United States Patent Application Publication US 2013/0129668 A1 - sequence listing, part 24

SEQ ID NO: 396930 - DNA, 122 bp, Homo sapiens
aagggggaggatttctgttatgttctgtgggccatcagcatgaaatcgtatattccgccccggcagggctttgcatttcacattttagtttgcatgcccgttccagacaattccagggcttt

SEQ ID NO: 396931 - DNA, 122 bp, Homo sapiens
accccaaaaccaaggtgatgaatggcagatgtcttataaggtgttcctgtaaaagatcttcgggctttgggaagagggccagatgcaggcctagaggtaaatttccttgttttcctctgcct

SEQ ID NO: 396932 - DNA, 122 bp, Homo sapiens
ctggtctaaggatctttgccaacctgtactttaatctcctgccccaccagggtccgagtccgctaccagaagcgacagaagctgcagtttgaaactaagctgggcatgaactctcccttctg

SEQ ID NO: 396933 - DNA, 122 bp, Homo sapiens
ggtgggggcgtaagcccgggggatgctgggctcagtgaagatggaggcccatgacctggccgagtggagctactacccggaggcgggcgaggtgtgtcctcggggatggcggagcgggaagt

SEQ ID NO: 396934 - DNA, 122 bp, Homo sapiens
tacggggccatttgagatgaagtcagaccagtttcacagcatgctgggagatgtagtttccggaggtttgagcaacggaagagccggggctaaacactaaaataaccgcgatttttagtttc

SEQ ID NO: 396935 - DNA, 122 bp, Homo sapiens
ggatggacgatcaatccaggatgctgcagactctggccggggtgaacctggctggccactcggtgcaggggggcatggccctgccgcctcccccgcacggccacgaaggggcggacggcgac

SEQ ID NO: 396936 - DNA, 122 bp, Homo sapiens
gtatggctgcgacttggggctggaagggcgcctcctccgcgggtatgaacagcacgccaacgatggcaaggattacatagcccggaactaggacctgcgctcctggaccgcggcggacatgg

SEQ ID NO: 396937 - DNA, 122 bp, Homo sapiens
gcccactgtccttgggtttaatgacgtctcttctctgtggaacttcacgattccttcccacggtcaactcgggacctcccagcgaccactgcagcctgcggacgaggccgggacttggccga

SEQ ID NO: 396938 - DNA, 122 bp, Homo sapiens
gcctgctatgctcgctgtcttctgcgtggtatgtatttggaggagcacacggtttataaccgtgcagtgcggtggcttgtctcggcgtggatgtgactgatgagcgctgtggggcatttccc

SEQ ID NO: 396939 - DNA, 122 bp, Homo sapiens
atttctcaaagccccaacatataagatctgtgcagaataaatgccaacaactggtcataccgtcagtggtgaatttgtatccatgaagtcaaagtattgctggagggggcatctaattgttc

SEQ ID NO: 396940 - DNA, 122 bp, Homo sapiens
cagttgtggctcagaatcccacacgcgcctcccccggccgcctgcctcctccctcccctccgcacagctgtctccagctgttctctgcagccccgggagagagagggagggggtgccctcgc

SEQ ID NO: 396941 - DNA, 122 bp, Homo sapiens
agggagaggcgtgggcgggagctggggctgcggggagtgctcgctggcaggcgcggtttccggatgggtgcgggatgggcaggcccgggctcggcatgggcggcccaggctcggctggcctg

SEQ ID NO: 396942 - DNA, 122 bp, Homo sapiens
cgcatgcaaggtgctcccttctccgctggtccctcgccccggcgcgcccacggtcaatcccgcgcagtgaatgagcgggtttggccacttcgcctattgcacaaaaagcgcgggtcgggaag

SEQ ID NO: 396943 - DNA, 122 bp, Homo sapiens
tctcccgcgcatttgcactaatgatggctgcatgcatagcaatcagcatgtgagcaaaatcgacaagaaaaccttgactttacagagcagtgtgtgagtaaacagaatgaaaacaacaacct

SEQ ID NO: 396944 - DNA, 122 bp, Homo sapiens
atttcatataaataggatcataagaaatgcagtcttttgtggttggcttcttccatttagcgtaaggttttcaaagttcatcctccatatatctgtttaaaataagtgaataaatgaatggg

SEQ ID NO: 396945 - DNA, 122 bp, Homo sapiens
gtttacctttactgtcttcctcaaaggctgaaggactgccaaagactcagggccttagcccggggggaatgacttagacctggttctacctgcattctgtggcatttgcatcactggatccc

SEQ ID NO: 396946 - DNA, 122 bp, Homo sapiens
aagcccgaggcggcgcctccgcgcaccgctcccagagcccggcagtgggaggttttccaccggacctcatcccaggcggcaggctctgctcagcccctggcttcttgctgccttcctagtcg

SEQ ID NO: 396947 - DNA, 122 bp, Homo sapiens
gccgccgggtcggagcctgcgaacactgaccggccggctgtggccacgcgtctgcgcatgcgcgcttctggacgacccggcagccgctcctcgagttccgattggttccacatgaggggcgt

SEQ ID NO: 396948 - DNA, 122 bp, Homo sapiens
gcacccccacctctgctcccgcggtctggcagaccctcagtcccccgcgcatctcttcagcggggcgatcccgagtcacgcaaccacagccccccaagctcatcttgtactcgaaagggctc

SEQ ID NO: 396949 - DNA, 122 bp, Homo sapiens
ctctcccttgtcagactgccaagatgctgattctattgaataaactccttcctgctggcccgtgagaaggaccccctagcgagtcccttgccctctaactctagagctcaatggggaggaaa

SEQ ID NO: 396950 - DNA, 122 bp, Homo sapiens
agtcccagacgttaatttgtaacaaaagtagcgatggccaagcccataaagggggcatctcggaaagccgttcgcatgcacggaagagatgaaagccccgtgcgcgctagaaaacggtttcg

SEQ ID NO: 396951 - DNA, 122 bp, Homo sapiens
gcgaggggaggggggtggtcctcgaacgccttgcagaactggcctggatacagagtggaccggctggccccatctggaagactagtgattttgttgttgtcttactgcgctcaacaacaaat

SEQ ID NO: 396952 - DNA, 122 bp, Homo sapiens
gaatggttaagtatagagtttgttttcacccgaagattgaggttgggcacttaggagcatcgcttcatgttaccctgaatgtaccattcagggtatacgctctctcaccatatatttctctg

SEQ ID NO: 396953 - DNA, 122 bp, Homo sapiens
gtaccggttgtcaaggcccgggtgaaattttaaaaataaaaaaaagagggcgtgcaccggcgtcgcccctgctccgcccccaccgggtacctaaatgcagcctggcctgaccgcccaagagg

SEQ ID NO: 396954 - DNA, 122 bp, Homo sapiens
ttaagtacaggcagagcggtttttggcccagccccctaggtctgggacgcaggtgaggggcggtctctccttcccctggcaggggcagcgtaagggtggccggcggctgggactgtcccacg

SEQ ID NO: 396955 - DNA, 122 bp, Homo sapiens
agacagtccgtttccaggcaacacagaagaaaggaacgcgctcagtcagcctcaaatagacggagatttcagccaatggatgtgcaggttccctccacattagccaataagaagtgcttggg

SEQ ID NO: 396956 - DNA, 122 bp, Homo sapiens
gccagcctcccgccctaccgccgtttccgtgggctgagccgccctgcggccacccggtcccgcgccagtcagtgcgccgccttcccgggggacacctcactcgccccttgctgcgccgtcgg

SEQ ID NO: 396957 - DNA, 122 bp, Homo sapiens
acgttccagtgcggacagccaaagggctgagcggaggcagcagccccgacccagcggtagcgccgcgccctgcccgagagaggcgcgccacgccgggccggagccggtggcccgggagcccg

SEQ ID NO: 396958 - DNA, 122 bp, Homo sapiens
gtggtggtgacgcccatgtgctctgtgtctgcatcgcaggtgtttgagatcctgctgagccgaggctactcggagaacagtttccgggaagacctgaagagcctctatttgaaacttgggat

SEQ ID NO: 396959 - DNA, 122 bp, Homo sapiens
gtaccatccggaaatgggaccggggccggcggctgttggagccctgcgagctgggacggccggcgtgtgtccttccgtcttcgctgccgacggtgggggttgggagcgatttttcgtcttta

SEQ ID NO: 396960 - DNA, 122 bp, Homo sapiens
ccctgagggaacgcgcgccccgcccctggccccacctctgccccacaccgggcactgggccgccacctttgttgatggaagagagaaactgaggcatagtgcccagggccaggggaccgcaa

SEQ ID NO: 396961 - DNA, 122 bp, Homo sapiens
tcggaagtgcatttcaaggtatgtgcggtggaggaacagagcctgaagctgccctcctgtcggcagggaaggggtcctgtggggaaatgggcatcacctccctctagtaaagactagaaaag

SEQ ID NO: 396962 - DNA, 122 bp, Homo sapiens
tctctttgaagacaaaacccaggacagttgtccctcgatgaacaaggctaacctgctgaacgtttgaagcaaggaactggagatggtctttgtatcggtttatgttctagattccagaaaat

SEQ ID NO: 396963 - DNA, 122 bp, Homo sapiens
acagagatttcattctgagaaaaaacaggtgtatggtgaactactgaatgccaagttgatcggatctggggcacatcattataagtgactagagataactagaggaatgacaggtggggtgt

SEQ ID NO: 396964 - DNA, 122 bp, Homo sapiens
ccagaatacaaagtacttaatacatattttcaaacctgtttgcatttcaaacaaagttagcgtttttgtaaatcaaatttgataacccgactaaaaatattttccagctttattatttaagg

SEQ ID NO: 396965 - DNA, 122 bp, Homo sapiens
gtctctccacccaggccggtttcccctggaaaaactcgcgagactttgcgagaggccgagcgaaagcctgggaagggaggaatagggagggacatagaagggccccgccctgccttctgggg

SEQ ID NO: 396966 - DNA, 122 bp, Homo sapiens
ggatccacagtagagacttggaggcgcgaggcgcaaggcacaagcctggcgggaagacgccgtcctggggcgtgcagaggcagccgctgcagcctgaggaggtgccgagtgtgcagagaacg

SEQ ID NO: 396967 - DNA, 122 bp, Homo sapiens
gccgcagcctccagatgcaggcctggcaccggcagccacctgtcctccccagcccaggcccggcaccgcccatcgcctgatcgcctgtgtaccccaccaccccgccccaggtgtcaggataa

SEQ ID NO: 396968 - DNA, 122 bp, Homo sapiens
ccccggcgccaagccgccgtcatcttcttcctgtgccaggtgatcgtctcctcacccacccggaaaaacatagtccgcccccacgtccttgtggaatagcgcccgcttccaagcaccgtgac

SEQ ID NO: 396969 - DNA, 122 bp, Homo sapiens
acttgattgataaatgattagaaaccaagtaccctgctgcaaaacaactttgggttcaagcgacaaattttctttcacctctttgacgtcagccatatcgtttttttaaattccaatgtctc

SEQ ID NO: 396970 - DNA, 122 bp, Homo sapiens
gggatgaccgttttcactgtcctccacctgccttccttcacatgcctacacatgcatggccggattgaggtagggccactagactcacctgtgtcgtgtctatttgtatatctgtttacagc

SEQ ID NO: 396971 - DNA, 122 bp, Homo sapiens
atgagcgtacgcagctgctccgggttttcgtggcagccggcgggaggcaggctgtagcggcggccgggggtggaggtgagggggagggtcggggggcgtgtctacactcagggtgcaggagc

SEQ ID NO: 396972 - DNA, 122 bp, Homo sapiens
ccctccccctcacacaaagcctgtcctccaccagcaaaagaggtcttaaaatatacatcacgcgggcctggtgtggtggctcgcgcctgtaatcccagcactttgggaggccgaagcgggcg

SEQ ID NO: 396973 - DNA, 122 bp, Homo sapiens
cccagcagtccctgcatggggacccgtggatcctggtgtccctggtttgcacccacgatgcgtgtcgtgtccactgtgggcaactaaaagtggcaagaaggccgagaagggaagataaggct

SEQ ID NO: 396974 - DNA, 122 bp, Homo sapiens
gcccccgcccgacggggagcccatgcagagccggatcccaggcgggcgctcccgagcaggcggccaggagtggccgcacaaacttctggtcctggcctcgctccccttggaggtccctcctc

SEQ ID NO: 396975 - DNA, 122 bp, Homo sapiens
tcgcgctaccgcgcgtgccccatcatgctctgcgcgctcccattacgtgccgccacctcgcgcccctgcacgtacccaacgtgccctgcgtggtcccgttacgtgtcccatcatgtttcgtg

SEQ ID NO: 396976 - DNA, 122 bp, Homo sapiens
ggaactcttgacttcaagcgatcctcccgcctcggcctcccaaagtgctgggatgacaggcgtgagccaccgcgccgggtctcatttaaatttataggaaacttgtggtaaaaatagcaaaa

SEQ ID NO: 396977 - DNA, 122 bp, Homo sapiens
ggtcccatgggacatgagtagccgaccatgacctggctgcgtactggcccaccaagcattcgactggcgtgcccagccactctccgtcatcgcagagaagtgctctatgtgagatttggtta

SEQ ID NO: 396978 - DNA, 122 bp, Homo sapiens
caaaaagaataacaagaacaataaccctatgctgaccaagaacatttatgtggaggacatcggtttgatccctgacatacaagtcttgttcttttctctctacctaacctcctttagcaaat

SEQ ID NO: 396979 - DNA, 122 bp, Homo sapiens
aaggtgctcccggtgacttactcgcagatgaaggtcccctgtgggatggtctgcagggcgcggaccccccagcccatcttggctgttcggtagagctgtagccgcaccctgggggtaggaga

SEQ ID NO: 396980 - DNA, 122 bp, Homo sapiens
tttcacatccaccctctcatctgaccccagactcctgggagacgggcaagtcggttgggccggggcaggcccgcaatcccccgttccgtgcccagatgcgcttcggaatacagaacagctgg

SEQ ID NO: 396981 - DNA, 122 bp, Homo sapiens
ggaggcctgaaatgatgggcggggcttgaataacagacccgccctcttccaggctggccacgcctccacacgtggttccctggctgctccttgtggctccacctcgcgggttttcccgcgcg

SEQ ID NO: 396982 - DNA, 122 bp, Homo sapiens
ccctcgaagagcaagaacgactcgaaggctggaggggcgttcacgctcccgcctccgttgcgtccagaccccaagtgtctgccgccgccgccaccagagccctaataagaggcctcttccgg

SEQ ID NO: 396983 - DNA, 122 bp, Homo sapiens
tgcctgtttcctgttttcactgctctcgttgctttgctgcagcggctccaacaggccagccggccggccatggactggggaccatcgctggaggagaaccggacgggcatgtatgtggccac

SEQ ID NO: 396984 - DNA, 122 bp, Homo sapiens
aaggggtgacagacggcacctggaaaatcgggtcactcccacccgaatactgcgcttttccgacgggcttaaaaaacggcgcaccacgaaattacatcccacacctggctcggagggtccta

SEQ ID NO: 396985 - DNA, 122 bp, Homo sapiens
taagtaaaggaaaaacaagcagtcgagtcattcgcatgaattgttgggctcatcattttacggtgcgatgccgtcttaggcgcagagcgtctcacttgtgcactaacgcgccacaatggcac

SEQ ID NO: 396986 - DNA, 122 bp, Homo sapiens
acagcgagctggggactcggggaccagtgtcggatctcccacccggttgggacttctgagcgcacaggggcaagatatgtgagtaaaccctgtccagaatcccagtcctttgtatcactcgg

SEQ ID NO: 396987 - DNA, 122 bp, Homo sapiens
agtctgtgctcagtgggcaaatggcagcgttctcacctgatttttgtattgtccaaggaccgtggtatctgcagatgcagcctagcacaaatgcacatgctttttgctcaggagcctgcagc

SEQ ID NO: 396988 - DNA, 122 bp, Homo sapiens
gcaagcctttctctacatccccatttaaaactgtaaaacccctctttggccacatgcttccgacacctcttccctgctgcttctctccaggacttaatccccttctgatcacatctcttatt

SEQ ID NO: 396989 - DNA, 122 bp, Homo sapiens
gaggctggggcgaggaaggttagaaccgagtccgctgcctgccgggaacttggcgtctttcgggcgagggaagagaaagcattcccacgccgatggttccagcaaaaccccaggaatgctct

SEQ ID NO: 396990 - DNA, 122 bp, Homo sapiens
gactaacgaggcaatgtggtctccgactgagagcggtggactagccagtgaatgtcaacgcgtccctaaggcgatatccgcagccgccccagccgcgtagcccacctggcaccgcccccgcc

SEQ ID NO: 396991 - DNA, 122 bp, Homo sapiens
ccccggggtcactccagccaggctgtgccaggtgaatgctcaggtatgcggaggcggaggcggaggcaggacggccctgggagggagcaggaggaggggccggcagcctggaagggaaagga

SEQ ID NO: 396992 - DNA, 122 bp, Homo sapiens
tccgagtctcttcgcactcccgccttgggaaccacagggttcgttgctgggaagctgtctcgggaccgcgtgcggagcgggaggggggctctcaagctggcagggccggggcttgaggggca

SEQ ID NO: 396993 - DNA, 122 bp, Homo sapiens
gagagcaagtcggccctgctgccttcccatttcacccttccactaatgagcaccaggaagcgcccctcccagggcgcgccctcaatcagcgtctggccctgagcaggtggcacccctctctt

SEQ ID NO: 396994 - DNA, 122 bp, Homo sapiens
taaataaagcaaaacaaaataaaacacttaccctttcatccacatgatgtcgctggacaccggaaggtttttctcccttcccagcctcaaaggaatacagtgagtagattttccttagacag

SEQ ID NO: 396995 - DNA, 122 bp, Homo sapiens
ggctgcggggccttgcggggacagccccaggcccggagctgcagaaacacccagaccccgcgcctcccggaaccacgcgtctctgtgcacagacattcctgggggcaggctcctgtccttta

SEQ ID NO: 396996 - DNA, 122 bp, Homo sapiens
catcgtgggcactgggaagtagcctgcagtgtcagcacagaccggcgctcaccaacgacacggcacggaggctttctagggagcagtccccccaggacagcaatacgttcaggcgacagcga

SEQ ID NO: 396997 - DNA, 122 bp, Homo sapiens
gcccccaacaaggccgcgcttccggccgcctgcccagtcgccatagcaacaggcgcagggcggcttgggagcctttgaggccctgaactatttaaggatccaggtgttgcaaggcggtaagt

SEQ ID NO: 396998 - DNA, 122 bp, Homo sapiens
gggggctggccgacaaacttccttttcttgtttggtttccctttttatctattgctatcgcgatcctgacagttcttaagatagggtcttcaggaggaggcagagacttgggaccaaaggtg

SEQ ID NO: 396999 - DNA, 122 bp, Homo sapiens
aacctttgacctctgttcctgtacagggagctcccatccttggctaagaactgggtgatgcggatgctctttctggagcagcctttgccacaggctgctgtagctctgtgggtaaagaagga

SEQ ID NO: 397000 - DNA, 122 bp, Homo sapiens
ggacgtgcaaagccctcccgtgcgggagccctgggacgggggcaccatcccacagccccccggcagccgccgatccccccgacacagccccccgggagccgccgatccccccgacacagccc

SEQ ID NO: 397001 - DNA, 122 bp, Homo sapiens
gcggggatggcgttggctctgggggcaccagtgtgacagggcagggcaccgagctgtggccgaggggcagagtgtcagagggcctcctggggaatgctgtctctggcagagaggcagactgc

SEQ ID NO: 397002 - DNA, 122 bp, Homo sapiens
aaacctgtcagttgccacctcgcacaagtccgcaccaagtttcctctcaggatttcctcacgagggagagtcctagctagagaacagctctgcttatacagcaacagagaaaactcccatcg

SEQ ID NO: 397003 - DNA, 122 bp, Homo sapiens
gctctacagagctggccagtttcttcagccccatagtttccccaccatacagatctttcacggccacccctataactagacacatcctctggctggctaagatagccctgtgattctgcaac

SEQ ID NO: 397004 - DNA, 122 bp, Homo sapiens
tctctgctgcgggtcagctggcttctggggggccaccctccctctccttggcatggaattcgttacttccagaattacaaggctgacaagctgtttatgaggtgtttccgggctgtgtgttc

SEQ ID NO: 397005 - DNA, 122 bp, Homo sapiens
cgggacgtgatttaaaatacagaagctccctgcactgacaaaatccgccgctcctttcgtcggcaagcataaaggtgtgcagcaacagtcacacacgaaccaccacacccaagcattcaacc

SEQ ID NO: 397006 - DNA, 122 bp, Homo sapiens
atagtgtttggatcaaacaaatgaaaaacagaaacatgacggcctctaccagcaaaagctcgagggttggaaagagtcccctggcagggaattggcaccccgtcgtgcctatcctctctctc

SEQ ID NO: 397007 - DNA, 122 bp, Homo sapiens
ccccatatgaccctcacttcccggccccggcccgggatggcttccccgagcccagcatggcgctgcctgggccagaggccttgcccacagagtgtgggttcgagccaccccacctggccccc

SEQ ID NO: 397008 - DNA, 122 bp, Homo sapiens
gcggagcaccgcccacccccacagcccccgctggccagctgtcggctaatctgctggctacgagcaggtaatttctcattggggcctgctcgctctctgcttatcacccgcggcctgtatcc

SEQ ID NO: 397009 - DNA, 122 bp, Homo sapiens
caagatatcatcaccaggggaaaccaggctgagctggatctttacgtcgtcaccagtgggcggggagaccagccttgtacccactggacagcgggcccattccgagtcagggaagcagaagg

SEQ ID NO: 397010 - DNA, 122 bp, Homo sapiens
cacgaacccaccagagggaagaaactccggacacatctgaacatttgaaggaacaaactccggatacaccgtttttaagagctgtaacactcaccgcgacggtccgtggcttcatccttgaa

SEQ ID NO: 397011 - DNA, 122 bp, Homo sapiens
tgctttcccgtaggaacactcgtgggcatcgggtcgcccgcttcgcccccgcgctctagacgcactttcctgccgcctggcgatgtccgaagtgcatatcagagcatggacttggtcttccc

SEQ ID NO: 397012 - DNA, 122 bp, Homo sapiens
gctgccgtgccccttcccaccgctggtcctgcttggccagggtcgctgggggccagaggccggcccggatgaccagagaggtggcctcacggatcccttggcctctcgccccctcctctgtt

SEQ ID NO: 397013 - DNA, 122 bp, Homo sapiens
tttatggcaacctttacacactttgcatcataaagcagaggcccatgaaaccacagcactcgctcaccctcctggaatttaggcttcgggtcctgcttcagcaccatttataagtgatttgc

SEQ ID NO: 397014 - DNA, 122 bp, Homo sapiens
agtcatctggtttctctgctgatccaggaaacttcctggagaaggccagtgttccagaggcgtctgtctgagagaagggagtgtccatacagcatggaggtagccacacgggggaatgggga

SEQ ID NO: 397015 - DNA, 122 bp, Homo sapiens
cctcctttgttaatatttaattaacatacaggctcacaatgccgggcgaggagactcggccgggctttgtgcggcgcgggagttcgctgagccagcccccaacggcccgggagctgggcagc

SEQ ID NO: 397016 - DNA, 122 bp, Homo sapiens
caacacgggatacaatttcaacatgagatttggagcggacacacatgcaggccatggcggcgttctaacgagatggggtgcagcgttctaaccagacggggtgcagcgttctaacgagacgg

SEQ ID NO: 397017 - DNA, 122 bp, Homo sapiens
ttgcaggcatgatgatcgcgggtatcgctgcgctgctgttgtggcttctggtgctggtgccggcgtggtgggggtagggtgggtgccgcgctcagatgcgggggtccctacctccccggccc

SEQ ID NO: 397018 - DNA, 122 bp, Homo sapiens
gattcttactgtttgtaagaatagtggttcccttactgtccgaactccaacccctgcactcggaaggaactctgtgctctctgtacccagatggatttggcagcctctgtgtgtgtgtgtgt

SEQ ID NO: 397019 - DNA, 122 bp, Homo sapiens
aataaaggtcgtagccgcagagtcaacgggcggagctaaagtggtcgtgattcatgctgtcgcgggaaccccgaaggtggggccccacgtaacaagaagatgacccgaagttgctccgcagt

SEQ ID NO: 397020 - DNA, 122 bp, Homo sapiens
aaaaatacacctatttgcccagtgcctgtgcagtatttatggtccagacacaccatttagcgccgtatttggaaaatgatggatattttagcaataccaagtgctttgccttgttttgcggg

SEQ ID NO: 397021 - DNA, 122 bp, Homo sapiens
gacccgctgaatccaggacatcatgcattccagtttcatttgcgagaacatttccaggtccggctgaagcctagtggctccagcagaggtctcaacccctttgggatgctcagtgggagaca

SEQ ID NO: 397022 - DNA, 122 bp, Homo sapiens
gcagcggtggaggcgacttcggagctcatctcgcgcccccaccactgggaacctgcctagcgcactctactgagtcacctctgcccgagttcaggatccgaagcgaaaaacaaacaaaaaaa

SEQ ID NO: 397023 - DNA, 122 bp, Homo sapiens
ccttgcagcctcgacctcctgggactcacccttttagcctccagtagctgggaccacaggcgcgcaccaccattcccatgtgcgtttttctgcttttttttttttttttttaggagagatgg

SEQ ID NO: 397024 - DNA, 122 bp, Homo sapiens
ctggcccgtagagagtgactgatggcgaggacccgctggggacccgagggcctcagcctgcgcctgcgccggggctccccgaccaagaccttccggcccccaggcctttgcaccggcagctc

SEQ ID NO: 397025 - DNA, 122 bp, Homo sapiens
ccctttgccagtattcaaacagacaggcagtcataaaacattaaaaaagatcctttaaaacggtcaggcatctgttttacctcagttcctttttagaaacctggaaatcaggagccccggct

SEQ ID NO: 397026 - DNA, 122 bp, Homo sapiens
tggccaaagaagacatgcagttccagcggctggacggcttggatggaccgatgggagaggcgcccggcgacttcctgcagcgcctcctgccggcgggcgcgggcatggtcgcgggaggcccg

SEQ ID NO: 397027 - DNA, 122 bp, Homo sapiens
ggtccctcagggttgtcgcaccgtccttgccctccccccatgacatcctctgtctagacacggtcaggacacaaatctggcagctctactgtctttaggagtcccaggaacagcaatttcag

SEQ ID NO: 397028 - DNA, 122 bp, Homo sapiens
tgcttggcgtcaagggccctgcaatgaaacggcttttccactgggactcctgggccgggacgcaggcggagcaccatccaccacatgcaccttgcagatctggcggctgcacaggcctccag

SEQ ID NO: 397029 - DNA, 122 bp, Homo sapiens
gcgaccgagctccagggcaggggttcggcagctgtcccgaggacttggtgagtagcttctcgtgagttacaccagatgaagacggcgctgccactgtttcagatgtggctgattggagtaaa

SEQ ID NO: 397030 - DNA, 122 bp, Homo sapiens
ccaaattgcactattattccagaactgcatgtactctcattcatttatctctgctgacatcgctccacaggaaggttttccagggcagatgcgtgctcccttggcaataaaagtggtggaga

SEQ ID NO: 397031 - DNA, 122 bp, Homo sapiens
cgcgggcaggaagcgtgtgtcttacgaacatcctgggaggtgcccgtgccagggctggcccggagctcccacacctgctcccaggggcttggcacaggaggctggagcggctgtgccctgcg

SEQ ID NO: 397032 - DNA, 122 bp, Homo sapiens
gctctgtcagggcggcggggtggcgcgcgctcctccctcgggcgctagctctggaaatcgcgctaggcagaggtgggcttgtgtccgcacccgcagcctccgcgtcaacaccctaggggaga

SEQ ID NO: 397033 - DNA, 122 bp, Homo sapiens
tttggttgtgtgcactcaagtcacagagtggaaccttcctttggatagagcagtttgaaacgctgtggttgtagtatttccaagcggatattagagcgccttgaagcctatggtagaaaagg

SEQ ID NO: 397034 - DNA, 122 bp, Homo sapiens
atgccaaaaggtccagggttcatgcccaggaagagtacttccttggggccctggcagtagcgagtcacgtagttgcgatgtggctcccatgcatactccacgggattgtagatgatgcccac

SEQ ID NO: 397035 - DNA, 122 bp, Homo sapiens
tgtgcctagagaagctctgacgccgccttggaagtaagtcgttgctgcctgacctttgggcgtctgggacggatgcctatacctgcacccagcagcactggaaggggcccaggcccttcgca

SEQ ID NO: 397036 - DNA, 122 bp, Homo sapiens
gccgggctgactcagcttggccgcagctacccggaccgactctcccaggtggaggagttccggccactcagtcccacctcggtccctggccccggcaggccctggaacagaccttaaaaaac

SEQ ID NO: 397037 - DNA, 122 bp, Homo sapiens
gaactgtggtgggaagagtgctgtattctcaaacgatcactgttttttaaaagcgtggcacgggcactccctcggccacccgcctgccctccccaatccctcacccactgctgcgaccaccc

SEQ ID NO: 397038 - DNA, 122 bp, Homo sapiens
caatccttccgcgggctgcccctgagcgacgtggctgctgctagccgctgcccaattacccggatggaatccaaagcaggcccaccctgtcagccaataagatccaggaaaagcagatgttg

SEQ ID NO: 397039 - DNA, 122 bp, Homo sapiens
tgggacagaaataaaacccccagtctataagacccaagagtaaacaaaacagggatataacgtccactcattgagggtctagtacaataatacataaaaagtgttttataacgtaaaaggac

SEQ ID NO: 397040 - DNA, 122 bp, Homo sapiens
tcaccaaaaaaagctgtgtgaatcttgttgctatgacaggatcactttttctttcaactacgcaataattataatattctattccagggtaaatgtaatttaaatgttgcacagaaaaggat

SEQ ID NO: 397041 - DNA, 122 bp, Homo sapiens
ctttctttatttttcccaaataacagagagaaccattccaaactcatctttttgggtttgcgaataaaattaaaactatcaggccttctgtgtctttaagaaaggcaattatttttggccag

SEQ ID NO: 397042 - DNA, 122 bp, Homo sapiens
ccacagcgctccacaaaccccccaacaacagcagaggtactacagccatcctaactgtatcgcggagccccaaatcttcgaagaaaactcggcccctccccggaaccggaagctaatggcga

SEQ ID NO: 397043 - DNA, 122 bp, Homo sapiens
cgctcacatagaaatttctgtcaaggataccaatgataaccccccggttttcagcagagacgaatatagaattagtcttagtgaaaatctgccccctgggtcccctgtgttgcaagtgacag

SEQ ID NO: 397044 - DNA, 122 bp, Homo sapiens
ctccccacgtgtctgtccacacagtgaagaggcctgaccagccgtggtaccaggacaggacgtgtccagggaacgctgacacctgtcctcgcgccttctcagtggccagcgtgatgaaacca

SEQ ID NO: 397045 - DNA, 122 bp, Homo sapiens
ctctttgtgtgcacgcccccctcgccccgggcctcagggcaggaagcacctggtctggagcggatgcacagggcgcctggttccggtccagcttccgccactgtggcccctggagagctggg

SEQ ID NO: 397046 - DNA, 122 bp, Homo sapiens
gggaaacagcgccagccaagggcgagtcagatccagacagacccaggcccccccgcccagcgccccaccccgctgcacctcagcgccttgtagctgatgctcatatggggtcaggatgccaa

SEQ ID NO: 397047 - DNA, 122 bp, Homo sapiens
agccagactcgctgcagaggcagctgtgctgttcccggagcctggcttcaggggtgcatccgtcactcagggttcattcacccaggcaggctccaagttcctggggtgcacaaggtgggcac

SEQ ID NO: 397048 - DNA, 122 bp, Homo sapiens
ttactattttgcttatttttctttgtgcgcgcctgttagtttgttaaaccagatctagtccgagtcttttctcctcccttctcctccctcctcctccccccgccaacaccccctccctgctc

SEQ ID NO: 397049 - DNA, 122 bp, Homo sapiens
ttcaacaattatttttattgctatgatctgcataattggcacaacagggccctgccacatcgaactgtttaagctcagaaccgtgtctgtcacatgtggagcgatccatgattgatgctatc

SEQ ID NO: 397050 - DNA, 122 bp, Homo sapiens
gagcgtttttttttttttttttttttttttttggtctgggcttccgaatatgttttatgacggttgattttacaccaggaggtttgtctccgaggaagacccagggaactggatatctagcg

SEQ ID NO: 397051 - DNA, 122 bp, Homo sapiens
gcgtctccgggtgctctcctccgacagcggctgaggagaaccagggaggaggactgggcgcgagagagcaaaggaacgacttcccatagcgaagcttccagccactgccaaccaccctcctc

SEQ ID NO: 397052 - DNA, 122 bp, Homo sapiens
tcccatagtccactgcttgggagcatattacaagcccatttattcctgccactcacagatcggcaggcagaaaggagtaacactcagtggctttttcactcccgcaattcggcgagcaggag

SEQ ID NO: 397053 - DNA, 122 bp, Homo sapiens
gcgggcccaggtgctgcgcgcgagggtgcggagttgctggcatgcagggtgcttgcgctgcgcggaggggagggtggcagggtgttgctggaggctgtgcgagggtgggggcgcgggcgtcg

SEQ ID NO: 397054 - DNA, 122 bp, Homo sapiens
ggccggagccggctccctcagcttgtggcgaggtgtggaggtagaggcgctggcgggaaccgggactgcgcgcggtgcttgccggccagcgtgagttccgggtgggcgtgggctccgcggac

SEQ ID NO: 397055 - DNA, 122 bp, Homo sapiens
acaagcaagatctggagcgcatcaggatgccaggtgaactcaaagacaggtcggaagtgacgtcactagccgagtcgggcgctcagcgggactgcgggtccggtggaattccggccggacgt

SEQ ID NO: 397056 - DNA, 122 bp, Homo sapiens
ttggcgggattactttgaggaccagccccttctgtatcccccaggctttgacggaagagtcgtggtgtatcccagcaaccagactttaaaggactacctcagctggcgacaagcagattgtg

SEQ ID NO: 397057 - DNA, 122 bp, Homo sapiens
tcagaacagcaggaggctgccttttgaggtgctctgaaaactatcatttcccactccctgcggacaccagtttctacctccattcagagtgcaaatcccagaaaggagggagcagggagatt

SEQ ID NO: 397058 - DNA, 122 bp, Homo sapiens
ccccctcacccacgccacgaagcccgctctgcgtggcagccccggagacagccgagcccccgcctccgccccctgcccagctcaggccgccagcccctgccagccgacgccgcggtttccta

SEQ ID NO: 397059 - DNA, 122 bp, Homo sapiens
gggaacggaatgtctcggtgtaaaacccgatcgtacattctgtttactgagatagaaaaccgccttatggctggaggtgagacatgctggcggcaatactgctcagctactctttactgcac

SEQ ID NO: 397060 - DNA, 122 bp, Homo sapiens
taaaagcaattttctttttggttactgccatagggattttgtaactgagtcacaccgggccgaggcgggacctcattggctgcgaccgaccacgtgccgcagtcgccccggcggtcggggcc

SEQ ID NO: 397061 - DNA, 122 bp, Homo sapiens
ggtcttccacttcaccttaaaagcggctgttctctgattatcattaagcatggccacgcccgcacttaacttctgacagtggggaaagcagctgtgtgtgatagcttggaaggtttactgct

SEQ ID NO: 397062 - DNA, 122 bp, Homo sapiens
ggacaatgtcttactcctcagtttatacccagccctgggtacacaggcgctaatttagaacgaatgtccagaaaagcaacattcctgcctacctcccccacaaccgctgaagccagcattct

SEQ ID NO: 397063 - DNA, 122 bp, Homo sapiens
ctacaagccgaccggcgctccctgcagaggctgtgctctcgtggacaagctggaagctcccggtcatgttcattcacatggaatactatcgcatccaaacagtggcgcagggccaggcggca

SEQ ID NO: 397064 - DNA, 122 bp, Homo sapiens
gttgttgtttttatttctcagttttccaacagatggagaagcagaggtgtagggaatggccggaacatgtgtgggatctgaatttgcccaaggtccttatctggtgcatcagagagttaaag

SEQ ID NO: 397065 - DNA, 122 bp, Homo sapiens
ccaacacagggtctaccaaacaggagagtcttagtgtgtacacccctcacccacacccagcgtggaatttctggcattagcacacctcccttccacaaagaatgaaccggagtggtgatctg

SEQ ID NO: 397066 - DNA, 122 bp, Homo sapiens
gggcacgggccagggttctattcccattggaggccactgctggatggatgcgaggttcctcgaggctctgtgaggggtctggatatgtggttctggggttctgtccttagggcttgttctcg

SEQ ID NO: 397067 - DNA, 122 bp, Homo sapiens
ttgtggacgctgtgctcggtcctgctgccggtgttcatcaccttctggtgtagcctccagcggtcgcgccggcagctgcaccgcagggacatcttccgcaagagcaagcacgggtggcgcga

SEQ ID NO: 397068 - DNA, 122 bp, Homo sapiens
gccgctcttcctccctgtcccgccagctcctgccttctgctgtcttggatctcctatgcacgggaaacctgttgaaggtaggacagccgaaaggtcagtattcagagtgagccgtttgcgaa

SEQ ID NO: 397069 - DNA, 122 bp, Homo sapiens
aatcttttctcaatctttgagactgtaggttcagagccaagtgaaccatgggaggaaaaacgaaactgtaaccattttgaaaacaagggtttcatctgaacaggggagatgaactgtaactt

SEQ ID NO: 397070 - DNA, 122 bp, Homo sapiens
acttctaaaattaacatccttggatgttaaatgaatactcagtttcttcatggccaagaacggaatattcatgcattcctttctttcacttcccttcaaagcaacagggaagcaacctctgt

SEQ ID NO: 397071 - DNA, 122 bp, Homo sapiens
gccttcgccgacaccatagaggtgggcctttggcgagtcacaggcgcgggtgttcggctacgtcactggggcgctacggtgcctggagctgggcagtcttctcgtcagagtggggactggta

SEQ ID NO: 397072 - DNA, 122 bp, Homo sapiens
gaaggaagacggagcgcggggacccgtgggggtgggggccaaaggcaatactcaccggttcgacagtcgccatcttagatcgatctgatcgcacaaccgctccagaagggggggtaagagga

SEQ ID NO: 397073 - DNA, 122 bp, Homo sapiens
tctgcacagggccagcccggggcgggagtcttagttaaggctttagacaggcaaggatgccggctctggacggacagatggatggaggcgcaggcggactcaggggctccttccttggttgg

SEQ ID NO: 397074 - DNA, 122 bp, Homo sapiens
tgtgtccgggagccgcgcgaagggcgctgcaggcgctgccctcggacctggagtccgggacgccctgtgctcaggagcctcctttgccagctgctaacacttcctgccgctctgtgcaggag

SEQ ID NO: 397075 - DNA, 122 bp, Homo sapiens
tcacgggagtcgtaactactttttctttctctcttccccactagcccggcgcaggccacgcgagacgccgaagccagcaggtccccacactctccggctagaccgtgccagcctgagccccg

SEQ ID NO: 397076 - DNA, 122 bp, Homo sapiens
agaggcagtggcttttaaagcatcctgattaacagtctgagctgctattcactgagttttcgccctgttgtagacacacatggctttccgttagagaagacagggtctggctctactgctgc

SEQ ID NO: 397077 - DNA, 122 bp, Homo sapiens
tccctactggctcacctagtctcccgacgccttcgcttcagtttggaaacgtccagattacgcagccccagcgagtaggtgggggctccctcaatatcaaactgcacaaccggggtcccccc

SEQ ID NO: 397078 - DNA, 122 bp, Homo sapiens
gcccgcccggagcgggactcggcgcccgacacgatgccgaggcctggcaccagcggccgccgccccctcctgctggtgctgttgctgccgctcttcgcagccgccacctccgccgccagccc

SEQ ID NO: 397079 - DNA, 122 bp, Homo sapiens
agggcctcccgttaggggcggggttaacaggctgagctgcggcccggcatgggtgggttacgggttttctccgcgaaagctccgggaaaagtgacctgaaatcgggactttcccgctgtcag

SEQ ID NO: 397080 - DNA, 122 bp, Homo sapiens
gctattagtcggttcacacagttcactgcaaacatttgataatgaggctaaatatactcccgcgtcggaggaggcgtgggcgtccccgcccaggcccgggagacagaggcgctgaccccggg

SEQ ID NO: 397081 - DNA, 122 bp, Homo sapiens
aggcttacttccgtgggaccttgggacctcatctctatttgggtcattatcttctctggccgcagcctgggactccctggtcttccttcctgctgatttcttcccagggctgctgtgcttag

SEQ ID NO: 397082 - DNA, 122 bp, Homo sapiens
gggccagatcccggccttggcagtgaacagactaaagtgctcctgggcttccccactctgcggggaataagcacccaggacgtgtcagatgatggtaagtgccccggaaaaaggaagcaggc

SEQ ID NO: 397083 - DNA, 122 bp, Homo sapiens
aggaacaatggagatggggaccaaaggctgtcaccgctgctttttctcgaaatgcccgcccgggtcctgtctggggctcccgcctacgcgctcatcacgtgcacagcccaaacttttcagag

SEQ ID NO: 397084 - DNA, 122 bp, Homo sapiens
tagggcgtggtcagggaagtaagtctctggaacccttgaaaacatatggaacttcctccccgtggagggctttcctaagctacatctcggattgacactcaacaactcaacttaatcaactc

SEQ ID NO: 397085 - DNA, 122 bp, Homo sapiens
ggtgctattagccgttggaattaatttttcattctgaattgaggacctgtaaaaaggcctcggcttggggacacggtttgggcatcccacagatgccccttgaggctcgcttgacagcccgc

SEQ ID NO: 397086 - DNA, 122 bp, Homo sapiens
gaaaggtcaaataagcccagaaactggcgaagcgaagtctgatacatctcattaaccaagcgcatctcagtaatgaggaagtagaggatgctgccccgcgtagccactggaagacaaagagc

SEQ ID NO: 397087 - DNA, 122 bp, Homo sapiens
acgcggggaacgcgactgctccgccccggccccgcgcacctcctcatcttgagcagctgccgcaggaagtgaaaggaaacaaacactgcgtggcagactctcagcgggacgcccccgcccgg

SEQ ID NO: 397088 - DNA, 122 bp, Homo sapiens
tacctgactccctaggccttcctgttaacaaaagggcagggcggtgagtgggccgagggacggccgtcggggtgaagaactgaagcaacaaatacctacggcatttgtttatctttccagaa

SEQ ID NO: 397089 - DNA, 122 bp, Homo sapiens
caagggcctgagggtatcgtgctgttagcggacgcgatgctgctttccaagatggctgggcggggatctctgatcagatttcaaagccacgattttggccgcgtgcgacaagccggactctc

SEQ ID NO: 397090 - DNA, 122 bp, Homo sapiens
cgtctgagcggagaggaggatccgggaagccggctgcggcgggaggagggaatgcgcgtgcgcgctggaccgcctcgtcccgttccgtcccaatcattgtaaacaggcagaggctgggcggg

SEQ ID NO: 397091 - DNA, 122 bp, Homo sapiens
ggtgtgggatataatctcgtggtgcgccgtttttcaagcctgtcggaaaagcgcagtatgcgggtgggagtgacccgattttccaggtgccgtccgtcacccctttctttgactcagaaagg

SEQ ID NO: 397092 - DNA, 122 bp, Homo sapiens
acatcgaagctcgggaaacggatggaagcagggctctagagaggcacgattgcatcgacacgtgggcaggtcgcccatgccaagggccatgttggtgggtgggtgcgtgggatctgtcgtat

SEQ ID NO: 397093 - DNA, 122 bp, Homo sapiens
gagaggagcctcttccggcaagccatcagcccctccgacagggtgaagctctttccccaccggaactcaagcaagtgcaagtctaagccccagattgctgctctgaaagaggagacagaaga

SEQ ID NO: 397094 - DNA, 122 bp, Homo sapiens
tgtctcacagccccgcaatggtcagcactgctagagtgaacttcaaaactgagctgacctcggggtaaggtacgagtggagccttgccaattccaattagatacctttcctatatgccccta

SEQ ID NO: 397095 - DNA, 122 bp, Homo sapiens
ctgcagctggagagaatcaacgtctactacaatgagtcatcgtgtgagtagcaaggccgccgcgccctgcccggccgggacccgcgtggacgctccggcgccgcctcttagcgcggcgagtt

SEQ ID NO: 397096 - DNA, 122 bp, Homo sapiens
cgtgtggcacgccgggggtcccgcagcatcctgtgagcatttccgcggggaagctgagcacgtgaagctcgctggttctgtgcgaagggtattcctggtgctgaataaagggtgttgctgtc

SEQ ID NO: 397097 - DNA, 122 bp, Homo sapiens
tcctcaggttctactactcatagcaaccagaaggaactttaaaaatcagatcatgttggccgggcacggtgcacggtagctcacgcctgtaatcctagcactctgggaggccgaggtgggcg

SEQ ID NO: 397098 - DNA, 122 bp, Homo sapiens
gcccaccgccgccgctgccgccatctttcctagcgccgcgctcacttccgggcagaggaacgcctcacttccgaagttttacttccggtaagccctgagcgccgccatggcagcctggacta

SEQ ID NO: 397099 - DNA, 122 bp, Homo sapiens
agaagaggaggccagtcacaatggacagcgccggggcctccccaaggccgtgtgtatgaacggcacagaggcggcgcagctgagcaccaaatccagggcggagggccgggcccccaaccctg

SEQ ID NO: 397100 - DNA, 122 bp, Homo sapiens
aatgaagcaaagtaaactctgctttttttttttggtctgttttgtttgtattacattatacgtcactgcttcttatgttataccagggcttcacatttctgagtgtctcattctttttgttc

SEQ ID NO: 397101 - DNA, 122 bp, Homo sapiens
ccgttaagaaccagctccagaggccagagctgtcttggggaccagacaggctggctgggccgtgagaatggggatcctcccatgggagggaaccgtcccagaagtctccagggccctcagcg

SEQ ID NO: 397102 - DNA, 122 bp, Homo sapiens
acaaaattgttcacccccaagcaaccaccgaaataatgagatcggatgcagtggagatggcgttgggggtgggagagaaaaatggatttatctttaaaatttttgcttaaaatctaaaatac

SEQ ID NO: 397103 - DNA, 122 bp, Homo sapiens
ggcaggtaggccctttgaggagagatggggacagggcagtgggtgttgggagtttggggccgggatggaagttgtttctagccactgaaagaagatatttcaagatgaccatctgcattgag

SEQ ID NO: 397104 - DNA, 122 bp, Homo sapiens
ggcatttctgctgttgaagctgggtagtttattacggtggccccaggaaactcacacagacgccaggactcaaccatccaagaagtcacaggtcactgtccaggactcctcgcaggcagcag

SEQ ID NO: 397105 - DNA, 122 bp, Homo sapiens
tgtatgtatttgttgttaatcaaccccagaatgtacctaacagccaaagatgccaaggaacgttgttgccctgccccctgctcacctacaaatactctacacttccctcagcctattggatg

SEQ ID NO: 397106 - DNA, 122 bp, Homo sapiens
ggagagcccgcccaggtgactggagctggaggcggagacacagtccgggaaggggcccgccgtatagtacggaagatggagccccgcaagcccgtacggaacagagactaggaggattggaa

SEQ ID NO: 397107 - DNA, 122 bp, Homo sapiens
aaggctgctctgcaggtccccgggccactcgcggggagcccgagccagcccgccagccagcggctagggcctcacccaggaatgaggaaagggagtgctgctttatttcggaagcaggtccg

SEQ ID NO: 397108 - DNA, 122 bp, Homo sapiens
aaccttgtcgaaggaccaaaggcgaccggtgcaggtgcttgctggtccttgttcttgtggcgcgggacggggacgactgtgggggagggggcgctggggaccggggtggagcgagcgtggtc

SEQ ID NO: 397109 - DNA, 122 bp, Homo sapiens
cagggctccactcaccatcacacaggacagccacatcctcgtagtgaaagcaattgtggacgccccagccgcggctgccgcactcgctcagcgcagcttcctgcccgcggcactccacgttg

SEQ ID NO: 397110 - DNA, 122 bp, Homo sapiens
agccaaggggaacggagagccaggcatcgctaactggcgacaatttgggtttgatctggacggagtctgtgtcttctggtagagagaacccctgggattttcgctctgctcctggctgtctt

SEQ ID NO: 397111 - DNA, 122 bp, Homo sapiens
aaggtggaggaagaagaagccggttttcccagtagcccagatctgggttctgagggctcccgcgagcgcttccgaggcttccgctacccggaggctgcaggcccccgcgaggcgctgagtcg

SEQ ID NO: 397112 - DNA, 122 bp, Homo sapiens
gaaaggcgaggagtgcgcccccttccggcgcccgccgtagcctggccactccgcgggggacgagctgcaggaaggggtacagcctgtgtcaaaacaccttgattcatgagtaatgatcagga

SEQ ID NO: 397113 - DNA, 122 bp, Homo sapiens
aatgaccaaaaggaagtgaagcaagaagaagagaaaaccaaaggctcaggtctgtcaactcgatgtggttccaaaagaagaatctgtccaaacaaggatttctgagggggaaaaaaaaaggg

SEQ ID NO: 397114 - DNA, 122 bp, Homo sapiens
ctccgggtggcgcttctcgccctcagtaaccggttacctccagaaccagggcgccagctccggccatccgcggttaagcgggagctcccattggctaatcgcacactgaaacgcacgccttt

SEQ ID NO: 397115 - DNA, 122 bp, Homo sapiens
cgctcgtccacccaccccgtgtaaaaataacaggtgaataccctatgtgggggtcctcatcgccgccatttccagaagcttccagtcacagccactgccacggtcgccacaaatgctactgc

SEQ ID NO: 397116 - DNA, 122 bp, Homo sapiens
ctctcatgaccagaagcggacggaggtgtcgggagcgacagcaagaacagcggcatacaccgcctccagcccttcagtcggggccatcaaccgcaaaccccgcaagctcttctctcagcccg

SEQ ID NO: 397117 - DNA, 122 bp, Homo sapiens
tgctctccaggcaggcactgtggccacagggggcctggcacgtcgagtgtgcaaaggtctcggtccttttctcccaggcagtgcccccagccctgtggcgcagaccccacatcagggagcgt

SEQ ID NO: 397118 - DNA, 122 bp, Homo sapiens
agggctaatcagtgctctgtcatcacagactggatcaatagtacacatttaatagcatcacgctgtggtcagaaacaagaggtagcacacacagagaagtaacagataaagctgggtaagac

SEQ ID NO: 397119 - DNA, 122 bp, Homo sapiens
atgaggaacatgaggccgtggcctgagcgtcttcacagaaataggaagctctcgaagagtcgcagcatctcacaggcccagccacttggagcccgctgggaaggctggatccaggaggaaaa

SEQ ID NO: 397120 - DNA, 122 bp, Homo sapiens
ccccaaggagcaggggcgaacgtgggcgcctcgtgccctgattggccgacggggcgcgcgcggcctggaggggcggggcggacgcagagccgcgtttagtctatcgctgcggttgcgagcgc

SEQ ID NO: 397121 - DNA, 122 bp, Homo sapiens
accagctgacgcggcggcggccaatgggagcgaacgccggagcccgctccccggggaccgcggcgaccgaggcagcaaagttacaaacagcccccagcccgcccgcccgccgcccgcccggc

SEQ ID NO: 397122 - DNA, 122 bp, Homo sapiens
cagattccgggaggggcggggagatcgggttgctgggcgatcctggggtgctggaggcggcgcggcgcggccggggcggggaggggtgcggcccgcctcctccctgccccacccccagcccc

SEQ ID NO: 397123 - DNA, 122 bp, Homo sapiens
atttctggcccttgaaggggttaaaggcctcctggagtcaaaaacaagcaggtgtcccaccgtgccagatacgctgcctaaactgcttccagcttctttttttttttttccccccttctgca

SEQ ID NO: 397124 - DNA, 122 bp, Homo sapiens
actaagcaaaagagaaaaaaagagaaggttctgagacagtgggagatgggaaagcgaacccgtggcaaaagcaggctaagcgacatagaaatcttttaagattctccgtatagttgctccca

SEQ ID NO: 397125 - DNA, 122 bp, Homo sapiens
catccatccacccatttatgttagagactcgatgaatctttaccaattgcctaacttagacgtaccaatccttctcaaatttccacttctccaagaagcacaaagctgtttctactttatta

SEQ ID NO: 397126 - DNA, 122 bp, Homo sapiens
cgggtgcctcgcggccccgataaaccttgagctcccagcctttgccccacccctcgctcccggaactccacctcccagaaggcagcgagaaccgcacatgtggctaatctttcagcggaaaa

SEQ ID NO: 397127 - DNA, 122 bp, Homo sapiens
ccgcggcggggctcccgcttacggcccgaactacttttcctgctttaaagatttaagtttcgtaagcagcattactgccccagctccaccccagcacaccccaaggaccgaaactcccagcg

SEQ ID NO: 397128 - DNA, 122 bp, Homo sapiens
ttaggcaaaataagtggcaccatgtgtaagttcacacagtttggagaataatgcaaagaacgaacaaccgcaaacatctaataattgtcattgttagagaaatgagtagggaatggggcaga

SEQ ID NO: 397129 - DNA, 122 bp, Homo sapiens
gaaacaagagaagcggagctttgtgcttgcctaaagacgtacccacaactacatagataacggagagttatgcagatagctttacagataagatactcaaacagctacagagatgaaaggag

SEQ ID NO: 397130 - DNA, 122 bp, Homo sapiens
gttacaagccaccctgaagagggaagaaccgggcactttgaggactgagagggaggccaccgtggccaacatgtgtgggtgcagatgacattgtccctggagtggatgccgaggggtggtgc

SEQ ID NO: 397131 - DNA, 122 bp, Homo sapiens
gcaggcagaggtcagtgtcaggctctaggtaagagatgtgtgcgtggaagaagccggctgcgttgaatttgggcaggcacacgggcgtccaggcctcgccctcgcgaaaggacgaggaggaa

SEQ ID NO: 397132 - DNA, 122 bp, Homo sapiens
gccggagcccgcttctacatccaccttgggaaaagaccccaagttagctctcagggctcgcggaccggaagcacgcataaacttctaccctgtccaatcataagcctcacgtgacctgccgc

SEQ ID NO: 397133 - DNA, 122 bp, Homo sapiens
ggagccgcgtggttctgggggagtttggggttcgcaatgtaagccttgtggccttgagctcgggcgggaggaatgagagcggaacagggatgggtcttgggattggcgtggggatagctgtg

SEQ ID NO: 397134 - DNA, 122 bp, Homo sapiens
agctccgcgcaaactctggcttctcttgtacgacagaggtggtttgctcttccgttgccccgtggcttcagctcatctttggcaggaaggcgaggcttccgcccggcacagggggtgagctg

SEQ ID NO: 397135 - DNA, 122 bp, Homo sapiens
cccagtcccctttctacctggtcgcctcatctggtcgcctccgagcccctcccttccttccgcccactgcacctggcggcctgtgctcggctctccagctccgccctcaactggtcgcttcc

SEQ ID NO: 397136 - DNA, 122 bp, Homo sapiens
ggaaccaaaatcccaaccctgattttactctagacccccaggacctcaaacgagtctctacggagggtaaactacaataaaatgaaatacagtcaatcaaaaacaagatgaatccgtgcttt

SEQ ID NO: 397137 - DNA, 122 bp, Homo sapiens
ttaatttgcattttccagatgtccacctggttgggtcatagtttaaccaaataaatcattcgttgggatgggaaagccaagagtgggttcagcttgctccgctcacaggagctgccacaaag

SEQ ID NO: 397138 - DNA, 122 bp, Homo sapiens
tcttcaagaagaaaaccgtggatggtgagttccaggccgggctgaaggggcccagctctgcgttttctcggcgtctttcgaggcctgctggccgcgattctgcctactgtccctggaggcgg

SEQ ID NO: 397139 - DNA, 122 bp, Homo sapiens
gggggccggggcggggcagggcggacagggctgggggcggaggtccgggggtgggtccggcggcgagtccgggtcggggcggacagagcagggggcgggggtccgggaggagggggccgggg

SEQ ID NO: 397140 - DNA, 122 bp, Homo sapiens
ccctccgcagcagcatcgcccgcggacgggatccggcaacccctgaccgtgagcggcgggcgctccggccaatcccggaccttcaggaagtcgcgccgctccagccagcgtgaggctgagcg

SEQ ID NO: 397141 - DNA, 122 bp, Homo sapiens
ggctgtggccacagaactgctgtctgcagatcgcttccgtccccgcgtccccagccttgacggactccgtccaatgacgacagtccacgcccacgtcggcgacgcccttccccttcacaggc

SEQ ID NO: 397142 - DNA, 122 bp, Homo sapiens
tgtaaagatgataactcagcccttactcttcagtgtttctcattcccgtctcccctacttcggaatgaaacacaatatcttaagcaaacagagcccaaagaggctgatcattggctctcatt

SEQ ID NO: 397143 - DNA, 122 bp, Homo sapiens
gcgtgtgccagaggtcccctgccaggaggaggcagctgggaggaagggaggctggcctcccgtgaccttggagcccagagtgagtgcctgtagaacccgctgaccctcccaggcctccagtg

SEQ ID NO: 397144 - DNA, 122 bp, Homo sapiens
cacccggccccgtgcgctcattggtcgggatgtgtcggctcagcagcctccaacttctcccgaatcccactggtgagtcccaggagagcgagctgagggagaaaggtccaaagggcgcgagc

SEQ ID NO: 397145 - DNA, 122 bp, Homo sapiens
gaggtcgccagggagcggcgggactgggaggctccaaagccctcagtgtacgtgcgaatccggagcggacaccgagaccttagcgcgggaaccaagagaggacagagctccacggaggccac

SEQ ID NO: 397146 - DNA, 122 bp, Homo sapiens
cctgttcctgcattttgttggcttccttcagtcctaccatatggttctaggtccctcttacgtcatctgcatagcagactatacctcttctgtccgctgacttgcccaataaataattctgc

SEQ ID NO: 397147 - DNA, 122 bp, Homo sapiens
tcccaaaactaattcctacttccccaagcactttggtgaagaaatgaatccagcccagctcgccgaggcatccaggtctccattctattttggtctccaggctcttcgtgaaagccaggttt

SEQ ID NO: 397148 - DNA, 122 bp, Homo sapiens
tccccgaatgggaatagatctgggctctcctggctggttgggaagcgttcttcctcccgccgcagccgaggccgggggcggaggagaggggaggggagaggaggggagggaagagagaacgg

SEQ ID NO: 397149 - DNA, 122 bp, Homo sapiens
aatgatctgattaattggttggttagggcggatggaggtgcttctctgccggggacctggcggggtttcgctagatcatttgttaattgtgggaaggaaggacgcatccggggagaggagat

SEQ ID NO: 397150 - DNA, 122 bp, Homo sapiens
actacaactcccacacgaccgcgcgcgcccgggccattcaaggtcgcgcggggggccctccgctcatgcggaggcctggacctgccgttacctacacgagctacccgtggttgcgactccgc

SEQ ID NO: 397151 - DNA, 122 bp, Homo sapiens
tagccaccgctggaggctgtggcagctacaggcagatcagcttttacagcaaggataaaacgatctttaaccttgtcccagcatgtcacatgtttgttgtaaagtttacttgctgataaaga

SEQ ID NO: 397152 - DNA, 122 bp, Homo sapiens
ggggtcgagccgctctgggagcgcgaaccctggaccccaggcatgcgcagcaagggggcgcgtgaagggggccagggccaagaccctgctttgccttgccggttttttttccttccaccagt

SEQ ID NO: 397153 - DNA, 122 bp, Homo sapiens
aggaccacgcacttgagctcggcctcggcgccacttaccacccgcacaggccgcgggaagcgcaggaagcacggggggctcccctgatcccccgagctcgccttcatcgcggcggccgaccg

SEQ ID NO: 397154 - DNA, 122 bp, Homo sapiens
gggtctaaagattattactggacgcatcaggcgcgagtgttcccgtacatggagggggaccggggcagccgctaccagggggtcagagggatcggaagagtcttcaaaaacggtacggagat

SEQ ID NO: 397155 - DNA, 122 bp, Homo sapiens
tgtttactgggccattgatctcttttccagtcagcagtgaaacctcagttagggaaaagacgcaccagatcatatctttctggcctgctgatgagaatggcatatggatgcaaaagctttcc

SEQ ID NO: 397156 - DNA, 122 bp, Homo sapiens
tcaccctttttccagtccacgtgaactgctagatcttggctttgcaacattagccaggggcgctacataaactgcttagtttctcaaaggctcaagcctgccctgatctgtctacaggatgg

SEQ ID NO: 397157 - DNA, 122 bp, Homo sapiens
atgcctaggatcagggcaggtctgtggggcgggcatttgaactgccagtggtatgatgtccgagccttctcccaccctgctactgcctgctcaggtgtgtccagctgcagcccccggtgacg

SEQ ID NO: 397158 - DNA, 122 bp, Homo sapiens
ggcgtgagcacggagggcctgttgttcacgttagaacagctgctgatcagcccgagtctccgtgaagttgccctgtggagaagcttgggtgggtgagagcctggggcataatagcattgatt

SEQ ID NO: 397159 - DNA, 122 bp, Homo sapiens
ccttcaaatagccggcctccgccctctggccaatcaccgccaacgctccctggcggcgcgcgcaccccctcagccagtcctggagcgccgatcggcgcgcgcccagactcctcggaccaatc

SEQ ID NO: 397160 - DNA, 122 bp, Homo sapiens
gggctcatctgctgtcagcgagggtaacgtggtgtggcgtgggctaacaagctttctcctcgcatggcttggcctccccagggcactgttcctgggctctgatggtcagttgagtcttgtga

SEQ ID NO: 397161 - DNA, 122 bp, Homo sapiens
gtatcttaaatgcaattactctttgcatattgctatatgtcgtaggaacctcaaaaataccgaactatagatgtaggagaggccctgaaacctgggagctaatggggtctcctgcctggaat

SEQ ID NO: 397162 - DNA, 122 bp, Homo sapiens
aatgggaaatgacaaagaaaaatactacttcacatagctgatgggaccctcaaaattatccgaaatgataatgacattttatgttatacatcctagtatttaacagaataacaatagagaca

SEQ ID NO: 397163 - DNA, 122 bp, Homo sapiens
atggtcggcttgtgattgctgtgttctccagtagaggtctttagctgccaggaggctgaacgcagagcaatatttaataagcactgtctaatttccaggcagtcttgcttcctagctttctt

SEQ ID NO: 397164 - DNA, 122 bp, Homo sapiens
gtagttgcggggacctgggaggccgggctctttcctccttggcctgccttccgctggctgcgtggggcagccaagaacaaagcctgcgagcttccatcaattgtaaagcaaagcacccttta

SEQ ID NO: 397165 - DNA, 122 bp, Homo sapiens
tcacgttgcccttccctgggcttgtgaggattggctccgcttggacctttgcggtgctcccggagccctccaggttgtccctccggtgccggaggccaagcggtggtgtccttcctgttccc

SEQ ID NO: 397166 - DNA, 122 bp, Homo sapiens
acagcgcggtgcgctcctgccggccatgctggctggggtggtgtcttaggcggttccagccgttagtcacagggcggccggactacaatcccagcatacaacgggagtggaggtggtgacct

SEQ ID NO: 397167 - DNA, 122 bp, Homo sapiens
atgaagtctccaagcctgtgatctgagagcttagtgcagcacagctgagggtgcctgtgacgggtctcagcaagtgtgtctcaaaacaattctccacaccacctgcatgagagtgtcctggg

SEQ ID NO: 397168 - DNA, 122 bp, Homo sapiens
ctccctagcccgtcttccctgtcttccgggtgtcctacacggctctggctgtgactccatcgccctgggtcgcactggaccctgcttgactacacttttgactcatttccccagatcaagtc

SEQ ID NO: 397169 - DNA, 122 bp, Homo sapiens
tgaggagggagtagaccttgggggcagaggacaggaggggagttacagctgtaggaggggcggggccaggttggacggtgcgaatcgacgttttctttaagaaaaaaattataacaatctat

SEQ ID NO: 397170 - DNA, 122 bp, Homo sapiens
ctagcaagtcctagcctcgttttccagccctcactcgaggtggagtcgctctggttccagcgcctctgacgaccgcaggctggggcttagacaggacatttattgctcaaagtacagtccat

SEQ ID NO: 397171 - DNA, 122 bp, Homo sapiens
gccctctattcctgtcgctgcgccccgccttgccggctgcgtgtcacccccgccccctgccgcgctggctccccgtccgtcccaccagccttgctgtcctgggcaggccggggaattcctcc

SEQ ID NO: 397172 - DNA, 122 bp, Homo sapiens
ctcttttctaggagcgtggggtgccttcgcgaataaaatctgaaggcatctctgctctcgcggagcttgttctttcttattttcaagtgcttatctagactggtagtcactaaagttcctgt

SEQ ID NO: 397173 - DNA, 122 bp, Homo sapiens
agctgtatcaccagtggcaacttctgcatttgcctcgcttagcttgtgtgttttcgcctgcgcaaatgttctgcctggattcttctagaaaagttcagggcatggagtgcttttttttttaa

SEQ ID NO: 397174 - DNA, 122 bp, Homo sapiens
agttcattaacagtgtagtatacatcatagtattggtacacattttaacagtgcttaccacggaacagataataggcctgctgttgattgtcttcagccagatgtactgcagtgcccaaata

SEQ ID NO: 397175 - DNA, 122 bp, Homo sapiens
gattttttttcctcaaactttatctccttgctcttttcccaatcccatgttacttcctttcgccttcttttgtgccaagatgagcaaggtataatcctccaaagaagaaaatgctccaaaga

SEQ ID NO: 397176 - DNA, 122 bp, Homo sapiens
tttgaaacattagatttttgtatttgctgtgactttcctactggccagtgtgccaggtaccggatatcctccgggaactgcaggcaggcccgtctctctttcacgggtgagagccgcagcct

SEQ ID NO: 397177 - DNA, 122 bp, Homo sapiens
ccctacctctcctctcgtaacccttgactcccacctgagagagccatttttctgggaatccgtgtatctctcccacctggtccctagcgtagaagcgggaggagctcaagcacaggtggaga

SEQ ID NO: 397178 - DNA, 122 bp, Homo sapiens
atcagtaaggaaaggaaggaatcaagcatcactctaagacaaactcagaccatctcttttcggtctgaaaaaataatccgtttaattgaaaaacctggaggatactattccactcccccaga

SEQ ID NO: 397179 - DNA, 122 bp, Homo sapiens
cgccttggtgtttggtcattaaaaccaatactggtctgaactacagaccgcggagggcaacgtggactttgaggctgttcggtccaactgcgagacgcagattcacctccaggtggaattct

SEQ ID NO: 397180 - DNA, 122 bp, Homo sapiens
cttggacttccttcctccctaggggccggcaggggctgcgattgctgtaagagtaggtcacgtggcagggcttcctgtatgctgctgctgccgggtgtccatggcccgcacccccaagctgc

SEQ ID NO: 397181 - DNA, 122 bp, Homo sapiens
agaaacacaagggggctgcagaggtaaacctggggacgagggcctgtccccccactcacccgtgatgcccacggtggacactgggcccacgcgctgcccctcgtggaggccgtacagatgca

SEQ ID NO: 397182 - DNA, 122 bp, Homo sapiens
tggaataggataattactcaatgttttcttcagaagtaaattgtagagtaaataaagaggcggtagctctgtttgagatttcaaggagtcaaagaatttgactattgagatttgtagtgtgc

SEQ ID NO: 397183 - DNA, 122 bp, Homo sapiens
ggaaccagatcttgacctgcgtgggcgtgaggcggatgaggctggccaggtgttcgcgctcgggcgccgacaggtaccgctgctgccgaaagcgccgctccagctcgtaggtctgcgccttg

SEQ ID NO: 397184 - DNA, 122 bp, Homo sapiens
agattgacgtcgtgttctgtcccccactcgcagcccgcgtcccttacatccgcccaccggcgcctggccccaggccttgacactcatccagttggtgttcagtgttcgatgagtggataagt

SEQ ID NO: 397185 - DNA, 122 bp, Homo sapiens
gtgtttggattcaaatcttctgttccatcaagttgggcaccccccaccccacccaaaaaccgaggaggcctaaaatctgcacagtgtaatttcagagtgcctacccctcctctcatttgctg

SEQ ID NO: 397186 - DNA, 122 bp, Homo sapiens
tgtgcggtccgcacttaactaagaggctggcatctctgggaacagcctccgggacccgcgcgctggtgcgtgctggagggagtagggaggggtggggcggtaggcatcgccctccgccgggc

SEQ ID NO: 397187 - DNA, 122 bp, Homo sapiens
tcacacttgttttgcagagaagtcttggctggcagaggcaggatttgtaattccttgggtcgcttgacttcacgaggggcgaggtatgcattgtagcgacacggactacttgtgaagccttt

SEQ ID NO: 397188 - DNA, 122 bp, Homo sapiens
ctggggcagggactgggaggagccaaagttatagccacacccccggtgacgcccggtggtcggctgtggtctcccattggctacaccggctgccagtccctggaggaggcggtgcccttccc

SEQ ID NO: 397189 - DNA, 122 bp, Homo sapiens
gtttgcatgagacactctctggcatggaatcttttctttcttttcagcacaacatagaaccggggctaaaaaggcctaagacattgttaaattaggttattcctgctccttctctctttata

SEQ ID NO: 397190 - DNA, 122 bp, Homo sapiens
tgatatgtttcccgcattgtgtgaggtcttgagacatccagaatgtaacctgcgatatctcgggtatatctcttaatcattaaaatccttcatcatacaaacataagctaccacaagcttat

SEQ ID NO: 397191 - DNA, 122 bp, Homo sapiens
gcatcgccccaaacgagcgtttctcccgcagggatgcgccctacgtgtccccgagccctgcgtgaggacaagaagaggagagggagagatgtttcaaatactgccatagctttgtcccacct

SEQ ID NO: 397192 - DNA, 122 bp, Homo sapiens
gctggggacatgctgagggaccccgggcgggaccctggcttaccggcccaaggtccgctccgctagtccttcagtctaaggcttgtttagcacaagacaagggatagcacgagttacacgcc

SEQ ID NO: 397193 - DNA, 122 bp, Homo sapiens
aggcgcacgtgtgtgtcgggctctgttgtgtctgcacatgcgtgtcggcatctgtgcgtgcgcacacgcccgtcagggtctgtgtgcccgcacaggcacgtcaacagctgagcacgctatgt

SEQ ID NO: 397194 - DNA, 122 bp, Homo sapiens
tgcacacacagggcagagggcagctgcaccttggcctgggcagcctccgaaatgcgtgcgcgccaggcctgagggcccccctggtggtgccacccgccccgctcctcctctgcaggagcctg

SEQ ID NO: 397195 - DNA, 122 bp, Homo sapiens
ctcattctaggtacccccgagggggacaaatcccttcctagtggctcggatgcaaggttgcgtcccacagatagggtttgcacatgggagatctaaccactagagggagtcagagttttgca

SEQ ID NO: 397196 - DNA, 122 bp, Homo sapiens
ctttcccagcggcatgtagagtcctgccctttccctacatcgcgggggcagggcgggggccgggagctgggtggtctgccatgggggtggccacagcagcagcagcagtggcgtgggggcag

SEQ ID NO: 397197 - DNA, 122 bp, Homo sapiens
agaggacgccgcttcccccgtcctgtccctactcaggtgtgcaccccttgctcgggcccgcgcccccaccctgggcagagcatagagatcactccttgttttcacgtttaaatgagatgcaa

SEQ ID NO: 397198 - DNA, 122 bp, Homo sapiens
tgagcagtttcttacagacctgataatagcagtgcctttgaggagggcaaatgcttcatgcgaaataattcttttaatcttctccagttgatgtagatgtaagtgatatttcatggtaaaaa

SEQ ID NO: 397199 - DNA, 122 bp, Homo sapiens
cttcaccaccagaagggtctccagcgtcgccttattctctgcctggcatctgagaaacctcgatgagcatagagcagatttagaagcctcatcagtcccatacggctggcctagaacagaga

SEQ ID NO: 397200 - DNA, 122 bp, Homo sapiens
agatgtggctctcatttctaaaacctggacttacagccacgtaatcccagtaccccaaagcgatcaacgtggacgcgatactaccatcgagtcacaggccctgctggcataccgtaggtggt

SEQ ID NO: 397201 - DNA, 122 bp, Homo sapiens
ggagtttggcaacccgatcgcaaccacgcaggcgcactgggcactctgtctctgcgcaggcgcactgggcgcccggccagccaccgcccgtcctttagcccgccccaattcgcaccgctggc

SEQ ID NO: 397202 - DNA, 122 bp, Homo sapiens
ccctgagtttggtaattttactctagttatatgaaatattcttgtacttggaacatatgccgaagtactaaggaaggggtaaggaagcacaaagtgtgcaacaaactcaaatagctcacagg

SEQ ID NO: 397203 - DNA, 122 bp, Homo sapiens
cacgcatgcgtgcgtcatgctctcagaaacacgcatgcgtgcgtcatgctctcagaaacacgcatgcgtgcgtcatgctctcagaaacacgcatgcgtgagtcatgctctcagaaacacgca

SEQ ID NO: 397204 - DNA, 122 bp, Homo sapiens
ctctccccttttctccctcttctccgccctcctttccctctcgccccttccccccttccccgtctttcctgcgatttcaggccgcattttagatatcccctgcaaagtgtgtggcgaccgca

SEQ ID NO: 397205 - DNA, 122 bp, Homo sapiens
aaggagtaggcaccccctgacgtcagtcagatcaggcccccaaggaagatttgaagggggcgactgcatagtcggggtatctcccatatacccaaggagatgggtttctctaacagcaccca

SEQ ID NO: 397206 - DNA, 122 bp, Homo sapiens
gcacaccatgagtgtgcccacaacagtggatgcagagtgtacttggcccatgtttaccaacgtttgcctgttcacccgaggaatgcacatgcatgaggtctgatgtaaggtccctgatgcca

SEQ ID NO: 397207 - DNA, 122 bp, Homo sapiens
ttgagttccgcacccccagcctctgagctttgcccaggcgctctccctctcccaagcgcacgtccccagcagctctgccatcggctgatcctgctcagtcctgcagtcaactaggactttct

SEQ ID NO: 397208 - DNA, 122 bp, Homo sapiens
gccacgtcatgcttttcacacacaggaaactgggggtccaggcctggtgaagctggaattcgaaatcacctcctctccagcctgccaccccgacctgccctcggcatccctggccttcccgg

SEQ ID NO: 397209 - DNA, 122 bp, Homo sapiens
cctcggtgcgttcccggtgctggccgccgccgcgctcgctccccgcgctggcttcaggagcgacccggccggtaattctgcatatttgcggacatcagccccaagaagaactccggagggag

SEQ ID NO: 397210 - DNA, 122 bp, Homo sapiens
caaaccaagaccagggttgtctggggttagctgtgtgactctttattgtagagtcccagacgagagttagtggccccagggcacaagggttgctaagggagagagggtcacaggtcctttct

SEQ ID NO: 397211 - DNA, 122 bp, Homo sapiens
gggccttgctcttggccttggatttctggctgcgcagttcgcgtccccgcggctccccgccggccgcgcgtttccgagccatgttgcttgtctgggcaaattccacttcgcgagtgacgcac

SEQ ID NO: 397212 - DNA, 122 bp, Homo sapiens
aacccacgaggtagttcctattattacccttcaatttgaaattgagaataaaacagaagtcgacaagttgaggtagcttgtgacatcagtatttcgtatttaatccagaaagcactgcttca

SEQ ID NO: 397213 - DNA, 122 bp, Homo sapiens
aagtggagtccaggcggaggcggtgccggccgaagagactggagaaatccaggacatggccgcaaggcctcacgggaaatgtagtccaaagccaggaagtggccctggaagcagcgcgcggc

SEQ ID NO: 397214 - DNA, 122 bp, Homo sapiens
cttacctggcaaggtggttttggaagtttccacggaagccttcccagggccgctgctgcccgtcctcgcctaggtgtggagcttcccgaccggctggggagggaatgtcctgcgggagccgc

SEQ ID NO: 397215 - DNA, 122 bp, Homo sapiens
ggcactgcccggacccacttggcctctcttgagtcgccgcgatctccgtctcctcccgggcgtctctgctgccccctagagagggggccactcgcagtggagaactgggatttttttttaac

SEQ ID NO: 397216 - DNA, 122 bp, Homo sapiens
ttattctgtctaaatctttgtttctgcatctgtaaaatgagggtgatagtagttgttggtcgtaagcttgttgtaaggaataagcattcttttacagtgctcactttggtgtgtggcacagt

SEQ ID NO: 397217 - DNA, 122 bp, Homo sapiens
ttgcgtccaccacttgccctcagtggctgctgctcgtctgagactgcagcgccctgggtccgcgcaggcgcattccacaccgacgcaggtccgtcctccaagtgcgcatgcgtgcagtctgc

SEQ ID NO: 397218 - DNA, 122 bp, Homo sapiens
agcacagttggggaaaacacagtaataccatctaagtttctttactgaggacctcagagccgaatggcctctatggatgccatagagaccaatacggactgagggtttaaagaagatggtgt

SEQ ID NO: 397219 - DNA, 122 bp, Homo sapiens
aagctgcgcgcagagggacgcccggtgcgagagggtgagcccctggccaccgcgcagggccgagtggacaggcccaagttcgcccagaggtgacacacttgggaatttgtggtgccatcgtg

SEQ ID NO: 397220 - DNA, 122 bp, Homo sapiens
gactaagtttattctggttgggctaacagagaagtcagagctacagctgcccctcttcctcgtcttcctgggaatctatgtagtcacagtgctggggaacctgggcatgatcacactgattg

SEQ ID NO: 397221 - DNA, 122 bp, Homo sapiens
cgtggtgagttgggcattgagctgccgtaggtcactgagtctgccctgccatcacgtctgcgctgccctgagacacggagctccagcacattctgcagagctcacactatcgagtccagcgc

SEQ ID NO: 397222 - DNA, 122 bp, Homo sapiens
ccctcactccaggaagctctggcttcgtttgtgaaacccgacgggatgaagggctaggctcgcctccagagtagtgtagtttctcccgccgtgggcacccggccccttgctaccccgcaaaa

SEQ ID NO: 397223 - DNA, 122 bp, Homo sapiens
cccgtgcgtgcgtccgggtgtctgagcgtgcctgtctctgagtgcgtctccgggtgcaggcgccagcctgtctacgtgggacgggtgctgacttggaagactcccggccctggaggattttc

SEQ ID NO: 397224 - DNA, 122 bp, Homo sapiens
accttaatgaccattggtagggaattggctaaataaaacatagcacaactatataatggacgctacatatccatttaaaggagggaagctctctgtaggttcaagatacactgtttagtgaa

SEQ ID NO: 397225 - DNA, 122 bp, Homo sapiens
tgggcggaattgcacagggtttggcggggatctctgctccgccttggcactactcggctccgctcgcctccgcgcggctccctgggctttcactcggctctgttcggctcctgctcgggaag

SEQ ID NO: 397226 - DNA, 122 bp, Homo sapiens
gggctcgcggctcctggaccaatggggaagtggcatgtgggagggcgccggggggccccccgccaatggggagctacggcgcgcggccgggacttggaggcggtgcggcgcggcgggtgcgg

SEQ ID NO: 397227 - DNA, 122 bp, Homo sapiens
tgcgctgcagccaccgccgcggttgatactactttgaccttccgagtgcagtggtaggggcgcggaggcaacgcagcggcttctgcgctgggaaattcagtcgtgtgcgacccagtctgtcc

SEQ ID NO: 397228 - DNA, 122 bp, Homo sapiens
cctccaagtggatcccatcctctgcctgcagcctccaccaaaaagcctggcaggagttcccgagtcctgagttctgagccaggtgttttgatgtttttgcagactggttttaaagattatgg

SEQ ID NO: 397229 - DNA, 122 bp, Homo sapiens
ggattagaggtgcatgccaccgcactcagccagggaaagtggctgctgaaccaagagttccgacttcccaaagggcaacagaatggcagttacccaaacttccccagctgaagaatgggaac

SEQ ID NO: 397230 - DNA, 122 bp, Homo sapiens
gtcccctttggtgtaggaatcacagtagatgcagggatgctctaagcatgcaaggtggcccgttcataagcagcatcataccctgaattcagaagctctactgaataagagctttcggggaa

SEQ ID NO: 397231 - DNA, 122 bp, Homo sapiens
agggggtgccgggaagggggagtgcttgcagctataatggttcctgggagccaacctttccgggctatctgcccgatcttgttttccccaacactacatttattttcttccgcggcccagcc

SEQ ID NO: 397232 - DNA, 122 bp, Homo sapiens
caccacgctgatgctccgtcagtactgtgtagatagcagtgcatggttagtgctgtgccacgctgacactcagtcagtaccatgtagatatcagtgcacggttagtgctgcaccacactgac

SEQ ID NO: 397233 - DNA, 122 bp, Homo sapiens
acagagtagtacagagaacagttcagagcccatgtatttatagtcctgagattcaaatgacggtttaagattcctcacttctgattggacaaaagaaacacggtttcactgaggggtggggt

SEQ ID NO: 397234 - DNA, 122 bp, Homo sapiens
aatctagccaagaaatgaagccagtggggggctcacaggaccaagaccctgctcacacaccgggggagccttctgcatctcattctggggcccctttccaacctttggagttgcctcctggc

SEQ ID NO: 397235 - DNA, 122 bp, Homo sapiens
tgggctgtgagtaaagggccctggaccaccccgttgttcccactttctgtggttaaggggcgcatcgagtggcgaaggagagagcccagtgaactaaacagccctttaaaagttcgctttgc

SEQ ID NO: 397236 - DNA, 122 bp, Homo sapiens
ctgcgaaccctggtcctcggaaaatcgacataataatccctgacgtttgctcttcagtctcgcggcatttaaggtatctccgagcccctttgggaagagcaggaaccccagacaactctttc

SEQ ID NO: 397237 - DNA, 122 bp, Homo sapiens
gtttctgctgtggactcagaaaaccacgttataaaacacagaccagggctgttaggaaaacgcagccccgggtgtgcgagtgcccacagctgcagcccatccgcccaccgcccccagggcta

SEQ ID NO: 397238 - DNA, 122 bp, Homo sapiens
ccggcttctccgccagtatgtttgcttgcttttggggcccttctcaagccagatctctaacgtggatggagtggcgcgtttcagggtggggctatgacaatgcactgcatgtgcagccgcca

SEQ ID NO: 397239 - DNA, 122 bp, Homo sapiens
ggtaggggagtgggggcgtggtcctggggctgcaccctctggtgtccgcagctggaaggacggaccgcatttgggccttatttataggtgttgccccaggagacgtcagtgactgcgccccc

SEQ ID NO: 397240 - DNA, 122 bp, Homo sapiens
gatttctgcgtgttttctagaatagtagccagtcacaaaacacaggacatggtctcataacgttccagattctaaacatttacaatcaatctctatgctttttaacaaatatctcaaaatca

SEQ ID NO: 397241 - DNA, 122 bp, Homo sapiens
tgcagtccccagaggagagcgagtgaccagacgctgcgcggggccaagttctccaagccgcgctgaggctcctcgcgccctggcaagtgacagcctcgcccctcccagcggagacaactcgc

SEQ ID NO: 397242 - DNA, 122 bp, Homo sapiens
agggaccctgttcagagagacacacccggaaggagtgagccccggtcagagaggctcacccggaaggagggagccctgttcagagagacacacccggaaggagggaccctgttcagagaggc

SEQ ID NO: 397243 - DNA, 122 bp, Homo sapiens
ctccctccaaaggaccctcagatctgtcagtctgcggacgccaggacagctgggagggggcgggcagggtggaggagcaaaacccgacagctcagtctctgggctggcggtagaggggggaa

SEQ ID NO: 397244 - DNA, 122 bp, Homo sapiens
aaggcctgtggtgttcccagggtacatattcatgccagaagtgaagtgctttggtgaattcgtttcctgaaagtttatcgcatacttgtactgggttaggtaagaagtaaagtacaaagaat

SEQ ID NO: 397245 - DNA, 122 bp, Homo sapiens
ctttgaattgatggaaaggaaatggtttggtgtccaactctcaaacactctagctgtgaacgtatgggcctaaacttgtcctgtgtgaaagacgtgtaaatcatttggtgtctgttccttac

SEQ ID NO: 397246 - DNA, 122 bp, Homo sapiens
aaggcacatacccagctgctacctgtgagccctccactctttccctgccctctgcaggcacgctggggttgaggcctctgagcctgggccacaaatcacatgcacacatgtgtaagtgcatg

SEQ ID NO: 397247 - DNA, 122 bp, Homo sapiens
gctggtcaggacttgaacattcgccggatccataaattgggtcatttttaacctcaaaaccgaaccgcagcctggggaggcctttaggaccgaggggagccatcccttcctctagtcgggca

SEQ ID NO: 397248 - DNA, 122 bp, Homo sapiens
gaccttctctgcagcccgagcctgacgggtatccagggtaaccgcgagggggcggagcttcgggttaggtcccggcgaggttcttcccgcagccaataacgagccgtaaatccccagcccat

SEQ ID NO: 397249 - DNA, 122 bp, Homo sapiens
gctagagggaaattctagagggaagggtgtaaacaaatgccaaaattggaatgttggcagcgttggagagagaaagatgccccagggagagatttagctcagcaatactgagttattgagtg

SEQ ID NO: 397250 - DNA, 122 bp, Homo sapiens
cttctgtgttaaaacacaagagaacccttaacgttaaaacctcaagcttccggagcatgtcggcgggagggacttaacagcggaacccaacattccccggtgaagttttccagccggagtca

SEQ ID NO: 397251 - DNA, 122 bp, Homo sapiens
atacccataacttttgaatcattcttacaagtccaaaagatacatggaaaatttggaccccgacattttaactgactttgcaactgcctagtgtctggtactaaatcatatttttaacagtg

SEQ ID NO: 397252 - DNA, 122 bp, Homo sapiens
aggcctagctcctttacggggacattctcctttctcagcctgttggaatcgaatccgttccggctcccacccaggcggtacctctgtctccactcccggaggccagatcgatctctcaggtc

SEQ ID NO: 397253 - DNA, 122 bp, Homo sapiens
agctggatctttacgtcgtcaccagtgggcggggagaccagccttgtacccactggacagcgggcccattccgagtcagggaagcagaaggcctggaggagcttcggggagcaggggctgga

SEQ ID NO: 397254 - DNA, 122 bp, Homo sapiens
gaacgtaagcttgtgggaggaggtggtaaacgaggaagcagtggggacatgaagtgagaacgcagtactcagccagaccagctcaatcagtcctggtgatgaacaaggtgaatcagctgcac

SEQ ID NO: 397255 - DNA, 122 bp, Homo sapiens
aggggcgggcggataaacaggaggtagaaggtgggagctctggggctttagcctaagctgcgttaaagcgctcagggaaagcccgcgcccagcatccatcgggctgcagactttggcaaggg

SEQ ID NO: 397256 - DNA, 122 bp, Homo sapiens
ccgcgagttatccgtattctccttcaggagtcatagtcaggccagaagagtgcggagggacggggcccgggaagagcagggaacccccagagcccgcagccaacgcggaggtgggcgagcgg

SEQ ID NO: 397257 - DNA, 122 bp, Homo sapiens
tcaaggcagctcatcctcctaatgggagccttgaaagaggactttctccatgttcttgatcggggtggacaccttcccccagaacagggacaaggcaggtagatagtccagtaccaggagac

SEQ ID NO: 397258 - DNA, 122 bp, Homo sapiens
gccgctcaccctgctgcccggaggaatctgccatggctgggaatcccggacccgcagctgcggctacagacacttcctagaatctgatgcaaccgccgccccggaagtcgcgccccacgccg

SEQ ID NO: 397259 - DNA, 122 bp, Homo sapiens
tcttccgggctgtcccggggcgaccctaccaactcccaaccagtcctccgcggccggctccgggggaggtgtttacagcctgtgctcgccccctgctctgcacaaccccttccgtcccgccg

SEQ ID NO: 397260 - DNA, 122 bp, Homo sapiens
acatgagggcaccgtggagaagccaccagcagggcccgataaaggcctggctttagaaggcgcctttggaaaagcaactaaaatcagcgtgcccctccttccccatggacacgtgcctcagg

SEQ ID NO: 397261 - DNA, 122 bp, Homo sapiens
gcctcacttcttccccataaaaacaattccaatcactgaaggtcttgctggcatctctgccgccatctactgagtcaaactggcacatattctagtaaatcctaaccaagaaaggtcattgt

SEQ ID NO: 397262 - DNA, 122 bp, Homo sapiens
gccaccaaggggccgggccctgcacagcgccctggggaagctggtttgaaagctctggagcgaccccaatgccgggtaaaggacaagatttgcccagacggaagggaatttggggtgaagtg

SEQ ID NO: 397263 - DNA, 122 bp, Homo sapiens
cccctccaagtgcaagttgtagcaacctgccgggtccacgcatgggcgggtcatactccacgggttccggtttccactccctgtgaaccaaaagccagagaggcccacgcacgagtccggaa

SEQ ID NO: 397264 - DNA, 122 bp, Homo sapiens
ccagacatcgtaaacgctttgctccagacattgtagatgctttgcgtgcattattttcttcgcacaatcacgctagggaggtgggttttactaccttttcttaaataatatttgagtcacaa

SEQ ID NO: 397265 - DNA, 122 bp, Homo sapiens
aggtctccgtatctctctgccccgccgccccttcccaactgcggacatgctgggtggatccggatcgcatggaagacgcagcctggccgcgctctcccagtgagtcctcatttcgtctcttt

SEQ ID NO: 397266 - DNA, 122 bp, Homo sapiens
ttcttccctttggtttccgcggtggggactcccggcgtccctgttgtgcgggtggagaagcgggagcgcagagacatgaggtaacttgctccggccccagctaggaaggggcggaggcccag

SEQ ID NO: 397267 - DNA, 122 bp, Homo sapiens
tagcctattcagatctacttccagaataagacgattcttgaatcaaaaccataagtcagtcggcgctttcactgtgacaccatgcagagtcggaactctaactggtattaaatgcacaatta

SEQ ID NO: 397268 - DNA, 122 bp, Homo sapiens
tgggacgcggcggctagggcggagccggagggcgcctaggcgtgtcgaggcaagccgaggcgagccgcggcggtccggggccctttatagccgggacggaaggcctcctgccctttctcccc

SEQ ID NO: 397269 - DNA, 122 bp, Homo sapiens
attagtgaaataagagtgccaggatctgactaggagtttaggaggtatagaagtaaaccacggcccagtcagagactttataagcctgggaatttctgaagctggttaagaccctagagata

SEQ ID NO: 397270 - DNA, 122 bp, Homo sapiens
ccggttccatgggctccgtaggttccatgggctccgtgggttccatggactctgtgggctcgggcccgacgcgcacggaggactggaggactggggcgtgtgtctgcggtgcaggcgaggcg

SEQ ID NO: 397271 - DNA, 122 bp, Homo sapiens
tcccagggccccacggtgctcatcacttctctccactctgttcttcctttgattggccttcggaaaacctttaaaatccagattttgatcctgtcctttgtatagagcacacttgacataac

SEQ ID NO: 397272 - DNA, 122 bp, Homo sapiens
gagcgaaagtggatagctgacggcctggaagaacgacattgccgtgactcggattcgaaccgaggttgctgcggccacagcgcagagtactaaccactatacgatcatggcgagccacaggc

SEQ ID NO: 397273 - DNA, 122 bp, Homo sapiens
atccttcgggggagggggaatatttttgtccccccgcctggctgtgacacataaataccccgcgggggcctgggcggcgagcacgcggcggcggcggtctctgagcgcctctgctctctccc

SEQ ID NO: 397274 - DNA, 122 bp, Homo sapiens
ccggctctgacctcctcctcacaggggtcctgcggagacgaactcccctggactttgcagcgccgtctaacccggctgcggacggcgtcagggcacgaacccggcggcagtgctgtctgtgc

SEQ ID NO: 397275 - DNA, 122 bp, Homo sapiens
cttttccttttcagacttatttgtgctaataaatttcccctgcaacttggtaactctcttcgaagaagtgtgtgatttgctgctgcttttatgtatttgattcaacctcagaaatatgatca

SEQ ID NO: 397276 - DNA, 122 bp, Homo sapiens
gagagggtgggcagagggtggctgtgtggtcggcggccagcggagcgcttcccagccagccgcccggcggggaacgtgcttgacctctgggtggttgctgctcccaagggtggggctccgga

SEQ ID NO: 397277 - DNA, 122 bp, Homo sapiens
cccagggagcgttgtgccctcgctgtgggacctggggacactgggacaggcttgtccatccgtccatgtccctagcaggcaacacacagccaagtgcaggagcaagcaggcagcccaggcca

SEQ ID NO: 397278 - DNA, 122 bp, Homo sapiens
ctcttcaaaaaagcatctctagaaatatggtccgctgttcttgccacatcttccaaaaatcgataatctaaaaatttcaaaacagaagaataaacaagtgacatataccaatggccaggaag

SEQ ID NO: 397279 - DNA, 122 bp, Homo sapiens
gggcggctctctggggtgacctccggtggagcggtggtgacatccccaatcgagcgttctcgtggtggctctgagcttcgaatggtgctggcagttgggctgagctggaggccatggctcct

SEQ ID NO: 397280 - DNA, 122 bp, Homo sapiens
ggccgacagctgcatctggactccaggctcgcccaccccggcagtaacagagcagcatcgcgcagcaacctgcccgcggggggaaacagcactggttcctcgccctcatcagccggccctcc

SEQ ID NO: 397281 - DNA, 122 bp, Homo sapiens
gggaagaacaacagggagatagacgaccacagcctgtgcacccgcaggaagtaaatagctcgttacccagaatgcccaccacttccggcgcttagacttcctcttccggtgtgggcggacgc

SEQ ID NO: 397282 - DNA, 122 bp, Homo sapiens
cttctatctcggctcccagctgggccccaaggggagctgaggggtgagctgcagccactccggcgcagagaaggacacaaaggctgagggctttccacgtccccctgacccaaggcgcatcc

SEQ ID NO: 397283 - DNA, 122 bp, Homo sapiens
tatgctactgaatttgaaggaattagcacttctgatagtgatgaatggtccaccctaaatcgttatttcttgccttgtatccaggagcatttgaaggttgaagtttgaggctagtttttggt

SEQ ID NO: 397284 - DNA, 122 bp, Homo sapiens
ccgcaacattgcctcatagatggcatttgattaataaattggaaatgtggagttatgaggcgattacatgcaaggctggattaaaatccgcatggagattagagataagccccggctctgcg

SEQ ID NO: 397285 - DNA, 122 bp, Homo sapiens
tctacactatgctaccttcactatgccatagctgttttggttcacattgtatgtgaaagacgagccagtagatcctgccagttgtgaaaggtattgcatattaaaatgctatgtgcaagttc

SEQ ID NO: 397286 - DNA, 122 bp, Homo sapiens
ccggggtgcgtgtgcccagaagctgtgcgggctcagtgtgtagacgctctggctgcgcagcgcgcgtgctcaagttccaaagcgctgcactccacggcggctggaaaaggtggaagaaggac

SEQ ID NO: 397287 - DNA, 122 bp, Homo sapiens
ggaggatggtagcctctggtccttcaactacttcttctacaacaagcggctcaagcgaatcgtcttctttagctgccgttccatcaggtgggcaccccccgcctcctcccccacctccctgt

SEQ ID NO: 397288 - DNA, 122 bp, Homo sapiens
tgggccctatgccgaggcagactcctgctctgtgctgctcctagggaaccacggcagcttcgaaatgcattctaatctgccctcttattgtgacagtttatattgtacttagaacctaaaat

SEQ ID NO: 397289 - DNA, 122 bp, Homo sapiens
gcaccccgccccgcaggcagctttctctcgcacgccgggcgcccggtcccgacggtcacccgcactcccgcacaggcatccccacagcctgcgccagcccaccgctcagcacccgggaaggc

SEQ ID NO: 397290 - DNA, 122 bp, Homo sapiens
tgtgccagccttgggctcccagactggggctgagtcctgcagtggcatccaagctacttccgtccccttttcaagactttgtgcaaggaaggacccaccaggccgagagctggtgaccccag

SEQ ID NO: 397291 - DNA, 122 bp, Homo sapiens
tccccaaaatatacatggcccctgcaaacgtcgtgcccaggtagaagcagaggccgacagcgcctccaaactcgggtcccagcgagcgcgatatcatgtagtaggacccgccagctgcggag

SEQ ID NO: 397292 - DNA, 122 bp, Homo sapiens
aaattaaaaatttaaccaggaatggtggtgcatgtttgtagtcctagctacttgagagaccgagttgggagaatcacttgagcccgggggtggaggcttcagtgagttatgaatgtgcctct

SEQ ID NO: 397293 - DNA, 122 bp, Homo sapiens
aaaggggtgacggacgcacctggaaaatcgggtcactcccaccggaatactgcgcttttccgacgggcttaaaaaacggcgcaccacgagattatatccggcccctggctcgcagggtccta

SEQ ID NO: 397294 - DNA, 122 bp, Homo sapiens
ctccctggtcgcctcgcaccgggccccagggtcccgccccgtcacctaccggccaagcgccgatctccccaaccaagcgagtgttgcgctccgctcgcccgcgatctcccgccgccggccgc

SEQ ID NO: 397295 - DNA, 122 bp, Homo sapiens
cagcgcctagattcattcctagcacatagtaggccctaactcagatgtgaatgtaggattcgtaggagctgagcatttgtgcttcaggcatcaagttgtctttgactcttcgactcttcctt

SEQ ID NO: 397296 - DNA, 122 bp, Homo sapiens
caaatacccagctggcttaaccacacccacggcagacacctgttgcctggcagagagaagcgccgtgggttcagaacttgactctggacggaggtgtgagtctctgggttcaagacacctcg

SEQ ID NO: 397297 - DNA, 122 bp, Homo sapiens
ctaaaaatcagagagagggcaggcggcagggcgcggccccagggaaagtggccaggtgggcggtgactggccgggcagctccgtgtgtggcacagggagacctggcacagggagaccaggta

SEQ ID NO: 397298 - DNA, 122 bp, Homo sapiens
tgagtagctgggattataggcatgcaccgccatgtctggctaatttttcttttctgacggcgtctcgctctgtcgcccaggctggagtgcagtggcgcgatctcagctcactgcaagctccg

SEQ ID NO: 397299 - DNA, 122 bp, Homo sapiens
cagcctcggctttaagctggggcgccagaagcctaagcggagagcgaggctgtgacctctcgttccctggaagaagacggccaagggtcctgtcctcgttctctgcctctgctgccctcccg

SEQ ID NO: 397300 - DNA, 122 bp, Homo sapiens
gccaggccgcaactccggccgccatggtgactccagctcttgggccggcagccgcgcggacgctaggcacaccagcttggagttagttcagcaaaccctgggagacaggaggggagagagag

SEQ ID NO: 397301 - DNA, 122 bp, Homo sapiens
tctgatgtaggcctttcaggccttgaatccagtgggattgagaactttctaagagtggtgcggctcttgacaacatgtgggctccaccagcagcaatcatgggggatgggcccaccaagaag

SEQ ID NO: 397302 - DNA, 122 bp, Homo sapiens
cctgcttaacggcttcctccacttcttccccaatcacaatcactgggtaaactcggagcacgtacagagaagggaagggctggaaaagaaaactgcacaggagctgcaccccccatcactca

SEQ ID NO: 397303 - DNA, 122 bp, Homo sapiens
tgagtcatcaaaatttcaaagagtcctgaccaccccagtggacccattagcactcataaccgtttacctaaggaatccctttccctgaggacttcttagaaatagatgctagagagtaattc

SEQ ID NO: 397304 - DNA, 122 bp, Homo sapiens
tcccgtcacgtctcctccagattaggcattaactcgggtgcagccgcacttccggggggccgcggcgggggaggggcgcctgcgggatccagacccgccccccactctcctctccccgcccc

SEQ ID NO: 397305 - DNA, 122 bp, Homo sapiens
ggccaggttggcagggtccatcccatgagaggtggcagtggagggccctttaacaccaaccggagagaccaaggagccaggggctgccggggctgtgagccggaggggcaagctccacactc

SEQ ID NO: 397306 - DNA, 122 bp, Homo sapiens
ttatcttgtgacaagggcttacagacacaggagcaagagtaactcagagatttgctgtcacggagccggggagcggcatttggaggggaaagctcttctctggggagttttatttataacct

SEQ ID NO: 397307 - DNA, 122 bp, Homo sapiens
cttttcattttgccatccttttccagctccatgatggttctgcaggtttctgcggccccccggacagtggctctgacggcgttactgatggtgctgctcacatctgtggtccagggcagggc

SEQ ID NO: 397308 - DNA, 122 bp, Homo sapiens
cgctccaggtcaccaggacgtcccggggcagcgagaggcctgcggggcgcggacaccacccgccacacggccactcgcgcccgcacctggcacacacacactccagaagtgcgcgggtccac

SEQ ID NO: 397309 - DNA, 122 bp, Homo sapiens
attcgtagtgaaatgtgtgaaatataaacacatgactttcacttattcattttcactttacgctttttaattgaaattaaattagtcacttaacatacataatgcagtgtttgttttccagt

SEQ ID NO: 397310 - DNA, 122 bp, Homo sapiens
cacctgtggaagcaactgcgctgattgatgcgccacagacttttttcccctcgacctcgccggcgtcccctcccacagatccagcatcacccagtgaatgtacattagggtggtttcccccc

SEQ ID NO: 397311 - DNA, 122 bp, Homo sapiens
gggacctgttcagcttgcccttacggctggctgtgcccttgatgacccccaggcgccagtcgctcttgctgcccaccaccacctcccagtagtggcggccgcaggagaagccgcggctggcc

SEQ ID NO: 397312 - DNA, 122 bp, Homo sapiens
tgtcatcccaggcccatgtgactccaattggcgtatctgtattccaattccaatgctgaccgtttctccagggctggctgttttccatctgatgggctgggtaattctcaggataccaggtc

SEQ ID NO: 397313 - DNA, 122 bp, Homo sapiens
gctccaggctccaggaaagggcgtcgcagggcccagaggttacacaacttcccccaagatcgctgtggaaatgactggcagagcagggattcaaacccaggtccctgtgggtgcctctgccc

SEQ ID NO: 397314 - DNA, 122 bp, Homo sapiens
ctcagacaccgggttaaagaaggaagtggctttatttggctgggagtgtcagcagacttgcgtcttaagaactgagctccctaaaaaagaaattattggcccttttaagggcttacaacact

SEQ ID NO: 397315 - DNA, 122 bp, Homo sapiens
ccgccctacccaccttcaggcagcctatgggacgcagggccccatctgtccctcggtcgccgtgtggccagagtgggtccgtcgtccccaacactcgtgctcgctcagacactttggcagga

SEQ ID NO: 397316 - DNA, 122 bp, Homo sapiens
ccccggcttctgctgagtcccctctcctcactcaggtcacctgcttaggcacagagtgaccggttcagatcaacccccctcacaaaccacagtgctccccatcatggctcgattctgaaatc

SEQ ID NO: 397317 - DNA, 122 bp, Homo sapiens
acacacatccacatggtgtcaccaagaccacacgcacccccacagaaacactatctatctcgcactcggtgatggagtcaacagacactgtgcccctcctccagagccaaggagtgggacag

SEQ ID NO: 397318 - DNA, 122 bp, Homo sapiens
aggatgagtggcacaggtcataaggcccacagcaggcactgagcaggcaagcatctttcacgccaaaaaaaacgactttcaggagaagaaatgcgttaacacactatgtgccaattctcatc

SEQ ID NO: 397319 - DNA, 122 bp, Homo sapiens
tcgtcggcggaatacgctcagttgcctagcaccacagccctctggctggtagtccctcttcgcggctcatatgctcgggtctccttgcggcccccagctcagcgaccgagacgcagacgagg

SEQ ID NO: 397320 - DNA, 122 bp, Homo sapiens
tctgctggaggctttggccctggtgtagcctgggcccaaggaagcctcattacacccctccgagaaccaggctgtggccaccaggtttttgttcatcttttctattatgtgaggttggtgct

SEQ ID NO: 397321 - DNA, 122 bp, Homo sapiens
ttagagggctatgatttctacaaagtggcccgactggcccgcgaacacgcagcagagacgcggcctccacaaggtcagaactaagatgtcctcagagatccccagttacgaagcaaagcgcg

SEQ ID NO: 397322 - DNA, 122 bp, Homo sapiens
cagggcgatattcacacatcattcaacagctgtggatggaactcctcctctgtgccagggcggtaatatgacctcccatgggttttcctcagtaataaacctatgggacttctaaaaagatt

SEQ ID NO: 397323 - DNA, 122 bp, Homo sapiens
caccgtctcctcaagcctgtctataaaatccggtgcactccagtgcactctgctgcaggccggaagtcccatttgggcaccccttactctcctgcaagagaaagagctgttctcctttcttt

SEQ ID NO: 397324 - DNA, 122 bp, Homo sapiens
gctgcctccgtggagatcccgagaaaagctcctgcgctccaagttaacttctctctgggccgcgcggcgcagtggagtctcggtgcagcccgcgtccctggaggcgcgcagcgaagcccagc

SEQ ID NO: 397325 - DNA, 122 bp, Homo sapiens
ggcaggcaggctccatagtgccaggcatctggctggctcagcagcagggggcgatggcatcgtcttcctgcccacctgggagccaatgtttcggctgggcaaggacaagcctcctctgggtc

SEQ ID NO: 397326 - DNA, 122 bp, Homo sapiens
gatgatgtagactttgggcatgtagagcattcccagggacaccgaggcgctcagactcaccgagaccgtcagcgtcgtcgtctggatgtacagctggcggagggcacggtggcgtcagagca

SEQ ID NO: 397327 - DNA, 122 bp, Homo sapiens
ctcgatctcctgacctcgtgatccacctgcctcggtctcccaaagggctgggattacaggcgtcttgctgcatctcgaagcgtcttcagcgtgctcttgcttgctggctctgatgatggagg

SEQ ID NO: 397328 - DNA, 122 bp, Homo sapiens
caaactcccgtccccgccattccaggccctggcacttaggagccaaaacctcaggtcaggcgcactttgggcctccagcccagccccgcctcctcagcgctagctagtaggcaaaaggaaaa

SEQ ID NO: 397329 - DNA, 122 bp, Homo sapiens
ttggagttatgtcctaatattaaattcgaagaatttcttagtctcacaattgggcagggacgggaaggggaggcagagaatgaaagagggtagtttagagatgccagtaaagaatttttgta

SEQ ID NO: 397330 - DNA, 122 bp, Homo sapiens
aatacttaaaagacatgcaggaaaccagcccaaggaaaaatttatgtggagccacgtctgcgcctgcgcctgcgccaagcccacggcgcgccacttgcacatgcgcagtagctgtaggaggg

SEQ ID NO: 397331 - DNA, 122 bp, Homo sapiens
tgtacacaaaagagccatccttgccctaaatgtctgtgtgatgagctgtaagaccctacacggcactttaggaaggggcactgattatctgaggctaccaccacccatctccccagagtacc

SEQ ID NO: 397332 - DNA, 122 bp, Homo sapiens
gtcacccatgtgtgttagaggctgggccccagttctctggggatcctgtgcccaagggcccgggtgtgtgtgtctcatgctgtcttttggtcacaggagcatgtggtgtctgtcatttcatg

SEQ ID NO: 397333 - DNA, 122 bp, Homo sapiens
cccgagtaaaaatcccggcctattccgggtgggaatatgtacaaggcggcggggcacaggcgggggtgggggcgggcgggccggcggccgcagcccccacccgagggcccccgcacctcggg

SEQ ID NO: 397334 - DNA, 122 bp, Homo sapiens
tggctaggagctgcactggagcatccagctcgcaggagggctcgcccccgggctcgcccccgtccagctcccaggcggagaaaggcgctctcgctaccgcaagccctacatcgcccctcttt

SEQ ID NO: 397335 - DNA, 122 bp, Homo sapiens
gtgcgtgtgccggcatgtctgtgtctggggtcctgtggggtgcacgtgatgggggttgcccggcagctctcacccatggagtcaggacgtgttcgtgcacttccgggctcacaggctctacg

SEQ ID NO: 397336 - DNA, 122 bp, Homo sapiens
cggcttcatgtgactaaacaaaacccccaagtctagtgcccagctcagcccctttgtgtccgctaccggatcctccgacgccgcagcggaaagccccccccccatccccccgccgagtcccg

SEQ ID NO: 397337 - DNA, 122 bp, Homo sapiens
gcggggcggagtcccgaagatgcaacggcagaagcagctcagggataagtgctgacggggcggggcattagggggcgggggccagtggactgcctgattggccaaatgaagaaggggcgtgg

SEQ ID NO: 397338 - DNA, 122 bp, Homo sapiens
agtgctgcgattacaggtgtgagccaccgcgcccagccgaattcgtgtttcttgaaagctcgccagatggttgggaagcacagggaggtttgggaaacgctgctcatgtgatccatttagac

SEQ ID NO: 397339 - DNA, 122 bp, Homo sapiens
gttaattttccaagaagcgctgagatgcagacatatgcccttgttcctctttcatagacgcggaaactgagacccacagaggttgaataggttgtccacagtctcgtagctaccaagtgaca

SEQ ID NO: 397340 - DNA, 122 bp, Homo sapiens
aagacatttacaatctggccaaatggccatgaaaagatgtttccagctgcaaaccagcagcgtccttagcttctctccttacctcatcaggcagaatctctgccaagctcccagctgcaacc

SEQ ID NO: 397341 - DNA, 122 bp, Homo sapiens
tactcaactcctggagagccttatcctgtgggaaagccaaagttgctgttgcctccagcacggtctcgctcaaaggactggagaggcaataactatgttaggtgatttcttagtaactgttt

SEQ ID NO: 397342 - DNA, 122 bp, Homo sapiens
gtgctcacaccaagcaaaaggattgaatctttcccaagcctgagtggcaggttttacccacggcggtttactggccatctctctgggggtgacccaaaggcctcttaaactctatgcctaca

SEQ ID NO: 397343 - DNA, 122 bp, Homo sapiens
ttaagcaaaaccaaacgcagcaacacgtcaccggggctttccccgtgctggggacaccgccgacagccaaggtcttgccccatccctgggccgtcagcaaacctggcttccctttgcctctg

SEQ ID NO: 397344 - DNA, 122 bp, Homo sapiens
ataaaggaagacgtaatgcatcagaggctggggttaaaatagcgttcgctaccactgaggcgcttattatgccaaactctgggcgaacgtcttgcggttccagtgtcttatttattcgcata

SEQ ID NO: 397345 - DNA, 122 bp, Homo sapiens
actctgactccagcacaacctccagtggggccagcacagccaccaactctgagtccagcacgacctccagtggggccagcacagccaccaactctgagtccagcacaacctccagtggggcc

SEQ ID NO: 397346 - DNA, 122 bp, Homo sapiens
tcctaaagtcacccagacctgccagttctgcccaggcgtccagacggcaggcatcttagacgtcgctgcaagggtctgctccagatggtgagcaccttagacagacgttgctggaaggcact

SEQ ID NO: 397347 - DNA, 122 bp, Homo sapiens
tgacaatctcctgtgccctccgcctcagcgtgttctgctaagggtgatatactatccattcggaagcttaggcgggcacatcctgctgcttcatgggctgggatggatgaagtgttgctgga

SEQ ID NO: 397348 - DNA, 122 bp, Homo sapiens
ggtctactccttcggcctcttcaccacgaccatcttcgccaacgcggggcaggtggtgaccggcaatcccacgccacacttcctgtccgtgtgccgccccaactacacggccctgggctgcc

SEQ ID NO: 397349 - DNA, 122 bp, Homo sapiens
cactgccactttcccaccgggtacctgggacgtgggtgtcgggagtctgaccaaaccgaccggcttcataattggaaaacagatctctcggcagaaacagaagccatgtatgagaggacccg

SEQ ID NO: 397350 - DNA, 122 bp, Homo sapiens
cttttcaggctttctgaaatacaaatgcagcagctcgtcgcagaccaacagtcccaatttcgcgtcttcaacccagtgctcaggggcgaaatgaatattcaggattttggcacgggaaactg

SEQ ID NO: 397351 - DNA, 122 bp, Homo sapiens
caagccccgttttacgttaaattctcgcaaccaccctgaggatggttccgtttttaaagccgcgttcctgccgaggaaacaatggccctcggggttaagacactgcccaacaccggccgcgc

SEQ ID NO: 397352 - DNA, 122 bp, Homo sapiens
tgggtgctggccttgggcctgaggccagaggacttgcctaaagcctggggctgtgtgggccgacctggctctgggctggtctggaacctggggcacgcatgaaacctggcgctccagggact

SEQ ID NO: 397353 - DNA, 122 bp, Homo sapiens
ccaggtggggaaagggctggccagaagtgaaagtccggtcggggcgccacacctaggctgcggattccgagagactgggaggctggaggcctgggaggcgtggcgggggcggagtcgccggg

SEQ ID NO: 397354 - DNA, 122 bp, Homo sapiens
tccagtcacacagatttgcacacacacccagccagggtcagagacacacagaggcacacccgtgcaaccacacacacacataaatacaaaagtacacccgtgcaatcagacatacacacaca

SEQ ID NO: 397355 - DNA, 122 bp, Homo sapiens
cggggcggggcgtggctttgtgcacgtcggcttccgggaagagctttacgatacattgaccgacattttacgacaggcgggattgttttgtggctgtcagctttccccgtggtctgagtttg

SEQ ID NO: 397356 - DNA, 122 bp, Homo sapiens
agctgctgtcccgggtgctaagcccctcactgcccgggactggcggggcctctccaagtgcggggcctaccaagcccaagcccacccggaactgtagccggccctcaagtgctgcgtgcagc

SEQ ID NO: 397357 - DNA, 122 bp, Homo sapiens
gcaaagagattctggtattcaggccggtctgatggtcagttaaagttcaatatcggaagacggatgaaatagagcgttatttctcgatatacagttaggcactcagccgtagatcttacagt

SEQ ID NO: 397358 - DNA, 122 bp, Homo sapiens
caggcggggcagccgggcagaggtgctcctcacctcccagacggggcggccgtgtagaggcgctcctcacctcccagatggggtggccgtgcagaggcactcctgacctcccagacggggct

SEQ ID NO: 397359 - DNA, 122 bp, Homo sapiens
gctttagagtttaaaggaaataaacaaagacctacttatttgattggccaaatgctcgctcgacagggttaaaatctaattaaagtatcttttagatgttccgtggttggactagcagctgt

SEQ ID NO: 397360 - DNA, 122 bp, Homo sapiens
cgcactcccacctctccccttccttgtcccaggacaagttgaccggcggattgctgctgacgctgacgcatgtcaagtttaaggcgtctcccgggcgcagtgcggatgcgttggccaggatc

SEQ ID NO: 397361 - DNA, 122 bp, Homo sapiens
gggatgcccaggcctcattgacccctgagaacgccatacacactggtctccatggcccagcgcaaacgcctaggtggtgaacacatgaggggaggagatggcagctgcctttagagcagggc

SEQ ID NO: 397362 - DNA, 122 bp, Homo sapiens
ttgtctcctgtggccaagctagtctcccgggtatcactcgggtccgctccgtcccgcccccgcaggccctgccgaaggccccgtcccggctgcagccccaccccctagccccgccctccctg

SEQ ID NO: 397363 - DNA, 122 bp, Homo sapiens
gtgaggttccctggggaactgcgcagggactgctgataaggcccacctcctctgctgcaccgtttttttctttccacaggtgcctctacgtctcctttcaagtcttaacttcaattctgggc

SEQ ID NO: 397364 - DNA, 122 bp, Homo sapiens
gagggggcctccggaagccatgcacagctttgggctgctttttctctgccactgggtcagcgccagggccttcttggccacgggccaactcttggcctcccctctcagaaggagcctgtttt

SEQ ID NO: 397365 - DNA, 122 bp, Homo sapiens
tatgtattaatttgtttaaccattaaaaataattgtattgcacaagcaggcccctttgtccgttctcgggttaaaagcctctggctgtgtgtgcgattcatggttaattctggaaaaaaaga

SEQ ID NO: 397366 - DNA, 122 bp, Homo sapiens
tgaaaggatgccgtaataaagccaagatagggctcctttgtgccttttgatggagtgagacggaatggcatcagattggggataactttaagcactatcgctgctatatgaggagataaaac

SEQ ID NO: 397367 - DNA, 122 bp, Homo sapiens
ggactcgcctcttttctcttagcgacagatgcgtcctggcaacagtcggcagagttgctgcggtttgtgcccttgcgatttctttttctgagagaggagagtcaaactcccacctccagctc

SEQ ID NO: 397368 - DNA, 122 bp, Homo sapiens
gccttatgtcgaatgaatttggaaataagaatgtcctcagagaccaggtgcagtggcggtcgcctgaaccccagggctttgggaaatgaacctgtgggaggatcacttgcgagcaagagttt

SEQ ID NO: 397369 - DNA, 122 bp, Homo sapiens
agagctcttcgtcttgtattcatggcagatgcacagcgagtgactgacacgttccagggacggcgaatgggaaagagcgcgggcggccgggggagggtgtgtagtggcagacggccgctggg

SEQ ID NO: 397370 - DNA, 122 bp, Homo sapiens
cggctgtgagcagaagggtcgtgagccaacctgtggtaatatgcacccctatcggaccttcgtttcccaccacatccctccacggaccttgttttaggcaatgcactgacccatgctccgat

SEQ ID NO: 397371 - DNA, 122 bp, Homo sapiens
tgagtcacgtctgactcagccggcgggcgggggatgccatggctctggcccagctgcattcggtgtccgggcacactgaggccactgaggacagcctcggggggctgcacggtgggctgtgc

SEQ ID NO: 397372 - DNA, 122 bp, Homo sapiens
cttattttccgcagcaacgtgtggaagggccggaacagctcggacatgtcttccaccttgcggtccaagttcagaggtccgtccgcatagaccacgaggccactgcatttgagacacaaaag

SEQ ID NO: 397373 - DNA, 122 bp, Homo sapiens
gttaatcaggcatatagatctagagcggggaatgtccgataccattccaggttatacaggcgagattaatgtcagatcttgggagcatttccagtacaggttaaaactgtcacgcggtcggc

SEQ ID NO: 397374 - DNA, 122 bp, Homo sapiens
ctcaccaacatctctcacccccacccactccccctggctgcggcagtcccagcgggaacccgacttaaagggacagccgccctccagccagccaaggctgcaagcgggaaccgcagggagac

SEQ ID NO: 397375 - DNA, 122 bp, Homo sapiens
cactcagagtgggagctttgtcaagaagaaagcactaccaacctatgctccaaggctgcccggctgcagccgctgtgtgttccaggccatgtgtctccctaggaaggaggcaatgctcatcc

SEQ ID NO: 397376 - DNA, 122 bp, Homo sapiens
gtgaggccgcagctccacctctgcccggtcttctcctcacttccgcagcacccccccccccgcaccccccgccttggcgtcactgcgctacaggccgcctgtaatttacatatgttttaacg

SEQ ID NO: 397377 - DNA, 122 bp, Homo sapiens
tgctctaacttttcttaaggttttgttgctagcccttcaagtgcactgagctatgtgactcggatggtctttcacacggcacatttggacatttccagaactaccatgagatggtttagacg

SEQ ID NO: 397378 - DNA, 122 bp, Homo sapiens
ctgtcactgggcgcgggggtgaagacatcgtcggttcctggggacgaagtctccttgctccgcatcatgatgcccccatcgtcgtcctcgtcctcctcagccacctttgcaggatcccggct

SEQ ID NO: 397379 - DNA, 122 bp, Homo sapiens
ttctctctccggctgggaggacctccctggtggaaaccttgggaagaccagccatctggtcggggagggttggggcttatcgggggtgggcgagcgagcggtcctgggggaggggagacacc

SEQ ID NO: 397380 - DNA, 122 bp, Homo sapiens
ccaggcgggcagcctccagcgcttagagaaaatgcgagaaaatcaggcccttccgtccggcgcacagggccagcacccagcattcgggcaaggtcagtacttgttggttgaaggagggaagg

SEQ ID NO: 397381 - DNA, 122 bp, Homo sapiens
ttctcctgaaaccagtacattggctcaagctgtaggctctgcctgcaggatgcaccagctcgtgtttgaattaaatacagtgacttgaagaaggaagaactctacagagtctactctggcaa

SEQ ID NO: 397382 - DNA, 122 bp, Homo sapiens
tcattttaaagacaggaacaggatggcctcctgcccgaagactttctctgcagccaggcccggggcaggagggtcagctgggcagcatccgggcccgcggattcctgcaaggtcgcgaggtg

SEQ ID NO: 397383 - DNA, 122 bp, Homo sapiens
gggggaagcggccagacaggaaccccgggctctcatggcgtttacagggtgttggggggccgggaggtggggaacagggagagtcacattcattcgattctcactggctccaggttgacagg

SEQ ID NO: 397384 - DNA, 122 bp, Homo sapiens
gcaggtcaagaatggtggtggggaagcggggtaggcagacctcggcgggggctgcctcggcgctctgctcctacccaaggggcccggttccctttctacccacagttccctttctatccgcc

SEQ ID NO: 397385 - DNA, 122 bp, Homo sapiens
atgatctacctgtgagcgcggcgctctggaaggtcacccaggctgcggacgccctgatagcggggtgacagcctgcaggattccccagctggtcactttcattcttggtgtgtgtgtgtgtg

SEQ ID NO: 397386 - DNA, 122 bp, Homo sapiens
gcggaaggaagggaaggctcagtccagacgggcagtgggaggaggtggcccccaactccacgggatcccggactcttcagctcagcggagagccccagagaacccgtcccctccctcccacc

SEQ ID NO: 397387 - DNA, 122 bp, Homo sapiens
tgctaaattttttccagttcttgcggcgagatcaggaatccctaaaagtagccgctcccccgccccggggccccgacagtgcttgggcacacaaaggctcctggggcgcagctggccctgag

SEQ ID NO: 397388 - DNA, 122 bp, Homo sapiens
gtaggaggtggagagcagtccagtttcccatcccactcccgcacgcttagccctcgcccccgactccaagctgggggcgacggtgcagattcccagctcatgaaagcagcccaggcgtctgc

SEQ ID NO: 397389 - DNA, 122 bp, Homo sapiens
cctaaacaccatgtgaccagagcacagagcctaggtgcaagcccaagggaaccttgtcaccgggtgacaaagagtgagtcagggggcccggtgtggctcagcagggagggagaaattccccg

SEQ ID NO: 397390 - DNA, 122 bp, Homo sapiens
agcacagggaaaaaagaaagcgggatccgctcgggacgcctgagcctcgattaagaggtgcggctcgggatttgtggccggggcgagagaccctcacgcagaagtccccaagtgcgcagggc

SEQ ID NO: 397391 - DNA, 122 bp, Homo sapiens
agcgccagcgctgccaccgccctccgccctcagtatcccggagcgcctcccccagctttccggtgtcgtagtctaggaaaccgcctccccaacgttacttccgggtagggccgaagccgtag

SEQ ID NO: 397392 - DNA, 122 bp, Homo sapiens
aaaaaaaaaaaattctccttccgagctcagcccccaaaaccacaagcttcacttcctgagcgttactgagtcgctcgcatagccctcccagacctgctcccaacccccgtcgggcggccggg

SEQ ID NO: 397393 - DNA, 122 bp, Homo sapiens
ccaatgggagcacagcagcaggaagtaacttccagacagtgccataccgccaagcgcatgcgccaaacaggctccagtgataaagcgcctgggagatgtagtacccagtattaaggtccacc

SEQ ID NO: 397394 - DNA, 122 bp, Homo sapiens
cctgaaagaaggggcgacatagcttccagttaattagtcaagaaatgaatcaagtcccagcggcctggcagaggctcttggggcgcgggttttgtgcaagccacaatggtccgtggggctct

SEQ ID NO: 397395 - DNA, 122 bp, Homo sapiens
atgcctgtaatcccagcacctttgggaggccaaggccggcggatcatgaggtcaggagatcgagaccatcctggccaacatggtgaaaccccgtctctactaaaaaaaaaaaaaaaaaatta

SEQ ID NO: 397396 - DNA, 122 bp, Homo sapiens
gtctggcctatctccacagtccccagagccccaggctatctttctgctgtggccagaggacgttccactggaacccttcacaacctacagccaagactcacagtggaggtctctgggcaagt

SEQ ID NO: 397397 - DNA, 122 bp, Homo sapiens
ccaggagctgactgacccgccgtgggcgaggcatcgctgcagcgtctgaagcctcttccgcggtcccagggcctccagaacccagccagggaccgtccgccaactcccgcccaccgcgcgac

SEQ ID NO: 397398 - DNA, 122 bp, Homo sapiens
ccgggcctgccctgcgctctcaacctaattcggcctcggagggtcctcccccacccagggcggcactccccaggccggcactcgcgccactggcgtgggactaaggctccctgcagttgggt

SEQ ID NO: 397399 - DNA, 122 bp, Homo sapiens
atgttggaataaggaaagcagggagaaatcctgtccaggtaaagtgacaacggtgtcaaacgctgcctactcatcagaggtaatacaaatgttaggtctcgtgaggtaacactagatgcctc

SEQ ID NO: 397400 - DNA, 122 bp, Homo sapiens
gggtaaggcggcaccgggaggctcggggggtcgcgtggcggtgggattgggacaccagcacgaggaggaccggaggatcgcgggccgggtaagagtagggggttcttgggcagcagaaatgg

SEQ ID NO: 397401 - DNA, 122 bp, Homo sapiens
gcttccatgtctcctccgctcccaggcctgggggagaaagcccaggagggaggcgtagagcgccaggcccttgtggctcccctggctccatgcaactgaactcagccccagaggatctctgc

SEQ ID NO: 397402 - DNA, 122 bp, Homo sapiens
ccaggcatgacgagacctgcacagggcaaactcctggggatgacgcgacgttgctgttaccgggaaaccggcctcgcagggcttggggaccaagcgagtctttgggaactctccacccacta

SEQ ID NO: 397403 - DNA, 122 bp, Homo sapiens
acctcatgatctgcccacctcggcctcccaaagtgctaggattagaggcttgagcaaccgcgcccagccggcaaagaccattctttaagccctcaaagcttcctgtgcttttggcttggtga

SEQ ID NO: 397404 - DNA, 122 bp, Homo sapiens
gagggagctgggttttaggaagtatcccagactccgtgttctgcggatgtggtggaaagacgtggggacgcctggggcgggaggggtaggggccgggccgcagtaacaaaggcctctccctc

SEQ ID NO: 397405 - DNA, 122 bp, Homo sapiens
agggaagatggtgtcctgcggccagcctttctgatgaacaacttttgggagtaacagatccggggaccccagagcacggcggccacgagagggcaccacagtcgcagaatcggaactcctgt

SEQ ID NO: 397406 - DNA, 122 bp, Homo sapiens
catttacatcggaaaaatgaatatcccttaaggcggagctccgcctaggtacatttggtgcggaacttgccccaagcagcaagtcgtggggaaatgtgaaaccagcaagaactgcccccagg

SEQ ID NO: 397407 - DNA, 122 bp, Homo sapiens
tttccgaaactgaaccttcttgcctgcaacaagaatccaagctttagggaacagagagggcgctgccgtgtcctaagccagtgctgctgaccaggtgcccagaggtttgagactatagacag

SEQ ID NO: 397408 - DNA, 122 bp, Homo sapiens
cagtccgtccaggctcttccaggaggaagaggcacgatacaagagaggaggggcaggggtcgcagcactgaacaccctggccggggttttgacagctgccacagtctctgagctccagcctc

SEQ ID NO: 397409 - DNA, 122 bp, Homo sapiens
gttttgcgatctctcctgggagtctgggtttggagtctggtcttagccggtagcaactgacgtggcctgaccacccggcccgtccaggtccacgggtgaggggccgcggtgggggtgctccc

SEQ ID NO: 397410 - DNA, 122 bp, Homo sapiens
gcttggccaggaggcccaacagaaactccagcagcagcagctcgttcccgggcccacggacgtggacaggagccaggagcccaggtcccaggagaccccggagctccctgtcggcctggccc

SEQ ID NO: 397411 - DNA, 122 bp, Homo sapiens
acagatggtgaaaaatttcctgcaggtggtaggaaaggggtccttctacccagcctatggcgaccccaagtggacaagcatgcacaccagcaggctgaaagggctagtggggatcctcccac

SEQ ID NO: 397412 - DNA, 122 bp, Homo sapiens
ggtcttgaggaagtccaaagggatttggacaaatgcaacttcatggggtaaagaatatggcgctcttggtgcaaactcttgggcatctgctaggatgtgagaacggtagtaatagcaggaag

SEQ ID NO: 397413 - DNA, 122 bp, Homo sapiens
gggtcgtagcgcggagggacccctgctccaggagctgccaactttatcgtgcatcgcagtcgcctgaaaggcttgttagaacacacgctgttgggcccaccctagcgtttctgcttcagtag

SEQ ID NO: 397414 - DNA, 122 bp, Homo sapiens
ttggggaggtttagtctgagacagttctatcttccccacgcgggcttgggtgcagttccgcggcttaggtagggggagaaaccaagatgtttatgcttaaaggaaattggttgagttttagc

SEQ ID NO: 397415 - DNA, 122 bp, Homo sapiens
tctcggggagaatctcatttccttggggtggtgagggtgacgggcactgtcttttggccccgcgtgtccgttccccggtctcccgcctcacccctctgcgaggtgaggaggggaaacggcga

SEQ ID NO: 397416 - DNA, 122 bp, Homo sapiens
tcccctatcacatggtattcccagtgtctcggtcttcacatggccactgtcttatcagaacgtgagtcatattgcattagagagacccactgtgctccaatatcacctcacattaactaatt

SEQ ID NO: 397417 - DNA, 122 bp, Homo sapiens
caagtaagacccaaagcggctacttagaagtgaaaacggttggggctacaagaggaaggccggagcggatttttccatagataaattgggccttcctttaatgttgctgttctgacgaaccc

SEQ ID NO: 397418 - DNA, 122 bp, Homo sapiens
accctccccccaagtccttgggaccacttgggtccccagagctggggagatggtttgtggcggctttgcctgctccaagaatgcgctttgcgctctcaacgtggtctacatggtgaggtttt

SEQ ID NO: 397419 - DNA, 122 bp, Homo sapiens
tccaaaaacacacaaggagagccctgccccagtccaagctgcaattctgcaagagctttccggggcctggggcacctcgaggcaggtcctggagagaagggaagcagatcctgcacagagtc

SEQ ID NO: 397420 - DNA, 122 bp, Homo sapiens
agtccaatttgcgcagcaagatccattaggcaggaagtgaggaagccagacgctgtcctgcggccctgaagcggggaactcactgtgggagtttgatgcctcaaatcaggagctgcggaagg

SEQ ID NO: 397421 - DNA, 122 bp, Homo sapiens
ggcaggctgtgggcagtcctgggcggaagaccaggcagggctatgtgctcactgagcctccgccctcttcctttgaatctctgatagacttctgcctcctacttctccttttctgcccttct

SEQ ID NO: 397422 - DNA, 122 bp, Homo sapiens
acgagaacgtgcacatgggcagggcccatgtaagtgaaaagttgggagcttatgcaagagcgattgggaaagaaaaaattattggccatgaaaatttacttgatgtggacaatgataagttg

SEQ ID NO: 397423 - DNA, 122 bp, Homo sapiens
cttcccgggaacctggagctgccctcccggaccccaggtggtcccctcctgccagctgcccgacctggagagcgggccagctgccactcactcagtctccctcgggctccacatacaaggaa

SEQ ID NO: 397424 - DNA, 122 bp, Homo sapiens
acacatgacggtcacaccatgggtgggactccactttatgcagccaagccactgagctcacgtggccgtgggtgtcaacatcccaggctccatttccaggaatgccagggacagctgggtcc

SEQ ID NO: 397425 - DNA, 122 bp, Homo sapiens
gcaaatcaagaaagggccgagaaagttgtgatcggctctgtcctgacgctcatctctctgcgatcgcgggcaactgcctggtggtatctccgtgtgcttcgtcaagaagctccgccagccct

SEQ ID NO: 397426 - DNA, 122 bp, Homo sapiens
catacacacacaccatatgtctgatctgatatatggattctagacaacttaggagaccgacgggcccagatataagatgcacattcacagcattcaacagactgaagcctccaaagaaaact

SEQ ID NO: 397427 - DNA, 122 bp, Homo sapiens
cctgtgcctccccagagccagatgaaacttgcattaaatctaagtaaaatgctgttgcaacgcaaacttagcttcaagaacatacaacttccagccaaatcactgctcccacgttcttctgt

SEQ ID NO: 397428 - DNA, 122 bp, Homo sapiens
atataacaaaatagaagttgcaaaactcacaaagtcccagtggaaagtcctgttcttagccgtcttttttgcatgtaacaggtgacatcggggacactataaatttaccaggaagaccaggc

SEQ ID NO: 397429 - DNA, 122 bp, Homo sapiens
tacctttccacttaggggaaatggttggcagaggagaaaataaacgattgcgacatgttacgaagaatgaggactagcaaagaggaaggagcttaggtaaacagtgctgctttatttctgct

SEQ ID NO: 397430 - DNA, 122 bp, Homo sapiens
taaggtgtgagtaaatgttttagaaagattatgtgctgcacagcagggcacctagatctccgttactatagggaatgcattagaagataaagtccaagagaaaactatgcctagcagataat

SEQ ID NO: 397431 - DNA, 122 bp, Homo sapiens
agattcggtgtctggtgagggcctgttccttatagatggtaccttctcactgtgtccctgcgtggtgggagggcctagccggggccttgtttacaaggatactaatcccattcacgagggct

SEQ ID NO: 397432 - DNA, 122 bp, Homo sapiens
gtccgtgcaggaaagaaattgggctgcgagcatcgccaacagaagccgggagccgtggcgcgcattatggacacgccgccctcgcgcgcagagactgctccagaaagggaaaaacgcaaaac

SEQ ID NO: 397433 - DNA, 122 bp, Homo sapiens
ttctcagccaagggtattaggaaaccaaatgccaccaaggcctggtccaagcttctcgggcgtggaacccagcaccctgcgactcgggcagaaggttgcgacaatgtctccagagcgggtta

SEQ ID NO: 397434 - DNA, 122 bp, Homo sapiens
tgtccggccctttgttctgcgctcgtgcgtgtgtccgggtacttgagctccctagcggtccgcctgtccgtctgtctggctgccgggtccctggagggcgcgtgggagggccgggcccgtgc

SEQ ID NO: 397435 - DNA, 122 bp, Homo sapiens
gcctgagaaaagccgctccaggagcggggtttcgggtagggagagccctccgattgggtccgtcatagggcggggcattaaaagggtagggaatgcctagagagcttgacctctgatagggc

SEQ ID NO: 397436 - DNA, 122 bp, Homo sapiens
ctttagaacattgctgttgttgcttatgtctctaatgttctcttgaatcttgacaatccccgaacactgctccccgctttatttgtttagtccagtcccagtgaaataaattagatgtcaag

SEQ ID NO: 397437 - DNA, 122 bp, Homo sapiens
ctttagagagcaagttaaacgttttagctaaattcatgtgctttgaatgaaacattcccacgctgtgcttataaacaactattgatattttctgtaacttcattccagaaattgtttgcttt

SEQ ID NO: 397438 - DNA, 122 bp, Homo sapiens
tgactgcaccttctttggggtgcctgcgggcccctgagatgcagtggggagcatgattgccgaggcttcgggcctggaaatgggtcctacccggccatgcgagggcaggggtggcccagagg

SEQ ID NO: 397439 - DNA, 122 bp, Homo sapiens
gcccatcaggagatgacaaataacacgaggggcgcctccatgcaggggatattgttgagccgtgaagaggaatgccactcctgtgaactcaacttgctctgaaaagtaaagtctattcaaaa

SEQ ID NO: 397440 - DNA, 122 bp, Homo sapiens
ccacacagtgatgatgcagagtctgctccaatgattcccaagacccatacgggttaattccggcaaaggaacgattccttgggttttagctcctggcctgggagtcacgcccagcttgtggt

SEQ ID NO: 397441 - DNA, 122 bp, Homo sapiens
caagttcctcctgcctgccgggggcaacgcggatgcctgagaggtactgctcgtgctcagcggggctggcggttccatcctcgaagggaggccaagcacccggggagacgaggactgtaacg

SEQ ID NO: 397442 - DNA, 122 bp, Homo sapiens
gctcagcacaaattctttctaaaattctaccaccaaattaattatatgcctttgtgggcccggggtagggatgtccagtggccttggcgccgtgcccacaaggcaaagtgcgtcctggaggg

SEQ ID NO: 397443 - DNA, 122 bp, Homo sapiens
atctccggcttcctggaggagaacgccaggcaggcaagctgggcgaactgcaggcagctgcggcggactcctaccccctccccagaactctctcctctgtgcgcacacatctggtgggggaa

SEQ ID NO: 397444 - DNA, 122 bp, Homo sapiens
gagcctccagcccagaggccggctgcccagttgcagcgcccgctgtctccatgtttaggtcgcctctagtgcgtccgtccccaactgggcccgggtggaagcgagaaccaggcggaggagaa

SEQ ID NO: 397445 - DNA, 122 bp, Homo sapiens
tggaggaacaggaggtgccaggggagtgtatggaagggtgcagtgcccgggacccccttgcgagggggcgcactcacaagagggactggatggagcggttggtccgcagagcctcagccagc

SEQ ID NO: 397446 - DNA, 122 bp, Homo sapiens
cctcgttgtccagcaggcccaggcccttgcaccggcgcacaaggaagtgcgcgtcatccacggaggtgaagccaccattgtcgggcttattcttgatatagcgcctcacggcctcccggccc

SEQ ID NO: 397447 - DNA, 122 bp, Homo sapiens
cgggccattctgcaaagagcaaagggctccgggttacgctgcggcgaacgatgcggaagacgccgccgccgccgccgccgccgctgatgctgaggctgccggggctgggagcgcggcggctg

SEQ ID NO: 397448 - DNA, 122 bp, Homo sapiens
gggggccagggagaggcctagttgcgtcgaggggggcaagcgcctggaggacccggcgcccgctccaggccctgcccctccaagtcccccgccccgcgccaggccccgcctctccagggccc

SEQ ID NO: 397449 - DNA, 122 bp, Homo sapiens
caggccggccagacagacggacaggctgaccccggcccgggggagcaggcgcagcggctgcgcaggtcccgccaccgccttctggccccaggcggcccctcagggcacgagctcttaggcgg

SEQ ID NO: 397450 - DNA, 122 bp, Homo sapiens
taccctctcttcaacttcattcattcatccaacattcgctgggggatttctacattgacacgccccggacagaagcctggggtaaagatgatcaggaacacgttccctcccgctaagcggct

SEQ ID NO: 397451 - DNA, 122 bp, Homo sapiens
agaaggccggaccgtgaaagcccggagggtctccgttcgggcaaaaatgtgggggcgggtcgcagcatttccaacgccccctggggctagtccattactgctcgagccagggccgccaaggg

SEQ ID NO: 397452 - DNA, 122 bp, Homo sapiens
cctctcttcacatacctccagtgcctgggttgagtaaagagggttgccacttatccagagcgcctgattcatccctgaatattgaagttcagttcagcttctaccgagtcccacccagttcc

SEQ ID NO: 397453 - DNA, 122 bp, Homo sapiens
agagcgcccatagacagacgcatgcgcctagctatccaaaagttccaccttacagtacttcggcgctcagagttgtcctcattgtacccctgccttggtttctcttccaaatataacagtaa

SEQ ID NO: 397454 - DNA, 122 bp, Homo sapiens
tgcaaataaaacaacctgtctaatcatttccatctcccttcctctgattcatttaaggaacgaatcaatgccttaattatgtgaaccattcagaactataatgtgtcacgactgggaacgcc

SEQ ID NO: 397455 - DNA, 122 bp, Homo sapiens
cgcaggtgccggggcccagcgcaggcgcacgggcgtcaggatgcggcctgttcctcccggcgtgctccgcggctcttggctcacagccgtcccttcgctggtgggaagaagccgagatggcg

SEQ ID NO: 397456 - DNA, 122 bp, Homo sapiens
caaaagcctccaagccgaatttcagcgccgcccgggctcgccaatttaggggaaaggctccgcccattccccgccccctgagacctggcaccggacgcgttgaggccccgcccactcccgtg

SEQ ID NO: 397457 - DNA, 122 bp, Homo sapiens
caccttggaaatgaagtttatgacgtcatcgttgcggctggccaatagaaaaagctcccgcggagaggtgttccttccccttcgactcagcttcttcacccgcgtgagcgagcgcgcgcgcg

SEQ ID NO: 397458 - DNA, 122 bp, Homo sapiens
cgacctcgtctctgagtatcagcagtaccaggatgccaccgcagaagaggaggaggatttcggtgaggaggccgaagaggaggcctaaggcagagcccccatcacctcaggcttctcagttc

SEQ ID NO: 397459 - DNA, 122 bp, Homo sapiens
ggaggcgggacctgcaggatcctggttagggtcttgagtacacacggctcctattggcctcggcagcagatgctctctgcaagcagttgatccacacgccagtggattttgtctcgagggag

SEQ ID NO: 397460 - DNA, 122 bp, Homo sapiens
caaataaagagaacagccatccatcagctggagaaagcctttcccactgtactctgtctgcgtggaaacacagtgcagtagcttccaacagtgcagacacccaaatgagaacgagtacttgg

SEQ ID NO: 397461 - DNA, 122 bp, Homo sapiens
accacacgttctcccatgtggaaacttctgacaagaacaggccgccagcagcaaagtccacgccaccacgactgtgacgtggtccatccagacctcgcctcccaggaggggatcccgccgca

SEQ ID NO: 397462 - DNA, 122 bp, Homo sapiens
tgagtcttaaattgcagggactgacctttggagctcctgcctgttaccgtcctctctggacgcttttattgtaccagggcgatccccagcccaactgtaccattcgagtccctactcctgcc

SEQ ID NO: 397463 - DNA, 122 bp, Homo sapiens
gaggaaacgtacggtgggcggccgggatcaaaatgaaagccataaaggaagcgcgctgatcgtgctgttccgggggtgttaatcacagtggatcccctgggagaggacacgtccctagtccc

SEQ ID NO: 397464 - DNA, 122 bp, Homo sapiens
ccccttttccctcccccccttttttccctccttctgctacttggatttttttagctgctgcgtcatgagcataatttatgcaaagagctttgccgcatgctgcaccgcccgcgccagccgcc

SEQ ID NO: 397465 - DNA, 122 bp, Homo sapiens
gcgccggcccgcgtgcccttatctgcatgtgcaggtcggctagatccatcactgcaggggcggccggctccggatctcagacccgccggaggccgggagggaggagcagagcgaggaggacg

SEQ ID NO: 397466 - DNA, 122 bp, Homo sapiens
ctcccataattcccacgtattgtgggaaggacccagtgggagataattgaatcatgggggcgggtctttcctgtgctattgtcatgacagtaaataaacctcatgagatctgatggttttat

SEQ ID NO: 397467 - DNA, 122 bp, Homo sapiens
tcagtgtccatagatcttttgaggggagagggaagggcaattccatttttccaaagaaaacgcttcccgtctcctgtttggagggtatgataagcccagccaacattcttggagtcgagcag

SEQ ID NO: 397468 - DNA, 122 bp, Homo sapiens
tcaaaataacaaacacgcacgacgtcttcgatcaccttcctgtaaaaccgggtttctagccggacccatgtcctcacagttcctgaatcaagttcaccgtctgtgcaagcgccacctgacag

SEQ ID NO: 397469 - DNA, 122 bp, Homo sapiens
ttgaccccaatccccaggggctagtccgctctccccttgcaatgcaagagacagagaacccggcacagggtgaaatgtgaacgttgtcggagactcccctggaaaaaactgccggagctcag

SEQ ID NO: 397470 - DNA, 122 bp, Homo sapiens
ctcagcaacatggataaatctcatacacattatgttgatgaaagaaaccaaggcccggtgcggtggctcacatctgtaatcccagcactttgggaggctgaagcgggtggatcatgaggtca

SEQ ID NO: 397471 - DNA, 122 bp, Homo sapiens
tagctggcatggtggcatgacctgtagtcccagtgactccagaggctacgatgggagaatcgcttgaacctgggaggtagaggttgcagagagccaagatcgcaccactgcactccagccta

SEQ ID NO: 397472 - DNA, 122 bp, Homo sapiens
ttcttttatttatacaaaaagttacttttttaaatataatttaagaacccctccaagcaccggcgtccgtttctgggttccaccaccaactaccgcccttttcactacctcaccccacaccc

SEQ ID NO: 397473 - DNA, 122 bp, Homo sapiens
agacctggccgcccgcaacgtcctggttgacagcaacctggtctgcaaggtgtctgacttcgggctctcacgggtgctggaggacgacccggatgctgcctacaccaccacggtgcgtcgcc

SEQ ID NO: 397474 - DNA, 122 bp, Homo sapiens
gaaaccggaacacaccatgaagcatgtcgggaatcgaaaggcaagctggttcggctggcccgcctggcacattcccgcgcatgctctgcgtggaggccgctgggaattgtagtttctagaga

SEQ ID NO: 397475 - DNA, 122 bp, Homo sapiens
tccgccaactccgcaggaccccgccgggaagtagagcccacccctttaccaatcaccgcccgttttctatcgaccgatggggcccatagccaataggaagagctgataccgagaggcccgga

SEQ ID NO: 397476 - DNA, 122 bp, Homo sapiens
aggacaagtccccagaggctgggacctgttcagggagcagccctgcggatgccaggtgcccgcgccctcagggtctcgaggtccgaggcccccgtccccgtgggcaccgaaacgcgagcggc

SEQ ID NO: 397477 - DNA, 122 bp, Homo sapiens
ccgccgccagtcccgcagccccgcggccagtgcgggcgcctcgcgaggtcgatccgggatcgtgccgccagtgcttcccccgtgtggcggggatccagcagcccagccctggcggcgatccc

SEQ ID NO: 397478 - DNA, 122 bp, Homo sapiens
gttacaggcaccactgcaatggagtctcttacagtggagatgagagattgggctcacctccgaatgcagcatagacaagtggaaatttacagccgaggagcagcataggaggtcggtggttg

SEQ ID NO: 397479 - DNA, 122 bp, Homo sapiens
gagggaagcacaggtggtgggagcaggcttggcagggaggctggtttctagcggggagctcgccttctccgctcagctatttccataaaccaattatcgccgatcatctcgggagattgagg

SEQ ID NO: 397480 - DNA, 122 bp, Homo sapiens
ccttcatctccttccctggtgactgcatttagttactgggatgtttgtggggccattggccgtaccttttattgggtctctggacccaggacatatgaactatgtggtactacagctggtgg

SEQ ID NO: 397481 - DNA, 122 bp, Homo sapiens
tgagcgcccgtgggaagcgcccagcagggtgcctggccctggggggactgtgcggggcaccggcccgtccaggtgttcacggcagtctgagagccggtgccacactgcctggtcccaaggac

SEQ ID NO: 397482 - DNA, 122 bp, Homo sapiens
cacgaatgtacgaaccttcccatggaaacattgcaaggggccgagcaaaattccgaccgtcgccagaagcgcagtcggagcgccgtcgccagtgcggattctgtccctaacacaggctctgg

SEQ ID NO: 397483 - DNA, 122 bp, Homo sapiens
actttggcattatgagaaagaagcatggatacataactagggttttgtgtatgactacaacgaaatgcagaatggtgtctccaaaaggtttccaattgctgccacaagaactgcttggtatt

SEQ ID NO: 397484 - DNA, 122 bp, Homo sapiens
tagtgttccggactaacgaacaaacggctcactaaattcaaacatgagtttcagcctggtcgccgagccggcgggtagaaaaaacctttcccctcctaaccctccgcagatgtcggccccgc

SEQ ID NO: 397485 - DNA, 122 bp, Homo sapiens
ggaagccggcgcggctcgactcccgattggccagaggcggcagaacggggtggggccaaacgacgcgcgttctgtggcgcgcggcctggcgggcgtgcaacggccgttagaggagctgaggg

SEQ ID NO: 397486 - DNA, 122 bp, Homo sapiens
aactccctaatgaggagaccgcatccccccaccccacccccgaggttacaggggagcctgcgtcatcccaaagcctgcctgggctgggttccaggaggccaggacatagagaggggggcctg

SEQ ID NO: 397487 - DNA, 122 bp, Homo sapiens
caccaacgactgccccgtaccgccccggtctgttcctcacatcaacaccaacgaccaccccggaccgccccagtctgtgccagcacccccagtgtgagatgaccacaaaatccagcaacacc

SEQ ID NO: 397488 - DNA, 122 bp, Homo sapiens
gcgctgagccaggccgggtacctgtctctggcggtgctcaccgcactgcgcggcctctgccgtctggctgggatcagaggagccaggccaactgcttctcattaagtcccaactgtggtttt

SEQ ID NO: 397489 - DNA, 122 bp, Homo sapiens
ctcttggaacttgctacctgcctctctgcaggcagtttcaacccctcactcaccctcacacgaagtcatctttctgagactcaggccttaaggcaaagatatctttaggtgtttcaattacc

SEQ ID NO: 397490 - DNA, 122 bp, Homo sapiens
taagaatgaagaaatttagtctcagagactgaatccctcaagcaaggttaacagctaaatcgtgggactggaattcaagtcctaaagcctacagttttgaatactactgaaatgacaagttg

SEQ ID NO: 397491 - DNA, 122 bp, Homo sapiens
cattgccctgcacctacccaccagatcgccgccctggtgggcgctcctggccctgtcctccgcgcttagtttgtcattgggcgcccagatccggaaccccagcctcgaagcttccggtggcc

SEQ ID NO: 397492 - DNA, 122 bp, Homo sapiens
ctggcctttctcgagggagctgtggagccagaaggaaggctcagaggatgccggcagccacgccgccccagtctcagtgatgagggtgtggggaagaagggcttccaccatgccaaaggctt

SEQ ID NO: 397493 - DNA, 122 bp, Homo sapiens
ccgggtgagacatttctggactgtgtttattctgattgtcatggctgggaacaggggactcgcagcaccaacaggcaagggaggtttgtttgggttattgtttatagtgcgctctccaactg

SEQ ID NO: 397494 - DNA, 122 bp, Homo sapiens
ctgtctcaaaaaaaaaaaaaaaagacttaaggagcagctgacaacatagacttcctttcacggagctggtcagctgatagagatgtcttggacatgctctggctggctaatctccatgttct

SEQ ID NO: 397495 - DNA, 122 bp, Homo sapiens
aacctgtccatcagcggacggacgtttgggctgattttatcttttggctatgatgaataacgcggtgatcaacattgattcacaagttttgtgcggacccgttttcagttgtcctgagtatc

SEQ ID NO: 397496 - DNA, 122 bp, Homo sapiens
cccgagagcagccatcctggatacgaggccgccatggctgacaggcctcagccaggatggcgggaatctctaaagatgcgggtcagcaaaccctttgggatgctcatgctctccatttggat

SEQ ID NO: 397497 - DNA, 122 bp, Homo sapiens
gaaggccctgaccctgctgagcagtgtctttgctgtctgtggcttgggcctcctgggtatcgcggtcagcaccgactactggctgtacctggaggagggtgtgattgtgccccagaaccaga

SEQ ID NO: 397498 - DNA, 122 bp, Homo sapiens
tccaatcaggttgagagatgacaacgtgctagcagccctcgttcactcttggtgcctcctcggcctcggcgtccgctctggccgcgctggaggagcccttcagcctgccgctgcgctgtggg

SEQ ID NO: 397499 - DNA, 122 bp, Homo sapiens
aagcctcccattcaccgcccctgtgcaagcaatccggggaaacggagagtgtgcgggccacggggatactcacagctggttaaacatgcgcttcatctcatcggtgatgttcatggagccga

SEQ ID NO: 397500 - DNA, 122 bp, Homo sapiens
ttagaggaactccactgcaccaattttgctactagacaaaccaggaatcttggatttgcgcgctttggtgctgacaggctttttcggccccagcgggctgccgtagcagagaagagcactga

SEQ ID NO: 397501 - DNA, 122 bp, Homo sapiens
ctcaataccattatttaaactgggattttcatactactattatttttactttgttgctgccgttggttgttgttgtctgagacagggtctcacacggtcacccaggctggagtgcagtggca

SEQ ID NO: 397502 - DNA, 122 bp, Homo sapiens
aggactctccggactgtggctgctcatcctcgtgatgaaacatgatctggaatcagattgcgaagcctcggcacaggaagggagttcagctcctgtttttaggccagagaaacgaggcccag

SEQ ID NO: 397503 - DNA, 122 bp, Homo sapiens
aaagaacattaaataataataaaaggtttctattcactgggaacctatgaaacatacagacgtacataggtaaacaaataaaaatcagggttccctcatatataaagcaaacactgacagaa

SEQ ID NO: 397504 - DNA, 122 bp, Homo sapiens
cccatttcacacctacaagctgtgtgagctcgtgtttcattcataacctctctgtgccaccgttctttcttctacaaaatgtcagccaataaccagtcaactacctaacagttgctggggag

SEQ ID NO: 397505 - DNA, 122 bp, Homo sapiens
cccaacaagaactaactctctcattaatttcctctggtagcaccatgtgtctgtctttgacggtgcttgtcagctccaattttctgtttatttctatgaacgtttgattaagtaaatgcctc

SEQ ID NO: 397506 - DNA, 122 bp, Homo sapiens
ttgtcacaaaggcttcaaacctcagggactgagaaaccttttaacactctgtttagtaaacgttaaaccctcggttgatgatctgagttcactctcccttagtatagatcaggctggtgagg

SEQ ID NO: 397507 - DNA, 122 bp, Homo sapiens
gggcctaaattgcatatgcatgatgatgacaaactgggaaagctctgtttatacacagatcggggtcagaaaaggccacagaaagctgcgacagggaaaggatggaggggttgattttctgc

SEQ ID NO: 397508 - DNA, 122 bp, Homo sapiens
ttgaaagccggagcaaggggacttgttttgttcctgcaccccgattttacttacattacccggggcctcgagggtgactcatagagattagccctgagcgtcgacccctcggcgccgccact

SEQ ID NO: 397509 - DNA, 122 bp, Homo sapiens
acagctctccaaatggcacgacacccgctaccttttggcttggagacgctgccccgaaggcggaacctccaggacagctacgtagcgtcccgagcactcagactgaagccagggcagccatg

SEQ ID NO: 397510 - DNA, 122 bp, Homo sapiens
gctggcatcacgcaattggcttggctgcagagtgagcccacggaagagggctctccgcaccgactctgtgactcaggcttctactaccaggctcatccgaggacggaggctgtcgttataca

SEQ ID NO: 397511 - DNA, 122 bp, Homo sapiens
cctagacagctcagcacaggacaaacagaaaggtcatcctgcaacatgcaatctagatgacgaagaaagataactcaaatgagacacctcagagacctctgttctccagttctggctctgat

SEQ ID NO: 397512 - DNA, 122 bp, Homo sapiens
cgccgctaaatttaaaagcatacattaaggcgtggttaggtagattaccctatgagagaacgagtaaaaaatatgcatgatggatagggttcaattaactatagcaacagacagagttccta

SEQ ID NO: 397513 - DNA, 122 bp, Homo sapiens
ggagctccccggccgcatcaacaggactgagaggcccgtctggcatggggcctgcggacgcgacgtgccctgatttccaacgcgtccagcgaggcagtgtccaggcaggcccaggtccaggc

SEQ ID NO: 397514 - DNA, 122 bp, Homo sapiens
gtagatgcggaagagaaacgggccgtcaggtgaagtgactgtcaggattccatcctggctcggccccttggaagacacatgatcttgcaggtaattagctcctgtaagcctccatttttccc

SEQ ID NO: 397515 - DNA, 122 bp, Homo sapiens
gtgcatggtgctgcaggttacacactgaagacctcagccagtggaaaacacaggttaggtcgtcaaaagactctggtttggtcagttggaaaactttatatgttttgaatgaacatttctag

SEQ ID NO: 397516 - DNA, 122 bp, Homo sapiens
attagcgctaagcggcccttcacgggtctgcagcccccggcctggcgcgctcggcttccgcggacggtcttccaccaggtcctcctcacagcccgcccggactttcccttggctttgaagcc

SEQ ID NO: 397517 - DNA, 122 bp, Homo sapiens
gggcggggccagaagcccggcggggttgggggcgctctcctagtgactcaaggcgcgcagcgctgggcgcaaagcgccagtctccgccttgcgagctcagagtgtgcccgctgcgccgccgc

SEQ ID NO: 397518 - DNA, 122 bp, Homo sapiens
aagatatagaaagctgcatggtaaaagttaacagtaaattcagaaaatccattacttcttcggagggcaggtaattcaaaaggagaaagatgtacaggtggctttagtaatgttctatttct

SEQ ID NO: 397519 - DNA, 122 bp, Homo sapiens
gcgagcgtttaagagagagaattctaggcacacctcttcctcccctccagagtgccccggcgtctttctagcctccgcctccaggcgggtgaggaggtgacacctgagaattcctccctctc

SEQ ID NO: 397520 - DNA, 122 bp, Homo sapiens
cccttcttttgcggtccgtgcgtacagccaagaggagacttcgggctagggagtccacagcgctcccggctgctcttgcgggtgaacgtgggtgcgggaggaacctggtagataatggacgc

SEQ ID NO: 397521 - DNA, 122 bp, Homo sapiens
cacacacccatcatgatggggcagactggacagcagtgtgagcacactgatgctcgacatcgcacactgcagccacgacgagacagcaccacacacccatcaggatggggcagacgggacag

SEQ ID NO: 397522 - DNA, 122 bp, Homo sapiens
ctgatggcaggtggcttcctccggcacttcagcttcttcactccttctgctgggctggatcgccggggacaaaggggttaatgtgtctgggggctgggagggaaggaggaagagcaggagga

SEQ ID NO: 397523 - DNA, 122 bp, Homo sapiens
tacgttgcccaggctgggcttgagcttctgagctcatgtgatcctcctgcctctgcatcccgaatagctgagatcacaggcgtatgctcttcatgctaatttagtgttagtttccctaaatg

SEQ ID NO: 397524 - DNA, 122 bp, Homo sapiens
ttccaggagggccagggaggctctgtatatacgtagaggtcacccaggcgtgtgtgtgtgcgcgcccccacgcccctgcccacaggcctgcattgaaggcgcttccgctccccggagagccc

SEQ ID NO: 397525 - DNA, 122 bp, Homo sapiens
ctcaggcagtgggcaaggcctgagaaaaagcaggctcatggcgataagtccctcctcttccggggtaggcagccgccacccgcgcccctgtgcccagagcctgcagcccccgcctccaggag

SEQ ID NO: 397526 - DNA, 122 bp, Homo sapiens
gccccgggatttaggaccaacatttgaagacccgaaggggtgaggaggggaaaggggaaacggggtcactaccagaccactgctaacggctggatagtgcccggctcactctcacgccgaat

SEQ ID NO: 397527 - DNA, 122 bp, Homo sapiens
gtagtccgtggcgcgggccgtggcccgcagctgtttgtgccggtcgataaacatgtgcaccgccagcaccccgaccatctcggcgatgatgaaggacagggccccgaagtagaaggaccagc

SEQ ID NO: 397528 - DNA, 122 bp, Homo sapiens
aaaagaacacgtcttcctttaagagaaataacacattgcttaaagaaatgaggctcctcacgagtgggaattgggatttgccagaaaaatggctgcaggtttcaagcgtcattggctctaag

SEQ ID NO: 397529 - DNA, 122 bp, Homo sapiens
aaaagcgcccggactctggtcccaagagcctgggcctccttaagccataagcgtctgcggcgcctcgctttgggccttcttttgggccgggccggaggcatcttctagaaggctcttcagac

SEQ ID NO: 397530 - DNA, 122 bp, Homo sapiens
tgtccgtgccgccgcaaccgcggcacacgcggcccgtcatgccggcgaccgcgcgggcagcgcccggagcctcccaagactctcaagccacccgagcctccggagcagcccgcgccgcccgc

SEQ ID NO: 397531 - DNA, 122 bp, Homo sapiens
cgagcggagttgtgcgtgtcgccgaaggggggtgggccgggggaggggaggttcgttccgcggagccccagccagaaccgggtgaggcttatccccgctgtctttccagtccagggccgccg

SEQ ID NO: 397532 - DNA, 122 bp, Homo sapiens
tactcctggtgtccacaaggtggcaggccaggcacttggatttgcgcagccaagggcgtgcgcagcccgcggccggaagcgtcccggcagatcgcagacggggtgttgagggaccccgcgct

SEQ ID NO: 397533 - DNA, 122 bp, Homo sapiens
tcccaactgtacacgattgttttatttcccccaaggagtccaaaaggcagatgcagatagcgggcaagtgctcgagctattttctcgctcactaccttctggataagtctttctggataaga

SEQ ID NO: 397534 - DNA, 122 bp, Homo sapiens
ggggagatacagcagtgaaccaaaaagaccaagtctctgctctcatacagtttaatttctcgtgggggcaagaagcaacaaacaagaaagccagtgattcagatatgatatgtcaagtggta

SEQ ID NO: 397535 - DNA, 122 bp, Homo sapiens
ccaagtctttggtcaattatcagtttctgtggaatcaatggttcaactgctttggtcacccggtctcgctggttgcaaatgactagaaacactgtcagagatctcgacaccaccacaatcga

SEQ ID NO: 397536 - DNA, 122 bp, Homo sapiens
tcgtaaatgtggctgtgtgctgcatacgcagacagggacgggcccggccataggcgtacacgtacgaatgcacacacatgcacaccccagctggcacagtaacggtgccacgtggataccaa

SEQ ID NO: 397537 - DNA, 122 bp, Homo sapiens
aacgctcagcccccgagcctctagctcacgtttgcgtctgcactgcctagtggaggatgccgctactcacatatggccgtgtacatttatgttcatcaacaccacacagaattttaaaatgc

SEQ ID NO: 397538 - DNA, 122 bp, Homo sapiens
tttacacccagtaagttgaacacaaaccggaggacagcatttctcatgtgggaagtacagcgggaatgttacagaaacgtgcctgtgaaagttaactaactgtggaccaagcagcattgggc

SEQ ID NO: 397539 - DNA, 122 bp, Homo sapiens
gcagggccacgcagcggtggtggcagagttgaggacagagcccgggtaggcgaggcatggcgcgtcaggtgagataaagccaggcaagccaatgggagggaccgcgtgagtgggttgaggcc

SEQ ID NO: 397540 - DNA, 122 bp, Homo sapiens
ttcctgaagcaacagagtcccttgtccttatctgactaaaatctttatttccaaaagtaacgcaattgtcttaagactcctttcttagaaatcttatcaaataaccagaaaagattacccac

SEQ ID NO: 397541 - DNA, 122 bp, Homo sapiens
gtcgcggccgggaaggcacccgagattgcagaggacagggcggagtcccctggggtcctccggctcggcggggcctttcttcaggctgcggaactcctcgaagtgggcgccttccctcggcc

SEQ ID NO: 397542 - DNA, 122 bp, Homo sapiens
catggttgttatagccctgagggctcagacatgggctgccaccactggatagggacagagcgaagagagcacttgattaggagtctggaaacctgggatgtacgcctgctggtgccagtgag

SEQ ID NO: 397543 - DNA, 122 bp, Homo sapiens
atgcggaggggatggcagtgccccagtctgaacgcagcctctctctgcatctggagggcacggggacttggcgcgtgtttggaaagggggatctgtttgtatcgaccagcagccgaggggac

SEQ ID NO: 397544 - DNA, 122 bp, Homo sapiens
cacctgtgcccgccgcggcacccgcccacagccccagcccggcctcacccaggagcgtcccgggcagcagtagccagcacagcgcctccccactcgtgcagagccccagcctccagagcagc

SEQ ID NO: 397545 - DNA, 122 bp, Homo sapiens
tgggcagagaagagagagctttgattctgacatgagagtcaaatttcaaaatgcaaagaacgaagtgtttaaaaaatggtaagtgactgtttaaatgaccaaaattaactggaaagcgatgg

SEQ ID NO: 397546 - DNA, 122 bp, Homo sapiens
gggcggtaaacaaggcgcgggaggtgggccaggcggcgcgcgcgggcggggagcagggggcgcgcgcgggaagcccctccgctcaccatcacgaccgacgcccccagaatcatgaagatcat

SEQ ID NO: 397547 - DNA, 122 bp, Homo sapiens
tgggtgatggaacgggctgctgataggactatgggactatgggctggtcacccctgctatcgtttttttttttttttttttgagatggagtctcgctctgtcacccaggctggagtgcagta

SEQ ID NO: 397548 - DNA, 122 bp, Homo sapiens
tcggtggcgcccttggcacacaggtaggacagcagcaggtgcacctcctcggctgtgggccgctgctcgggctgcagccagcagaactgcatcacctcgtacctgcgaggaggtcccccggg

SEQ ID NO: 397549 - DNA, 122 bp, Homo sapiens
ctgcacccccaccccccaacacccatacccccatccaggcaggatccccggttccgcccccgctttcaaccaaggaaagccccagctgcccggatgtgatgccactgacttgcgcactgggg

SEQ ID NO: 397550 - DNA, 122 bp, Homo sapiens
atgtgaaatcctttggagtcccagcatcatccaacagacaggtgctttccacatgggccacgaagccacctagaggagccagggaagggagaacaggtcaatgtcttctactggcctggcaa

SEQ ID NO: 397551 - DNA, 122 bp, Homo sapiens
gacctaacataaaacctttttactgaggttttagatatctaacctgtactctctgacgctcggtttccctatctgttgagtttggagattgtttctgccccacgagtattactggaggggtt

SEQ ID NO: 397552 - DNA, 122 bp, Homo sapiens
gatccctccacggcttcccccttatctagagcatctggccccatcttggccgtctctgctcgctcagagacataaacagaaatgccgtttggcaaaggcggccctaaaacatctttccctga

SEQ ID NO: 397553 - DNA, 122 bp, Homo sapiens
gaaccttcaccagcccagtaagaattgaggattcttagagccccaaagtggcgtccagctcgctcctctacaaaggactgaaggcttcgagcaaagtttagctggttaacaccatgatggac

SEQ ID NO: 397554 - DNA, 122 bp, Homo sapiens
cggagcgtcactgacaaccacccggaaatggtactatcgcttccggggctgcctagcgcgcggcgggaaattgtttcccagagcccggattcgtgaagcagttgagtgctgcagcggcagtc

SEQ ID NO: 397555 - DNA, 122 bp, Homo sapiens
gctgttatcttaaggtgtgcagtgactaggccaaggacatccggtggttagagaaggacgcgcctgcgatgccagcctcaagtctttgccttcctggaactctgctccagggtcgcacctgc

SEQ ID NO: 397556 - DNA, 122 bp, Homo sapiens
ctggggcggagcttggtcgtgagaagcctgggcgcgtggctggaaccgaagctgatggctcgctagctacggttgcgaggcggggcttcggtggaaggggccgggctctgttgcaaggggca

SEQ ID NO: 397557 - DNA, 122 bp, Homo sapiens
ggagtcggctgcaggaggagcctccccaccatcagcgtggccggcggagtgagccacgagcgcaagggcacccctcccagccgctgttgctgtggccccggccgccagcgtcccgggagggc

SEQ ID NO: 397558 - DNA, 122 bp, Homo sapiens
cggagtggctgtgacagcagcaatggcaacagcttctacacagtgggtgatgtctcatctcgcccaagagccctctaggtccgtggggccgatttgggattgctggggctgggggggtggtg

SEQ ID NO: 397559 - DNA, 122 bp, Homo sapiens
agaaccccagaagctgtgcggcctgtggcgggcggggctcctgcctcggtgtccagtgcgcgcacccagctgagccccgtagtggtgtcctgtgccagggactttcaggatctgatactttt

SEQ ID NO: 397560 - DNA, 122 bp, Homo sapiens
gcagtcaagcagctgccagggctagctatatcaaggcttgactccaggaggattcacttccgagctccaagctccctcatgtggctgacggcagggatcaagacctcattggttgttgccca

SEQ ID NO: 397561 - DNA, 122 bp, Homo sapiens
agacacatctttgcctcggtacttaaattttctccgcctctcttctggagcatctaaggtcggcatattgactggaagtagtaagttacctgcaggttggacagcaacaaagaaattttcag

SEQ ID NO: 397562 - DNA, 122 bp, Homo sapiens
cttttgctttatgtatgagaaagataggataggtggattccaccctgaagtgtaattggtcgagctgtttctatggttaatctaaacttcatttgattggtgaattccaggagtaggcatcc

SEQ ID NO: 397563 - DNA, 122 bp, Homo sapiens
tcctgcaatgcccagtccttctctccacacctttcctttcacagaattcccatattcattcgtttgtatgtctctggcattgtatctaagtaagtcatgttctcgccttgtttcccttttag

SEQ ID NO: 397564 - DNA, 122 bp, Homo sapiens
caacgcgatgcaatatgctgtcgcagaacaagcactgccaggctatgtagctgaacttaccgttctccaggcgtccatttccccaacctgtgaaaggcggggagggggttggacaagatcac

SEQ ID NO: 397565 - DNA, 122 bp, Homo sapiens
ctgaagcagccgcccacagcccagccccgccgtgccccgccgtgccccgccgtgccccgccgtgccccgccatgcgactcaaagccccattcaagctacgtaggagggtaaattgtcctttt

SEQ ID NO: 397566 - DNA, 122 bp, Homo sapiens
ccgctgctgctggggctgccgcggagccgggggtcatggagtgcggctgcagagagcggccgccggcaacagcagcagcagcaggaagcgtcgcggcgacagcggagcgcagcccgccccgt

SEQ ID NO: 397567 - DNA, 122 bp, Homo sapiens
gttgggccgggagggtctcccggggcggggcggaggaggagggaatgcaaaacagagcctcgtccccggaacccaagaagcagcaacgcccctcactataaattcggagctgcctcctcgcc

SEQ ID NO: 397568 - DNA, 122 bp, Homo sapiens
gagaccagaagggtggtgggtggcctggggagctgcagtgcgcagccccggggtgctgggcggccgcccctccctgggcgggccgtccactcctcacctcctgcttgcccagtggccgagcc

SEQ ID NO: 397569 - DNA, 122 bp, Homo sapiens
aacaatgggacagaattggaaccagtgaagccggaactcactacaccgtcccctaagtgacgccaaaatgcactttctaacgtctccggagggaagtgcgcttgcgcaaatgctaggttaca

SEQ ID NO: 397570 - DNA, 122 bp, Homo sapiens
gacagctcctgggccaagactcagggaaacattgagacagagcgcttggcacagaagtagcggggtcagggcgaagtcccagggcctcaggcgtggctctcaggatctcaggccccaaaggc

SEQ ID NO: 397571 - DNA, 122 bp, Homo sapiens
cgagaggggaggccccttggcactggaggcagggcctcaccaggcagacgtgccaggacccgcgtccctgcacacagctgcccaccggccagtggagtgggacctgctgcccctctgacagc

SEQ ID NO: 397572 - DNA, 122 bp, Homo sapiens
aagtgagccaccgtgcccggccgtgaatgtgacttgatagcccagatttccttccgtgaacgcttgttagttgtgaaactagcaaagttgcgcctctgagtttacgcagagccggctccgga

SEQ ID NO: 397573 - DNA, 122 bp, Homo sapiens
agcctacaggctgcaggtggcagtctttggggaacatgagctcagagctgccacagcttccggttttgcaagacaatgcttccttctcaaactcccacacctccccggatgttaccactcct

SEQ ID NO: 397574 - DNA, 122 bp, Homo sapiens
ctgcctttggggtcccctgaattagctaagcacatcactcaccgtctgcaataaagtggccgaggcgggagtgaataatgaaggtgcaatgtgcaatgtccgggcctttcaaggggctattg

SEQ ID NO: 397575 - DNA, 122 bp, Homo sapiens
gtctcgaactcctggacataagcaatcctcccaccttggcctcccaaagtgctgggattacgagtgtgagccactgtgtccggccaagaaggacctttagatgaaggatatattgcacccca

SEQ ID NO: 397576 - DNA, 122 bp, Homo sapiens
tgaactcctggcctcaagtgatccgctcatcttggcctcccaaagtgctgggattacaggcgtgagccaccaagcccagccaaggctgggtttatgagacataaaattcccattttacagat

SEQ ID NO: 397577 - DNA, 122 bp, Homo sapiens
aggggccggtgcattctcgccgctgttctttgcaacctgcaggggccggtgtatgtccggcgaggagccggggccgctgcgggtgcgtgcaacccccgaaggagacaatccctccacctcgg

SEQ ID NO: 397578 - DNA, 122 bp, Homo sapiens
ggtagggtttccttaaaggccctcttcatttactggacccaacagctttgggtatagtctcgggtagagactgccatatctttctgtttcctttgaatagcattataatgtttgagagaaca

SEQ ID NO: 397579 - DNA, 122 bp, Homo sapiens
gcagggcaggctgcacctcagagcggcgggagcagcggcgggtccaggaaacccctggggcgtacgggtggccccgggggggccgggggcggggaggcgggcggccggcaccgccccggccg

SEQ ID NO: 397580 - DNA, 122 bp, Homo sapiens
ctcaaaaagacaaggctctcaagttacactcttttgtgtgtctgcgagtcaaacttgtagcgcctactggggaccagtggaaacgtgatggtcgccccctgcgggaccaggtgaataaagct

SEQ ID NO: 397581 - DNA, 122 bp, Homo sapiens
gctgctgctgctgctgatgctgatgctgctgctgcggcctcaccatcaaaaagcctgcctcgtggaccccacgtcattcttcgctgcagcccctcactggagcaggtgctgggctgaattga

SEQ ID NO: 397582 - DNA, 122 bp, Homo sapiens
cagggttcctgtgagcatctgcatctctgcccccaggccctgcgtcacccccctcacctccggaggctacacatatctggagtagatgccaggcacagccccaccacagccccttgaaagga

SEQ ID NO: 397583 - DNA, 122 bp, Homo sapiens
ttacctgggtgctggtctcagacttaccagttttgaatccctgttttaaccactcactatcgatatgaccttggataagttacctaacctttctcttactgtccttttccgtaaaatgggga

SEQ ID NO: 397584 - DNA, 122 bp, Homo sapiens
ttcatgactgtggtcatttgtagtgtattctttgttgctgacggcttcctgggtatgcatcggacctgtattgcagcagttctcaaactttttggtctcagaacgcctttatattcttgtgt

SEQ ID NO: 397585 - DNA, 122 bp, Homo sapiens
tccttagtctcctaaagtgttcccagctggccatgcaaatgtcttctctgtgtagcgttccgtggatttttttttgtttcattttttaattttgtgtaaagataaggtctcactccgttgcc

SEQ ID NO: 397586 - DNA, 122 bp, Homo sapiens
aagcgaaagaaagacttacctttctcggaggcacgaaccaagcagcctagaagacaaatgcgctgctcggagagactgccgcggcaaccaactggacaccccaagagctcactcctccgcgg

SEQ ID NO: 397587 - DNA, 122 bp, Homo sapiens
gtgcccccggatgaagtgcggggagaggtgctggtccccaggcatggcaggcagcgcggacgttctgggaccgggagccacagtctgtgtttgggttggaggatttgtgtggtcagtaaagg

SEQ ID NO: 397588 - DNA, 122 bp, Homo sapiens
ttgagaggtggagcgggcacaggcgcctaccgctttataccggtccccccactccccgcccgcccgccctaggcacagccggagcaggtgacaggtgacaaaaccccgccccctcccctacc

SEQ ID NO: 397589 - DNA, 122 bp, Homo sapiens
ccggcccctgcagacttgccaccagcctggtccctgttccgccaagcctgggagtggggccgggcaggggcaggcggggcaggggcaggggcggggggcggggggcgggggccagggtggca

SEQ ID NO: 397590 - DNA, 122 bp, Homo sapiens
gggggccggaagggtggggggcgcatgcccaggttgagggcaggaagcggggcagcgaggcgtgggtgcgccgagcgagctgaactggagctgccgaatcccctccctccgcccctcccgct

SEQ ID NO: 397591 - DNA, 122 bp, Homo sapiens
gcgacaagagatcacaggctttctaggtctaccgcgcaccccgatgacgtcacgcggcgacgttctctgacgtcagagtttcctgcccaccatctttgtccctggcaaagtgggttttgcgc

SEQ ID NO: 397592 - DNA, 122 bp, Homo sapiens
cacccttccttcctgggcagaaacagcccagaggagcctgggctgatcccagcgcaccctcggccatgaccttgggaaaatcctctgtgcagccagcaagcagatagccattgtcccactaa

SEQ ID NO: 397593 - DNA, 122 bp, Homo sapiens
cacagagcacgcgggaaactccctccagtccacactgctggtaataaacaagtcctggtgcgtgcaccagatcagaacacagagcacgtggcaaactccctccagtccacactgctggtaat

SEQ ID NO: 397594 - DNA, 122 bp, Homo sapiens
ttatatagtctctgcagcattcatgtttttttcaaatcagattttaatttcaaagacacacgactattattgaagtcttatgaaaactaattgctcaattaactttctattgctgcatgaca

SEQ ID NO: 397595 - DNA, 122 bp, Homo sapiens
tcccagggagaaagcctggcgagtgaggcgcgaaaccggaggggtcggcgaggatgcgggcgaaggaccgagcgtggaggcctcatgcctccggggaaaggaaggggtggtggtgtttgcgc

SEQ ID NO: 397596 - DNA, 122 bp, Homo sapiens
ccctgacgggccctgggcctggggggcgccctgcagtgacacccctcgccctgggccagccgtgtgtcctcccagaagcccccttagtccctgggcggctactgttcttgcggccgcgattt

SEQ ID NO: 397597 - DNA, 122 bp, Homo sapiens
gtccctgtgcaccgacccgccagcgcgcagcctggtgagagcacttgtgcgccttgggatcgcctgggctgcttcttggcgctctgcctagggggaacctgcttggtgacaacagggctgga

SEQ ID NO: 397598 - DNA, 122 bp, Homo sapiens
cgccgcaggccccggagcccagcccgttgtctggccgcccgcgttccctgcacgctgggccgagcacacttgccctctagctccgtggcagccgcgcagccccactacgcccagccagcccg

SEQ ID NO: 397599 - DNA, 122 bp, Homo sapiens
cacggatgccgcagttttccaagtgcagcttgcccctcccacgtgataggtttctggcatcgcccctccttgctggcgattctggggaagattttaacgctccctggagccgtccccagtga

SEQ ID NO: 397600 - DNA, 122 bp, Homo sapiens
ttctgaaatgtacccctcccaacaggtttttctttgtttgagacagagtttggctcttgtcgcccaggctggagtgcaatggcacaatctctgctcactgcaacctcctcctcccaggttca

SEQ ID NO: 397601 - DNA, 122 bp, Homo sapiens
ggttcataagggtaaatcaagacaggtatgaaacctagagaaagtaaaaatgagaagtcacgatgctaggcagagagaatacgtgaattaaaataaacattcaatttttggagcaactcact

SEQ ID NO: 397602 - DNA, 122 bp, Homo sapiens
cacacgcggctcacctcctccaggctctgagctgtgcagagaagcgggccaggctcagcccgtactcggctcctcggcggcaaccgcactcatgcatgagaagagcggcgttcctgtaggtc

SEQ ID NO: 397603 - DNA, 122 bp, Homo sapiens
ctgagccttaactgtcactagggggctgctttccccaggacccaacctgctgtggacccccgctgacctttgacttctaggcagaacgtggccatgggacctgagaagcacttcctactcta

SEQ ID NO: 397604 - DNA, 122 bp, Homo sapiens
agttgggttaattggctatttaataaactcactgttcattacagagctaagtatatgcaacgttaattcacactgccttaacatcactgtacctatgttttttgtttgtttgttttaagaca

SEQ ID NO: 397605 - DNA, 122 bp, Homo sapiens
acccgttttctattggttaaatcatttttgacggacaggcccacgttattgacttcttttcgacgacgccagcgaccggaagcagaatagaggcgccagaagatgcgccatcaggatacaca

SEQ ID NO: 397606 - DNA, 122 bp, Homo sapiens
ggtcaacagatttcttctaatttttagttatggaaaatttgtaggatatgccaaagtagacggaagaatgtagtgaaccccacatgctgccaccgcacacaccagttgctgtgtgacccatg

SEQ ID NO: 397607 - DNA, 122 bp, Homo sapiens
tcatgccagtttacgcttctggctttgatatgtttactttttgagtactgagagtgacagcggtatgcaggacacattcttagcacctaactgaacccctccttgcccccaataaaacatgc

SEQ ID NO: 397608 - DNA, 122 bp, Homo sapiens
aaagcaatcaaactttcacgtagaaatgtcttcctccttcccaactctgaggaacatgggcggcttgggctgggccacatttctcctgtgaggctcggtacggccgagtggcactccctgag

SEQ ID NO: 397609 - DNA, 122 bp, Homo sapiens
cattatcttacgaatggattggcgtcgaagttaaggattgtcccttttctgattatattacgattggaaagagttaaacagattcgattctaactttcccccgggaaagtaggaattgtgaa

SEQ ID NO: 397610 - DNA, 122 bp, Homo sapiens
tgctcgcctaaggataggccgcgcctcctggcctctgagccattggcaggagggcgtgggcggggcatcgtcgtctggcactggccactcagaacttaggaactgaacctggccattggcgg

SEQ ID NO: 397611 - DNA, 122 bp, Homo sapiens
tgcactgagctgggcaggtcgtgccactcggtaggccacatcagctggacagatgcctttcgctctccggacaccatcagggagggaggggaacctcagggcccggagcacatccacagggg

SEQ ID NO: 397612 - DNA, 122 bp, Homo sapiens
cagccctgaaagaaactatacttcctcgtggccgcgcgcccctcgggccgcggcgcctcgcgccctccgctcggcctccctcgcgccctcgctccgcgctccgctcctcgctccggctccgg

SEQ ID NO: 397613 - DNA, 122 bp, Homo sapiens
actcccgtattccctgcgctgcaggtgctgcatgactgccagcggtaccgcagcaacatccgggagattggagacctgtgggtaggtccagccattctaggtcctgcctggcattcggggct

SEQ ID NO: 397614 - DNA, 122 bp, Homo sapiens
tttcacctggtgtacgttgtgattaggtttggcagtagcgagttcgtgaccacgttgtgacgtgctggcatatacttcctgagagttaaggatgggaagccagatctttactttagggcacc

SEQ ID NO: 397615 - DNA, 122 bp, Homo sapiens
tttaacagtgctctatatgtattttatgaactcccaaagctatgcatacgaatctttcatcgccgatccgcacaaagccagagggatgcgcagctcctggagccgagaacccgtagggcgca

SEQ ID NO: 397616 - DNA, 122 bp, Homo sapiens
aaaagaggtgctgatcttctcccttacatatttttatttctgcatttgaaatgctggcttcgttttgcctgaagccttagaataaatcattgctgttacattataaaaacaataattgtcat

SEQ ID NO: 397617 - DNA, 122 bp, Homo sapiens
gtaggtcagaatgtcttgggtctgtcctcgccacacgctcgctgggggacgcgtctgcctcgtagctctcctgccatctggattttgagcacactgataattttttggggactcttgcgtct

SEQ ID NO: 397618 - DNA, 122 bp, Homo sapiens
taacccagatatctataactaaatatccggtgggaatgactgcatagttcttccaaaagacgtagaccataatgttcatgagatttattcctatattagctaaaactgaaagcaactcaagt

SEQ ID NO: 397619 - DNA, 122 bp, Homo sapiens
agggttcccccatgttgcccaggctggtccgcacctcctcggctcaagggatctgccttgcgcctcccaaagagctgggattacaggcttgagccaccactcctggcccctttcatctctgc

SEQ ID NO: 397620 - DNA, 122 bp, Homo sapiens
gatttctaacatctatagaatttttacgaagtcacttcgctctgatattgaagaatacaacgctgttcttcttatcctgtatgttcaggcctgtttcagcttgcaagtaatacgggaagtga

SEQ ID NO: 397621 - DNA, 122 bp, Homo sapiens
agacggtccacccagcaacactcaaactgacaaagaccttcaaaattcagccggaaggaccgggggaaatagtcccttctgggtcatctcatcgccccgagacagatgacctggttttctaa

SEQ ID NO: 397622 - DNA, 122 bp, Homo sapiens
actgggccgtctggggccgggtgagtcctgacgcacctaaaccagcccacagcccctcagcgactcccgggcacggctcacactcactcagaatggaaggatgtggctgcttaggggcctgg

SEQ ID NO: 397623 - DNA, 122 bp, Homo sapiens
cggcgaccccgccagcgatgagggcgatgggctgccaggggaccggccatggttgcggggcgaggaccaggtgagtggctggagccgggccgcgaggaatatgggaatagtggggtcgtgtg

SEQ ID NO: 397624 - DNA, 122 bp, Homo sapiens
aaagcgaggcccggcgaggcagcgcagagggtagggtccgacctgggctcctcagggccccggggcaggctctctatccccagcagtgtttacccatcttggtctgtacccctccgggccct

SEQ ID NO: 397625 - DNA, 122 bp, Homo sapiens
cagagcccttcaggaggtggggaactgctccctgtggcctgcactccctccccactccctcgttttgtatattccttgggcaagggctgagtgcctgcttctgcccagctcagccagagtgg

SEQ ID NO: 397626 - DNA, 122 bp, Homo sapiens
gtcaccagccaccagctgcttacgcctcagccgctcttttaaatctgggaaggcccgaagcgccggcacatcctcaaaccgcaggttctgtgcggcctgcagctgttccgccaggttgctga

SEQ ID NO: 397627 - DNA, 122 bp, Homo sapiens
cccacgccaacggctgacctcatggtcctccgtggcctcgcctaggcttgcggcagccgacgtggcgttgttgcctaattaggttggactgtgccagccccagcggagcccacgcccggccc

SEQ ID NO: 397628 - DNA, 122 bp, Homo sapiens
tcttggccccgcccatccccagcaccatattgcgaactacaattcccagctgcctccatgcgtcggacccttcaaaatgggcttcccagcagcctctcgggcgaagagccccgcccttcgga

SEQ ID NO: 397629 - DNA, 122 bp, Homo sapiens
gccccctccctccacctgcctctctagctctgtgtccctggctgggtccttttctcctcccgccaggcctctagagcccacctctaattgtcctgatgggaataatgggggagcggggttgg

SEQ ID NO: 397630 - DNA, 122 bp, Homo sapiens
gcctggatctctgtggctggtgatggcaaggacagtgaaggacaggacatcattagataccgtcacacctggatttagcccttgggctgtcaaatgccctgtagacatacaatagcatgcaa

SEQ ID NO: 397631 - DNA, 122 bp, Homo sapiens
ctctcgggttcaagcgattctcctgcctcagcctcctgagtagctgggattacaggcgcgcgccaccacgcccagctaattttagtactgttagtagagatggggtttcaccatcttggcca

SEQ ID NO: 397632 - DNA, 122 bp, Homo sapiens
ctggcccgccccggcctccgagggccaggaagccccgagcctgggctgggaggccaaagccgggagccaggatcccacctcagtcccgcccagggtggcgcccctgtccctagcacggctgt

SEQ ID NO: 397633 - DNA, 122 bp, Homo sapiens
agggctctcctgtggatgaatgtatctcacacgctaatgatgaaacccttccctgagccccgcatcagggattctgagctcagggcagatgcgtcgtcgtcacggtctttgctgcagtcacg

SEQ ID NO: 397634 - DNA, 122 bp, Homo sapiens
cgcaggcgacatgttatctgctgtcagaaggaagcctgcctctttgcatgcaggtgtttgcggggcttgggaaggggctccccgatgacccgggcgggaaattggggcggccgcctacgtga

SEQ ID NO: 397635 - DNA, 122 bp, Homo sapiens
ccatgcataaaactcaggcatcctgggtcctgccctactgctgctttgtggtcagaacatcgtgagatcatgcagcctcaaggctgggaacatacgggatcaggtccaacagcaggttggag

SEQ ID NO: 397636 - DNA, 122 bp, Homo sapiens
cccgctgcttcccgctgcggcccgcctctcaagctccggtcgccgccgtcccggctcgtccgcgccgccacagctgccctcagcgccccgcggccgctgcaaatgaccaattcttaagatat

SEQ ID NO: 397637 - DNA, 122 bp, Homo sapiens
tttgtccattgtcccagtggatgttgtccttatctatgaagacttttgtgaagcatcctccgttattgatttatttctttaaaaacaaaaccaaaggagggcataggcccagagagcctggc

SEQ ID NO: 397638 - DNA, 122 bp, Homo sapiens
cgcagctgcagcaatcccgcgatccacaaagtaatgacgcccgcccagatcctccgcagccgtgcacaggggaggacacccaggtaggtctcagtgcgcagctacagcattcccgcgatcca

SEQ ID NO: 397639 - DNA, 122 bp, Homo sapiens
gtaattgcaggtttctaactgggcctaaggtgagctgagggcttgagcccctcagcccagcgggggtcccttttcatcccttctctgacagattgctttgtaaactttcttaggccttcccc

SEQ ID NO: 397640 - DNA, 122 bp, Homo sapiens
gctattgaagaagatctgagtcctgcagaaggacagcaaggagaaaaacaagacacagaacgggacagagaagaatagaaagctgactcagatgaattttgtgatgccaatgagtcctactg

SEQ ID NO: 397641 - DNA, 122 bp, Homo sapiens
ttcctggagcaggccttcagctgtgctggggcatctggcagaggacagacaatccagccccgatggattgagccgtggcctgcaggtcttcgtccaggttcgggtcttggggcggtccctct

SEQ ID NO: 397642 - DNA, 122 bp, Homo sapiens
aaacaagagtgacaggtttttgggtgcagcccttttgaagcgacattcctcacggcacttcgacctggacccacctgcctgggggataatggcatttaaccttgtatataagattatatcca

SEQ ID NO: 397643 - DNA, 122 bp, Homo sapiens
ataaatcaggccctgaaaccaggccccaggcatccagagatacagtcctcctcccgcatccggcccgcaccaggcaggtaaagacaggtaacataccttgctgtgtgttctgccgttctttc

SEQ ID NO: 397644 - DNA, 122 bp, Homo sapiens
agcccctcagggcccctctcctaggcccccaacccgatacgagccccagagggtcaacagcggcctcagttctggtaagctggaggggttatgggtgggaatatctccatccccagagaagg

SEQ ID NO: 397645 - DNA, 122 bp, Homo sapiens
tgcagtgctaatcaggggagagaagcatttggttaccaggcaaaaacattagggcggcttcgctggtacccctgtagtggagaaaagagcctctagttattttagttgaggtgtatttcttt

SEQ ID NO: 397646 - DNA, 122 bp, Homo sapiens
gtgctgggtgcagacccgtctgagtgcgctgagaagacgtcaggtgaaggccggggtagccgggtgtcttctttcttctgtgtccaccttcattttgtcctcttcctctttttgcccagtgt

SEQ ID NO: 397647 - DNA, 122 bp, Homo sapiens
ctacttagggcctagaagtgtgcctctctgaaaggacatgcccgtgtccttctgtattcccgagtttattttagaatgagtgcatatctcagggtgtatgttccttctagggcctgtgtgtg

SEQ ID NO: 397648 - DNA, 122 bp, Homo sapiens
aggaagggctgactcactgttcaccttccctgtacgttaccagctcgaggtctcaggatgcgttggaccctattttggtctccggaatttgtcatcatgcagtgctattttccccattatgc

SEQ ID NO: 397649 - DNA, 122 bp, Homo sapiens
gacccaggctggggctgcgcttgggctccgctgcgcaggggttcgcgcccgcgagggggccggaactcggcccagatagctactgctcgcagcccgcctgccagactccctcctccgcttcc

SEQ ID NO: 397650 - DNA, 122 bp, Homo sapiens
tgtgtctaattcatctttataatcttaacacagtgccaggcatatcaaaggccttcaatacgcgttgattgaattaaataatgccctgttgggccagaggggaacctgactccagccctggc

SEQ ID NO: 397651 - DNA, 122 bp, Homo sapiens
cggggcgccagtccagcgccctgcgggcaatgggcttcagcgctcgagcacgcgcatgcgcgggcctgtatctccagaggattcctcgggtcacctggacgccagcatctcagccacctgcc

SEQ ID NO: 397652 - DNA, 122 bp, Homo sapiens
acaggaactctttaccttcctcgtgttacccaggtcctgcggatttagctcaggcccctccgggccactggatctgggctggtctgtcagcctaggatccagggctccagggctccagggct

SEQ ID NO: 397653 - DNA, 122 bp, Homo sapiens
gttgggattacagatgtgagccaccacacccaggtgacagctaactttagaaggcagtgtcgcaccatttcctgccacacctctgcccatgccgtttcctcagccaggagcaccctttcccc

SEQ ID NO: 397654 - DNA, 122 bp, Homo sapiens
tgggtgcctaccgcagaccggccctgggcggcctcaccccacgctgcccactcactgtgacggtcggggtcaagccactgcggcaggatctcccacaccagccccaccccgcacctgctgaa

SEQ ID NO: 397655 - DNA, 122 bp, Homo sapiens
gagaggccactgtgcatggccccaggacacacacatgcggaaagatagacatcctaggaccgggacctccagcgaggctgacctcaggcatctcctctgtgacgatgtccacctgctgggca

SEQ ID NO: 397656 - DNA, 122 bp, Homo sapiens
gaacagggcagcggaaaaggcaggagtccgaggcccagggccctgcctctggcggctgggcgcccttggtcacattgttggtgctcagagcctcagttcccacagctgtgcagcgagaggaa

SEQ ID NO: 397657 - DNA, 122 bp, Homo sapiens
caggttcggagccctgccccgcgggaaggcagctaaggcccggcgagaaatcgagcgcagcgcctgttggctggcactgctgggggaggaacccagtacaccctccgcagccgctggcccgg

SEQ ID NO: 397658 - DNA, 122 bp, Homo sapiens
gcctctcctgttccttctcaggagtgcggagcgcggtggtgcgagagggcttggagggggcgctcaggcagggcgtgggtttccctcagattcaatgatcctgctgggctcggtggagcggt

SEQ ID NO: 397659 - DNA, 122 bp, Homo sapiens
gtggaaactcatcagtctcccatgttgctgccgtgctgagcacagtgcgagaaagccgtgcggagaatggttttattccccactcggtggtctggaggtgggtggtttttgcccgtctctgg

SEQ ID NO: 397660 - DNA, 122 bp, Homo sapiens
gggccgggggtgggcgggggcgggcccggggcggcccagggcggggcccgccgcttcccccgccctcattggccgctggcggactcacgtcacccgagctggtgctctcccccagcccctag

SEQ ID NO: 397661 - DNA, 122 bp, Homo sapiens
ccattgtggtcaaggtgaccgggcccttgtgctgcccccaccagaccccaagcacccctgcgctccggccaccctcggtctctagaacctgtcaagcttgtctgtacctcgaggacttctcc

SEQ ID NO: 397662 - DNA, 122 bp, Homo sapiens
cggaattcctccccttggtttctgaggggggctctgaaggagccagattaggatgcagagcgcagcccgggcgaccgagggcgaggaggcgagccaaggacatcagcccgagggcgcctcga

SEQ ID NO: 397663 - DNA, 122 bp, Homo sapiens
aattcttttttcttaaagaaaaaggttttggatttcggagcatttcggattttcagatgacggatgaactcaatctgtatatgttatgaggtagagggtccaaaattttcttttccagaaat

SEQ ID NO: 397664 - DNA, 122 bp, Homo sapiens
aatattcttcaccaaacattggcagagtcggcttggttaccatgataaatacctgcaagtcgttccctagaggagcctcatcctttccttagctacaccctttgtttctgctcttccttgaa

SEQ ID NO: 397665 - DNA, 122 bp, Homo sapiens
atgcaatcatcgtggagtgcaggggtcaggagtgtagacctaaagttggacagacccaggcgatcttggtgtggccactcaccagtggccttgagccagtgacttcttgtctctgagcctca

SEQ ID NO: 397666 - DNA, 122 bp, Homo sapiens
gggcaatcattcaacaaggatcgtgcgttaaggagtgaaccagaaaccgcgtagggggcgcgcctgagagcctgaaaacttcctggttagcaaatactgaggctggaaagggcctgaacttg

SEQ ID NO: 397667 - DNA, 122 bp, Homo sapiens
gggcctcgctgggaacagtagcccttggccgctgcagtggactctgggagttgtagtccgcgtgccctttgcggggcagagccgcggttcccgggcacaggggatggacgcgggaggtgaga

SEQ ID NO: 397668 - DNA, 122 bp, Homo sapiens
gatgcagctcaagaacgtgtccgtggcgctcgagttcctggaccgtgacagcatcaagctcgtgtccatcgatagcaaagccactgtggatgggaacctgaagctcatcttgggtctggtgt

SEQ ID NO: 397669 - DNA, 122 bp, Homo sapiens
actgacttcaaaaatgaagccgtacaccctcgcggtgaatgttacagttcttaaacgctgcgtgtccagagtttgttccttctgatcttcggatgtgttcggagtttgttccttctggtggg

SEQ ID NO: 397670 - DNA, 122 bp, Homo sapiens
ggggctggggggctcaggtttctgctggcggcttggcgggtgtggggttaccagccagctcggttacccagccggagacactaggctgggggggagggggtgggcacagggcagaccctggc

SEQ ID NO: 397671 - DNA, 122 bp, Homo sapiens
ttcttgtcccagccgtcgtcacacacggtgccccaacgccggtcgtggtacacttccacgcggccctcgtgcggacctgagccattcaccaggcggatcatcatcggggcctccacgccacc

SEQ ID NO: 397672 - DNA, 122 bp, Homo sapiens
atgatgtgagttgcccaagggaacaccctagggaaacgtctgaacaaggaaaagaggatccgggacctgcttgtatctgcgaaaaggagccaaaggagcaggcttaggagagctcataagtg

SEQ ID NO: 397673 - DNA, 122 bp, Homo sapiens
ggtccggtcctgaggctgcagaaccatcacctcatttcattttccctgcgtgcctccagacggcgctgcagctcgtgtcaatcttgccagctccgacgctcctggcgctgagctcctcactg

SEQ ID NO: 397674 - DNA, 122 bp, Homo sapiens
acagaaggcgcaggcctgcggaagggtgaggccagtggacctgggcaaggcattggcagacggtgtcatgctcccaggcctggtggagctgcctgcagcacagagaccagccctcctgagga

SEQ ID NO: 397675 - DNA, 122 bp, Homo sapiens
gagacctgcgcgaggctgtgaggctccccttcctcccctccaagcggttctcctggtgatcgccccttcgccacctctctagcctgggcaactgggggcgccccggacgaccatgagagata

SEQ ID NO: 397676 - DNA, 122 bp, Homo sapiens
gctgtggttttacagtgcactgtttggtgcattttacaatccccttgctagctacagaaacgttctccaagtccccactcgattcagaaagtatagctcgcttcatctctcaatgtaatata

SEQ ID NO: 397677 - DNA, 122 bp, Homo sapiens
cctcccctcggccactggacaacccacacatgagtgatttcgcagtctggggagtgtgcacgccctggcaggtcgggccagttgctggtgagcttatgaagtgtggtctcctccccggagct

SEQ ID NO: 397678 - DNA, 122 bp, Homo sapiens
gtgtgctggtggcggtgtggtcggcagtgtgagtggcacctgtgctggtggtggcgtggtcggcagtgtgagtggcgcgtgtgctgggggcggtgtggtcggcagtgtgagtggcgcgtgtg

SEQ ID NO: 397679 - DNA, 122 bp, Homo sapiens
gtcccctcatccctaaacagcaagccatctcccctcgcccgccccccgcccccccagtctcggagatctcagaggcaccgactgggaggtgagttagttcacgtccttctgctcggtggagg

SEQ ID NO: 397680 - DNA, 122 bp, Homo sapiens
cgtgctcaaagatgtcgttgacgaaggagttcatgatccccatggccttagaggagatgccggtgtcagagtggacctgcttcagcaccttgtgcaagtacacggagtagctcgccttgcgg

SEQ ID NO: 397681 - DNA, 122 bp, Homo sapiens
ggcgtggccgctgtgtgctctaccgggcggtctctggggccatccgcgtgtggggctgcgcgtgagtgcatgcgtgtgagcttgtgcttgtgcctctgctgggcacgactgtgcgcgccggt

SEQ ID NO: 397682 - DNA, 122 bp, Homo sapiens
ctgtgggaggtggctaattaagatgggtgttggttctgggagaatatggcaagctaggtccgaggtgcaatcctaaactcttgatgacctgcggatttcaaactctcacaggaattcatgca

SEQ ID NO: 397683 - DNA, 122 bp, Homo sapiens
gtcttttaccagcttttcaaagattcattcagtagtagaaacagccaaatgctgctacaacgcagaataaactgtcctaaaaaataaatacaacacacacacacatccagaatgttagtact

SEQ ID NO: 397684 - DNA, 122 bp, Homo sapiens
gtgtttctcagaatcctaggaaataagggcttctttctagaaggcagggccaggatgctgcgtgggtgttccctggcagagaggctctgtggccctcaggacttcatccttctgcaggcttg

SEQ ID NO: 397685 - DNA, 122 bp, Homo sapiens
tttaaccctatcaattaagtaaggagaaaactgaggtttcttgaagtaaaggaatctgcccgaggtcagatagctagaaagtgacagagttggaacctagcccaatttgtcaaggttttcaa

SEQ ID NO: 397686 - DNA, 122 bp, Homo sapiens
agggacgtcttgctgctactgaattgtggaagaggaggggccaaccccagcacagtgagccggtgaccccagcacttaccaccccaaagatgccaattccagagccgatggtggtcattgta

SEQ ID NO: 397687 - DNA, 122 bp, Homo sapiens
cagccctgaccagcagggggaaccgcgttttcgcgcttcgagaacgggagcttagagcctcggaaatgcattgagcacgcaggaaagccaaccgactgctcttttaagggcaggcaaatgtg

SEQ ID NO: 397688 - DNA, 122 bp, Homo sapiens
gaggccggtggtgtcttaccatgatactggccgagtctacacggtatctgctggtgcatgcgatacagtctcgctatgcattagaagctgccaggtacctgctgccagggaggaacagagga

SEQ ID NO: 397689 - DNA, 122 bp, Homo sapiens
tgtgtggagctgccttgtgctgtttccaccaggccctctgcagcctcttctccacccggtcgctgaagtgagccctgttatagcattacagatctgatcctactttctgccttccatttgct

SEQ ID NO: 397690 - DNA, 122 bp, Homo sapiens
ggccaagaaaaacctagacagacaggccttgctgggattcccattcagtctgttagcattcgatcataccctttcctccagtcgtatttctacatggctgtccatattttgttgaacctaaa

SEQ ID NO: 397691 - DNA, 122 bp, Homo sapiens
tcctagaggcatgaaaaggaccccagaagacactgcctttgtataatccgtttgctatcccgaggtgattcacggagtttctggggattggcgcaggctggcgctgggaacccccgcgccgg

SEQ ID NO: 397692 - DNA, 122 bp, Homo sapiens
tgtccctgcagcagctccttcggctctctgggcctcagtcttcctcatctataaaataggcgtgctgacactttccccgtagtactgtcttaagaactggataaagcacctgctttgaaggt

SEQ ID NO: 397693 - DNA, 122 bp, Homo sapiens
gccctagcgtcaagctcaccatgtggcctttgcggcacgtctgcttctctctgcctggaccgctcgggtttgaaggcccagggcgggccccagacgtctcaggggccatagaggcgctgctt

SEQ ID NO: 397694 - DNA, 122 bp, Homo sapiens
agaacagggagctctttgttactttcttcctggattttagattccagttcagcattctctcgttctagcattcgcaccttttgcaggtagttagcaaggcgctcgttcaagatttgcatggt

SEQ ID NO: 397695 - DNA, 122 bp, Homo sapiens
gggtgagagaaaaatggagctgggatgaccagtgcatcatttcaagtgatccagttgcttcgggcttagcaaacaatttgaagaaacaagtctgtgtgtgtgtgtgtgtgtgtgtgtgtgtg

SEQ ID NO: 397696 - DNA, 122 bp, Homo sapiens
cctgccggttttcccatgcgctgtgcctgtctgcactccaccaacggcgagcggaccttccggtagttaaacatcttcacgaactcttggactttcctgcacacacagagaagataattttg

SEQ ID NO: 397697 - DNA, 122 bp, Homo sapiens
gcgagtgactgacagaatacaaatggtgccacgaagcaccggggatttacggccgacccgcgctttccgatcggtttctctaccccggcccatccagccatccttttctttaatgaaacagc

SEQ ID NO: 397698 - DNA, 122 bp, Homo sapiens
gcgaggtcagattccaaccaacccaaatcacgcatcttctcctggcccttcgttttctctcgggagacatggcctccctactattgcataattactttgtgaagttaaagagcgttgggtgg

SEQ ID NO: 397699 - DNA, 122 bp, Homo sapiens
acagtgccctccctgacagactgaaaatcccaaactcctcctgcagcttcgcagcagagacgcaggagctgagggatgtggcccgcgccgaaaatggcagacaacaaggtgttgctaccttt

SEQ ID NO: 397700 - DNA, 122 bp, Homo sapiens
gaggggtaggggtgtgcaacaatggaggggaggtgcaacaacagtgactacctagcccttcgtctacaagtccgtgattagaagcagcagtaagcaatcagagcacagatctccaatatttg

SEQ ID NO: 397701 - DNA, 122 bp, Homo sapiens
accgtggcgcagctccgcgcgcccccggctgctgcgacccgggaggggggagccccggagcggctgcgcccggccccgcacccccggcagagcaggttagctccccctgggtggcaagcctt

SEQ ID NO: 397702 - DNA, 122 bp, Homo sapiens
ccacccccacagaggcttagcaagggcctctctgtgcagtcagctccggccaagcctcctcgagccacagagaacgtgaacatgaggattgcggtgagggcatgtgtggcacgttatttttc

SEQ ID NO: 397703 - DNA, 122 bp, Homo sapiens
tcattgctgggagaattccaaggagtgagtcagaaaataccacctctgcccctatgtcaccgatttggaaatatttgccttgaggggttgtcctcagtgacttctgagtccttgatagacac

SEQ ID NO: 397704 - DNA, 122 bp, Homo sapiens
attgaagggacggaggcaaggagatgcacaatccgggcagctctcgctcttctcggaaggcgaagggagtttggcggagaagacggggttggtgagccgaggcggggactccggacgtgctc

SEQ ID NO: 397705 - DNA, 122 bp, Homo sapiens
ccccggccgcctgcccgcggcctgtccggaggctccctaggaggctgcgctgggcctgagcggccgtgtccaccgcgcccagcccctatctccgcgtccacccctgcgcggtagcgggacgt

SEQ ID NO: 397706 - DNA, 122 bp, Homo sapiens
ctcaaatgatcctctgcctgggcctgtccaaagtgttgagattacaggcgtgacctattacgtccgacctgccttttgggtttttggtttttgttttgttttgtttaattgaaggttagggt

SEQ ID NO: 397707 - DNA, 122 bp, Homo sapiens
aaataaaccaaggggccctgacatgtcttaaaccctcctggtgtcagagaaaaccacgtacgtgcaatttcttccaggggccccttctatgggttcatcaaaacaatgagacttgtgactgt

SEQ ID NO: 397708 - DNA, 122 bp, Homo sapiens
tgggaaggaggtgtagcgtgagactggactgcccgcattgggtacatgcgcagtgccgctcgcgcgggccgcgccaatcctgcagcgccttcaacaggtttcgggcggcgaattccagttct

SEQ ID NO: 397709 - DNA, 122 bp, Homo sapiens
cttcccccttacctgccaggccacctggaaaaggtatttaatcaggtgaaggagaaaatacgtgtaaagcacttggaataataaggattttcaaaatgtcaggtattcttctatgttataaa

SEQ ID NO: 397710 - DNA, 122 bp, Homo sapiens
taccgaaacacctcgttgacgctctcgagactgcggcttctcgggcgagagcgcccagtgcgcagccgcattccgagctcgccccgccccaagcccagtctcaggctctctcggcccttgaa

SEQ ID NO: 397711 - DNA, 122 bp, Homo sapiens
acagtgccctccaactcctgctgtgccgcccagatgcactgggaaagtcacgtgtgcttccggctgccctctggccacactcatcagcagccctgacactgttacctaatggccagtagtga

SEQ ID NO: 397712 - DNA, 122 bp, Homo sapiens
tagggcgggtgaaactgagacacggcatgcccacacgcacccccaagcgagaaaaatagtcggtcacgtttcttattaggtgcctgatagtaatctgggctatttcattaaatgcattacaa

SEQ ID NO: 397713 - DNA, 122 bp, Homo sapiens
gagcgggggagactgggcgggccggactggccggagccggggacagggctgggggctccgcgcccccggtgcccgcgctgctcgtgctgatccacagcgcatcctgccggtggaagagacgt

SEQ ID NO: 397714 - DNA, 122 bp, Homo sapiens
ggggaatattggtttggtatgtgacagtttgataaaggcagtggtaggggctgtgggttccggattggttgatttgcatagcaaaggtgcgttcacaggcaggttgtttgctgtctctagga

SEQ ID NO: 397715 - DNA, 122 bp, Homo sapiens
caatgctccgggggctcccggccgcccgaagcgcgcgccgccaggctcccggccccggctcgggtcagcttcgggcccacctttgcctgcccacgcctgaaagtttcccctcccgtccatca

SEQ ID NO: 397716 - DNA, 122 bp, Homo sapiens
taaccgtctaaactgatatgcatttcaacagatgtgatggttgaaaagaaaacaagcccccgtataagttcagtggggtatcatttacttgtctgtagcaacagtacttgatacattattta

SEQ ID NO: 397717 - DNA, 122 bp, Homo sapiens
ctctcccttgctgagagtctccagcacagctgacggcagaatgaaggtctgacccccgcacgggccaggctttcctctcgccccacccgatcctctcacccctttgccctgtcttaacggcc

SEQ ID NO: 397718 - DNA, 122 bp, Homo sapiens
aaggcggggcgtggcggacgtgggccgggcggtcggtgtgcgtgcccgggagtgtgtgcgcgctgggggcgcgcgtgcctgtcggtggccccgcggcccggcgcggcggagcgtgcaagccc

SEQ ID NO: 397719 - DNA, 122 bp, Homo sapiens
gtgggaaagagtccagggccggcggggtgctatgaggcgaggacttcctgagccgaggaccgggtgggttgtgagttgcgaccagcctcgctgacggaccctactacctctttcagttccag

SEQ ID NO: 397720 - DNA, 122 bp, Homo sapiens
ggcaatttgaggtcaggaaagaactttctgtggtaaccaatgggaaggaactgccgtttgcggactgcagcgattgattaggtactttaaagagatcaactggcaagacaaatgacaaggca

SEQ ID NO: 397721 - DNA, 122 bp, Homo sapiens
gttcaagcctcctcagtatctgagaaaggcgcgaagcctctacgcagttgcgacccgaggcgagcaacaactagcgcatgcgcacgtgagcccgcggcgcacgcgcgctgacctgtggaagg

SEQ ID NO: 397722 - DNA, 122 bp, Homo sapiens
aaggaaaggagtggtcaagagctataacccacccagtgtgtagcctggcatcccatggagcgcatccaagcatggggtctaaagaaaaggtattgtgggaccccagtgggagaagagtatca

SEQ ID NO: 397723 - DNA, 122 bp, Homo sapiens
ccctggagaggtcttccaggcttgggctcagcacgcgagcacagggagcgggggtgccggcggcggaggcgcgtacggcccgagcagcccccagcccccagcgcgcacacttgggccagggg

SEQ ID NO: 397724 - DNA, 122 bp, Homo sapiens
tggatgcagtctggtgttacataaccggctggctgaggacgcaggtcccctgggcgctgccggcgcgctgtgaccagacacgcgggcgcgggtggggggttccgtccagcagagggcggcaa

SEQ ID NO: 397725 - DNA, 122 bp, Homo sapiens
ctggcacagccgccccacacggcacgtacgccgacatcccttatctaggaggtggagaaacgggcagggagactaaatacctcagaccaaggcagcctccgtctgccgaggcctctcctcat

SEQ ID NO: 397726 - DNA, 122 bp, Homo sapiens
ccagaggagcgaacgttcggactgcttggtagtttactagggcaaagtaccaccccaccccgagcgagcaagcggacctcaggaaaggggctccttctgtgtaaagtgatcggcaggccttg

SEQ ID NO: 397727 - DNA, 122 bp, Homo sapiens
tgcctataatcccagcactttgggtagtcaaggcgggtggatcacctgaggttaggagttcgagaccagcctgaccaacatggtgaaaccccatctctactaaaaatacaaaaatcagctgg

SEQ ID NO: 397728 - DNA, 122 bp, Homo sapiens
gggccgcgggcagcgtcgcctcacgcggagcagagctgagctgaagcgggacccggagcccgagcagccgccgccatggcaagtgagtcctgtagggaagccctattgaggccgggacggaa

SEQ ID NO: 397729 - DNA, 122 bp, Homo sapiens
accaaaaggcacgcatcaccacaccaggctattttttcccctctattttttgttgagacccgttgggaggcgcggggaggggggtctccctatgtcgcccagactggtctcaaactcctgga

SEQ ID NO: 397730 - DNA, 122 bp, Homo sapiens
gtctctggagctgggggcactgtgcatcagccaggtttcattgtcgtggaaaccaattaccgactgtatgcctacacgggtgaggcgggacagagggcccctggaagaggaggttgggggtg

SEQ ID NO: 397731 - DNA, 122 bp, Homo sapiens
ccctgcagtccattcttccatcacagggctggcagggtgagcctgaggctggtgtctaaacgtttcattgcacctgtcttccgtgccaccattaattctgtcaccttctagaactgggagga

SEQ ID NO: 397732 - DNA, 122 bp, Homo sapiens
accgccggaagcccctttcctaactcctggaattccctgtcactcagtcactccgccagccgttcagcaagcattaggcctttcaggcgagggcactgtgccaggcactggggtgccacaga

SEQ ID NO: 397733 - DNA, 122 bp, Homo sapiens
ggaaaccaggtaggttttaatttagtgcctaggctccctcagctgcagagctacctcctgcggtgggggaggggattaaagatgactcagacctgccctagcccagagaaactccgtttgca

SEQ ID NO: 397734 - DNA, 122 bp, Homo sapiens
taaccatgtggttgcgaggtatgagtaaaacatggttccgtcaagcaccatggaacgtcacgcagctttctacagcatgacaagctgctgaggcttaaatcaggattttcctgtctctttct

SEQ ID NO: 397735 - DNA, 122 bp, Homo sapiens
gggcaagtggccaaggagtggatgccacggaccagtgaggctccttccccaccgagtgcccggctggggccctgcggcgagaggtccggcccgggcccggcccctcctcagggcagtcactt

SEQ ID NO: 397736 - DNA, 122 bp, Homo sapiens
ttctacccagaatacaaagtgacctttttaaaaatgtaaatcagatcatgtaataccctccggtcccaatttacccttaagaaccagttccttatcaaggcctagaaggtactgcataatcc

SEQ ID NO: 397737 - DNA, 122 bp, Homo sapiens
tacaaccggagggcagcttaagttgcctgttttactcagggacagccctaaactgcctttcgccagaatcggacggctgagaatccagtgtcgtcgcggggtggtgctgccagctggctccg

SEQ ID NO: 397738 - DNA, 122 bp, Homo sapiens
caggtggccgcgcctggggcagcgggtgcacggggcacctgcgggaatcgacagaaatgccgagcacctgaacaggagagaaaggagctgagccagaggatgtccaggggtgtctcattttc

SEQ ID NO: 397739 - DNA, 122 bp, Homo sapiens
cccgggccctgcttccaaaagcagactccatgtcattcacataccgccgtggtgcacagacgtgggctgagagcggggagctacactcgggcctggagccggtgtggcctccgccaggttgt

SEQ ID NO: 397740 - DNA, 122 bp, Homo sapiens
gatgatttcactgtggaaataaaggttgggatgaaaggaaatcatcctgccaccggtaaccgggatggctgtgttcctccacctgccggatcaaggagaaagaggatggattcaatgggacc

SEQ ID NO: 397741 - DNA, 122 bp, Homo sapiens
gaataataacagcgtttaccaccatggggtaatgagatgagcaccagcaagcaatgtttccgttattcgtatcttctttatcaccataattacgcatgccgggcactgcaggaaccacttca

SEQ ID NO: 397742 - DNA, 122 bp, Homo sapiens
agggggaagtgcttccggggaaacgggccggggttggtgtttgtaaacttgcctcggtcccggtgggggcagccgcggcggtggggttggcagggtgtgctggggcctggaggaggcgccgc

SEQ ID NO: 397743 - DNA, 122 bp, Homo sapiens
ttctgccctaatgatgaaattaaatgatgtttaattttgtaattattaccaaataacatacgatatattacagcagtgcctcatggaaaacctgttccccgaggatgagtttaagaataact

SEQ ID NO: 397744 - DNA, 122 bp, Homo sapiens
gcccgccctggagagggccctgggggccgccccgccgagtctgcagtgggcactagggggcgccgtctaccggcttcccgagcccaccgctccctaccctggctcctgggggtgtggccgcc

SEQ ID NO: 397745 - DNA, 122 bp, Homo sapiens
gacggggccggtcagtggtggagatgcagggtaactacggtctgatcctgggttcagtctcgttctctctcccacctcatacctgatggccttgggacggattagcggtgctaacataacag

SEQ ID NO: 397746 - DNA, 122 bp, Homo sapiens
gaaaaggggggtgctggttggcagaggtgtcggggcaaggacaggagccaggagcgcaggcggggcccgacggcagccacccccggggccagacttggcgcgggtgtcttgaagatgcttga

SEQ ID NO: 397747 - DNA, 122 bp, Homo sapiens
cagaatctcaggccccttgggttggaaagccttgtgaacttggcaaggttgagtcaagttcgacagttcaaactggctacattcaggcttgaactctagctctccccccaaaggatgcgtca

SEQ ID NO: 397748 - DNA, 122 bp, Homo sapiens
attttccttgcttctttctagcctgcacctttaatgctgctgcttcccaacctgggcctccgcacccagtcatcttcctttttagccagtcttagcatcccagaagctccaggcggaaaagc

SEQ ID NO: 397749 - DNA, 122 bp, Homo sapiens
ctacgacacgcggtgatccaaacctctacgacatgtggtgatccaaacctctacgacacacggtgatccaaacctctacaacacactgtttggcagaagaggaaactgagggccaggtgcag

SEQ ID NO: 397750 - DNA, 122 bp, Homo sapiens
gcaggaggggaaccgcgcgtcccatcgcccggaccccgggccggcggcgcggccgagtcccgctgcttccgcactcgccccgggacccggacccccgccccaccgcgcccctccacctcccc

SEQ ID NO: 397751 - DNA, 122 bp, Homo sapiens
agagatgtaaaaaaattctcaaggactgtagagctggggggcagcctcctctggtgtgggcgcaggccaggctgcaggtgggcactgggactgaggcggtgtgtgaagaagggacaatggcc

SEQ ID NO: 397752 - DNA, 122 bp, Homo sapiens
tattcagctgcctgtcgactcccagggggtaggtacgcgatcatgagccggcatgcctcccgtgccccatgcccgtgcccctccactccgcctccgtgtctctgtgctcgtgttcacgctcc

SEQ ID NO: 397753 - DNA, 122 bp, Homo sapiens
cgcaacggtcccaaaccccttccagggactgggactacggaccctggtccgaccttctcgcgggcttcccactgcgccaatcaaatcccagaaacagtgagtgctagaggcccggctgctaa

SEQ ID NO: 397754 - DNA, 122 bp, Homo sapiens
aaaggaattcattggcctgcataactaaaaagctcaggctgagtccagggaccttctgtacgtttgtctctctcttctgtatgtctcttctctctgacttcccctgcattggcttcattctc

SEQ ID NO: 397755 - DNA, 122 bp, Homo sapiens
cttcctgggcttccaacattgattctgtaattcacaagagcccaggtgtgactcattgaccgaggtctcagcagcatgctgacgtctggctggtttcccttctgtgacccactgcaggttcc

SEQ ID NO: 397756 - DNA, 122 bp, Homo sapiens
gccggcgctgacggactgggggcgccgcccgcgcccgggaccgacccctctgctcgcggccgcgcctttgaggtaaagccccctgcgcgtaggtgctccgctgccagccccggcccggcggc

SEQ ID NO: 397757 - DNA, 122 bp, Homo sapiens
ccgggctccgcggctgcagttgctgttgtggccacaaggtggcactaagtctttggcggccgctggccttcccgaccgtggaaagtcggggccggtggggctaggtaggaagagcacactcc

SEQ ID NO: 397758 - DNA, 122 bp, Homo sapiens
attgtgctttcaaagcattgttaaatttttttactgtattgtgcaatcagaagttaagatcgcaaaagaacaaagcaaattatgattaatgtacagtagtaaccaggcagacaagatcactg

SEQ ID NO: 397759 - DNA, 122 bp, Homo sapiens
cagtaaacaagaggaataaatttcaacttggtctaggaatattcccctttaagtggcacacgctgacactgaaactgttaaaaacaactgaaaaatgtgcctagtcattagaatgtaataat

SEQ ID NO: 397760 - DNA, 122 bp, Homo sapiens
atagctcaagaaggcctatacaaattgtgatagcttggccatcttcagcatcttcaccatcgctgttcaggaatccagggtttttattgaaagacaagcatcagcttgcttctgtccagcct

SEQ ID NO: 397761 - DNA, 122 bp, Homo sapiens
tgacacagcaactgagagtgaaaggcagaatttaaactcagggactttacctagatcccacgatgtgagcccttgaggagtcccaggtccttcttatgtttgaggggagggcaacaggtttg

SEQ ID NO: 397762 - DNA, 122 bp, Homo sapiens
gggtgtagccggctgaaaactgcagaaggaaaattttctttataagctcctggagggcagcgacccactgagatctctgtaccgtgacatctgtcactcgctagaccctagtacagtgcgtg

SEQ ID NO: 397763 - DNA, 122 bp, Homo sapiens
catgtgttctacgatgagtatgtcttatttttgcaatcaggaaaccaaaccccataaaaacgtttttttctttaagtctgcgcaggtgtttctcaatgtactggcagcctgaggggagggag

SEQ ID NO: 397764 - DNA, 122 bp, Homo sapiens
ggcaagaaaaagaaagaaagcagcaaggtgggtctcagactgtcccgtagacagattagacgcttgccagttcctttctgctgcccccaaggttgtgccaataaagaaagagcaacaaacct

SEQ ID NO: 397765 - DNA, 122 bp, Homo sapiens
gtggcataagcaatagccctgcggccaaggtcataggcctcttcagggctaagattaggccgatagccactgtccatgaccccgtaggcataagtgttcccactacccgtggagaacatatt

SEQ ID NO: 397766 - DNA, 122 bp, Homo sapiens
agagtcatcagctcttcgtcggtgtctggcccagcctcctgggggctgggctggggtgatcggctcgtgggcagcacggggagctcctgcgggtggcactgcttccctggcttctgcgtttt

SEQ ID NO: 397767 - DNA, 122 bp, Homo sapiens
atcaccgaaaagcactcatgaagcgtgggaggacacagaactagctacagacaggagtctcgtccttccggagacagacacccaactcattcagctgcacagtgtcacagagaacagatgtt

SEQ ID NO: 397768 - DNA, 122 bp, Homo sapiens
agctgtcagtcaagcgtctttcacagccagccaagaccttttgatttctagaacaaacagcgatgtcttagacctggagcagatttgcaaaatcgagtgaaaacatctggctgtgctaacaa

SEQ ID NO: 397769 - DNA, 122 bp, Homo sapiens
ttccatccttctggctcagttcacttccaggcctttgcccgcgccagtccctgtacctgccggtctccccaccgcatcccacgggtgtcagaaatggggcccctcccgcaagcgcctcagtg

SEQ ID NO: 397770 - DNA, 122 bp, Homo sapiens
gggcacggacctgacccccagcacggacctgacccccagcacggacctgaccccagggcgcggacctgacccccagcatggacctcacccccagcacagacctgaccctcagcacggacctg

SEQ ID NO: 397771 - DNA, 122 bp, Homo sapiens
cgacttcacccggcgaggacagggcgaggcgctgggcccagaggtatgtttgaaacgattcgcgtatgtgaatctactttttgaattgtaaattttatgaaacctaaatacaaatcatgtac

SEQ ID NO: 397772 - DNA, 122 bp, Homo sapiens
gaggcaggaggccaggcctgcagaggccgaatggaagtcaagttcggggcctgcagaggccgcggaaagtcaaaagcggggcctgggaaggccgccgggaggcatgagctgggctgggctga

SEQ ID NO: 397773 - DNA, 122 bp, Homo sapiens
accgcagattctcatctcctcgctaccgtaagagagatgtaaagaatcagacgggttacgcgctcaggcaccctcatgaagcagaggacctgggcttaaaactcattcagtatcaggaaaag

SEQ ID NO: 397774 - DNA, 122 bp, Homo sapiens
ggccgcaggtgcggcttcttcacccgcggtgctggagttctctcaagtggaagcccaggacgatgaaaacctcataggtaggctgctgcttacacacagcagccgccacggcgcaaaataaa

SEQ ID NO: 397775 - DNA, 122 bp, Homo sapiens
actcccagaggacacctagatctcctgtccaggccctctcagtgtctgtaggcaggatagcgccctctgcatactctccccacccagctttccccctcactggcctcacacactaggagggg

SEQ ID NO: 397776 - DNA, 122 bp, Homo sapiens
agccatacctaaaaccgttgtgaagaaagctacacaaagggtgatctgaaataacctttgcgtggcttcttaagcctgcagacatgaggtagtcactgaaatagtgacacatgtctgcactt

SEQ ID NO: 397777 - DNA, 122 bp, Homo sapiens
cagggctggtggttttaaaagcttctctcaatgtgaatttgagtccaaagcgaggcgatgcgtgtgtttatatagaggcgggaggctgcgccgtgggcgccccgccagcacccccccgcccc

SEQ ID NO: 397778 - DNA, 122 bp, Homo sapiens
tgaggaacaatggactgagctgtacaacttatctgaacttagaagttagtttttaatactcggttcttagcacattgaattaaacaaccggtagtgagtaggtgatcttttatacatgtttg

SEQ ID NO: 397779 - DNA, 122 bp, Homo sapiens
tgtgtcccacagagaccagaaaagcacctgctgggcttcggtcccctctgttcccatgtgcgtctcagtgagcatcttactttaatgactgtgatcctagtgtttgaagtgacatgtttttc

SEQ ID NO: 397780 - DNA, 122 bp, Homo sapiens
ctggctcagagcctcccatggggaccctccatgctcttccaccttctgtagcacagcaaccggaggagctatgtttagaaggtggtagagccacgtgatggaagaactctggctccttcaat

SEQ ID NO: 397781 - DNA, 122 bp, Homo sapiens
tagtatgtacatgtgaaagtgcctttctattttagaggagttttagccttgctcttgtaccgttgccccgctctgtgccccacccccacctcctcctcccaattcctgctgcccactcgagt

SEQ ID NO: 397782 - DNA, 122 bp, Homo sapiens
cacgtgttaacttctaagaaagtaggtggggcccgggatgtcacctcatcttaaaacatgcggaaaccaaaaagagaaaaggctctcccgtcaagtcagcggagctgcccaggagagcggag

SEQ ID NO: 397783 - DNA, 122 bp, Homo sapiens
cccagcatcatgcaggaagctgcagccccgcagagttaggacagctcatttggcacccggcgagcccttcccaggcccgcagcccagaatagagccggggcccaagacgcccactggagaca

SEQ ID NO: 397784 - DNA, 122 bp, Homo sapiens
ggaacacgcagaagtagttgtgcaggcaggtgaccaggagggacaggacccacagcagggcgcacaccacggccgacaggcgcttgggccgccggcgccagtaccaggcggggaagatgacc

SEQ ID NO: 397785 - DNA, 122 bp, Homo sapiens
caccgcgacacgcggcagcgctttgccatgaaaaagatcaacaagcagaacttgatcctccgcaaccagatccagcaggcctttgtggagcgcgatatcctcaccttcgccgagaacccgtt

SEQ ID NO: 397786 - DNA, 122 bp, Homo sapiens
gagcctgtccccgtctgcacccccgcccagggtccccgcgatcacgcaccccgcggtgggcggggcctggccgaactgcaccgctcactcaggggcccctcgaaaccccctggagaccctcg

SEQ ID NO: 397787 - DNA, 122 bp, Homo sapiens
tttccagttctagtgcacccgaaagacaggacaaggttaaaactggtaagtaaatgtagacgagagttgtaaaattcttacaaggaaagtcttaagactgatgaacatttatattcatgatt

SEQ ID NO: 397788 - DNA, 122 bp, Homo sapiens
gtgtgttttaatattctaaaaattttcccaccaccactctttgtgttgcagagacagcatcggtgactacagggctagacaagaacatttgttcagactaaagaaagccagaagccaaaatt

SEQ ID NO: 397789 - DNA, 122 bp, Homo sapiens
tattagtaaagcgtttactaaattaccgaatcaaaccgaactggcttaggttctcaatagcgtggaaatccactgaaaataaatgaagagggcaaactacaggggctccgcaggttcgggtc

SEQ ID NO: 397790 - DNA, 122 bp, Homo sapiens
ggcaaggtgtggggaagttttccttcccgggcgaagaagctctgcggaactgtcattttccggaactggatgcttgcttcctggcggggttctgaaagcgaacaccgcggggcaagatggcg

SEQ ID NO: 397791 - DNA, 122 bp, Homo sapiens
tcggctgcctctccaggaagcgtgttcaacacatggaatcagggctccacccagacctgccgaggccacactcctggagtatctgcatccagagatctgcacgtttgtaaagctaaggggtg

SEQ ID NO: 397792 - DNA, 122 bp, Homo sapiens
aaagtctttcatgttagcacagattttaggcatctcgtgttcgggaggttggatctcagacgtgttttgagttggtcatagtgaaggacactaggtgtcaaattctagcgagaacaatttcc

SEQ ID NO: 397793 - DNA, 122 bp, Homo sapiens
ggggcggagcctcgttatcgggacgggcgtgttggggcggggcctaagtgcggggcagggcgggctttcggggatgcggtctggattctggaggaggcctcggcgcgcagctgggcgagtac

SEQ ID NO: 397794 - DNA, 122 bp, Homo sapiens
ctaaagattgagctatgtggaagcagggccttcttagcccttcctaattcacccaaagctcgatctgctactacaatgacccagtgaggactgtgtctggaccctcattcagtattcctctc

SEQ ID NO: 397795 - DNA, 122 bp, Homo sapiens
aggccagggcacagtcactgcgaggggaagagacaggacgccggggggcccgggtgtgagcgcagcctccatcttacggctgaaagggactgaggccgagctgggcaaggagaacttggggc

SEQ ID NO: 397796 - DNA, 122 bp, Homo sapiens
gcagctgtggttgtgatgtcctccagccctgaaatgggccaagatggcagagggcagcctcgggcctctccttagtgccagagctcccagctgggattagccccacccttccctacttagcg

SEQ ID NO: 397797 - DNA, 122 bp, Homo sapiens
agccatcaccacactggatcctttcaaggaagcggggcggggattattattaccatttaacggataggaaactcagcatcagcgaaagttcagatgggcttttaaggaagagtaggccaggc

SEQ ID NO: 397798 - DNA, 122 bp, Homo sapiens
aacgtgattccgttgtgtgttcctctggggtaagcaagtagcatttcctcccccagagtccgcggtcgggatgctgtgcaaacttgcctatctctgaaaacagacgtttctgcggtacccgc

SEQ ID NO: 397799 - DNA, 122 bp, Homo sapiens
aaagccatgggaatcatgcgctgattttcagggctatcgggatcaaagggagtacacatacgataggcctcccacagtctctcgtagaattgttctggactttcttcttttccctgaatgac

SEQ ID NO: 397800 - DNA, 122 bp, Homo sapiens
aggccccctgggaccggtagtgctgggcgtggcctcgggactacatatcccagtggcccccgtgcggcgactttagctgctgctgtctcagccgctccacagcgacggcagcggctgcggct

SEQ ID NO: 397801 - DNA, 122 bp, Homo sapiens
tacttgttgcaacatgccccagggagggattctttccattctgtgattcctttctatagacgagggatggggtctcgtggccagcaagcaaagtttgaactcagctctccgactccagaagc

SEQ ID NO: 397802 - DNA, 122 bp, Homo sapiens
gacaaatgttaatcttttgtttccagaaaaagttgggctttcccaagcagttctattacccggttcagaattgcttcatccaaaaatcatctgatggtatagatggatcctagtccttttca

SEQ ID NO: 397803 - DNA, 122 bp, Homo sapiens
gaggaaccctggtcccgaccggcgaactcatagcggggccccaaggccctgggtgctgtgcggtcagtcccgcccacgccagagttcctgccctcgccctgccgtgtgcttcccaaccaaaa

SEQ ID NO: 397804 - DNA, 122 bp, Homo sapiens
ttccgtcacgacgccctggtttctgcactcagacggccaccctgtgccacgcaggatgggcgcgggagtcacactccgctctgtgctctggccacgtggcttccttttaatctcaggtctcg

SEQ ID NO: 397805 - DNA, 122 bp, Homo sapiens
cacccggcccaacccagctatatgagtgacttgaaccaccacgggaacttgtccagcctccggcctgatctgcccaacatcagaccacttcatcctcccagcactgtattgtctttttaatc

SEQ ID NO: 397806 - DNA, 122 bp, Homo sapiens
ggcgacttcggcaaagggtgcgtcgccttgggcggcggttgtcagggtgaaggtgtgaaccgtctttcacagtctgttatgaaaaccgctcaaggtctgggcacggtagatcacgcctgtaa

SEQ ID NO: 397807 - DNA, 122 bp, Homo sapiens
gagcaaaggggaacagagacctttaatgagcttctactaagtaccgggagttccgcggggcgctttgcagatcccggggaagttcagagaatgaagttttcttttgcaaggacaaagtaaca

SEQ ID NO: 397808 - DNA, 122 bp, Homo sapiens
tctcgggtggcatgggtttaaaatcagacggtgggatcggggacgaccccttctcaatcccggaggtctcgggtggcatgggtttaaaatcagacggtgggatcggggacgaccccttctta

SEQ ID NO: 397809 - DNA, 122 bp, Homo sapiens
ctgggcatatgttcctcaactcacatcacttgcagcagaggaggagaacagagcagggagcggggttctgtaactgcaaacacagctgcttttgaggaagcaatttctaattaattcactat

SEQ ID NO: 397810 - DNA, 122 bp, Homo sapiens
gagagggagcaggcgaggatgcgggcccagcagagcctgctgggccactggaagcacggccggcagaggagcctgcccgcggtgctccttccgggtggccccgaggtatggaccttctgcgg

SEQ ID NO: 397811 - DNA, 122 bp, Homo sapiens
ctgtttatggcgggttgttttcctgccgtctcttctcttcactgtgatgcgcctactgtgcgtattttgtccacgctggcaatgcagccagccccagctggtccccagtttgggaccttatt

SEQ ID NO: 397812 - DNA, 122 bp, Homo sapiens
gacctcgtccaccaggtccgccaggtcgggcaggggctcgggtcgctccacaaggatgggcgcgaagggtcccaccagccagggcagcggcacggcctgcaccaccagctccagcagctcgt

SEQ ID NO: 397813 - DNA, 122 bp, Homo sapiens
ggcctcggcattggcagacttccagggctcggggcccgaagagatgaccttccgaggtggcgacctcatcgagatccttggggcgcaggtgcccagcctgccctggtgcgtgggccgacacg

SEQ ID NO: 397814 - DNA, 122 bp, Homo sapiens
tgatgctacagtgagacactgaccccaagggctttagaggacacaacacagaaatctgctcgattgataaatatccatcttagttcttactttataaaacccagaactaagtaacaagacat

SEQ ID NO: 397815 - DNA, 122 bp, Homo sapiens
cgcgatacgcaagtcggggttcttgggcagaccctcctcctccaggttctccagcggcatcgcggcgaaggggacagcggctgacaggacacaacttggttacgaccggctgcggcagcgga

SEQ ID NO: 397816 - DNA, 122 bp, Homo sapiens
aaatcatcaaattataacacaacgtgcagtgagggccaaactgttaataataatcataagcgacttttactgagggtttcctcagcgtcacacactgggctaagcacattacaagccctcac

SEQ ID NO: 397817 - DNA, 122 bp, Homo sapiens
aggagccgccggcactgcgcgagtgggagggctgggcttctcgtgtactcctcaaactctcgcgaggcttcgggcggctttcttcccgagggcggcacgagggctgggcggtggggtgcggg

SEQ ID NO: 397818 - DNA, 122 bp, Homo sapiens
ttctcctctcgagccttggacaatgttccctctcttttcttgctctcgaaaaacttaaatcgctgtgatcagattctgggacacttaacgttatcttctcaaagaattttggcttttataaa

SEQ ID NO: 397819 - DNA, 122 bp, Homo sapiens
ggagcaggcgggcggggtcccgcggggccggctgccgtcagcgccccttcccggcggccgcgacccctccccgctgacctcactcgagccgccgcctggcgcagatataagcggcggcccat

SEQ ID NO: 397820 - DNA, 122 bp, Homo sapiens
cgaactcccggggaggagactgggtcagggacacctgcggaactcggcgtggccccgacccgccggcctcgggcgcggaggggtgggcaggttaagagagcaggaggagggacctgcgtcct

SEQ ID NO: 397821 - DNA, 122 bp, Homo sapiens
caatggctaaggagtatagaaaggatcattatagtgtgtgtctctgtgggtcctatgttacggcaagatgaaacaagcttattaggctctgtcttttaagggcataccagttgaaagagcat

SEQ ID NO: 397822 - DNA, 122 bp, Homo sapiens
gaagtcaggaatgacactaatggctccttcccctgaatctgacacccagcctaaagagcacgagcaggcccggcaggccgcgtggccgggtcccatgtgctccacctgaggccgctctcacg

SEQ ID NO: 397823 - DNA, 122 bp, Homo sapiens
ctgccggaagggagtaggacactcactcgtttggggaaacagtagcctggtgtggaggtccgggcgggtgctgggaaccacgagggcagcgaggttgtcctggcagagtaaatgttcgttgt

SEQ ID NO: 397824 - DNA, 122 bp, Homo sapiens
ggcttcctccccctcctctgttttgattcgagtgaccacgtcactcttagccacaagacccggatctgccggctcccgcgggcggcggcgcaacagattgcagcgcctggagactccagctg

SEQ ID NO: 397825 - DNA, 122 bp, Homo sapiens
tctaaggggcctctgctcctgccagtggccaggccaactgctcactgcgccaagccaccacgtagacacaggtacagccctgccagattttctggtttatcaagaggagctggaaatgtggt

SEQ ID NO: 397826 - DNA, 122 bp, Homo sapiens
tgtggtgccagtaggcaaggcgatgcttaaagaatgacagggacatgtctaaaaaatagacgctggcttgcagggctcccacgggccaaacgggggataacttgaacatcaaaacaagtaat

SEQ ID NO: 397827 - DNA, 122 bp, Homo sapiens
gggtcctgatggtggtaacaactgctgatgcccatcttggcctggggcactgagatcgcccggagatcacagtgttagcttcagggcggggtagaaattagaggataggggatctctagggc

SEQ ID NO: 397828 - DNA, 122 bp, Homo sapiens
aactgtctgtttagcctttcactgggtctctaggatgaaagtccaaactcctctcaaacccgtcaccttgggttcttgcccacagcttccacctcacctgcggccactccctatggacatcc

SEQ ID NO: 397829 - DNA, 122 bp, Homo sapiens
gagtccgcgcctggcccacactgccctccgccgtcctgggaccaggcccacaccgccctccgccctcccaggaccaggtaggactgaggctctgtgggtctgacccacagcgtctgggaggt

SEQ ID NO: 397830 - DNA, 122 bp, Homo sapiens
cttctcacaatgtgacacaggagacaaaggtccttagctaagggtggggagggaggaatgcgggaaagtcatctggcagaaaagaggaagacaggagtgggaaaacatggcaggtctgccag

SEQ ID NO: 397831 - DNA, 122 bp, Homo sapiens
cttaaaagacatttcccagtgcaaacagagctgttgcttccaccttttgtattatttctacgttgttaattcttttgtaaagtggtttagaccacattgattaactgacaaacactccacag

SEQ ID NO: 397832 - DNA, 122 bp, Homo sapiens
ccagatattgacgacttcattgtggatgatgatggacagcctctgaaaaaacctaagtggcggaaaaagcttcctggatacacagacgcgtgagtggggtctggtacaaggtggggataaag

SEQ ID NO: 397833 - DNA, 122 bp, Homo sapiens
tctgcgccctgagtgcaccgagctcacacccggcccagcccgagtgcacccgagccctcccgctcacacccggcccggactcacctgcagctgcagcagcccctgcacctgtagcgtgaaga

SEQ ID NO: 397834 - DNA, 122 bp, Homo sapiens
ggacagtggtcacagtcactgggcaggagtaaagccgagggagggtggggcacacggacacggccccatcccctgctgcatgcactcgcatgcatctccctgcctgtccacaagggagaggg

SEQ ID NO: 397835 - DNA, 122 bp, Homo sapiens
tgtaatgtcttcactggaacaatgaatacagctcttcacacctgatacaaaaatgtgcaccgccccccccacccccaccccacctggccccttccccataccctgctctttatcaatgtgct

SEQ ID NO: 397836 - DNA, 122 bp, Homo sapiens
gggttggggaccacacggcccccaggccccggccagccgagaccattagggacatggtgacgataacactccagaagcgaggagaagatcgccgcgactggcggcctccacggcccgccccg

SEQ ID NO: 397837 - DNA, 122 bp, Homo sapiens
tcgccagcagacgccaagtacttaccgttgggagaaaaggcgagagaaagcacggggccacggtggcctgtgaaaagcctcaccgagttcccctgctgagcgctccacagccggacggtctt

SEQ ID NO: 397838 - DNA, 122 bp, Homo sapiens
gcacaccaccatatctggctaatttttcaattttctgtagaaacaagggtctccctacatcgcccaaactggtctcaaacttctggcctcaagcaatcctcactctgcagcctcccaaagtg

SEQ ID NO: 397839 - DNA, 122 bp, Homo sapiens
cctggggaagggcggagccccgatggggcggggctcccggagattgggggcccaagagctcggccaggataaatgagcgggctgccggctgcagacagtaggtcgggttagcgggcagcatc

SEQ ID NO: 397840 - DNA, 122 bp, Homo sapiens
gtgagggtaaacttggaatttaccccgatgagatgcggtgtggggagggtccagtggctgcgaggccctggaagcatgcctctttcagggaggcctccatcatcagagcttccgtctgcaac

SEQ ID NO: 397841 - DNA, 122 bp, Homo sapiens
gaagtgttgcgtggcctgcctcttccttcatgaagccacaaagtgccactgcgtgagttccgtggcacattggaacacagtgtacccgcctctgggcaagagccgtggaaatccacacatga

SEQ ID NO: 397842 - DNA, 122 bp, Homo sapiens
cagcggtcttccggggtgcccggcccccagccaaactcataccgcctaccgagactgcgccgccacctgcagcccctcaccagctcggttttgggagctcgacgctcgacatcactacctgc

SEQ ID NO: 397843 - DNA, 122 bp, Homo sapiens
ccagaaagtcaatattttccctgggccaccgcagagatgcacatacttctatcttgcctccggccccgtggacccggctgctctgcctggtcagcttcctgctggtggatcacgacctttct

SEQ ID NO: 397844 - DNA, 122 bp, Homo sapiens
ccaccacctcccctcaccttggtcttggtgtgtggagcccttggccaggtcccaggcagtcgtgggtaacaccgcagacgtgtgttacccagggcggggcccctgagagctggggtggttca

SEQ ID NO: 397845 - DNA, 122 bp, Homo sapiens
cagctcccccacccgttcacgcacactcgctccctgggccgcgccggctcgcgcaggggccgtcaggtaaattagatctgaaagctgacaatttctgaccatatttccttgattatttcaaa

SEQ ID NO: 397846 - DNA, 122 bp, Homo sapiens
tccgtcgcacccgtctgtgcacactaacctttaggggaacttgccttgcttcctaagccgcgactcagccggggctgtgtaaaccctccctgcctgttcccaggctagtctggctcctcgcc

SEQ ID NO: 397847 - DNA, 122 bp, Homo sapiens
ctctcccgccaattgccgggctccatcaggcaggtcctttcctcctgagcccaaaccatccgtttgttgtcgtcctccaatcacaggggctcatcctcagggactactttgcaatcggcgca

SEQ ID NO: 397848 - DNA, 122 bp, Homo sapiens
aggttcaaaatgtgcttcctccggctaagccctgggactgaaaccccaaacttctcccctcgtctccgagcctggagaatgagtgtcctcccaagaacccgagtggagggattggaaggaac

SEQ ID NO: 397849 - DNA, 122 bp, Homo sapiens
agtcccctcccatcccccacctttggccccctgcgagccgggtctggccccggcaagtgacgcctcggaaacgcagtctgcgtaccctcccctgagtccaaaatgaaggggccgacctccac

SEQ ID NO: 397850 - DNA, 122 bp, Homo sapiens
aggtgatgcacctgcctcagtctcccaaagtgctggattacaggcgttagcccctgcgcccggcccctgaaggaaaatctaaaggaagaggaaggtgtgcaaatgtgtgcgccttaggcgta

SEQ ID NO: 397851 - DNA, 122 bp, Homo sapiens
ccagcgtactggcgaaccgagagcagcgggcagctatgcggcctccaggacagcagggggcgatgtcttgccgcgcggccgcctgcagtgggggcggggccgtacccggcggttggcgaagg

SEQ ID NO: 397852 - DNA, 122 bp, Homo sapiens
tagggtagttttaattattgcaaagttattgttgaggagctcaccttccttatattatggcgattgtaatctggaattctacatgctaaatgtaaggtatgtcccttgggcactctgctgag

SEQ ID NO: 397853 - DNA, 122 bp, Homo sapiens
catgtttggaacaagaaccaattcgtttgttcctaacgtgacacctggaggaggcagagtcgctgtggatgccacgccacctcgcagccgtgacagctaatgacgcctgcagtccccaccat

SEQ ID NO: 397854 - DNA, 122 bp, Homo sapiens
cccggcccacctgactctagtcctctgtgccggctgccaggggatacccgaggccacctgcgtccccaaaagaaggtctcaccttcagagccagcctttgaggctcctgggtgacctcagcc

SEQ ID NO: 397855 - DNA, 122 bp, Homo sapiens
tctccacacccagacaccctttccagggagctagaaaacatcacagttggccctatagaccgagcctctaattggaaatagaatatccaattatttacacaagactgtacagcaaacagttc

SEQ ID NO: 397856 - DNA, 122 bp, Homo sapiens
atctaaataaatgattcttagaagacatccagcaaaacacataaccttgtcatttagattcgctcgcccacagggggactggagggtactcaccgactagggcttcacagccgcatcaccgc

SEQ ID NO: 397857 - DNA, 122 bp, Homo sapiens
cccggcatgggtgggttacgggttttctccgcgaaagctccgggaaaagtgacctgaaatcgggactttcccgctgtcagctccaagcaggacctgaggaccaaatgatcgcccgttttagg

SEQ ID NO: 397858 - DNA, 122 bp, Homo sapiens
acctccccttggcctatctcctgcagaaaaattagggtgagccccatcctcgatctgctccgccaagttgcgggaccgcggggcgtggcacgctcggggcaggcggtccgaggctccgcaat

SEQ ID NO: 397859 - DNA, 122 bp, Homo sapiens
ggactatgtgatcctcaaacattgacactggatgggctgcagcagaggcactgggggcagcgggggccagggaagtccccgagtttccccagacaccgccacatggcttcctcctgcgcgca

SEQ ID NO: 397860 - DNA, 122 bp, Homo sapiens
gagctgtatttctaggtgtgtgcactcatgcccacgtgtcccaggctctttagagggaagcgttccctaggtacgtggcattccctttcaaattcacctagcgccccagagaagggattgtg

SEQ ID NO: 397861 - DNA, 122 bp, Homo sapiens
aaacaaagagcactgaatggggagttgggtcgccagggttccaggccatttcaccttgaccggcagtgtccttggactcgtccccttcaccttcctgagcgtcagcttctttacttgacaac

SEQ ID NO: 397862 - DNA, 122 bp, Homo sapiens
gtcgaagcagccgccgggaggtctgggtgggcagggaggccgagaggacggtgcaccgcccggcagcgctgagacctggccgcctaggccaccctgcccggcgagggagaggggtgtctcct

SEQ ID NO: 397863 - DNA, 122 bp, Homo sapiens
ggcggggaggagggagaaaccacccaccggtcacggggaggggcgaactacctgaagagtcgagagtgggcggggaaaatctagccctctgtctagcaaatgggaagaaaccatttgctgta

SEQ ID NO: 397864 - DNA, 122 bp, Homo sapiens
aaaaacaaactagctatggaagcaggaagtgaggtcaggctggagttgcagggactgtcccgggtgggttacaaaagcaggacctgcttagactatagacaggtgtgtgtgtgtgtgtgtgt

SEQ ID NO: 397865 - DNA, 122 bp, Homo sapiens
aagtcaagctcttgaatataactggtggtattgtgggcagagatctttagttcaaatccacgtattttttaaaagagagaaccggaggtagagcaatgatcagatgggtgcacagaccagtg

SEQ ID NO: 397866 - DNA, 122 bp, Homo sapiens
gaaggaacgtttatcaaggacctaccacgcaccaggggctgaaggaatgtttatcaagcacgtactacgcactgaaggaatgtttatcaagcacctaccacgcactgaaggaacgtttatca

SEQ ID NO: 397867 - DNA, 122 bp, Homo sapiens
ccgcccacccgcgaggtcactcacctcggcttactcagcacttctacttcctcctacttccgcaaacaaacgggcctcgggccacgtgatggcctgaccaccgctctccgccaatcactggt

SEQ ID NO: 397868 - DNA, 122 bp, Homo sapiens
ctcctggtcactgcccttcctgtgcatagtttgtcatctttttagctgcgaagacgccttcgtgggtctgcgtccggagcaaggcggttacccgatcccggcagtgagccgcgccgcgcgtc

SEQ ID NO: 397869 - DNA, 122 bp, Homo sapiens
ggagagcttgttaaaacattccctggcctcatccttaggaattccaattcagcaggtttgcgctggggcttgagaaatttgcaaatctaacaagctctgatactaacactggaccacactag

SEQ ID NO: 397870 - DNA, 122 bp, Homo sapiens
atgcagattagcctaaaacaagaagcactgatttcactttcaagtctgggagcccgggaccgccttgctcatgtatctgcagatgcttagtgggtaggcttagctggtttgactgggctttt

SEQ ID NO: 397871 - DNA, 122 bp, Homo sapiens
atgctgctatgaacgatgacacgagtgttcgtgcaaacatgttatcaattctcttgggtgcgcacttagaagggaagttgctgggtcatccagtgaccgcctaacctctgaagacccactgg

SEQ ID NO: 397872 - DNA, 122 bp, Homo sapiens
ccgccccggggaggggcctggctggcttgtcccaggacaaaggaaggccttggcctgggccgcagccactcccaggcccagggaccagactctcaggcagccctgggccaggccccacctgc

SEQ ID NO: 397873 - DNA, 122 bp, Homo sapiens
tctccaagaaaggttaacttttcttaactcacaagttaaacaaaggctgcaggctccatgcggagctcaggcacccagcggtgaccgatccagaccaggtcctcccggaagcccggcctgcc

SEQ ID NO: 397874 - DNA, 122 bp, Homo sapiens
cctcagcgggatcctggttggagagcgcctcagcggggtcctacacacagagcgcctcagcggatcctagatgcagagcccgtcagtgggttcctagatgcagagtccctcagcgggatcct

SEQ ID NO: 397875 - DNA, 122 bp, Homo sapiens
tcccccctactcccactagtctggtttcggggagcctgttcctccttgtccttgcagaggcgcgtattgaattttggctgaccgagccttcctctgcatattaactttcccctcttacctgg

SEQ ID NO: 397876 - DNA, 122 bp, Homo sapiens
atagacgcagaagtcacggaagagcagggtcacacggagctgcacgtgggttacagagaacgtctggattatagacgcagaagtcacggaagagcagagtcacacggagctgcgtgtgggtt

SEQ ID NO: 397877 - DNA, 122 bp, Homo sapiens
gcttagggagaaggtgccccaacagcaatgctgcaagcttggagaaagggtctatattcacgctgagccacaggaactgggatgaagaccctggaaaatcaaaccttggacaattttctatt

SEQ ID NO: 397878 - DNA, 122 bp, Homo sapiens
gcgtgtccaggcagtcaatgcagggcagggtggccagcactgtgacacccacggtcatgacgggatctgtgtggtggcctcgtggaaggggcaaggcagatgcctaggagagagcaaggggg

SEQ ID NO: 397879 - DNA, 122 bp, Homo sapiens
tgatattcaaactttcagtgtaccagtaaatgagcatgaaatcactgaaaaataaaatcacggcaaattacaatctgggggatatttgaaaatgaaatacagaaaagaagtatatgcaaatt

SEQ ID NO: 397880 - DNA, 122 bp, Homo sapiens
aagacaatccctgaaaccaaacagaaagggaagctgtccgtccatggcagcgggcaagggcgtgcacactcacgagggttccacggagcaaaagtaggataatttctgggcagacctgccgt

SEQ ID NO: 397881 - DNA, 122 bp, Homo sapiens
ccatcctcctcccaccgccgccgccgccgccctctcctctcctgtcagtggctcaggctccgggactgctccaggttcccctcgccgccattttgactcctagacggagcaggaggggctcg

SEQ ID NO: 397882 - DNA, 122 bp, Homo sapiens
cttctatgcatgcgctcctatgtgtgcgtgcgcttgtttgtgcatccatgcatgtgtttgcgtgcgtgctggaggagagcattgggtgggaccctccagccttttggcttctcctctgctct

SEQ ID NO: 397883 - DNA, 122 bp, Homo sapiens
aagcgatcactgccacgccaagcagccaccgcaaagcctcgcgggtaaggccaagccacgcgggtaaggccaagccaatccgttacacaccagtgcgcctgcgcacctttgacgtcactgaa

SEQ ID NO: 397884 - DNA, 122 bp, Homo sapiens
gcccccgcacctcccccgggcacatgcagacttacttccgggcctcttgctgcaactcttcgatttgtttcttcagcgcctcattggcctctgtgaccgcgaccatctgctccttatcgaac

SEQ ID NO: 397885 - DNA, 122 bp, Homo sapiens
cagcgtctatctccccatgatatgcagagactgccccagtgaagcgttcgtctcagcagccggtccgactgcgcggccctccccgactacttccggcaccgctccccgcctccaacccggaa

SEQ ID NO: 397886 - DNA, 122 bp, Homo sapiens
cccataggccctccacgtaagacccgcctcgagccaaaggaagctgttggtctgggagaacgtctatcatggtgactgtaggtgtcaatggactgatgctaggcttgcccaggggtgacgcc

SEQ ID NO: 397887 - DNA, 122 bp, Homo sapiens
aaccagctgcagaggtgtcttgcatattacacagtcaccagggctccactgaaaattaggcgggtgatcaagtttgaggcttttaaatggcagtcatatttcactgtccgctgtagtcacaa

SEQ ID NO: 397888 - DNA, 122 bp, Homo sapiens
tgttttgtgtttgtacttgcatgtacatgcatgagcttgtcttatctcctccaacaaatacgtgctcctgggaggcataactgggtcttactcatctttttagctccagcagtgcctagctc

SEQ ID NO: 397889 - DNA, 122 bp, Homo sapiens
gtctttctttctaatggaagtctccctatcttatctaaattcggatttgtttctgtttgacgttaatgtgtagctaagagtgatcccaggtgagtctgagcccgccttggtggggaatgaag

SEQ ID NO: 397890 - DNA, 122 bp, Homo sapiens
gggggccgcgccccccctcctcccccctcgccggtcccagagccgcagctgctgcgcccgcgcgctcccggggacattctaaccgccgccaggtcccgccgcctctcgccccgctattaata

SEQ ID NO: 397891 - DNA, 122 bp, Homo sapiens
ttctgcctgttttctgccaagattccaatcctcgcctgcctccaggccctcgcctcccagcgcctagcaccctgagggaccactcaggcaccccaggcctctcccaatagccccacctctgc

SEQ ID NO: 397892 - DNA, 122 bp, Homo sapiens
aattcaaggtaacaatctcctccactttttaagtttcattttacataaatattctgccagcgtaaacttcagattctctatcagagctgatttgctcatccaaagagtctctcagtcccctc

SEQ ID NO: 397893 - DNA, 122 bp, Homo sapiens
tccgccgccggccccggcctccccacggccccgccggccctgcccctggagacctgagggcgccctcctcccggggaactgcgacccggaatcctggcctcgcccctgtcgcgctcgctgag

SEQ ID NO: 397894 - DNA, 122 bp, Homo sapiens
cctctgagattctaatgcagggctgcagctctgatctgggcccgcggaagctgttaacctcgctgagcagcaagaggtggctgtaaacagacttcccttgctcttctttccagaactggagt

SEQ ID NO: 397895 - DNA, 122 bp, Homo sapiens
tgacctggtgatccgcccgccttggccttccaaagtgctgggatttgaggggtgagcctccgtgcctggcccccacagtgggttattttttaagagaattgcccagggccaaaggtctagga

SEQ ID NO: 397896 - DNA, 122 bp, Homo sapiens
gtcctgggcttgggcggtgtctggatccggggtgcgtcccccctgctctggcctgggcagcgccgcctgctggcagggccggaccctgcggccccgggaccggacaccaggcggtgccgcca

SEQ ID NO: 397897 - DNA, 122 bp, Homo sapiens
ccagatagtccccgcccccttgccacggaggctaacgattggtcagtgtcttaccagacccgccctccacgccccagcctagcaggttcggtgggtcgcccaggtcgttaactcccagaccc

SEQ ID NO: 397898 - DNA, 122 bp, Homo sapiens
tgaggtaaagttgggagcgcagcggcgttggcggcggcggcggcggcagcggcagcgcggcggggccgggtattgtccgcggcccctttaaatccgcgatcccccttttaccctccctcttt

SEQ ID NO: 397899 - DNA, 122 bp, Homo sapiens
gtagggcggtaggcaagggcagttctagccaacagtccctaaatcatcccagcgggggcgcgggaaattccaccgaggtgaaagcctagggggccgggtgaagaaatccccatacccgggcc

SEQ ID NO: 397900 - DNA, 122 bp, Homo sapiens
ccccataggggtgggtccacgcgagcccctgcccgctgtcctcttctgggcgggtccgcgcgtgcttcctgctcgctacccccatcgggacggttctacgcatgcccctgcccgctgccccc

SEQ ID NO: 397901 - DNA, 122 bp, Homo sapiens
cctttgaaatgaggtctttgtgtgggggagctgcagccccgcccggcacagggagggaggcggccccggtgggaagggccctgcaaggcctgcccagagcaccaggagctggctggggctgg

SEQ ID NO: 397902 - DNA, 122 bp, Homo sapiens
gtgagactgacagcctttgggggcgcagggtcctgttctctgcgctctagcccatctgtgcgcagagcctcgttcccaggcgcctggaacccggcgggcattgacgtcaagcgccggcggag

SEQ ID NO: 397903 - DNA, 122 bp, Homo sapiens
gcggtggcggtagcgacggcacgccgtagggcggtcagaaggtttccggttccggtgtaacgttcgggctccgtctcaggggctgaagtttgtgaggtgagtagtggccccgggcccacaga

SEQ ID NO: 397904 - DNA, 122 bp, Homo sapiens
tttccgttccacttcctaaaaatctgtgtttaatgaatgtgagcattacagagagctaagcgtcagctcacagatgtgatggagcttggcttgtgccttggaaggtggccaccggcagtaga

SEQ ID NO: 397905 - DNA, 122 bp, Homo sapiens
gctgggagaggccgccgaagggcgggggcggtcaaggcagggtcccacggtgctgccattcgcccgggtctggcgcgggggggcgagagaagctgcgcgcagagggacgcccggtgcgagag

SEQ ID NO: 397906 - DNA, 122 bp, Homo sapiens
cctgccatacctgaggccccccccccgccacccccccgcctcacacagcccaagcctccccgatgagcaccaccccctgctccacggtgcccggtcccgtcgactgcccaagggctgaggag

SEQ ID NO: 397907 - DNA, 122 bp, Homo sapiens
cattctcgggggcgcccacattctcggacgcccacactctcggacgcccacactctcgggcgcccacactctcgggcacccacactctcgggcgcccacactcttggacgtccacactcttg

SEQ ID NO: 397908 - DNA, 122 bp, Homo sapiens
ccccgaagggagggagggctaccgtagagacttggtcgagaggcgcgggacaagcctggccgctgggactgtgcgctgaggtgcaccgaccgtcgggccgcgagctccccgcagaccctcgc

SEQ ID NO: 397909 - DNA, 122 bp, Homo sapiens
gtcaccaagagacgttcaccttcattatcatccaagcataggaaagggtcttccccaagccgctctacccgggaggcccgatcaccacaaccaaacaaacggcattcgccctcaccacggcc

SEQ ID NO: 397910 - DNA, 122 bp, Homo sapiens
agcattaaggacagctcgatcaccatctggccacttccccaccccacatccagccacccacgctttgccaagtgctttctcactcagccctggctcatgtgaccttcacaactgtgatgaac

SEQ ID NO: 397911 - DNA, 122 bp, Homo sapiens
tgccccagcagggacgaggagcggctggagaagggtgtttctttgacccgtttacaggctcgaaacgccggtctcagtggctattgagttacccaccaagttaccccggttagagctgtttg

SEQ ID NO: 397912 - DNA, 122 bp, Homo sapiens
agtaaatgaaggaattgggggtataaaaaaatttctggagcatacatgtataaaggttcacggcatgccgaaagacaaagtcaaaggagcattcacaatggagctggcatccttttgcttca

SEQ ID NO: 397913 - DNA, 122 bp, Homo sapiens
gccactgcaccgggccaaagtcgcagaatttagagctggacaagccgacatcgcctcctccggcgggtggctcagtgcccagtggctcagtgctggtgcacggtgagggagacccagggttc

SEQ ID NO: 397914 - DNA, 122 bp, Homo sapiens
aaatgaagacgaatccacatggcacaggatttctcccaacatcctcaaacgggaatcatccgaaggcatcgattctacagcccaaagcctttgtccacaactcccaggggtcagagcttcct

SEQ ID NO: 397915 - DNA, 122 bp, Homo sapiens
tacaccctctgtgatattgttcataatactcaaggggggagatgatactacacccaatgtcgcagggggtgtacactctctgtgctattgtttgtactatacaaggggaaaatgatactact

SEQ ID NO: 397916 - DNA, 122 bp, Homo sapiens
gactcccagcatgctctgcagcccctcctccctgtcaaacccacaaccaggtggaattcccgagtgccccgtgggctgccggagagcccacccttccaacggggatcccagccacagagaat

SEQ ID NO: 397917 - DNA, 122 bp, Homo sapiens
catcgctggcggcgggtccccgcgcggagcgggcgctgtgtgttcgcgcgcgcgggcgcgcgctgaataggggtggcctcctgcgcccaacctgctgcattttaggtgcttgcctctctttg

SEQ ID NO: 397918 - DNA, 122 bp, Homo sapiens
gacacaggccttggaaggttttttgagtgtgaaatattactcagcgttttctgcagacctcgcgggcaatgccgcttctaattttatccaggccttcttctgtagggagggcctgttaagag

SEQ ID NO: 397919 - DNA, 122 bp, Homo sapiens
cctctctacaccaacacagacagtcttactgtgatcactccagtcaaaaagaagcggggacgaccaaagaagcagcctttgctcacagtcgagacgattcatgagggaacttccaccagccc

SEQ ID NO: 397920 - DNA, 122 bp, Homo sapiens
aattctcaaagtgggaatgatatttgatttttttaaaaagtaatctttggtgtgctacagcgataggtaaggcatttgtacaaaaaacttaatgatttcttcagtgagtacaccaactggtg

SEQ ID NO: 397921 - DNA, 122 bp, Homo sapiens
aatgagagggaggcggaggagcagcgatcacgtggttttagggactgtctaataattccacgccagcattgccggtgtttcagggggtgggaaccgctgcgttccccatcaacttttctccc

SEQ ID NO: 397922 - DNA, 122 bp, Homo sapiens
ataaacagaccaaccctgtaaagagcaagatctcacctgggacgcacaggaaaccacagccgctgggggctttgtactcaaagtctgttttttcttccagtgatactttaagagagcacttg

SEQ ID NO: 397923 - DNA, 122 bp, Homo sapiens
ggtgggggcgggtggggctttttccaaaaccaagtcccttccagccctgcttgtcctcttcgggctggcgggcactgagctggggccatcacgcctttctagagcgcctgcggaggtggcga

SEQ ID NO: 397924 - DNA, 122 bp, Homo sapiens
tcacggagtggaatgaagggggaaggctctgtgaagccttcctggccggggatgagcgctcgtaccaggcagtggctgaccggctggtccagatcactcagttttttcgttttgatggctgg

SEQ ID NO: 397925 - DNA, 122 bp, Homo sapiens
tccccacggcgcacgtggacgccgacaaaggtgcgcgggcggtcccctgtgcggcccaggcggagctgacccagcacactctgcgcctcttcccgaaggtggtcgtgcagggtgaactctct

SEQ ID NO: 397926 - DNA, 122 bp, Homo sapiens
gtgcgggccggggccccagggaggttgggttgggggcggcggggtgcgtgtcggggtaggcggaggctgtcgtccgcccccggcctctccccgggcccttcgggccggctccgcccccggcg

SEQ ID NO: 397927 - DNA, 122 bp, Homo sapiens
acgcccacccttttagctcggaggatcggggaggcacggacctccggcggcagcggagggcggcggcgaaacgccgggggcgcgtgggttagcactgagccgccgccccagcccgcctcgcc

SEQ ID NO: 397928 - DNA, 122 bp, Homo sapiens
aggtggtgtggggaggcgaggatgacagtaaagcgcagccagatgtggtcgggccgccgccgggactggctacgattgggagcggcggggctgctgctgccagggcggcctcgtgggtcggg

SEQ ID NO: 397929 - DNA, 122 bp, Homo sapiens
tataggcagccctggcggatggggaaatggaatctgggggtgaggagggaaatttttaagcgtagtgatgctgtcatgctaagttgcacaactcagggtccctggtgaccacaggggctcag

SEQ ID NO: 397930 - DNA, 122 bp, Homo sapiens
gactttcttcctcttttggcaacatggcgggcggagaagctggggtgactctggggcagccgcacctttcgcgtcaggatctcaccaccttggatgttaccaagttgacgccactttcacac

SEQ ID NO: 397931 - DNA, 122 bp, Homo sapiens
ggctgaggggtgggcagcgggggtggtgggctgggtcagccgcaggtcacccggccctcccggggccaccatgccgcaccctggtgtgttggggatcctgatttcagcctcagcctgggcct

SEQ ID NO: 397932 - DNA, 122 bp, Homo sapiens
gtgcctcgggactcggtgtgcgcaggggcggtgggtggggtgcggagacaccggccccgacggaggccaggtcagggccccaggtttgtaattaccagccacccccaagctcttcagccctg

SEQ ID NO: 397933 - DNA, 122 bp, Homo sapiens
ctgagatttactgtcctgccacgtgtgggatgcaggataagccgggaaagtattatgaaacgttttttacatgtatttatcaacccaggaaatactgaactctgatgacgcctggcctctca

SEQ ID NO: 397934 - DNA, 122 bp, Homo sapiens
cgggaaggaggccgtcggtccgcccctcccgctgccgcagcggccaggtccgacagcgggcgcgggacgctggattcctatttgccagcttcctgctggggagcgttttccaatggggcgcg

SEQ ID NO: 397935 - DNA, 122 bp, Homo sapiens
ctcagcatcaggatccaggtcagcagcagcctccagagccatggccgcagccagagcccccgccttgctgaccactgcccctgtcacaggagttgggcctctggcgccggcatcggtggtgg

SEQ ID NO: 397936 - DNA, 122 bp, Homo sapiens
ctgctgtttcttccaagtcattaaagcaaagccggatagttgaaacaaaacagaatcatgcgtagttggcaaactgaacagaaaataacatccacacagcatgcccttctgccatgtactgt

SEQ ID NO: 397937 - DNA, 122 bp, Homo sapiens
tgaccctctctgagccatcttcctgttggggccacttctctcattagttaatacaaggatcggcttggacctgcttttcccactgtcaccccctaacagggcagcctccatgctatgctgcc

SEQ ID NO: 397938 - DNA, 122 bp, Homo sapiens
ccatgagctccaacacaccactggtgcgcatcgcaaggctgtcctcaggggagggccccacgctggccaatgtctccgagctcgagctgcctgccgaccccaaatgggagctgtctcgggcc

SEQ ID NO: 397939 - DNA, 122 bp, Homo sapiens
tccagccaggctttcccgacttgtctcccgggaaaggacatcctcgctccgccctcctgccggctccttgtgtccgtctctctgacccttcacccgcccgggccctgcacatataaacagaa

SEQ ID NO: 397940 - DNA, 122 bp, Homo sapiens
ccgcccgccttggcctcccaaagtgctgggattacagccatgagccaccacgcccggccgcgtctgacattttttcatgggagaatgttggaagaaaatcacataggaagggaggcattttg

SEQ ID NO: 397941 - DNA, 122 bp, Homo sapiens
tcctcctggggccctcagggatctcatgaagtcttccttggcccaaccaggcagatgccccgggctccagtggggggaggggtctggggtctggtccgggttccccgctttctctatgtccc

SEQ ID NO: 397942 - DNA, 122 bp, Homo sapiens
agaacgaggacacaagtctcagggcagatacgcgcatccgcaagtgtagacaggaaaaaccgtgaatttacttgaaaggcaaaggccgcatgagctggctgcatgagctgcagtccgtggac

SEQ ID NO: 397943 - DNA, 122 bp, Homo sapiens
aaggaaagggcttcccagtcaccctgcggcgacgcttctccctcccgggaatgacaccttcgctcgctttcacacagccaagccgttggagaggcagaaacagtgggtcccgagcccgcagg

SEQ ID NO: 397944 - DNA, 122 bp, Homo sapiens
aggaccgtcctctggaatatcttggagccaggagccagggaggctttcctcagtcccagtcgttgcctgtcgccgctttcggtttctcttccctaatagcacccgccaccccttttctctga

SEQ ID NO: 397945 - DNA, 122 bp, Homo sapiens
ctgatgctcctgaccacctccctcccagcaggcccataaagaccctcagacgccatgcaccggaggcccctgtggcttctactatctggcatttgtctggtgtgctggcatcatctatacca

SEQ ID NO: 397946 - DNA, 122 bp, Homo sapiens
cacgatgaaaccccgtctctactaaaaatatacaaaaaattacctgggcatggtggcgggcgcctgtggtcccagctactcgggaggctgaggcaggagaatggcttgaacctgggaggcgg

SEQ ID NO: 397947 - DNA, 122 bp, Homo sapiens
aaatggaaacaacaggggatattcagatacatttattcaacaataaggccagtcaggcctcgcggtgacctgatgggatttcaaaaccttggttctcagcaaggcccagatttttgaatgag

SEQ ID NO: 397948 - DNA, 122 bp, Homo sapiens
ggtgagggccagcagtccagcacgagatgccgggcaggacgggcctggcaggggagatgccggtgggctggggaccgggccgggctggggcctcagagcctaatgaaagcacctgtgccccg

SEQ ID NO: 397949 - DNA, 122 bp, Homo sapiens
gggcggggaggggcgggaggggcggggctccggggcgggcgtgggaggtcgggcttcgagcgtccccgggcgctacaggtgggtgaagttaagtggctgctggagcgtctcgggggacagcc

SEQ ID NO: 397950 - DNA, 122 bp, Homo sapiens
ttaactggacagtggtggttgagcttccctcaagggcccagaattcctgagaagtggacccgcctccctccccaggctcttgttctctaagtgagacttttcttctggagcctaccccagtg

SEQ ID NO: 397951 - DNA, 122 bp, Homo sapiens
ggaatccctcggccgctcctgctcagggcaccctctgtgcagacacaggcgcctccgccgcgcggcttctccgtgtttgctgaagacgcaggttttccaaggctgcgcctgggctctgccgc

SEQ ID NO: 397952 - DNA, 122 bp, Homo sapiens
ttagagctcgacgagtattataacaagacacttgccacagagaataatactgctgccactcggaattctgatttcccagtctgggatgactataaaagcagtgtagatgacttacagtattt

SEQ ID NO: 397953 - DNA, 122 bp, Homo sapiens
tagcagctgccgctgcagccatagcagcaggtttgtgcgtggggtttctggacgcaaggccgccagtccttgggggcactggaggcaactgctgggcctagcgagggcggaggaaccgcggc

SEQ ID NO: 397954 - DNA, 122 bp, Homo sapiens
cccgctcgctccccgcgcggcccagggatctccagggagagcgcagcgcgcagtagggtccggagttcccgctccgggctgtggtcccccagccgggagaacaacccagccagggaacaacc

SEQ ID NO: 397955 - DNA, 122 bp, Homo sapiens
tcctagaaagtgcagactcgctataaaatgtgttaggtggtgagaacgctgatggttcaccgttttcctccactttcagcctcagtgcaaaccctctgcccaaagcctcgctccagtacgga

SEQ ID NO: 397956 - DNA, 122 bp, Homo sapiens
aggttccaccattatttccatttaaatatggggaagctgatacagagaagttatgtgactcgataaaggttacacaggtaataagcattggagctaggatgaaaacctaggcaatttgtttc

SEQ ID NO: 397957 - DNA, 122 bp, Homo sapiens
ggtgagaaaaggaagttggactccatttaaatttaaagtgagacattcgtccaataaaatcgatttcaaacttggtggtgtttggcttccctcttctccagtagttttctttttttcgtagt

SEQ ID NO: 397958 - DNA, 122 bp, Homo sapiens
ccgcaaggaaaaaggtgcttggtgcgcacgcgctgagctttaccctcttcgcgtatgcatcgccgatattttaagaatctgtaactctctactgtagtagatttaacagtcatggctcttac

SEQ ID NO: 397959 - DNA, 122 bp, Homo sapiens
cccgacagatgatagtacatcccacactgctgctggaaaagatagtgcaaaagttgagcgcgccgagggctctcttttctcccggaaacaatttttccctagacccggaagcagttgttgtt

SEQ ID NO: 397960 - DNA, 122 bp, Homo sapiens
ctcggccgctgccgcgcacgcgcatccaggatgcggcgcgtgtgtgacgttacccgcccgcgccgccctcctggggtgcctctcagggacccaggcgctcagctgctggggccgcggagggc

SEQ ID NO: 397961 - DNA, 122 bp, Homo sapiens
gggcccctgcgcagatgcggctgggtttcgggtgtggagccatcttggacccacgggctgcgtcttccgggcacgggcacagtgtgtgggctccaggcatggggtgccctcagggcagggcc

SEQ ID NO: 397962 - DNA, 122 bp, Homo sapiens
tggacttctgggtgggtgtcctgcagttcccttcctcttgagtctttttaactgggggtccggtgtgtttgtgatcaatgacatgtatgcgtgtgcatgtgtacctttgcaggtacacatgt

SEQ ID NO: 397963 - DNA, 122 bp, Homo sapiens
ctctgtgtatttgtccttgtctcgcccctctagagggtatgtttcccaggatcaaggaggcgtccgtcttgttcacatccattccccagaccccacacagtgcctgactcagaggaagccac

SEQ ID NO: 397964 - DNA, 122 bp, Homo sapiens
tgcctgccgcgtggggagtctcagggtggctggcaatgaacagctcagccagagaagagtcgaacacggattccggggcgagtcaggagaatttcctgggacagcgaatggcagggagtgat

SEQ ID NO: 397965 - DNA, 122 bp, Homo sapiens
tccttcggggccggccggggctcggtgcagacccggcaggagggaagccaagctaggagacgcagccaggtcggaggcgcagtcctctgcccacaagtttcacattgatagcctttccctcc

SEQ ID NO: 397966 - DNA, 122 bp, Homo sapiens
ttccaccaggtggacttcaccttcgaccggcgcgtgctggccgccgggctgctcgagtgccgcgacctgctgcaccaggccgtgggtccccacctgaccgccaagtcccacggccgcatcaa

SEQ ID NO: 397967 - DNA, 122 bp, Homo sapiens
aagaggaaccgagagtgaacggagtgcgaggcgccgggtcggaggcgagaggggctcttccgccttgcgacccctggccccgcctcccggtcccttgccccgcccctctcggctcaccgccc

SEQ ID NO: 397968 - DNA, 122 bp, Homo sapiens
aatgtaccagtcagaacatcaagatgacacgttttatacagaagtcagttgtactgtatccgaaatccatctattgtaataatacgtaagcatcattacagacttatagatgggaggtttct

SEQ ID NO: 397969 - DNA, 122 bp, Homo sapiens
atcctttgaaggaagatcgtttagaccagcttaatgaaacagacatccttcgcgtactgacggaaacactggcggcacatattgaggccgtatttcaggatcagacctgccggttcgaacac

SEQ ID NO: 397970 - DNA, 122 bp, Homo sapiens
agctttcagagaaactactttgtgatctttgctttcatgtcacagagttacaactttctgcggagtcagcaatttgaaaacactgtttttttccattctgcaaatgaacattttggagctca

SEQ ID NO: 397971 - DNA, 122 bp, Homo sapiens
ctctggaggaacataatccggggggcagcctgcgggagacagggcggctatctggctgcccggggaagccacatccagctgacacccttgttctcctgcccaccccaagccttggagggtgg

SEQ ID NO: 397972 - DNA, 122 bp, Homo sapiens
actaggtcagggggcgcagctgagagaattcaagcaacctccccgcaaccggttccgccgcgtttgtgggctggtagcccggaatacatttcccagaggccttcgcggccgacgtgcttcgc

SEQ ID NO: 397973 - DNA, 122 bp, Homo sapiens
tttctcagattctcaggtcctgtgtagactacatgcccagaggcgcaaacctcgtagggacgagatggctttaaaagtaaaaatgctcagaaattattttctcacaagctatggaagacaaa

SEQ ID NO: 397974 - DNA, 122 bp, Homo sapiens
gccttccccatcacagctttcatcactttgtgctaagcttccgctatcactactctgggccgttcctgtttggtgactcagggaccagtctggcatggccaccgctgggtccccagcattaa

SEQ ID NO: 397975 - DNA, 122 bp, Homo sapiens
cccctgccactccattgggatttaagggaacctgtcacatggttgggagcccttaaaggtcggaagaaacaggagtggtcagaaaagacttagaaccaagaaaattaagcccttataatcaa

SEQ ID NO: 397976 - DNA, 122 bp, Homo sapiens
tgaagatctgaagtgggagcaggtaaaggtgtgtgcctctacaaaggccacagctgaggccgcccttctttatctacctcttttcatctttccaacttccagaccttttttttctgctgata

SEQ ID NO: 397977 - DNA, 122 bp, Homo sapiens
ttatgtatacccacgcctctatctatctagagagagaaaaggatgaaaggaaataatacccgggattttaaatggaatattatatctgcttggtggaattatgtgtgaatttcatttccttt

SEQ ID NO: 397978 - DNA, 122 bp, Homo sapiens
gtgcctaagaacgtcttttttccccaaagtaaaatgtgccattaaaaaatatttttaaaacgcaaaagtgcttatcattccgtacttcttttactaccttcagcagccaattattgacgtga

SEQ ID NO: 397979 - DNA, 122 bp, Homo sapiens
gcaaccgacgtgctactccctggcccctgagtgcgggcatgggaaaaacccgcccactggcggcctctcactctgggccacattccacaaggctcgccctcacccgcccatgaagccccaga

SEQ ID NO: 397980 - DNA, 122 bp, Homo sapiens
ctctggccatctgctccctatggagatcaggaaaagccaggaggctgccgagtgcttccacgagggctggggagccaactcctcctcagagtcctacccgaaaagcaaatggctcttgtgga

SEQ ID NO: 397981 - DNA, 122 bp, Homo sapiens
actagagatctctcccgcgccttgaacttgcaaatttatgaatcaggggcaaaaaaaacccggataccgagcctggcctcccaccagctagagaacccaccaagttccaggaggggcggggc

SEQ ID NO: 397982 - DNA, 122 bp, Homo sapiens
ggcagtgctgaattcaaccacatagcctgtgcgtcctctgccttgctctgattgtacctccgtgggcctggccctgccccctgccacacctcttggggatctgttcatgccacaaacatctc

SEQ ID NO: 397983 - DNA, 122 bp, Homo sapiens
cccggatggacgagcgcgagcgcgagcgcggagtgggccggtcccagttggcgaaagggccgggtgtagctgtagtttttttattaactgtctgtgaaaaaagtatttaatttatattttga

SEQ ID NO: 397984 - DNA, 122 bp, Homo sapiens
caggggagaatggcagagctcctgtgccctcctgggcgccgtcctccaggcacctgcgtgcgtccaactgttgaaagctccttttgggtttttatggaagcttcattacatatacatgattg

SEQ ID NO: 397985 - DNA, 122 bp, Homo sapiens
tggtgaaattaaagggagaacaggagcccaattcagacagtaaacaacaacaacaaaatacggcatgtataaccttccttcaggagatacagtgcaagtggaaaattctaggcttcttaaaa

SEQ ID NO: 397986 - DNA, 122 bp, Homo sapiens
gggcttgaaggtttgagtttctccaacagtaacaagggaaagcatgcttccacctggagccgagtccaagcacacagccagtcctgcacacgcatgcgtgcaaacagggaagctcaagcatg

SEQ ID NO: 397987 - DNA, 122 bp, Homo sapiens
acagggcttccccttctctgtcatgaaaacaggatagaaaaagcttgtggccagggagcccggggcctgagtgaggcattgtgtcatctctcgctctgagctcatcctagaggcagacacat

SEQ ID NO: 397988 - DNA, 122 bp, Homo sapiens
gcacaacccgcgatccgcgtggctccatctgagtccctggttaggctcccttggtccctgcgttccctcgcctccctcgcctgtcctcttcctcagtcccacccagcacggcaccaaggtga

SEQ ID NO: 397989 - DNA, 122 bp, Homo sapiens
ggaatattcttcagccttagaaagaaaagaaattctgacatgtgttacatgaatggacctcgagaacattatgctaagtgaaactagctagtcacaaacagacagacctggataacttcagt

SEQ ID NO: 397990 - DNA, 122 bp, Homo sapiens
gcggcacgcgggccgggcgccgggagggcgggggttccccggaggagctggccgccccggcgccccattgggcgctgctccaaacgtgcccgagtggtgacaggaataaagtgggtcacaag

SEQ ID NO: 397991 - DNA, 122 bp, Homo sapiens
ctgggattacaggcatgagccatcttgctcagccatgttcccctttgaatgcaggagtatcgcctcttccaggcaggagttcctcttattcagtgagacaagcacagacccagataattaca

SEQ ID NO: 397992 - DNA, 122 bp, Homo sapiens
ggaggctgaggcaggagaatctcttgaacccaggaggtagaggttgcagtaagccgagatcgcgccattgcaaaaaaaacaaaggcattgatgcacagtgcacagaccagcaaatctgagag

SEQ ID NO: 397993 - DNA, 122 bp, Homo sapiens
gtctctttgatctgtggagtattcactcacttgtgattttcccctgtgcatgttaataaacgtgtatgccttttcttccgttaatctatttttatcttattttagcaaatctccagcaggta

SEQ ID NO: 397994 - DNA, 122 bp, Homo sapiens
tcactcttgccacatcagtggagtgtatggttgcaaattctgttactcaaggcccgagggcggggattggagtaatatccaatcagagtgtcggaatgagaactgcccaatcaggcccgcag

SEQ ID NO: 397995 - DNA, 122 bp, Homo sapiens
cttagaaggtctgcagcctcgcttttgaggccagcgagaccacgaacccacaggaaggaacgaacaactccagatgcgccgcctttaagagctgtaacacacaccaccaatgtccgcagctt

SEQ ID NO: 397996 - DNA, 122 bp, Homo sapiens
cacccgactgctgacactgccctcccatccctgctctacaagcgggcggtggtgactacacgaggcgccgaagatgctgttgagggccctggagaaacttcagcagaacagggcctctcccc

SEQ ID NO: 397997 - DNA, 122 bp, Homo sapiens
tgactgagaccctctgactgttacccacctctcattaactcttagcctgaactcccagaccgcataccaccaagcagaagcgattcgttaataaatctctgtcccgagcccttccagaggaa

SEQ ID NO: 397998 - DNA, 122 bp, Homo sapiens
ctacggccctggctgcgggaggcggagctgcggcccgataaggagcctcatttgcatggacgcgcgggattggccggcgcctggcaagccgggccgacgtcctccggcggcgcgcgccacgc

SEQ ID NO: 397999 - DNA, 122 bp, Homo sapiens
catggaacaccaggaaccacgaacccacccttgtctcccatgcgctgggaaccaccccatcgcactgctgccccatgtagggaaaagaaagaaagatcagactgttactgtgtctgtgtaga

SEQ ID NO: 398000 - DNA, 122 bp, Homo sapiens
gccacccccttcacacaatgcttacgggacggggtctggtttggggcccggggtccctgtcgcaggactgccccctcctcaacccgccgtttccatagcaaccagctcaccacttcgcgggc

SEQ ID NO: 398001 - DNA, 122 bp, Homo sapiens
gtcagcttgggccttcctgggtttggccacagagtaggtttggggattttccatggttaccgatcacgagtcctggaaggggacaagcagggctgtttcaggacctgtgcactcattcacca

SEQ ID NO: 398002 - DNA, 122 bp, Homo sapiens
tcaaatgagattaaggaaatttgacttttagcccaaccttagctttctatatcatttagacgaggggttcatttctttgattttagcaagattgcagctgggaggcagttgggttgaagatt

SEQ ID NO: 398003 - DNA, 122 bp, Homo sapiens
cattttcttcttactccctctgcctcctgagggaccctggagtttccctttgtggctccccgtggcgtggggtgcccccacttcttagaatctttgagtataacaagctatgttttcaatgg

SEQ ID NO: 398004 - DNA, 122 bp, Homo sapiens
ggatcaatgacacgctgaggcaccgccccttccgggcactgcgaaacatgattggccttgcggcctgtctatgcagccgctcaacccttccggcggtccaggccgctcaccttaaggacgca

SEQ ID NO: 398005 - DNA, 122 bp, Homo sapiens
tggtcggagaactccgggacctgtcgcccgacgacccgcaggtgcagaaggcggcgcaggcggccgtggccagctacaacatgggcagcaacagcatctactacttccgagacacgcacatc

SEQ ID NO: 398006 - DNA, 122 bp, Homo sapiens
tgtcggccgggacgggtttctctgcggattctttgaaatgaaataatgtgatgcacgccgcgataagggccggcctgtaatgaggcccaggccgccgggcggctgctattgctccaggtgtc

SEQ ID NO: 398007 - DNA, 122 bp, Homo sapiens
gaagctcctctgggtctgtcctggcccacagaccctgtgtaggaaaagcacttgcccctgcggggcaggccctggcagagcccggtgaggcagtgagggccctgcaggataagtggaaatct

SEQ ID NO: 398008 - DNA, 122 bp, Homo sapiens
agtttggccagaagtccgggtaagatactgttccggcatgcccgcctcaggctgactggacgcttttcagggtgaaagggctaactctcccagcaggagaggcctcggggctctgcccttta

SEQ ID NO: 398009 - DNA, 122 bp, Homo sapiens
ggcttttactacagggcctttcactctccagccgaccccctccaagaccaagtgtttttgcgtgttgggctaaaaatagccagccaagcctaacaactagcttctgattggctcagagcaaa

SEQ ID NO: 398010 - DNA, 122 bp, Homo sapiens
atctgattgcacacaggccactgactcacactgtgatcttcggtaagtaggtttaccactcggtgtcctgtttttccatctgtgagatgggaatgataacatggggctgctgggtcaagcca

SEQ ID NO: 398011 - DNA, 122 bp, Homo sapiens
tttcaaacttgcaaaattccagaccaggagttagcacactgtggcccacgggccaaatcccgcccaccccccaccaatgtttgtacagctaagaagggttttttttttttctgcttgtttgt

SEQ ID NO: 398012 - DNA, 122 bp, Homo sapiens
gctgctgacaggtcatcagagctgggaccaaagacccgccgggaggctggcagcctaggtcgcttcccaagctctccgggcccttcccttcggcggctaatttccacttttcataaggatgt

SEQ ID NO: 398013 - DNA, 122 bp, Homo sapiens
cttgtgcccagagtttctgatatcctggctgtccacgagagtccaggaatctgcgtttcacgtaaaccccccgatgctgcttaagcggggagtccttggctgcacattgagaagcacaggca

SEQ ID NO: 398014 - DNA, 122 bp, Homo sapiens
tctgcctcctggtttcaagcgattcttgtgtctcagccttagtagctgggatcacaggtgcgtgccaccatgcctggctaatttttgtatttgtagtagagacagggtatgaccatgttggc

SEQ ID NO: 398015 - DNA, 122 bp, Homo sapiens
ggggtgggtgacgaacagcacaggcacgcagcccccagccctagccccaagggattggaacgggaaggagaagacatcggtcctacacacacaatgaggcctgaaagttctcctttccctca

SEQ ID NO: 398016 - DNA, 122 bp, Homo sapiens
tgcaacatagcaaccatccatcagaactactaaaaaggtcttccttatacttaacttccccgtaacttttccctactggacctagttttgtaccacagaccctcttccattaaacaaccttg

SEQ ID NO: 398017 - DNA, 122 bp, Homo sapiens
gggacgccccggccgggccctgcgctcccggccaggttccatggacgcgctcccgcgggccggggcccgggccacagagtcagaagcaaagcgcaagaaaaataaattcctccagcttggag

SEQ ID NO: 398018 - DNA, 122 bp, Homo sapiens
cactccagcctgggcgacaagcgagactccgcctcaaaaaaaacaaaacaaaacaaaaaacgatctttgaggaacctcccctgtgtccccgcccaccgcagctcctggagactcctcccgtg

SEQ ID NO: 398019 - DNA, 122 bp, Homo sapiens
ttcctttttgttccacatttaaatgcagatttatagatccatagtgaacataacagtcctcggtcaaattcctgtgtgcactttaccaatctttctatagtggttggatgtatatgctagga

SEQ ID NO: 398020 - DNA, 122 bp, Homo sapiens
cggccctggctccctgcctgcgtctagctccaccccacaacatctcacccttaccgaacccgcctgccccaagaggcccagcccatgtgaccccacgcttctcagagaggagatttcctgtt

SEQ ID NO: 398021 - DNA, 122 bp, Homo sapiens
tttagtaccccaggacaaagggcccttggccagtcccagactctcttgaactgttgtccccggataatttcctctacccttcatctcccatgaacctggggcagcaacactcaagaactggg

SEQ ID NO: 398022 - DNA, 122 bp, Homo sapiens
agagatcctgcccttagtcactgggaaaattgacagatgtagcagattgctttgtcttaccgattcctttgccttgctcctccctggagaatgcctattaacttttgcatgctccctgcatc

SEQ ID NO: 398023 - DNA, 122 bp, Homo sapiens
caaggggaggaatgagcagcagacatgggagacggatgagtcttttaatagaaaaacacacgtgcaacagtatcaacacacatctctcgcaatcctgacagcgctgaacttcagttcttcac

SEQ ID NO: 398024 - DNA, 122 bp, Homo sapiens
attttgttcttgaacttcattaagaacaaaacagggtgggtggggcaggaaattcctaggcgatacttctgcactgaatgggatcatactgactacataacacgttatacttagggggagac

SEQ ID NO: 398025 - DNA, 122 bp, Homo sapiens
cgcaggcgaccgaggaccgtcgcgttccctgcggccggcgggaggggagggggcgtcgcacggaggtgcctgcctcccttggtgggcaggccgtctgctttggtgttctcccgtgacaagtg

SEQ ID NO: 398026 - DNA, 122 bp, Homo sapiens
tctcaccctcctcctttcttgttcatctagtgaaggtgatttcctttgttcctcccccgtcgaatcctccctgacagtggaatggagtggtgatagtgcccaggggctacatgggtgaagtg

SEQ ID NO: 398027 - DNA, 122 bp, Homo sapiens
gcccactggatgccgaaggctgccaacaggaagttgaagcccacggcgctgaagccgtagcgctgcaggaaagtcatgaggaagccgaagcccacgaagaccatcacgtgcacgtcctggaa

SEQ ID NO: 398028 - DNA, 122 bp, Homo sapiens
tggttaccaagtgcatgcactgtgggttccagcatgtcgccaagggaagagggagggagacgcaatgcaggcggaaagaagaaaggagaaaaaagtactcaggaaattcagcctgaatgaaa

SEQ ID NO: 398029 - DNA, 122 bp, Homo sapiens
gaaaatgatgctttcttttagtgtttggttgaactatattttcatgctagtactttaggacgtaagctgacaaccagaatgtctagctccagaaagtttgcagtgtttgccatctcagagaa

SEQ ID NO: 398030 - DNA, 122 bp, Homo sapiens
gtttgaacccgaggaacggcgcgggcgggtctcagccgtgtttggaccaatcagcgtctccgctcctatgatagacatgggcgtctcagccaggccccgcccatgtccctaaaggcatggag

SEQ ID NO: 398031 - DNA, 122 bp, Homo sapiens
tgaaacttggcattcattataatgtttcgtggctgctgataacctacagttcacaatcttcggcctggtattcattgtccaccaaaatctggcccacataggaatttactggacagctagac

SEQ ID NO: 398032 - DNA, 122 bp, Homo sapiens
gcttgccgggaatgcgacgagacagctccgcctcccgagacgaaagcccgcccctcagcccgccggactcaggctcaagtctgagcttcgcctctgtagctccggtttagcggtctgctctg

SEQ ID NO: 398033 - DNA, 122 bp, Homo sapiens
agatagcacagcacgcgccctcgcattgcgcagatgtggctcagatcccacgctgccattcggtagatatgtgtctttagataagtgacttaactttcccgaattttagagtcctcatctaa

SEQ ID NO: 398034 - DNA, 122 bp, Homo sapiens
ggtgcccgcagggcacaggtgccgccgtggctgctcgcacaacccctgcagctgcgatcccgcccagttagcctcgggggctgcacagcccagccccctcgcccagggcccaggggttctca

SEQ ID NO: 398035 - DNA, 122 bp, Homo sapiens
ccccattgccgttaaacttcaaggactcactagctggatacacctgtctaagattaagcccgtttcttatgagtccccacaggcacctgagaaagacactatggccaacacctgtgaactct

SEQ ID NO: 398036 - DNA, 122 bp, Homo sapiens
gcccgggggcccctggtctttcctttgctccccccattcattgcccagctacctctgctccgtgtacggctgaatcttttgcacaatgatgtcggaatccagcacccccaggaggaccccaa

SEQ ID NO: 398037 - DNA, 122 bp, Homo sapiens
ccttctcagcctggattccactaaacctcttccccggcagagtcaggctcagagcctcctcgtgcagccctggactctgccgggagcaattagtctcagaatctcgatctgagagagaagcg

SEQ ID NO: 398038 - DNA, 122 bp, Homo sapiens
tgaggccccgcgccccacgggcagaatcccagaggagtggaggtgaggccccgcgccccacgggcagaatccttggtcctgcggaagaagtttttgtatcagctttagatttgttttgggca

SEQ ID NO: 398039 - DNA, 122 bp, Homo sapiens
tcatttttcatactgttttcttaataagcgctcaggcctaaggtgtgacaggaagtcgcacgcgcttggccagagcacagtgaagcaaaggactgggtgctgatggatggagccacggcggc

SEQ ID NO: 398040 - DNA, 122 bp, Homo sapiens
cggcccccggcctctcgtggtgctgctgctgcggtggcggctgcgtggtcaagatgctttcggctccccagcggagcccgctccccgcagccgaaggccccaggcaggcggaggaggctgcg

SEQ ID NO: 398041 - DNA, 122 bp, Homo sapiens
gaaggagcaggtgggagagctgggaggggcagacactcctcaccaggcccagtggctcatcgcaggtgtcagggccaaaccccacgttcacagattcccaggagatccaggagataacagta

SEQ ID NO: 398042 - DNA, 122 bp, Homo sapiens
aatggaacgtggaggtggaggaccccttcattcgaccctagtcctggcttccctcggggacggggaggccagaggatctgggaaaaacactgctcccttcactgaacgccactacgtagcag

SEQ ID NO: 398043 - DNA, 122 bp, Homo sapiens
gaacatgcgtattactaagcggtcgccgggctgatgacataaaaaccgggtgccggcaggcgccagtcgcaggtgtgctgctgaggcgtgagaatggcgtcccgcggccggcgtccggagca

SEQ ID NO: 398044 - DNA, 122 bp, Homo sapiens
ggcgggtcgggggcggggctgggctggaaggtgagctcgggaacgttggtagggatgacgcggttgacagccagaaaatgctccacgaagcccagcaccaaggaaaggagcaccaggtccgg

SEQ ID NO: 398045 - DNA, 122 bp, Homo sapiens
acaaagtctgggggcggagcagattgggtaccaaggaggactgcctggaggtggtggccgcggtgactgctccaaacccgttcggccctgtgcagaagtctgaagaacagaggtgccctctg

SEQ ID NO: 398046 - DNA, 122 bp, Homo sapiens
aattctctccacgcccacccccacagcatcggccttcaccaccgccgccgctgccggaagcgcccccacgtctccacgccaccaccgtgaggtcacttccggcgcgacaccttggaatccag

SEQ ID NO: 398047 - DNA, 122 bp, Homo sapiens
ctgccttctcgaatccgcacagtcccagttcagagatgttacgcagcttgcccgaggctgcggctaagactggggcccggggccccaggcttgactccacctcggggctacagagatcccag

SEQ ID NO: 398048 - DNA, 122 bp, Homo sapiens
cttaagctcaccaactaagacgtttgtgctcacatggaaggagaagtgctccttgatgtccggacaggtgagttttatgtttatggtttatttttgccacaaagtggggctgaaagtttaga

SEQ ID NO: 398049 - DNA, 122 bp, Homo sapiens
attaagtatggggtgtcaggatgcaagccctaacaaggaagtgtgaaaaaagaaacatggcggggcatttttttcagtaggaaaaggccaaatctattccattgaatacaatgacattgtta

SEQ ID NO: 398050 - DNA, 122 bp, Homo sapiens
ccccaaccccctgcgtaaatctcttgtgttgagaaaagcaaggcttgcaggaagccactccggatgtttgctgctttacatgtggcatctgtggctggctctgataacgtcccggggcacca

SEQ ID NO: 398051 - DNA, 122 bp, Homo sapiens
taagcgcatgagacaccaaattctgtggctgccatcagaaattttctacagtacatgacccggatgaactcaatgcatgatgactcttcttatcacacttgcaaatgaatgcctttcaaaca

SEQ ID NO: 398052 - DNA, 122 bp, Homo sapiens
cccagctaggggcgcggtggtggcgacgctgtagcctctgcaccatgcgctaatagaaggcggaggagggggttgcacgacctgccatccacggccacccattgggtggggcgtgtgtgtgt

SEQ ID NO: 398053 - DNA, 122 bp, Homo sapiens
acatggtaatgcacaactagagttcagccacgcttcctttcggccggaaccgccatcttccgtcattggcccaaatgaccaacaggaggggaaaggggagaggctcccgatggatgttctct

SEQ ID NO: 398054 - DNA, 122 bp, Homo sapiens
agaaaaggagtagggaagaattagtgtgttatggggcgttctcaatggaggaaaatagttcgtattttcatctacaaataaaagaagagtcatgtgtgataagaattaaaaagcaggggaag

SEQ ID NO: 398055 - DNA, 122 bp, Homo sapiens
ttgggccttttcactttaatagcttaacagagacatctgtgatggcttgcatccagagtgcgtggtgtttatttttgatttgaaatatgaaaagcatttttttaagacaactgactcctctg

SEQ ID NO: 398056 - DNA, 122 bp, Homo sapiens
acagaaatttggaggctgagtcccaacaaaacccaacatttggctaggtgtggtggctcacgactataatctcagcactttgggagaccgaggtgggtgatcacttgaggtcaagagtttga

SEQ ID NO: 398057 - DNA, 122 bp, Homo sapiens
gtaacccctccctacaaactaccccctttccctctgcccaagtgagcacagggaccgccccgcagcaagacgacggcagatatttaaaatgtgaggaaccccggccacagcgggcggggctc

SEQ ID NO: 398058 - DNA, 122 bp, Homo sapiens
ttaggttttaattttgttacatttgcactctaactgcactgaaaacagaaaaaagaaatgcgtagtgcagtttctaaattgccacagctggagcactttaagagctacaattgtccagttaa

SEQ ID NO: 398059 - DNA, 122 bp, Homo sapiens
agcatgcatatgtgagccgagcagccactacactttgatgcaaatcgtaggggagagagccgggggatggtctgtagagaaaggtgctgaacaaagtaaagatttcctgctggcgacttgaa

SEQ ID NO: 398060 - DNA, 122 bp, Homo sapiens
cccggtctcagctcttcccatgtccatctttgttctgtgaggtcttgggcagctgtctgccgggcacttccatctggggaggggctggtgccgcctgggccccgcctcgggaggacggtgtg

SEQ ID NO: 398061 - DNA, 122 bp, Homo sapiens
ccatgctccagtgtccagaggaccgtcacattgctcaaatccgcagccaggtggcacctccgcaagctgggcgtgtgatgcggtggcgtcttagtgacagttggcttggctcctggagggga

SEQ ID NO: 398062 - DNA, 122 bp, Homo sapiens
ttgtgggggcagccaatcacaggcagggaccagggtacccctagccaattggtgatgagacgggggtttcggcgcttctaggcatgtcaatgttttttctctacttcctgggtttttctggt

SEQ ID NO: 398063 - DNA, 122 bp, Homo sapiens
gcgggagcgcatgctgcgggcgctgcaggcacaggagatcgagtgccggctggtggaggccgtggacggcaagtgagtccgaggcctgggggtgggggggcgggtccgcacgtggatgtggg

SEQ ID NO: 398064 - DNA, 122 bp, Homo sapiens
agagtccactaaggagtaagtgaatgttttagaggggctctgaacatctgtgctgaagttcgaatagcctagttctgaaatgaatatttgacctaaggcccaagcaaaatttcaccattgtt

SEQ ID NO: 398065 - DNA, 122 bp, Homo sapiens
gaaggggcctgggttaaagagcaggtatcatgaggctctgccagctggggctgagggaggcgtgtgggagtggaagtgcctggagcccagggacaaagtcctgtaataaattacgtgggccc

SEQ ID NO: 398066 - DNA, 122 bp, Homo sapiens
agtcaaagaaaggggtgacggacgcacctggaaaatccggtcactcccaccagaatactgcgcttttccgaccggcttaaaaaacggcccaccacgagattatatcccacacctggctcgga

SEQ ID NO: 398067 - DNA, 122 bp, Homo sapiens
gaggtaaacagcatttcctctcagctctgggttggaaaaagccgcagcagctgatgggcccgggaacccgaggccccgccccctaggtggtcctagcctttgcgcgtgcgcggcgtgtctgc

SEQ ID NO: 398068 - DNA, 122 bp, Homo sapiens
gccaacgacgcccagctggctcatccacctgcccttcatcatcgttaacaccagcaagaccgtcatcgactgcagcagcatctccaacgacaaattcgagtatctgtttaattttgacaaca

SEQ ID NO: 398069 - DNA, 122 bp, Homo sapiens
aaaatctgtttttacgacttcttgtaaaatatctcttgcactaatgtttcacttcactaacgtagataatatagagccaagcatgagcttccattgaataagcatcaagctaaatatatact

SEQ ID NO: 398070 - DNA, 122 bp, Homo sapiens
ttcccttctgcccccaaggccaagcagctcaactgatgagatctgctgttgcacctgccacggctctgaacccgggatgcttggcgacccccggggcacacaaaaaggccctgcggcctaac

SEQ ID NO: 398071 - DNA, 122 bp, Homo sapiens
atcgggcccaccaccgtgtgccacaaagatgcccaggaagccccgtggcccacgggaaagcgttttctatgaccgtgactgatcagactttggcaaaacgtgcaggtgacctcactgaaagg

SEQ ID NO: 398072 - DNA, 122 bp, Homo sapiens
ctggagcaaaatgaacccggggagggggaggagaaagagggtggggggagctttccaagccgaaggagtcgctgagttaaattacaggggcctgggagggatgattaacagctctcatggtt

SEQ ID NO: 398073 - DNA, 122 bp, Homo sapiens
tgatgtatgagttcaagtaaatacacagcattataaggaataagaactgactaaccatgtcggagggtgcaattatgatgtcacaggtacagctgcatatcaccaggcaatacagcaatttt

SEQ ID NO: 398074 - DNA, 122 bp, Homo sapiens
ggcgggcggagtgatacagctggacgccagttggtggagcccccgcgggaaacgactgagcgcgaggagcgtgcgcgctcccgtcgtggcgacggtggcggcgagcggcgtcagagcttgag

SEQ ID NO: 398075 - DNA, 122 bp, Homo sapiens
gtactcctaggcttctggtaacaatactggctgctggataggaaagtaaagggggtgaggcgctctgggagggttagcctggagacagttgaaggcttgaatggcaagtcggacggcttggc

SEQ ID NO: 398076 - DNA, 122 bp, Homo sapiens
agagaaatgcatgcacgtgatccactggcctgtgtgggattccttgcggcatctgaaggccgtgattcaaaggtcccctgacaaccttcccataaatgaaccaactgatcctcacaactgga

SEQ ID NO: 398077 - DNA, 122 bp, Homo sapiens
ccggctcgggagaggggccggtgctgagcggcagcggaccaacggggagggagcggggggcggagtccagctcccaggccccacctgctggccgcccctggctcccgcccccagggacgcgc

SEQ ID NO: 398078 - DNA, 122 bp, Homo sapiens
atacccgcctccattacgttgtgctgtggttgtttttgaggcatcagagggtgtgcgtgccgccacatgttgattggggtggcttctgcgttcagcgctgccgcatcccttcacccttcccc

SEQ ID NO: 398079 - DNA, 122 bp, Homo sapiens
ctgagttgtcaaaggactttttgccagcaaagattttttaaaaattcactttgagttagtcgaggaagttttcttggtgtatagaaatgaaagcagtgtcatctcttcctgatgcctgttta

SEQ ID NO: 398080 - DNA, 122 bp, Homo sapiens
tttgccatatttcccgggatcatgttatgtgaatggctgacgggaaaaacccaggggtatcgcgttacaggaaagagctgcgatttatttatttattttcttccttctgtaactaattccaa

SEQ ID NO: 398081 - DNA, 122 bp, Homo sapiens
ctgtggatgagcgggagaacaatgacacaccaactcctgcactggctgtttccagaaatacgagttggacagccgccctgagccacccactgtgccctgccccacccccgcaccttagctgc

SEQ ID NO: 398082 - DNA, 122 bp, Homo sapiens
agggacctgtgtctccactttggacaaatctcccgggaatttcccgggggttcagagctccgatgtcggggcggggaggggcagggtgtcatgtgcggcgctggccacacggtggcgacaga

SEQ ID NO: 398083 - DNA, 122 bp, Homo sapiens
attattttaaggtcatatttcatgactgctaattagtgtatccataaacacaaatgaagtcgacattgcacattgaaattgtataatctaccaagatgtaggaatgcacaaaactcaaaggt

SEQ ID NO: 398084 - DNA, 122 bp, Homo sapiens
aagacctggctggctgtttcctggaagaactgcaccccaagccctcagccagggatgccccgccggccagcagctcctgcctttgccaggacggcgaggatgccggttccctcgagccacag

SEQ ID NO: 398085 - DNA, 122 bp, Homo sapiens
ggcaagcacggcttcccgggctcctttccggcggcgcaggagaggcgcggggctggcgaacggtgtgggactaatggggactaatttatttagctcgattccatttgtctgaaatggcagac

SEQ ID NO: 398086 - DNA, 122 bp, Homo sapiens
aggggcttctggaaggaagggcactttcctcgggagctcgctctttattttggggggctgcggagcaccccaggaaacagcaaggcagctccaagagtccagcctggtccccaccagtgaac

SEQ ID NO: 398087 - DNA, 122 bp, Homo sapiens
cccacctgcttctaagggggcacgtgggtctgcagactgtcagagagccctgcccttcagcgagtgcctgctgtaagcttggccctgcacgccagggcgaatgtgatgcgctctttgctagg

SEQ ID NO: 398088 - DNA, 122 bp, Homo sapiens
tcccacagataactaaagcttgtcacttatattcttgaaattttttacctgccttttcttcgaacttttgaactgatttcttgcttttctttatctttcttgatcttttcttcatggattca

SEQ ID NO: 398089 - DNA, 122 bp, Homo sapiens
cctagtttgtagaggtccaggaaggttaatggtatgaagtcagtactcagcagtgcagaacgaggactaaaattcaaatcttaggctaatagtgttctttccaggagagaaaggcttcttta

SEQ ID NO: 398090 - DNA, 122 bp, Homo sapiens
atggcatcttggctgcccagcctctggccaaaggttagagggaatggctgatttccagttcgcagattcagaggccatggagttttctgatgaccaacacaggtcatccctcctggggtgag

SEQ ID NO: 398091 - DNA, 122 bp, Homo sapiens
aaatctgcatttaaatgaatgtattataatgtggaaaagtaagcccaaatacaaagtaagcgccatcacgtttgggataaaaacaaagtacagtatcattagagtcctctgggaaaacgttt

SEQ ID NO: 398092 - DNA, 122 bp, Homo sapiens
tcctgtgccgtgggggtgacaacgcagacgtgagagcccggtaggctggggtggtggccacgttaccaaagcacctcgaacaggcgggagccctggaggcttggccagctctctgctgtcgc

SEQ ID NO: 398093 - DNA, 122 bp, Homo sapiens
caccaataggactcaaaactgaagggtttttgtcagaactcctgcttctacaggggaagccggcaggaccactctgatgccttctgggtcccctgttttctcccttcctttcctagaggtgt

SEQ ID NO: 398094 - DNA, 122 bp, Homo sapiens
agcggagtgagtgagggaagcgatgggcgcgggaatggccggcccacgggtcgcaggagacgggacgccagtcctttggctccgttccgctggctccttcgtcagtactgacacctcgggct

SEQ ID NO: 398095 - DNA, 122 bp, Homo sapiens
tccaggcatgcgcacatgaacatagatccaataaaagctcttattggagctagaaatatacgtataatatatatacatatataactattactatatataaaactcatatatataatctatta

SEQ ID NO: 398096 - DNA, 122 bp, Homo sapiens
tactacctcgcccctgactctgcatgtgggagctcccacaaccagggctccttcagaagccgaaacaactcagaagctgcaacctttgctttgagctaaaaaaaaaatagcagaaaggctta

SEQ ID NO: 398097 - DNA, 122 bp, Homo sapiens
accatggaagtcaatgttgaaaaacaaatagattcagggcataagggtgcaggtttgttacgtggatatattgcctagcggtggggattggccttctaacccccaaacagtgaacataatac

SEQ ID NO: 398098 - DNA, 122 bp, Homo sapiens
ggtaaattacccaaatagaaggcaaactgcccagggctgtaattaacatacaatatgcgccgagagggaaaggttaatgctaactccggtcctaagtacaaagatcattgggagtcaggggt

SEQ ID NO: 398099 - DNA, 122 bp, Homo sapiens
gacccgcggtcgcttcctcggcccggctccctccagtcgccgcggaaggtgtgggaagcccgggcaccctcgcccctcagggccccggccaggcctactggacctccagtgctacagggacg

SEQ ID NO: 398100 - DNA, 122 bp, Homo sapiens
tgtagtgcgctatgccgatcgggtgtccgcactaagtttggcatcaatatggtgacctcccgggagtggaggaccaccaggttgcctaaggaggggtgaaccggtccaggtcggaatgaaac

SEQ ID NO: 398101 - DNA, 122 bp, Homo sapiens
cctgtctttctccatggcaactgtctacgccgcaggctggagctgcccattaccggagcccgtaagcagtatgggtgctggacaaacagcgtgatcgggtcgtaaaacttggtggaaaacga

SEQ ID NO: 398102 - DNA, 122 bp, Homo sapiens
tcgaaccacgcccgccggcccagctcgcgccgcagcgcactccacttccggctcggcccgcgtcctcgcagctgctacgcaaccgcacaaggaccccgagggaggctgcccggccgaaggcc

SEQ ID NO: 398103 - DNA, 122 bp, Homo sapiens
tgagtttattttcatccctaaggctccattcaggcagaactctctagcctgacctccccccggggtggcattaccagcccatccatcttaatgaaataactgaagtggaggtacagaaagac

SEQ ID NO: 398104 - DNA, 122 bp, Homo sapiens
gaggtggagcgggcacaggcgcctaccgctttataccggtccccccactccccgcccgcccgccctaggcacagccggagcaggtgacaggtgacaaaaccccgccccctcccctacctcct

SEQ ID NO: 398105 - DNA, 122 bp, Homo sapiens
cagaacaaaaaaagtcaccttggcatgaatataattaagaaatcagccgtgtgcttctcacgtttgggctccgagacgtgggagatgcccgctaacctaagaccttccgagggcgatgcaag

SEQ ID NO: 398106 - DNA, 122 bp, Homo sapiens
gtcgatgagcggggctgggggcgggccctgtgatcgggcggggcggggcctgctaaggggcggggcctgtgcgcggaggccgctcgcgaaccagccgtggggaactggtccacgtgggctcg

SEQ ID NO: 398107 - DNA, 122 bp, Homo sapiens
gaaattaaggaggagggtctgaggggccgacctcagagggacagatagagaaatcgagagcgaaacactcaaggaagtggaacaaatcgtcgtagccaggcgtctctgcctctccggaaacc

SEQ ID NO: 398108 - DNA, 122 bp, Homo sapiens
ggcaaagagaagacatgggacagccaggaaatgtggcccacctgactccaatcatgcttccggccccgccacggttccggccccgccacggttccggcctcgccacggttcctgccccacca

SEQ ID NO: 398109 - DNA, 122 bp, Homo sapiens
ctgcgaccacagctccctgcagcctcgaactcctgggctcaggctatccttccacctcagcgtcccgagtagctggggacacagagggatgaccacgcccagcttttttttttttttttttt

SEQ ID NO: 398110 - DNA, 122 bp, Homo sapiens
tttgtcctaaacttgccgtgtgttcttggaggcgcgggcctccctgctgtcatcacacctcggatcaccccaggcaatctcgcccctgtggcttcacctgggtccagccagacctctgctca

SEQ ID NO: 398111 - DNA, 122 bp, Homo sapiens
gaatttacgctgccctgggaggaagggccaggctgcggcttagtgactcccttcctctcccgcccctcagcagctctgggtctggagctttctagtgctcaaaggtgtagggggaaaagagg

SEQ ID NO: 398112 - DNA, 122 bp, Homo sapiens
gtacacgccctgggaatcgggggtcttccagtatagggaaccaccgagatgcgggccctccgaagtcctagagagggcgcctcggccgccggcacccgccacacttccggcctttgtgggcc

SEQ ID NO: 398113 - DNA, 122 bp, Homo sapiens
aaggaagggaagaattctgaaactgctgagagagtattcaaaagagaccgtgagaactgacgatgcttcttgcattgacaaggcggaatgagctaagctgaatttcatcataggaaaataaa

SEQ ID NO: 398114 - DNA, 122 bp, Homo sapiens
ggggagagggtgagtgcggtagggcataccagaggggggcgggcgcgcttcctcgggactcgccggctcgatcaggcacggcccggcgctggggacctaagcctggggagcgcccgggagcg

SEQ ID NO: 398115 - DNA, 122 bp, Homo sapiens
tttaagagaccccttcacacatttgaactttgaatctctgcagaataactctattccccccgtatggtaaagcagatcatatttaaaatcaacatttaaaaacatctatatcttaatattat

SEQ ID NO: 398116 - DNA, 122 bp, Homo sapiens
catgacgcaggtctgagaatcgatcccgggttccagcccagccatcattttcagagaatacgggccctgtcccgagccgccagccattgccaatggctgcccggaggaagggaggaaggggt

SEQ ID NO: 398117 - DNA, 122 bp, Homo sapiens
tcccggccctaggtccctgtgggaacacacagccagccctgcctctgtgggggtccctttcgtggccagagcccccttcctcaggggacacgcggtccagctgagggtcatcccgtgacaag

SEQ ID NO: 398118 - DNA, 122 bp, Homo sapiens
ttggctctgccaggtgagagccactcccactctgtctctcagacacctgggctttaggtacgccctcttatttccctatttcttttcatgtgaatcaaaatctgaggctgtcgttctcctgc

SEQ ID NO: 398119 - DNA, 122 bp, Homo sapiens
ctctcgagccccgtccccgcaagctttagggcggagccagccctgaggctcggcccgggtcggggatggggaaagccgggagtgctgttctgagatcaagcttcaacctttggccctgctgc

SEQ ID NO: 398120 - DNA, 122 bp, Homo sapiens
tcacacagaggccgtacctggtgtggactcactgagaatgctgtatcgcagggccaggggcgtcggggtccttctcctatcttcggctccacttccctgcagaagaagaaagggtgctttgg

SEQ ID NO: 398121 - DNA, 122 bp, Homo sapiens
gggcgtgagtgcccgtgtggtcgtttatgtcgaggactgtatgctctgaccacgatgccacgtgacccagttcccaaacatacgaacccacgtctggacctcagtgtgacttaagaccaagg

SEQ ID NO: 398122 - DNA, 122 bp, Homo sapiens
aaaaatgcataaagtaccccggtaatcccatcataaggtcgaagccttgtaagttggcaccgtctgtgcttctggttcaggattccggacggagcttcttgtgcggctccttggtcatcctt

SEQ ID NO: 398123 - DNA, 122 bp, Homo sapiens
cccatcttccttccagtttcccaggcttgaagcggcagcagctcccactgttctcccaggcgctgtctgtagcaggagttggccctgagggagagcaggccagaccagtgcagccccccgga

SEQ ID NO: 398124 - DNA, 122 bp, Homo sapiens
cagggcctcacccctttatctccgcctcgcacccggcgccccacgctctttatctctcatcgcagcggccccggccctccggccggctaagttcaatcacataaaagcgtttcacttgacct

SEQ ID NO: 398125 - DNA, 122 bp, Homo sapiens
gccaggctttgtctatgtagctgtgcccagagcaagtttgcccagggatacggtgcgctccgcgagcatctgctgggcttgcacaggggacggggagggacctctggtttcatttctctgcc

SEQ ID NO: 398126 - DNA, 122 bp, Homo sapiens
aggctgtgaggacttcggagggcaaacgctgaggaaaccaacctgcctccaattccaaggcgtgagatttacattgcagcctttgtgatgctgcttagttaactggctgtatttatgcagat

SEQ ID NO: 398127 - DNA, 122 bp, Homo sapiens
tcttagaggaaaaaatacttagtttctatagaggcaaaacaaggaaaaaggtggacatgacgtgtggcaaaaacaagcaccctgaagggcgagggaaaagaaagaatgaagctaagtacata

SEQ ID NO: 398128 - DNA, 122 bp, Homo sapiens
gagatagcgaactgcggctgcagagcaccagctgaacgcacacacacaagtgtcttctcacggtatgattagtgttcacaggtttcgtctagctcatcagaaatgaagaatagcgatgatga

SEQ ID NO: 398129 - DNA, 122 bp, Homo sapiens
gtccacacataactcccacctcaaagatggggcatcttttgctctgggagatatcaaatgcgaccaaaacaagtgtttgtagatttgaatgatgattcagcagtgtagcagttctcactcat

SEQ ID NO: 398130 - DNA, 122 bp, Homo sapiens
cttctcaggggcaggaggacttcactgtgctcttctgatagccaggaacaggcacctaggcgggctgccccgaatcatggggacatgcagctcatggcaaggaggaaaatgagccatactga

SEQ ID NO: 398131 - DNA, 122 bp, Homo sapiens
ataggctcctatgagtccaaaaagcacaagggcaagtaatgtagagcctgaactcttagccgctaaatgaatatttgtagctggactgattatcaggttcctgctttttggattgagctttg

SEQ ID NO: 398132 - DNA, 122 bp, Homo sapiens
agcaggctcaggcagaggtgtcgaaaaggcgatcgatcatgtcgcccacctgctccaccccgtacttgatgtacttctccgggttcttggtgaagggcacgctgccaaacctgaggaggcac

SEQ ID NO: 398133 - DNA, 122 bp, Homo sapiens
ggcggcttaggtcccacatggagcggctgggccgggccggggggccgctgggggtccgggcgcgctgcacactccttagaatgtcactgagtgccggccccggggtagcaggggagacgcgg

SEQ ID NO: 398134 - DNA, 122 bp, Homo sapiens
atccaagattctttaaccacactctaaaagttcttcagactcaggacttaaacatagccacgccaccttggccttcaatgacagggatctagcaatgctgcatcatcagccttccaatacca

SEQ ID NO: 398135 - DNA, 122 bp, Homo sapiens
ctcaagcgatccacccgcctcagcctcccaaagtgctggcattacagacgggagccaccacgtctggttagtattatgtacttctgactattgtgttctactttccgatttaaacaatgatc

SEQ ID NO: 398136 - DNA, 122 bp, Homo sapiens
gggtttttactgccagagatgtgtctgtcttgcgccccgcatgcactgcctgcggggctgcgctgcactccccggcggcgccacgggtctggcccccgcgcttctacgtgttggggggatgc

SEQ ID NO: 398137 - DNA, 122 bp, Homo sapiens
agagctgaggggtgaaatggacagcaggctcagccaggaaggtgctcagaaggctgaaaacgatgactgcagctgcactgtgattggggaaaacctgtcccccaacaaaataccctctcctg

SEQ ID NO: 398138 - DNA, 122 bp, Homo sapiens
cccacagggctccctggattcctctctgacaagcacatgcgccggctctggtcttggctccgtgtgccccagcacgacagaacaagtgcggcaagacccaggcctgcagggcggcggcaagt

SEQ ID NO: 398139 - DNA, 122 bp, Homo sapiens
cccgggagacagtggttgcagtgagccgagatcgggccactgcactcactgcacagcctgcgcagctgagcaagactccgtctcaaaaacaaaaaaaaaagtaaaaaacaaaagaaaaatcc

SEQ ID NO: 398140 - DNA, 122 bp, Homo sapiens
gcccgtcggggacgcaccccgaactccgaggatgggagctgagggctgggtctttgcgggcgagatgagggtgtcggatcaactggcctacaaagtcccagttctcggcccccgggaccagc

SEQ ID NO: 398141 - DNA, 122 bp, Homo sapiens
gcctccacggtgaaggtgtagttcatgtggggctccaggtcgctcactgtcacactggtgcgggtcagtccgtgaggaggctccgagtagcgcacactggcctcacacggcccgcattcccc

SEQ ID NO: 398142 - DNA, 122 bp, Homo sapiens
caatgggaagggccgggagcgcgcggcgcgggagatttaaaggctgctggagtgaggggtcgcccgtgcaccctgtcccagccgtcctgtcctggctgctcgctctgcttcgctgcgcctcc

SEQ ID NO: 398143 - DNA, 122 bp, Homo sapiens
tgctgccttaagagcccgtaacactcaccgctaaggtctgcagcttcactcctgagccagcgagaccacaaacccaccagaaggaataaactctgaacacatccgaatgtcaggagaaacaa

SEQ ID NO: 398144 - DNA, 122 bp, Homo sapiens
gaaggactgcctgctgtcctccagtcagctgaaggccaagggcgaactgagcttcgagcgcgacatgctgctggtgggctgcagcagtggccgcatgcactacgaccgccactaccgcgagg

SEQ ID NO: 398145 - DNA, 122 bp, Homo sapiens
gcatgcagagggcatgggaccttggctcacagccgcatgacactgggtgctctgccacagcgtcatcccttgtagggctgtgagggtttactgttgacattccaatactggagtaacatatg

SEQ ID NO: 398146 - DNA, 122 bp, Homo sapiens
tgctgaatatgtgaatcaggaagaaatgtgagagggccattcctttggtggtgatcacatcgctcagcaatgcaagtcatcctatttgtcaagagtcaggggacagctgtctgttgacattg

SEQ ID NO: 398147 - DNA, 122 bp, Homo sapiens
ccaatactacactttcttgtttactgtgtagtccttatcttctggcgcaaagcgggcactcgctaaaaacctgaatgaaagtataaagcaggccgggcgcagtggctcatgcctgtaatccc

SEQ ID NO: 398148 - DNA, 122 bp, Homo sapiens
tggccacaaagggacagctgagaccccctcccaggatggctgtaaggggcgtccctggcccgagccccataggtagatgttggcaccatgccatccctcatccctgtctgcccctcccccac

SEQ ID NO: 398149 - DNA, 122 bp, Homo sapiens
ctgacccccaggagctggggtgccgaggggcgcgggccacagcggtgcgagccagtcgggcgcccgcgcggtggggcgcgcggcgcggggattggcgggcgctccccggtgcccgcagctct

SEQ ID NO: 398150 - DNA, 122 bp, Homo sapiens
gcggggaggggcagtgagatgaggggccagccgctgctcgggacccaccactacctgtggcgtcccccagcccaacttggcagcacccgacaacccgcggagacgtctggaggagccgcccc

SEQ ID NO: 398151 - DNA, 122 bp, Homo sapiens
aggtctggagggactaaaagcccacctctcagaatcgcggtaacaaacctcacctccgtacgcaagatggcggtcacctctcggttacccaggccaaaactaggcgtttgcgccaggcattg

SEQ ID NO: 398152 - DNA, 122 bp, Homo sapiens
ataattaaaaacacttttagttccttcttcaacttaaaaatacccctccaactagtctagcgaaaaacaccctccacagtaaaccgtttcctgggcctcatctgttcccttaacctcctggg

SEQ ID NO: 398153 - DNA, 122 bp, Homo sapiens
ttatctgaccacccttgcagggcatgcgacaaggttgtggctcatctgtccggccagtgacgcttaaaccccctatgggagggggagcatgaggacaggcaggtgcaggagctttggtgagc

SEQ ID NO: 398154 - DNA, 122 bp, Homo sapiens
acttcagccaggaaatgagagacccagggaggtcctttctctggagcccgtctcacaagccgcctgcctctgggagaggccaagcctggagccggatgaagcttggaaatgcatgcaatttt

SEQ ID NO: 398155 - DNA, 122 bp, Homo sapiens
tgctgggattacaggtgtgagctgccgcgcccggcctgcattcctgttttgttcctctgccggattgcaacttctgcatttgatttttagtccattagtggtcaccctttaaaaggtcaaca

SEQ ID NO: 398156 - DNA, 122 bp, Homo sapiens
tctatcagaacaaggccagcttttcactgttcctcttcctcaaggatattccatcaggagcgagggaaacctctttgcttttccccctaaaatttagacagaggattgagtgggagcctagt

SEQ ID NO: 398157 - DNA, 122 bp, Homo sapiens
gtgggaaaagcgatgtggagaagcaggcacgaacccatctggaatggaacatgtcccttccgaataatttcatgtgggaaaataatttcaagttgaaggataattactgcagagactgccag

SEQ ID NO: 398158 - DNA, 122 bp, Homo sapiens
taggaatgttctcccactttgctttttctactacaagtgctatgatacccatagcctgcacggaaatgacttttcatattgttacgggttttaaactagatctacagcctgaatatctaaaa

SEQ ID NO: 398159 - DNA, 122 bp, Homo sapiens
cggcagcatgagcagcggctacagcagcctggaggaggacgccgaggacttcttcttcaccgccaggacctccttcttcaggagagcgccccagggcaagccccgctccggccaacaagtga

SEQ ID NO: 398160 - DNA, 122 bp, Homo sapiens
ctttctttctccttccctctgctgcctgccctacccgccgctgccgccgccgcctcctcacgcccccttcccgaaataccctggcagcccccgcggccgcgccgttccagcccgcggcagcg

SEQ ID NO: 398161 - DNA, 122 bp, Homo sapiens
gtttagtgtgcaaacagccccagggagtgactgggaagattcagccatggaggctgtgtccgttgtctgtactgtgtctgttgtctgtacggcgctgtggccgccaaacggcccagttctga

SEQ ID NO: 398162 - DNA, 122 bp, Homo sapiens
tccagtgaatccagccaagtcctaggaacacaaagacagctaaaaatatcaataacaaaacgttgagctgttcttatgaacagctcaaagcaggttcacatggattccctcctgttgcctca

SEQ ID NO: 398163 - DNA, 122 bp, Homo sapiens
tgggaagacttcaggggtttggggcttgggagaactatcagaatttaccagactccaggtcggagtctggtaagagaattcagcaattctcctttctgtttcctgaaccttttttagggctt

SEQ ID NO: 398164 - DNA, 122 bp, Homo sapiens
gtgtgatgctgccacagcccagacccaggggagcgctgcccaaaggcctggggtgggtcccggccttgctaaagttgaagcgctctgctccttgtaaagtgggatcgagtgagtacatatta

SEQ ID NO: 398165 - DNA, 122 bp, Homo sapiens
cactgaatatgaatgtacagtttaacagattcttgtagagcatccttgcagccttcctgccgggcatagaaatagaactttgatgccctccggaggtcttatgcacccttcctagtcaaggc

SEQ ID NO: 398166 - DNA, 122 bp, Homo sapiens
ggcgccggcggggaaggggagcccagcgctgggaccagagcactgcggggaggctttgcccgggaggagtaagtggaggagtgaagtcgggacttggtaagttccaggtggcaggaacccac

SEQ ID NO: 398167 - DNA, 122 bp, Homo sapiens
tctcctccggggccgacgtgtgtggctctgacacggggactttgggctccagacagggggcgggggacctcgggggtcctgcagccaccccggtctctacgactctacagaagctgctctcc

SEQ ID NO: 398168 - DNA, 122 bp, Homo sapiens
cgatgcttctgaaagaaccggacaaaaagtccacacgctgtgtgattccattcataccaacgtccagactaggccagtccgtacagacaggatgaattactggttgccggagggtggggagg

SEQ ID NO: 398169 - DNA, 122 bp, Homo sapiens
gggaccagccttgccagcctccgccttgggttcagctgcagctgtcatctgcatatggcgcgcggcagcagaggtggcaactctcaacgctgcccgagccaccagcagcgcggacccctggc

SEQ ID NO: 398170 - DNA, 122 bp, Homo sapiens
gaccatctcgttggtacattcacaattttccgtctccaatattctttctacatttttgtgcgtactgaaaaacagtggtgagtagtacgagcctccttagatctctaaactaccagtaaatc

SEQ ID NO: 398171 - DNA, 122 bp, Homo sapiens
gcggggctggagtccgaaccagcgcagcgcggggcggggcagcgggaaggtagtcggaggcgcagggcggagcggagcggggcggggcccgcgagccgaggtgggggcggggcacgcgcgag

SEQ ID NO: 398172 - DNA, 122 bp, Homo sapiens
aagctgttccacctgcaccaagaatgcgcgctggagacggttgccccggaggccctggcccgagagaaaaccagtccccgctgcccgcgcctcccggtagcgcgctccctgcgcctctcccg

SEQ ID NO: 398173 - DNA, 122 bp, Homo sapiens
cctgcggtgcctatgggcagcacctgccgtggcgccttggttcgcaggtgtccctcttcacgatcatttgatcattgtgagctgccgccgctctctggtcacccctggtgtcacagtgcccc

SEQ ID NO: 398174 - DNA, 122 bp, Homo sapiens
ctgcaccccccaccctcatcccctccccctccgccccctcccccctgcgccgccggctcccgatctgattcctgatccttgattccttgatccttggtcccgccatgggagcctgagcgccc

SEQ ID NO: 398175 - DNA, 122 bp, Homo sapiens
gagtcaccgcatctggttgcctcaataatttcttcttaactcctatatcacctgagggcccggggcacagttcccccgtcacgcttggcattgaacttgcccacctcgccttcccgaggcgc

SEQ ID NO: 398176 - DNA, 122 bp, Homo sapiens
tcaacgttacaccactaccacgttggattacagtaaaacagcaccattcgcacctcaccacgcaccacatcccagcagcccgcggtaagccatagctggtctgatgttggctttcagagacc

SEQ ID NO: 398177 - DNA, 122 bp, Homo sapiens
gtgccctcccaggagcactgtggccgtccgtgtcacctgtgggggtcctaggagcctgcacgagctgccggaggcacatggcctgtgcacgccccttccctggcggagactcagaggcctgg

SEQ ID NO: 398178 - DNA, 122 bp, Homo sapiens
gagctcatgctccccgagatcttaggatgctttggaagcgctctccactggccggccttgcggttgtcatcctgacatgctagccctgccctgaacgcccccggggactctgcaccgtggca

SEQ ID NO: 398179 - DNA, 122 bp, Homo sapiens
tgtggctctcaagtgcgccgctgaaccacactgctcttccttcctctccgtgggtcgcgccggccacctagtcagttctgatgagagaacctggataccttggttgccggtgcaggattcac

SEQ ID NO: 398180 - DNA, 122 bp, Homo sapiens
cccgcggccctggctcagcagccgggccattagcgcgcactcaccgccccaccccgtagccgtcgctgctcccggcatgccccgccccccacggagcctagtggtcttcaggaatggcgacc

SEQ ID NO: 398181 - DNA, 122 bp, Homo sapiens
gcccagcctgtccctgtggacacacctgcaagtaatcgctgtgcctctcccagcggatggcgcgtcttcccattaatgcgcttggattggatgaacgatggtgtagtgggcttgggacaggc

SEQ ID NO: 398182 - DNA, 122 bp, Homo sapiens
gaatttgttcgtcttggaaacgaaatccaagaagcctaaggctcaagacctgatcctgaccgggtgtcacgtcgcctgggagcaggcgatcctgaccgggtgtcacgccgcctgggagcaac

SEQ ID NO: 398183 - DNA, 122 bp, Homo sapiens
cgcccacccgcccaccgggtgaggggccgcggggccgggctgaggtggcgtgtgggtggccgtgcccctctgcctggagccgcctcaaatcaactttattgacagtaggcggtgaccgacag

SEQ ID NO: 398184 - DNA, 122 bp, Homo sapiens
gacactagaaggcagagctgaactaacttctgctaaggtcccgcctctgccgctttgtcccgcccttatcttctcccctcctccagcgcctcattcccttttcgctcgccccggccgtgctg

SEQ ID NO: 398185 - DNA, 122 bp, Homo sapiens
accatgcctggcacacattagaccatcaataccaattgactccaggaaggagtgtctccccgtgggggcatcaggagccgctgagtttaaatacacaggtgggatgtgacacactgggaacc

SEQ ID NO: 398186 - DNA, 122 bp, Homo sapiens
tgcagccgcggcagggatggcgggggttgcggcccctccaggcaatggcactcggggcaccgggggcgtcggggacaagcggcagctggtgtacgtgttcaccacgtggcgctctggctcgt

SEQ ID NO: 398187 - DNA, 122 bp, Homo sapiens
ataactcaggctaagagaggttaagtatcttgtcccaaattgcagttccaatggtagagccgggaaacaaaacctaaatccatctggctgtggaggtcaatctcgtattctctatgtgatat

SEQ ID NO: 398188 - DNA, 122 bp, Homo sapiens
taataggctttgaattccaaaggtctatgaaaggtctgctttactcctcacttaaccttccgggttttcctacttttctttatcttggcaccacaaaccctcattccttgttagttctttac

SEQ ID NO: 398189 - DNA, 122 bp, Homo sapiens
ctcggcattgcgggcctggtgggcagagccgcggagagggcttcttttccccaagggcagcgtcttggggcccggccactggctgacccgcagcggctccggccatgcctggctggccctgg

SEQ ID NO: 398190 - DNA, 122 bp, Homo sapiens
tcaaaagcatatttctgttttaaagctagagttcacttcaataatgcttggttaattgtacgggcattcacacttggtggcaagccagaggccttccttgacaagataaaatagagagagcc

SEQ ID NO: 398191 - DNA, 122 bp, Homo sapiens
tacgggtgatgggcgcggacaatgtgcggcgcatcttgctcggagagcaccggctggtgtcggtccactggccagcgtcggtgcgcaccattctgggatctggctgcctctctaacctgcac

SEQ ID NO: 398192 - DNA, 122 bp, Homo sapiens
ctgagacacccgtaactggcacgttaaaaatttttcccagttccaagactgagaaatgagcgctcctttccaatccacccttcccaccttcccctcgcatgcgttggcgcgaagcccagcag

SEQ ID NO: 398193 - DNA, 122 bp, Homo sapiens
ccgccacccacaacacaggggggtccctgcccgacctgaccaacatccacttcccctccccgctcccgaccccgctggaccccgaggagcccaccttccctgcactgagcagctccagcagc

SEQ ID NO: 398194 - DNA, 122 bp, Homo sapiens
agtctcgcaggcgggctccaggtggactgtagggtaacgccaccaagatgctgggcatcccgaacttggtgtttggacacttgattgtggacctgcgctgcaggcgctgtctgggggctggc

SEQ ID NO: 398195 - DNA, 122 bp, Homo sapiens
cttcctgatttcgtgtggctgtctccaaggaggaaacgaactacgcatcccaagatgcatcgcgcataggcaatatggtcccgctactggacccatttcctacctgggaaatggagtcgaag

SEQ ID NO: 398196 - DNA, 122 bp, Homo sapiens
tacgtcactcggagcgccggcggaaacgagacgagcctcgccccgcacgtccggaagccacgcctccagcttccggccacacctttcggcgggtgacatctttgctgagggctcaagcggag

SEQ ID NO: 398197 - DNA, 122 bp, Homo sapiens
tagccatagccttcagagtggcctacggaacccaaaccctttcactcagttggtcctgctcggaatcctgggatttaggaatcatctgggctcctgtccagctccacatgtcaattctggag

SEQ ID NO: 398198 - DNA, 122 bp, Homo sapiens
ggcggaggaggaaacctctgctctcggtaagggcaaatgaaagggtaagaaggactgatacgtaacatcttaagggcctgcagacaaagctggacacacgagcacgcacacaggcacacgca

SEQ ID NO: 398199 - DNA, 122 bp, Homo sapiens
tggtagaaggcttgctgggtctcgatccagatatagcgctggccctggaagaggtaataccgcagcacccgcttctgggtgggagagaggagaggatgggttggaagctggccccggcccca

SEQ ID NO: 398200 - DNA, 122 bp, Homo sapiens
atttcatttcctctgacggtggtggccaccctgtgctaagcagaaatgcttccagcccctcgcactggctgccccttgcaggcgggcgggcaggggagggggcgtgcggctgctcgtgtttc

SEQ ID NO: 398201 - DNA, 122 bp, Homo sapiens
tggccagcccagtctccaactcctgaccttaagtgagcccatacacaatcaagaagagagcgagacctgttctttttttctgtctttgactatttgagacagtcttgctctgtcacccgaga

SEQ ID NO: 398202 - DNA, 122 bp, Homo sapiens
taagacacccagcatgaaaccccagcaccgactgcaaattccaccgaaagcagagtcatccgtttttgccctcggcaaacaactcaacttcaagcctcgagtccttgcaaacccacgctggc

SEQ ID NO: 398203 - DNA, 122 bp, Homo sapiens
tccgctgggtgagtccacagctgtccctcttgtgatcatgggactcagcagcactgaccacgtccttccacgctctctcacctgcccccaactgggggcccatgacttggcattagcatgtt

SEQ ID NO: 398204 - DNA, 122 bp, Homo sapiens
ataagaaggaaagagaaagaacagagaagtgggaagacagtggagggtagaaactaggaccggaagacatggggacaagctgatgcccactgcacaacgtcctcacaggtagttgggccatt

SEQ ID NO: 398205 - DNA, 122 bp, Homo sapiens
gaatgaataactttcttatcctggcctttctctaactctctcacttctacttgggtcacccgccccctccccaggagtcttataaaacaaccaggggaagaggaaacagaagtggctcatat

SEQ ID NO: 398206 - DNA, 122 bp, Homo sapiens
actgtgggacacccatggccgtgacaccagtgactggagggactgtgggtcacccatggtcgtgacaccagtgactggcgagactgtgggacacccagggccgtgacaccagtgactggagg

SEQ ID NO: 398207 - DNA, 122 bp, Homo sapiens
cctccactctcctgcccgcccctgacgtttcttccccctgcgagaaaggctccagaatttcgcttaataaacctggttgaggcctggaagaaaagcaatctggcaaccgggggccgaagaac

SEQ ID NO: 398208 - DNA, 122 bp, Homo sapiens
cggggaccgatcgatggagagaaggcgggcaagacgccgggaagcgcattcctcctcaaccgagtgccacaaccgccctcccgaagtgccccggggcttcgagcatcacctcgcggtaatcc

SEQ ID NO: 398209 - DNA, 122 bp, Homo sapiens
cctatcaccctaagctagggagtaggtcgaattaagggtactaccttcatatggatggcccgatacctggtcataatgaaatcattctttcttggccttggtctctccacctgccgacaggg

SEQ ID NO: 398210 - DNA, 122 bp, Homo sapiens
gtagggcgcagggccccaggcaaggccaagccagcgtcccctgcacggcgtctggatcttcggggaaaacgctcacccacccctggtaaagggcctgcagatcgagcatcccgggccccacc

SEQ ID NO: 398211 - DNA, 122 bp, Homo sapiens
tcagaattcccaggtccgcagctgtgcgaaggaccaataagaggcctttttgaacagtgacgccaggcgccctggcgctgcccccaagctcgtgcctcatttacagcctgcgggcgggagtc

SEQ ID NO: 398212 - DNA, 122 bp, Homo sapiens
ctctcccccagagagaagaatcctgaatctaggctagagtccttccatgaccacccacaccgggagtgcccagtcactcctcttcctgggactcttcatgtgtaaagtgaggctacaaagtc

SEQ ID NO: 398213 - DNA, 122 bp, Homo sapiens
ttctgcatctggcatacagccctggctcagtaaataactgaaaggtattgatcataccagcgtcagggtagagatgagataaatcagcttgcctcttcccctggttgttacatatgcacgag

SEQ ID NO: 398214 - DNA, 122 bp, Homo sapiens
ggctgagggtggaagaacggaggcgctcccttccccccgcgcccctaggctatgcggagccgctgaagggcgtcccgccagagaagttcaaccacaccgccatctccaagggctaccgctgc

SEQ ID NO: 398215 - DNA, 122 bp, Homo sapiens
tggtgtggggcagggggcagaaagaagggcaaaaaacaagggagatgttgacagtaagagcgagaacaaaagctttagaagtttagggcttacaagccatcaattatttgacattctggtct

SEQ ID NO: 398216 - DNA, 122 bp, Homo sapiens
ccctccactcccgcaaaactccaacatgcactaggaatagcctgagtctgcgtggacgctcgcggcccacctggctgacaccggcagcggtacgctcgtcaccagacacccccgcatttctc

SEQ ID NO: 398217 - DNA, 122 bp, Homo sapiens
gaccaagccaatgaggaatgggagactgcatcagagagcagtgacttcaccagtgagcgccgaggggacaaagaggcacccccaccagtactgctgacacccaaggctgtgggaactcctgg

SEQ ID NO: 398218 - DNA, 122 bp, Homo sapiens
tgcagataatcccgggaccacagtttgagaaaccgctattatctagggggttggctgagccgagcaaggcataagaagccttcccccaactctcttcatacatgaatagacttgcctggacc

SEQ ID NO: 398219 - DNA, 122 bp, Homo sapiens
ccgagattgcggcgaggagagccgcagcacaaggcaaatccacgcggttggtccccgctacgcccccgtagtcacccgcagcccctcgccaaagggcgctccgcgcatgcgcacaggatccg

SEQ ID NO: 398220 - DNA, 122 bp, Homo sapiens
ttaggaaggcttcttgcttagggagaatgcatgaagacaccattgtaagaaaataaagatcgtatttcatgtagtgtgactttactgagtgggcgtggccttccctgtttttttcttgccag

SEQ ID NO: 398221 - DNA, 122 bp, Homo sapiens
atggaaggaataaaaacggtgcagcagaggtccccccatgggcgaaagtgccttccaacccggcatgtgtggggcccaggggatcctgggtttccctggttcacgccaacaaagcatcttgg

SEQ ID NO: 398222 - DNA, 122 bp, Homo sapiens
gggaagaagaaatgggaatttgcttaccagtagttaaaaaaaaaaaaaaggaaaggactacgtggaaacgaatgcgggtggaggaggtactaatatcttctgagcatctcctacaggccaac

SEQ ID NO: 398223 - DNA, 122 bp, Homo sapiens
agaagatacaagtgagggctttgagacccgctcaggaataactcatgagcaatcagcacgcgctgagaggaaacgtcttccagaattcgttattattcacattagacattactggagtgggt

SEQ ID NO: 398224 - DNA, 122 bp, Homo sapiens
cagtggctcacacccgccgggcacagtggttcacaccagccgggcacagtggctcaaacccgctgggcacagtggctcacaccaacagggcacagtggcccacgccagccgggcacggtggc

SEQ ID NO: 398225 - DNA, 122 bp, Homo sapiens
gtcccgcgaggaaggctgccggcatcggcgccgacgctccgcgctggaaaaccgagagcgcggggtttggcagaggccattcaagtttgttttactcgttcagcctgtatttgtggggctcc

SEQ ID NO: 398226 - DNA, 122 bp, Homo sapiens
tgctctccccagatggcccttacctgccgatagatcttgcccttttccaagcgggtgatccggtcccactgaagtgagcccttctcatcgagttttctgaaaggcctggggtgcaggtaaag

SEQ ID NO: 398227 - DNA, 122 bp, Homo sapiens
cctgactccggtcagtttgcaggaagaggaaacaacaaaacaaaggaaccgccaatccgccgggtattatatccctcagctccaacctccgacttcggaccgccagggtcaccttctctacg

SEQ ID NO: 398228 - DNA, 122 bp, Homo sapiens
ggcatgatgtgacacagatgagcccggccctggctcctcagggaggaccctgtagacctacgccggggatggtgggtgccctgaggaagggtaacctccccagcaggtccctccaccaggcg

SEQ ID NO: 398229 - DNA, 122 bp, Homo sapiens
atttcctggcctgctcattcatgagtagttgtttgttcattcacgcctcacatgcattcacgcatacatgcactcacgcatacatgcactcaccgcgtgcgtacagccactcgctcgctatg

SEQ ID NO: 398230 - DNA, 122 bp, Homo sapiens
tcaggctaggaaagcttggcccgccggtcctcctctgctttctccgcctacttgggtcggcgaacacttccgccttggtgccgcctcgccccgacttcccagtatgccccgcgccgtctccc

SEQ ID NO: 398231 - DNA, 122 bp, Homo sapiens
tgccaagtagattagtgactaggaagttgtcagttctctgactggctcatcataaacttacgctgtgtatcaacaatgtaatgaatggcatgcccacatgtatgtagtgtgtgtgtttttgt

SEQ ID NO: 398232 - DNA, 122 bp, Homo sapiens
gccagagtggagagggcgtggccttgcgcccgcctgacatagcaagactgcagaggaaatcgccgtggcaggaaagcgcctcgcctggacaccagctccgcattaatcaccaaagcacactt

SEQ ID NO: 398233 - DNA, 122 bp, Homo sapiens
cggcgaccaggaagtcccggaagaagagctgttactgcacagcggaacacacgtgaacgccggcagggtggagagaaggaggtgacagctgctcccgtcgccccgccctttctgaaagctga

SEQ ID NO: 398234 - DNA, 122 bp, Homo sapiens
ggtcacttaatttcataccacttggcgaggtaggataactttcttctttgacaactgtctcgactatataaatggtgattataccggaaagggttctaatgccttttccacattcttccagt

SEQ ID NO: 398235 - DNA, 122 bp, Homo sapiens
ggcgcagggacgctggctgctcacctccaggagccgacagaaggtgccttcggcgtcacgcgtccaaccctggggctgatttaaataactaataagctcagagaaattttacgaggggaact

SEQ ID NO: 398236 - DNA, 122 bp, Homo sapiens
cttctagtgtggcaccccttttcatttgggtatgtagagccatggttactgttcaacagacgttgaaccagatgtgcctgctattacagaagtgaaatctgacagctgttacctaaactctt

SEQ ID NO: 398237 - DNA, 122 bp, Homo sapiens
tttttccataatcaggaaagcctagaatcttaactccaaataggaaagcttctatctgtccgctttgccatttggtagctcagggttccccaaatccactgcctagtgtcttcaatctttct

SEQ ID NO: 398238 - DNA, 122 bp, Homo sapiens
agtggcattttggcatctattgtcgtcatatctgtctgctgccccacttaatctacaaatcgctcacgggtcggaggcaggacccgtgcgttttcagatgtactagctgggctgttctaact

SEQ ID NO: 398239 - DNA, 122 bp, Homo sapiens
ccacaatgccctgcgcgcgccccagccccgcgtcgggaacaagtgcacggtggttaactccgaagcgtccctcagtggagcaccaaggcaggactggcttctcagggcacttggcagcggga

SEQ ID NO: 398240 - DNA, 122 bp, Homo sapiens
tgcccgttggaggccccgcccctggcactaacccctcccccttatctcttcgcagcgaggcggctgcgcagtacaacccggagcccccggtaagccccctctgcaaccagacccccttctcc

SEQ ID NO: 398241 - DNA, 122 bp, Homo sapiens
gccaaggtccaggcaagaacaactctcaattaaagagtgctctgtcctaaagaaatgctacgagatatcggctcacagagaaaagtctcaaatttttaatgcagtctaatcaaatttagcca

SEQ ID NO: 398242 - DNA, 122 bp, Homo sapiens
ttccttataggatgagtattttcctcctttcaaggtgtgagagcgaccaagaagcaataacgcataggggagtcggggtgatagattggaatgctcttggctggagtgtgattggtgtctgg

SEQ ID NO: 398243 - DNA, 122 bp, Homo sapiens
ctcatatgtcaccttccttatgactaacaatgacatttaaaactgcactacctggcccggcgtggtggctcatgcctgtaatcccaacactttgggaggctgaggcgggcggatgcctgagc

SEQ ID NO: 398244 - DNA, 122 bp, Homo sapiens
ctcacagacttcatttacaaactacacatttacagataagatatgaagaatttcaagacacgacagtagaacattaaatccctagcacaggcttttgtgtcactgagctggttgcacaccag

SEQ ID NO: 398245 - DNA, 122 bp, Homo sapiens
aggattctcccggtgtccgcgtagggatctcatgctatataggagggccctgccaggcaccgtctcctctctccggtccgtgcctccaagatggtgagtcttcttgcgtggtgagggtgggg

SEQ ID NO: 398246 - DNA, 122 bp, Homo sapiens
gcgcggctgcagtaggctagagagtccgcacctgcgccgcggccgtggggagagagggtgcgtcccggcagtcccgcacgacgggccccgcctcccctggtgaccccacgctccggcctcgg

SEQ ID NO: 398247 - DNA, 122 bp, Homo sapiens
tggctggctacacatgtgacctcaggccattcattgtaaagccacaaatctcatagtctccgaggtcactaagagctttatttccttgccaggagcggtggctcacacctgtaatcccagca

SEQ ID NO: 398248 - DNA, 122 bp, Homo sapiens
tgatgggcagttaaagactgaattttgtggtgtggattgttcattttgggaattctttcccgggatagaacttaaattgagcttagaataacaaagaggattttcatgcaaaagcgagagcc

SEQ ID NO: 398249 - DNA, 122 bp, Homo sapiens
caacccggggtacagtcacctgccccctctccccaccaaacacactcacacagacgagcacgcaggttttatttttcatagcgtgcacaagaactgcgaagtagggcctagaggataataaa

SEQ ID NO: 398250 - DNA, 122 bp, Homo sapiens
aggtccgcgggcgccccatgctggcagtggtaatgccgccggctggcatccggttggctgcgcgctgggaacgccagcgaggcagcgccaccggcttgaggagggtgaaagttcaattcttg

SEQ ID NO: 398251 - DNA, 122 bp, Homo sapiens
ccctgaaaagctgagtcaccttgggtaatttgcttagcctctctgagcttcagtttcactcgggagctggccaagaacacttgtctcagagttgctatgacattcgaacatggcagtgtacg

SEQ ID NO: 398252 - DNA, 122 bp, Homo sapiens
ttaaatgttgcctgtgtgcttgtcaagaatgtgtagcctttccttgttgagttctggcctcgatatatacctgttaaaacaaatgtgttcattatgttgttcagattgcctatatctacttt

SEQ ID NO: 398253 - DNA, 122 bp, Homo sapiens
aaaaaaacatacacaactacacatactgacttctggagtagacgctcggtgacttctttccggtgtgataacttttttgggttgtgcgatgggaaggtatcgagtatctgtagctactgctc

SEQ ID NO: 398254 - DNA, 122 bp, Homo sapiens
gcactttgaaaatccaataacatgcaaaatctcagggaaaattcctaacgtgaaaaatctcgggacaagataaaggaggcagtatcatctttgtgtctctacttctgaagttcagtcttact

SEQ ID NO: 398255 - DNA, 122 bp, Homo sapiens
agtatgtgtcagaagtgggattcgaacccacgcctccattggagaccagaatccccaccgcggaggaagcttagcttgagtctggcgccttagaccactcggccatcctgacacactgcata

SEQ ID NO: 398256 - DNA, 122 bp, Homo sapiens
cttccaaggctggcctcctcagcatgtactgcttaccgaaggaactcctcagtatctggccggggaacttccccacgatcttgccgaacgggactgccccccagttactatttaagagtccg

SEQ ID NO: 398257 - DNA, 122 bp, Homo sapiens
gttgtatattgggacagataactaagcctgctaagcttgactctcagatactatagagaacgatcaaaagagtttaaataaaaataatttaataaatgaacaagttatagaggtgtggggag

SEQ ID NO: 398258 - DNA, 122 bp, Homo sapiens
ggctcttctggttgacacagtgggatgtagaccatgctctgtttgataacacaccccagacgcaaacactaagacagatgtggtacatgaggatgaatatatctcatctttcattcgagaaa

SEQ ID NO: 398259 - DNA, 122 bp, Homo sapiens
aaacagttccatagcagctcactctctcaggccccaggaggtcgcagaagggcaacctcccggtttggcttattttccctgggaagtgtctgtcgttcaggcctctttaaggagtcagtccg

SEQ ID NO: 398260 - DNA, 122 bp, Homo sapiens
agtttccctgattgattttcctcacacagcccccgctgctgttaaggacaagacttttaccgcaggaactaaaaattaggaaaatggtgtgactccaggcaacagcagctcaggactcagtc

SEQ ID NO: 398261 - DNA, 122 bp, Homo sapiens
gcagcacaccacaccgcagcacaccgggaaagcgatccgcctctgtccttctcacctcctcgttctgataagcagtcaccgctatgaactgggtctcagggaagcagtggctggtgatcatg

SEQ ID NO: 398262 - DNA, 122 bp, Homo sapiens
gggcagagggacccgaggcagagctgggcccggggtggtgccacacttgcacacggagtgcgggggccggttccggacacagagatggggctgcactttggaggcccggggtgcaagtgaga

SEQ ID NO: 398263 - DNA, 122 bp, Homo sapiens
ctgcatgctgcactgcacgccactgtggtccaggacctgggcctgcacgacggcatccagcgcgtgctgtttggcaacaacctgaacttctggctgcacaagcttgtcttcgtggatgccgt

SEQ ID NO: 398264 - DNA, 122 bp, Homo sapiens
cgcgacggcggccgccgcaatagcggcattttcgggggcgcacgcgcactgcaccgtccgcggccgttcctaacctcaggcagcggctgtggcagtaagcccctcgggtgcgcacgcgctct

SEQ ID NO: 398265 - DNA, 122 bp, Homo sapiens
gcgaggccctgcccctccccgccaacggccattctctggacctgtctttcttccgggaggcggtgacagctgctgagacgtgttgcagccagagtctctccgctttaatgcgctcccattag

SEQ ID NO: 398266 - DNA, 122 bp, Homo sapiens
tctttcctggaaagaagcagccagagctggcaatttgtggtgtatggtaggagacacagtcgattggggccctctgtgaatttctttatactgttctttctggagtctcataaaatcctggg

SEQ ID NO: 398267 - DNA, 122 bp, Homo sapiens
caaccctgtgtggtcccggctggcgggagagacctgggctctgagactctctgggagccacgtgcacgggggcgtctcctgcaggagaccccaccctcctgacggatgaggaggctccaccc

SEQ ID NO: 398268 - DNA, 122 bp, Homo sapiens
taaacatttggacttagaaatttcaagtaaaaatgtgttttgttgtgaacagaaattcaccggcattattacctaagtgtatttccgagatgttgccacgtatgttttcttatttacagcta

SEQ ID NO: 398269 - DNA, 122 bp, Homo sapiens
ctctctcttactcccacagccaggctcagaattcacttttcatccttctaagacagccagcggacggttcgctacttcgtcctcgcccctcccctccggcccaggcttctggcagcaggccc

SEQ ID NO: 398270 - DNA, 122 bp, Homo sapiens
tggccgctgtggttgctgtttgcggtggtctagggaggaagaagttgacacacttggtaacggctgctgtcagccttacacatcccgggactcacacgggtaaagtctccatatcctatgct

SEQ ID NO: 398271 - DNA, 122 bp, Homo sapiens
tgcagcagtgcagtagaatagggcctggcaaaacctttgctagcaaagcgccttttgtgccgggctgtggctcgctatcgacatctcgtccgttaccaaggctgggtttcctactgatttcc

SEQ ID NO: 398272 - DNA, 122 bp, Homo sapiens
taagaaagctcaggtgtgcagtatttgttttcttctcacttagagaaatgggagcatgtgcgtaagcagcatcagggccacagagcaaggctgaggaccagcaccctccctggaaatcacag

SEQ ID NO: 398273 - DNA, 122 bp, Homo sapiens
aagtcacctgtaaaaggtggcccagtgaggcaggatgaggctggtccagacccggacctccggattctggcctctttccttcccgctgcctgctgcttggtgatagggagggtggcctgacc

SEQ ID NO: 398274 - DNA, 122 bp, Homo sapiens
ggaccgcgcgcctctagagacctgcgcgaggctgtgaggctccccttcctcccctccaagcggttctcctggtgatcgccccttcgccacctctctagcctgggcaactgggggcgccccgg

SEQ ID NO: 398275 - DNA, 122 bp, Homo sapiens
agcccaggctggagagatggaagccggaagactccggagtggcacagtggttgcagggcacggggatacttaggaaagccccttgccaggcagcaagagctgctcctctatgtgcccccttc

SEQ ID NO: 398276 - DNA, 122 bp, Homo sapiens
tactgaggcatgttgtattctgccatcggatctaccacaaagtactggtagcgggcagagcgctcggccggccagtactggtgacacttctcctgtggaggagatggcggccgtggtcagcg

SEQ ID NO: 398277 - DNA, 122 bp, Homo sapiens
gttgtggaagtgggggagaaggtgtgccaggcgatggagggggtcggcgggggcggggcccgcactgtccccgccccatgtgggtggagcctcctgcccgggcctgtgtcgcggcagagcct

SEQ ID NO: 398278 - DNA, 122 bp, Homo sapiens
gccagccaagccctgaaccctcgacccataggtaacttttgttttcttaaacttagggcccgtcttagttgatagatgtctattttgatctctcaaattgcaataccaaattataattttga

SEQ ID NO: 398279 - DNA, 122 bp, Homo sapiens
tccagcctgctctgggagaggagcacgcctcccttgagctgcaggcgggtccggctctgacgaaacgctgcgagaatgccagacagtgtagcctccaccgtttgctcggggtctctgctgcc

SEQ ID NO: 398280 - DNA, 122 bp, Homo sapiens
aggcggcagcggcgacggggggaaccgggcctggggcagggatcggggccgcgactgggacgggcggctcgtcggagccctcagcttgcagcgaccacccgatcccaggctgttcgctgaag

SEQ ID NO: 398281 - DNA, 122 bp, Homo sapiens
aataagctctgactcccgctgtctgcaaaaatgaccggatgcaggaatgtcacctagaaccggccagctttccgacctctccggtcaaggacgcattcctaagagacgaagggagaatgaca

SEQ ID NO: 398282 - DNA, 122 bp, Homo sapiens
acctctctctgcgaggtctttttgacaagctgtttggggcaccgcgcagacgtctggcgccgggagccagagctcgggcccgttgctgagccctgtgttcctgcaggcgatgaagctagggg

SEQ ID NO: 398283 - DNA, 122 bp, Homo sapiens
tatgcagcctcagtatcagaacgagccaggaggttaacggagcgtcgtcgtgcagcgtcccgggacaccagggcccagcgcgcgctctgcttcccggcgctgccctctgggactccgcaggc

SEQ ID NO: 398284 - DNA, 122 bp, Homo sapiens
tctccattcagtattgttcccttgctggtaaggagttgtgatcctttggaggagaagaggcgttctggttttgggaattttcagccttattggactggtttttcctcatctttgtggcttta

SEQ ID NO: 398285 - DNA, 122 bp, Homo sapiens
ttgttttagtcagctgaaagttcataccagggacacatttgaccacattcttatttcaaacgttttggctcctgtagattctatttcaaatgttgacagctagaaacttgttagctttaccg

SEQ ID NO: 398286 - DNA, 122 bp, Homo sapiens
tggtccaggcgggcccaggcctcggcgatggcggtcgtgttgctcagcatgcacacggcacgctgcaccttggccaggtcacccccaggcaccacagtgggaggctggtagttgataccaac

SEQ ID NO: 398287 - DNA, 122 bp, Homo sapiens
cgcagccgcgccgcggggtggctcccgggtttccccaccggacggccgggagggtgggaccggggcgggacctcccccagctgcactaacgcgcccgccccgcccctccctggccaggtgca

SEQ ID NO: 398288 - DNA, 122 bp, Homo sapiens
agggcgctcccctgggtcctagaggcggtcggacgcagcagcagggagtcgggagctgcgcgcctccccgccggttcgagtccccgtcttgggacctgcggccgcggggctctcgctttctg

SEQ ID NO: 398289 - DNA, 122 bp, Homo sapiens
tcgtttctcccggtgggttcgtggtctcgctggcttcaagagtgaagctgcagaccttcgcggtgagttttgtagctcacaaagacagtatggacccaaagagtgagcaacaagatttaatg

SEQ ID NO: 398290 - DNA, 122 bp, Homo sapiens
gagttcgtggtctcaccggcttcaaggaatgaagtgttactgcttgattagagaaaggtgcggacccaaagagtgtggggcggcaagatttattaaagggaaagcgaaagcgaaagtaaagc

SEQ ID NO: 398291 - DNA, 122 bp, Homo sapiens
cctgccatgatgcatccatgtaccaggcagtgagaggcatagggggcatgaagcacagggcgggaccagctctgcacacacggccgaggccctgacaagtcaagtgacttctcgggccttca

SEQ ID NO: 398292 - DNA, 122 bp, Homo sapiens
tcagggcatcccctgatgcaggttggtcaggacctgcccagcttgcaccagcaggttctgcgtctccatctgacctggcagaccttgcactcttccacccactgtggaggactaagtgtctt

SEQ ID NO: 398293 - DNA, 122 bp, Homo sapiens
tggcagatacagggaattcggcagccacaagcatgtcctccttctccttcaatccaagttcggctgtggtccctcatgaccagccctccaggcccacagggaccgacagcaaccccatgccc

SEQ ID NO: 398294 - DNA, 122 bp, Homo sapiens
gcggtcggggaagccggtcagggtggtgcgcaatgtcaagggtggcaagaatagcaagtacgcccccgctgagggcaaccgctacgatggcatctacaaggtgagtgccccttgaggaggcc

SEQ ID NO: 398295 - DNA, 122 bp, Homo sapiens
ctcacgggaggtcttgttgacccggaagtgcatgggaggataagcaccgaagaagccatccggaaggggttcatagatggccgcgccgcacagaggctgcaagacaccagcagctatgccaa

SEQ ID NO: 398296 - DNA, 122 bp, Homo sapiens
ggacagtccagcagctggcccagctgtggggcctgtggtctcccctcctctgccccctcccgtgctctttggatagccttgtacttacagccacttggacaagccttagcattgtttgcctc

SEQ ID NO: 398297 - DNA, 122 bp, Homo sapiens
gagcagaactgaaccggctttaccaaaccgccagcgaacttgacaattgtattgcgatggcgtgggctgcgtgacgtcacctccggtcgtgtctctggtctccgtgttttccagttaattac

SEQ ID NO: 398298 - DNA, 122 bp, Homo sapiens
gaaacctgaccataaatcttgtctgccttgagagtctaggattttaagcacatagccgggcgcagtggctcacgcctgtaatcccagcactttaggaggccgaggcgggcggatcacgaggt

SEQ ID NO: 398299 - DNA, 122 bp, Homo sapiens
aactcccgccccttaaggctgagggcccggaagtcccctccccggaagtgaaattggaggcggaaacaggcacggaaagcggtggaagtagcttctgacctttctgaactgtctgggaccct

SEQ ID NO: 398300 - DNA, 122 bp, Homo sapiens
tctagcctgaacgggagcggcaatgggcgcctccctagatcagaaacgcagcagacatcccgccagatccagaggggtggaagtcaacagcgggtctgcaacaatggcgatcagcagtggtg

SEQ ID NO: 398301 - DNA, 122 bp, Homo sapiens
tccctgtttcagaaccgagttaagatgttcacccttctcccctgtttgggtcccccctgccgtttagctactcgtaggcccggttgtccgccagggacgggcctagttccttcctcagctcc

SEQ ID NO: 398302 - DNA, 122 bp, Homo sapiens
cgacctttgctccgcgacctggaacgggagcgactttttgagacacttccagatctactgcggctgctcctgcgactcctacttcgtgaccatcttctagatcgagacctggatctgcttcc

SEQ ID NO: 398303 - DNA, 122 bp, Homo sapiens
aaaagtgttgtcattggtagaaaactcaggtcaataaatacttactggatccctgctatgcgcaaggcactgcaatggcaccaagatggtttgagcactgtccctgcccaaagtagctcaca

SEQ ID NO: 398304 - DNA, 122 bp, Homo sapiens
agcctccagctcctccgtagagaagagctacgagctgcccgatggtcaggtcatcaccatcggcaacgagcggttccgctgccccgaggcgctcttccagccttgcttcctgggcatggaat

SEQ ID NO: 398305 - DNA, 122 bp, Homo sapiens
ttgcattttcagtcaaattttatacccctccagcgggggactatttgcttttacacaacacggagcccaacagagagccagctagagataaagcaggcactagaagatgtgttgaaaccagt

SEQ ID NO: 398306 - DNA, 122 bp, Homo sapiens
gtcctgggctaggtgggcactaccaggggctcctttggtaaggagtaccgggtaggcacccggtcctgccaatccaccactggaacagctggggggacagcagacaggcacggtcggacaga

SEQ ID NO: 398307 - DNA, 122 bp, Homo sapiens
cagggacctgttcacacgtcacactggccccggagggggaggtgccagcaggtgccctcccgtcaccacatggaggctgtcacatacccaggtgccatgtcacctccgctgcagcatgagct

SEQ ID NO: 398308 - DNA, 122 bp, Homo sapiens
cagggctacagaagctggtccatgaccaaccatgttctgaccactgcctggggggcttctcggaggtagagagagagagagagcaagaggggagagagcgagccagcaagccagcgagcctg

SEQ ID NO: 398309 - DNA, 122 bp, Homo sapiens
ttctcgtatcagtggttcctttattaaatccagccttaaatcagctaacacaggagacagcgaaatgcctgcgggggtcagccccaccacagtacagagcagagcaagacatgggagagaaa

SEQ ID NO: 398310 - DNA, 122 bp, Homo sapiens
gaccccaggccaggctttgcggcacccctggctgaggaggcggttgccaaagcctcccaccggggagaaaacgtcagtgaaaaggataactgagagcaccggtgctatcacatctatatcca

SEQ ID NO: 398311 - DNA, 122 bp, Homo sapiens
atggtgagatcacggctcactgcagcctcgaactcctgggctcaagtgagcttcctgcctcggcctcccaaagtgctaggattataaggccactgcacccagctgcggttgtgatttttttt

SEQ ID NO: 398312 - DNA, 122 bp, Homo sapiens
aagttaaatcgaaacaccattctgagtgtctgctgccaccctgagagcagttgcaacaagcgcattcgtctctgagcatttaactgcaaagggtttagataaatgagtggtggtttcctttg

SEQ ID NO: 398313 - DNA, 122 bp, Homo sapiens
tcggggcagcgcgggctcccttctttccagcgcaggaagaaggggtgagggaggaggggccggggtgctggcactcaacggtaacatctgttttacttaagcagctcgatttcgttttagga

SEQ ID NO: 398314 - DNA, 122 bp, Homo sapiens
aaaatcaagctaaggcgatcacccaagctctacatcccaggaaatttactcatgattgagcgttcctagggaaaagcaaaggactggttctgactcaaagacaggcgattatagaagctcat

SEQ ID NO: 398315 - DNA, 122 bp, Homo sapiens
ttgtgccaggctctgtccacctgagtcccatggcattcgctttttaaaaaacattatccacggttctgtggaattttctcatttcatgagcaatagaagtctgactcctaatttgtcatctt

SEQ ID NO: 398316 - DNA, 122 bp, Homo sapiens
ggtgtgatcacagctcattgcagctttgatttcctgggctccagtgatcctcctacttcacgctcctgagtatctgtgactgcaggtgagccccaccatgctcagccaatttattttttatt

SEQ ID NO: 398317 - DNA, 122 bp, Homo sapiens
actcttctcacctgcaaaatgggtacagccacatcccttctctccctgcagccaggaagacgcacatacacaggagtctagcccacaccggccccgcacaaattaagggctttactctctga

SEQ ID NO: 398318 - DNA, 122 bp, Homo sapiens
tatcctttgctgctttctttggtgagcacctatgagttgtattcttgttggctgccctttcgttttgcaccaaatgatgccatattttgtaagccatctttaaaactctctgtggatcaagc

SEQ ID NO: 398319 - DNA, 122 bp, Homo sapiens
atggtttttctgctaccagtacttaagcatccctctctgattataacaattctgtggacacgaccaaggcagtgatgttgtaagtcaggccagatcttaaagggaagtcccattcttgacta

SEQ ID NO: 398320 - DNA, 122 bp, Homo sapiens
gcctcatgatagattattctcaggctaaatttataacaggcactcaacaaaagtattcatcgcttatcccctaacattatctagtagctataggagccggtgacctagtaaataaaaaaaaa

SEQ ID NO: 398321 - DNA, 122 bp, Homo sapiens
cctggcctgaggccagcttcaatttggaagctggagctccagatcccagtggctcctatccgagtaaggaagggaggagcaaggctgagcccaatggctaaatcaaggcacaggcaggggac

SEQ ID NO: 398322 - DNA, 122 bp, Homo sapiens
ccttctgctccacaagaggtttctgtcctccctgagctctccttaggacacctgcattaccgtttgacaggtgtactatcccaaactccccacctggcactgtcctcgggacgggtcaacac

SEQ ID NO: 398323 - DNA, 122 bp, Homo sapiens
ggcacattcatttaagagcatggaccaatgttaagaattttttacagatatttttgcaggcgagatgataaagaggaaaccaatgataatacaagaaaggcattttctaaattctgtagatt

SEQ ID NO: 398324 - DNA, 122 bp, Homo sapiens
tcgcgccgcctgccgcccccggccgttcactgccgcatttcgcgctctcgcgccgcgccccgccccaccggcctaaatttgcatatcccaggatcgcggccaatcgctgctcgtctctctcg

SEQ ID NO: 398325 - DNA, 122 bp, Homo sapiens
cttctagtttgtgcaccatttctctactaataattggagcaaaactccttgaaagagttccgcatacttcctatatttcccaatgtcctcctcctattttctctcaaacactttttattcat

SEQ ID NO: 398326 - DNA, 122 bp, Homo sapiens
ccgactggccgcagcggaagccggcgcgcgatcccacgctgcgctttcgccacgtcctgacggctgcccgataaaacggacattaaaattgcactttccactgaatacagcagcgcctattg

SEQ ID NO: 398327 - DNA, 122 bp, Homo sapiens
tagttgcacctggcctgaagtcagtctcgggactgcctctcaggaccccagacagggtttcgggttcccgcctgggtcacgtgtacggaggctgccagtgcgcactcagcccggcccgccgg

SEQ ID NO: 398328 - DNA, 122 bp, Homo sapiens
ggtgcgctggagcgagtgagcagcgatacctagggcggaagtgctctcggcggaagtgatcgctgtgtgaatcgtgggtgggatggccgcgggccgcctctttctaagtcggcttcgagcac

SEQ ID NO: 398329 - DNA, 122 bp, Homo sapiens
catgtagttctcgcagggctcgcgcaggcagatgttgtcgtcgaagggcagcacgcgctgcgtggagatggtggtcagcagcgtccgattcaggtagatctgctcctgcaggtcctccgacg

SEQ ID NO: 398330 - DNA, 122 bp, Homo sapiens
tctctttgaggcctcccacccccatccaatccaggaggttgcagtcgctgtgggcggcggcggaggatgctcgcaggacaccgctgcagttgcgacctcttcccactagatgtcttcccagt

SEQ ID NO: 398331 - DNA, 122 bp, Homo sapiens
taatctgtccttggaactagtgcaagtcagtttttaactacttgcggagaaagtctgaaacgtcacaaccaaccaaacaaaaatgaccaccacccagtgagtgctggaatgaaattcatgtt

SEQ ID NO: 398332 - DNA, 122 bp, Homo sapiens
ctcttcggaatcttctctagcttcctcagccctctgcctaaacctgcctgaagaatttctcgaagctgaagccaactcaaatataagaaactgttagggcataccgatttacagaatttgat

SEQ ID NO: 398333 - DNA, 122 bp, Homo sapiens
tgatgggaacgcatgcgtccaggagcctttatttactcttaattctgcccgatgcttgtacgtgtgtgaaatgcttcagatgcttttgggagcgaggtgttacataaatcatggaaatgcct

SEQ ID NO: 398334 - DNA, 122 bp, Homo sapiens
gtgagtcttcgagaaaacacccatttagatgtaatatgagacgaggaagcacagcccacgcgcttgggactcacctgagtctgggtgctggctgtactttccaatcactggacccgcagaca

SEQ ID NO: 398335 - DNA, 122 bp, Homo sapiens
caacgagatcaaatccgcgcacgcgacagtgagcggcccacggcctggagcgcgcgcccgcgcagcagctgatgccccatttacagttgctaagccgttcattcagctgtgtactcagcgcc

SEQ ID NO: 398336 - DNA, 122 bp, Homo sapiens
ggccgggagaagtagcctggaagccaatcgagccctggcggaagtcgggctcggcgcaggcgcactgagactctggcctaggcgcgggcggcagcctggcagacctaggagagcgcaagcgc

SEQ ID NO: 398337 - DNA, 122 bp, Homo sapiens
aggctgtgcgggcacagctgttacaggcagggggcaggggcctcgtggagcttgtgtagacggaggggcggcgggccgtgtagtgcaggctgcgaagactcaccgcggtgaagtgcggccag

SEQ ID NO: 398338 - DNA, 122 bp, Homo sapiens
ctcagaagattctgttttaaccacagcagatgcactgaagtaggctcatctggcggccctcggaggaaggaccgagtgttgcataattccagcaaatgagagcagaaatactgagaacagcc

SEQ ID NO: 398339 - DNA, 122 bp, Homo sapiens
ttctttaatctggatattctgccatcctgttggcaacacctttcaccagcatttaacagtcgatactggatataaactttagatcaatatagttacatttggtagttttctctgaaaaactc

SEQ ID NO: 398340 - DNA, 122 bp, Homo sapiens
ccgggacgggggcggcgaggagaccacaggccgggtcaggatcaatgtgttggatgtcaacgacaacgtgcccaccttccagaaggatgcctacgtgggtgctctgcgggagaacgagcctt

SEQ ID NO: 398341 - DNA, 122 bp, Homo sapiens
gcataactactcaatccccattttctcatctgaggaactaaggcacgaaacagggagtgccgaagggtacaccaggcctgatgtcctaatgcagaaaccgggccttcctgcagtgggccggg

SEQ ID NO: 398342 - DNA, 122 bp, Homo sapiens
gggcctccctaactgtccccctcagggcaagcccttcctccccacttccagaaagctgctcgttccctggccatcccacacctctgacctcgtgccacttccggggcctgttggctttaaca

SEQ ID NO: 398343 - DNA, 122 bp, Homo sapiens
agaaaaagcctagctacaacccaaacgcatccaccagtcttcctaagtcttaggaggaggcgggattagcaagagaaaggaggaggaggaggggaaaaaactactttttgtctcttccttcc

SEQ ID NO: 398344 - DNA, 122 bp, Homo sapiens
ctggaggttcacagcagacacctaggacaagcttggaggtggcatcactgctcaggaaatcggctgattggctgtagctgggcctttagaacaggcaggtgactttagctgggtctctggaa

SEQ ID NO: 398345 - DNA, 122 bp, Homo sapiens
ccttccacggctgtgctgccccgccggcctcgggaacgtggcggccatcgccctgggccgcgacggggccatcacacggcacctgcagcacacgctgcgcacccgcagccgcgcctcgttgc

SEQ ID NO: 398346 - DNA, 122 bp, Homo sapiens
ctcttgaaaccccctcaactgtaaataaccattactccggctgagcatctttgatcaatacgtgtgatcactgatctctatcataatggttctttcacattcactgcatctctgggctttgc

SEQ ID NO: 398347 - DNA, 122 bp, Homo sapiens
ctatgttctgggtccagttgcaagaccatcctgcccacttgctgggtcgctgaggcagagcgccctggactgtgctctggagagcagggggccgtctctgctcactgctgggcagtcagagt

SEQ ID NO: 398348 - DNA, 122 bp, Homo sapiens
atgtgtccaccactccagccccagggaggacaatgacccagcacccaagcctggcaaggacggtgcctgccagacccaaccccagtgcagacgccctgccccacagccacaggacagaatgg

SEQ ID NO: 398349 - DNA, 122 bp, Homo sapiens
gggccggcttggccgctgcagccaccgggcctgggccccagcactcgagccgcagggcgtcgcaggcctggcctcgcttccccagagtcggccctccccaggaattttttgttccttagccc

SEQ ID NO: 398350 - DNA, 122 bp, Homo sapiens
gctggtgacgcgggcagggtcagggttggttgcaggtggcagctgctgctaaacccattgcgagcctcagggtcaccaagttcaccgtcctttcatcatagtatctgatctttggcccgcgc

SEQ ID NO: 398351 - DNA, 122 bp, Homo sapiens
ggccaagcctcccttccccctcgtagggccaggcgtcccagtcgccgaacaggaagagggcggggccaaggaggaaaaaaaaagcctccacccctcgagattttccacccgctaattttccc

SEQ ID NO: 398352 - DNA, 122 bp, Homo sapiens
catgaccaccccctcccttgtccccaccatgcccatgatgagtcttttctcaaggcagctcgccttgcctccatctcaccctcacctgtgcaccacagccacactggacatgggtccctctg

SEQ ID NO: 398353 - DNA, 122 bp, Homo sapiens
ggatttatttttctcagggcttccagcccagatggctcaaagtctatggaagaagggtcccgagtgcaggtggccaggcctggttgtctgctgtgatgctggctttatgtgacctttctggc

SEQ ID NO: 398354 - DNA, 122 bp, Homo sapiens
tcaacatgcatgcttcggcgacctcacctcgtagtctggaagggaagatcagctgagctccgggggtagaagcagccaccaagagacccggatgccccacctcccgcactcctacctgcagg

SEQ ID NO: 398355 - DNA, 122 bp, Homo sapiens
gccgggagcacggtgagctggccaagtcctcctgagcaagcgagtggcggctggcccggccggcctgggcttgggcctcctccaagactcgcctggcaggagggcggaggcaccccgggagg

SEQ ID NO: 398356 - DNA, 122 bp, Homo sapiens
gatggtggcactccaagcaaaggggcgtgtgggtgctgcaggaggagcacagagcactggcgcccctcccctcccgccctgcagatgccggaggccccgcctctgctgttggcagctgtgtt

SEQ ID NO: 398357 - DNA, 122 bp, Homo sapiens
gtataccagttaaagtagtgtgtggctggtgccagtagaggtcagtcaagggatccctgacgagaataaagagcccagaaacaggtccatgtttatatgggaacttgatttttgacagatac

SEQ ID NO: 398358 - DNA, 122 bp, Homo sapiens
gcatggcttcgggggccggacctgcgcctccgcctaactccggccgccggagacgccgtgcggaccccaagccagtgcgcggaagacaccgtcctaccctcggcatggctgcctcccacccg

SEQ ID NO: 398359 - DNA, 122 bp, Homo sapiens
gcctgggaaaaacggtgaagaggcaccacttactacaagcagtccgagtagctgtgactgcgaccaccccaatcctggttccaaacagcatccttcccggttctcttcttaaggagcagagt

SEQ ID NO: 398360 - DNA, 122 bp, Homo sapiens
tggcaaaccggctccatgggcgaatagtcagcaaaatgccgcagctgcttctggtggcttcgccctttcccccactccccgtttcctcctttccattccggtgataaaccatgagagaagca

SEQ ID NO: 398361 - DNA, 122 bp, Homo sapiens
cactaggtgtagtcttctcgagtagaatccaggcagtcgtggagcgaacgcagctgccaccggagaggaatcgtgttaacagtcttatttgtttctgtcaaaaaatttcatagacaaccgta

SEQ ID NO: 398362 - DNA, 122 bp, Homo sapiens
accaaggggctgccataaggagtctgtgactagagatgggaggtggtggccacggcctctcgctgtatgctgtgtggaaggtcgaatcatcatcatcataaaacttaatattgcccttatgt

SEQ ID NO: 398363 - DNA, 122 bp, Homo sapiens
ccgccgccgccgccgccgcccgctttcggctcgggcctcaggtgagtcggaggggccgggcgcccaccgagcagggctaatcctgtggccgcctggggttttccctgcgacctgcgcccgcg

SEQ ID NO: 398364 - DNA, 122 bp, Homo sapiens
agctcaaacaggcgcacgtaccctggacatgccctcctctgtcacaccaatgcctttctacgaagacatgtgaccccgaagcagctcgtcgacgcgcccctcccggactctggggccataac

SEQ ID NO: 398365 - DNA, 122 bp, Homo sapiens
gtgcgcggtgacgtggacgtccggtgcgcgcgcgcaggctcttcagctggagcggacacacggtgtgcgaaccgaacagaataacccgcccccagcgggatgtgaaggactccgggtgaggc

SEQ ID NO: 398366 - DNA, 122 bp, Homo sapiens
gccccctcgttgcaaactacacttcccattgtgccctctcgcgcttcctgccgcgctgcacgctgggagtgcaggaccgcgaggcctcaaggtattttggaactcatattctttagtcaact

SEQ ID NO: 398367 - DNA, 122 bp, Homo sapiens
cgaggcccgatgttgaatgggttggccacataggctctgaaattatcaaagatggtcagacgggagacagacaaggagctggatacacagatcggcagattatctccaaacggggtgaagta

SEQ ID NO: 398368 - DNA, 122 bp, Homo sapiens
gggcgttttaaactgatctttgcacctgctggtggcagagaacagcatttcccccgcccccgacttcctttatgagctgggaggaagcaaaatccagctctattgttggagctccctctggt

SEQ ID NO: 398369 - DNA, 122 bp, Homo sapiens
gctttgaatccaaacacctgggcggctttcactttcgtggggagttgatgtcactccccacggcaatttgaatgactggttctaggacttgatgaggactggaaggtatttctggtggttgt

SEQ ID NO: 398370 - DNA, 122 bp, Homo sapiens
ctgtctctagtaaaacaacaacaacaacaacaaaactacaaaattagccgggcgtgatgtcgcacacctgtaatcctagctacttgggaggccgaggcaggagaattgcttgaacccaggag

SEQ ID NO: 398371 - DNA, 122 bp, Homo sapiens
cctgggcaagcctggcccccactccctgtagtggggcaggtgcaggcgggggtggctgctcggaggaggtggcctgagggatgtatatgagtttcccaggcagccttaggagggagggtggg

SEQ ID NO: 398372 - DNA, 122 bp, Homo sapiens
aacggctagagagttgtagtcctcccgaatactctgattggtcaggatgcagtacgagggcggggtgtgagcgattcagcatattatcattgggtgaatcagggggcgtggtggggaatttc

SEQ ID NO: 398373 - DNA, 122 bp, Homo sapiens
gggagttgtgagtgtgaggccatgggtgtgggcactcagatccgtgtgcgaggccatgggcgcgggcactcagatccgtgtgcgaggccatgggcgcgggcactcagatccgtgtgcgaggc

SEQ ID NO: 398374 - DNA, 122 bp, Homo sapiens
agtgaacagtgtttgctgctctgtacactcggacgaactgtggttgctactctgtacactcggacgaactgtggttgctgtcttcaaggagatgtgatccagtgggagagaaatatacctac

SEQ ID NO: 398375 - DNA, 122 bp, Homo sapiens
tctctccaagccatgagcctggaagaggcaaagatgcaccgagcagagcttcagagggctcgggctctgcagtcctactatgaggccaaggctcgaaaagagaagaaaatcaaaagtaaaaa

SEQ ID NO: 398376 - DNA, 122 bp, Homo sapiens
cctttcatttgattcttgcagtgagctggcgaggtgggtacggctatcctccttccttagcggcccaaggcacgggtttggagagcggggtcacaggcacgcacgggaagggcggggatttg

SEQ ID NO: 398377 - DNA, 122 bp, Homo sapiens
gcgacctaggcgcaggcatgcgcagtagctaaagtcaccagcgtgcgcgggaagctgggccgcgtctgcttatgattggttgccgcggcagactcccacccaccgaaacgcagccctggaag

SEQ ID NO: 398378 - DNA, 122 bp, Homo sapiens
tctgcctgaaaaccctaaatgctttccctgttacaatcctttataatacttgaatttgaacgctttatgacagcagggtcaaataaataagataacttgggttcaaagtctgtttttcttta

SEQ ID NO: 398379 - DNA, 122 bp, Homo sapiens
cgtacattgtcagcttcactcccgcccaatcttcattggcccagcgcgggcccgtagtcccgcccccagaaatcaacgttctaatttggaacacctcagagagcagattggaaccagaggcc

SEQ ID NO: 398380 - DNA, 122 bp, Homo sapiens
ggaggaattcatgaatgcaggctccaacggcaggtgaggctggacaagggataggtgtcccgtggccccagcccacactacctgtggtggtgatgaaggcgtaggacttggaggtctgcccc

SEQ ID NO: 398381 - DNA, 122 bp, Homo sapiens
gctaaaaaggcctccaagagcctaatgatcagataccacacggaaatcaggatgaaacaccgaggtctgaggagcaattaaaattatctgtatctcctacagccactgattaccaaaagacg

SEQ ID NO: 398382 - DNA, 122 bp, Homo sapiens
agcacgagctcggccgagttcatttggtcgcaggaacaagggggtcgccaggagcaagagcggagggggcgcctaaagggaggagaccaaggcctaatcaccatccgccccctaactcccta

SEQ ID NO: 398383 - DNA, 122 bp, Homo sapiens
aaagttatcattttagaattcaggggagaggaattcgtcattccacacaaactcgctgaccgacctgggcgtttagcccacagaaacacagaaaacggaaaccgagccctctaatcttagtt

SEQ ID NO: 398384 - DNA, 122 bp, Homo sapiens
ctccttccccttcttatttttcatgagggtgactttgtacttctgttcggcgccttcctccgcttgttagctctaatgacggccgtgtggctgccgcagaatccagccacagccctgtttgt

SEQ ID NO: 398385 - DNA, 122 bp, Homo sapiens
gtgcagtcctaaccctttcccaacttgtgctggcagcagttaagaaactcctttcaaatccggctgtcttgcgcctgcgcattcaagcaaagcgctcataggcggggtggggggggtggggg

SEQ ID NO: 398386 - DNA, 122 bp, Homo sapiens
aagaaaaaccacatggaagaatagactttaacattagcattggatatttctagatctcagcgctctcacattgccaagtcacttggaatgtctaatcagctgcctaatggaggaactgagac

SEQ ID NO: 398387 - DNA, 122 bp, Homo sapiens
tctagagtgtctccaggtagcttttccagtgccctctctacctgtggagttgctgaaatccgcgctgctcgctcagaaaacgggtcaccgaggaaagatttcagcaggaaagagcagcccat

SEQ ID NO: 398388 - DNA, 122 bp, Homo sapiens
gagttggctgttggggtgagggtttcggctgtagctgattcggtttatcttatttggtcccgaagcgaccttgaaatccctcagccacccagaggaggggtcattggagttgaagtcgggcc

SEQ ID NO: 398389 - DNA, 122 bp, Homo sapiens
gggcagagaaaggatgaagagagaggaatgtccagcatagcgcaggcgctcacttagtagcggccgaatatttatcggcccaggtctgtcgcctcggagccgttaaccgcctgtccaggtca

SEQ ID NO: 398390 - DNA, 122 bp, Homo sapiens
gcagtgccagcatccacaccaaggcaggcagagcatggggctcgaagcgcgggccgggagcgccccctagcgctggctgggcagtgtccctgctacaaacccaaggcccctctcctgtcagg

SEQ ID NO: 398391 - DNA, 122 bp, Homo sapiens
agaatgttacaaaataaagcagcagccaagcgcacacttgcttctaagtgctgagatagccgggagccagccagaccatggcctgagtcccacaccctcccctgacagagccgccctcccgg

SEQ ID NO: 398392 - DNA, 122 bp, Homo sapiens
ttctcgagcctggggaccttgctggtgccctcaaatgccacaccagccttttgtatcacccgaaaggtctttgtggcactctgtgtcttttcctgggcctcccctgctgcctcccttttagg

SEQ ID NO: 398393 - DNA, 122 bp, Homo sapiens
cctgagcagtcccaagcaggaaagtgtcgcaagtggaagggacagaataagtgttgcctacggcactggtgacattcactacaccaaaatccaaaggtggcttaaaaacagagtctttagat

SEQ ID NO: 398394 - DNA, 122 bp, Homo sapiens
ggcctgaagcctatggaccaatgagactcaaggctctgccccttcacagccaatcagctgcgggtccgaggcagacgcgcgggagtggcgctgtcctaggtgcctcccaggctgcccagcgt

SEQ ID NO: 398395 - DNA, 122 bp, Homo sapiens
gctggcaagacgcttaatcaaagtgagcggccccgcgcgccgcgcggcccggctcctccacgtaatttccagccagctgataaagccagctgaataatacggcggccctttggagacaccat

SEQ ID NO: 398396 - DNA, 122 bp, Homo sapiens
acctcccccaggatccatagggacaggaagttgctaaaaatacccccaaactcaggtggacgaggctccaccagaaacgtgatctggagagcagtcccacagccacaggacaggtggcactg

SEQ ID NO: 398397 - DNA, 122 bp, Homo sapiens
gaggtgagtgagaattactgtgtttcttgggaaaaaatacactacagaatatggacatgccgtttacctagcaggcctccaactcagaatagaatacatgggtaagcttagtctgttcccac

SEQ ID NO: 398398 - DNA, 122 bp, Homo sapiens
tggaggtgcctgagaggtggtgggatgtatccatgacttctcccctctccattttgaactcgtgttcccgctgcatcttcttggaaatgacatttttgagcagactggaggcgaacttggac

SEQ ID NO: 398399 - DNA, 122 bp, Homo sapiens
gaatttgaaaaccgtggagacagttaagaggcacgtgagcacgagggcagatgggtgcagcggggttaggatctgccccagatgcagactccaaacctgctgtgctcacaagcttgggcctt

SEQ ID NO: 398400 - DNA, 122 bp, Homo sapiens
cgtatccgagaggcagcagcatctccaggtccctaaccctgtggaatcgccctaaaacaacgggtgtatcagacccatctcctgcaggcaggagcctgggcaagctacataaccttcggttt

SEQ ID NO: 398401 - DNA, 122 bp, Homo sapiens
aagatacacaagaaataactaggtttctcaacaccgtaacctgaatgatacacatcatcccgccctttgcctgtacctagttgactgcttgagcctgctgctaatcattctaatttatactt

SEQ ID NO: 398402 - DNA, 122 bp, Homo sapiens
acgcgtgacccctcaccgcgtgcagacgacacgtgtgaccctcaccgcgtgcagacgacacgtgtgaccctcaccgcgtgcagacgacacgtgagaccctcaccgcgtgcagacgacacgtg

SEQ ID NO: 398403 - DNA, 122 bp, Homo sapiens
tgtcccgccctccggaaccttcctgttacagggtttccaggaaaaaaaaagttgtatttgcgtgcctagctcaacctggccccagctaacatcgttacgcgccatccccgacgtgctcccca

SEQ ID NO: 398404 - DNA, 122 bp, Homo sapiens
ggaagtaagcattgacgctgcctgcctacctctgccctgggctcccaacaccaccacagccgctgagtctctaggcctcagagctgcctgagctctgaggcaggcccagtctctgagaggga

SEQ ID NO: 398405 - DNA, 122 bp, Homo sapiens
cgctcgtccccgtcagccccgccccggcgctcttctcgccgaccaatcaggaggcgcgaccggcctcccagccccgaggcctcgcccccagccggcgcatcgccagccaatgagcggccgag

SEQ ID NO: 398406 - DNA, 122 bp, Homo sapiens
ctccgtccctcagcctcactcgtccgtctccttctccaggcctgggtcccgggtccccatcgccgctgcagcccagatgcgccgaccacagccctggcagggcccagtgcaacccggaccca

SEQ ID NO: 398407 - DNA, 122 bp, Homo sapiens
agtcttcatgtttgtttgcacctgatagctttctcaattagagagaagtgagagatcttacggctgactcgcttgaacactccattaaaacatttcatggcatggtgtgcaatcccccaagc

SEQ ID NO: 398408 - DNA, 122 bp, Homo sapiens
tcactacgttgcccagtctgttcttgagcccgggagctggaggctgccgtgagccgagatcgccccatgccagtatgggcgacaaagcgagaccctgtctcaaacaaaactcacaaaatcag

SEQ ID NO: 398409 - DNA, 122 bp, Homo sapiens
ggcagtgctctctgcctaagtgaacttgggcaattttctacaaacctcagtttctgcacccgtaaagtagcaacggttgttctgaggacggaatgagaaaatgcatgtcaaagtccttagca

SEQ ID NO: 398410 - DNA, 122 bp, Homo sapiens
gccccataaagtgcacctcagaggtcagggaacacataacaaggacattcaaaaggggagcgcgcggaagtggctttaggaagcactaagtcttgcctggttttttttcctccctgcttttc

SEQ ID NO: 398411 - DNA, 122 bp, Homo sapiens
cacagccaatagatttggaatcaggcctaagagtacacatggagggtaaatattaaagtgcgtattatgtacatctagaatccatgtgacttgcagcctacctgtaatttctatccattgag

SEQ ID NO: 398412 - DNA, 122 bp, Homo sapiens
gctaagctctggccaaggccgctgcggcatcgcagtgatccggaccagcggccccgccagcggccacgccctccgaattctcacagcaccccgagacctgccccttgctcgccacgccagcc

SEQ ID NO: 398413 - DNA, 122 bp, Homo sapiens
gaaccaatctggagtgagaattggggtgcagagaaaatccgtaaacttagttgctccctgcgctatgacggatccatttcccatcccaggtgaaccgcagctctgcgtcctggttgtataag

SEQ ID NO: 398414 - DNA, 122 bp, Homo sapiens
gagtggaccttccgccagaagggcactgaggagtttgtcaaggtgtgcgggtgccgggaacgggcatgggagggcaggggtccacgagtgggaggcggtggggctggatctcagggaggggg

SEQ ID NO: 398415 - DNA, 122 bp, Homo sapiens
gtaagctggtcatcctggagggtgagctggagagggcagaggagcgtgcagagatgcgtgcggaggtgtccgaactaaaatgtggtgacgtggcaaagaactcaagaatgttactaacaatc

SEQ ID NO: 398416 - DNA, 122 bp, Homo sapiens
ccgccccgcccctgccccgcccccgccgccgcgccgcctcctcctcctcctcctccccgccggggtgaaactcgagcgccccacccgcgcctgacctccccgagcccctccccgggccccgc

SEQ ID NO: 398417 - DNA, 122 bp, Homo sapiens
ccatgtaatgagcaaggggagaagtgattgaggcagagagaataccatgtgcaaaggctccgtggtaggaaagatctagacgcctttaaggatctaagagaaagccgaagtgtttggaacac

SEQ ID NO: 398418 - DNA, 122 bp, Homo sapiens
gggcagaaggctcaggaaaccgtccatttggaggtctggaaaccggcacagaaataaacacggtagagctagaccagagaccaacaaagtgaatctggagcttagatggagagagaagagag

SEQ ID NO: 398419 - DNA, 122 bp, Homo sapiens
aaagatttgattcagccctcttcgttttgtgactacattcttttggtttttcatatcatacggattaagaaatggcatgtataatgtttttgcataactgcaattcaactcttaaacaaatg

SEQ ID NO: 398420 - DNA, 122 bp, Homo sapiens
aaccctaactcaggtcctggcaaaagatgcgagaggaagacttgctctcttaataaatctcggccgcccgcacatctggcccctagacctgctcggtagaggactggctggtggatgcgcgg

SEQ ID NO: 398421 - DNA, 122 bp, Homo sapiens
ttggatggagggaatcaggaaggcctcctccaaacccaaggctaggagagatgttccctccggggtccagggaggagaacagaaaggactgagaagaactaggaatgccctcccaaacccaa

SEQ ID NO: 398422 - DNA, 122 bp, Homo sapiens
ccctttcccagctcctagagccaatgagccgtggcccatcaggtggtggcctggcgaccccgctgttctctgaactcctgtctagccgtcatacacgcagacgcggttctttctctcttccg

SEQ ID NO: 398423 - DNA, 122 bp, Homo sapiens
gaaggtggcccctctccatcagcatcacggcgatcttctcagctctcttgtgcagctgcacgcaggtcagcgagttcgctatcgcaccctgcgggccgatcacagggacaagcacataagat

SEQ ID NO: 398424 - DNA, 122 bp, Homo sapiens
accgccgggccctcgcgcgggcaggcataggaggctccggggtcggcggcgcaggcggggcggcctctgagcttcgcgctcactctcccgggtctggtcgggcccagccccgaccctccgcc

SEQ ID NO: 398425 - DNA, 122 bp, Homo sapiens
cttaaagttgcagtttctaaagaccctgtcaacgctgttaagtgatgacttaactgtagtcggattccatggaatggaaccatgggccaggacggattaaatcaacagccagcatctacctt

SEQ ID NO: 398426 - DNA, 122 bp, Homo sapiens
gtctcgatcgccatctggcggtggaagtccacattacatccgcggagcaatggctgggaacgttgcataatagagcggggctcaaattccaaattaagtttctgaattttttccatctggaa

SEQ ID NO: 398427 - DNA, 122 bp, Homo sapiens
gccaacaagcttggagctgctggagtttccaaagatctctggatcctgtagtcctcctcccgcgccagccaccgaagaacgctgcggacccagctcgctcctggtagcaagacccgaactgt

SEQ ID NO: 398428 - DNA, 122 bp, Homo sapiens
ttattgaaaacgaaagtagtctccacagtgtgggagcggcctgagcaggctcaagggctgcgttatacaatcttctcggtccaaatacccgctagaggtttcccattggccactcatgtgct

SEQ ID NO: 398429 - DNA, 122 bp, Homo sapiens
ggcttaagcaatgtgcccatctcagcctccaaaagtgctttgattacaggtgtgagtcaccgtgcctggcctgaatgtatctttaaatctgatcctgagttaataataatcttttgattaag

SEQ ID NO: 398430 - DNA, 122 bp, Homo sapiens
ctcccacacctcaggcatcacccgcaatcagggtgcactctgcatgggggtggggggcaccgcttctcagaggtcagggtggacgatggatgcggaggggctgcttctcccaggtcagggta

SEQ ID NO: 398431 - DNA, 122 bp, Homo sapiens
ccgcggaccgcaggctcccaggtagcacctgccccagcctggcgccccaacctccgcctccgggcctcccacgcagtgagtcacctggaaaggacgtaaacagattgagtggggggcccgct

SEQ ID NO: 398432 - DNA, 122 bp, Homo sapiens
ctttggtctagagggaggaagccccaggatccgcccctagggctgagcccggggcttccccgcggccttaaccccttcagtgccgaccccacccactgtgggcggggctccggggtcctcag

SEQ ID NO: 398433 - DNA, 122 bp, Homo sapiens
tccctctggtcttgagggagaagaatcctcctgggtttccagagagtgactctgagggtccgccctgctctctgacacaattaagggatgaaatctgtgaggaaatgaagggaagacaatcc

SEQ ID NO: 398434 - DNA, 122 bp, Homo sapiens
cgatggtgggaaaaatgttacgtgtcattcagagcatttgtcagacgtttattaaagtctcgtttcaggtttggagggtactatttagaagtcttaatttccgaattggatcctataattat

SEQ ID NO: 398435 - DNA, 122 bp, Homo sapiens
aacagcctgcgaggtagtcactgtcctatatgggtacactgcttagcgccataccgggcacgcgttcagaggtcgaccacgccctgacttttccttagctttattttggaagcagtgggttt

SEQ ID NO: 398436 - DNA, 122 bp, Homo sapiens
gcaccgtaggccctctagtgggtctgggtggcgtcctcccggcccctcgctgctcaagcgcggctccctcttgccggggcgcggcctgcccctcacagtgacccccccgacccaccccccaa

SEQ ID NO: 398437 - DNA, 122 bp, Homo sapiens
ggtttcattaatgttagctgatattaactaagtgcttataatatagggtgatgggggagccgaaggaggagtgacccatcgcatttggaaaacgggttattgtccctgtcagctgtcttttt

SEQ ID NO: 398438 - DNA, 122 bp, Homo sapiens
taaggaaaaaagtaaagtgcctgccctcaaacttgtcctctgcccttgcagcttatatgtcggaggggttatcattaacaatttggcatatatccttgtgtaaaactccacacatacacaca

SEQ ID NO: 398439 - DNA, 122 bp, Homo sapiens
gggtccctgggaggggctgttgccctggtggggttcacaggcccctcactgcaggggacccggagcaagggatgccccctggaatggccccgtgaccagaaagcgagcctgcccagcttccc

SEQ ID NO: 398440 - DNA, 122 bp, Homo sapiens
aagctcttgccttgccctcccaaagtgctgggattacagacgtgagtcaccacgcctggccggtaatttctcattgtgaattgattgggtccctgtaagtcacagagcctgtcctgagtccc

SEQ ID NO: 398441 - DNA, 122 bp, Homo sapiens
taagaagccagaggaaggactgcaagtggagcagctgtctgacgtgggcatcccctctggcgagtgtctagcccagtgtagagcccatttttacttggagagcactggcatatgtgaaggta

SEQ ID NO: 398442 - DNA, 122 bp, Homo sapiens
gtggacgcccataggcccctggtgtgcagtctctcacatgctggggattgttactgagaacggcattccccatccttatctaaggcacctgcacccagcaacgccaaacacaaaggcacgtt

SEQ ID NO: 398443 - DNA, 122 bp, Homo sapiens
gcctgtttattttcccattgattttgccatccttgacccaaagcacagaagtcaataccccgttaggtgtggcaccttcatggggcctctgctgtctctcgcgctgcagggagagctcccct

SEQ ID NO: 398444 - DNA, 122 bp, Homo sapiens
cttcacagagggctattcccgcatgtttttatgcacgcagccctggtggcgctgtactgtcgtggactctgctgcgacgcagttgtcacttgctgtcctgcgttgaagacctttctgtgtag

SEQ ID NO: 398445 - DNA, 122 bp, Homo sapiens
tcctgaaagcaaaaatgggcaattgagataaatgaaaaagagaggcatcaataagaaaaacgaaagagttcatcagtgaatttttatggcatctaaaattttagtttttggtaatttagttt

SEQ ID NO: 398446 - DNA, 122 bp, Homo sapiens
ggctcccagcgtggccccccaaatcacgggcctcccagctcaccctggacactggggcaccgggcccagagtccacccagcaggggccaggaggatttactgacaaggcgaaggtctgattt

SEQ ID NO: 398447 - DNA, 122 bp, Homo sapiens
tgctggggaggatggcgcgcctgaagacgcagccgaggtgggagcacgggcaggctcaggcgggaagaaggaggcatcgtccagtaagaccgtcccggacgggaagctggtgaaaggtatgc

SEQ ID NO: 398448 - DNA, 122 bp, Homo sapiens
ctctgtggcctggcttcactcttcatccatctcacaggggacaagaccacaaacaggagccggacaaaggaggtaggggcaactaaacccctgatttaggagacaaaaagcacggcagtgaa

SEQ ID NO: 398449 - DNA, 122 bp, Homo sapiens
ccggccccgaccccggccggcccgccaaacacccacattcccactgcgcgccttcctccacgcagctgcccctcccgccacccccggcggctccccaggtccccggagccccggaccccagc

SEQ ID NO: 398450 - DNA, 122 bp, Homo sapiens
tacgcgccctcggtggccgaggccgacgtggacgtgctgctgtccatccccatgttcctgcgcctctacctgctgggccgggtgatgctactgcacagcaaaatcttcacggacgcctcgag

SEQ ID NO: 398451 - DNA, 122 bp, Homo sapiens
cactaagtttacacaagaaactggtactatttgaatctaattaatccaaccaaaatttaccgagtgcttcctatatgagtatatgtctaggttgtctattttctaatttctccttttcagtt

SEQ ID NO: 398452 - DNA, 122 bp, Homo sapiens
cagttggtccctgggccaggcagcttgctggaaagaggtgctttcggctggctaccggtgcgcggggaccacactcacaaaccgcattccggtcttcccgcccgaaaatccgcgctgtgcga

SEQ ID NO: 398453 - DNA, 122 bp, Homo sapiens
agcaggcaccctcgagctctccctccatcggtggaagtcggctcaagcaggtcctgaagacgggactcctgagggtttggccttaggtcgcccgtggacctctctcctacgccgccccctac

SEQ ID NO: 398454 - DNA, 122 bp, Homo sapiens
ccctcatgctagcctcgcccctaaatcggacgccgatgccgcccaattttgggggaatcccgagactcatgcccagccattcccagggagaatggtttggggcaaactatggctgtctgggg

SEQ ID NO: 398455 - DNA, 122 bp, Homo sapiens
gctcctcgctctcctcccaccacacgcgcccccctaaaccccgcaggccctcagcccacccggtccagcccagggcttgactgcaccccagagtcaggtcagaaaccaacgcagtggcttcc

SEQ ID NO: 398456 - DNA, 122 bp, Homo sapiens
ccccacccacgatggacaccaggagcccagtcccagatcctggcctcctccagccactgccggtccccaccccacagccccccacctgagcacgaggggcgcagcaaggcccggagccctgc

SEQ ID NO: 398457 - DNA, 122 bp, Homo sapiens
aaaccggcgggcaaggcggcttttccttctgtaggaaacttttctggccaaactcctgtgcgtgcgtgtgtgtgtgtgtgtgtgtgtgtgtgtgtgtgtgtgtgtgtgttctttccccttct

SEQ ID NO: 398458 - DNA, 122 bp, Homo sapiens
aagacggtcacctttcggggacctgaaaattttttttcaggtggcgcccccattacaagccggccgtccttccgggggggcccggagcaagcccggctctcgcctggtggcgtttctcacta

SEQ ID NO: 398459 - DNA, 122 bp, Homo sapiens
gccccacccactgtgttacgccacagaggcagccctgggggttaggattggcagagctctcgtggagacctgccatcgtgctgatccagagccaccttgctattctctctgtagaggagaag

SEQ ID NO: 398460 - DNA, 122 bp, Homo sapiens
cgaactcctgacctcaggtgatctgcctgcctcgacctcccaaactgctgggattacaggcgtgagccaccaggccaggccgctccttcattttatagataagaaaacagcctcagagagga

SEQ ID NO: 398461 - DNA, 122 bp, Homo sapiens
actgttacttccccacagctgaagcattttcttacccgtatttgtattgaggagtcaggacggtgcgcagtgagcgattccgccgtcgctggcggacacacctcagcggctccaccaggggg

SEQ ID NO: 398462 - DNA, 122 bp, Homo sapiens
cctcctccaagacaaacagcggaaaatctactgcgtggcttgtcaggaactcgactcagacgtggataaagataatcccggtaagagtaaaaaataatccgggagaggggccggatatgctt

SEQ ID NO: 398463 - DNA, 122 bp, Homo sapiens
tcccgagccgggttgacgctggcgtggcggccatgtttattgagggcacctggcttctcccgcttgcgccgccgggtgagcctgaaggcgcgcacccacctggctccaggaagagggaccga

SEQ ID NO: 398464 - DNA, 122 bp, Homo sapiens
tgaagccagtcccccaaggtcacacagccggccggccggccgcaggacaggggccgaagacgtagttgtctgacctgtgctctaaccactgtgctctctggcctcaagccggctcccacact

SEQ ID NO: 398465 - DNA, 122 bp, Homo sapiens
tttcagcagcatatctgagagccaggggtggcagtgcttgggaaagcagctcactatgcacgccagtcactgtgcccagcaaggctgtgactcgacgtcccacagggtcctctgtcaccttc

SEQ ID NO: 398466 - DNA, 122 bp, Homo sapiens
ctccccggtcgccccagcaggcccaggcacataggtgcccagagatccctggcttctgatcgcccggaagactaagaggtgagcatgacacatggcttttcctttgacgttacatctctacc

SEQ ID NO: 398467 - DNA, 122 bp, Homo sapiens
ggggtggcaggagacaggggtaggggagcgtagtctgaggtggggagaaggccgggcccccgagtctcctgcaagaggaattaaaaacagggtctctagagtcggactgctggggctcaaat

SEQ ID NO: 398468 - DNA, 122 bp, Homo sapiens
gacgcaggggcggggcctacggggtggtgagcgggccctctgctggtgggggggcggggccggaggagccaccgcctccccgcctcctggagaccctgagggagaaattccctttaaggctg

SEQ ID NO: 398469 - DNA, 122 bp, Homo sapiens
ctccgtggtcgggcggggtcgccgccggccacatcgccctctgctgttggggaggagaagcgtcccgctgcgcacggcctcagggattagaaatgggcttacctggtgctcctcccgcccct

SEQ ID NO: 398470 - DNA, 122 bp, Homo sapiens
gccactgtgagatttgtgtttctcttctggaagtctcagagactttattggccaaaaagtcgattaggaaagtggtccaggccgggcacatggctcacacctgtcatcccagtactttggga

SEQ ID NO: 398471 - DNA, 122 bp, Homo sapiens
caaggacactttgtcacttggtttccgtcagtctcctgagaatggggaatttaggtctagcgtggttcacagttctggttttttaggagttatacttgaaagctcaatgtcggacacatagc

SEQ ID NO: 398472 - DNA, 122 bp, Homo sapiens
caggggctcagtgacagctgccttcctgagccgcttcggttacctttcgcacccacgagacgaaagcttccgagagcgggagagagaacaagaaatggcccgcccactcccggtgacaggga

SEQ ID NO: 398473 - DNA, 122 bp, Homo sapiens
gggctctccccacagatgccacctctcccagtctctgctgggtgcccccatgtttggccccgggtgtttgtcagggtgtctgctgagggtctccaggcatctcaggccccacagggatgata

SEQ ID NO: 398474 - DNA, 122 bp, Homo sapiens
atatgtttgcccatttttaaatagggttgtcatgttattggtgagttttaagagttcttacgatatctgaaatactagatccttaacagatataggatatgtgaatattttatcattctgtg

SEQ ID NO: 398475 - DNA, 122 bp, Homo sapiens
tcaggtagaaagggcactctatataactctgcacttgcccaggaatctctcctctacaatcggcagccagtacttcacgtgtctggagggagcgggagaggcaagcaaggttaatgacgtgc

SEQ ID NO: 398476 - DNA, 122 bp, Homo sapiens
cgcacggttctcgctgctggggtctctgccggccaataggagaggcctgaggcctgaaggcggtggggcggggcattggcggctccagcaaccggaggccgtcccagggagggccaatcgga

SEQ ID NO: 398477 - DNA, 122 bp, Homo sapiens
caactgtagcttgttctcatgtggttcttcttgcctgcttttctgctgcttagcccagaacggacacctgccatgcccacctctgtgccttggcacctactatttccactccagactatttt

SEQ ID NO: 398478 - DNA, 122 bp, Homo sapiens
ggccggggaactcaggggcaaatctacggctcacctaccttcttaatcccctagactagccgttggctatatggtgacatataggacacccacagatccctatcattcaatgacatatattt

SEQ ID NO: 398479 - DNA, 122 bp, Homo sapiens
gtgaggcgggatctgcgccgagtgggcggggggtttcctttccccgcagggctgggggtccgctgtttccccgcgctgctgccgaggccccgccgtccgcgtcctggccgtgtgtccacacc

SEQ ID NO: 398480 - DNA, 122 bp, Homo sapiens
ttctctgttcttacactcaagcctagcggtgctttcgccaggcagcagcagcctctcctgcgagttttaggcatgtatgcagctcagtttgatcgagcgttccttttctgccttttcactct

SEQ ID NO: 398481 - DNA, 122 bp, Homo sapiens
ctggggaggttctggggaccgggagagtggccaccttcttcctcctcgcgaagagcaggccgggcctacccgtccgcccgctctgccgtccgctggccggccgactgctgcccgatcactcc

SEQ ID NO: 398482 - DNA, 122 bp, Homo sapiens
gcccgacggcggcaggaggcctccggactccgccaccatcccagctgccccgggagcaggcgagcagggcgccacgtgctcccccagagcagcctcccagtccccgctgccgtccatcttgg

SEQ ID NO: 398483 - DNA, 122 bp, Homo sapiens
acccacctctccctccctcttcttcctctgcacacactctgcaggggggggcagaagggacgttgttctggtccctttaatcggggctttcgaaacagcttcgaagttatcaggaacacaga

SEQ ID NO: 398484 - DNA, 122 bp, Homo sapiens
acccgcgcccagattgccttctggcattctgcgtcgttggggaagggccctcttatctcgcggtggaactcgtggcagggcggggggcggagtcccgggcttgtcctccctgcgagcggctc

SEQ ID NO: 398485 - DNA, 122 bp, Homo sapiens
acgatgcccaaaggctccccgttgccctacttctcctgctggctgcaaagggaccttcctcggcgggctgcaaatctccacccagctccgcactggaggcgtccccttgggctggttacttt

SEQ ID NO: 398486 - DNA, 122 bp, Homo sapiens
ggtggtgcttttttattaaaactgcgcaatgcctacactgccgcaggggctgcagaaatgcgtggaatccttgcgtaccctttaggaaccctcgctttagaggctatggcataagaagactg

SEQ ID NO: 398487 - DNA, 122 bp, Homo sapiens
tcacttgtctcttctatctgcggcctagagtggggtaaagctgttacctcccttgggagtcggcttttgagctctgggcatgagtcagccctgttcctgatggccgcaggatgattggcaga

SEQ ID NO: 398488 - DNA, 122 bp, Homo sapiens
acccacccctcgccaccaagctgggtgcagagaacagggcaggcgcacggacggttcttacggccccaggcgccagacccagggcacagaggccaggatctcacgcgcgaccgcacgaggcc

SEQ ID NO: 398489 - DNA, 122 bp, Homo sapiens
agcgcctgacgtggcgctgatgcggggcgggcaggcggagcccagggacgcctgatggggcgggggcgctgcgggctgggggggcgttaaagggcctggctccgggaaggggcgcctcgccc

SEQ ID NO: 398490 - DNA, 122 bp, Homo sapiens
aagaaaatgcagcagactgtatagacatacccccttaagggtcagaataatttaacgttacgacagctttaagtacaattatttaatttcacattttccccttttcattaagatctttcaaa

SEQ ID NO: 398491 - DNA, 122 bp, Homo sapiens
gcagccagttaagcggcgtaagctaagagacgcggggttccggtgcggtgccctccggcccggggttacctactccacatgtgggtgtttttcccaagtgcggcttctggggggcggcgcgg

SEQ ID NO: 398492 - DNA, 122 bp, Homo sapiens
ccccaggagtttcacacgggggtagggtgggggcgggtgtgacacgcgagttcccgcgaacgtgagagggaccttgtgctcaagcagcccaggtgtccaggatccctgcctcctcaaggtca

SEQ ID NO: 398493 - DNA, 122 bp, Homo sapiens
acaaaggcaatcagatcccatcctcctccttcatacccacctctgttgaagaacatgtaacgtactactgccatcttagtaaaaattttgaaaggatgaccactcagaacaactctcttgat

SEQ ID NO: 398494 - DNA, 122 bp, Homo sapiens
caccctgcatcctagcctccttcctcaagaaaacctatgcacgcccagagattatgtcatcgaggcagaggctgctccagcaccagcaaagccactccaaggcagcccgggccgcggccgca

SEQ ID NO: 398495 - DNA, 122 bp, Homo sapiens
tggagagaactcatgtggcccaggaaacatggacaggaatgttcataattgcaaaggcctcggtaacaaaagccagaagtccccaaatatccatgtgccagagaacaaatgcaatgagtttg

SEQ ID NO: 398496 - DNA, 122 bp, Homo sapiens
gcagcgtctccggatcgggtggaggacgagggaatgcggacacggccctgtcttcccctccgggtaattgatgacctcaggagaacagctccattttgcctgcatgcaacgtgcacagttct

SEQ ID NO: 398497 - DNA, 122 bp, Homo sapiens
tgtttagttgtctaggtttctgacattttgacttgtggctcctagagacttgagtggcagcggagatattaatttttatgcatgttgggcatgagatataaacaaagtggatatttccttta

SEQ ID NO: 398498 - DNA, 122 bp, Homo sapiens
ctgcccaggtgaagggcgggtgtgggaggtttccgtagaggccgctctcccctgctaccacggccccgtgtgggaccctgggtctgtctgacagacagaggcttcctgagccaggcccttgg

SEQ ID NO: 398499 - DNA, 122 bp, Homo sapiens
tgccagctcccatgtaccagcagctggaatctgaaggcatcagtcttcatcttagggcatcgctcttcctcacaccacgaatctgaacatgcctctctcttgcttacaaatgtctaaggtcc

SEQ ID NO: 398500 - DNA, 122 bp, Homo sapiens
ggaactcctgagctcaagcgatcctcctgactcggcctcctgagtatctggaactacaagcgtgtgccacggcacccgactagtctacttaatttgaaacttatctagtgctgtccattccc

SEQ ID NO: 398501 - DNA, 122 bp, Homo sapiens
aaggaaaatttgcacttgcctctgagaacttacaatgtggttggggatttacaagacacacgcaactaagtccactttagaaactcacagagaaaataatagggcaaaccttagacctaacg

SEQ ID NO: 398502 - DNA, 122 bp, Homo sapiens
ggccgcgggcgctcgcttggtagggtgtgctggggcgtagagtttagggtcctgaggctgcgtctgcgtgtcaactcagtggagtctctcgaccgccctttgttaccctcctttagtgacca

SEQ ID NO: 398503 - DNA, 122 bp, Homo sapiens
gcgcgggcgtcgcgagtccctgtgtcctcccctgaccctcgggtccgcgcaccccgagcccgaagtcccagaaagaccagaggcacttactgttctgcatgctggctctggctgggggccgc

SEQ ID NO: 398504 - DNA, 122 bp, Homo sapiens
aggcaaaattcccaacaactaaaatatctctcgggaaatccctttccacaccctcggggacgtcccctggccctggtatcctcaggcccgcctggcggctgacacaagttgttctaacaggg

SEQ ID NO: 398505 - DNA, 122 bp, Homo sapiens
ccgggactctcgggaggcagagctggcagggccggagcagatctgggtcagtgcctcccccggggggctgcggtgtcattcagcaccttcccggggctgggtcccggggctgggtcagcact

SEQ ID NO: 398506 - DNA, 122 bp, Homo sapiens
cggcggcggcaggcgagtgtgcagtgcgcgcagccgccgatgggcggggagtgagggactcgcggcgcgccgccggcggggctagagggcgtcctgcgggctcagccgcgcgccgctcgccg

SEQ ID NO: 398507 - DNA, 122 bp, Homo sapiens
caggagtaaagatctggggaagacggacacgtccttccaaggctgaggaccccggtgacccgagctgagggcagccagagcccggggtgaccaagccctgccctacgtgtccggctgtctct

SEQ ID NO: 398508 - DNA, 122 bp, Homo sapiens
ggtggcggggtggggggctgttggtgcgggagcgcctgcgccgctgtcgctgtagaaggtcgagcggtcacttgttccttcgttcattcattcactcatccatccatttgtttgttcactca

SEQ ID NO: 398509 - DNA, 122 bp, Homo sapiens
caaactcctgagctcaagtgatctgcctgcctcggcctcctaaagtgctgggattacaggcgtgagccactgcacctggccactattgatcttaaaacagaccctaagtggacaatgctcca

SEQ ID NO: 398510 - DNA, 122 bp, Homo sapiens
ttattctttgaattcctgtgcttaatcatctgtgactcttctgtaatgttttagtcttgtcgtttttattacacaactatacgtccttagaggtcaaagtagaaggcttccatttattaaat

SEQ ID NO: 398511 - DNA, 122 bp, Homo sapiens
gttcacatctggagagacacatccaggctacatactcaaagaaatgctaaagaggccggccgcggtggctcacgcctgtaatcccagcactttgggaggccgaggcaggcggatcacgaggt

SEQ ID NO: 398512 - DNA, 122 bp, Homo sapiens
caccataaaaatgcttaagcatcctattgttagtatttctttcaatgggaagctgcatttcgcttgggttaacctcgattggaaagaggagaagaaaagtgattcaatccctaagaagttaa

SEQ ID NO: 398513 - DNA, 122 bp, Homo sapiens
cacgggtgcctgggctcagcctcttaacgctgtgaacacatctcagcattttccaggcagcgataaggcattggttctcaggcttgccgagagagcccttgactttctcctcaggttctcat

SEQ ID NO: 398514 - DNA, 122 bp, Homo sapiens
tggggctcggctttccggggcagcagaggttccgggggctgcttgggcaggaaggtgtgccggctgaaggggaagggcgaggacgagggcacgaagaaggggaacatgaggcccgggtggac

SEQ ID NO: 398515 - DNA, 122 bp, Homo sapiens
tgaaacaaagccctgaaccccctcaggctgaaaagacaaaccccgcctgaggccgggtcccgctccccacctggagggacccaattctgggcgccttctggcgacggtccctgctagggacg

SEQ ID NO: 398516 - DNA, 122 bp, Homo sapiens
gctccggcgcggtttagtgggtgcggcctggagagcccacgccagccggacactgggccacgtcggagccgccggggcggcgccgggttgctgagcggcgtcacagatgctcccgcgggtcc

SEQ ID NO: 398517 - DNA, 122 bp, Homo sapiens
actcactaaattgtaagtcttgccttcctcaatcaggcaattatgctattcagaatattgcggaaaatgcttgtctatcagatctgtcagatctcttggtcggctcttggcatcttgcaaac

SEQ ID NO: 398518 - DNA, 122 bp, Homo sapiens
gagcctactcgggagccacacagcgccccctggcggagtggagcgggggcggcggtggcgcgcccctccggtgggcagggtgtctgtcccgcccccgacggctcctccctttccgctccccg

SEQ ID NO: 398519 - DNA, 122 bp, Homo sapiens
gggctcacccagcggccacgggcttctgaagacccgggtgggaagtgcggcccgggaaagcgcaagcgtctccatggcaacgagggcggacggcgtcagagcgagtcgcttccggaagtgac

SEQ ID NO: 398520 - DNA, 122 bp, Homo sapiens
tttttaggcaaaacacatgggctgagccctgtgagcttggggttccagtgtgtgtgggcccgctgtgtgggttctggtgtgtgggggcccgctgtgtgggttctggtgtggggggactcgct

SEQ ID NO: 398521 - DNA, 122 bp, Homo sapiens
tccagacttgaattcgactagaggggatgcagatatgtatgatcttcccaagaaagaggacgctttactctaccagagcaagggtaaggcaggggttgggtgggcacgctggcaccttcacc

SEQ ID NO: 398522 - DNA, 122 bp, Homo sapiens
acagcagatgctcactgatgctcatccacctgtgatgcctgaatgcatgaaggcaggctccgcatagccctttcattcctatggatgtcccccacaccacccagccaccatttagaggcata

SEQ ID NO: 398523 - DNA, 122 bp, Homo sapiens
gactctgcactgctttcagcgttccaggacttaacaacacggatgatcggcagttctttgcgtttatttttggtcctacatgttgttcttcaaacccatttcctcttgttctttccccaaca

SEQ ID NO: 398524 - DNA, 122 bp, Homo sapiens
ggagcgatggtccctgggatgcagtccagagctcagcccccagctcagcccgggaggaggcgcagacggcctcagcaagtctcggaagagcttccccgggggagctgggcccgctttcgtgt

SEQ ID NO: 398525 - DNA, 122 bp, Homo sapiens
tatatatatatataatttttttttgacacagagtctcactctgtcgcgcagtgtcgcaatcgcggcacactgcaacctccgcctcccgggttcaagcaattctcctgcctcagcctcccgag

SEQ ID NO: 398526 - DNA, 122 bp, Homo sapiens
gctgtttttccaggttttcaatttcccgttcatggtctcggactaggctatccttctctgcgttatgctgctgtaataggtgcgtcttctcctgttcatgctccagcttcagctctactatc

SEQ ID NO: 398527 - DNA, 122 bp, Homo sapiens
aatatttatgcctcatctactatattctttatctatgaacattttttccctttctcagagcgagtggaaaccccagagaagggcaaattgaaacaattctagaaattaacaaaatgttaatt

SEQ ID NO: 398528 - DNA, 122 bp, Homo sapiens
gagtggaaaaaatgtgttaaacgtcggtttgacgccccaccggagcttccaaatatccagcggctgggattcttctacttaatttaatctttattggacagggcggctcctatgctcctatt

SEQ ID NO: 398529 - DNA, 122 bp, Homo sapiens
gcccgggctccccgcgccctgccctccgcgccgggggccgcccgccgcagacacgggacccgcttcgaggccgctttggcgccaaatcctgaggtaaaattgaaagagggtcgggcgggctc

SEQ ID NO: 398530 - DNA, 122 bp, Homo sapiens
aaatacagtattcttgggatgtgaaatccacttatagagagggccaacttttcgtatactcgggttccacaggaccaactttggaacttgggtatgctcagatttggggatatatggaaatt

SEQ ID NO: 398531 - DNA, 122 bp, Homo sapiens
ccgctaggagcgcccggtggaggggccgcctttatctgctgggggattccaggagtggcccggaaagtcttgcttcacaccctgctgggacttcctgctggcccagcagaccccagactcag

SEQ ID NO: 398532 - DNA, 122 bp, Homo sapiens
tctggaggctcgactggggatgaatctacttctgagttcatccaggttattggcagagttcgtttctctctggctgtgtgactgagggtcctggccttttgcttgctgtcaactgggagcct

SEQ ID NO: 398533 - DNA, 122 bp, Homo sapiens
gcttcactccccctccacagccaggcgtgcgggtgacgtggcgacgtgtgggtgacgtggcgacctgtgggtgacgtggcggcatgcgggtgacgtgacgacctgtgggtgatgtggtggcg

SEQ ID NO: 398534 - DNA, 122 bp, Homo sapiens
tggtggctgctctgtgggaaagtagagctccggtgtgtggacgtcatgacgcggccatcccgccacaagcacagcaagaaccgctgtgtacaagatcatgtggaggaggtggcgtgtggacg

SEQ ID NO: 398535 - DNA, 122 bp, Homo sapiens
gggaatgtgcggctcaggtcggtccacggagaggtggcccctgccagtgagagacagccccggctgctggacctgctgttggttttgaaatcgtgagtcttcccttcaagggatcagtgtag

SEQ ID NO: 398536 - DNA, 122 bp, Homo sapiens
agttcacagaatcccaggaaagtatgcaacttaattatactctaaatgtcagtccatcagcgacaaagttaatttcacacccacgcaatgaggaccaaatgcaattttctataattagccta

SEQ ID NO: 398537 - DNA, 122 bp, Homo sapiens
agctcgtcggctgtgtattggggcgcgtggaggctgcagtcacggtggcgcccgcggggacggaggagggaatgagtgaagaggagcaaggctccggcactaccacgggctgcgggctgcct

SEQ ID NO: 398538 - DNA, 122 bp, Homo sapiens
ttggtatcaagccttgtctttggtttctgaggcctcctgagcccttctgtactgggagaccgcactccagagtctgcagaggagaccacccctgggaaacaaacacagctgtcttcagagtc

SEQ ID NO: 398539 - DNA, 122 bp, Homo sapiens
gagggagaaggaagggcgcccggggagcaggctggcagagtgaccgggattgatgagcggcgcagctctggagggacgcgggcgagagggtcgctcctcggggagagggctgggtgagtgag

SEQ ID NO: 398540 - DNA, 122 bp, Homo sapiens
agacagtgagcctccaagacaaggcacaggggagaggacagacggccaggcctgggtctgcggcaggccactgcgaacccccaggaagtcacttaacagtcctggttattcaccatggaaat

SEQ ID NO: 398541 - DNA, 122 bp, Homo sapiens
ttggtgccacgctaaggaagacagttcatcgctgtggctgagagcagggaccctgcggtccggcagcggaggttccagcccacgctctggcacttcctaacctctctgtgcctccgaggagt

SEQ ID NO: 398542 - DNA, 122 bp, Homo sapiens
gaaaaggaaagggggaagggaagggggaagggaaggcggaagggaagggaaagaaagaagcgtatttaggcagtatcgcgttgatttcagtccacggaacctctggtgaccgggtagtgtga

SEQ ID NO: 398543 - DNA, 122 bp, Homo sapiens
acacgggagaggccagcagtcaggagggggctcaccgagtttgtctgcactcgctccctccgcagccgccctctccagctggaagaagtcgtaatcgaacctgctcaggtcctcactgcccc

SEQ ID NO: 398544 - DNA, 122 bp, Homo sapiens
tctctggctctaggagctgatgctccaagtcttggcccaaacactacttccggccgggtgcggcggttcacgcctgtaatcctagcactttgggaggccgagacgagtggatcacttgaggt

SEQ ID NO: 398545 - DNA, 122 bp, Homo sapiens
ttggatgtagggtttggaagaaaagagctaaggttttcagtttgggcatgtctgtgcacacgttggcatatgtgtctacataaagcttaatgttatccaaaattatctcatttcttttttta

SEQ ID NO: 398546 - DNA, 122 bp, Homo sapiens
ctgggggtgagagtgatatccctgttgtccaatcagagaagcgggtttccctgtggtccccgccccactttccctgctgccccaataaccgccctaaaaggccgggcttctgctgtcaagta

SEQ ID NO: 398547 - DNA, 122 bp, Homo sapiens
tccgacgatagcttcagcctcagctctggagacccgggacaggaggcgccacgggagggccgcgcccagtcctgctcgccatgccgcggcccggagggcgggcggcgagaggcaggaagccg

SEQ ID NO: 398548 - DNA, 122 bp, Homo sapiens
gtgtcgtggttggaggcgaggtggggcggccgtttgttttctcgtggtctcgagctcgcgcgctctcatcccctcccccgcggcgtgcggcggggcggagaaacggcggcggcggcggcggc

SEQ ID NO: 398549 - DNA, 122 bp, Homo sapiens
ctttgccctgccaatcctgcctgggccaattcttccaaattcctgtaaattctatctcagcgagagattttccactatccccaactctattcttttggatgccatcccctactacatatttc

SEQ ID NO: 398550 - DNA, 122 bp, Homo sapiens
ttagccttgacgggcagaatcaaactacaaatacacaggcctcgccttcaggaggccaagcggcggcactcgggaggaggcagccggagtcggtgttttcttaataggaaactgtccagaga

SEQ ID NO: 398551 - DNA, 122 bp, Homo sapiens
gttcctatctagatcctcaccacatctccgcaaggtcagaattaatgtgaaaaatgcagccgagagagatcaagcgatttatctaaactcagctgttaagtggcagagacaggcagaatttt

SEQ ID NO: 398552 - DNA, 122 bp, Homo sapiens
gctgctgctgctgctgctgtcgctgtagctgctgcaccgacccttctccagtggcggcggcggcagcgctgagcagcaaacctgccgcatctggccaggccatttggggggctccgccgctc

SEQ ID NO: 398553 - DNA, 122 bp, Homo sapiens
cacttccgcctccgtcgccaccgccccggaagcactcgccgcaggcccggaaaaagaatccgcctcgcagcgtcctcttcaggcacccccgggtggccttgttgtctgtttcctggccgagt

SEQ ID NO: 398554 - DNA, 122 bp, Homo sapiens
ggcagaggctatgtctcttgttcatagtcataacaccattgcctggcttggtgctttacacgtggtaggcactcaataaatatttggtgaatgaatagttactacgaataactatataaaat

SEQ ID NO: 398555 - DNA, 122 bp, Homo sapiens
cccggcggcgcttccccagcgccctccgcgtggaaccccgcgcctctggaacagaaggggcgtgtgacgcagtcaccgttgcctagggccacgttctgatcagatctgacgcctccagcgcc

SEQ ID NO: 398556 - DNA, 122 bp, Homo sapiens
aggcggaaaagaccccaggaagcgagcccactcctccccactgctcagcaacaccgcctacgacgttctcagtagccgaatccctttccaggcgcatgcgcccccgaggtgggcgagcgccg

SEQ ID NO: 398557 - DNA, 122 bp, Homo sapiens
ggatagatcttcagttctcatgactacaggaggatactaaggctcagacaggagaagagacgtggccagcctgtgtccccagagtctatgatcttaccactaggttacagtgcttctgggga

SEQ ID NO: 398558 - DNA, 122 bp, Homo sapiens
gcatccccttctcgtttaccggtccccgtggacctcctgactgaattcgcgctggctgcccgtgctgcaatccaggatgggcttcttgcggcccggtcccctcctgactattacctttcccc

SEQ ID NO: 398559 - DNA, 122 bp, Homo sapiens
cccaggaaggtctgaaggcatggttaaaggactccgcatgtcagccacttacagtcaccacgttaccctagcagcaaggctgtcagtcgggacccattcggcggctgctgtggcaactgtat

SEQ ID NO: 398560 - DNA, 122 bp, Homo sapiens
gcaaagcctctgtccatccggcgggtgacccacactaagaagacgacttgcccagagtaacgtgggccacgcggtccaggtgtgtccacctctcacaaaggcagctgtcaacaccgggagtt

SEQ ID NO: 398561 - DNA, 122 bp, Homo sapiens
agtcttttcacaatgaaaccacaacttaccttcttcctacctcaatcagatgccactcaacgattcccttgctctaggaatcctggattttcagctcctctctctgcatctctcaacaacaa

SEQ ID NO: 398562 - DNA, 122 bp, Homo sapiens
cgccgccgagtcctggtgcgcaggcgcgggccgccgcggcccggctctcttgcgcaagcgcgctgtccgcttcttctgggcggacgctctggaggcaaaacatttccctgctgggggcggcg

SEQ ID NO: 398563 - DNA, 122 bp, Homo sapiens
atttggttcacttgaacatgattgtgctgatagataaaaatgaaacattgggcccacgtgcgctcctcctcgcaaagcccgggctccagcgattgccttttcttattggtccagatggtggt

SEQ ID NO: 398564 - DNA, 122 bp, Homo sapiens
gggacactcaaacctgcctcagagaagagaccggcaccattcccaggggagggggcaccccgatcccggccacagcaaattcgtgaatgcccagtgtgcactggggtaaaaaggtcattcag

SEQ ID NO: 398565 - DNA, 122 bp, Homo sapiens
tctgctctccttctctaaatccagttctttctgccaggtgtactcaaagggtctttgctacggaaaagtgatttctcccatccccttctaaccatttttgtgttcttatctctggtcagcaa

SEQ ID NO: 398566 - DNA, 122 bp, Homo sapiens
ggaggagcgcctgccctcccagatccaggtgctgcccaccaggcggtgttaggagtgcctcgtccgcaagggcgccatccttgttaatgggattcaggcctttgtaaaagtggattcttcac

SEQ ID NO: 398567 - DNA, 122 bp, Homo sapiens
tgtcacaactaagagggctaaggagacctgatgactaaatgtaatgtggttttctgaatgcgatcatggaagagaaaaagaatactgggtaaaaactaaggaaatctaaataaagggtggac

SEQ ID NO: 398568 - DNA, 122 bp, Homo sapiens
taaatgaaatgggagctctagtgacatgtgacactttactgtgacctttctgagccactgcggtgaacagctgatgcatttcctcccccatcttgccctgctgaagcaattttgaacactcc

SEQ ID NO: 398569 - DNA, 122 bp, Homo sapiens
ggcaggttctgctttcccggtctcatcacttaagtcctgtcatttcgaaggcaggcgccccgtcgtgtccccaaagcatccacatttcccaagctcccttccggtccttgaggcccctcggg

SEQ ID NO: 398570 - DNA, 122 bp, Homo sapiens
agatcttagactgttggggaattccagaagctgggccacatcctcacggatcagggcctccgaggccaacctcaccttctccaacttccggtgttctccttgtccaggcgcagtttcttaac

SEQ ID NO: 398571 - DNA, 122 bp, Homo sapiens
agaggcaaagtggacctggcaaccacaagaccctccccataagcaggggaccagcatacccgggagctgtccctgtctgtcacagcacagtggggccacgaggctgacattctctggccttg

SEQ ID NO: 398572 - DNA, 122 bp, Homo sapiens
ggccatggaagtgcggttcttcaggggccagttctctagcgtggtccacctctacagggacgggaaggaccagccatttatgcagatgccacagtatcaaggcaggacaaaactggtgaagg

SEQ ID NO: 398573 - DNA, 122 bp, Homo sapiens
cctggtgttcgaggcagcctggccagtcctcggacctgtgcagcctgcagaagaaggggccgcaccttgtggataaggagtgtgtcattcatctttgtgttccagccacttttcgtggttcc

SEQ ID NO: 398574 - DNA, 122 bp, Homo sapiens
gtcctctgagtagtcgtcgccgccacggccgcagccagcgtcctgccccgccatgtttcgcgctccgagccgcgccccgcccatgccctggcttcactggccggcaagaccgccaatcaacc

SEQ ID NO: 398575 - DNA, 122 bp, Homo sapiens
atacggaatgcagcaaacccctaattttccttgaaggggccacggaaagccaaacggattcgtaacccggttgctcaatggtccattggctactgcaggacgcgccctcctcttacgccgca

SEQ ID NO: 398576 - DNA, 122 bp, Homo sapiens
catgtttccctcccctttctgagctcacaactagactccttctcagcctccctatcagtccgatgcagccatgtgactgagtcctacagaaagcaagtgagagaactgatgaatgtgggcca

SEQ ID NO: 398577 - DNA, 122 bp, Homo sapiens
ttatctcttttaaaaattacctagaaataaggtttctttaattgctggttaaaatgctcccgtgcagaaaacaggaaagaacctgcctggttccttagcaaatctgagttccagtcccaggt

SEQ ID NO: 398578 - DNA, 122 bp, Homo sapiens
cacatgagggaagacacgcgtgaagcactgggtccctccatggccttgggccgcaggaaccgtgggcgcacgagcttgggaaggacatgtcggaggccggcgcctgtgcgggcagaagctgt

SEQ ID NO: 398579 - DNA, 122 bp, Homo sapiens
tcccatccggccaggacagatccccgcccagaaaggggctgttgactgcagcgggctgcgcgcccagaactgggactgggatcgcggcggggcggggcgggcgcgggcccagggagaggcgg

SEQ ID NO: 398580 - DNA, 122 bp, Homo sapiens
gtctccgcctcgccgccaacaaggaggaccagcaccaggcctgggaactgctgacctgcccgcccaccttcccacccagaccccgccttcccgggccagcgggacatgacagacctgtgagt

SEQ ID NO: 398581 - DNA, 122 bp, Homo sapiens
ctgtttgcagactgaaatatgagttggcgaggaagaagatatagaccaagacgatgtttacgacttgctcagctggttgggcctatgcttgtgagtgacttcacattcgatttttttctact

SEQ ID NO: 398582 - DNA, 122 bp, Homo sapiens
aatatatgaccttcctctaggaattctcgactggcaagggaaaaatgcctcaaatgagcacgcgcacaacttcagtaaacacactgtgagtgcggccactcccaagtgctggcagaccactg

SEQ ID NO: 398583 - DNA, 122 bp, Homo sapiens
tgggggcgcggggcctgaccttctgcctacgctcctctgtcctgttacctggggtggctacgccagcatcatctggccaaaaatacctcctaatcgttctggctgagccgctgccactgcca

SEQ ID NO: 398584 - DNA, 122 bp, Homo sapiens
cagggttggaaaggagccttaactcactgccctttgctccttttggcttgagtgaaaaatcgaaaagccagacagggagcatatcttttcatcgaccctgttccattttcttatctgacagt

SEQ ID NO: 398585 - DNA, 122 bp, Homo sapiens
ctgtttcctgcgagttcagggggaggagggagggtgagatgaacgtccggggaaagagttcggtgtccacgcctaagactccctcagaatggacaaaaatgtccggtcagcaggtcaggttc

SEQ ID NO: 398586 - DNA, 122 bp, Homo sapiens
gacttaccatgttaccatgttgcccggtctcaaactcctggattcaggcaatcctcactacggcctcccaaagtgctgggattacaggcacaagccacctctcttggccaatttttcttcat

SEQ ID NO: 398587 - DNA, 122 bp, Homo sapiens
caaagtgtttttgtactctagtgagtttacttctctcagacactttttaatataagtcatcgtccctctttatagaggtcaccaaggctcagagagggctagtaacttgctccaggagtcct

SEQ ID NO: 398588 - DNA, 122 bp, Homo sapiens
ggcgagtccgttccccggagtggagctacaagtcccaaagggtcttcctcagcgcgaaatcgttcccagatatttgagttaagttgtttgactccagctgtcccctttcagctctaaccact

SEQ ID NO: 398589 - DNA, 122 bp, Homo sapiens
ctgaagagggaagtcagctgacgaactctagggagtggtttatgaaagcctcgggccacacgtgaggaactctgagttatataactagaacacagatcacacagcagaatgcaagaaatgag

SEQ ID NO: 398590 - DNA, 122 bp, Homo sapiens
gctcggctctttttaaattattgctattattttactaatgggaagggggggcggggtactcgtcaggtaaactgtgatttaatctgaatttaagacccagtattctgctagcagaaacagag

SEQ ID NO: 398591 - DNA, 122 bp, Homo sapiens
gtggagctcaggagccttaggaactgtgcggctgcaggtcagcctcaaagcatccaggttcgctgcaggaggacacctggaaaaaaatctcagaaaaacggctcaagagcctggagaagatc

SEQ ID NO: 398592 - DNA, 122 bp, Homo sapiens
gaagagatcgccgagtaccggcgccagctgcagtccaagagcatcgagctagagtcggtgcgcggcaccaaggagtccctggagcggcagctcagcgacatcgaggagcgccacaaccacga

SEQ ID NO: 398593 - DNA, 122 bp, Homo sapiens
tacatgttgtgggtgccgctccgggagtcatagcgcagccagatcccgaagttcttcacccgcaaggggaacttctcaaacacctgcccacagtagacaatctcccctgaagacttcttcat

SEQ ID NO: 398594 - DNA, 122 bp, Homo sapiens
gctccaccacccacccgccctggaggctgcccctccgagtccagggaaaggcttaccagccggctgcgggagaaagaaccccagaggcatcctatcccaaagaaagaaagcaaaaaggctgc

SEQ ID NO: 398595 - DNA, 122 bp, Homo sapiens
gcctgctgtgcccgcgctgtcgccgctgctaccgcgtctgctggacgcgggagacgccagcgagctggtgattggagccctgcggaggtaagtgtgatttccatgcttctcccttttgcaaa

SEQ ID NO: 398596 - DNA, 122 bp, Homo sapiens
cccatgccctgcgaggagaagaaaacctacgactgcagcgagtgtggcaaggcctttagccgaagctcgtccctgataaagcaccaaaggatccacacgggagaaaagccgtttgagtgtga

SEQ ID NO: 398597 - DNA, 122 bp, Homo sapiens
cccgggccgccgcaaggctgtctgggaaatgtagtcagcacggcgctgtttgcacctggccgcggagcctcctgggaaatgtagttcggcccggccctggcaccgtgaggggaaagaggcgt

SEQ ID NO: 398598 - DNA, 122 bp, Homo sapiens
atctgcgcggccagccaccctaagtggaagggaatgcaaagcctcctgcaacctccacagcgctgggcagcaagaatgcctcctaagcgtcccaacactccaacacctggaaggtcttacgc

SEQ ID NO: 398599 - DNA, 122 bp, Homo sapiens
tctcccgtctcccgtctccctctccacatggtctccctctccctctctttccacggtctccgtctgatgcccagccgaagctgcactgtactgctgccatctcactgcatcctccctgcctg

SEQ ID NO: 398600 - DNA, 122 bp, Homo sapiens
gcccggccgcccgcgcgcctctcacccgtaaggccgccgcccctgccgtggccccggcgtcgctgcagcacgaagaaggggttggcccgctccgtcacccacagcgcattggccaccagcac

SEQ ID NO: 398601 - DNA, 122 bp, Homo sapiens
ggcgctggcagtgcaccctttgctccttcagctgcccatgtagctgtgcctgctcctcttcggcactggctaaagccaagttttaaaatgccacctgcgggcaggaggtgcccattcttgta

SEQ ID NO: 398602 - DNA, 122 bp, Homo sapiens
gccgtgggggcggggcagcaggtcgttctgccaatggagagccgtagagggcgtgagtggcggccgacggggcggagtcgcgcggtggtctccgaaggctcagactctggctggagagaggg

SEQ ID NO: 398603 - DNA, 122 bp, Homo sapiens
aaacatgatgtttaggacactgagagatgtacccagagcccctgctctgatcaactcacacgcatatttgaaaggacaggacctcccatgatcatcatctttaggaaacaaagatttggttg

SEQ ID NO: 398604 - DNA, 122 bp, Homo sapiens
caactgcgactcccctcccaccccccgacttaacagatgtcaaggaaaacagaaggaagccgtttctctccaggacatgcagtgtctgctggagttttggaaaaatgctttctctcgagtcg

SEQ ID NO: 398605 - DNA, 122 bp, Homo sapiens
gctcacaggggctctcactgctggttggccctgccctcccttccccctcagcagggtgcccggaagctggaaccttgttatctgggtaattagtttcagaccctgcactgaggccggccagg

SEQ ID NO: 398606 - DNA, 122 bp, Homo sapiens
acaggtacaggagctgtgccactgaactctacggaggtatagtgtctggaagctcaggtacggggcggccagacacacacaaagctgtagtgtgattttccctgcaggatatctcggcctag

SEQ ID NO: 398607 - DNA, 122 bp, Homo sapiens
gagacagttttgtagtttcgctcttattgcccaggctggagtgtagcggcactatctgagcgcactgcaacctccgcctcccaggttcaagcaattctcctgcctcagcctcccaagtagct

SEQ ID NO: 398608 - DNA, 122 bp, Homo sapiens
aatgaagctttctaattatggacagagaggatgaaatatagggtctggagggatttgagacgggtttccagcagtcggcaccaatctccaccagaggtgctaagtgtctgtagcagatagtc

SEQ ID NO: 398609 - DNA, 122 bp, Homo sapiens
tgcttaactcagaggagcctatgaccttccttgacaaggcaaacagcacggcgtcgtgaacgctgaggaacagctgggtcttggtgatgccagcgtcaaagaaatcattcctctcaaatgcc

SEQ ID NO: 398610 - DNA, 122 bp, Homo sapiens
gtgcaacagagtgaccaatgagactgcaaactgctgcgtgtccataggagagcttatacacgttcacaattaggaatcaaaaaataaattccacaggagtgtgtgagctatgcataggctga

SEQ ID NO: 398611 - DNA, 122 bp, Homo sapiens
cccgcctgcagctgcctctgtccccacccttccgggcaggtggagctggaggagggccgtcgcttccagctgatgcagcagcagacccgggcccagacggcctgccgcctgctctcctacct

SEQ ID NO: 398612 - DNA, 122 bp, Homo sapiens
gccagtcagtgcacccaggcctgtgcaagtggcctgtgaaaggcttctgtgctcgccgcccgcctttccagtggctcaggactggccccatctctttgcagcactgctgagaacgcctctca

SEQ ID NO: 398613 - DNA, 122 bp, Homo sapiens
aacgcacattctagtaacactaccgaagaaacacatgcggcttctaaccgagaacatcaccgagaacggctgcatgaacgcgcattctagtaaaactaccgaagaaacacatgcggcttcta

SEQ ID NO: 398614 - DNA, 122 bp, Homo sapiens
ctcacagggatcctctttcagttcatttagataggtgccctttgggcccttgaaattcaacggctatgtgttcacgttcagcacgctcggctgagagctttcatttttagggcaaacgagcc

SEQ ID NO: 398615 - DNA, 122 bp, Homo sapiens
caagagatgttatctttataacatctgccgtcatctctgctgtgtgggaactaatggctgcgtttgaataattaggcctttgcaccatagcacaacaaaagccggcattgctccattaaagc

SEQ ID NO: 398616 - DNA, 122 bp, Homo sapiens
tttgaacaaactccctgggtgattcttctgcactctgaagattagtactcctgccctaatcgttggtgatggaactcagcatttgtttcagtctgacagacaattattatatcccctgtcct

SEQ ID NO: 398617 - DNA, 122 bp, Homo sapiens
cccgctggagatgtggaaatggagggacgcggcacctgggcgcttcctggggccagacaacgccccctcattggaacctccatgaccctgcctctgagaaaccagcgcgtccgcaacgatca

SEQ ID NO: 398618 - DNA, 122 bp, Homo sapiens
gcgggtcctcagcgcgtctcagccgcaccaagcgcctcccgctcccgcgccacccgggcgcgctgctggggcctgatttccataataatcagccagagatctcccgaaaaggctgggagcgg

SEQ ID NO: 398619 - DNA, 122 bp, Homo sapiens
ggaccactgtaagagcctcagtccggcctcacctccgctttgagggagcaaatccaggggcggggcgagcgggggcggggcgagcgggggcggggcgagcgggggcggggcgagcgggggcg

SEQ ID NO: 398620 - DNA, 122 bp, Homo sapiens
aaggctcagatgccactcaccagacagcagggtcgactgctagtgaccttgagcccagtccggacagacagacaggcagacagacgcacggacaagcagatgctccttggccagctatccac

SEQ ID NO: 398621 - DNA, 122 bp, Homo sapiens
gccaacctaaagatgaagtggaagcttaaattcgaagagtgggccaggtgcaatggctcacgtctgtaatcccaacactttgggaggccgaggtgagcagatcacttgaggccaggagttca

SEQ ID NO: 398622 - DNA, 122 bp, Homo sapiens
gggggtctgggtggggcagtgaccccacatttgcttgcagggacccactggctacaaaggcgagcagggggaagtcggcaaggacggcgagaaggtgaagctgccgcacagcagctggggag

SEQ ID NO: 398623 - DNA, 122 bp, Homo sapiens
cggtgcgtcggtctgtcctctccggcgggctggggctgggaggatggcccagcggaggagcgggggagtgttgttgtttgctgacaactgagccgagagctcatctctttgaggtcgctttt

SEQ ID NO: 398624 - DNA, 122 bp, Homo sapiens
agttaattagatttccctaaccagctttttaaactgggtgaactgagttctagatatattcgttagcattagctgatccaaaaagaaaacagaactagttccagaagaagaactccatgttc

SEQ ID NO: 398625 - DNA, 122 bp, Homo sapiens
ctgtagccaggaactcggacacagaacccacagctttgccattccttccttcagcgaatgcgaattgagtctactccatgctaggcctttgctgatgctggagatacagctgtgaataaaat

SEQ ID NO: 398626 - DNA, 122 bp, Homo sapiens
aatatggtaaaaaagacaaaatataattcaaacatatgcattatatgtcaaagtatgcttcgctggcatcaagtagactcaccttgagatgcaatcttggacaacctccatcttaagaatat

SEQ ID NO: 398627 - DNA, 122 bp, Homo sapiens
aggggaccctccgctctgtagtgctacagggtccaacatagagccgggtgtccccaacagcgcccaaaggacgcactgagcaacgctattccagctgtccccccactccctcacaagtgggt

SEQ ID NO: 398628 - DNA, 122 bp, Homo sapiens
gaggacctgaaattgaaagggtaccacactgacctgctagaatgtccactgtcactctcacgtgaactatacttgaagggccagatgggactataaaataatggtaagctccttcagacttt

SEQ ID NO: 398629 - DNA, 122 bp, Homo sapiens
tactgttagagctggaattttcagtaaaagggggaaaacagaaatgagggtagaagtcagcgggaggtgggccatgatggaatgtgtgctcagttctaattaagtgaattcaacataatccc

SEQ ID NO: 398630 - DNA, 122 bp, Homo sapiens
agaggcagagggaggtcacatgctggctcccaggtcagggtgcaaagcagtctgcagcctcggagagaggctgtctgttgtcatttctctctgtaagggtccaggccttgccatgagggtga

SEQ ID NO: 398631 - DNA, 122 bp, Homo sapiens
gctcatgaaccagttcacacactaagcaaaatacaaagaaccaaaaaccgactaaggttacgttccaaccaagtcctatacacaaaccaaagagttttataatgccaaaatctgtaacagaa

SEQ ID NO: 398632 - DNA, 122 bp, Homo sapiens
aggaccataaaattgtaactttagtcattcagaagtatgtctgttttttttgtgtctttacgaaatgtattatccaaggagggcttttggaattagggagaaattttcttatttttgataat

SEQ ID NO: 398633 - DNA, 122 bp, Homo sapiens
ttgtaaataccactgcactgggaccaacttccagagatattcttaattactctgctgtgccgtctctttattgcttagctgggtattagcatatgatttgccctcagtgaatgttggctttt

SEQ ID NO: 398634 - DNA, 122 bp, Homo sapiens
gcccgccgctttctgtaccacagccgcacgcgcgacctgcgcgactacatccgcatccaccgtatccccaagcccctcaagcagcgcatgctggagtacttccaggccacctgggcggtgaa

SEQ ID NO: 398635 - DNA, 122 bp, Homo sapiens
cccagcacgtgcagcaacaattcagctctcacgtcgtcttccacgcaaacgcctcatccgcgaggacctgcgccagcctagcgttgaagggcctgtagaaatcccgcagaatcttctgtgtg

SEQ ID NO: 398636 - DNA, 122 bp, Homo sapiens
aggtgtttgcggggcttgggaaggggctccccgatgacccgggcgggaaattggggcggccgcctacgtgagagttctccagtcacctctaaaatgcgggacacaggctatccatgtcccca

SEQ ID NO: 398637 - DNA, 122 bp, Homo sapiens
gggggctcaccacgtcccccggaacctgcagatcctccgccctccgctgtcgccagcggccgagcgctaagctgtccatgcagccccagggtcaaaccctcccggcatctcaggcctggccg

SEQ ID NO: 398638 - DNA, 122 bp, Homo sapiens
ctggcttcttttgctctgcatgatgtgctcgaggttcgtccatgttgcagggtgtgtcaacgcttccttccctttagtggctacataacatgccattgtttgtttacaccacagtttgtgcg

SEQ ID NO: 398639 - DNA, 122 bp, Homo sapiens
agtggggaaataattaagcactaaggaaatattgtatgtggatttgagaccaacgggaaacgcgctcccaaacaatgctcgttgtttgcaccgagccgcttttctgctaagtttcatcaagt

SEQ ID NO: 398640 - DNA, 122 bp, Homo sapiens
catccccactgcaaaggtgttgttatggactgaatgtttgtgtcccctccaaaatttgtacgttgaaatcctaaccaccccgcccatggtggtatttggaggcggggcctttgggagatgct

SEQ ID NO: 398641 - DNA, 122 bp, Homo sapiens
gcgtgatttgtctctcgggcgccagcgtcacttgcaggcctcgtgataaggaatggacaccgtgggttcttctgcccagcctggcctgtcctcctggggtcagcccctcagtacaccccaag

SEQ ID NO: 398642 - DNA, 122 bp, Homo sapiens
cagggctctcaggcaggacagtgcttgggctgttcagagtttcgggggcgccctgtggcccgaggctggaggtaggaatgcaatggggatggcttcaaagcctcagggaggaggggctatat

SEQ ID NO: 398643 - DNA, 122 bp, Homo sapiens
ccatcatggccatgtgtcacaatccttctatctcaactccccatgagacacaattgttggcgacacacaactcaaacttccccagtcccaaacaatctctatgacacactgccaccaaacac

SEQ ID NO: 398644 - DNA, 122 bp, Homo sapiens
ccgcctctgcttcttggccgatgggtgttgggacatggagtccccagcctgtgctgctgacgccctgtggtggctagccgctctttagacaccagacgctgccttccacttcctcctctcac

SEQ ID NO: 398645 - DNA, 122 bp, Homo sapiens
ccatcatactaaaatgatcagtctgcattccactgagtcaacaaagccatcatactaacacggttattctgcattccactgagtccagatcttacttctgccacatagcttcttaggccaat

SEQ ID NO: 398646 - DNA, 122 bp, Homo sapiens
gtcagttactgatgctgacaaccctgagaccggagattagtggtggattaactcctagaacggcaggagtagcccaggacagatataaggcaagggttgtttccagagctgagtagaaatga

SEQ ID NO: 398647 - DNA, 122 bp, Homo sapiens
aggtccctcctttgacagctgctagagatattagccacatttcccttcccaaatctgctccgggttaacaggcccgcgggggcgggagggggtgaggaggcaggaggatcctggtggactct

SEQ ID NO: 398648 - DNA, 122 bp, Homo sapiens
ctgagctccagttccagccccagcgcagctccaaatgcctccccaggctgtggactcagtcgggctggcttgtgagattctcagcatctgtccagccccggtccccagaaccagtccgggaa

SEQ ID NO: 398649 - DNA, 122 bp, Homo sapiens
ggtgagttttgaacaagaactaccatcatgcaggcttcttgcccagctgaccactggccccggggtgcctgcctggctggtcttcatcacctgaggccaccaggctcaagccactgctgttg

SEQ ID NO: 398650 - DNA, 122 bp, Homo sapiens
tctaggggcatctgccaggtaggcagaccagaaacttaccccgagttctgtgacccgctccggggagcggggcatctcatgtcctctcagccacgtctgaaagctgggacatggcagagtgg

SEQ ID NO: 398651 - DNA, 122 bp, Homo sapiens
tttaggaagcacccttctctttcccgactcacatggggcagctataataattcagcttcacgtggctgaattattttctgttttcacttggttctttttttcttctcctttaagaaaaaaaa

SEQ ID NO: 398652 - DNA, 122 bp, Homo sapiens
aaatctagtccattctgaggctccgccgcaccccgccccctcaggctctcccattagcaccgccccttaggtacagttacactggctccgcccactaattggcctcgccccccaagggccca

SEQ ID NO: 398653 - DNA, 122 bp, Homo sapiens
acttgggcttccccaggtcttggcttccgttaggacagtgtcccgggtctccctgtcctgcgcagccccagttcccaagaaatagttgaatgaatggatgtttgcatcccgtacccagcctc

SEQ ID NO: 398654 - DNA, 122 bp, Homo sapiens
gaccacgagcatggacatgatggtcgcgctcactccggtgcagtgagtgtctggggtgagcgtctgcagcaatgaggccccaagggagggcggtggggtggctcgggcactgacctcttccc

SEQ ID NO: 398655 - DNA, 122 bp, Homo sapiens
ggctgcttctgcaaggctggagggtgctggaaaggggttagggacatctggggctcagcgcgccccgtgtaatgccgggatcctgagctcaagtggggagagtcatgtgtgttctgagtccc

SEQ ID NO: 398656 - DNA, 122 bp, Homo sapiens
attctactaaaactatggaaaacattcaccagtttgcttgcaaatcaactctgctgcatgcgttcacaagtttcataaagattgcatgctttctgttttcaatacaaattgtattttttttt

SEQ ID NO: 398657 - DNA, 122 bp, Homo sapiens
aacttgctggaaggaaggaatgacccttctagccatggaacggtggtcatccgtgagccacggcctcaggaggtgggttcccttaaggctccggctctgggggcagcgccccctgggagcgt

SEQ ID NO: 398658 - DNA, 122 bp, Homo sapiens
accactgaacaattacaccccaagtctcaaaaatatcaaggaaatataatccacaaagagcgactccaaatgtcaaaatcaataaagaatagtctctgcagtgcattcattgaattcaaata

SEQ ID NO: 398659 - DNA, 122 bp, Homo sapiens
ggttcaatttgtgaggactctgaagccagtatgcagctgagtttacctcctgggtgtgaacgcaggccattacacaccatggcaagttggccttactctttagagatgcagtgactctccta

SEQ ID NO: 398660 - DNA, 122 bp, Homo sapiens
gggcagggctaaagcaacagggaattattcaaatataactgggtggggtcggattccaggcgattccaggtctgcgaaaattagaagggtctggagctgtgtgcctgaatcctggatgggcg

SEQ ID NO: 398661 - DNA, 122 bp, Homo sapiens
caggcagttttgtaactgcaaccaatcaaataatgtccttattgcagtttcatatttactcgataaatacttgtctctgacactttttcatcataacatgaagcctcttccagtttggtttt

SEQ ID NO: 398662 - DNA, 122 bp, Homo sapiens
ccaaaactcttttctgtcttgctcgctgactgcctctgcgctctctaagtacaacctggacgcacaaccctgtattccgggaggcggtggagacagaggcggctttgttcgcgaccagaggc

SEQ ID NO: 398663 - DNA, 122 bp, Homo sapiens
acccgctgcggctctccctgctgcccccctgccggtgcacgtgcctccggtgggggtccccggccttgcctcgctcggcctcgccctcccagaacccgggttgctccaggctgccctcccgg

SEQ ID NO: 398664 - DNA, 122 bp, Homo sapiens
accccctgacagctttgcggtggggtttcccttaggacagcggcggtttccagatggtgtcgctggtgtctctgtccgaggtgacggaggagggcgtccgcttccgctccccctacgacggc

SEQ ID NO: 398665 - DNA, 122 bp, Homo sapiens
aacaggtccaaatccacaggccgtgcgcccttatccgggcaccagtcgggtctcaacctgcgggccacgcgccctcacccaggcgctgatcagattccaacccgcgggccgcgcgcgccctt

SEQ ID NO: 398666 - DNA, 122 bp, Homo sapiens
ctcggtcaagggtttcacagtgatgtggaatggcttttccacagtcgaatcgcatatcttcggagtgggttcagaccgacttgtgctgtctctggggccaccctgagtgggaggagggggac

SEQ ID NO: 398667 - DNA, 122 bp, Homo sapiens
ggtcgggggcccctgcgggaggacgcggctgctctgctccctcaggaagttcaacaggaacggtacgaattctttccgcagggcccggagtgagctcagcgcggccgcctccccagcgttat

SEQ ID NO: 398668 - DNA, 122 bp, Homo sapiens
ttccaaaacgtggcacagtcgtgcaaagcaggagggaagaaacggtgccaggtagtgactcgccgagaatgagaccgaactaattcacaaagggtgtaaaatgtttgccatgcagaagaggt

SEQ ID NO: 398669 - DNA, 122 bp, Homo sapiens
cgggtaaggccaagccacgcgggtaaggccaagccaatccgttacacaccagtgcgcctgcgcacctttgacgtcactgaacctgtgccttcactgcatctgcagctccagcctcccagaaa

SEQ ID NO: 398670 - DNA, 122 bp, Homo sapiens
gctgctggaccactgtcttaaggaggccagtcttgctcagctccctgcatgaaaaacagacgagaaacacgggagactcccggtaacccccaacttgccggtagggaaggcagccactctag

SEQ ID NO: 398671 - DNA, 122 bp, Homo sapiens
gcacaaaggcgcggacctcggcctggccccgcccccgccgcctcccggcccgcctccctccgaggccctgcccccgccccggccgaggccacgccccccagccaatcctgacgcgccgcgct

SEQ ID NO: 398672 - DNA, 122 bp, Homo sapiens
gtgcactcgggcgccacggggcgggcagagacgcaggggcggggcctacggggtggtgagcgggccctctgctggtgggggggcggggccggaggagccaccgcctccccgcctcctggaga

SEQ ID NO: 398673 - DNA, 122 bp, Homo sapiens
gcctgggcgacacagcgagaccctatctcaaaaaatattaaactatcccaagaaataagtcgtttagggtagagactcccatatgctgggccttcagtacgtttgtctttatattgggagtc

SEQ ID NO: 398674 - DNA, 122 bp, Homo sapiens
ggcaacggctggcgcggcgccccggaaggaagccggccccggcgcccccgcggcccgccccggccccgcgctcaccagccatcgcaccacaccctcacggcgcgcctgccccccgggcccgg

SEQ ID NO: 398675 - DNA, 122 bp, Homo sapiens
gaaaactctgttaaactgtacaccgtaattggcatctgttaaaacaactccacttttgaacgaacagcatttctctctcaagatctctctctctcttttgaatttgtcagatggagttacgc

SEQ ID NO: 398676 - DNA, 122 bp, Homo sapiens
ttggagtcagcaaaccggatctccgtggtcacctcgttgttgtaggtgaccacagccacccgggccccccgtgggcagttgctctcagcaatggtcaggtcattcacaatactcaagaccac

SEQ ID NO: 398677 - DNA, 122 bp, Homo sapiens
ctcatggaggctgagacgtctcaagagcgtttctgtactccagctgcgcgtccccaggcacgagcgctcgttaatttccctgagatgccgtgcctagtttgaatattttttcagtcactgtg

SEQ ID NO: 398678 - DNA, 122 bp, Homo sapiens
cccattgctgttctggccgtcctattgccgcgcggaatctgcactgccgcttgcttattacgtacaggggaggattgttgacaagtgctccggagcctgcctcactgcgctcttcctccctc

SEQ ID NO: 398679 - DNA, 122 bp, Homo sapiens
gacattaataaagctgatgaagataaaaaaggaaaacctactgtcttagtctgtttcctgcggcaataacagcacagggctcactgtattaccagggtcagggctcagtgtgtgaccaggat

SEQ ID NO: 398680 - DNA, 122 bp, Homo sapiens
aggcgcgttggtgcgagttggggacggcaggcagggacacctaaaacctacggtacgccacgaaggggtttcagcacgtcctgaaaggcccgatccccccccagaaccgctgtgaggggggc

SEQ ID NO: 398681 - DNA, 122 bp, Homo sapiens
gagctctgcccgccagcctttctttcagctacagaatgcctcagtaatgctctattaacccgccagccttcctttcagctacagaatgcctcagtaatgctctattaacccgcaggaagtgt

SEQ ID NO: 398682 - DNA, 122 bp, Homo sapiens
gcccgggaccccgtttccgggggtagtctaatgaaaaggcactcgggagctatttctgaacggacctgggcttgtcggaccagtgagcggcggcggctgcgcggcggcagcggcagaaagcg

SEQ ID NO: 398683 - DNA, 122 bp, Homo sapiens
ggcctgagccgccagctcatttcatcctcacaagcacatgcagtgggcgctcattagccccgttttacaggtgaggacacatgctcagagactttagcccacttgtctggagctgactgcct

SEQ ID NO: 398684 - DNA, 122 bp, Homo sapiens
ccgtgtttccctagaacccagtcagagggcagcttagcaatgtgtcacaggtggggcgcccgcgttccgggcggacgcactggctccccggccggcgtgggtgtggggcgagtgggtgtgtg

SEQ ID NO: 398685 - DNA, 122 bp, Homo sapiens
cgaggtccaaagctccagcaggagagaagcaatgctttctgtgaatgagatacaggccgccgccctcccaatcagaacacgggagatatcagccaatcccggcccgccgatgctctagtatc

SEQ ID NO: 398686 - DNA, 122 bp, Homo sapiens
tgagggatctggaaaatacatcactgacttccaccagccacagagctgcagggtgggagccgagcgggttcctctgagcagcacaagcgtcctgcgcttcgacacacaatgagcctcagtac

SEQ ID NO: 398687 - DNA, 122 bp, Homo sapiens
cagctcggacagcgcccagggccggagcccgagcccttggaggtaggcgagcgcgaacaccggagagatgggggtagagagtcatggaaacccacctagcgacacccccttgttcccgccct

SEQ ID NO: 398688 - DNA, 122 bp, Homo sapiens
caatcatttgcataattgtcagtcatctcagtggggtctggcttcagtgacagggctcgccgtctgccacgactcacccccactgtcaccaccaccacaagattaaagactgccagtttggt

SEQ ID NO: 398689 - DNA, 122 bp, Homo sapiens
aaagcacgcagggctgccgctacctggcgcacgcgcactgagctgcggctgccgagcccgcgccccggtccctgccgctttacctcacccgctcttggatcactggggccgggaaacgcttc

SEQ ID NO: 398690 - DNA, 122 bp, Homo sapiens
atatacctctgtaacccttctgccctttaaaaattaaaattaaggagaaacactgattttcgtctctagaggcaatgggcttaattgctagaggctgttttgtatacgtaaaagcaggcgag

SEQ ID NO: 398691 - DNA, 122 bp, Homo sapiens
cctttgccagcgtgcgcccccacttagtgcggaagcgtccgcggacgcctcgcagcgaggcgtcgccacttagctcgcccgctcttggggtttctctgactgttgtttccacagaccccagg

SEQ ID NO: 398692 - DNA, 122 bp, Homo sapiens
ggtgtagggggccacggctggctttgtgggactcctggaatcggggctctccgaggagcccgggggcggggcacggccctgcggcggcgcccccggacgggtgtccccggggcaaaggcact

SEQ ID NO: 398693 - DNA, 122 bp, Homo sapiens
ttgggtgataggtctgcaagttaaggaacaacaaacattgccagaaatccaccagaaactcggagagaggcatggaacagattcccccttacagtcctcagaaggaaccaactctactgata

SEQ ID NO: 398694 - DNA, 122 bp, Homo sapiens
atgtgtgtgtggtggtgggacattagaaaggtgccctgcctaccctcccaaatgccagatcgtgccgggtaaaagtgtttgtagccacaggagaaaactgaggctgcatcagccctcccttc

SEQ ID NO: 398695 - DNA, 122 bp, Homo sapiens
agtaatctgcacatttggccatttagaatttagtcttttccaagcaaatcattggccagccgtcatgaagacctgttttgtgttctgcttcagagagataatactcaatgaaatgggcggct

SEQ ID NO: 398696 - DNA, 122 bp, Homo sapiens
aaacctctgttgcccagtctggcattaggaagtgcccattaggttgttattgcttgttggcgcttgagctggggcttgaaggtttctataatgtgtagcagtgtatagaaaacaggcaggtc

SEQ ID NO: 398697 - DNA, 122 bp, Homo sapiens
ctccacgaccagaactaacgctgttccctcggtccgactcgtcctcccgcgagggtcccgcgcccccacacccactcgggacatttctcagggctgctcttcggcctgcgggagcctcgggg

SEQ ID NO: 398698 - DNA, 122 bp, Homo sapiens
gagcggtcacgtgacagcgggttcctccaggccagcgctggtggttgagtgatgtaatcacgtggggtctgaagtcttcgtgggtgtaggtttcttcgttatgctgacgacaggcagtgccc

SEQ ID NO: 398699 - DNA, 122 bp, Homo sapiens
aagcattatctaaatggtttggcaaaactcttttcatctgtgaaatgggtataatacacacgttgaagtattaaggcattgctggcaaatgttgatgcctgaaagtgataaagatacaaaga

SEQ ID NO: 398700 - DNA, 122 bp, Homo sapiens
ccgtcaagcccagggcggaggtaaaggtgctcacggaggtccgccgtgcggcctggcagacgtgcctgcgtgaccccacgcgtccctgcctgcgggtgcagttccccgtgagtactcaggtt

SEQ ID NO: 398701 - DNA, 122 bp, Homo sapiens
gcagcccggagtcccggattttactggttcccgtgcctgcggacaggcccccagggctagcggctttgtggagggaacactgggtatcctctccacagtccaggtaggtgggacccccactc

SEQ ID NO: 398702 - DNA, 122 bp, Homo sapiens
gctggcgcggaggctcagagtgggcaaggcaggggtcgggctgcagggcgagcagggccacgcagcggtggtggcagagttgaggacagagcccgggtaggcgaggcatggcgcgtcaggtg

SEQ ID NO: 398703 - DNA, 122 bp, Homo sapiens
aaaggcaaaggaaaaaaacatgtggatgttttccaaaatattaaccccatcacaatgtctcgctgtcactatccttttacagattaggaaaagaagttacagggagttaattaccctcagat

SEQ ID NO: 398704 - DNA, 122 bp, Homo sapiens
cgccggcttggatttcagaagctcggctagggcggcgtgctctatagagccagcagtagccggggacaagcaggtgccccgacctttctgagctggtggagtgggagcctcccgggtacagc

SEQ ID NO: 398705 - DNA, 122 bp, Homo sapiens
aaattcactacataaaacctaggcactgctaagcaatttactcacccctttgatcctcagcggtctcattagtaacacagatggaatgattcctacctcaggctggtgagctcttaaagaga

SEQ ID NO: 398706 - DNA, 122 bp, Homo sapiens
ctcacaggcagggattctgttctccagcattactttttaaaaggtgttcagctagaaaatcgcatattatttcttctgtaaaggtttctccttgccacctttccgtagctacagctgtcaca

SEQ ID NO: 398707 - DNA, 122 bp, Homo sapiens
agggtccccaggtgatttttatatacatcacaggcttgcaaaatacccagaaaatctgggcggttggatttctaatgagtcattatgaactaaaaaaattcacctaagagtatgcatattaa

SEQ ID NO: 398708 - DNA, 122 bp, Homo sapiens
ttagcctctgtaaagccaggaggatggaagggggccgctggccgagggtggaacggattgcgccacctggctgtgagtgcgcttggtcctgaccgcaggactgcagctcccagcggaggcag

SEQ ID NO: 398709 - DNA, 122 bp, Homo sapiens
tgttgcgtccctaccaatagcagggcagttttaagaactgactcaaatgttcagggctgccgttattttaaagcagataacctgtaacatgaaaccccagcacatagctttgacctttgtat

SEQ ID NO: 398710 - DNA, 122 bp, Homo sapiens
ggccaagacaacttgggaaaggtgtcttgttttaagatgctaatctccagctttctgttccgttctaccagctagaggcctctttcatgtgaagatcatatactttgggcatcacaactgct

SEQ ID NO: 398711 - DNA, 122 bp, Homo sapiens
atttccttagccctgtatattctgcagagacttttcacatatttatcttagttggttccacggcaatgctatgacttaaatatcattatttccagtttagagatgaaaaagctgaggtccag

SEQ ID NO: 398712 - DNA, 122 bp, Homo sapiens
tttattttttgagacggagtctcgctctgtctcccaggctggagtgtagtggcacgatctcggctcactgcaagctctgcctcccggattcgtgccattctgctgccccagcctcccgagta

SEQ ID NO: 398713 - DNA, 122 bp, Homo sapiens
gcggatccgtttctggtcgttctcctggggcccggggaggtggcgctggtcaggaagcctcgcccagccctcccggggcccaggccttcctggggctggtggtgccctcagacccctctgtc

SEQ ID NO: 398714 - DNA, 122 bp, Homo sapiens
gcactttattaacctcctcgtacccaagtcaccacggggcagcttttcacagccctaaggcgtggtcacttcaagcccacagcgagttgctcgtgtcctcggcttctgctccgcaaatctcg

SEQ ID NO: 398715 - DNA, 122 bp, Homo sapiens
ggtcgcctcaaacatcccatccaccgagggccgaagattctaggtctctcccacctcccacgtgactatgtgacatttgacgggtaactgcatctcatctgtaaaatgcgtcttgcaggatc

SEQ ID NO: 398716 - DNA, 122 bp, Homo sapiens
ctgtctttctcgtcctttaccacgagtgaccagaaccacgtggggattctcaaccacggccgtggtatacctctcctgtgcttcatttctcatcaaacacatgcccaatcttctagatgctt

SEQ ID NO: 398717 - DNA, 122 bp, Homo sapiens
atgtgagcgaaccgtgaaaaccttacgctcagcgaaagatgccagatgccagagaccactcgccgctgagcccatctccctgcaacactgcaggtagcggagtctagagacaacacagacag

SEQ ID NO: 398718 - DNA, 122 bp, Homo sapiens
atactggctgcacgtttcaggtacctggggagtgggtttaaaacacatccacaggccgggcgcggtggctcatgcctgtaatcccagcactttgggaggccaaggcaggtggatcatgaggt

SEQ ID NO: 398719 - DNA, 122 bp, Homo sapiens
cagatctccttggcaggtttatgggcgagagaaagcggttcccagcctcctgccctgatgcggctgcaccttctggaccaccgtgaacactctgccccctgccaggcccccaaaatactctt

SEQ ID NO: 398720 - DNA, 122 bp, Homo sapiens
agccctcctcgcgtgcgagcattagttggctaaagtcgcctgtctcgacagtctcccctgcggggtatctggggaccctttctttgggaatccacgctctttgtcagagtagccaatgcctc

SEQ ID NO: 398721 - DNA, 122 bp, Homo sapiens
tccgccccgcccccgactccgctcggcccctcctcgcgccacgcccccgcccctcccgcgcgcgcagctccgccccgccctcgtgatcccgccccaacctcgtgctaagctcccttccgttc

SEQ ID NO: 398722 - DNA, 122 bp, Homo sapiens
tggagtaaaaaaaatgaggtgactgtgaacagtagactattgtgtgaaaatccttgagaacgtcaagcaagagcagaatcttgagcaccctgtcagaattaagggtgctcatcagatttatt

SEQ ID NO: 398723 - DNA, 122 bp, Homo sapiens
cttgtgcgcttcttctggcgcacatgagcaaactgcctgttgctttaggtttctctccaccgctaggctccttttggttagctcacccccacaactcatccccgggatttccctgaccacag

SEQ ID NO: 398724 - DNA, 122 bp, Homo sapiens
tcggggctctcccaggcagcatggaccctgtggttctgcacgtcacagactctttgggggcgtccacagccctttgcgcttgaggctggtctgataggcttggcaagggcaggatcacaccg

SEQ ID NO: 398725 - DNA, 122 bp, Homo sapiens
cactctaacctagtctgtggatcagacagctcaagaacgcctgacaggaagtcccactgacgctcagaaaggcgtctgccataagacaagggttcgttcgttagaaaggtctgaggtagtgc

SEQ ID NO: 398726 - DNA, 122 bp, Homo sapiens
aaagaaagaaagaaatacatttttctgatttttaccatttaaaaatgtaaactggcctgacgctgtggctcacacttgtaatcccaacactttgggaggccgaggagggcagatcacgaggt

SEQ ID NO: 398727 - DNA, 122 bp, Homo sapiens
gaccgtgtgcccagcaactccactgctgggctgtgcccccgggggacgaggaccgggccacgccagaactcgggagcaaatgctgaccacagcattcctcacagcaggcagacaatgggaag

SEQ ID NO: 398728 - DNA, 122 bp, Homo sapiens
gaatagctttctccagcggacatctccttgaaggtgattgtagctccgcacatgccttcccgcgctggaaggagaggagaaggaggaggaagaagagttggtggcctctggtgacaccatgt

SEQ ID NO: 398729 - DNA, 122 bp, Homo sapiens
tcgattgggggcgggggacactgtatttgatatttgtgatcagtgatcattgttcaactgcgaaatagagtgtttgcttttgataatggaaaattgtattcgttttaaaattccgtttgttg

SEQ ID NO: 398730 - DNA, 122 bp, Homo sapiens
cagacagctgagcagcgcgcacagcaggaccccggtgtcccagtagctgaccatggtgagcgcgacgcggcctgctcgcccggtgcccgcgctccccgcggccaacgacccggccgccagag

SEQ ID NO: 398731 - DNA, 122 bp, Homo sapiens
gaagctcctcccacacatgctgggatcatgccccctggcttgtcatctttcccttcccaccgtcaccagtgttgtgagggttgtgcacagagtgtcagccagagataccacccaacttgtcc

SEQ ID NO: 398732 - DNA, 122 bp, Homo sapiens
cacaaagccagggaaatagccaggtgctactggacgcccctatccagttgtcaaagataacggagaactacggtgagagtgaggggaggttgaactaactgcccccctgtgcttttctccgc

SEQ ID NO: 398733 - DNA, 122 bp, Homo sapiens
acagcccggttacagataatcacgaattgccccttccccagcacccctcagtttggggcccgagctggccctgcaacatgcctgtgtcttgttgcttctcttggggtccacacatccaccca

SEQ ID NO: 398734 - DNA, 122 bp, Homo sapiens
ttcttgtggtcagggcccagaccatgataaccttgaggactcctctctccgggagactgtcggggctaagctgcctgtggccctccaccgccctgctccttcctccgggtgggggacacccc

SEQ ID NO: 398735 - DNA, 122 bp, Homo sapiens
ttgttgcaattgggttcagcccgggcatgggctgaacgtggacgcgcgggaaccgcgcctcggtttccccatctgtgaaacctggaggctgtattaggattctgtgcctcctattaggattc

SEQ ID NO: 398736 - DNA, 122 bp, Homo sapiens
ggcccacggtggggtggcagagggagagggcccaggtcggggcggacacccttgcctgcacgggtgatgtggaaccagaaagctgactctggatgcaggaaaaaggtcagggttgcatttcc

SEQ ID NO: 398737 - DNA, 122 bp, Homo sapiens
cattcactcagttaccaagtccccacagtttcaccactcaagacagttgtcagaccatggcgcctctccatccccatttccctaggataggccttggtgtctgaggccaaccctgcctcatt

SEQ ID NO: 398738 - DNA, 122 bp, Homo sapiens
tgtgaagtggctatttctttatatttatccactactccgtgaaggcttctctgttctacccgttccaaaagccaatggctgcagtccgtgtggatccaatgttagagacttttttctagtac

SEQ ID NO: 398739 - DNA, 122 bp, Homo sapiens
ggaggcggtgctgaaaggtgtccacagccacaaaaagtagatccgccgtcagccaccctccggcggcccaagacgctgcagctccggagacagcccagctatcctcggaagagcacccgaag

SEQ ID NO: 398740 - DNA, 122 bp, Homo sapiens
agcgtgtacgcgggggtggtgggccctgcgggagcgtgtacgcaggggtggcgggccctgcgggagcgtgtacgtgagcgcggcgggccctgcgggagcgtgtacgtgagcggggcgggccc

SEQ ID NO: 398741 - DNA, 122 bp, Homo sapiens
gagcagggcccaggccaggcacgaccaccgaggggatgaacttcacagtgggtttcaagccgctgctaggggatgcacacagcatggacaacctggagaagcagctcatctgccccatctgc

SEQ ID NO: 398742 - DNA, 122 bp, Homo sapiens
gctctcacttctctaggcagcttgccccacctctttcaaaaggtggaactgggagaggggcgggcactgtatcttgcgaacgacagaaatggcaaccaactgtgcttctgcattacagacca

SEQ ID NO: 398743 - DNA, 122 bp, Homo sapiens
aacgcttcgtggcgctgctgcaaacctccatcacctagtgctgtgagggcccctgggatccgctctcccagctctgcgccctctaccccctgctgtgcctgaggcccccccacctccctcgg

SEQ ID NO: 398744 - DNA, 122 bp, Homo sapiens
cgtgtgtctcacctgcacccaggtcgcccgcaacgcggcccgcctccccctgcagcagcacgctcctggggggcattctggtgttgaaggccgtctggatgttgtccacaaacgtcttacag

SEQ ID NO: 398745 - DNA, 122 bp, Homo sapiens
ggcggggacaggatgcgatcttggcctatgaaaggcctcagcttgggagcggcctgtcagcggccatattaacaactggcaaactacggcttgaatccctgagaaacggaggcgcgtggttt

SEQ ID NO: 398746 - DNA, 122 bp, Homo sapiens
ttgcggggtggagggacgtgagagttctccagccctcctgcgggcactgcagctcggaggcgggagaggagcactagggcgggagaggagcacgccccactcttggagacatttcatcaccc

SEQ ID NO: 398747 - DNA, 122 bp, Homo sapiens
tttcctttgttccaggcaaattctgttttctcaataaaaagcccagacaaagagttcaaccgccctctgcagtatagacagtgttctgttagacactcagaatgccagagaccagaagatca

SEQ ID NO: 398748 - DNA, 122 bp, Homo sapiens
agctactacaggtcctgatccaagggtcactcttgctcattcctcccaacttgttcagtccgccaacaacactgtgaggacacgctgggacaatctccgctctctccagcaacgaaactgag

SEQ ID NO: 398749 - DNA, 122 bp, Homo sapiens
actgtattctgggtttcactctgcctcctgtacgtttcagctcggaggccccactcacctcgtatcccccggcccgagcaccggcagccgccagcaacaaaaggaaaaagcagagaggcggg

SEQ ID NO: 398750 - DNA, 122 bp, Homo sapiens
tatgcaatcccactgcatatgaccatggcagtagaacaagttcaattactacactggatgcgttaagtgtgctttcctagcagaaagcaccagggtggagtcaacagttcacatgctaatac

SEQ ID NO: 398751 - DNA, 122 bp, Homo sapiens
aggtttccgcacggagaattacgccgcagaagcagcaacagacccgcgtattcatgagctcgtgtcaccgggaggtcgctgccaggccttagcccaaccaccatttcgtttcaggaaatgct

SEQ ID NO: 398752 - DNA, 122 bp, Homo sapiens
cacccccccagcccatggccgtctcccacccctgggccttcgtgcatcgtggtaccttggcggcgcccttggctggcttctgggtggcatttaaacgcagccataaaggaggccagccctcc

SEQ ID NO: 398753 - DNA, 122 bp, Homo sapiens
cgaaattagagccagcgtgctacaccttcttgcgcagggtgtgacctggagagccctgtgcgtggcctgacttcagtctacatgctggaagtggctggggaagctcctggctcccggcgcag

SEQ ID NO: 398754 - DNA, 122 bp, Homo sapiens
agacatttcatttggctgccctttggggttttctgctgctttttggtgggctgctgttatcggttgattctcaggagcttctgaggctcattggaatccacagtctctcaagatgcagggtt

SEQ ID NO: 398755 - DNA, 122 bp, Homo sapiens
tcgtccgcccgcgctaattctctggtgggagtgggattcacgggcctggtaacgcggggtcgaggagtaccccaaacgagccaaactgggcgaagactaggagatactgattttcttttctc

SEQ ID NO: 398756 - DNA, 122 bp, Homo sapiens
gggaacccggggcagcctctatttagtgcggagcctgggctgaggcctcatcgcgcggggcgagttggggacctgttgctctgtggcctgtcccaaggccaaccacgcaggccacatgtgtg

SEQ ID NO: 398757 - DNA, 122 bp, Homo sapiens
atatatgtaacgccctttttaaggaagctgaaaatactaataggggaatcaaagtttgagcgtgtgctgcacacaggcaagccctatcatttgcttgcctgttgcttattggcaaaatggtt

SEQ ID NO: 398758 - DNA, 122 bp, Homo sapiens
gaccggtggtctgaagctgaggcgagacctgggaacccagtggacaggctcgtgagtcaccggagcatacaagacagacagaacctaaggggacagcatcctcaagtgaaaaacagaaccaa

SEQ ID NO: 398759 - DNA, 122 bp, Homo sapiens
gaactacaatttctgtggaataagaaggagatatactggaactgaagcttttggtaacctcgaattttcattttggcaggcaaaccaaagagaagaaagactttgtgcttgagagttgaaaa

SEQ ID NO: 398760 - DNA, 122 bp, Homo sapiens
ggagggactggtgggtcgggaggggccggtgtctccagtatgggtctcgggttctcgggccgaacagggtttcaaaggatgattacaggcaagaacattatctgtggaaaatgaggacaaca

SEQ ID NO: 398761 - DNA, 122 bp, Homo sapiens
gcagcatggggtaactgtctccatgattcaactacctcccaccaggttcctcccacgacacgtagggattatgggaactacaatgcaagatgtgatttgggtggggatacagccaaactata

SEQ ID NO: 398762 - DNA, 122 bp, Homo sapiens
agggcagctcagccgggtgcaggggtgtgggcttgttggcagcggtgctctcacatagagcgttgtgtgtggcatggaggtgagccaccacgggccaaccacaagccctccctgggctctgc

SEQ ID NO: 398763 - DNA, 122 bp, Homo sapiens
aatcaagccagaattcaataaagtctcagtccagataaacaagacaaaagaaataagattcgagtagaagatctccttcaagggaaagttgctgtgtttgtccaagacctttgtcccatcca

SEQ ID NO: 398764 - DNA, 122 bp, Homo sapiens
tcgccatcaagatcgtgaaccgggagaagctgtcggagtcggtgctgatgaaggtgtgtgcgcctgctgcagtgtgcctgcgggtgggggggcctccggggctgagggcaggggcggggccg

SEQ ID NO: 398765 - DNA, 122 bp, Homo sapiens
actagggccaccgctcttgtgggcagaaggccgcgtccattccaggaagaggatcttctccggaaatgtgagacctatagcatattgatttaggttattaagatgaagtaaaaaggatgctc

SEQ ID NO: 398766 - DNA, 122 bp, Homo sapiens
gacgggccagctgccaacagcatctccgtcaggacccccaccaagggccccaacgaccaccgggtcgttcaaacccacagccgccaatccagccaccgccactaggggcaccactgctgcgg

SEQ ID NO: 398767 - DNA, 122 bp, Homo sapiens
taagcattagcagtctgcactgagatgaagagaggtgtagtgactagggaacaattgtcacgtgctttgtgcctattcccgtgcagggaggataaacccagggtccatgaatcaggaagtgt

SEQ ID NO: 398768 - DNA, 122 bp, Homo sapiens
atttgtcactgaacatttagcagctcccaaatggcacgggttgtgatagcgccttcaacccgattgttcttcagggatcaaggcaaaggtgtcaggaggcactaaaccgtacaacgcgagcc

SEQ ID NO: 398769 - DNA, 122 bp, Homo sapiens
cagaagagactgagaaaaagaaaagtcaagtggagcgcccactgccccgcctgcagaaggcgagtacgcgcggaggagactacaggccccagaatcctccgcggttccccttgcctggggtc

SEQ ID NO: 398770 - DNA, 122 bp, Homo sapiens
ccacctcccaggttcaagtggttctcctgcctcaccctctcaattgattgcaggcacccacgaccatgcctggctaattttgtatttttagccaaggtggggttttgccattttggccaggc

SEQ ID NO: 398771 - DNA, 122 bp, Homo sapiens
aagaaaagtactgaacaagtccacattatttatgatatggcagtcaggccagtaaacaggcggcctctttcacctctcttgaggttctagtcctattcccttctgctcaaatgtgaaacacc

SEQ ID NO: 398772 - DNA, 122 bp, Homo sapiens
ctgacaggctagggagaaaaccactggtagccgcgggcaccccacgccctgggagtgaggcggcaagggacaagtctcccgccccctagacttgcctcgcaaatacttgcgggtcgagggcg

SEQ ID NO: 398773 - DNA, 122 bp, Homo sapiens
aagacatctgcccgcctcggcctcccaatgtgctggggttacaggcgtgagccacagtatcgggcagccagatggtttttagtacaagaacgacactgtattttaaaataattattcagttt

SEQ ID NO: 398774 - DNA, 122 bp, Homo sapiens
aaatttacatttcagtgttcattactgaagttttgttggagtgcagccacgctcttctgtcggcacgtcatctgcatagctgcattcgcactgcaaaggcagagccgagccgtcacaggctg

SEQ ID NO: 398775 - DNA, 122 bp, Homo sapiens
cagcgtggcccacgtctccagtcccagcgtggcccacgtctccaatcccagcgtggcccacgtctccaatcccagcgtggcccacgtctccaatcccagcgtggctcaagcctgcaatccca

SEQ ID NO: 398776 - DNA, 122 bp, Homo sapiens
gccggaggcacggggtagcccccgggtcctttgcggccccgcgcgagcggcaagttccggcgcggcctgtgtcgtcgccgctactcactgtcatcgctgccgtgcctcagccacttctggtc

SEQ ID NO: 398777 - DNA, 122 bp, Homo sapiens
ccacagagtcgggagtcagctgacccggaccctttaaagcgcagatgtcacccttaagcccgccccggtctggaggccccgccgcgcttcccggactctaattggtcttcaagtagctcatc

SEQ ID NO: 398778 - DNA, 122 bp, Homo sapiens
agaacagtttcactgccacgtccatttccgtgacagcacctgtgattgatgttgcgtggacgtgccacacttgcacttggcaggctttcgaggctgctggccttgctgccatgaggactgtg

SEQ ID NO: 398779 - DNA, 122 bp, Homo sapiens
cacgtccaacacacgtcctcctccctggctgaaggtccccaccacggcaggggctggccacgcaccccggccactccaggacaggctgccgcagctggggagcttctggttccccttctttg

SEQ ID NO: 398780 - DNA, 122 bp, Homo sapiens
ttctgagcctgtttcctcatctataaagtggcaatcacaatcccggttttaaaaagcggccgtgaggctatgaaccagtgcatgttcggtgccctgtaggtgcttactaaagctagtgaatg

SEQ ID NO: 398781 - DNA, 122 bp, Homo sapiens
cctctgaggcactaaacccaatttagagaatcactttatgtactctccttgagcttcatgcggtgtgagtctacatgactaatttcccattagatctctcagaacaggagacagctgggcag

SEQ ID NO: 398782 - DNA, 122 bp, Homo sapiens
attacaaacatggggacattgtggagaaccattttagggaccccatcccattgagtgccacgaatacagaaaaaatccatgatcccatttacatgttttagaagtgagagaaactccaaata

SEQ ID NO: 398783 - DNA, 122 bp, Homo sapiens
tgagacgggtgtagcctagggaagagtaaggtgtccggccgggctgtatctcgtgggtggcgagggaacattgcctgtctcggaaacagttcccaagacaacgcgcatcccagacgcccggc

SEQ ID NO: 398784 - DNA, 122 bp, Homo sapiens
tagagagcccaaagagctcctgtaagagggagaactctatctgtggtttataatcttgcacgaggcaccagagtctccctgggtcttgtgatgaactacatttatcccctttcctgccccaa

SEQ ID NO: 398785 - DNA, 122 bp, Homo sapiens
cgcctgcagtatttaaacgattgtcggtggaagttcacgtcgtgctcctctttcgacagccgttgggtaacggatcaaaacccttaacggccgcggctggagcgcgagctcggggcgccgag

SEQ ID NO: 398786 - DNA, 122 bp, Homo sapiens
cctgggcctcacgaatgcgcggtggggaggcactttcattcgtggggggtacctctgcctcgccgtttctgttttccttccacatcacaggtgcctcgatctcccctttcaagagttcatgc

SEQ ID NO: 398787 - DNA, 122 bp, Homo sapiens
agagtcacagatacacagtctgggaaagtaaaacttaactttgtgagtctaactgcaatgcgtttagacacatttatatataatggggccaaaaatcacctcttttacaaattagattcgtg

SEQ ID NO: 398788 - DNA, 122 bp, Homo sapiens
aaatttaaatgcaagtttaaccaacaaccaaatgtcattgtaaagtcaaggtaattaatacgtttacatgcttttaaaaattgtaatgctacagagaacttacaaaagcaccagtcctctgc

SEQ ID NO: 398789 - DNA, 122 bp, Homo sapiens
tggccgacatccagctcagcagggaaattgtgaaaggcacactcggtgcccctattcccacgctgcccacgagcagtctcgcgcacggccacacagacctgggcgcacacctgtcccctagt

SEQ ID NO: 398790 - DNA, 122 bp, Homo sapiens
ctgacctgagcaggggaattaaatctccggagcgtcacccgtgtcttgccgagagcggggcgcagtgcagccctggaagggcggagagagtgaggatggtgcacacccgaaccagctgggtc

SEQ ID NO: 398791 - DNA, 122 bp, Homo sapiens
ggccccctccccagacctgggtggaattgggttccacccaaccctgagggacccagcccccggatgacccttccctctagacccggtagcgagtctcctttgagacctggagccgagccgcc

SEQ ID NO: 398792 - DNA, 122 bp, Homo sapiens
gagccaaaaacccacagccgcttgactcacggatatactatgatgtcaagctgcagtcaccggtggtcacaatgggcagcctaagtcatcaggaagaggctattgtgcactgcttgggaggg

SEQ ID NO: 398793 - DNA, 122 bp, Homo sapiens
cctaacctgtaagaggaaaatgctcatgaacaccgggctgcaacggctgagtgccgggtccgcacccatgggcggcggcagcggcctggatggtactgggatggggctgatgggcagcttct

SEQ ID NO: 398794 - DNA, 122 bp, Homo sapiens
atgacgggccttcctatcgtggacttcagctcttattgaaactctcattagtcagcttctcgtgtcaggtctccccaactatagctcgcgagggcaagggcggagtctcagctacagtaggt

SEQ ID NO: 398795 - DNA, 122 bp, Homo sapiens
aggaagcgttattcctctttgcgaacaactgaacagaatagctgctgcagaaagcatctccggaatatttgcaacccagagccgtgcgccccacacgcaatacaccggcaaagggttaatct

SEQ ID NO: 398796 - DNA, 122 bp, Homo sapiens
cgcgaaagtccctggtgccagtgcttccagctggttggcgctcaggtccagcagctgcagcgcgcccaggccccagaaggctcgcacatgcaccgagtgcagcccgttctcgcgcaggtcca

SEQ ID NO: 398797 - DNA, 122 bp, Homo sapiens
tacttggtttcgcttcgctagtcccagaggcccagagtggctcgcctggagtctctgtggcgcggtttcctgtacctgccttgggatccggagggaggaagctgggacacccgggagtcagg

SEQ ID NO: 398798 - DNA, 122 bp, Homo sapiens
ctccaccgggagaccaggcgctcgccaatacactcaatcccactccaccgggagaccaggcgctagtcaatacactcaatcccactccaccgggagaccaggcgctagtcaatacacgcaaa

SEQ ID NO: 398799 - DNA, 122 bp, Homo sapiens
cgcccctttaaaagcgcgcggctcctccgccttgccagccgctgcgcccgagctggcctgcgagttcagggctcctgtcgctctccaggagcaacctctactccggacgcacaggcattccc

SEQ ID NO: 398800 - DNA, 122 bp, Homo sapiens
ggacgggagctgcaaggagccctgtaagagaagcctgatgtcactgatcaatgttagagtcgcggctgaagttggccgatgtctgtgcatcctcatgtgagaggaggtaaagtatcctgcac

SEQ ID NO: 398801 - DNA, 122 bp, Homo sapiens
ccttaaccatgcactcccagacatcgtggacatcaagcctgctaacatggaggagctgaccgaagtcatcactgcagccgagttccacccgcaccagtgcaacgtgttcgtctacagcagta

SEQ ID NO: 398802 - DNA, 122 bp, Homo sapiens
acttgcccaacatgagccctggtcttgtctgaccccaaagcccatgggaagtttaggctgcgtggaaggacagcctggtgggctcaggatctgtcccatcacgagttggaacctcagctctg

SEQ ID NO: 398803 - DNA, 122 bp, Homo sapiens
cctgatgcgacccggtaacgcgttcagactgcggagtagcctaggggcccagagtggaagcgtagcgaggacccctctgcggggctcctgcagcccctcctcccccagccaccggcgggctg

SEQ ID NO: 398804 - DNA, 122 bp, Homo sapiens
caacatgggttgtgcttctcggattcaggccaaagttctctgcgccggtgggtggagcttcgttgcacgaaatgaacacccagtagtgatctgcccggctaacgctggggctttgcggacct

SEQ ID NO: 398805 - DNA, 122 bp, Homo sapiens
tcagggccgacaacactgcgctgccaggggagggtccagctgcccccattggctgacctgcggccggccactcagcccccagccctggccaccacctccagcgacagaactggggctctttc

SEQ ID NO: 398806 - DNA, 122 bp, Homo sapiens
agcttcagcccggcgcccgcagaagtttcccggcggagcgcgcttgacccgggtggcccgcgcggaagccctcagcgtccccctcgtgagtgcctcgccgcccaccctgcggcgccgggcgc

SEQ ID NO: 398807 - DNA, 122 bp, Homo sapiens
tcttagcaacctgcctgtctcggctccaggaggcgggttccagccaatggttgagccacccgcttccagccaatggctgagggataagctgaggggagtgagaggtcacttactgcagccgg

SEQ ID NO: 398808 - DNA, 122 bp, Homo sapiens
gtgcgccccttccgccacgttcgggctttccagtacgcagcgaaaaaaatgccgcatgcacgcatttatttattttgcaacagctgcaagaaacaatgaagcttttcaagaaccggggaaac

SEQ ID NO: 398809 - DNA, 122 bp, Homo sapiens
gtccacgtgactccgagcgaactggggcggagattggtgaagaaggaaggaaaagggaagcgagtgcagggactgttttatgtgaggtcgatctaaaaatcacagcgctatgaattttctgc

SEQ ID NO: 398810 - DNA, 122 bp, Homo sapiens
ggcagggcaggcctcgccgcggtcccagccgcagtcgctgccacagcggcccacgaagggcgggtagccgctgagtaggatatacaagatgacgcccaggctccacaggtcgcagcgcttgt

SEQ ID NO: 398811 - DNA, 122 bp, Homo sapiens
tcactgcaagcaaaaaggggaagaaacgctcacaaaagggaaggcagcaggaaaagtaatcgggttggtaagtcttgagaggcttctgcaaactccaaacattagcacttgggttagggatt

SEQ ID NO: 398812 - DNA, 122 bp, Homo sapiens
tcattcaatcaagaaagttgtttttgaaatttgataactacaggggcatggtacttgtaccgtgtcacccagtattgctagtcctggtccattttcagctcatacctgccttctagattgaa

SEQ ID NO: 398813 - DNA, 122 bp, Homo sapiens
tcaaatcgtcagtgaaggaacatgcataaaatgcaagccctgtattgtgctctgctactccgtcagcctcatgggacagaaaattaaaaaatgtgaacagatgcgagagaaaccaacgcagc

SEQ ID NO: 398814 - DNA, 122 bp, Homo sapiens
taacaaggaggtggtggcagggtagtgagctccccgtctctgggggtgtgtgcaatccggcgctgcgctgtcagcagggcaagggctggggccggggccaagaccaccaagccaggcccagg

SEQ ID NO: 398815 - DNA, 122 bp, Homo sapiens
ccccagccccgccttgttactgcatccgtctgaggtacaaggttagaagccacagacacccgagctgcagcctgacccacacaagctgcgggcgcaatggcgctttgcagacaagacagcct

SEQ ID NO: 398816 - DNA, 122 bp, Homo sapiens
tctcactgccctcggattccctgtacctctacatttcctccccaataactgagctcagcacggctgcaatgtggtgctcccttcctgaaatcagatgcagagtattctaccctctctttgac

SEQ ID NO: 398817 - DNA, 122 bp, Homo sapiens
ctgtcttggctctgagaagagcctggagtttctcagccttcctacaacatatgaaaacagcgggtcggcgcgtggaccggggcagaagagccgtcctgctgtacccgcgcgcccagggcgct

SEQ ID NO: 398818 - DNA, 122 bp, Homo sapiens
aaaaaaaaaaagaaaaaaaaagaaaaccactgcagctctaaactagttctgcatttttgccgaccctggtttgctggaaaagcccagcaccaaaggctatcatacaaagctgtgggaaattg

SEQ ID NO: 398819 - DNA, 122 bp, Homo sapiens
tgtgttgcgggggtgattgcgctggctgccggggggtgggcttctcatatgcattctggccggccagctgcattgatttcctattagtctcccagcaccacccagtaacacatcatttcagt

SEQ ID NO: 398820 - DNA, 122 bp, Homo sapiens
gcgacaagagcgagactctgtctcaaaaaaaaaaaaaaaagaagtagaagggaagaaaatcgcaaggaactagactaaaagaatctcgacccttgaatggagttacacgaacggccagatga

SEQ ID NO: 398821 - DNA, 122 bp, Homo sapiens
agtttcttcaagccagatgaaccctggatactgttcacagcacactggtgttgaccctgacgcttgcggctggctttgtttgcacttggtcgtctccagtagaaaaaccgaggctcacggtt

SEQ ID NO: 398822 - DNA, 122 bp, Homo sapiens
aatctctattgttccctgtcatctttaaatgagtgtcaaagtaggcaggggggctttgaccgttaaccgcacaatttagcctgcctgttgtgtctcgcgggccccacctccttggagtttct

SEQ ID NO: 398823 - DNA, 122 bp, Homo sapiens
ccttctgccctgcagcctccgtcctggcctcagggacgctggatcccaaatgagagggtccgaagcatctcagtcacacgcctccaccggactgtcggtggctgggcaggggtcagtgccac

SEQ ID NO: 398824 - DNA, 122 bp, Homo sapiens
cggcgctccgggtgtagctgggggcgcaggtttggcgggcgcggcggcggtaccgggaggcgcagtgatataggactcaaaaggctgggacaaccgagaccccatgctctggaactcggcct

SEQ ID NO: 398825 - DNA, 122 bp, Homo sapiens
aaaatcccctccatccagcagccggaccttgcagaagaggaccccgttcacgaagggaaccgcagtcagctcctccagggtgaaagtagtttggaatttgaatttcttcttcttcatcaaga

SEQ ID NO: 398826 - DNA, 122 bp, Homo sapiens
tttcaaatcacatctttgccagtaagaagccagatattaaattttaaaattcaaggaaggcgggctgcattttgcattctgataaaaaatggtttatatttacttaggtctaaaaatgagct

SEQ ID NO: 398827 - DNA, 122 bp, Homo sapiens
cgcacggacgcgcatgcgtcccgcccgcccaggtgcgcacgcgcaggagccgcggcgcgacggtccacaaaggctcagaaggccagaaaacccggtaccaccaaccctggtgcagcggcatc

SEQ ID NO: 398828 - DNA, 122 bp, Homo sapiens
ttctcggagacccctgggcggcggctgcgcaagcccctgagaggagggggcgaccctcagcgccgtgggggaggaggctccgcctgcccacagccctccccactgccactcgtacctcccta

SEQ ID NO: 398829 - DNA, 122 bp, Homo sapiens
acctaggaagtaagataattttaaaaagagagcactttggcagtggtgaagcaggtgaaacggttgaatacaacacctgtggtttcaaagaaaagttcccacagagcggatacactactcgt

SEQ ID NO: 398830 - DNA, 122 bp, Homo sapiens
ggagccccgcccagagcctgctccgctctcaggccgcccaggctagccagccgccagccgcgctcgcccatggagatcctagacgagttcgacagggggaagctccaagaatccttcccaaa

SEQ ID NO: 398831 - DNA, 122 bp, Homo sapiens
agcacttggcaaggtcagtgaggggccagtagacccccggagaagcagtaccgacaatgacgaagataccagatcccttcccaacccctttgcaccggtcccactaaggggcagggtcgaga

SEQ ID NO: 398832 - DNA, 122 bp, Homo sapiens
gctaaaatttcttaaccaatgccggccagcgatggcagggctgcgggactacaatcccagcgcgcacagggatcagggactgtgcgcatcactggaagaagcggcagaacggcgcgcgcctc

SEQ ID NO: 398833 - DNA, 122 bp, Homo sapiens
tcgtggtttcggttctgactgtaacaattttagcttttgtctgaggcaatgtttgcatttcgaagctgcaggaaatctagtcatgctggggaagtggtcgtggagtcggccgtcatgggatt

SEQ ID NO: 398834 - DNA, 122 bp, Homo sapiens
gaggagcgtctctgcccggccgccatcccatctaggaagtgaggagcatctctgcccggccgcccatcgtctgagaggtggggagcacctctgcctggcaaccgccccgtctgggaagtgag

SEQ ID NO: 398835 - DNA, 122 bp, Homo sapiens
aatatggggtaaaagatagaaagctctttgatccctgaaggcattcttgagcattggaatcgatgccagcagtatcctatctggggatcttttctttgttttatgaaagaaaatatgcaaca

SEQ ID NO: 398836 - DNA, 122 bp, Homo sapiens
ctcccggctgccagcgtgagcggttccgggaaaggctgcgcccagcctcctcgccagcgccgccgccaccaccatgcagccctccagcctgcctcccctgggttgctcgcccacagctccgc

SEQ ID NO: 398837 - DNA, 122 bp, Homo sapiens
caggaaatgagtcatatgtgaatgacagataaagcctttgaattggtatttttttaattacgtgctatgttacatgtgggcagttggtccacctgagtgattaatttatcaaggaatcactg

SEQ ID NO: 398838 - DNA, 122 bp, Homo sapiens
ggtaacgtgtgtatgtctggcggcctcgccggccgctgggcccaaaggaggaacctgttacgcagagtggagatgctgaggcctgcggtcaccgggcccaggaccccctcccctagtcgacc

SEQ ID NO: 398839 - DNA, 122 bp, Homo sapiens
aggatccagggctgccccaacaggagccccaggagagggagctggaaccagagaacagcacgtggcaagaggccccagttaagctttgcagcaggatggcccagtggctactgggttcagaa

SEQ ID NO: 398840 - DNA, 122 bp, Homo sapiens
accgggagcgtggctgtgggtgatgggtgggtcagggacccgggcaggatgtgcggtgtccggaggcatccgggctcagcattgttttctcccacctccttcaacgccaaaccttccttcct

SEQ ID NO: 398841 - DNA, 122 bp, Homo sapiens
ggtaatgacccccaacttctcatacgccccctccccagctgtggtcgtgggagctgaccgcgtggttgccaacggcgacacagccaacaaggtgggcacctaccagctggccattgtcgcca

SEQ ID NO: 398842 - DNA, 122 bp, Homo sapiens
cagtggccgcgagtgcggccggacctggagtagtacctgagccgctctggccgagcaaggcgcggggccccggtctacaccgcgctggacccggctatgccgtgacggaattcccgaggccg

SEQ ID NO: 398843 - DNA, 122 bp, Homo sapiens
caattaggggctcgtctagtgaattgggggtattctccttcgaatgagtacactacccgccgcaccttggccgggtttcagatgccccaaacttaaaagaagcctaaaaggccgtcaggctg

SEQ ID NO: 398844 - DNA, 122 bp, Homo sapiens
gtggagagggcactggccgggcccggaggggccatcctagccggaggcgacgtcgggcaacgcgccggccatgctaggcctggaccccgacaggtgccagagcatccccccggcgggccagc

SEQ ID NO: 398845 - DNA, 122 bp, Homo sapiens
actgactccttctcggcttagcggctgaagactgatgctgcccgatcgcctcggaagccccgtagaccatcacggacgccgaggtttgggtaactctcacagtggaaggtaagtccgtcccc

SEQ ID NO: 398846 - DNA, 122 bp, Homo sapiens
cgtctcggatcggcagcgccaagggcagcccgagccttacgagagcggcagttggctgagcgagtctctcgcctccgtagttctcgtgtgtctttggccgcacagcctctcgggagttgtag

SEQ ID NO: 398847 - DNA, 122 bp, Homo sapiens
gccaggcgctgctgcagcctctaggaaatcaaccgtggaaacacacggaccctgccctcccggcgccagtgttctggtggtcaggaggtgaagaaaaccagcaagaaccagcacaggaatcc

SEQ ID NO: 398848 - DNA, 122 bp, Homo sapiens
ctagctgtctgggcatttgtgtcaaccagaactctccctttgcataaagccacctgcacgcgatgacagcaaagtaaagatcaaacataaaccatgggttgaaacgaaagcaagcaactctt

SEQ ID NO: 398849 - DNA, 122 bp, Homo sapiens
taataaatccaactctgccttcttcactctccagtgtctgtgtgccttatttttcttggtcgtgggacaagaacttggagctcaccagtggggggagtaaaagagctgtaacactccctccc

SEQ ID NO: 398850 - DNA, 122 bp, Homo sapiens
aaaccaaacaaataccaactcaaaccctccttcacatcctcccacatcttcccagtgcttcgctatctcacaggacccagctggcccctggcttcgccccacccactgcagctggcgtcttt

SEQ ID NO: 398851 - DNA, 122 bp, Homo sapiens
atgggagctgccttagcaaggagaaaagcatcccaggctctgcagagaaaatggcaaatgcggctctgtctccctgcaggactcagagagtagtttgggatgagaagcaaaagaaagcagtt

SEQ ID NO: 398852 - DNA, 122 bp, Homo sapiens
gccgtgagtttcttggtttgaccgttatgctttagaggtagcgctgtcgagcccggaacacgcggtccctcgcttttgtcccatgctgagttggttttatcagaggccatcgtaggccccac

SEQ ID NO: 398853 - DNA, 122 bp, Homo sapiens
ctggctggccaggcccagggcctgggctcatgggctatattgagggctgagtcaccagcccgcgcctgggtcaggctgagtgtcactggctgctggggcctgagtcaggccccgatttatcc

SEQ ID NO: 398854 - DNA, 122 bp, Homo sapiens
tgagtcgggaacacacgcacacaatggccgaggtacactctagagcattcacagtgagaccggaacacacgcacacaatggccaagatacactctagaacattcacagtgagtcgggaacac

SEQ ID NO: 398855 - DNA, 122 bp, Homo sapiens
gcctggagatggggaggagtggaataggctgtgggtagcagctgctgcgagtctccaccccgaccaaagcagctgctcctcctgtgcccaggcccagcccatgctctgtggccatgcaccta

SEQ ID NO: 398856 - DNA, 122 bp, Homo sapiens
ccgctgctcccagagggcagcccacccgggaccatccacgctacctctgcccgcttgggccgaccccacagggcatcctccccggctgcagcctctcctgcctggaaaggcacggctggcct

SEQ ID NO: 398857 - DNA, 122 bp, Homo sapiens
gagccccgggcctcctcccggcagtggaagaatcagcgtgctaacattgtgtgcaaaactcgcagcgtgatcaagaactgcaaaagaaaacagaaaagaaaaatctcttctgatcctgtggg

SEQ ID NO: 398858 - DNA, 122 bp, Homo sapiens
tcctttacaaataaagctgcgaatcaattcagatggttacagagtgaaaggagatctgatcggagaccaagggccaaggattgtagggtgaccagcaccacggtcacttcaaagttgtcttt

SEQ ID NO: 398859 - DNA, 122 bp, Homo sapiens
gaccgactgtcaaggtttatggtcgttgagggaatgccgtgggaatcagtggttgagaaacggggtaggaaagtgtgtatcagtgaatgaacttggtgtccattccgggtttgcaatttaat

SEQ ID NO: 398860 - DNA, 122 bp, Homo sapiens
acccatctttcagaaagcaacatgagaccgatttacgccttccagctgctgtttcatctccgtcctttcatcttaatcacttctggagcactatgccatcttagcattcgaaattcccagag

SEQ ID NO: 398861 - DNA, 122 bp, Homo sapiens
aagcaactcttgagaaatgggagtgccttcctgacctcagtctttattgatcttggtatccgcacctccagtgacgtgtcctgaagggtgggagagaattcacaagtgcctcacacacaggg

SEQ ID NO: 398862 - DNA, 122 bp, Homo sapiens
acactatagttgcccattgaacaaccattcacagatgcttgctttcctagccacccttgccgctgggccatagaccagaggaaaaatctgcagggcagaatttcttgtaaaagttgacaatt

SEQ ID NO: 398863 - DNA, 122 bp, Homo sapiens
tgacgcgtggggtggggtgagggtggccccaaagagaccagcggcagcaagttccccaaacggtaaattcctgactgcagcgtgagccctgggacgcagtcgaagcagagcaaagtctcccc

SEQ ID NO: 398864 - DNA, 122 bp, Homo sapiens
atcctaaaagtccctcgtcgcagcatacaaagttgtgggtaaatccagcgcagtggggggcgcacggccttacctgtgccatggcgactactcaggtcaggggaaggtgaagcaggactgca

SEQ ID NO: 398865 - DNA, 122 bp, Homo sapiens
caagttaacacttttaaggaaacattactgggtataaaattatctctagtaagtcgtatgcgccttttctctgagctcactgtatcacactaaccagcagagggtgcacaataaagaagaga

SEQ ID NO: 398866 - DNA, 122 bp, Homo sapiens
cgcttaagatgggattcgaaccaccaaacacccaacagaagttccccatatgactcaccgcgtgagcccacctggagccgcacactctccgcagcctcagccagcagagtggcgctaaacct

SEQ ID NO: 398867 - DNA, 122 bp, Homo sapiens
agcgaggcagccctgacctgtcaccatctttgtgctctttctagacaccgggggctgatccgcgcctatgagtttgcggtggaccagctggccttccagagccctctccctgtctgccgttc

SEQ ID NO: 398868 - DNA, 122 bp, Homo sapiens
agtgactctctgtgaaactgcagagtcagaggacttcccttccgtagttttcattctaagcggtcatctgtgagtcagaagatttcgccgtggcctgatttcccaccctttctgcccgcgca

SEQ ID NO: 398869 - DNA, 122 bp, Homo sapiens
tggccggtagaacaacaacgatatttatgagattaaaccctcaaacccttcacagtttgccgggcaactaataaccatttgccaagctgttcatttaataatgagtcagctaagccaaaagc

SEQ ID NO: 398870 - DNA, 122 bp, Homo sapiens
tgtgtcctccttagggctccgggggtgagtaagagctcccttactcagccgtgatgcattcgctgtcttcttcaggggcccctcccagccaggtgtcagcagagggagaggagagccaaaga

SEQ ID NO: 398871 - DNA, 122 bp, Homo sapiens
ttttaggaagagctgcctgctcagttctgtgttatagaaaaatgacttcagtgtcagtgccgagagtcctggagggggcaagcctgcagattagaatactaggataataatcctggttagag

SEQ ID NO: 398872 - DNA, 122 bp, Homo sapiens
aaaggttaatctcagaaactaacttgaactcgcgcggaagtgacgcaacagaagttgtcgcgctttgcatctccgcctcccgtgctccgcctccggtcttacgtttcgcccccggcagcgcc

SEQ ID NO: 398873 - DNA, 122 bp, Homo sapiens
cgtagctacccccaagaagccgtgatcgggagctccgagctcccccagagctgcttcccacgctgtggccaacaacgacggcagaaacctgggaacctgctcagcaggtcagaacaggtgcg

SEQ ID NO: 398874 - DNA, 122 bp, Homo sapiens
cttgaggccaggagttcgagaccggttggggcaacattgtgagatctctgtctacacacacgcacccacacacaactagccagatgtagttgcgtgcgcctgtagtcccagctaccctagag

SEQ ID NO: 398875 - DNA, 122 bp, Homo sapiens
caggaaagaccaggctgggagagggctactgactgcttactgtaatcagcttcagattttcggcatcaacaaggcagaaccccagtgagacaggccagggtgacaggaggctctttggtgac

SEQ ID NO: 398876 - DNA, 122 bp, Homo sapiens
tatgcttcttggtctttatgagtcgcagctgttcctagagaatggcctagcagccagggtcgccgcaggcaggctttgccctatactaactgcccagcaagcaggcacatggggctgagacc

SEQ ID NO: 398877 - DNA, 122 bp, Homo sapiens
aagaggactcagtaaatacgaatccatcgacgaggatgaactcctcgcctccctgtcagccgaggagctgaaggagctagagagagagttggaagacattgaacctgaccgcaaccttcccg

SEQ ID NO: 398878 - DNA, 122 bp, Homo sapiens
acccctgctgctgccagcactgtgcagaatgctttctattaaaaattaaaaaccacttgtcgagtctctgggaacgctcagattacacaggaaacaagccccctctcaacatccacccctgc

SEQ ID NO: 398879 - DNA, 122 bp, Homo sapiens
tcctgcaggccaggctccgggcgctgtctgctcctgcgtggtcccttccgccagctcgggcgctgtctgctcctgcgtggtccctcccgccagctcgctggggcgtcctgcaggccaggctc

SEQ ID NO: 398880 - DNA, 122 bp, Homo sapiens
gtctctgtggattgggacagaaaggccagcccttcttggcagtcagagggcactcctgtgcggcttcatagtctgctacgtacataatgaggctcaaaaagactgagtttgggaaaagttaa

SEQ ID NO: 398881 - DNA, 122 bp, Homo sapiens
gtgcctagtacagagcaaggcaccagctgcaaaatacttagctccttaagaacacagcctcgctttttgcatcatgaatcaggcattgttctggctgcactggctgcaaatccgcccctccc

SEQ ID NO: 398882 - DNA, 122 bp, Homo sapiens
cccttcacaaaggggctccaggcgggcgcctccgcggcacagcctccgccccaccgcccgcggcgaattaattgggccctgaaagaaggggcgacatagcttccagttaattagtcaagaaa

SEQ ID NO: 398883 - DNA, 122 bp, Homo sapiens
tttgtcacgactttacaacgccaccgagttgatgtgtcaatctgcttctgaaatgctgctcgctgaggctttgtttgctgctgatcgtagagaacaccacggcagacatctctgtccctgtc

SEQ ID NO: 398884 - DNA, 122 bp, Homo sapiens
tacccatcagaaagagaaatggatacatgagctctggcatttctctgcaatccaaaaaatcgaggcaattttacattaacagggagagatgttaagcggaaaaagcaagttgcaagatatgt

SEQ ID NO: 398885 - DNA, 122 bp, Homo sapiens
tggtatattttctctttaaatatgtaaaacacaaatcacaaaatgtgcctactacttcttcgacttatcctgcaaagcactcataaagccaatggaaagataacattaaacagagtctggag

SEQ ID NO: 398886 - DNA, 122 bp, Homo sapiens
aagtaatatagggtacaaaatttttacaaaatgtgtatttaggttatttgagtcaaaacacggatggactattatttttgtgaagaacaagacaggattagttaataagctatttacctttt

SEQ ID NO: 398887 - DNA, 122 bp, Homo sapiens
agtggcttgggggacccccacatagaagtgtgttatggatgctttgcactcaaggaagggcgcgctgcccaaggctcccgggcctgctcccgagccgagccggggacgaggggcgacagcgc

SEQ ID NO: 398888 - DNA, 122 bp, Homo sapiens
ggaaaatatcgtgcagggacgtggcctgtgcccggaggagccaacactacccctggggcccgcgccccttcactccagcccgcccgagcttcccgggttcatgccccttctctgaggcgttc

SEQ ID NO: 398889 - DNA, 122 bp, Homo sapiens
cagacgcttggagaagcaggccagggcttgctactccctgtacggagcactggatggctccgtcactgtgggtgtctcgtccaccgtggtcagttacttgtgagacaagaacagggaatttg

SEQ ID NO: 398890 - DNA, 122 bp, Homo sapiens
cgccgaggcctcctccgcccccgaccgccgttcccacgctccctgtcccatggcgaaggtcgccggtgcccggtattcacctacggcattcgcggctgcagccttcagcacccgcgccattt

SEQ ID NO: 398891 - DNA, 122 bp, Homo sapiens
ctgcgcacctgctggcagaagctgcctccatttcgcgaggtgggcgcgcggctgctggagcgcttccacggcgcctcacgcgtcatgggcaccaacgacggcaaggccctgctgcccgccgt

SEQ ID NO: 398892 - DNA, 122 bp, Homo sapiens
aataaaaaaattagctgggcgtggtggcgtgcacctgtccagctacttgagaggatcactcgagcctgggaagttaaggatgcagtgagccgtgattgtgccactgtactccagcctgggtg

SEQ ID NO: 398893 - DNA, 122 bp, Homo sapiens
cctgggaccccgccagccgggtgacggggtttaagcactgcaggtccactcggcaggcaacgattggacttttgctgtccaatgtactccagggatgctatgccccccagcaccccgagtct

SEQ ID NO: 398894 - DNA, 122 bp, Homo sapiens
ccaaatctttaaagaacccaagtcatgctaacaagaaataaatgactaacactctgggagcgctaatcaggagcacttcaggaattcccttcctttttcctgccaggcagcagtttcacagc

SEQ ID NO: 398895 - DNA, 122 bp, Homo sapiens
cgctggctccgggcttccgactccccgggccactgccattttgggaggccccggccctgccgccgtgacgtaaatgcccaaacatggacacaggatgtgtgccggggactcccgaaaaggaa

SEQ ID NO: 398896 - DNA, 122 bp, Homo sapiens
ccgttctcctgggtcggggaccctcacttcttctggggtgtgctcagcttctgcatgccccggatcttgtccagcagaccagaaatgaaggcctctgtgggtttgtaacagtcaaccagcag

SEQ ID NO: 398897 - DNA, 122 bp, Homo sapiens
ctcgacctgcctgtgactcgtcttgggccagtaggggacgccctggcctcaccagacgagcgcagccatgggcgaccgcctcagccactcccagatcttgccctgtcgtttaccttagatca

SEQ ID NO: 398898 - DNA, 122 bp, Homo sapiens
aacccggaagtgcacttgggctcggagagccagaactacaattcccagaagcctccgcggcgcggacggtcagtaggcggggttccggcttctccaaggaagtggggcgggggaccgggcca

SEQ ID NO: 398899 - DNA, 122 bp, Homo sapiens
cctgtggacctttctccagatgaaatttcagtaaaggcagagctgctggtatcttctggccgtggagctatagttggtacctctgctggctttggcattaatgggagaacggttttaaatcc

SEQ ID NO: 398900 - DNA, 122 bp, Homo sapiens
tccgctactccgagtcacttcggtaaggcgggagcccgagcaaggtcaaggagggaagtgcgcggtgccacggaccgacacagttcgctctagcatctgacgctcggactccgcgccctcag

SEQ ID NO: 398901 - DNA, 122 bp, Homo sapiens
ttcaaagatgatgaatttattctgtatgtgttcagttggatatgtagaacttgagcttaacgaaagcagtgactagaacaatagatttgggaggtatctgaatatacaagtatgaaaaccag

SEQ ID NO: 398902 - DNA, 122 bp, Homo sapiens
tgtttgttccgcccccgcggaaaccgctgctcgctgggcaggggctttctgttttgcagccggaacaggaacacagatagcccgccaagccgccggcgacaccttccaacccctttagctct

SEQ ID NO: 398903 - DNA, 122 bp, Homo sapiens
acagccgtgcgagggaggggacgcccactggactcaccgaagtagtcagagggtcccaggcgccccacctccacgtactcctcattgggggaccggcgctgcagcacggacgcggtgccctg

SEQ ID NO: 398904 - DNA, 122 bp, Homo sapiens
caacttgccatctcactctcagaaagcaatgcccacaacgtgaggcggcagggagtgaaccggcttcttcaccatcccgctcctctaacacaccgtgtgcccgtcacggcagcacctttgac

SEQ ID NO: 398905 - DNA, 122 bp, Homo sapiens
tggctgcaggcagttgctctcgggtttccttccaggagctgggaagccggaggaaagctgcggttcctgttccgccgagcttctgaccttcctctgcaggacgtgtgctactattactatcg

SEQ ID NO: 398906 - DNA, 122 bp, Homo sapiens
tttctgggctccaagctccccagcaagagggtgaatctgaaggtctgccctggctctgggcgctatgacctaatagctttgtaatatgcctgccagcagctgtactgtacaatttctcatca

SEQ ID NO: 398907 - DNA, 122 bp, Homo sapiens
cctgggcagtcttgtctgcctcggctgtgaagtggggaggctggcaacagttttcttcagcgcccaggatgcagccggctaaggtaggtgctgggggaatggggtcttgctctggagggggg

SEQ ID NO: 398908 - DNA, 122 bp, Homo sapiens
gttgcgggtaaggaacaacgcagaagcctcttccacccccaaatttaatgcaacagcaggcggaagacctgcagggtcccgttcagaaaaagggccgtcagactgtcgagcctaagaataaa

SEQ ID NO: 398909 - DNA, 122 bp, Homo sapiens
taaaccatgcgagtgttcctctgcggttccccaattcctagcccgacgccttgcacagagcgggtcattcaatgcatgaatgaagaaaagaggaaccaaggggggaattacggtatcctacc

SEQ ID NO: 398910 - DNA, 122 bp, Homo sapiens
ccccagatgctccccagagctgcctggagcttggtgctgaggaaaggtggaggtggaagacgagggatgcacagctcagaaggcaccagtgagacctggactccttcctccctgcctaactc

SEQ ID NO: 398911 - DNA, 122 bp, Homo sapiens
acgctgtgggagaggaaaacagccacatgtgggctggctgcttggaggagacacatgagccgtgaacacgtctcccccggccgctccctggttccatgcgtgctcgtcttgggcaccacgag

SEQ ID NO: 398912 - DNA, 122 bp, Homo sapiens
aaaaatatttttaagctttctctcagaattgaaggcagtaggggagggatacagaagttccggaaatggctgactgtgtagacaagatggtgtggtttcagagtacagctgaatatatacag

SEQ ID NO: 398913 - DNA, 122 bp, Homo sapiens
ttaattcaaagtgttaggaatttcattaaaaacagggcgagcctcgtcagttctggtgtccgcttcgcttcgcgcggagctcggcgcacctcctggaacagcgccggggcgggaagccggtt

SEQ ID NO: 398914 - DNA, 122 bp, Homo sapiens
cccttccagcctctccctgacacacatggaacttctgggtggctcccaaacgcaggctgacgtcaccagatgctgattctgatcctcacccttccaccccccatgtcagccctgacctcaga

SEQ ID NO: 398915 - DNA, 122 bp, Homo sapiens
acagcccacctgccctggaacctccaggcaagggccacggagagacgtgagtcatggcaccgcctcgggaccttttttctcttctcaggaaagaagagaaaactttgcacgaaaacgccaag

SEQ ID NO: 398916 - DNA, 122 bp, Homo sapiens
gtaataactgcctcttacctcctagggtttttttttgaggtttaaatgagttaatgtctccgaaaaactctgaaagcaaagatatgtgtgtgatactgtgattctacaaagttgtgctcacg

SEQ ID NO: 398917 - DNA, 122 bp, Homo sapiens
agagtgttaaggaggagacccactgtccaaccttctcagatcctttgcgggtagccctggcgtcccgcgggtaagtcaactactccctgttcaaagagcaaatcttggagggcttcagtcag

SEQ ID NO: 398918 - DNA, 122 bp, Homo sapiens
ggggacgcgctgtcgtctggggtgtctccgcgtactcctgttgggcgaaccctggctctccggtgttggttgtcacttgagcaactgatgggcttccaggggaagtaaacggagtcgctagt

SEQ ID NO: 398919 - DNA, 122 bp, Homo sapiens
atttggtctatctgctatctatcctttcttgaatactctgcagttttcttaatagctattcgaaggagatacagcattccatctctccggctctgcatggtgctaaatggtttgcatgcatt

SEQ ID NO: 398920 - DNA, 122 bp, Homo sapiens
ctgttccagtttcaagtaaacaaaggccaacttcttgcagacatggcaacttcttgcagacgtggcccaagttaaaaacggttaaataagaaagattttaaaagttcctttgtgcatgctgc

SEQ ID NO: 398921 - DNA, 122 bp, Homo sapiens
ctcaacacctcgttacagatggggaagtggatccaagcgcaaagggcggccggagcggaacgcacaagcgaccgagctgcctggaaggacgcgcgccccgcccggcccgcccccgacgggaa

SEQ ID NO: 398922 - DNA, 122 bp, Homo sapiens
ggtgattggccctgtggtctatcaggcgaaaaccacagattctccttctagttagtatagcggacttaataaaagaggaaaaaactcttgcttcagtactgacagttccttatgctgcttct

SEQ ID NO: 398923 - DNA, 122 bp, Homo sapiens
tgatcatgaactctgcccccactaaatagtggaatgcttttattttctatatttcaaggacggtctctctgctccttgtccctcttccgaagagcagggtggaaactgtatttagaacactt

SEQ ID NO: 398924 - DNA, 122 bp, Homo sapiens
gtaggaaaacaggaagtgactggaggaagtaggtgcctttgttcagtacccccttctcggcgttgcccccaggctgcgccagcggctcagcagccctctgtgcagacctggtcagcctccag

SEQ ID NO: 398925 - DNA, 122 bp, Homo sapiens
atggttccagcaaaaccccaggaatgctctgctcctggtcttgtagttgacacctccatccgggactcacctggtggaggagatcaggttacctgccgactcccgctcttttcaggtgcagc

SEQ ID NO: 398926 - DNA, 122 bp, Homo sapiens
ctgtgttatcttgggcaaataatggaagctttctgaacctcagctgtaaaataaggataacggtagtctctacctcttagggttttttatgaggaggaaatgaggtactgcatgcaaaacat

SEQ ID NO: 398927 - DNA, 122 bp, Homo sapiens
tgcgggggcggggcgtccccagagccctcaccaccctctcccccagccccaccccggccgcgtcccgctggacttggccgcccgccttgcaggtgctgaagggcttccccgagtgcctgcag

SEQ ID NO: 398928 - DNA, 122 bp, Homo sapiens
gatcacatcacacaccccaatcccagcttaaagtctgcctctggcttcccaaagtgcttacgatagcactgtaacacagtgttcagaggcccacaagccctgagtggtctgggcctcactac

SEQ ID NO: 398929 - DNA, 122 bp, Homo sapiens
cctcctcaggccctgactcactggggttttgtgctcggactcaaagagctccattgacagcggggctggggtcggtttctctccacacagcctagcctgctgggaggcacaaccaggcaaat

SEQ ID NO: 398930 - DNA, 122 bp, Homo sapiens
ggcgccggagggagtgggggtttgctcaggcatgccgggctgcaggtcccaagcccgtcccgctgggaagaggctgaggcctggcaagaattagagcgctgcgccggcaggccggaagtgct

SEQ ID NO: 398931 - DNA, 122 bp, Homo sapiens
cccttctccagcagcacaaccagtcctcccagctggtcctgtggggaccagccgtcatggcgacgtggtgacaatgtccccaggcagccgaccatcctgggcttctctttgggcaggcctgg

SEQ ID NO: 398932 - DNA, 122 bp, Homo sapiens
gcccacaggcggtcctgcccgcccggtgccctgcggagagcctcgtgcagccctgggcaccgcccctgccctgccctgaccccttggccttgaaatgctgtcatcggaggagccgtcccgct

SEQ ID NO: 398933 - DNA, 122 bp, Homo sapiens
cggggctcagacgctgcgcacgcgcactcgcgacccctcgcctccttttgctttttctggcgggaaaagctcacgcgcacctcccccaactcaactgccgttcgtcgttcgtggatgtccgt

SEQ ID NO: 398934 - DNA, 122 bp, Homo sapiens
gagcacagagcagagcagtgccgttgatatcctgccaatgcccagcagaataaaagcttccgaaatcagggctaaaaataaataataaaacaaaatgacaacataaacaggaagacctaaag

SEQ ID NO: 398935 - DNA, 122 bp, Homo sapiens
gacactgccggtcagccccgctgggccagcagggctcccagggcccaccgctgtgagactcggtaccttgcagacacgggccacacgagccaccacctgctcggcatagcagtcggactcca

SEQ ID NO: 398936 - DNA, 122 bp, Homo sapiens
gtgtgggatatagtctcctggtgcgccgtttttttaagccggtctgaaaagcgcaatattcgggtaggagtgacccgattttccaggtgtgtccgtcacccctttctttgactcggaagggg

SEQ ID NO: 398937 - DNA, 122 bp, Homo sapiens
ataaaatgcattcagtaaatgatagccgttattgctgtcatcactaattgattattgtgccgacacttgttgttactgaggctgagatgctgatgatacttactcagctttgctgcttgtcc

SEQ ID NO: 398938 - DNA, 122 bp, Homo sapiens
cggcggcagcggagcctgtggctccccctgcgggctgctcagcggcgtgcacagtcctgccggctggcttgggtgggtggtgggctgcgggtaggggaggggatggaccgagtcccggcttg

SEQ ID NO: 398939 - DNA, 122 bp, Homo sapiens
agtgtcgccggtcttcctgcagctgcccagctacgaggaggtcaagtatctgcccacctacgaggagtccatgcggctgcagcagctcagccccggggaggtcgtgctgccagtgtcggtgc

SEQ ID NO: 398940 - DNA, 122 bp, Homo sapiens
agaggacctggccttcctctggggccacctgcagggtccaccctcttggggactccatctcgcgcctgtgacctaaaacaggagagaaaaggcaagtaccttagagaatacaaagaacacca

SEQ ID NO: 398941 - DNA, 122 bp, Homo sapiens
tcccagtgtgccccgctgttgttattccttttatgtgctcccagccctcttgaaaagggccgctccgggactacgcgttccagaatgcagcggaaatgggggcggagcgctctcggttaggg

SEQ ID NO: 398942 - DNA, 122 bp, Homo sapiens
atgatgcagccgacctggaccccaccgagaaccccttcgacctgcttgacttcaaccagacgcagcctgagaggggcgacaacaacctcaccaggatcgtgggaggccaggaatgcaaggac

SEQ ID NO: 398943 - DNA, 122 bp, Homo sapiens
gatgatagcgcccacttcatgttgttgctgcgagtatgaaatgagtgaggtgtaggcgcccggtacataatacaattccccaaacgttgactcaaagcctgaaaagggagctgccaggacgt

SEQ ID NO: 398944 - DNA, 122 bp, Homo sapiens
tttttttagtagagacagagtttcaccatgttagccaggatggtcactatctcctgtccccgtgatccgcctgcctcggcctcccatagtgctgagatttacaggcgtgacccactgtgcct

SEQ ID NO: 398945 - DNA, 122 bp, Homo sapiens
gatctggaagatcaccttaaacaagtgatcaaacttagcattatgagccacctgcaatcacgaggcaggaaggatatatcacctatgcagtatttttcccaaaaatgcttaccttgaatctc

SEQ ID NO: 398946 - DNA, 122 bp, Homo sapiens
ttcataaatcagggtttggccctctgcttggagcatccaaccccttgaactcaaacctgtcgagcaaggggttaagagttctgttctcttgccaacctggctgggcaaaagcctgtgccatc

SEQ ID NO: 398947 - DNA, 122 bp, Homo sapiens
agtattatcagcatttctgttagtatggttcctaatggaaatatgggtcatattagtcttcgtgtaggctaaaaatatacaccctttggtagtctagtaaatgcccaacatgtgtcaactaa

SEQ ID NO: 398948 - DNA, 122 bp, Homo sapiens
gacggtgttgtcggacttgaactccacgcgcatgttgttgctctgcgaggtgatgacctccggcgtctcagagccgcagaacctgccgtgcagcttggcgtcgggggacaggccgctgcgca

SEQ ID NO: 398949 - DNA, 122 bp, Homo sapiens
taaccagggttttctctttacactggcttgtttacttatttcttcaccaaagccagggaacgtccctttagctactgcagcatttctaacagatgcgacaaatcacaggggtgtattttgac

SEQ ID NO: 398950 - DNA, 122 bp, Homo sapiens
ccgcaatggaatgttcagaacgcgggacctccttgggttaggatttctagaccccgggatcgtcgtggtgagatttaggatttctggaccccagcgtcatcttgatatgacttaggatccat

SEQ ID NO: 398951 - DNA, 122 bp, Homo sapiens
gactccagccaccgcctggacctcaggagcccgcttctcccccggggaattcccctgcaccgctgccatcccagtccctggctttgacgctggggtagggataaagaagagcgcagctgtgg

SEQ ID NO: 398952 - DNA, 122 bp, Homo sapiens
caaggataataactaaaatcttcccttgacttgagccaggacctcagctttaatgaatgccgggtcaagaagtcatgaagaaagaggggggcagttctagggaaattctgtctattcaaaaa

SEQ ID NO: 398953 - DNA, 122 bp, Homo sapiens
cagtgggggcaggacagtgggtgcagcccactgagtgtgtgctgaagcagggcaaggcatcgcctcacccgggaagtgcaaggggtcagggaattccctttcctaccaaagggaaggggtga

SEQ ID NO: 398954 - DNA, 122 bp, Homo sapiens
ttcgtgagccctcacaacccttgaagtttttacttgtttggcagaactaagggcactgaacgtttgtaagccgttcactaacacttacaggaagggcataaaagggtgctcaagtcagtctg

SEQ ID NO: 398955 - DNA, 122 bp, Homo sapiens
cccccgggagggggcggagagtgcgcggctggctgcggcggccggggaggccggggaggccgcggcgcggtcactgcgagccgagccgagccgcgccgagccgcgccgatcgccatccggcc

SEQ ID NO: 398956 - DNA, 122 bp, Homo sapiens
gcagaaaagatcgaggccctcactctaatagcccatgaggaactgaatcctgcccacaggcgcggggccagcagagaagccgagcctccccgcacggagcgtgcaatctactcacagtccgg

SEQ ID NO: 398957 - DNA, 122 bp, Homo sapiens
atcctggactgacattcccaccaggatgggcatagcacagagtgctgggaggccaggctgcgtagtcaatggagcgtttgagatgaaaatccagtccacattctgaggagggggaaagcaag

SEQ ID NO: 398958 - DNA, 122 bp, Homo sapiens
gaaggtgcccggggagtggctctcaccctgccccttcccacagcccctgcagatcgatgacgacttctgcgggcaggacttcaaccagcccctggggggcacagtcaccattgaggggacgc

SEQ ID NO: 398959 - DNA, 122 bp, Homo sapiens
gcaggagctctgaaggggtccgctggcgggggaccctcggacttacccgagctggcactgcggacccctgcgaggttcatagaagcacggaagggggccaagtgcaatgaggatccaaggga

SEQ ID NO: 398960 - DNA, 122 bp, Homo sapiens
tcttcttttctttgttaatcaacaattacagcagatgtaaacccacttctgaatgtgtggcgaggaaaggtagtctttcaggctttggagtcctattcctgttgacttgggtccaggttgta

SEQ ID NO: 398961 - DNA, 122 bp, Homo sapiens
ggggagggactggaacaaggggctagtgaaccttctctgggtttttcctgcctgactatgcgttgacagtcccagctgttgggcctgtgctcctgtacactgcacggccttgagaggagttc

SEQ ID NO: 398962 - DNA, 122 bp, Homo sapiens
taggggattctacagccaaagacttaaaagatggcctgacataaataaggactgactaggcgttagctcttgatattgttgttgatgttgctgctgttgttttagttgttgtcaaaaaagat

SEQ ID NO: 398963 - DNA, 122 bp, Homo sapiens
tggctgggaagtgaagtgcttgcttgccctgccagcctcagcagtgtattttggtgccctcgagaactggggtggatggcatgagccaaagagaaaaccaaaatgctgacattgacatcaca

SEQ ID NO: 398964 - DNA, 122 bp, Homo sapiens
accaagatagtggggactttgtgcctgggcatcgtttacatttggggcgccaaatgcccacgtgttgatgaaaccagtgagatgggaacaggcggcgggaaaccagacagaggaagagctag

SEQ ID NO: 398965 - DNA, 122 bp, Homo sapiens
aggcgagcttggggacgaggaaggccgagcccggcggcgcggcccgagcgcccgcttcctcgccagcattgggttccctgaggggccgccctgccccgcgtcagcctctgcagcctccaacc

SEQ ID NO: 398966 - DNA, 122 bp, Homo sapiens
acttctcgcgcaaatctgcagtgttcttgcagggctgctgatgggtggtcctgttcttttcgcggtcctgtttgcgcagagatgaaacggggaacttagcgtatccctaccgctctttttga

SEQ ID NO: 398967 - DNA, 122 bp, Homo sapiens
ctgagcgccacctgccgtctgactcaggaacagcgggcccgccgcagcttaggggagaaacgtccaaaaacctcgctggccctcagaggtcagggtggcagggcactgactcgacccttttg

SEQ ID NO: 398968 - DNA, 122 bp, Homo sapiens
acattgtgtctctcttgcaaagaaaaataaaaggaaaaaaagaacttactttcaagtcatcgatattttgtgcaacagctctgcagggtatcaataaacttttccaaagctgtaaatgtgta

SEQ ID NO: 398969 - DNA, 122 bp, Homo sapiens
cactactgtcagttctgtgccaggtgtcagagcaagtcccgttcacgtgtatttctacatcgttatgagacttatgagatgatatcgttatgagatataatcgatgagatataatggatttc

SEQ ID NO: 398970 - DNA, 122 bp, Homo sapiens
actatgtgtggagcatgtcacccagaggctggtatgcagcaagtgctttgtaaatagtagcgatgggcactactgaaacctgaatgtctgcctctgcctgtttgcgaatgactccaccttcc

SEQ ID NO: 398971 - DNA, 122 bp, Homo sapiens
ggcgcaggggccgggtaggggagggcttgggtccggccatccagtgggggtcagccccatcgccgggttccgcggggccgcgccgaaggggcggagcctgggtttcggtttcttgcaaacgc

SEQ ID NO: 398972 - DNA, 122 bp, Homo sapiens
tcttcaaaggttgccaggttggaaaacaaaggcttttcttgttgcagcaaggagagaaaacgcagcatgcacaaaacttcagaacgtgtttgtctgcctcttgtcagcttacatataacaga

SEQ ID NO: 398973 - DNA, 122 bp, Homo sapiens
ttacagttctctcctgcaatatatattccacttgaatgagaacgcattgaatccattaaacgaagaggtcacttaaaatgaaagattgcagtcatgcctaaatggcatgttaatctttgttt

SEQ ID NO: 398974 - DNA, 122 bp, Homo sapiens
aaaccaagatacgcacagcccaaatcactttcccatgtgtttttaccacctggagtaaaccgttcaagaactgtttatctccatgaacatatgacctccacgatgccaccaaggtcaacaag

SEQ ID NO: 398975 - DNA, 122 bp, Homo sapiens
ggacggcaaggacgcgtggctggcgacggtttcgcaggggcgcccgttcccctgggggcgcgaagtccccgctccaccgctgccccaactcggctccgaagtgcctttgccgcaagacttgc

SEQ ID NO: 398976 - DNA, 122 bp, Homo sapiens
gccatctcggccgcgagaccccacggaggtgggtgccggcaccgcccgggagacaaggggcggcaccagtgaatatgccccgggacttgtttccccccagtggttctttttcatttattaat

SEQ ID NO: 398977 - DNA, 122 bp, Homo sapiens
aggccgcttcaggtgacggttcactgctggtgagcgtgcagtcacggaggaaggaagccacgagtcagggccagactctggggctgggccatcgcaggaacagaagcctggcgcacagcaca

SEQ ID NO: 398978 - DNA, 122 bp, Homo sapiens
aggatgtgcagaaaagggagccgggacggagcagtttcggctggggctcctggccaccgtcgcccgccctgtggggtcccatgtaacaggggctgagggcgcgcccttctgctccagggccc

SEQ ID NO: 398979 - DNA, 122 bp, Homo sapiens
tatggtctctggggactgcattcttcttcctccattgatcaaaatgttgtcctaagccatcggcattatttcccactctaaatccttctcaagctctccccctctttatcatggaaattaga

SEQ ID NO: 398980 - DNA, 122 bp, Homo sapiens
tggaggctcctccggtgggccgtggggtctgcaacctcctctttccgtttcatgatagatcgcacgcctgccgggggcccgcctggaggggaggacagcggaggtgctgtgagagtccttca

SEQ ID NO: 398981 - DNA, 122 bp, Homo sapiens
gccccgcggcctggtcgggcaggaagtcgtaccatagactggtctcggtggcgctgaacacgtcctgcgaggcgtagccctcggccaccgacggcggctgctcctcccgagcgcgccaacca

SEQ ID NO: 398982 - DNA, 122 bp, Homo sapiens
ccgccgcccgcccagggagtccctgcctggcaagctggggctcggggaaaagtccagcagcgagagggccgcgtgtcccgggacggttccaggggagcccgcgcggaaacgcggaccaggcg

SEQ ID NO: 398983 - DNA, 122 bp, Homo sapiens
accgtggggcggagcctgatggagtttcgtttccgcggtgcccgagggacgccggggtaacggaaaccttggccaccttctacgaagactagagagggtcaaacctatcagaacgcgattat

SEQ ID NO: 398984 - DNA, 122 bp, Homo sapiens
ccgctcaaattggcagaattgccggcaagcacacgggccgttcaagatcccggtccccagcgagaaggtccccttcaccaaggtccaggagccattctagaaactctgataagtcgtcttct

SEQ ID NO: 398985 - DNA, 122 bp, Homo sapiens
ttgtttcattttcatcctttttgaaagtcaggcttccggttctggggttctggggagggacgtggagagccttaccaaccagcagggaccaggaccggatgcctggagccctcttcagatgg

SEQ ID NO: 398986 - DNA, 122 bp, Homo sapiens
aagagacaataaaatttgagttacgactcataatgtgaccccattagacgcacaggctggcgaagtgcagggaaatgcaggctccaagaacgtctgaggctgtaattatcagcccatttatt

SEQ ID NO: 398987 - DNA, 122 bp, Homo sapiens
aaaacaaaaaacaaaaaacccaaacagcaaaaaaaccccaaaacacctttgttttggttccgagatcgattcagtattagttcccttttgtgaaatgaaaacaggattgtagaaaatgggct

SEQ ID NO: 398988 - DNA, 122 bp, Homo sapiens
tgattcccgaacctgcagctggtgctgcactggaggggtttccgttggtccaacgcaccccggtgaagggaattccctggagaagagagaggaggtgccagaacctggctgtaaggggggtg

SEQ ID NO: 398989 - DNA, 122 bp, Homo sapiens
ggcccagccaggagagctggagaggcagcgaggatcttccctcagagcctggcgagggggcgcggcccagccaggagagctggagaggcagcgaagatcttccgttagagcccagcgagggg

SEQ ID NO: 398990 - DNA, 122 bp, Homo sapiens
ccgtggcctaccacgagcacagggtaaagaacccaaatggccagagcccctccggagggtcgccacacctggcgatggtcccaacaagaagactcatgagaaggcagggaactggcaaatga

SEQ ID NO: 398991 - DNA, 122 bp, Homo sapiens
tcagggctcctgggcggccgccttttccagttccaggtgtgcagaagtgtcctctccccacgcgcggcgggctgcacttggtcgctggctccgagatcgcgcggggccgccggaagcccaag

SEQ ID NO: 398992 - DNA, 122 bp, Homo sapiens
ggggtgcaggcaatgagctgacccaccaagatgggaagcaagatgtgcagtcgttttccacggtaacggtgcattctaggctgtccatttgtcaatgttccttcatcagattatccttcact

SEQ ID NO: 398993 - DNA, 122 bp, Homo sapiens
agtggctgggactacaggcacgtgccaccacgcacggccaatttttggagttttttgtagcgatgggtcttgccatgttgcccaggctgatcttgaactcctgggttcaagcggtccaccgg

SEQ ID NO: 398994 - DNA, 122 bp, Homo sapiens
aatttggtttttggctttttttttttttttaaagtagtaaaatgctgataggcagtaacacggggatctcaacaagttcagctgtgatggcgatagcaattacaatggaaaagtaaaataca

SEQ ID NO: 398995 - DNA, 122 bp, Homo sapiens
ggtgatctgcccaccttggcctcccagagcgctaggattaaaggcgtgagccaccatgcgcggccttcctattacattctgagcacagggggagtgatcagagtgaagggtgtggcatttcc

SEQ ID NO: 398996 - DNA, 122 bp, Homo sapiens
ttcagtctgactgtgtgagttctcccttgctataactcatttgtattcaaagccacttttcgaaggagcattttaccagaagtgagtcccctcccccttgcttgagcctaatgacctcactt

SEQ ID NO: 398997 - DNA, 122 bp, Homo sapiens
tctcttccccaaccacggaggcagctggacacccagaagcagccagggcatggctgggcacgcctgggaaggttgagtcccggagtagtcctggactcagcagccaggagtggccccactgc

SEQ ID NO: 398998 - DNA, 122 bp, Homo sapiens
agaagaggaaaccagatttcggttcatgatgtggtagaaagagcactagtccaaactcagcgggcctgtttctagttctgaccttgtcacttgctgaaaagcttcagttaagtcacttttca

SEQ ID NO: 398999 - DNA, 122 bp, Homo sapiens
gtggtctacaggccgagaggtctgggtcccaggggaggaacactgccaccaggagacgcacgatgacgccgccggaatggaagttaagaccccacccggccccttgggctcctcatgcctct

SEQ ID NO: 399000 - DNA, 122 bp, Homo sapiens
ccgaaaaagagcttatttgctgattggcttctgccgctgtctttcacaaccgcagccagtcgagcggaggcacacccaaagccccgcccccttagagttcaaataggtggtgtctcccaggc

SEQ ID NO: 399001 - DNA, 122 bp, Homo sapiens
ctgggaagacgatggtactcttcagagccgtgttttcttcatttgtcaaatggagaagaacgtaattccttcccacagatgttgtaaggattaaaagagataatggataggaaaagagcttt

SEQ ID NO: 399002 - DNA, 122 bp, Homo sapiens
ggttaaagttctttagaacccgcctatacactgttcctattggtccctggatacaaacaacgacgccattttcccaccagttctatggaaacagaaagttacgcctcaaggctttctgggaa

SEQ ID NO: 399003 - DNA, 122 bp, Homo sapiens
gcccgtcccgttgcggcaggtcccgcccccggcccgtctcgcgcttccattggcccgccgcggcccccgccgctgtttgtctcggcttccccgccacccattggcccgctcgggtcctccca

SEQ ID NO: 399004 - DNA, 122 bp, Homo sapiens
ttacaggcctgtgacctggctcaccacgatgctctccatgtataatgcatgcagcctccgcggtgctcaaatctcaccaaaaaccagggacagcgacagcggtcggggccgtggggccacat

SEQ ID NO: 399005 - DNA, 122 bp, Homo sapiens
tgctcttgttcttacttcctgaattgagtcacggagccagagttttgaggttttgactaacgaattaagttaatgacatggggctatatttaggtggtaaaccaagagggatacagtttttt

SEQ ID NO: 399006 - DNA, 122 bp, Homo sapiens
tacacagtatagtactgttcgcccaggctagagaataaaacagctagcattgtaccaggacgcctgtgcatctttccattaaagccatagcaatattccctcaaacacatattcatcactac

SEQ ID NO: 399007 - DNA, 122 bp, Homo sapiens
ccaaagtgctgggattacaggtgtgggccaccatgcctggcctgaacatccttttttgatcgtaggcagaaataagtgtgctgtgggtgcagctcacatccttggctaacccctagcagcag

SEQ ID NO: 399008 - DNA, 122 bp, Homo sapiens
actctagacattcagattcccattttcgactctacaggacacaggtccccaaagtcccatcgaatccatggcaacatttcccccaagtccggcccctgcttgatcagctttcctttcccact

SEQ ID NO: 399009 - DNA, 122 bp, Homo sapiens
aagaactccattaccagttattttggtgctgcaggtagaatagcatgtggcgaaaaataccgagttttggcacgtcgggtgacacttgatggaaaggtgcagtatcttgtggaatgggaagg

SEQ ID NO: 399010 - DNA, 122 bp, Homo sapiens
tgatggtttggggacatttggggtagtaaacaattctatgaagttcagttatgaattcttcgctgggttcacgatgacagaaaagaatttctgttcatgaagggtgacctttgcatacctcc

SEQ ID NO: 399011 - DNA, 122 bp, Homo sapiens
cgggggccgctgggcccggcctggtctgcagtgtgggaagccggccaggcctgtgaccagcgcccgggccgagggccggacctgcgtccgctgcggggcagggataccgggtccctgcaggg

SEQ ID NO: 399012 - DNA, 122 bp, Homo sapiens
tgaagctaaaattgtcagcagactttcctccaaggctttaggatggccaatcagtctccacgaaacccctatgcttaatcatcatgctatccagggtctaagcacacagcaagtaaagacat

SEQ ID NO: 399013 - DNA, 122 bp, Homo sapiens
ggggcggcgggaaggcctcggccggggggctgtaggtgaggtccagcacctctccggggccgcaaggcagcgccagcgggcgcggggcgggcggggcggggcagcccagggcgggcgcctgc

SEQ ID NO: 399014 - DNA, 122 bp, Homo sapiens
cgccggccgatggtttctcgagtgctgtctgtggtactgatccacgttcccccacctccccgccccattccaacactcagaccacggtggtggcccttgaagctctgacccgcttccgcgaa

SEQ ID NO: 399015 - DNA, 122 bp, Homo sapiens
gtaataaaaataagattttctggtgccaaagacctatgtaggaggctctttctgcttgcacgcaagggaaggaacagagaatgcctttaattctggctttgatttaaatctgcatcaccatt

SEQ ID NO: 399016 - DNA, 122 bp, Homo sapiens
aggcttctgtgcacccctttccgtgtgctggctcgcatggtcgacatccttgcttgtcgccgggtagaaatgcttctggctgcaaatttacaggtattgggaagagaaaccctgatattgat

SEQ ID NO: 399017 - DNA, 122 bp, Homo sapiens
cagagatacgatcatcctccacttcctgtggccctccccctctttctttgctaacagaggcgtctatttttagctaggcacatggccacccagagtccaaacattttccagcctctctggag

SEQ ID NO: 399018 - DNA, 122 bp, Homo sapiens
cctgaagtcggcctctccaggcccagctccagcctcccggcggcctctgcaggcctaagtcgtcctcaagtcggcctggaaatgggcctggaagagctgcaagtcggcctccccgggcccag

SEQ ID NO: 399019 - DNA, 122 bp, Homo sapiens
acttcaggtccttacccaaagaccttggtctaaaagatactttcggtgtccctcatcatgcgatctttccgctctacctaagcggtgtaccaaatgatctgcaccaagaacaatttcatcca

SEQ ID NO: 399020 - DNA, 122 bp, Homo sapiens
taccgatgagctccttatttctgacgtccaaggccatgttccgcagcgcagtggccaccgcgcacaccacacggtcattgtctattcggagcagctccacgaggatgggcaggcctttctct

SEQ ID NO: 399021 - DNA, 122 bp, Homo sapiens
ctaggggcgccgatcaagaatacagtgcatttcgagtagggatggttcagttttccacttcggagttcagactgacaccccacatcgacaatttggaggtggcaaacagcttcgcagtcact

SEQ ID NO: 399022 - DNA, 122 bp, Homo sapiens
tgatggggttatactgggcaatattggagggacaagtaatttttctgtagttattttttgcgtagagattcataaatatgaattgagggtcacagcttggtagaggggtaaaaaggagaatc

SEQ ID NO: 399023 - DNA, 122 bp, Homo sapiens
acaccggccgcccggcccacaagccaagaagctgcctgcttggcccacaagccaagaagtcggcgaagctgagggcggtgggggagggggcaccggccggccaagcccggcggacgggcgtg

SEQ ID NO: 399024 - DNA, 122 bp, Homo sapiens
gggccttcaaggtggagagaaaaacacaagcaaaggcaaagaacaggtatgtttagaaaacgagtccttcagtgtggctagcgacagggagtaatgacagacgaaattataaaggttggggc

SEQ ID NO: 399025 - DNA, 122 bp, Homo sapiens
gagttagctgggagttgctgacgcagttccttctgcgctttgttcaagatgtgggtctggcgctttcggtgaggggtgctctacagtctggcgtggggggtcgggccgggttctgggagcgt

SEQ ID NO: 399026 - DNA, 122 bp, Homo sapiens
gacggaggctgcgaagggaaaccccagccggaagtagactcccaggatgcagcggaggcgcgaaggcatgcgccggtggacgctctgattggttcctcctgctgtttttaaagggagggggc

SEQ ID NO: 399027 - DNA, 122 bp, Homo sapiens
gcccatcggccacgatctagacacccggtggacaggcagccacgaggggacagggcccatcggccacgatctaggcacccggtggacaggcagccacgcggggacagcgcccatcggccacg

SEQ ID NO: 399028 - DNA, 122 bp, Homo sapiens
ccttggttggcatggtgggatagaagccactctgaatgagctggagtctgcacctgtggccggggcagaggcagtggctgaggtagatggaggattggggagaatgcaaacaggaagacaaa

SEQ ID NO: 399029 - DNA, 122 bp, Homo sapiens
cctacctgaccctggggtcagaagctgaggactcagatgctgaattttaggtcactcacacggtagtcgatctgctctcctctggaagacggtcactcttcggggacctgaaaattgtttcc

SEQ ID NO: 399030 - DNA, 122 bp, Homo sapiens
agcgaacacgccctgtctcggcgccccgcgcaggcgcacacagcgccgctgccagctccacgcccgaccctacccatattaggagaacagctctccagacgtgtctccagggccaggctccg

SEQ ID NO: 399031 - DNA, 122 bp, Homo sapiens
taaggaggtccggagacttggaagaaacttcggagactcgctgaaaggcgaagaactgagcgagaaaaggaccccaggctgggccctgaagtccacctggaaggctgggagcctccgcggcg

SEQ ID NO: 399032 - DNA, 122 bp, Homo sapiens
cctagaggccaaaaataaagatgtatgtgccagtatttttcttgtcttttaaaaagaaaccgggagttggcaatttgttgctgaagacactaggttattgaggagcaggaagagctgtgttg

SEQ ID NO: 399033 - DNA, 122 bp, Homo sapiens
cccctgggcgtctggagaggtcgccacgacccgatcccctcgccggggctgtagggagagcgtccctggaggctgacggatttccctgcctgcgctcatgcccattgcctggggggccctgc

SEQ ID NO: 399034 - DNA, 122 bp, Homo sapiens
gagaaaagacactcgttcacagtataagagccgaaatgagaaggcaccctcgttcagcctcgtctgggaacccacacatagggctactcaagattttctctgctttgcgcctgtccaagaat

SEQ ID NO: 399035 - DNA, 122 bp, Homo sapiens
cagaaatctaaacccgtgactatcatgggactcaaaaccaggaaaaaaaataagtcaaaacgattaagagccagagaagcagtcttcatacacgcggccagccagcagacagaggactctca

SEQ ID NO: 399036 - DNA, 122 bp, Homo sapiens
ggtaccggctacagacccgtgagcaggagccgctccctcgctggtttaggacctgggtgacgatggggtgacctgagggcacagaaggcgccacaattacctgagtcgggcgcctcggcgca

SEQ ID NO: 399037 - DNA, 122 bp, Homo sapiens
caggtgcagtcccaccaaaatttattgaactccaagctagaacaaaaggtggaggtgcaccgatgaagaaacagggcctctgccttcaggagcttacaaggccattaacagagagtgatatt

SEQ ID NO: 399038 - DNA, 122 bp, Homo sapiens
cgccgaccctgtggaatggtggaaacacaacgcaatcaggcctcctaatctcgcagcgatcgcgatgtcttttcttggagctccgccaagcagtgttccctccgagaggctgttcagttctg

SEQ ID NO: 399039 - DNA, 122 bp, Homo sapiens
tctgcaaagctgtgctgccagcagccggatcgcaggcaccgcctggcagatctgaaggttcgtgctgtgcaacgtgccttcctgtttgtgagttcacctgaccgacaccaggaggggctgga

SEQ ID NO: 399040 - DNA, 122 bp, Homo sapiens
gccgcggtgacagctgagggtccagagagccggcaggaggggaccctgcgcattgtctgccgcgatggggacgtgggcgtgcccgcggaattcacctcctccggggaccagccgcccaggga

SEQ ID NO: 399041 - DNA, 122 bp, Homo sapiens
gtcccccggaaaaaaagacgatgtactgggaaggccacagcccacagctcttcccatgcacgaaccgcacacccgagacgggattccgccttatgaccctcccgtgtcccagtacaaacaat

SEQ ID NO: 399042 - DNA, 122 bp, Homo sapiens
agttgctggcgattctgagaaaacttggccgcatccaccggggccctgcctccagtcggccgctgccgagtctctgcgttctggccgcttcccggcttaatgaatgccagccatttaatcat

SEQ ID NO: 399043 - DNA, 122 bp, Homo sapiens
gcaagtacagcactttctagattgctcctggagtgtgggaacaacagtctctcctgtccacgttactgaatccagaaaaaaggtgaacttacgaacatgggaaaagaaatccagctaaagcc

SEQ ID NO: 399044 - DNA, 122 bp, Homo sapiens
gggcagcatggcgggcatatgcgtagcttctggcaccacggccaccgggagttgagaagccggctggaggccactcctgcccggaccgcagtcctcctctcgggcgctgccctgaggcgtga

SEQ ID NO: 399045 - DNA, 122 bp, Homo sapiens
cacggagagcctgggcaggaggtgcaggctgcggtgggtctcttgacccagcagccacctcgggccgtcctcgaggtctgcaccacgatccaggcctgcccggctgcccggggtgccttcct

SEQ ID NO: 399046 - DNA, 122 bp, Homo sapiens
ggacgcgatgaggggcccgccccaggcagggaatggcaatgctctaaagaaaagagacttcgtcaacagggaggagtcagcccttgacagcgaccttgttctctgcagcagcaaacatggca

SEQ ID NO: 399047 - DNA, 122 bp, Homo sapiens
ccccgcctccaaggaccccatcggcccggggccctagcgcctgttccggcagacccccgccggtggctgctgtcacttttgtagtaggtggtgactgatgctgcttttgctcttccctgagg

SEQ ID NO: 399048 - DNA, 122 bp, Homo sapiens
aaggctttaccaagcaatgaattcctagtgcatcagcatattcataaatgaaatatactccgagtttcttgaagaagagaaaatcttctcagaatcaggtctaattatatgttattgaattc

SEQ ID NO: 399049 - DNA, 122 bp, Homo sapiens
aacgcgcgcgcggacagcctcatcccgggcacgcgcgcgcagcagctagagcagatccgccgggacatccgatgacttccggtctagcgcagggctggacaaagtcatagcgctgtgaacgg

SEQ ID NO: 399050 - DNA, 122 bp, Homo sapiens
tgccttagcacttttgacagcttactacttaaatagtgattatgttcttggaaacaacatcggtaggtccacaaagaaaaatgtactctgggataaggaatagaaataactgcggtttcctg

SEQ ID NO: 399051 - DNA, 122 bp, Homo sapiens
gccgggaactgacagatcctgcttagcccggggcccagcactgagaaatctgggaaggaacgttgctcaccgcacatgggccgtggccccatccttcgggccctttaggtggggaatcgggc

SEQ ID NO: 399052 - DNA, 122 bp, Homo sapiens
atttacttagcatttcctcttctgcctcaaccctcttcccgagtcaccttactctactgccgtccacttgatgatttccctcatggggacttacatttagtcatctcaaaaatacctactat

SEQ ID NO: 399053 - DNA, 122 bp, Homo sapiens
aagtaacgggatgcgtcgtgtaaatatttcacgttggaatcactactttttataacaggacgtagttgcgaataaataaacatcctgtgcctcgtaatactttttttttttttttttaacag

SEQ ID NO: 399054 - DNA, 122 bp, Homo sapiens
tccacacagcctgggctcctgccttttgtagggggatgtctgtgcctgctggggagggagcggatgagaggacagggtggggaaggaccatcaatcctgtcaggagctctctctccctcttg

SEQ ID NO: 399055 - DNA, 122 bp, Homo sapiens
tttcgcgtcccgttgccgaggtccactttgcccaggctggctagagcactgtccttgatccgcgcgtcccagcgacccctggccgggcacccgacccgccaaaggaccccgatcttggcagc

SEQ ID NO: 399056 - DNA, 122 bp, Homo sapiens
tcctaaagccagaaacgtcccggtttccctgaggtcctaaagaacgttgacagccaacagcgcgcctaacttggagcgaatcctcttcgggctttccagagtgcgggggatagataaagagt

SEQ ID NO: 399057 - DNA, 122 bp, Homo sapiens
ccagtctttatcttaatttatttgacttattcaacaaatgtttagggaacagctgctatgcgtcaactactgtatagtgttcctcctagaaagttcaggaaacagcacagcaaaaaggctaa

SEQ ID NO: 399058 - DNA, 122 bp, Homo sapiens
gcaacagcgggtgcgcgatgtgcgggtgatgtccgaagacggtcccccagggaatgtgtccgaggcccgcgtgggcgccgctcgcggcttcccgctgggaagcgtagttgttgagatgcgaa

SEQ ID NO: 399059 - DNA, 122 bp, Homo sapiens
ccggaacccaaggctccgccatccaggacaactgctctgccaacgaggtcccgcgagaatcgagagatctcgcgatacaaacccactcgcatctcgcgagcttccactagacccaacatggc

SEQ ID NO: 399060 - DNA, 122 bp, Homo sapiens
cagaggaatcctgggaccttaggagtcctgattaacctccctgcccctgtcatccccatacgcccgccgggatccgctgggggaacctagggaggcagagccgcagcaacacgttccttgag

SEQ ID NO: 399061 - DNA, 122 bp, Homo sapiens
ctgaaggaatagagtttggggcagaaaaatcaagagttcagttttagacaggtcaagtttcgggtgcttaccagatcttcaaatacagatcaagtagttagaaagtgacacaaatctggagt

SEQ ID NO: 399062 - DNA, 122 bp, Homo sapiens
ctaaaaatgcctagtggcaaatttcaaaattcttccctctctggtcagcaagctttccctcgattcatatcccccacaatatagccagactattttggcccaagaaaaccaacttgcaaaga

SEQ ID NO: 399063 - DNA, 122 bp, Homo sapiens
cgcgccccgcctgcgagctaggaactgtggggacccggcagcgggcgagcgagcccaggtcgcggcagcactgcctgcgcggtcgtcttgacgcctgaccagggccggttttcaacttgttt

SEQ ID NO: 399064 - DNA, 122 bp, Homo sapiens
gaaaatatcctcacagactttctgtgttctcagagacgatcttcttccctagaaagaagtcgcttacggttggcgtttccctcaggcagcgccgtgggcagcccacaggcccttgtaaggcg

SEQ ID NO: 399065 - DNA, 122 bp, Homo sapiens
gtggcctttccctcagctgcctgtctgggcctccctggcttcccggatcttcatctcatacgtgaggcaataggaggagtttctattcattgagacaaacagtgagcgggcaccaacaggcc

SEQ ID NO: 399066 - DNA, 122 bp, Homo sapiens
tgttatagccctgtgtttccttctctgtccttccatattctctataatgactactcagcacgattattcaattgcttagaaaagaaaaacacaggaaggacagagaagtggatattttagtc

SEQ ID NO: 399067 - DNA, 122 bp, Homo sapiens
ggtgtctgggggcgtggcttagactggggcaccctgagtgggcctgtgttagtttgggggcgtggcttagagtggggtaccgtgggactgggcctgtgggagcctgggggcgtggcttagag

SEQ ID NO: 399068 - DNA, 122 bp, Homo sapiens
ggacactgggccgaggtgtgggcagcaggccatggctgtcactcttgtgtgtgaccagggcgttggtgggatacaggaacttcgcataagacacgacctggaaaagcaaatgcatctggcct

SEQ ID NO: 399069 - DNA, 122 bp, Homo sapiens
atccccggggtcggccccgagcggggatggagtctcctctgcggtggccgaggcccagcgcgagcccctcagctcggctttcagccgtaagctcaacgtcaacgccaagcccttcgtgccta

SEQ ID NO: 399070 - DNA, 122 bp, Homo sapiens
cttagacctagataacatgatgctgaggtcaggagctccatctggctcccttttgtgatgcgggtgagtaggaggggacagagctggatgctctcatactcttgatttgtttgcaccctcct

SEQ ID NO: 399071 - DNA, 122 bp, Homo sapiens
tctgactgtcctgcacctctcagctacatgttcaggacccgggcaggctgaggcaggcgacgcatacggatgcacacactcagactgtgttgcacacgcacactttcttttttgaattcacg

SEQ ID NO: 399072 - DNA, 122 bp, Homo sapiens
aaggaaagcagcagtgattcccataactctccaagaggcactttgcaatacactaattgccgctgctttttatcaggagtttgaagaagggagcagaagtgagacaagttggaaaaagcaaa

SEQ ID NO: 399073 - DNA, 122 bp, Homo sapiens
cacctgctccacctgggggcatctgtccgagtcagacgctcggcccccttcgggctgctccgagaaacccagccagaaccacgttggagaaattaggaacctgctgctgaatttcaagccga

SEQ ID NO: 399074 - DNA, 122 bp, Homo sapiens
tggtggagagtgtgtcaagtaggaccatgaggtaagtggactgactcttactcaagtaaccggaatgttctatcttcaaacaacgtgggaccaaagagtgtacagaggagctctgttttccc

SEQ ID NO: 399075 - DNA, 122 bp, Homo sapiens
gcggtggccaagccccacagggatcgggccgcgcccttccacgacggagcacgtccccggcgcagtgggtgagccatgaatagggctgagtgtcagaggttctttgtcctgtttttgcaact

SEQ ID NO: 399076 - DNA, 122 bp, Homo sapiens
cctgcacgctggggtccgaaattccctttccaaccccctgggggtgtgtgggtgggtgatcgaagtcgagaacaccagcgacactttttttttaaacaaaactttattggtaatagttttca

SEQ ID NO: 399077 - DNA, 122 bp, Homo sapiens
ccccgctccctgcgccgccgcctcagtgggcccggcccgcgcgtagccccacagccgccgcggccaccgaccccggcacggccgccatctttgttttcgctgtgcgcttccccccgccccgc

SEQ ID NO: 399078 - DNA, 122 bp, Homo sapiens
gacaagcttgcactagacaatactactattgtagtagtattcccatggattctaaaatgacgtcctggtcaggcatagtggctcacacctataatcccagcacttcgggaggctgaggtggg

SEQ ID NO: 399079 - DNA, 122 bp, Homo sapiens
cacagcctcctccaccgtcagcttcagtcccttgatggggtcgatgacgtaaccggtggccgcctgcgcctccaggagctcaaaggctgtgccggggcggatgatgcccttcttcatggcct

SEQ ID NO: 399080 - DNA, 122 bp, Homo sapiens
ctgtctttcttagcaatgtcttagcaaaagtcttctatttgccacacgggtccaagcttccgcttactaagcacccaagtgccagacaaccccggaggcaggtactcccattgtccccactg

SEQ ID NO: 399081 - DNA, 122 bp, Homo sapiens
cccagcccctgccgcccgcgctgcacccgcggcgggcacagcggcgtctcagcggcctgtcggtgctgctgctctgctgcgtcttcctgctggccacgcagccactggtgtgggtgagcctg

SEQ ID NO: 399082 - DNA, 122 bp, Homo sapiens
cttcccctgcctgcctgggaagaggaaagggaggggtgccccagaggcaccagctcctggcgggggaggaggaacattcaggtttctgagagctgaattccaagagtgcaaaaccccagcat

SEQ ID NO: 399083 - DNA, 122 bp, Homo sapiens
gtgcgtggcctgacttcagtctacatgctggaagtggctggggaagctcctggctcccggcgcaggcatccctggcctttggggccctggctttaagtctctttcctggcatggcctaaagc

SEQ ID NO: 399084 - DNA, 122 bp, Homo sapiens
ttggttaatgctctgagttggcatggggagtcttgttcaagcactggtacctctgactcacgactgtgttcttagtccattcacctctgcacctaaattttcctttatgtaagtgtgtcaca

SEQ ID NO: 399085 - DNA, 122 bp, Homo sapiens
agggagagcccgggccacccggacagatgggaccagaaggtcctggaggccagcagggctcgccggggacccagggccgtgcagtccaggggcctgtggtaggtgtcactccttccctgccc

SEQ ID NO: 399086 - DNA, 122 bp, Homo sapiens
cagcgggagcccgtcaaaaatggagatttctgccgtcactctgggactcttaattcggtccgtctggggtggggcccaggaatctgcatttctgataaggtcacccgctcccctcccccatt

SEQ ID NO: 399087 - DNA, 122 bp, Homo sapiens
acaaatgcagaaaacagagactgtatattacctgcctcaactcagatatagtaagatattcggatattgaagtattgaaagcttctgagaggtcctttctaaaccaaacggaatccagaaaa

SEQ ID NO: 399088 - DNA, 122 bp, Homo sapiens
gagtgcttcctcttagcagccatggcctatgaccgctatgcggctgtctgccacccactccgatatcccactctcatgagctggcagctgtgcctgaggatgaacctgtcgtgttggctcct

SEQ ID NO: 399089 - DNA, 122 bp, Homo sapiens
ttgtgccgccaaatcacggaggccttccgggccctgaacacgaaccggacggggccttcccgcattactacccgaatgacactgctggggggaccgctctctggatgccattgtggccacgt

SEQ ID NO: 399090 - DNA, 122 bp, Homo sapiens
ggggcgcaccggtgctgtgtgcctggccggagcgttttgaaattttccggggccgctcggcggcgctgcgattggccgcgttcgggtaacctctatgcaaatgaggccgcgccgcctccgcg

SEQ ID NO: 399091 - DNA, 122 bp, Homo sapiens
tctcactcttttaagcaaatcttactcctgtggtcttaccaccatgttcttttttgcattcggtgaaaatgaaagccctttttatttatattttctattccttgagagtctgagtagatgtc

SEQ ID NO: 399092 - DNA, 122 bp, Homo sapiens
ctcaaagagggcagaaggtctcttcttctgtgggatttgtgctctgccaggcgctcttctcgagtcccgcgccgcgtgcgcccctcctttgtcccatttgttacttcatttgttatctgtgc

SEQ ID NO: 399093 - DNA, 122 bp, Homo sapiens
acccccagctgcctgacccccacctgccactctgacccttttggttcacggcgatgcattcggagcattgtcactgttccctgtaagtcagacatctgggtgcccagtgccaatggagacac

SEQ ID NO: 399094 - DNA, 122 bp, Homo sapiens
agggaccttcctcaggggcgggaagagccaggcccctcccccacctcctgagccccaaaccgggttgtgcccgtgactgacaggcaaggctccgccctactccccgcccatttagcgcctcc

SEQ ID NO: 399095 - DNA, 122 bp, Homo sapiens
cccagaggagactgctccagctgttgcagcagccatcacacaggagggtatgtcagctgtcgcagggttctccccagagtgggctgctttagctattacagtacccatcacagaggaggatg

SEQ ID NO: 399096 - DNA, 122 bp, Homo sapiens
ctggcctcacgcgcagcacctagtgccctgcacagagccgctccgcaggggaaaaaagggcgaataacctgagagaaagaggtttggaaaagataaggacctgccaaggcgctaaaaccccg

SEQ ID NO: 399097 - DNA, 122 bp, Homo sapiens
ctccctccagattagacccgtgggagtggcatctcgggctgttcagtgactctgtttcagcgccgcgctgttttcctgcagaatcttttaatttcactaccaactctttctttcttttcttt

SEQ ID NO: 399098 - DNA, 122 bp, Homo sapiens
ttcttacaggacttaactagcaagtcctctaggctagaatgttcgcttctgcggtacccccgcccctccgtctggtttcctttttgacagtgcaaggaaccaggcaagaggctccgcagaat

SEQ ID NO: 399099 - DNA, 122 bp, Homo sapiens
tgtctgggtccagctctgctcacatctgctttccagcaatggagaatgaaatgactccagcgggaagcaagctggaaagggcgcgatggagagtgcgagggtgtgtgtgtgtgtgtgtgtgt

SEQ ID NO: 399100 - DNA, 122 bp, Homo sapiens
cggccctggacccaggtgtacaccgtggagctgcacattgggaaggtggtactgggggaccgtgggtattaccgcctcgaggtcaaagccaaggacacctgtgacagctgtggcttcaacat

SEQ ID NO: 399101 - DNA, 122 bp, Homo sapiens
ctgggcgggggaggggctgccaggcccgcccgtcccagcagctgccagcccgccccgagccgccagcccagatggtgcccatctgctgacgccgccatgggccagcctcctgttcccgcctt

SEQ ID NO: 399102 - DNA, 122 bp, Homo sapiens
agaaccccagcccgagattgaggactgaccacagggagcggagcctttcgggacggaccgcggggggcagagcctctcagggtcgggatgtgcaggtggcttgtgacacaaccagaaggcac

SEQ ID NO: 399103 - DNA, 122 bp, Homo sapiens
tggacaggaggtgttaggggtggggagagagctgatggtgggggatcccgctccctcccgcgtcagtctggccggctccgtcctcccgtaggctccgctgtagctagcaatgtgacaccagg

SEQ ID NO: 399104 - DNA, 122 bp, Homo sapiens
aaggagtagggtgtgcaacggggacagagctgtgtggggaaggggaagggcacatgcctacgtggcccgccccctccaactgcagggaggatacagtgagcgagaacacgaagagacccgaa

SEQ ID NO: 399105 - DNA, 122 bp, Homo sapiens
tactggcaaggagctgacatgcagcccggagtcagctccctgcggatgggctgatcctcgcgcaggctgtgcggggcgggcgcgcactggacccgccccatccccgccccctccccgccccc

SEQ ID NO: 399106 - DNA, 122 bp, Homo sapiens
ctagggaggggcggtgtcgtagggcggagcccggagctcggcccctgacgagcccgaactcgtcaacttcctgtcggtacttgaagaagcggagccagggctgagatcccgaaggcgggcga

SEQ ID NO: 399107 - DNA, 122 bp, Homo sapiens
aggggataggggacaggataaaaaccatctagaatatgacatgtacaaactcaaaacaatcgcgaggtcagaaaatggacaactttagaaagaatcccatctttctcgatagggctacaggc

SEQ ID NO: 399108 - DNA, 122 bp, Homo sapiens
acaaagggaagtggggtgtaagctcaacccctgttggacgtgggggtgctggcgcctgaacgcccccgaaggcctcaactcccagaaagctgcctgccaggtcacaagagccctgtgaggtc

SEQ ID NO: 399109 - DNA, 122 bp, Homo sapiens
taggcttcaccggcgccctctggcggtcagatggggaccgactgtcgagagagcagaagccgggaagcccgagaggcggcgctggccggggtccaggggaggggacggtggctggactaggg

SEQ ID NO: 399110 - DNA, 122 bp, Homo sapiens
agcagctgccctgaactccagggttacccaaaaaggacttcagaggcagtggccctggctcgggctaccagaccatcttgggaagccctgccacctctgtggctttctggcctccatcctgg

SEQ ID NO: 399111 - DNA, 122 bp, Homo sapiens
cgaaaagccagcgctgagaccacaactcccatcaccctgcgagcaccagcgccttcagagcgcatcctccgaggggcaccagcgccattgaccaccctgctggccgaagggcccgccttccc

SEQ ID NO: 399112 - DNA, 122 bp, Homo sapiens
ggacccgcccctcagcagcaacatgtcactgagcctgttcgtgctggaccagaatgacaacgcgcccgagatcctgtaccccgccctccccacagacggttccactggcgtggagctggcgc

SEQ ID NO: 399113 - DNA, 122 bp, Homo sapiens
tgctggggaagatgggggtggtgatgcgcgcgatcttggccgcctgtgggaaggcgcccccgttggtcttgtagaaggaggtggcaaaggagcggtagcgctccatttccgagttgtaatcc

SEQ ID NO: 399114 - DNA, 122 bp, Homo sapiens
ccctgtctagcaccttggctctcaggctgcgggcggccaggtccggggggccgagcccgtcgaaaaagaaatcctcgttgaagatggggttggcgctgcacttgaccacgcggctctgctgc

SEQ ID NO: 399115 - DNA, 122 bp, Homo sapiens
ctcccccacccctgccttcccatttcgccccccaccccacccctttctcacagtcccgctcggccgccccgcagtgcccatgtaaatgacagcaataaatatctaatcaaggccccgggcga

SEQ ID NO: 399116 - DNA, 122 bp, Homo sapiens
tgactcctagacttcatatgatccacccgcctcagcctcccaaagtgctgggattacaggcgttaagccactgcgcacagctgggcattcaacattattgtaaaactatttccaagtgaccc

SEQ ID NO: 399117 - DNA, 122 bp, Homo sapiens
caacaacgacaagaagctgtccaaatatgagaccctgcagatggcccaaatctacatcaacgccttgtccgagctgctacaaacgcccagcggaggggaacagccaccgccgcctccagcct

SEQ ID NO: 399118 - DNA, 122 bp, Homo sapiens
aaagcttagtgtttagctattctgtcacttcctcaactcagtagcctgatattgaacttccgacactttttttgttcattgtgttttaagtttgggttgccactccattcctgaggccacaa

SEQ ID NO: 399119 - DNA, 122 bp, Homo sapiens
gggccccgagcacacgtggaatcgagcaaactgaaagtcatgcattttgtggcaagggttcgtaaccgatgctctaaagactggccttgtaattatgactgggattcggacgatgatgcaga

SEQ ID NO: 399120 - DNA, 122 bp, Homo sapiens
gcctgcggtcgggtctcggcgacccgccgggactttctaatcagagtcgtggggattttacgggtggagttactccgaaacctttaaggccgagtgtgataggtagttcaaagcttcctgtt

SEQ ID NO: 399121 - DNA, 122 bp, Homo sapiens
ggtgagaattcaagcctggcgcgggaggtctggtagcggtcggggacccagcgcatcctccgctgctgctggcctgggtgccaagcccctcatttcgggccagccgctcggagtgcaggccc

SEQ ID NO: 399122 - DNA, 122 bp, Homo sapiens
cccgcagtccccttcaggtaggggaggagagctcacccctgcctcctccgcgacccgcggcggtaagggagtcacttcgcggtcgccatgtggcagcaaacatccttccacctcactccagc

SEQ ID NO: 399123 - DNA, 122 bp, Homo sapiens
cgagtgtcacgtcgggcgctctttagagaggactgggacaagagttgcggacgcgaagaacgagtaagcggtggttcatccctcctgaccccacccccgtggcctggcccgatggtcgcgcc

SEQ ID NO: 399124 - DNA, 122 bp, Homo sapiens
gcttcacctgcgcagtctcgcgtcagctcacttccaaccccctgcaaccagcttcacctgcgcagtctcgcgtcagctcacctccaaccccacgcaaccagcttcacctgcgcagtctcgct

SEQ ID NO: 399125 - DNA, 122 bp, Homo sapiens
gcaggcaggcttctctgccttcacccgctttccacgcagcgccagacaagagagggcaaccgtcaatccagcgccgtggcgatcattacaggtctgcagtgaagcagaaaaacgccgtaata

SEQ ID NO: 399126 - DNA, 122 bp, Homo sapiens
agttcaatctcgctctcgcgaaggtcctcttttttcggcggagctcccgcaggggcgactcgctgtcccagaccagatagtagcaagagctgggagagacccaaatctgcagggagagggcg

SEQ ID NO: 399127 - DNA, 122 bp, Homo sapiens
ccgaagggcccactttaaataacgggtaacagacctgcaaaactaagcgattcggtcaagcgctaatgatagggaagctaagccaggtcgccaggtctatctcatctagctccacagcacac

SEQ ID NO: 399128 - DNA, 122 bp, Homo sapiens
gcctggtccgccaggtgcaattggggtcgcccggatggtaggggtatggaacgtttttcccggaaatgccaccactatggatcagatttatgaatgagtaccttttttcattcttgtactac

SEQ ID NO: 399129 - DNA, 122 bp, Homo sapiens
tgggcctcctgggacagatggtgcttcactgccacttgcttcagggagtgaggccatctccgccagtggcgagctggaaggattctgcgggctctcctgatagaccattttccttgaattgc

SEQ ID NO: 399130 - DNA, 122 bp, Homo sapiens
acctcgtgatccgcctgcctcggcctcccaaagtgctgggattacaggcgtgagccaccgcgcctggcctcctcaagtgtttttagtttacattagtttattattttagtttacatttgggc

SEQ ID NO: 399131 - DNA, 122 bp, Homo sapiens
cgattagggaagtagagctaggaaggtgggggcgggggagcgggcgataattaagcgagtcgtcaggaaattgctttctagatggggatcatgatgcctctaacttgaacggggcaggagaa

SEQ ID NO: 399132 - DNA, 122 bp, Homo sapiens
accagagggctccctggtctagcggtaatgccagcccctgggaaggagcccgttacctagcggaccttggtctagcagtagcgtcagtgcctggggaaggcacccattgcttagcagacagg

SEQ ID NO: 399133 - DNA, 122 bp, Homo sapiens
ttcccatatccctacttttcagaaggattttctctgctcgttcacttaacattgctgatgcgtcagtcttttcttcctcatctctttcaggggctggagaggcagagggagacagaggagct

SEQ ID NO: 399134 - DNA, 122 bp, Homo sapiens
gtggttctctgagggaagccaattctggggaccggtagtggaaagctcttgcgctgtttccggccacctcagcgggaagcggagacgcaagcagctggatctccggtaactgagacataggg

SEQ ID NO: 399135 - DNA, 122 bp, Homo sapiens
ttgatcggaagtcagtccatcagatttgctctgggccggtagtactgagtctaagcactgcggtgaagaagatggtagaaaacagtctggatgctggtgccactaatattggtaagtttggg

SEQ ID NO: 399136 - DNA, 122 bp, Homo sapiens
ttgtcaccccagcgggggagggcggcgctgggtggggcggcggactccgggtgggcttttcgggggcgcccagaatccagactgttggggatcactatgagccaaagggagtgggtgcgccc

SEQ ID NO: 399137 - DNA, 122 bp, Homo sapiens
agaggctggcggcagacgggccgggacaggcaggtcctaaatggcattgtttgaaggggccggctaattgcacagagcagtctgagcctgagaccccagccctggcctccccactctgtcct

SEQ ID NO: 399138 - DNA, 122 bp, Homo sapiens
ttccacgaccggcctctccgctgccctatcagcaaatcatcgggccggtgcctgccagtccgggccaatcccgaacacatttactttgagcgggaaaagctcagaagcggcgagagagcgtg

SEQ ID NO: 399139 - DNA, 122 bp, Homo sapiens
caatgaagataacagcaatgaacacacaactatgatatctatatatactaaacacggtagcgtatattgccatttaccacattacatccaattaacagagccaaaaacatttttaaaatttc

SEQ ID NO: 399140 - DNA, 122 bp, Homo sapiens
gcaagggagatgcgagaaggatggaaggcaaggacgctgcttgtccaatgggagaaagtacggatgtgtttcagacacggaacagttcccgaccccaagaacgcagatcacctgggaccaga

SEQ ID NO: 399141 - DNA, 122 bp, Homo sapiens
tggcctggggctttgaaaccattgcctgtcctgctaatgacacgtccagttctcttctcccggccgcggacgccgggctgccgttcccggggtggctgactgggactggggtactttccccg

SEQ ID NO: 399142 - DNA, 122 bp, Homo sapiens
ttcatttggcattcagtctgccgtgcaaagttagtaatcctcctggtgtccccggagaatcgttcaacctgagggtgggggtgtgtccccttctttgtgtattaacacgggctcgtagagcc

SEQ ID NO: 399143 - DNA, 122 bp, Homo sapiens
gtgatatatggttttctggaagaccaagaatggtaaggaaaaataggtgctgtatacacacgtatgcataatcatgttattacagaatttatgttgggggggaaaatgagagttgttctgta

SEQ ID NO: 399144 - DNA, 122 bp, Homo sapiens
gaggcttcgcaaagcaggagccctccgtagcagggcttcggtgtcggggctccgaggctccggcctgacttctccacggggtacacaggaacgtctccggacgccaggacctgaaatgggcc

SEQ ID NO: 399145 - DNA, 122 bp, Homo sapiens
cagctgcagggagccctcacgcggaccacgcactctatggccgtagggagccgctgagagcgagaagagcacgctcctgcccgcccgctgcaccgcacctcgcctcgcctctctgctctcct

SEQ ID NO: 399146 - DNA, 122 bp, Homo sapiens
ggaccacttactcgaggctacatgcggttgtttcccttggtcacgttctctcatattcggcgtagaacatagttcaagttattttgcagagttttgctctttccgttatcaaactgcaagcc

SEQ ID NO: 399147 - DNA, 122 bp, Homo sapiens
cagggcctaaatttaggagagtgtcccgagagcagttcatacaaagggctttctctaagacgcgctacagcccttcctagcagagtttatccattcgtccccaagagcagctagaagagatt

SEQ ID NO: 399148 - DNA, 122 bp, Homo sapiens
ttcctgaaagcctccctgacaccggatcctgagcgcaggacgggcccagccacttgggggcgccgctggccccaaagtaccgggagcttaccctccgctgaccaggattcaccctggctggc

SEQ ID NO: 399149 - DNA, 122 bp, Homo sapiens
tgcgctgccacgtttatttctcttccctcctcctctcaaaacaggacggaatgtggggtgcgggcctgaatattataaacaaaaccaaaaaacactggctggaaaggaagtaagcggattct

SEQ ID NO: 399150 - DNA, 122 bp, Homo sapiens
atgctggctggggatgtgctccctgcccttgaatctccttcctttgtagtttttggcctgcgcggttacgtttcccaggcggaggagcgcgcgtcgcggctgcgcccattaacgcgcggcgc

SEQ ID NO: 399151 - DNA, 122 bp, Homo sapiens
ttagggttcctctcctgtagagaaggaactgcctgtgtagatgtcaactggctctctttacgttgtccaatgggaacctggagttctgagaactagtgcaaaaatctttttttttttttttt

SEQ ID NO: 399152 - DNA, 122 bp, Homo sapiens
gaaagcaggagagagggtgtgaggtggaggaggacggtggcctagaggccgcctgccctccggggaggcttaaccagcaattcctgttgctgacagataatccctgctagaaggggacccct

SEQ ID NO: 399153 - DNA, 122 bp, Homo sapiens
cccttcctcctcttcctgctcctggctccttccgacgagtttggtttgaacttttgaatccgccaatcagcgccgcgcgcccccactccgcgggtgcggccgggcgcaggccagggctcgaa

SEQ ID NO: 399154 - DNA, 122 bp, Homo sapiens
caaaacagaagcgccagtggcgaggctgtccctgccagttggcagcactgattgagtgtgcgggggtcctccctcttctgaagagagtccccggagggatgtgtccagtgtgtgtccttccc

SEQ ID NO: 399155 - DNA, 122 bp, Homo sapiens
gagagcctctgaacagggagagcctctgaacagggacggcctccgaacagggagagcctccggaatagggacggcctccgaacagggagagtgtccgtttctgttggtctaagccacgcagt

SEQ ID NO: 399156 - DNA, 122 bp, Homo sapiens
cacattttctgtggagaaattcaagaaatttgcataagtaaccaggagtcaaatgttaatcgcccggacaatggggaaaatatctccaggacatgtcagagacctttgtggcagcccttccc

SEQ ID NO: 399157 - DNA, 122 bp, Homo sapiens
tgctgtcagtaaacggaggcatcgctgcactgccagctaatgactgcaggctgaggcgggcggctgggtgcgttcactgcaagctcggaacgctggcactggctcttcctgctccatcctgg

SEQ ID NO: 399158 - DNA, 122 bp, Homo sapiens
gacctggctggtggactccagcccaagcctgccagctgcctgccggggtgggggccttggcgggagaggacggggccgggtggggaggaaggcggggcctgaggctgtgcgaggcgagtcgg

SEQ ID NO: 399159 - DNA, 122 bp, Homo sapiens
gtactcttgcagttgttattgttgttgtcatttatgaaagtattccacggtctccctgaccgaagccagggaagtacaggaactggctttgaaggatgctgtttcattgaattaataatagc

SEQ ID NO: 399160 - DNA, 122 bp, Homo sapiens
ggcgggcgggtgaggatctccagttactgcgctgcaatgagctcccagaagacagacgggcgcactggccgctgcgtgccaccactcagcacttctctcgccttctgaggccttcttccccc

SEQ ID NO: 399161 - DNA, 122 bp, Homo sapiens
ggaaataacaagactattgtgcggattgtctaagtgaatggatataaagtgcttaacacacggcagcatagtaagtgctcagtaaaagttgctattctgatgctattataccattctataat

SEQ ID NO: 399162 - DNA, 122 bp, Homo sapiens
gacattgagtgcatatgccccagctgggtttcaggaaacatgatttgatataagaaaaatcgaatccctatgacaaagtaggttataatgtgatcctactgtccctgatttgtgtgacatta

SEQ ID NO: 399163 - DNA, 122 bp, Homo sapiens
actgggaagttggcaatcagttcctcatcatccttgttgagcgccacaaagccaaagaagcggcgcacattgttggcagcgagcacccgagagtgcacctcggccgtgcgctggaacagctg

SEQ ID NO: 399164 - DNA, 122 bp, Homo sapiens
aagttgtcgctgagagagagcccagggtgggaatgcaagggctaggctcggtccgggggccgcaagaatatatagccttcagcatgacgcccctcagaaacatggctctcaaactttaatgc

SEQ ID NO: 399165 - DNA, 122 bp, Homo sapiens
cctagtctatgccaaatcttcctgagtttctctagccaaacaatgctaatcacaacgtcccgcctctccgccaggtcaggtaagcatccaggatgaggccacacccgctcccatcactcttt

SEQ ID NO: 399166 - DNA, 122 bp, Homo sapiens
ttccctctctctcccgctagggtgctagtgaacaatgagctaattctgatggagctggcgcggagccagcgccccagccttgctgccactgtgcagccgcctaggagccagactgcttactc

SEQ ID NO: 399167 - DNA, 122 bp, Homo sapiens
cttgttcttgccgcccatgttgcagctgtggcagaagatccttcgcggcccaggccccgacggtaccactgcacagccgagagctcttcacattccccggctccggggctgccaccctgcgc

SEQ ID NO: 399168 - DNA, 122 bp, Homo sapiens
gctcgccgggctcggcgggacatactaaccggctggtagacgccatcttcacggcgactgcggtgcccgcaacaagacacaacagacacaccgaaagcaggaagcgaatgtggcgaagagac

SEQ ID NO: 399169 - DNA, 122 bp, Homo sapiens
gtcaggtaacaacttagttggagttggtggcctggaacttcagcatgagtagctccatttcgatttgatctgttgggcctagtgcaggaactcagtccaaaccgatagtctcctatacattt

SEQ ID NO: 399170 - DNA, 122 bp, Homo sapiens
ggctggctggggacaaggacaagcggacttgggagcgacggggtttgggcatctgggagacgggaactccttcccgggaggaagaccgtgagggaggcgtggaagtggatgtgagccggtgt

SEQ ID NO: 399171 - DNA, 122 bp, Homo sapiens
ggcgggcgcggggcggggcgatgcaggcagggtaaggggctggcagagtgagacccgccccgaccgggcagcactacccgagcgctgttgcctggagaccacgggacgccgttgcctggaga

SEQ ID NO: 399172 - DNA, 122 bp, Homo sapiens
gacctagcctaagaggccggaaggcgccaagggcgtaggaggtgggtggttgtgagggaacgcccccagccagctcacttccggtgggcttcacatgctgtggggtgtcactgttaaggtaa

SEQ ID NO: 399173 - DNA, 122 bp, Homo sapiens
tcctgcttgcttgtttaaaggttagcctttaggatctcttaacttccacaaccaataaaacgtgtttcctagtccttattatggccaatcatttccacattttgttagagtctgcagattac

SEQ ID NO: 399174 - DNA, 122 bp, Homo sapiens
ccaccgccgcagcaggtgggggcccagtgggcgggggcggggcccggctctgggcggagccgaggcggcggcggcgcaggctggggccggggccggggcgggagccggagcccgagctggag

SEQ ID NO: 399175 - DNA, 122 bp, Homo sapiens
tgtataagccaaggtgatgctgggtgccccgaggcagaacaagaggcgcggggccacacccgtgaaccatgcagacggccgaagaagtcttaggcagggcgccctgggctgcaggcctgccc

SEQ ID NO: 399176 - DNA, 122 bp, Homo sapiens
ttttgtttctaatgtggacgatcatttaaaatgcctctggtggccgggcgcggtgactgacgcctgtaatcacagcactttgggaggccgaggcgggcggatcacctgaggtcaggaattcg

SEQ ID NO: 399177 - DNA, 122 bp, Homo sapiens
ccccagggcccagccgatctagctccggctctgactggagaaacgggctggggctggccccggatgtgacatcctccaggctcacctaccggccccacgaggctccgcagctgctgcccata

SEQ ID NO: 399178 - DNA, 122 bp, Homo sapiens
caaatgggttgagagaaagggagcacacactgcaaatctgcaaggatgaagtcagttacccgagagcaaaccacacctcaaggtgtgaaggaagataaccagaaacaggagctggcacatgc

SEQ ID NO: 399179 - DNA, 122 bp, Homo sapiens
ggcaggcaacgtgtcgcctggagttgtcacagatgcaggcctgtgggcagcgctgggcggcggcctgcctagccggggccagcagcagaagtacaagaagcggcagcaccaaggggacatgg

SEQ ID NO: 399180 - DNA, 122 bp, Homo sapiens
gcggacaatcgcgtgagtgctgcgggcgtagctgtgcccgggtcctagcgccggacccggcgacgccaagaaaccacccaataggaggccggaagcatcggaagtcacatgctgcccaggct

SEQ ID NO: 399181 - DNA, 122 bp, Homo sapiens
cgttcccgccaccctggctgggctctcacctggggggggctctcacctgggaggggggcacgcggtcgaagttcttccccagcatcctccgcatgtgcttccgcgcgtgggaggtcatctgg

SEQ ID NO: 399182 - DNA, 122 bp, Homo sapiens
gggtttaacttatcagtaacccgctcatgataggatgcacgagataaggggagaagcacccgaagtgggtcatttttattcttggctaacagctctggccacggcagatgctgccgcaaagc

SEQ ID NO: 399183 - DNA, 122 bp, Homo sapiens
cctgagtatttgacttccttcgcttcttttctggactcttcatttgcagacctggaagagcggcaaaaggaagacgcagacaagtttccctgaggtttccccaacctcttttctctcagcca

SEQ ID NO: 399184 - DNA, 122 bp, Homo sapiens
gttttcctgtgtcgtacaaatccctcgtgcggcaaaagtagtttgtctttactaggccaccgtctcgtcagcgttacggagtattttgtccgcctgccgccgccgtcccagatattaatcac

SEQ ID NO: 399185 - DNA, 122 bp, Homo sapiens
caaaggcctcccccacgcagatgaggtgctggcactctgcaaccagcttccccacagccccggtgtctggtgcgatgcttcagtccaaagtatttccagaacatcgcctgcggtcaccccgg

SEQ ID NO: 399186 - DNA, 122 bp, Homo sapiens
agaaacacaaattatacaaaatttaagtgcaatcaaaaataaaaatatatgttaaataaacggttatggtacaaattttgcaaagccttcaggtgagccacaaataatcttggaaattattt

SEQ ID NO: 399187 - DNA, 122 bp, Homo sapiens
tgactgtaactgctattataaaccacagtggacccttgagcaacatggatctgaactgtgcgggtccacttatacgtggattttctcccgcctctgccacccctgacaagcaagtccagatg

SEQ ID NO: 399188 - DNA, 122 bp, Homo sapiens
gttgatgttcaccccatgaagcttgtaatgatgcaagttgtgtatggtatcctcagccgccgtcttgtcttctatgtgtacaaagccgtagttcttaatgatgtcacattccagcaccttcc

SEQ ID NO: 399189 - DNA, 122 bp, Homo sapiens
gttcaaatggtggctctcgggacttagtgaggatccagggatgtgggcttcctaaagccccgaacctcccacactgcagactatccctcgcatagcgagaacaagagtaacaacccccttac

SEQ ID NO: 399190 - DNA, 122 bp, Homo sapiens
gcaggggttggtaccgcctcccgcgcaggtatgtgacgtcatcgcgccgacgaaggcgcccgctaggccccgcctgctctatttaaacttctggactcaacctggccgctagaccggagcgt

SEQ ID NO: 399191 - DNA, 122 bp, Homo sapiens
ctgcctgaaaagggctgcagacaatcattcattcaggcctcattcagccacacctgtgatcgcatctcctgtcactcgggggtaagggggcgggacctggagccctatccattcagcggcgc

SEQ ID NO: 399192 - DNA, 122 bp, Homo sapiens
tcacaaatagtctgttacagctccatccactgaaaattgtcataaaagacatttttcaaacgagttcatttttagaaaaaccactccagatatcttaccttcggaaatcatccaaggagtgt

SEQ ID NO: 399193 - DNA, 122 bp, Homo sapiens
cttacgcacatgcacacttagactttctcggttttcatgaaactcacaatctacctcaggcgctcaaaggcactcggcctctcaggtctgaggcaccacagagaggcttccttgggcacagt

SEQ ID NO: 399194 - DNA, 122 bp, Homo sapiens
tctcgacgccccgtgccgccctccaccgggccccagccgccagccctagccccggctccccggtgcccacgccgtccccccgcgctctccccggccggcactaacccccatggccgcgcttc

SEQ ID NO: 399195 - DNA, 122 bp, Homo sapiens
ccgtattattcccaatgaaggtggctgacatttttagcccccggggtgggatgtcacagacggctgtttttacgttgttggggagccagtcagcaaagtaactgctgttcttatcttgaatg

SEQ ID NO: 399196 - DNA, 122 bp, Homo sapiens
taaaacactgtgatttaaaatgtagtcccagctgcttgggagactgaggcaggaggatctcggcttggatcctcagaccaggagtttgaggcagcagtgagctacgattgtgccgctgcact

SEQ ID NO: 399197 - DNA, 122 bp, Homo sapiens
tgacaacatgggtgtcgtgcctcctccaatgatccagatggtgaagaacacgatgaaaggcgtggtggggaacgtcatctggcgagcataggatgccgtgtcacagatggccaacgcaaatg

SEQ ID NO: 399198 - DNA, 122 bp, Homo sapiens
aaaagagatactttttgcatatcataatactattatcaagtctaagaacattaactaattcggtatcttcttttcagtttatattcgtatttccctaggtgtcccaaaactctgttagaact

SEQ ID NO: 399199 - DNA, 122 bp, Homo sapiens
ttcgctgctttgttcctgtgtttcattcctttgttactttgtgtgttttgttcaattcttcgttcaaaactccaaggatctgaacaacttacactcacggggccttccttccagtaacatca

SEQ ID NO: 399200 - DNA, 122 bp, Homo sapiens
actcttatttaatctggtacaaggagcattttctcatggcacttggtgccaatggatctgcgatgggaagcatttgagtcaaaggtcttcttctaggtattgctggtactccaccattgaac

SEQ ID NO: 399201 - DNA, 122 bp, Homo sapiens
aaagcaacgcccttatatgccgggaattcggacctaattgaagactgaaagcgcgcataccggaactttggtcctgcttcttggccccaccccgcatagcccagccctggatgacgtcacca

SEQ ID NO: 399202 - DNA, 122 bp, Homo sapiens
ctagattcagacctctgactccagtacatggggcttttccatgcaataggtgaagtcagacgtttgtcatttgagacacagaaccctgacttgttacttcatgacacagccggtggtttaac

SEQ ID NO: 399203 - DNA, 122 bp, Homo sapiens
cagttcctgcctctcagcagcttctgcgaggcaggtcacacctgcaggggagcctggcagcgctaggagaggcaaggggtgggggtgccgccttttcatggggccaagaggggccctgagag

SEQ ID NO: 399204 - DNA, 122 bp, Homo sapiens
cgccacagagcccgcagcacgccgccgccgcagcctaggtcacgtgagtacccacgcgcgcgtcttgccagcggattcatcaccggcctgctcagactaggttctgcccactctgaccttct

SEQ ID NO: 399205 - DNA, 122 bp, Homo sapiens
agatagatagatctatctgtgacagataacctatatcacagatagatctatctgtgacctcggggatcatcatctgttaaagctttcattcattataaagggatcattgagggactagtgtg

SEQ ID NO: 399206 - DNA, 122 bp, Homo sapiens
tccattgtgcttcccttccctattaggaaagtacactgtccgcccaagagacaggatggacggccttcttccagctctacataaagcgcaagcccactggctcacccgggtcctgcttaaca

SEQ ID NO: 399207 - DNA, 122 bp, Homo sapiens
acatcaacacacacacacacacacacacacaaacgtttgagtggggccagagggccctggcgccaggggtgaacgcgatccaacagaggactgagacaatctaaagaaaaagcccattagaa

SEQ ID NO: 399208 - DNA, 122 bp, Homo sapiens
cactcggtcctttacagctctttgtctgcagccaggctcttgtctttcagagctggctgccgccccgtctctggagctgatgcagcagccagataatgaacagtatatcagcggaggcggcg

SEQ ID NO: 399209 - DNA, 122 bp, Homo sapiens
ataagacgtgcaaagatcgtcaaaatgtaaagtgatttggaagcagccaggcgcactgagcgggaggagaccgcacaagcgcggaggaagacgtaggttttcgcttacttgcaagcaggagg

SEQ ID NO: 399210 - DNA, 122 bp, Homo sapiens
attcttcattgtttatctgcctgattctcacttcctacttccagatgacagggttccagacgacaaagaggtaaaataaaaattacccataggcaagacaaaggagcatgggaaaatgaggg

SEQ ID NO: 399211 - DNA, 122 bp, Homo sapiens
gtcacgggagacactctggagccattttgcggggctggaattccttcgcccggcggagctcggcgcgcacccgtcagctgtgccgaggaccctgcgcccggggggccccgcggccacgtgac

SEQ ID NO: 399212 - DNA, 122 bp, Homo sapiens
aaagcagctgtcatctcggggccaaggtttgctttgcgaaagaagcagagatgaaggccacgtggaagcctctgttcgcttcgtgcacacgattctgcacccacaaacagccacggtgctag

SEQ ID NO: 399213 - DNA, 122 bp, Homo sapiens
tccatgagcttcaatcgctgcattttcagcccattcctctctgcatttctggagtaatttcggttactctttgcacagctccctctccgagtccacaggactcatcacaactcgcgagacac

SEQ ID NO: 399214 - DNA, 122 bp, Homo sapiens
agggactcccactccccgcccccacccctctccgcagcgcgcctcccgcacctgcgccgccgcttccggccccgctggcctccgacactgcccgctgcgcccgcaaccacgggagcacgtcc

SEQ ID NO: 399215 - DNA, 122 bp, Homo sapiens
ggctgctgcgaggatgctgcctgggcggctgtgctgggtgccgctcctgctggcgctgggcgtggggagcggcagcggcggtggcggggacagccggcagcgccgcctcctcgcggctaaag

SEQ ID NO: 399216 - DNA, 122 bp, Homo sapiens
gttgggatgcagcttggttttgtacattttggggagacgtgagacatcaatcaacacgtgcgagtgtaccttggttcagcccagaaaggctggacaattccaggagagggctttcaggtcac

SEQ ID NO: 399217 - DNA, 122 bp, Homo sapiens
tatcccgcatccgggtcatcatgaagagctcccccgaggtgtccagcatcaaccaggaggcgttggtgctcacggccaaggccacggtgagggggcagggcgggggtgtgggccgcccttac

SEQ ID NO: 399218 - DNA, 122 bp, Homo sapiens
tgatgaggcgagggagttacgactctcattttgcaggtgaggacactgagcacagggaatcgacccactcatggtcacacagcttgccaagtcgctgtgcttgggaggtgaaccaggcttct

SEQ ID NO: 399219 - DNA, 122 bp, Homo sapiens
ggaaacagagttccacaggcgtcgttgccctccgccttcagccctccgcgggttcgatcccggccacccaggtgaagcgcttgcttccctaaaagaatatatggttttcttggcgggggcgg

SEQ ID NO: 399220 - DNA, 122 bp, Homo sapiens
agcggtgccggtgcggggcgccccaccaggaggaggtggcggaggtcccgggggccgccccgcctcgcagcctgggctctgcctgctctgcgtccacgccagcataagccccagccggctcc

SEQ ID NO: 399221 - DNA, 122 bp, Homo sapiens
catgctgtttctgcagtttctgctgctagctcttcttctcccaggtggtgacaatgcagacggtaagaacatcgctgtcagctgcaaggttacatgtatctgggtagagtgtgctgggcttt

SEQ ID NO: 399222 - DNA, 122 bp, Homo sapiens
tgcctgcgcgtccggcctctcccccggggatcccctgggattaccgacggagctcaatttcgagagtatggtgccagcgcccgggctaatctagtcctctctactcgctctttttcccctcc

SEQ ID NO: 399223 - DNA, 122 bp, Homo sapiens
agacagatagacgggagaatgagatggaaaaaagcaactcatccttttctgctaacaccacgaaggagataaaggaagatttatgagtcatctcggaccacataccagcaagcagcaaaccg

SEQ ID NO: 399224 - DNA, 122 bp, Homo sapiens
accctagccactctgcgaagtttggctggggtgggagtgggggcggagccgggcagggggcggattccgcagcagcaactccccggacgcgcgcaggcctcaaagccccccagcttcagtgc

SEQ ID NO: 399225 - DNA, 122 bp, Homo sapiens
cactcacgcaggagttgttttgttttttttgttggtagaggtgccggtttcccatccccacggcttatttacaattatgggtgttgttatttttaaaggattcacaaggtgactaactctct

SEQ ID NO: 399226 - DNA, 122 bp, Homo sapiens
gcgaaaaaacccagaacccctctcaaatattctcacagatagactcacctcctgatgtgccgctaaaggcattccctaaatgcataccccatcagcccctgaaaactataggctttccagcc

SEQ ID NO: 399227 - DNA, 122 bp, Homo sapiens
gatccggacctagctcatattgctgccgcaaaacgcaaggctagcttccgccagtactgccgcaacaccttcttatttcacgacgtatggtcgtaaagcaataaagatccaggctcgggaaa

SEQ ID NO: 399228 - DNA, 122 bp, Homo sapiens
tatcaatagcaagtttggctgaaatgcaaatatccaataaccagagtgcagaaagcagctcgcccttagagaagctgtggctagaatccgtcagtctggctctgcggggcctgatacccagg

SEQ ID NO: 399229 - DNA, 122 bp, Homo sapiens
gtgcagactctgagtcagccctctctgctggggaaagcagcaggaagttcagtgagtcagcgctgccggtgacagcgggtgccggcctggggcagccaggaagacaggcctccgaagcgtct

SEQ ID NO: 399230 - DNA, 122 bp, Homo sapiens
gcccggcgagaagtcgagcgcagcgccggtgggctggtactgctgggggacccagtacaccgtccgcagccgctggcccgggtgctaagccccttattgtccggggccggcagggccggctg

SEQ ID NO: 399231 - DNA, 122 bp, Homo sapiens
ctggaactgttagacaataaaatgtctgttgtgtaagccacaaagtacctaatacaaagccgaagcaaactaacacaacctccagggatctctgttggcttccttcactcttcttattctgg

SEQ ID NO: 399232 - DNA, 122 bp, Homo sapiens
tgaagaaaaaggtaatggaaattgattcgcatttcttttttaaagattttcttcatttggcgtgaaaggtaggatcttgtacatctccagggtttggggtagggagaagaagagacgttagg

SEQ ID NO: 399233 - DNA, 122 bp, Homo sapiens
ccaataagctttctcttaatcaccaccaaggattaaaagccagtcctcgtcatcagctcacgggccaccccgtcactggcacctgcgggaaaacaagaaaagaaaaacaagatcagccacgg

SEQ ID NO: 399234 - DNA, 122 bp, Homo sapiens
gtgcaggcgatggagcagatgcagggttcagccttggaggggagctctgaggctgtgcctcggtctggctcctggggatgtgcaggctgatgtcgcagtaacatgtccagagcctggcttgg

SEQ ID NO: 399235 - DNA, 122 bp, Homo sapiens
tgcctccagctccagctcccctgagttctcaggatgtgaggggtctatggttcgtccccccgctccagcctggagatgacatcaggtttggaagcttgaagtcctgctccagagaaaggaag

SEQ ID NO: 399236 - DNA, 122 bp, Homo sapiens
ccaatgatgggcaacaacaagaacgacgacgaaccctgggctcggaactcgcccaggccccgcccctcacagccccgccccgtcctcggccccgcccccggcctgtcgcctcaacaaagtcc

SEQ ID NO: 399237 - DNA, 122 bp, Homo sapiens
gagtgggaccaggctctctgatccaaccctctgctagcaactcggctgtcggtggggtggcgcgcgcgtattctcacggagtgactaggagagggggacgagggagggggtctcaggggagg

SEQ ID NO: 399238 - DNA, 122 bp, Homo sapiens
agaagcataaatgtttccaccaactgagccagcaggcctaaaattgtgcatgtttggcaacgggcagtctctcagacgctgatggccccgtgacccattaccccaaatcccagggcagcttg

SEQ ID NO: 399239 - DNA, 122 bp, Homo sapiens
agactgcagcaacagtgactctcctcagcattcaccaccaagctggagcgatggacatcccgcttcccaggacccacctcctccgcgttctagaggcggtggcggccggccctggtgctgcc

SEQ ID NO: 399240 - DNA, 122 bp, Homo sapiens
ggaggccccacctcttgtgcccatacaaggagcggcgggccctagatggcatcgtggcgtcgcgacggcgtgtgcgtgtcgcgcttcctagtgccgtttatagggtcccggcacttccgctg

SEQ ID NO: 399241 - DNA, 122 bp, Homo sapiens
aggcggcaaggaggcaggaggcagcagaacacaagaggatagggctgttccctctcagggcgcgctccctctcgctccctctcgctccctctcgctccctctcgctccctctcgctccctct

SEQ ID NO: 399242 - DNA, 122 bp, Homo sapiens
gcccagcctccaggggtggtgagggtcactcccagggattcttgcgtcagctggggcacacgctgcagagccttccacgacctctctgactccagtgggatctggctctgcaaaagttaagc

SEQ ID NO: 399243 - DNA, 122 bp, Homo sapiens
aaaccccactcccccatccagtttgttgtgtactgggaagcactgggtgtgctgaagaaacgacaaacagcaggggtttgattcttaaaacgttcctgtactctaggtttttgtgtcattgt

SEQ ID NO: 399244 - DNA, 122 bp, Homo sapiens
tgccgctggggaagaatgaactgtgaggtccaggctcagatgtcttagagtcccagcaagcgtgagctctcttcatcacctactgggctgcagaaatggggccccgcacaaaacaagcaccc

SEQ ID NO: 399245 - DNA, 122 bp, Homo sapiens
ggggaagtccgacactgagcaacgaacgcattcccgcgcctccaaaacctaggccgggggcgctggaaacccttaccggcacccggccaccgcggcagacgcttgctcctgccacgcccccc

SEQ ID NO: 399246 - DNA, 122 bp, Homo sapiens
cctacttatttccacatccacattcctatcaccaggcagttaaagaaacagaaacaaatgcggctgagactgcttctttggggatactcttagtgagctctccatctccccaaccacaactt

SEQ ID NO: 399247 - DNA, 122 bp, Homo sapiens
ttagctggtctgcaactcccttaagtgaaaagaaaaggagtcaggtccaaaaaataaaaacgcagctgaccaaaaagaaaggaatggctaaggaaaggcgcgggtttgaggttacttataaa

SEQ ID NO: 399248 - DNA, 122 bp, Homo sapiens
acagacacagacctcagagctggctgcctcgggagtgccttgctgacggtcgctggagttcgtccatcaggcgactgcggtggggcacggagagcaaccgctgcctggcggagactttgatg

SEQ ID NO: 399249 - DNA, 122 bp, Homo sapiens
acaaacatatgcaaaatcagaatcctctgggaacaagcagttgtcttccaaaccttaggtcgggtatagagagcaacaatggagaagagaccttggtgccttggagtcttagatacaaatgc

SEQ ID NO: 399250 - DNA, 122 bp, Homo sapiens
cattattgaagttgaacattttattataaaagcacctgacacaccgggtgcagtggctcacgcctgtaatcccagcactttgggaggctgaggcgggtggatcacctgaggtcaggagttcg

SEQ ID NO: 399251 - DNA, 122 bp, Homo sapiens
cctcaggaattgcattcctcgcagtgacaggagaggatgtaccggtaggtggcagtgagtcgcatgccccctgagcatcgcagccgcagtgccttcagcttggaagtctggggccggcagca

SEQ ID NO: 399252 - DNA, 122 bp, Homo sapiens
tcagagccaaccttgctgggcttctccggtcagatcagccctggcccggggtcagcccggcggggaacgggtccaccctccgccagcgacctcagagctcccgggcacagcccggggcacag

SEQ ID NO: 399253 - DNA, 122 bp, Homo sapiens
actgcagcgtgggcgacaatgctaggcgcccaggagaactaccgctcccaggttgcctttcgcgccccgagggctgctgggactctcggactcccgggccgagaccgagggaaagaatccgc

SEQ ID NO: 399254 - DNA, 122 bp, Homo sapiens
attagggtaggcccctggtcctcgcgcttcccagggtaacctggagcaggggtcccggagcgcactcctggggctcagctcagcttcacttaccagggtctgctcgtactgcagcgcccgtg

SEQ ID NO: 399255 - DNA, 122 bp, Homo sapiens
ccggcgggaacgggctaggcaggacctgggcactctgaggctctgccccatccctgcaggcggagttcgccatgttcagcgggacccacgtggagcgggactttgtggaggcgccgtcgcag

SEQ ID NO: 399256 - DNA, 122 bp, Homo sapiens
aaagccttcatttccatggtcaaccagaaaagcccagacaaaataaaattcatatgtttccgtgaggctagtagagatgcaggaagcactgattaactgaattagagagaaacaaacccttt

SEQ ID NO: 399257 - DNA, 122 bp, Homo sapiens
caggtttgctggtatctgagcctgtttaaactatcttcaagaactcaggagggctgggcgcggtggcttgacgcctgtaatcccagcactttcggaggccaaggcgggcggatcatgaggtc

SEQ ID NO: 399258 - DNA, 122 bp, Homo sapiens
gtcacaaagcacacacctcactttgtgtaacttctgctgacttgttcctgccaccctccgcggcttcctattcaattgcaaaggcgttcacaccaacacaatagaacagaaggaaatcagat

SEQ ID NO: 399259 - DNA, 122 bp, Homo sapiens
caagttttctctgagtctacgcgcttccttaggactacaactcccagcatgccacgccagcggtcaaagcttattggtggtcctgccaggtcgcttgcgttgtggcagtcatggtagccaat

SEQ ID NO: 399260 - DNA, 122 bp, Homo sapiens
tgggactctgcccgcggctccgctctgccagccgggtctgtgtaggctctgcagcccgggcgctagagcggcacctccaggctggtgcgggaggcaggacttgctcttcctatttgctccct

SEQ ID NO: 399261 - DNA, 122 bp, Homo sapiens
ggggtctctccggatgctcgattcatctgtccccgtggggaacggcctgaagggcagattcgagggacggtgggacaagccgagttcctggcagagagaggagctacagcgcgtggaggatg

SEQ ID NO: 399262 - DNA, 122 bp, Homo sapiens
cagcctaatttacacacatttaaacacgcgtgtaaagggaggggagagagagagagagcacgttgtgcatgaatcactgctacagagtcacactccaattccacttggtgagcactcacccc

SEQ ID NO: 399263 - DNA, 122 bp, Homo sapiens
gctgtgattgggagagccaggatggaggtgcctgtgttgggaaaagacgcttgaggacagcgcttcctggcgggctctgggatcttctgagatcctgatgtctgccaagagcaggaggacag

SEQ ID NO: 399264 - DNA, 122 bp, Homo sapiens
aatatgtatgagcctgatgcttgtctgctccttgcctcttattctatctaattagctgtgcgtaggaggtgctgaattgcaagagcccgtttattttatagtgatattcccagtacagcttg

SEQ ID NO: 399265 - DNA, 122 bp, Homo sapiens
taacggtgtaatatatctacggaaggatatacaagtcacgaaaaatattgtcaaactagacgctgggggacatttactctttttaataaatgtatgtgaatgcattacttatccatattact

SEQ ID NO: 399266 - DNA, 122 bp, Homo sapiens
ctctaggcacgctgcacctggtggacctggcgggatccgaacgcgcacggaaggcaggggcggccggcccgccgcggggagacccagacggcgcccggcgcctgcgggaggcccagaccata

SEQ ID NO: 399267 - DNA, 122 bp, Homo sapiens
gaggctgcatccttctagaaagcgctgttgagaggtgtgaggaggctgccacgcaggccgcgccgccccgaatggcaggtggaaggcggctgagtggagccgcagcaaatgcaaccctgccc

SEQ ID NO: 399268 - DNA, 122 bp, Homo sapiens
ttctttcccctcttacaaaccatttcctcgcctttagaaactcgccatcaaacccaaacgcgccctctgatcaccgcagaaagcagaaacaaagggggctgagcggcgattcaagcggctct

SEQ ID NO: 399269 - DNA, 122 bp, Homo sapiens
ctgtccaggaccgagcatgtcggggctggggcccagggacccccgggacaggcccgaacccggctggcaccagggagcagagaaaacacacacccagcagcaacacggagggccgcccaggc

SEQ ID NO: 399270 - DNA, 122 bp, Homo sapiens
ttcaacacaaactaccaagttccaaaacaaaaattcaaccggccactctcggatccctcccgataagagaaaaaccacacatgtaacctgacgtggggaaactgacggagatcttacagtgg

SEQ ID NO: 399271 - DNA, 122 bp, Homo sapiens
aggggcatctgagggtgtgggggctgccacagcccgggaggtgacccctcgcagctggggcgctctgatcttcggcccacaggcccggggtgccgggaccccgccctcctgcagggccaggg

SEQ ID NO: 399272 - DNA, 122 bp, Homo sapiens
aaacatcatacattgcattgatgagagagtgtcaagcggtacaatcacttcagaaatgttcgacaattttttacaaaggtaaacatgcacctactgacatggtttaaatctgtgtctccacc

SEQ ID NO: 399273 - DNA, 122 bp, Homo sapiens
aagcgggtgggcggggtccaggtgctgcggtgttgtcactggctgggagggaggctggcccggcttggtgctgcagctcccatcaactccaggacgccacagtctgggaaagaagaggaagc

SEQ ID NO: 399274 - DNA, 122 bp, Homo sapiens
agtcttgctttagtttgctttctgtttttggtgtctttttctctacccctgtgatggattcgaattacaaagagttctggtttacctagtttgtggagaagggggatagtgtaatctctaat

SEQ ID NO: 399275 - DNA, 122 bp, Homo sapiens
ctatctgaggcttgaataaaataggattctctccaaattaagctgttgggcacatgccagcgttttgggatgatctgagaaagaagctgctgctggtaacaaatgaggtgtcttctacatct

SEQ ID NO: 399276 - DNA, 122 bp, Homo sapiens
aggacacaactgaggaagcaataagaatatcaataatagcagtctctaggaatcatgcagcgtttaccacgaactgggcagggctctaagcactgtacatacactaattcatttagtgctta

SEQ ID NO: 399277 - DNA, 122 bp, Homo sapiens
gcctgctggccaggagcaaacagtctatgtacagaacccctggagacccccggcctagaacgcctgcagcacagagcagctgggtccggacacaggcacgaggtccttggcagtgtcttttc

SEQ ID NO: 399278 - DNA, 122 bp, Homo sapiens
ccccaccctggctcacctgggccttgtccagcagtccatacacggtgaagatgttggtgtcgggccggaccatcacggcgtggggtggtatctgtgccaggttgcaggctgcaaactgggac

SEQ ID NO: 399279 - DNA, 122 bp, Homo sapiens
ccaggcagagatgctccccacctcccagatggggtggcggccaggcagaggctgcaatctcggcaccccgggaggccaaggcaggcggccgggaggtggaggctgcagcgagccgagaccac

SEQ ID NO: 399280 - DNA, 122 bp, Homo sapiens
aggccaaccctgactccaggggctctaggtctccatgtgaagtggtgaccatgagccctccgggtgagagcagtctgcctttccccactctgaatgaagaactgcccagggcttgccagaca

SEQ ID NO: 399281 - DNA, 122 bp, Homo sapiens
aggtgccccagaccccaccgccggcgcaggaatcgaggacgccaactgctggcacctggacgaggagcagatccaggagcaggtgaagcagctactgtccaatggcggctactacggggcca

SEQ ID NO: 399282 - DNA, 122 bp, Homo sapiens
gtaatacggtgtctgtcgcacatatattatatcgtgtatgtaatgtataagtatttatttcgtttgcttggggttttgtttgcttttgctgagtccgacccctctacctgccgcctggccct

SEQ ID NO: 399283 - DNA, 122 bp, Homo sapiens
acgttatgaaaggagaggaaagagaaaactgggtactgaaagagggagagcgggcaggaccgtttcatctgtctggtatttactgagctttctttgggaattccgaggcatttcaaatagct

SEQ ID NO: 399284 - DNA, 122 bp, Homo sapiens
cagacgtgtccacactccccacacgtgccggcccgaggctctgtagtctcgcaggtgcgccgagtgtacacgcccccagcccggatcagactgtctagactgcggggtgcaccaccccccac

SEQ ID NO: 399285 - DNA, 122 bp, Homo sapiens
aactagggagccgccggtccggcgagggcgcgcaggcaactgttccacggagaggcgctccgtttccaacgtccatcagcgacggcggtaattagggctttccaaccccaaatgtgggcgtg

SEQ ID NO: 399286 - DNA, 122 bp, Homo sapiens
actgaaacaggaatcctctttattccacaagcgagacacagaacaaacagtgccccaggccggagaactgaggccagacctgcttcccaggtgaccccggtgtccacaaaataaatgcccct

SEQ ID NO: 399287 - DNA, 122 bp, Homo sapiens
gtgggaagctactttgaacattctatatacacatctaaatctaactcaacaattctaactcgataaaagtacacccttatggagaggacctgggcataagctatgccaaatataaaaatgaa

SEQ ID NO: 399288 - DNA, 122 bp, Homo sapiens
gaaggagacagaaatttctgctagttttgttgttgcatctcaaacagcagcagttgtggccgcagagcatggcaagtgcttagagaagacggaaaagcgttccatgtgtgcgtggaggacag

SEQ ID NO: 399289 - DNA, 122 bp, Homo sapiens
gaacctcgcagttcctcctggatctcttgtaatgtctgccgcgggtgaaaccagctgccacgttaggaatctgcaccaagaccaccatgttatgaggaagctcaagccagccacgtggagag

SEQ ID NO: 399290 - DNA, 122 bp, Homo sapiens
ctaccagttttgcctcttgttacacaaacctaggagcagccaattacccgctgagagaatcgtaggtagttctctggcctttacaaattcttaactaccacctttccgcagaagcaactgca

SEQ ID NO: 399291 - DNA, 122 bp, Homo sapiens
taggagagagaactacagctcagctgccagctgaccgcgggagataatgccttgtgcgcacgcgcttgctcagaaggcgccgttcgccggctacctgttggtgtgtatgcagagcatccctg

SEQ ID NO: 399292 - DNA, 122 bp, Homo sapiens
aggcctagcgtgggtggtcatctcaggggcagcactggtggccgttgaattgttccttaccggggagaacaggtggcagggagggatggttccagaccccatggcacccgtgtctctgcagt

SEQ ID NO: 399293 - DNA, 122 bp, Homo sapiens
cccactctaaaccccctgtcctccaaatcacttagtcacttaccttctctccatgagggccgatggcaccctggggcccgggaagaccctacatacagggaaagagaagtcacaggggcctc

SEQ ID NO: 399294 - DNA, 122 bp, Homo sapiens
ctggccaaaatatggacaaaagaccgtccgtaagttactagctgggtgctaggctggaatcgattcttatttaagatggcctagtaggcaggcctccaaatttgttttcattcctttacctt

SEQ ID NO: 399295 - DNA, 122 bp, Homo sapiens
ggaaacaatccctttattttagaaggaaggattgtaaattaattaattttcactaagtgccgtgagggccattgatgttattggaatgtacaaattaatacattatttattgttaatttatc

SEQ ID NO: 399296 - DNA, 122 bp, Homo sapiens
cggtggtcacttgaccgcctgtgaggaggcggcgcgtggggtggatcggactgggcgtggcgggggctcaggaaggagggtggccctaccccagcgggctcggctcggggcctccgcggcag

SEQ ID NO: 399297 - DNA, 122 bp, Homo sapiens
gtctcaaaggtgggatttgagcgagggtccggctgactgcagagcctgtgtgtgagtccccgtgtgacactctgcacttggacccttgccccggggaagtggggggctagtggccccgagag

SEQ ID NO: 399298 - DNA, 122 bp, Homo sapiens
taaaagcacaaaactgaaaaactacagaacaaaacaaacaagcagcttttcagatttcttcgaaagtatcaaggctgaaatagatcagtgtctggtcttgaacctgcaaaaaaagtaacggc

SEQ ID NO: 399299 - DNA, 122 bp, Homo sapiens
gtctggactcacaagaactctgctaaggtgctgaaatcccataatgatcacccatattcccgccaactgcattcctggtattgtcacaagacagcatcatataagcaatacagaaaatatgt

SEQ ID NO: 399300 - DNA, 122 bp, Homo sapiens
gctgcagcgcaaaggcgccaggcctggcgtggaacccgagcctgcgcagggccgcgtctgcgttcacagggaacggtgaccccattgtggcaaaacatctaacttagctacacatacacggt

SEQ ID NO: 399301 - DNA, 122 bp, Homo sapiens
tcatggcaaaatgaagaatgtgagctttgtcttccccaagagactcatgggaagcagatgcggaatctctgaggaggctgttggctctccccccatgatagctgccggccaggtcgctcgga

SEQ ID NO: 399302 - DNA, 122 bp, Homo sapiens
acccagccacggccctctccggcgcaggcagatttgaggaccgagccttcttgatgctgacggcctgagggggctcccgggtgccggatgtctggcccgggccagggtggctccccggggag

SEQ ID NO: 399303 - DNA, 122 bp, Homo sapiens
acctccctgcccggctcagtagctctgggccagttcatttcgccacagcccggagcctctcggaaagcaaagattaaaggggaaagtcgcagctgtatatttatattttcattgctagaagg

SEQ ID NO: 399304 - DNA, 122 bp, Homo sapiens
aatggtccctccagtgtagccccagggacagctccttgaggagacacacaggcctgctcccgccatgccccacaggaatgagggagaacagccccctcctcctctggaggctgctgcccaaa

SEQ ID NO: 399305 - DNA, 122 bp, Homo sapiens
gcatgatgcacctggctagagcctgtctcccaacacctgggctgggggcacagcacagagcgccgagcttgcgggctggggattggggctgggtgaggccagcgtgtcctgccccctgggct

SEQ ID NO: 399306 - DNA, 122 bp, Homo sapiens
agccctgctgctcccaccaagggtaccaggcagcctccacataccgagggctgtaggagtcgggcatggggccactgacatctgggggagaggaagggagggctcagtgccgtggctgggag

SEQ ID NO: 399307 - DNA, 122 bp, Homo sapiens
agatttgaccttttacttgatggacagtttaaaatctcaggaacagcttctaagatcggccggactactgcctatcaccattgcactttattatgtagtactgatgggacgttcttgtcttc

SEQ ID NO: 399308 - DNA, 122 bp, Homo sapiens
ataaaattttcaaagacagggactgaatattgtccatttttctgtctcacacactgccctcgttcttttaaaaaatgacattgtttaagtgtcttccttgtgccttatcatgtgcaaaagcc

SEQ ID NO: 399309 - DNA, 122 bp, Homo sapiens
agtgtctccgtgtgcctccctgtggggcgatggcggagtaaacgggtgatggccactgagcgctggccgtggggactcttggtcctggctgccaagtagaagcttcaggggtgctcttcaca

SEQ ID NO: 399310 - DNA, 122 bp, Homo sapiens
ccgagggagggattggtaggaggggcgtgggcgaaaggcatcgcccagtggtggtgcctacgacgcctccccacgttcggacttctccagaggttgcagagttcgagctgtggagcctagtt

SEQ ID NO: 399311 - DNA, 122 bp, Homo sapiens
aacacagtcagctgaacagagggtctcaaagacaaatgttattcttcctagttcagaacccgtggctccagtcatagatgttggtggtctatttgacagattaaaatggcaatatttatact

SEQ ID NO: 399312 - DNA, 122 bp, Homo sapiens
gactccgtgttccctaagttacgatgagtttgttcctgcccgcagaagccgcctcgcctccgcagtgccacctctgctgcccccagccaccggcacagctgagtcaaggtacaaccgcccag

SEQ ID NO: 399313 - DNA, 122 bp, Homo sapiens
gaccagcagcctctgcgcgccaagtccgttctctaaagccagcggatctccatgtcctcgcggtgcttgcccctggcactcgctgtagtgccaggcactcgatgtagtagtccgtccttcag

SEQ ID NO: 399314 - DNA, 122 bp, Homo sapiens
ttcgagaatatggttagaaggtgccctcagatgaatgttggtagcccacggctcgtctgacgcttttccctggatttttaagcggcgcgacagtgagaccatgttccttgtaagggatttag

SEQ ID NO: 399315 - DNA, 122 bp, Homo sapiens
ctgcagcccccgaccacattctaataaggagcaggttgcgctccttattagacagctcggcgacctacttggtcacagccttcatgcaggtggccatgtcatcgtagtgctctgcctgcttg

SEQ ID NO: 399316 - DNA, 122 bp, Homo sapiens
gcaagagctacaacggtgtctgaaagatcctgattggctggctcagctattcatcaaacacgtgaggcttgagggggcagggcctggggcggggcttaggaatgggctgggattctctggag

SEQ ID NO: 399317 - DNA, 122 bp, Homo sapiens
ggcggtctttgtggctcaggaccttcactggggcctgaatcctcttctattccttcctgccgtccattcccgaccccaccttgtccgccggcgcccaatctgggacccaccctcccaccacc

SEQ ID NO: 399318 - DNA, 122 bp, Homo sapiens
ccctcaggcagggcttaccacctccttgcaggtaaggaaattgagggaaagttccttacccggggctcagacaggggacagtgattttgggttgggatgcctcagaccatctcctgctcagc

SEQ ID NO: 399319 - DNA, 122 bp, Homo sapiens
acagcgccacggaagaggatgcacccggctgtgtggacatgtgcccagggcccgggacagcgccacggaagaggacgcacccggctgtgtggacatgtgcccagggcccgggacagcgccac

SEQ ID NO: 399320 - DNA, 122 bp, Homo sapiens
aggccggaggagggcggtgggcacgtgtgggtcccacctgacagccgtctgcctgttctacggctcggccatctacacctacctgcagcccgcgcagcgctacaaccaggcacggggcaagt

SEQ ID NO: 399321 - DNA, 122 bp, Homo sapiens
taggactgtgtgctggcagcagggctggcagtgtctccagcagcaggcagacctccccaccgggagccagggggaaaggctggctctcccattcaaatgcatgtacgtgtgcaggtatggat

SEQ ID NO: 399322 - DNA, 122 bp, Homo sapiens
ataggccaacgagatggtgacggccagagggagcccctcgggcacggcgaccaccagcaccgtcacgccaatgatgaagaacttgacaaagtactgcacgtagacgggcgtgcactcaggca

SEQ ID NO: 399323 - DNA, 122 bp, Homo sapiens
tctgcagcttgatcctcttgtcgttgcgatagatggtcttgaccttgaagtcgatgcccacggtgctgacgaaggcaggcgtgaacgagtcgtcagcatagcggaagaggaaggacgtcttg

SEQ ID NO: 399324 - DNA, 122 bp, Homo sapiens
tccctccggcggccgccgccgctgacagctgttgggggctgcggaggccgaacgcgcccacgacaggtgtcaggctggccggcacgcctgcctcctgccaccccaccctccccggacccgtg

SEQ ID NO: 399325 - DNA, 122 bp, Homo sapiens
aagcgaggaaagtctatgccgccagcgaccggcaggaggcacgtcgggcacgctcgtcaccgtttcctggcacgtgaccaccgccctgccctgtcgctttagggcctgtcgcttccggcggt

SEQ ID NO: 399326 - DNA, 122 bp, Homo sapiens
cgtgggctgaatcgccgcgcggatattaaaagtgtgtgtggggggaggcccggagcgacgcgccagtaatccgagctcttgattatccagattcggatcaaacggggcggcggcggccggcc

SEQ ID NO: 399327 - DNA, 122 bp, Homo sapiens
cattggttgttgcccagagacatgagttcctagtgatgcaaacctcaccatagggcagcccgcattatggtatctggattcccttagagccagacagcaagtgaacccactggagatggaag

SEQ ID NO: 399328 - DNA, 122 bp, Homo sapiens
cactatgccctcacccctgccccccgtcgccctcagcgattccccctcctgctcccaccccgggctctgaagccaggaaacccaagaggaaatgactgagcccgtctgggtccccgcccgct

SEQ ID NO: 399329 - DNA, 122 bp, Homo sapiens
cgcttccgccgcactcctcgtcctagtttcgctctctctcgaattcatcgcatcacgtttcgacccatagatattctagcccaagagctgaggaggcggaggaggaaggagaggagagggag

SEQ ID NO: 399330 - DNA, 122 bp, Homo sapiens
ggtctaagaatgatggtttgctcaattgctgttggtggctgtgcaggggaacatgcctagcgccaccctgttgatggtaacactctgtcatggctgaatgagcaactcttcctggaaaccat

SEQ ID NO: 399331 - DNA, 122 bp, Homo sapiens
tcacagtttggtgccgtgtgcgtcaaaccggggcgacgttgggagcacgcggcgtccccgcgtcacacgccgctctgtacgctactcggctccagcggcccccctccgctccccgcttttcg

SEQ ID NO: 399332 - DNA, 122 bp, Homo sapiens
ttccgttgtgtggacattccacactttgtgtgtccatccatcactgatggacatgtgctccgttcctgctacttgtttattgtaaactgtgctgccatggacatttgtatgcaagtatttga

SEQ ID NO: 399333 - DNA, 122 bp, Homo sapiens
aaccaagattcctgggtgtgggcgcaggagggtctgcggagtgtgtgagctgaggctcggcgggaggaactaagcttttctcctgcccccacgtgccaggcacacatgcgcccaaagttggg

SEQ ID NO: 399334 - DNA, 122 bp, Homo sapiens
gcggggcgagcgctccagctggcgggaaggaggaagggccgggcgcggcgcagaggcgggcgcctaccagccggcagctccggagctgcccgcgccatgtccgcgcacaatcggggcaccga

SEQ ID NO: 399335 - DNA, 122 bp, Homo sapiens
aatacactcacaatttttctcaattgccaacagactagtttatttgtttctcttgtaatacgaacatgctattctcttagtttttatcttcaataacatatgaaagatccaaaatcaaattg

SEQ ID NO: 399336 - DNA, 122 bp, Homo sapiens
accgacctagtacgagaaaacacctcagacgctgtcaccacagcagtgaggaggcaacctcgtgtctattcggtcaaaccacatgcagctgcctttcgcgctggccagaaacagccgtgtat

SEQ ID NO: 399337 - DNA, 122 bp, Homo sapiens
gaaaacttcaggaactcaacatagatacgtcgctttttaagtttctcatttgaaactatgcgttacacgttctgctgagagccgcgaaggcaggcagaggttaaggtcctggaataaaaagg

SEQ ID NO: 399338 - DNA, 122 bp, Homo sapiens
tactccagacccctctgcaagcattggtcattcatcagctttcacgaggtgaactggggacgaggcaggggcttggaccggcttcctggccaggactcactgccttcctcagctgagaagac

SEQ ID NO: 399339 - DNA, 122 bp, Homo sapiens
cgccgcttcccgctcctccgcctcccgcttgcagtaggaatacctgtgattcatgtgctgcgagtacgagcccgagtgtgagaagcgcttgccacatttatcacactgatagggcttctcgc

SEQ ID NO: 399340 - DNA, 122 bp, Homo sapiens
gttcattacagtgaaggagcaatttcccttaaaatggatgacccagcgccctgtctgggtcgaacagtggcctaaggaaaaattgggggcgctttatgaaatagttaaagaactactagaaa

SEQ ID NO: 399341 - DNA, 122 bp, Homo sapiens
gtggaggtcagctcccagaggctgttcagtctccatgtatgagagggcggttcactgctccgctgaggtgccttgctaattgtccttgtctggcgactctcccctatcccactcacagagcg

SEQ ID NO: 399342 - DNA, 122 bp, Homo sapiens
cgcagcagcgcgcaggctggagaaaggagacttgttgggcgctcgggtgggggaagctcacgccgcacaccggggaggaacaatgtaatccggcaactccagcaaactggagggtttctgca

SEQ ID NO: 399343 - DNA, 122 bp, Homo sapiens
atgggtccccttcagagtttgaagcatgacccatgtgaccagataggagaatctctcgagcgcagggaaagctgggtgctgcctgtgtggtggcagagtctggagggcttgctgtgctgggg

SEQ ID NO: 399344 - DNA, 122 bp, Homo sapiens
agccgtgacagctaatgacgcctgcagtccccaccatggtccctgcctcatcctctgtgccgttgtcttgtgtgttccatttatatgaatggcaacaaaagtagaaaccaggaaagcaaaat

SEQ ID NO: 399345 - DNA, 122 bp, Homo sapiens
tctttcccgcccccatggctgccttcgattggctaaacctgctgggccgcggcggggatgcggcgcagccgcattctgattggctagacttaggcctggaccctagtgattggctgatagga

SEQ ID NO: 399346 - DNA, 122 bp, Homo sapiens
gggttggggggctcagaccacacttggaccatgaaagtgaccacatgcaaatcacagaaacgggatgcagggatccacagacgtgctcctcttgggtccccgttacctcaccgccacccctg

SEQ ID NO: 399347 - DNA, 122 bp, Homo sapiens
gatgctggggatgaagggggctgctcgcagatgtgcctggtggagagatggcccagaggtcggacagaagagacgatcaaagagcaatgggaggagctgagacaggaggggagccgggggcc

SEQ ID NO: 399348 - DNA, 122 bp, Homo sapiens
cagtgtcaaacttgacatcagcctgcgagcggagcatggtaacttctccagcaatcagagcgctccccctcacatcagtggcatgcttcatggagatatgctcctctcactgccctctgcac

SEQ ID NO: 399349 - DNA, 122 bp, Homo sapiens
ttatacatacatgtgttcacacagactccagtgcatgtatgaagcaggcacatacgtgcacgtgctcacatctgcagtcattcatgcacatggcagtctgtgttcttatatacacagaatgt

SEQ ID NO: 399350 - DNA, 122 bp, Homo sapiens
gacgctcgcctcaccacccagagcacagtcaggctgggcctcctggcctcctccccatcccgggcctggccccctgcccagccgccttcaccccggggagtgctggatctgctgcattccct

SEQ ID NO: 399351 - DNA, 122 bp, Homo sapiens
caggaagctggcagccatgaattctgggaaatgtagtgtgcagcccccatgccggagtcacgcgcccgctgtgatgggtgggctcggagctggcacacaatagttctgtggccgacatccag

SEQ ID NO: 399352 - DNA, 122 bp, Homo sapiens
aggctttttctctgacttcgcttagtgtaaccagcggcgtatattttttaggcgccttttcgaaaacctagtagttaatattcatttgtttaaatcttattttatttttaagctcaaactgc

SEQ ID NO: 399353 - DNA, 122 bp, Homo sapiens
atgctgttcaaggaacaacacggcgtgtggaccacgacactaccccagccccagggtgtccgggaaaagctttggctagggctccaggccacttcaaattgctttttttttttttttttttt

SEQ ID NO: 399354 - DNA, 122 bp, Homo sapiens
tacatatttgcttaatacacagtaaacttctctggaaagataaacacaaagctggaagaacggattgcctatgcaagaggaattagcaaaccttgagaaggattgagagtgaggctttcctc

SEQ ID NO: 399355 - DNA, 122 bp, Homo sapiens
ggtgggaggtggagggggtggtggcgcagggggcactgatcggggcacggacgtggagaccgatgtaatctggacctgaggggagaggaaagagtgagaagccaggctcttcccgccctcag

SEQ ID NO: 399356 - DNA, 122 bp, Homo sapiens
gtgacatgaccagtcttaatttttacaggctgctgtgtagcagcagagaagcggaggagtcggtcagcaggctcttgtattaatcttggcaagccacaatggcagctcaggccagagtggta

SEQ ID NO: 399357 - DNA, 122 bp, Homo sapiens
gagtaagaaggggagtccggaagcgtcagggtaacaatgggatgggtatggggtctggttcgtttcaccttagaactttttcacactgataacgaggaggaacaacagtatagcgaagtaac

SEQ ID NO: 399358 - DNA, 122 bp, Homo sapiens
gaggagttgaaatctgaggagggatgtttgccctctgtcccccgctgccctaaccactcccgccccctggaggtatgtgaagagtccagaatccctgggattcctgacactgcactttgagg

SEQ ID NO: 399359 - DNA, 122 bp, Homo sapiens
ggctctctttcctcctcctttctgaggcttgagggagaggaaagtccttcctgcctggggcgcccagagctgtcactttggctctggttcagtgaaacctggccattgacaggacagatggc

SEQ ID NO: 399360 - DNA, 122 bp, Homo sapiens
aagtggtttaccaaaacgcggcggaaggaatcaggacagtttgcccgacgggcgggtcggcggctttcaggcgggagagatcttgccaggggcagagagagatcccgaaaatcgcccccagc

SEQ ID NO: 399361 - DNA, 122 bp, Homo sapiens
gcacagagctgatgctcagcaggcatccgctatcagcatttgttatcactgtcattgctacgactgcctgctgttagtgccactgtctcctcacctggctgatgcactggacatccaagttc

SEQ ID NO: 399362 - DNA, 122 bp, Homo sapiens
ccctgtgcgtgccgccgcgctgttgctcgcagtgtgctggcgccgagctcggtggacacgcgcgcagtcagagctgcctctcgccctcgctagctgggctcgcagcctcttcctccctccct

SEQ ID NO: 399363 - DNA, 122 bp, Homo sapiens
gtcggagccgccggggcggcgccgggttgctgagcggcgtcacagatgctcccgcgggtccgctcccgcgggtccattcccaggactttgggttctcggacagaggccttaggacacggggc

SEQ ID NO: 399364 - DNA, 122 bp, Homo sapiens
cttccttttcccccggtccacgctgtagcagctgctggggagctgggggagcccccggcccggctgctccttcaggacctgttcaattttctggatccggctcagcactgctgagctctcct

SEQ ID NO: 399365 - DNA, 122 bp, Homo sapiens
tgttctaaaatgggggtggggggtagtgctccggcctgcttccccggttggcccaaggtccgcgctgatcaccgcccaagaggcccaggagacccgcaaatctgtgctgcacgtccgcactc

SEQ ID NO: 399366 - DNA, 122 bp, Homo sapiens
tcagccccagctgtggggaaggcggaatttgcctgatatcgcggagccgccgcctggcagcgccgagcctggcctgggccgcttcacgccaagattcatgcccggctaacaagccccacttt

SEQ ID NO: 399367 - DNA, 122 bp, Homo sapiens
tgaatcccaaataagactcagaggaacttttaaaagaagctacttctaaatgactgactccgccaactgcgtgccctcagcagggccacgacgctgcaacgtggaggaggtggaccaggggc

SEQ ID NO: 399368 - DNA, 122 bp, Homo sapiens
aagtgtctgctgtagggccgcgtgtgagagacaaaatgcctgcagaaacagggcggcgagcggaagagattggccctatttctgaagtcaacgtagttctgtcatcagaggatgctgtactt

SEQ ID NO: 399369 - DNA, 122 bp, Homo sapiens
atggaaacaggtccaaaactcaggtggcttgattttgggtctgcacactcaatcactagtcggtagttagtataagctgatgatattttgcaatgcttctgaggaaagcaacagcagaaatt

SEQ ID NO: 399370 - DNA, 122 bp, Homo sapiens
ttcaagcgattctcctgcctcagcctccggagtagctgggactacaggcgtgagccaccgcgcccggccatattatgtattatgtataaacgcatatgaccttacacacaaggttaaatgca

SEQ ID NO: 399371 - DNA, 122 bp, Homo sapiens
ggctttagactgtgttcccagccctcggatttggacaccaagccacctcgcttctcacctcgctctaacaaacactccatggtgttgtgcacaacgatttgggtttcatctggttcggcctg

SEQ ID NO: 399372 - DNA, 122 bp, Homo sapiens
ctgggggtggctgctgggcctggcacaaagccttcctggtgtcggtcgtcctgcaaggcccgccgggatgggtggctgcactcctccagcacacggacgctttactggccaggctacttttc

SEQ ID NO: 399373 - DNA, 122 bp, Homo sapiens
tcaaatctctgatttgagatgagtgttgaccctacgggggttgaaggcctctctggagagcgtcgattgagcagacaggcccagagctggacgatctctccctaaaatgccaatggcctcgg

SEQ ID NO: 399374 - DNA, 122 bp, Homo sapiens
ctgccggtgtgcggccagcaagtctctcgagcagagcaggtgaaagcaacgccgtcgcttcgcctcttcaaactcctgcactcgatggcggctttttaggagacatctgtgccttgctggtc

SEQ ID NO: 399375 - DNA, 122 bp, Homo sapiens
gcctcagtttcttctgtgcagtgcttggtttgcccccaactatttcccctacgtggtatccgagtggctgtgcctcagtttctctgttgtgccttgacaaggccggtctgttccttgccctc

SEQ ID NO: 399376 - DNA, 122 bp, Homo sapiens
caggaggagatccaggaagcagtccgcacgtgcagccgtcttttcggggccttgctggagcggggagagctgtttgtgggccagctgccctctgaggagatggtcatgacaggtgagccctg

SEQ ID NO: 399377 - DNA, 122 bp, Homo sapiens
atgggtgttatgtggccattagtaaaccatttacaaactttaaaaaccctgacttgttaacgataaagcaggatacaaaattgtgtgcaaactataattacatttacatttggaaatagaag

SEQ ID NO: 399378 - DNA, 122 bp, Homo sapiens
atgccttgtagttccagctacttgggaggctgaggtgggagaatcacctgagtccggggacgtcaaggctgcagtgagcggtgattgtgccactgcactgcagcctgggtgacagagtgaga

SEQ ID NO: 399379 - DNA, 122 bp, Homo sapiens
ttgtcccaaagtgaaaagcacagccagataagcacgctggaagcatctgctcggggctgccgctattgtgggaatgcaggcgctgtggctactttgggtatgagacatgcatgcttcgtgca

SEQ ID NO: 399380 - DNA, 122 bp, Homo sapiens
ttaactacctgttataaaatttatgggtgggtttgtgaaaagaaacgaggtccctgcatccggcctagggaactgcttttcttactatggaggaagtctggggaaggcatgaggtatcccct

SEQ ID NO: 399381 - DNA, 122 bp, Homo sapiens
tccctagaggagcccatgacggaactcccgccacgcctgagactgttccccaccacccgccggtccctaaaggagcccacgacggaactcctgccacgccagacactgctccccaccacccg

SEQ ID NO: 399382 - DNA, 122 bp, Homo sapiens
aactcacaacccaaatataaaagcaggttccattgcatctttaacaacataattcttaagcgattccaactgcatctctatttaagactcttctcaatttcttgggtcacaaaacctctgtg

SEQ ID NO: 399383 - DNA, 122 bp, Homo sapiens
gatcttggttcactgcaagctccgcctcccagttcaagtgattctcttgcctcagcctcccgagtagctgagattacggacatgtgccaccacggccggctaatttttgtatttttagtaga

SEQ ID NO: 399384 - DNA, 122 bp, Homo sapiens
cgggagctctgcgagagttttgtttccgtggagatggcttctgctgcctcagaaagaaagcgggtttatcctctcagcacagcaaagtgcccagtccttctgccgaacgacgagtggaagcc

SEQ ID NO: 399385 - DNA, 122 bp, Homo sapiens
tggatgcacccactggaatttttctttaacaaacagacccgcggaacttgttagagagcccggcgaagagttggctgctctccccgtccacacatacgataccagagccaggggcgagggct

SEQ ID NO: 399386 - DNA, 122 bp, Homo sapiens
ttgtccttgcaatagtttgttgagaataatggttcccagcttcatccacatccctacaaacgacatgatctcatcattttttatggctgcatagtattccatggtgtatatgtgccacattt

SEQ ID NO: 399387 - DNA, 122 bp, Homo sapiens
gcggccgtagagcgtcagatggccaagatctcggtggcagaagatggtcgcctgcgcatccgcggagcactgatgggcacctatgtcgccagtgtgctctgcaagagtgtgctagaggcagg

SEQ ID NO: 399388 - DNA, 122 bp, Homo sapiens
ccgaggggatgcagtggactgtgtgtgtctggctgtagcagacgcgaggcggcgacgaggcgccggggacccgcgcgaggggcggccgggaggcggcggcggcggccgccagaagtagcagc

SEQ ID NO: 399389 - DNA, 122 bp, Homo sapiens
gggcccccttcattcagtaaccagtgctaggggggagtccccaagaggtgggatagcctgcgctggattgtaactaatgatcgcttcaggcctagagtattttctctagtttctggaaagta

SEQ ID NO: 399390 - DNA, 122 bp, Homo sapiens
gggtttgggaataatgaggcgttttttatttctttcctgttcccagtttctccccgggttcggtcttaactgctttccagccccagagatacttgctgggcatgtgtgatgtagtcttagtc

SEQ ID NO: 399391 - DNA, 122 bp, Homo sapiens
tcctccctggcacacgagggaccgaggcctgctcaatgcacaatgcagcctttgatatcccggctacagcaggaggcccagggagggtgggaggggcagcccagcccagcctgcaggcccac

SEQ ID NO: 399392 - DNA, 122 bp, Homo sapiens
gtcgatttcctgtagtgaatcaggcaccggagtgcaggttcgggggtggaatccttgggccgctgggcaagcggcgagacctggccagggccagcgagccgaggacagagggcgcacggagg

SEQ ID NO: 399393 - DNA, 122 bp, Homo sapiens
agggcggaggccggtggcggccctgcagctgcaccgggactgccaggcttccctgggaaacggagggctgctcaccccattgcacggaggggaacactgagccacctgcaggcaggagcccc

SEQ ID NO: 399394 - DNA, 122 bp, Homo sapiens
ccctgagaagttgcaggtttcttcgccgcccccgccgcctccttctccctcctcttcagacgcctctgcagcatcttaccctggcagcccagtgagtttgggctggccagttccgagcagga

SEQ ID NO: 399395 - DNA, 122 bp, Homo sapiens
ctacggcggcatcttcgtggtggcgcgtcgcgctgccctgaggcccccacggccggcgcgcgggtcccgactccactcggactctctggatagccgcctttccatcttgccgccgctccggc

SEQ ID NO: 399396 - DNA, 122 bp, Homo sapiens
gggtcagtggtgcgggtgtccccgaggcagggccgagctgcctgggctgcggggagcccgcgccaaccccctgctctgctgcctgcaggaaggggttcttgaacccaacccagtgcggaact

SEQ ID NO: 399397 - DNA, 122 bp, Homo sapiens
ctcctcccatagctgatctccctctgggggagatgccgcgcttctcagcggtgctggccgcgcatggggtcctacgtcatgtttttgtggaggttaaaccacacccgtccctgccgcactgg

SEQ ID NO: 399398 - DNA, 122 bp, Homo sapiens
gggacatgctgcaggccaccctccggctagaaggagggagtacttgaggaacaaggtctgcgaaaattggctgtgctctgttctaaaacttggaatggcctcagtacctggggaatgtgttt

SEQ ID NO: 399399 - DNA, 122 bp, Homo sapiens
atttaactctgggaagtccaaaataaccttttcgggttcaggtcggcggaaagccccgcccgaaggggctatggctccgcccacgagcgcaaaagacccgccttccgcgtcacgccagccac

SEQ ID NO: 399400 - DNA, 122 bp, Homo sapiens
tatttcctcattgtggtttgaactggtatttctctacttctgggacaatgtcaaggttcgcgagtccctcacagagtcaaggaggctgatccttgggcatttgtccaagtgggttacaaggg

SEQ ID NO: 399401 - DNA, 122 bp, Homo sapiens
ttctagtcctagacccacagcattctaactgtatgaccttggttaatctctatgagctcccgtttcctaccagcctggtagatcattgtgaagactcaacagatgatttagataagagctca

SEQ ID NO: 399402 - DNA, 122 bp, Homo sapiens
ctgtcatcgtcatcgccgccgcaggctggccttccctgaagagctccagatcgcagacaccgtgccgtgcccgccacgcagatgcagtttccactcagccccacagtgcgggcttcctgggc

SEQ ID NO: 399403 - DNA, 122 bp, Homo sapiens
gcctctcccagggcagctggcaggagccaggtgagaacagatgcgtctgtagcaggagggcgttgatgcctctgaggttgtagcgagcttggtatttaccttttcctcctggtccattctga

SEQ ID NO: 399404 - DNA, 122 bp, Homo sapiens
tacaaccctgaaaaccagcctgaattattttgagagacagacagtggctgcaaggagaagcgtcgggattttctgggctggccatctccagtgtcactgaccccggtctacccctgcatgtt

SEQ ID NO: 399405 - DNA, 122 bp, Homo sapiens
ctcagccagggagctgtggatgatgctgatgatggactccaggccgctgccctccagcagcgtgcggtggtcaccctcgatgacgtggacggatactttcccgtcgcatacctgcaggggat

SEQ ID NO: 399406 - DNA, 122 bp, Homo sapiens
gtgcgcaggggaagcgtgactgtgctcaggtaacccacccgggtggagggggcggccctgcgcctgctgccttagctacccaccctggcccagaaagcagcagcccgtaggagtctgcgttt

SEQ ID NO: 399407 - DNA, 122 bp, Homo sapiens
ccatggaccagcagttcagcacccccggtagagcttgctagccctgcagaatctccgccccgtcccagaactactgagtcagaattcccccaatgtgagagccatctaggcctggaaggagg

SEQ ID NO: 399408 - DNA, 122 bp, Homo sapiens
tgagcaaccggctggtggacctggagcgccgctcccaccacccggagtctggctgccggacggtgctgcgcctgcaccgcgccctgcactggctgcagctgttcctggagggcctgcgtacc

SEQ ID NO: 399409 - DNA, 122 bp, Homo sapiens
ttgtagtgaaattctttctccagctccagggtctggtagcgggtgtaggtctggcggcctcgtttgcggtcagttcctgcacacagtattcagaggaaaatcagtgagtaaagaaaacgccg

SEQ ID NO: 399410 - DNA, 122 bp, Homo sapiens
ggtcgagggctttagtgtgcgcatgtgcaaccagagcggcggcgggaagtgttgcgcaggcgcatccgatcgactcggtaggtggggatctcttggagacggcgacccaggcatctggggag

SEQ ID NO: 399411 - DNA, 122 bp, Homo sapiens
ggactacaggcgcgcaccatcacacccggtaagttttcaattttttttgagacggagtctcgctctgtctcccaggctggagtgcggtggcgcgatctccactcactgcaagctccgcctcc

SEQ ID NO: 399412 - DNA, 122 bp, Homo sapiens
tggtggtcggaggcgcggtcatcagccagggatgggttggcctcgtgcgcgtgccctgcgcggtgctgagatcagcccagcacgatgtctagcatgttctgcccgaaacacacgcctcagaa

SEQ ID NO: 399413 - DNA, 122 bp, Homo sapiens
gtgccaggggaccagctcccaggcccacagcagggactgcctgcaatatcaccaaggcaacgaggaccccacctccccagggcctctgacttctcagagctatgcctggtccctgcgggagc

SEQ ID NO: 399414 - DNA, 122 bp, Homo sapiens
gcaatagcaaccagatctgtaataacaggtgtccatcaggcactcccagatggaagataacgccatctggtggagacaacagagcatcactagaaacccaaagccaatcttctgccaaagag

SEQ ID NO: 399415 - DNA, 122 bp, Homo sapiens
caccccgccacacccctgtgttccgggccctgaccctggctcaggtgcccttcctcgtcccgttgccccgggccctgagccccgcccccgccacgcccctgaggcttccaagctccacccgg

SEQ ID NO: 399416 - DNA, 122 bp, Homo sapiens
tagagggcttgccaggtcgctgcatacctgtaggaggatggggtgcgagttgacagccagcgtgtagagcaggcgcagcttgtcacggtcggtgaagtggtccatgaagatgctgccggcgt

SEQ ID NO: 399417 - DNA, 122 bp, Homo sapiens
ggtcaggtcccgcagggcgcaggcgggcgcttctcgcagcccaaacccgggcggggagtgcgggaacccctagaactatgctgggagccccagataagaggaaggagatggtgacttaagtg

SEQ ID NO: 399418 - DNA, 122 bp, Homo sapiens
acgcagtacagcccatagaacttgggcagcagcgtccgcgggttctggttgaggttctgccgggggaagagggcaagtcgtggagggcggctgggccacagactcacgggggcgggcaaagc

SEQ ID NO: 399419 - DNA, 122 bp, Homo sapiens
tcgcgcgtgccggcgctgggctacgtggagctgatgccaggcggaggctccgggctcggacgcctcacatcgcgccgcccgtgccgggccgggcagtgcagggcagggcagggcagggcagg

SEQ ID NO: 399420 - DNA, 122 bp, Homo sapiens
ctcctaagtctcagggagacacgtcagcttgagctctgggcaatttcagcctggcagtctcgcggcccggggaggggcggcgggtgtctgcagacgggctctagggcccagcggccgggcgc

SEQ ID NO: 399421 - DNA, 122 bp, Homo sapiens
tgttttggtcgtaggaggcgcagggcaggttgccgtaggcgtcggcgcccaggccgtagccggacgcaaaggggctctgataaagggggctgttgacattgtataagcccggaacggtcgag

SEQ ID NO: 399422 - DNA, 122 bp, Homo sapiens
aaagtcaaggcgcgcggctctgctgtgacctttgtcctgggaggggtgggtggggtgcgtcgccactcttggcaagagaaaattgcacggcatatcgttcttcccagttaccttttccagtg

SEQ ID NO: 399423 - DNA, 122 bp, Homo sapiens
cacgcgcctctatagcgccctacagcgccgggcacacgcctccatagcgccctacagcaccgggcatgcacagtcagcactcatgacctggcttccaagtacctggcataaaacacacagaa

SEQ ID NO: 399424 - DNA, 122 bp, Homo sapiens
tatagtttaatttcctcaaatatatttatcttagaagttctacatttcataaaagaaaaccgaacacatctttttatgaactgatgtgagcatttggagttacaggaacacttttacatatg

SEQ ID NO: 399425 - DNA, 122 bp, Homo sapiens
ggagtgctcacgtgcatcaagtgcttaggaatccattggaatcttggcacccacctttcccgagtctgatctctggacctggatgactggccagttgagcttatcaagatgatgtcatccat

SEQ ID NO: 399426 - DNA, 122 bp, Homo sapiens
ctggacccagcgaatgcttccctggcggtgcgtggggactcccggagacctccggccacacggcccccgctgcaggcatcaagggcacaccccgcaggggaaggggtttccggcgctaccca

SEQ ID NO: 399427 - DNA, 122 bp, Homo sapiens
aaagtgaagtcaggcccttcttgcatctatttttaactaagtttagcatatgaatgtgaacgtgaagtctttctttagatccccctaactcaattactgacgtatgccaagcatcccgcctg

SEQ ID NO: 399428 - DNA, 122 bp, Homo sapiens
agactgaatattctggccgggaacttgtctttcttctaacatctagcagctgcccctttacgtaacttctgggtatttcaccatgccctgtaggctcccacggcatcacacttctgcaggga

SEQ ID NO: 399429 - DNA, 122 bp, Homo sapiens
cgttccggagtggcccctgcagggcttacaaacagacgcggcggctgcgagagggggacacgatgacttctttctagagcagggacttagagaaccgagtctttatgcatgaatgtacctgc

SEQ ID NO: 399430 - DNA, 122 bp, Homo sapiens
ggttcccactacccgccagagacccggtccatggggccaaacggaggggcctgtgccggtcgacaccccaagccctgtcgcgccccccccgccgcctaccgtatgggaccggcggaggagaa

SEQ ID NO: 399431 - DNA, 122 bp, Homo sapiens
ctcggtgagcgcgccgggggagaggcgagcagagagtggaggaggaggcggcggcgggagcgctacccaggaatgttgctgccgcagccacagccagggccgctgtggttgaggaggagaca

SEQ ID NO: 399432 - DNA, 122 bp, Homo sapiens
tgaaacaagggacccccccacacacaccccatttttattttgcactcagctctacaattccgtgtccagtcctggtcacccatagtcttccaaaatccagcaagaaaaatccttctcagaaa

SEQ ID NO: 399433 - DNA, 122 bp, Homo sapiens
agcttttgtaagagacttaggatctaaaagaggagtactacaggaagaaactagaggaaacgggaatttcatccatgtcctgtgtatctgctggcaacaggtcagaacggccagtatgttat

SEQ ID NO: 399434 - DNA, 122 bp, Homo sapiens
agggccactagggaggtgcgcactgcgagctccacgtgcacccttgggttgggtaagtgtcggagatgacttggagccctaaggagcaattaaggccaggtgagtggatgcaggccgggaag

SEQ ID NO: 399435 - DNA, 122 bp, Homo sapiens
tagttgtgggcgctgcgacgtgctttgcgtctgatatgattggccgtaggcactcagtcccgcctccataccctgatagcgctctggtattggtggagatgccagggagacctcggtgggca

SEQ ID NO: 399436 - DNA, 122 bp, Homo sapiens
ccaggtccaaggtcccagcgaggggctgtgggtagcacctgtcagtcacaccccacacagcgagcggattatttgaggattccgatcacctctcctgtcgctcaagccccaggggcgggacc

SEQ ID NO: 399437 - DNA, 122 bp, Homo sapiens
tgggcgcgagcttctcctgggagctgtggcagagcgctctctgctgctcaccccatgctccgcaggcctgcaggagcgaacacagaacaccccaaacgcccgtgagagggcaggtcccggtc

SEQ ID NO: 399438 - DNA, 122 bp, Homo sapiens
gtgaagattcctagtgagcccaggctgtcagcttgtttactaccaaatgttaaaaagaaacgtttgagtttgattaggtaaaatacaaaggacaaataataatatctttaatatacaattat

SEQ ID NO: 399439 - DNA, 122 bp, Homo sapiens
cctgtccctcctctcccaggtcttgcactgggccctgacactcagccctgcagccttcagcgtctgggaagtcccttcgaggagcagcaccccagactctgatgttctggacttcactttgc

SEQ ID NO: 399440 - DNA, 122 bp, Homo sapiens
ccaaaaggagccagacttttagggaggaaattgaattctcagtcagtatgctgggtggggcggtgatctaacacacttgggcctagagatctaaaaaatgcagaaacaccaaggctaaggga

SEQ ID NO: 399441 - DNA, 122 bp, Homo sapiens
tatgatgaaaaaatgtatgatgctgctaagttgttgtacaataatgtttccaattttggacgtttggcatctaccctggttcacctgggtgaatatcaggcagctgttgatggggctaggaa

SEQ ID NO: 399442 - DNA, 122 bp, Homo sapiens
aagaaagactgaagattcctacttaataatcaaatccccttggttgaccttgctatcccccgtgaaacttttccagccatgtcagtccttgtttgttgatctcctcactttatttctattac

SEQ ID NO: 399443 - DNA, 122 bp, Homo sapiens
ttatttggtttcatcattcagagcaatgactgagtagccagaccagccccctttttcttccggatcctttgaagaactttccagtgtttttccttgcagtaggtttatttttactgattgca

SEQ ID NO: 399444 - DNA, 122 bp, Homo sapiens
cccaggaagccttttcgtccttgctatagtcaattcattctccagatgaaagcctgaaagcgccacgacccaagtttcacgtctatccactcaagaggcctgcttggcgcaggcgcatacct

SEQ ID NO: 399445 - DNA, 122 bp, Homo sapiens
agacgcggggcctgaggctcctggacttgaggtattaggctggtgcagaagtaattgcggcggccgggtgcgggggctcaggcctgcaatcccagcactttgggaggccgaggcgggcggat

SEQ ID NO: 399446 - DNA, 122 bp, Homo sapiens
ggaggatgaggaggacaaggaggaagatgaggaggaagatgtccccggccaggccaaggacgagctgtagagaggcctgcctccagggctggactgaggcctgagcgctcctgccgcagagc

SEQ ID NO: 399447 - DNA, 122 bp, Homo sapiens
tttgtccacgatgttgctccttaaccttaagttacttgcaagaggagcctgtggccctcgcgactgttaagtgcacgctcagcctcaccctgctggggaaacgacggttcctcgtaaccgca

SEQ ID NO: 399448 - DNA, 122 bp, Homo sapiens
atcctcacagactttctgtgttctcagagacgatcttcttccctagaaagaagtcgcttacggttggcgtttccctcaggcagcgccgtgggcagcccacaggcccttgtaaggcgcgcgcc

SEQ ID NO: 399449 - DNA, 122 bp, Homo sapiens
ccatccactttcgggcattccaggtactcaggccaggctacggggcaggcaggagtttcgcgttctggttttgatatgaattagttttcgtgtctctccaaagtccttcaccctaggagtag

SEQ ID NO: 399450 - DNA, 122 bp, Homo sapiens
agaagtggtccggagtgggcggcgttagggcggtgctttctggccacgtggtctggcggccgattgtgcttctgggctccgcggggctacctgccagtgattttgtgcgcctagtatgtgcc

SEQ ID NO: 399451 - DNA, 122 bp, Homo sapiens
gaaaagctgcttcaagccagccaacgttccaagtctcgcagaagcgtgtgaaaatccccacgctcagtcgccctctccctgcacacgccccgagtccgcgtctccctcctgtgtgaatgcag

SEQ ID NO: 399452 - DNA, 122 bp, Homo sapiens
gggaggccggattcctggggcatcctccagccccgggctgttcccgtgggttaattgatgcggaccttttctggggcagcttacagtagggaacaactagggcctcttggagaacaggtgta

SEQ ID NO: 399453 - DNA, 122 bp, Homo sapiens
agttcaaagtcttcttctgtctaatccttcacccctattctcgccttccactccacctcccgctcagtcagactgcgctactttgaaccggaccaaaccaaaccaaaccaaaccaaaccaaa

SEQ ID NO: 399454 - DNA, 122 bp, Homo sapiens
tcactcctgaagccagcgagaccacgaacccaccgggaggagcgaacaactccagacatgcgcggccttaagagctgtaacactcaccgggaagctctgcagcttcactcctgagccagcga

SEQ ID NO: 399455 - DNA, 122 bp, Homo sapiens
taggggcaagctcttgtggtgccttcagctaagggaccctcagtttctatgcaaagggagcgtgttggctatagagaagggactgctgattggctcactgaatgtgggaatgacacgttctc

SEQ ID NO: 399456 - DNA, 122 bp, Homo sapiens
ccctgagttctggtttgaattagtcaccggctccaaccaccacattcctcaggctgctggcgccgggccaggctctggggcgggggccatcccgcccggacgggtttgggagttgggcgggg

SEQ ID NO: 399457 - DNA, 122 bp, Homo sapiens
ggctgcggtgagatacctgggttcctgaagggcgggtggttaggtcgtaactactgcccccgccggctgactctccgagcggccgggctcggaagccacgagccagctgaggcgttctccgc

SEQ ID NO: 399458 - DNA, 122 bp, Homo sapiens
atacctctttgttgattttattgctttccgccactcggtcggctggggaggggcgctggacgggaggtgccgggatcggctgcatggcgataagctggatcttactggggacccgccggcta

SEQ ID NO: 399459 - DNA, 122 bp, Homo sapiens
cgcgtacctgccgctgccgccgagggcagcgccctctgtgttccctgccttcctacgggccgacgcctggcatagttgaggtttcgctccaactctgtcctgcccctgatgtcacaggcaca

SEQ ID NO: 399460 - DNA, 122 bp, Homo sapiens
gcctgtcagcctttcggggtccacaggccctcactgtgaaccccttctagagtggaagctcggggagggcgagaggccgccttcctttccctcggctcctcctgcacccagcgagggctcgg

SEQ ID NO: 399461 - DNA, 122 bp, Homo sapiens
accctgaccaggctgcagagagacagagaaacgccctgaatctcccgtccgctagcccttcggtttatcttcactgactccctgggtggaggccagccagaagccaggagcaaggggacctg

SEQ ID NO: 399462 - DNA, 122 bp, Homo sapiens
acttcgcggtgaggcgtggggtggggcggggcgggcctctgttttggcccgccgggccctcgtagggcgaggggagctctgggaacggggcctgtgcgcacgcgcatctgacggttgtctcg

SEQ ID NO: 399463 - DNA, 122 bp, Homo sapiens
atatttttcaaatgagtgaatggtgactaagacacgcatttggaaccagacagacccaggcgtgaatactgttatgccaaccatgaccatgcagcctctctgtgactaatttcctcactggg

SEQ ID NO: 399464 - DNA, 122 bp, Homo sapiens
gggactggtgctggccattggctgcctcaaggctcccaccccgcctgcctccctagcctgcggctggcggcccctgcctctccagctgcctctgaactccctggagcaagcacctcctgctg

SEQ ID NO: 399465 - DNA, 122 bp, Homo sapiens
aaaaacaaaaaactacaaagtgactcggctgactttggagactgttcagagaagctgcctcgggctgtgcgggatgctctggggtgggaggggcagaacggcatggcccggaaacctctgaa

SEQ ID NO: 399466 - DNA, 122 bp, Homo sapiens
ctgaatgcaattcagcatgtattcaccatgctctgttagtggtgtccagatgttgcatgacgggggagcacactcacattgtgtctgtgtgactcatgtccctggagttatgcagcgcacag

SEQ ID NO: 399467 - DNA, 122 bp, Homo sapiens
tctaaaaaaagaataggaaaggaaaaaccctgaagtcagatgaaaagcggcctccacgtgcgtaaccttcagcactccgctcacctggagagcctctacccacaatgcactaagtggatgat

SEQ ID NO: 399468 - DNA, 122 bp, Homo sapiens
aatgctagagaaggggaaagaagcctagaaagagtaatggagggaagagaccgtgagtagcggttactgccttgggaacaactgcagcattagaaactgtagttattctcactaaccctttt

SEQ ID NO: 399469 - DNA, 122 bp, Homo sapiens
gggttctgcgtctgtgaccggggtgcggagcactggtgtgcagttctctgtctcgtgattcgtgtaacagtgagtgctgcctgcaccaacagccggctgccttccgtggctgtgtgggctcc

SEQ ID NO: 399470 - DNA, 122 bp, Homo sapiens
tgctgtgacaggcaagggcactgcctggggaagtcagctcggtgagtctgtgtgagcgttcgttcactgggagggaggacaggatggccttgagcagggccgtcccaaccctctcaccccac

SEQ ID NO: 399471 - DNA, 122 bp, Homo sapiens
agtatcatcccaagctgcaacacgagcagccccggggaggctcccaccgccctgcagggccgcgccctacgccggccgccgaactccagcccacccgcagggaagctactccgagaacgcag

SEQ ID NO: 399472 - DNA, 122 bp, Homo sapiens
aattcatactagggtgtgaacaactcactccctgttagctgttagggatctctgttcccccgctagggggaaccctggcagggcctgcctggagtgcccacaccactctcccttacccttcg

SEQ ID NO: 399473 - DNA, 122 bp, Homo sapiens
gactggattcttgtttcgcttgtgatatcactttttccagtcactgatttggaatatttgcgttttttaacttctctttgtcagatctcaggctgcctgggaggttgagggtaggggtagaa

SEQ ID NO: 399474 - DNA, 122 bp, Homo sapiens
atttactgctgcgaacattcttgcacacatgccctggtacgtgtgtgtgtttttaggggccgagacaggtggatcacctgaggtcaggagttcgaggtcagcccggcctacatggtgaaacc

SEQ ID NO: 399475 - DNA, 122 bp, Homo sapiens
tatcttattgcagtgtactcatctattttcagactgctattgaacgtgggtaactgaaaccgtggaaagcaaaaccacacagataagggaggactattgtatgaaagacagaaacccaacta

SEQ ID NO: 399476 - DNA, 122 bp, Homo sapiens
caggcggctgcaggggccaagggcggccatcagactaggagcccgggacccctcagaggccgcaggcgctattcggtggtcaagcggtcaagggcagcctacccccactgcccaagataggc

SEQ ID NO: 399477 - DNA, 122 bp, Homo sapiens
caagggatattatgaaatattgctggacccagcacctagtgatatgactctctgcttttgcgtgggcactgcatacatgtgtaatatatagctaggttaaacacctgggtgatgtgactttc

SEQ ID NO: 399478 - DNA, 122 bp, Homo sapiens
acacagctaacaaagcatagagtgtgtgacctcaataaggcattcaacaaagacacacgccgtatttccctctgactgcgttcccttaggatgctctgatgttggcgtcgcattcttctaaa

SEQ ID NO: 399479 - DNA, 122 bp, Homo sapiens
ggcgggacgtatgtgtcatggcgctctccatctaaagtctgtgcagcttccggagagtggcgggttgattttctcactttggactggtttttacttcccgacttctgggtaagggtggccga

SEQ ID NO: 399480 - DNA, 122 bp, Homo sapiens
gttttgttttatggagattggctagactggcaggtgacaaggcaagaggtgggctggccacgagagccagctgagcagtgcgagttggtgtgattcagccatttgtcaccaccatattctgc

SEQ ID NO: 399481 - DNA, 122 bp, Homo sapiens
ggaatacagacccaggggaggcaggaaaatttaggtaaaaggaagcacaaaagttgaagacgaggcgctgccatcaaggctgtggggtttcaggccaagaacaggagctgaggaagccacaa

SEQ ID NO: 399482 - DNA, 122 bp, Homo sapiens
tgaagtgaaatgttattacatttaaagacccagcaaactaggctgccagaataacacctgcgtcagacatttctaagtaaagaaagagaaggagaaggagatattggtgtgtggatgaattc

SEQ ID NO: 399483 - DNA, 122 bp, Homo sapiens
aggacctggtggggcagcgggaacttgaccttagagtcgtggaactgcttgacggacggccggcggcacttgccggctgcgatctcctccaccttcatgatctggatggagtgggcctgggc

SEQ ID NO: 399484 - DNA, 122 bp, Homo sapiens
atctatgccacgacctgggaccgggcataatttcggagccagaaagtactcctgtggtggcgccgggtttctcaggcgctcttccagctaagggccaggagcccagcgatttccctacagtt

SEQ ID NO: 399485 - DNA, 122 bp, Homo sapiens
atttggagattctgagattttgcttcgtgacactcgtattaggatatatggactctcgtgcgtgtgtgtcgccatttatactgtggttcccatcacgggtcaaaaacaagcattttctgttt

SEQ ID NO: 399486 - DNA, 122 bp, Homo sapiens
ctcctcttcctcccctcccgactctctgctcctttcccgccccagaagttcaagggcccccggcctcctgcgctcctgccgccgggaccctcgacctcctcagagcagccggctgccgcccc

SEQ ID NO: 399487 - DNA, 122 bp, Homo sapiens
acctaaacatctcatccatttttttcccctctaatctgcagaaccgcaaccagagaggtgcgcgggtctgatgtgtgtttggggaaggggtggggaggggagagagtccctttcagtgccca

SEQ ID NO: 399488 - DNA, 122 bp, Homo sapiens
agggagcgggaagttgtgcttttgagccgtggctgcgtcactcttgagtgctgtcacactcggggctggggctggggacacctgagctctcatcctggtccccacttggccttggtcatccc

SEQ ID NO: 399489 - DNA, 122 bp, Homo sapiens
gacccgcgcagcagccccgcctgccctgccgtgagagggaagtagaccgcgcttggtttccgcaggttagagtctcagatgcattgttacagctgcacaaactaccctaccccgacagtgcg

SEQ ID NO: 399490 - DNA, 122 bp, Homo sapiens
ctggaccagccacagcctggctgtctgggccggtctgctggcttgggaataaaataatgccggggcgtccccagtagagaagctcaacaatgcaggtatgtgtcctcaacttatctagacat

SEQ ID NO: 399491 - DNA, 122 bp, Homo sapiens
acctctctctaatttggaatgttatatttgagaagatggccactgtgaataagtgacaaacggaatgacagtgtctatttaatgaaatgcatgtcttcaaaatatatacagaactcgatgaa

SEQ ID NO: 399492 - DNA, 122 bp, Homo sapiens
gcccatcattagctaccttattgcctcatatcatagtaagggttctttgtgtgtgtgtgtcgggggttccttagcccagcattgaataccatgctttacattggaggcagagtagagggatg

SEQ ID NO: 399493 - DNA, 122 bp, Homo sapiens
ctgcacgtgggtgtctgcacgtgggtgtctgcatgtgggtgtctgtgccctcaagtgtctcgtgtctgcacgtgggtgtctgcaccctcacgtgtctcgtgtccgcacaagcatgtgtaggt

SEQ ID NO: 399494 - DNA, 122 bp, Homo sapiens
tggattcttgcggtaagtgcatacaggcttgcagtgcgtttctcccacgttttaacctttcgcttgttctctcctcctcccaccactcttcccagtaaatgacaccttcaaaaccacacgca

SEQ ID NO: 399495 - DNA, 122 bp, Homo sapiens
atccccgattccgcattttcccggagcctaaggagcggggctgggggcccggccgggtgccgcagacctgcgtgagcgcgggggcggggcggtgacgtcatagccgcgagcgaggctgcgcg

SEQ ID NO: 399496 - DNA, 122 bp, Homo sapiens
ctgggggcagcagcggcggcggggcgcgggcagcggcgagtcctaggcgctcgggtctgccgccctctttatacggtggccctgaccgcagccggcagccgagccagctcctacgtggagca

SEQ ID NO: 399497 - DNA, 122 bp, Homo sapiens
gaggaaacgcattgataggcgattatttatttatttatgcaaaagtgagccgactttgttcgccaggtaaccgggcacgcggcccaacccctccagccctagccgcccccaaatccctcctc

SEQ ID NO: 399498 - DNA, 122 bp, Homo sapiens
ctgctgggggtctgcagggcgtctggggcctgggaatgtggttccagcgctgtggccagccggtcacgtctttgtctctgtgtccacttctggcgtagcttgggctccttgccaggcgtctg

SEQ ID NO: 399499 - DNA, 122 bp, Homo sapiens
caaagcccagcatcccacaaggacggacactcactacagcccggtgcctgcggagtattccgaacgcgagatccaaggaaaccacgaaggctcctctgcgggctcccttgcccctctgcggt

SEQ ID NO: 399500 - DNA, 122 bp, Homo sapiens
ttctgtgctaaatacaaaaagccctgtgatgttttgctttgcgtgtccacctatctgactcgtaagaaccgaggctgaatccagacccacactctgtcacgtcgggagagcctgccgcggcg

SEQ ID NO: 399501 - DNA, 122 bp, Homo sapiens
gatttctcaaggttggggcatgaaggagagacagttagagcgtatagggggcgatgcagtcgatggtatctgtagcacagtacccagaagacccgggagctaggaccaaaccaggagtcagc

SEQ ID NO: 399502 - DNA, 122 bp, Homo sapiens
caccttacaccgcagctgtccagagactggcaggccttggcctaaagtctggagggtgagcgacctgcaagactcacaagaggggaagccaacagagatacctacaaacggagtgctgtgcc

SEQ ID NO: 399503 - DNA, 122 bp, Homo sapiens
agagcaatcagtagagctaaacaaaatgctagggaagcaattaatcatgactatgagattcggttaagtgaaagcttagaggaggtaacacttcagctagcttgaaaacagattttgaaaga

SEQ ID NO: 399504 - DNA, 122 bp, Homo sapiens
cgcctccgagggggaggagttctgcatctacaaccgcaaccccaacgcctgcagctatggcgtggccgtgggcgtgctcgccttcctcacctgcctgctgtacctggccctggacgtgtact

SEQ ID NO: 399505 - DNA, 122 bp, Homo sapiens
tttgtaaaccaaagcttctaaatgctgtaaatgctgcagacaccaggttcatgtgaaaagcgtatctgccatggaaaaaaatacacgcacgagaaaatggagcaaggtcacatgaatctact

SEQ ID NO: 399506 - DNA, 122 bp, Homo sapiens
cccccagaagtctagcatttctagctaaaactctgcgagcttttaaggggaactccggggcgagtgtcttggcgaagctgccgtgtttattggtgtctgtatatagagcccggccgagcccc

SEQ ID NO: 399507 - DNA, 122 bp, Homo sapiens
ggaaggaagaaatgaaggaaggaagggagggagggagggaaaagaaagatgatgctaaaccgtggggaggctgtgggatgtgacatgtcccagagtccacagagattcccagaaacaaatgc

SEQ ID NO: 399508 - DNA, 122 bp, Homo sapiens
ccctttcctcctccctgcccacgccccccagctcctcccctttcctagcgaagctcgctccggcaatcaaactccctggagagctgtagttcccatcgggtgggttaccccaactcagctac

SEQ ID NO: 399509 - DNA, 122 bp, Homo sapiens
tttccaaagtgatggctctgttgtctggaatgtctcacagccaggacatttttctcaacacgtcagctctatataatgaaagcaataagaagaaaatcagatgtgcacagagcttttctctc

SEQ ID NO: 399510 - DNA, 122 bp, Homo sapiens
agttagcttaaggcttttcattttttggtctctattttcaccttaggttttttttgctgtcgtttttattttccctaggtgccagtgcccaactcattctcatacttactcccaaggtaata

SEQ ID NO: 399511 - DNA, 122 bp, Homo sapiens
cgagccgcggcgctgcccgccggctccccgctcctggcccgcgagcgcccgacctcagggcgcaggcgtaggtgcatccggctttcccgccacgtgacctctcagttgctgacactagatag

SEQ ID NO: 399512 - DNA, 122 bp, Homo sapiens
atgatacatgggtgtcatctttattatttatagattattctattactctccgaacctctccgcaggttgaaatacttcacaattttgaaatgaaaattagaaaaaaaattctaagccataat

SEQ ID NO: 399513 - DNA, 122 bp, Homo sapiens
tgtttttaaacgcttgagtaaagattcacacaaagctggaaaaaaagcttttttgttttacgcagctatgaccactgctgcagtactaggattatgaatcacagtaggctgtccttttaaga

SEQ ID NO: 399514 - DNA, 122 bp, Homo sapiens
gaagcagcttcaggtccccgtgctggatctcgtacagctgaatgacgccggtgccccgtgcgaagttgcccatggtcacaaatttggcgctgcagggcacccacttacagtcaaacaccgtg

SEQ ID NO: 399515 - DNA, 122 bp, Homo sapiens
tttcctgatccacatttcatttgtggttgtcatcctattataaaagttgaatcctcaggccgggcgcggtggcttacgcctgtaatcccagcactttgggaggccgaggcgggcggatcacg

SEQ ID NO: 399516 - DNA, 122 bp, Homo sapiens
gaggagcaacttggttcgtaactccctgtgcgtgttttgcgactcttgtccagaaggtagcgccacagcctggaaaccaacatttctaaattcattctgggattcccatcaaggacttgttg

SEQ ID NO: 399517 - DNA, 122 bp, Homo sapiens
gggagaagacagagtgtccacccctggaactccgaggttatcagggagactgaaagtggacgaagacagaaggcaggatcaacggtccttatcaggaaggtctcaggtgctagttattgctt

SEQ ID NO: 399518 - DNA, 122 bp, Homo sapiens
atttaactctaagtagacaccctctctcctaagaatcttaatgttgtaagagaaagaagacggggttgcagaactgagttgctgccaatgcaacatcatagagaatatactgttggagactt

SEQ ID NO: 399519 - DNA, 122 bp, Homo sapiens
tttacatttttgtgcattcattttgttttattctgtgtcaaaaaaccaacctagaaatttcgtttaggtcctggtcaaatggaaagattaccaggaagttgtgtgtcaaaagaacactggga

SEQ ID NO: 399520 - DNA, 122 bp, Homo sapiens
ggggaggggggtcaaggtggcaagcagagctgggggcccagagtccgctcccgtgccgcgcggcgagtcgcttacatgcccaggtcgctgtaggtgttgaagaactccatctgattgcacgc

SEQ ID NO: 399521 - DNA, 122 bp, Homo sapiens
gggcgggggtgacagctgagttggtgttccccttcattcgtttagttcagcgcgttgaagcgctcactgtgtcctaggcagacaccgtgctgtgcgcggggatcacagttatctagttcctc

SEQ ID NO: 399522 - DNA, 122 bp, Homo sapiens
gactggtgcttcacctaatgccaactgaaacttcagctcgctggctccacccagtggtggcgaataagcacagcaacctcattaacaatgagacagatttcttgcctcatttgatgctcaat

SEQ ID NO: 399523 - DNA, 122 bp, Homo sapiens
gcctcttcgtggaggaggtggccgcctccttggtcagggagttcctcagcagaaaggtaacggctcgccccctccaaagcccaggaagtggctctaatttggggggatcatcggggtctccc

SEQ ID NO: 399524 - DNA, 122 bp, Homo sapiens
tcaggctcacgagaacagatccttcatcaccttccttctcctccagaaaccccagtttctcgtagggcttgaaaagggctgtctactgaactccactttcatcagcgcctaaagcccttagg

SEQ ID NO: 399525 - DNA, 122 bp, Homo sapiens
tattgtgtagagcaagagaacaaagctcccacagcgtggaagcagactctggtggggtgccgcgctcgccagcttttattcccttattgtccccgcccatgtcctgctgattggtccatttt

SEQ ID NO: 399526 - DNA, 122 bp, Homo sapiens
ctgcctcatgggtagacgccgactccaccccctgaacatccggggccttttaaccgcccacggacggacggctggtacttacatgtgcacatgtgcagctactttacttaccgtcgaaggca

SEQ ID NO: 399527 - DNA, 122 bp, Homo sapiens
ggtgaccctgccctggcgcttctgccaggtcctcggccagagtccagtcgccaggttcagcgacgcttctggaaagtatgcgatccagggcgctgatgtgcactaccctgtggggcaccgaa

SEQ ID NO: 399528 - DNA, 122 bp, Homo sapiens
attttatttttttttagtagagatgaatcttgctatgtgcccaggttggtcttgaactcccgacctcaagtgaccttcttgcctcggcctcccaaagtgcggggattacaggtgtgagccac

SEQ ID NO: 399529 - DNA, 122 bp, Homo sapiens
ccctttctcttccaggcatctgtcccttgcatcccaacgggagcgcggtcccctgggaggcgtccctcagcagccccgggaagttctgtccctgctcccgagtgtgcccagagtcctgccgt

SEQ ID NO: 399530 - DNA, 122 bp, Homo sapiens
gcatctcacgcctgtaatcccagcactctgggaagcagacgtgggtggatcacttgacctcgggagtttgagaccagcctggacaacatggcaaaatcccatctctacaaaaaatacaaaaa

SEQ ID NO: 399531 - DNA, 122 bp, Homo sapiens
acgcaggacggcctgtggacagggtcctctctctgtgtcctaagtgcagacggccagccacggaaaggtgcgcatgcaggagggcctgtggacggggtcctatctctgtgggaatcacacac

SEQ ID NO: 399532 - DNA, 122 bp, Homo sapiens
cagacatggtttacttccacagtcacacaatttaccaaatgaaaagttccatagaaggagcgctccacctactcttgtaaatagcatcatgaaaatagaaccagagcccgggcgcggtggct

SEQ ID NO: 399533 - DNA, 122 bp, Homo sapiens
agaaggaagtggccgcctttgttagcttgggttcagaagcttgtgtctgtcacccagggccgcccagccccggggtttgcgaaggtccggggtaggagggctgcagcctgcgcgacgcggcg

SEQ ID NO: 399534 - DNA, 122 bp, Homo sapiens
tggccttatgatggctctcagttttcttaggcagcagcaccgcctgaatattaggcaaaacgccaccctgcgcgatggtcacacgccccaagagtttattaagctcctcgtcattgcggatg

SEQ ID NO: 399535 - DNA, 122 bp, Homo sapiens
tggcatggccgtgtgtgtggcccagggagcgggttttcctgtagaaagcaggcccaagtacgtgttggcgagggcgcaccggcatgcatacatgttgcagtgtgcatgcaggtgtgagcagg

SEQ ID NO: 399536 - DNA, 122 bp, Homo sapiens
ggattcgtctgcgcatgctcaagattcaggcggagcgccgggctgcagtgcgcggaggcccgctcccgggactcattgatgcgcatgcgcagggcttcagcctgcacgtactcggattgtgc

SEQ ID NO: 399537 - DNA, 122 bp, Homo sapiens
gtagccgcggacctcggtgagtacaaggtggtggggggtcgccagcaggttccctctccccggccccagctctggacgctcaccccagtgcaacgccctgagtgacggaaagaggtaggacc

SEQ ID NO: 399538 - DNA, 122 bp, Homo sapiens
caagcatacagacaagcacacacagattctatttcagatgcctgccttctagtcacttatcgtagagagaggatttatttctttgaatttgttgttttagaattgcatacaacttcttaagg

SEQ ID NO: 399539 - DNA, 122 bp, Homo sapiens
acaaaaataatctgagactccctgaaggatgagaacgggctgagcggggccacaggagcccgcaccgggtccgcggaaggaactcacactcctgcttcaaggtgtggaaggcgacccaagag

SEQ ID NO: 399540 - DNA, 122 bp, Homo sapiens
cattccaagcaggaattgccaggcacagtgctgtgtgggccatggttcctagggccatggcggcctcctgagttgccaccgtcatcccccgagatacctgctttcatgatttatgctttcat

SEQ ID NO: 399541 - DNA, 122 bp, Homo sapiens
ctagcccagagaggggaaggaactttcctaagggcacacggccgatgagtggcagacgcgcggctaaagcccagatctccagaggggacctggggtgaacagcagcctctgtctccccttat

SEQ ID NO: 399542 - DNA, 122 bp, Homo sapiens
atgacagttttgccattccagattgccaaaagagccagtggccagtctagggcaccgcgccgtctggcatctccctggaggccctgggcctggcccgaggctcagcccggatctgcagttgc

SEQ ID NO: 399543 - DNA, 122 bp, Homo sapiens
tcgccctcactgtcttctctctccacggtgcctgtttatgcttcattgttggacacggagcgacttccaggcctggggtgttatctccatcaggggaggattgcctgctgattccgtcaggc

SEQ ID NO: 399544 - DNA, 122 bp, Homo sapiens
cccccaagtcccagaccttggggactgagcatgtgaaatcatcctctttcttgcatcatgcgtgtccacattgcacccccccacccccatacccctacttcaggcccagtcaccatggccag

SEQ ID NO: 399545 - DNA, 122 bp, Homo sapiens
gttcctagacaccattaaggaaataattgagaagaaagggtatctgcctgaacagcttttcggtgcatatgcaagttccctattctggaaaaataaatgccacaaaggacatttattagtaa

SEQ ID NO: 399546 - DNA, 122 bp, Homo sapiens
tggagcgaggcggcaggtcatccccgtgcagcgcccgggtatttgcataatttatgctcgcgggaggccgccatcgcccctcccccaacccggagtgtgcccgtaattaccgccggccaatc

SEQ ID NO: 399547 - DNA, 122 bp, Homo sapiens
tggggtgtccaccttatcctgcgcagcatttatcggagtgggggtgtccaccttatcccgcgtggtgtttatcggagtgggggggtccaccgtatcctgcgtggtgtttatcggagtggggt

SEQ ID NO: 399548 - DNA, 122 bp, Homo sapiens
tggagcccaaggcggttcaaatgcgcagcccctttgggatcttcgtcaagaaaaggcagtcgttgacggagaaaagacggggatgcgccttggccctttctccacgggaatgctctctgggc

SEQ ID NO: 399549 - DNA, 122 bp, Homo sapiens
tttgcacgaaaactgaaccccaaacgatgcttcttggtgcgaccaggagaccagcaaccccgtcccctggaggccctgaacggaggcttcaatctttctcgtattcttcgtaccgccctgcc

SEQ ID NO: 399550 - DNA, 122 bp, Homo sapiens
gaagcagactcttgacctgtgaagctggcggcggcactgctctgaggccagtcacacgagcgacaggcacccagcagccaagccaccgggctgcggtaagggcaggtgcaacactgaggtcc

SEQ ID NO: 399551 - DNA, 122 bp, Homo sapiens
gcccgcgaacacatacatacaagcaggcgcgcccaaacgccggcagcacacaggcgcgcacgcgcttttcaggactcaggaaatgcgctttctgctccccgcgcccggtagagctaatgcag

SEQ ID NO: 399552 - DNA, 122 bp, Homo sapiens
tccagggcagaagaatctcagctggcactaaaagaagttacgtggctcccaaccacatggcggcagtcttcgtggtcacaaagagaatggggctgtcctcttttcctccactcttttctagg

SEQ ID NO: 399553 - DNA, 122 bp, Homo sapiens
tgtgagcaatctaactaatgcattgcccttctcagagggtgtttgcattttaaaagaaaacgcttaggggtggtaatatataacccagaggaatcaagcccaatactcagcgtggtgcctgg

SEQ ID NO: 399554 - DNA, 122 bp, Homo sapiens
aaagagaaggttgatggacaggccaagaattcatggtacgggggctgtaccatgaggacccgggagaaaatccaggaggaatgagccatgaggctaggtaaggtggtattatctcatgttgg

SEQ ID NO: 399555 - DNA, 122 bp, Homo sapiens
aaattgaggttggggggacaggagaccgagaatcaggcaagaggccaatggaaatggccacgtgggtgggcttggcctcaaaaaggggcgtctcgttttcactctccccgggcgccccattt

SEQ ID NO: 399556 - DNA, 122 bp, Homo sapiens
gtggaaacggattggacatcctagtgcaaagagatgtggcagtgcaggtctgcagcttaacggagcctgggcaggaggtggctgatgtgggtttcatctgcatagagattccggctgacgcc

SEQ ID NO: 399557 - DNA, 122 bp, Homo sapiens
tctgctgttgagaaaaaagctgagttgccacatactaagctttaatactgttaggaataacgctcaaaaccctaaggaaattgaacacttgaacaaaagattcttagcaaagcaattttact

SEQ ID NO: 399558 - DNA, 122 bp, Homo sapiens
aaacagtggccctctcctagggtacagtagtctgtctcccactaggagactcctaggatacggtaagatacctcctaggatggactgtgcccctctcctaggatacggtacactgtctccta

SEQ ID NO: 399559 - DNA, 122 bp, Homo sapiens
gcttgaaaataaagtgagaaaaacaccgaccaacatttactcagcacctacggtgggctgcggacgttgacacagggtcctctctaatcttccatacagatcagccatgagggccgcggaga

SEQ ID NO: 399560 - DNA, 122 bp, Homo sapiens
tttgtttgtttgagatggggcctcaccatgttgcccaggctggtctcaaactcctgggctcgagcaatcctcttgccttggcgtcctgttgcattttgaaggagggatatcggatacttgca

SEQ ID NO: 399561 - DNA, 122 bp, Homo sapiens
ccccacgccctccacccgcggcgcggagacaccaggagccacgcagaggctctgcccccacgccctccacccacggcgcggagacaccaggagccacgcagaggctctgcccccacgccctc

SEQ ID NO: 399562 - DNA, 122 bp, Homo sapiens
ttactgttgagggagataatgcttgccaagctccccagcacactgccacccacatcagtgcgcacctgagtatcagcggttttaggattacgatgactattactatcgtaaattactcccag

SEQ ID NO: 399563 - DNA, 122 bp, Homo sapiens
gagtatgaagcttccacttccggagtaaccggaagttcctgtgttctttattctactctccgctgaagtccacacagtttaaattaaagttcccggatttttgtgggcgcctgccccgcccc

SEQ ID NO: 399564 - DNA, 122 bp, Homo sapiens
caagcctcgccctcttttcacaggcctgcccccttttctgtgccttaaatgagaggaaatcgatctgatgtttactgctgattgtgatgtttcagcctccattgggcttttgctaacaccta

SEQ ID NO: 399565 - DNA, 122 bp, Homo sapiens
tcttgcccagggagggagcgtagggggcagaccctctacgtgtgacatgcaatcagctcacggcgattcacacgtggtcctggggcctgaacggcttggtcaccaccggcttctggtccgac

SEQ ID NO: 399566 - DNA, 122 bp, Homo sapiens
tgtgtgttgtgtggtctgaaaacaaagagcaggcatcaccttctggaggtgaggctggcccgggactcagatggctctaactctgcgggtcgcctgcccagaggctgcacttcagccggcgg

SEQ ID NO: 399567 - DNA, 122 bp, Homo sapiens
tatcccgtgacgcggagaccaaaatcaaactgccactgggtgtgaagctcagatctctcacgacatcttggtggccggaaagattcaaaagcaggagccctggcatgggagcaggggcactg

SEQ ID NO: 399568 - DNA, 122 bp, Homo sapiens
tctatatggtcccagccaggactatgtagccatttaggagggagaactctatgttcttcccggcaaaaacgtgtgggcctggccggccacgcttcgctttggaggggtgcaggtgacttgtg

SEQ ID NO: 399569 - DNA, 122 bp, Homo sapiens
acaagagtgggcaaggggagtgggcacgagctctttcaccctagggagttccaatgctcccgactaggtccagaaaggtagctgcacccaggctgagggtattatagacaccaggcatccca

SEQ ID NO: 399570 - DNA, 122 bp, Homo sapiens
caaagagatgtgccttgctctgactgtacagccgaatttcagacacttccatctgagcctcgagtctcagcattctccattgcaccatgctgtgggcacctgtggaaatgcctcctgacctg

SEQ ID NO: 399571 - DNA, 122 bp, Homo sapiens
caggaccaggcggtccagcgaaggagtcgactccagcgaaggtgagcgccacctcccccacgcagacacttccgtctgccccgggcctggccacggccgtcctgggctccagctgcagggac

SEQ ID NO: 399572 - DNA, 122 bp, Homo sapiens
aggcagccgagtgaggctcatcgcagcatgtcatgcaagggctggcaccaccgccttcagcggtctctgaggactgcactctgttcagtggtgacacgctggggcagagacaccacgccaag

SEQ ID NO: 399573 - DNA, 122 bp, Homo sapiens
cagcccccagagggccggagccgagatggcctgctgactgtgaacctacgggaaggcggccgcctgcacctctgtgcggagaccaaggatgatgccctgtgagtcactcccaggagaggatg

SEQ ID NO: 399574 - DNA, 122 bp, Homo sapiens
atgaaatgacagaaaaagaagagacgggagcgcaaaagaaaacttgccgatagtcagagccgtctgaaaataggacagactacctctctggggtaatgagctccacatcaccagaagtgtgc

SEQ ID NO: 399575 - DNA, 122 bp, Homo sapiens
cctcctaggcaggataattaggtccccaggctcggtgttgggaatacaggcccagcatgccgctggcggccacaatcccggcttcctgccttcaataccataatccttcctggagtctgagc

SEQ ID NO: 399576 - DNA, 122 bp, Homo sapiens
gacggccagtccacaggacgcgcccgtagacttggaccaacagctgaagtcagcccctgacggccttcacatctcccagctgggagtgcccttaagaactaacccatcagaatgggtttcat

SEQ ID NO: 399577 - DNA, 122 bp, Homo sapiens
gaactgtatttgtagaggtaaggcctttgaaaggtaagttaaaatgaagctgttagggtgcgccccagtccaatctgactggtatcttaataagaaggaatttggacacatgaagagaaacc

SEQ ID NO: 399578 - DNA, 122 bp, Homo sapiens
agaagtaaaattaataaaactgctccaaaagatgatttctaaagatgacattcctactttcgctttaagctttctttcctgaggccaagtaggggcctgaagtgggaacaggaggggtttgg

SEQ ID NO: 399579 - DNA, 122 bp, Homo sapiens
tggaattcaaatatactaatttgattctctgtgtcccatttctgatttgaacagagccgccgattgttacctggtatgcaattttagatccctgcattcctgttgttcctaacaacggcttg

SEQ ID NO: 399580 - DNA, 122 bp, Homo sapiens
ggccacaggccctcagatcccccaggggcccaacctagggcatggaggcggctgctggtgcgtgggcggaggcggaggccagctgcccccagcgtggcagcgtaaggcacattttcaaatca

SEQ ID NO: 399581 - DNA, 122 bp, Homo sapiens
gtaatctaagttcctatgcctcaggaaatcaaaaatataaaaataaatctggcggccgggcgcggtggctcacgtctgtaatcccagcactttgggaggccgaggcgggcggatcacgaggt

SEQ ID NO: 399582 - DNA, 122 bp, Homo sapiens
gggcgacatttacgctgagagcttctaccgtgaaggagccgagcaggatggactcctgaccgcagcatctcaaagaggaacgaaggctcgcacgagctgggacagcggaaagagcagaagag

SEQ ID NO: 399583 - DNA, 122 bp, Homo sapiens
acctccctcccgctgtgcaaaggaacgcaggagcccggcgcaggtggtgggcttaccgcgcgcacgcctggctggagaggtgacgccgctgtctgccaacctttcccagcttttcccacgat

SEQ ID NO: 399584 - DNA, 122 bp, Homo sapiens
cggtgagctgcggcgagcggagcttcgcggggatcctgctggactgcacgaaaaagtgagcgggggcgcgggccgggacacccccggggtccccacgcgacacccgcctccgccgcccggag

SEQ ID NO: 399585 - DNA, 122 bp, Homo sapiens
gcctaaatcctcaaattctggctcttgcccaaagtgtgtagccagtatccatagagactgcgaaaagcatccgcgagccggggcggccccctcctcctcagctccaaattgcttcctttttc

SEQ ID NO: 399586 - DNA, 122 bp, Homo sapiens
cgaggcctgctccccgctccctctgccgcgccgggccaggacttacctcgcaaggccccacgaagaggatcttggctttcagcatagttgtccgccgcggcttagccggccggagcccacgg

SEQ ID NO: 399587 - DNA, 122 bp, Homo sapiens
ctcttaagttcctttccagaatggtgaatcctttcaagccgccttcctgcctcgtccttccgaagtgttgggattacccatatgaatcactgttcctgacctgaacatcaaagatcactgat

SEQ ID NO: 399588 - DNA, 122 bp, Homo sapiens
gggctggtgggaacctgacctcctggaaaggacggactcggagtcagagccaacgtgtcccggagcgcagaggcccagggggtcgcgctaaacactgtacctcggggaacaaaaccgtgaag

SEQ ID NO: 399589 - DNA, 122 bp, Homo sapiens
tcctgggttcaagcgattctcctgtctgagcctcgcgagtagctgggagtaacatgcgcgcgccaccatgcctggctaattttttgtatttttagtagagatggggtttcaccatgttggcc

SEQ ID NO: 399590 - DNA, 122 bp, Homo sapiens
cgcagggtggtagcaggggcgccccgcggggctccttcgccaggtcccggaggccgcgggcggggccgtttcccaaacatcgtgctctggactttcagaggctgaacctgatccccccgccc

SEQ ID NO: 399591 - DNA, 122 bp, Homo sapiens
tcagggcgctcccctgggtcctagaggcggtcggacgcagcagcagggagtcgggagctgcgcgcctccccgccggttcgagtccccgtcttgggacctgcggccgcggggctctcgctttc

SEQ ID NO: 399592 - DNA, 122 bp, Homo sapiens
aatgctgtgatgcgctgggggatgccaccacaggatgccttcaccacacagtggctggtgcgggacctgaggggcaagactgagaaggagtttaagtgagtgtgggtgatacagggctgagt

SEQ ID NO: 399593 - DNA, 122 bp, Homo sapiens
gcacaacatgcccagaaacgcatttgagagccctggagtcgcgcttggcttggcttggggcgccggtgcgtgggtacactcgaggtgcggggtgcctatccgccaccccgacacctacaccc

SEQ ID NO: 399594 - DNA, 122 bp, Homo sapiens
ctggatcagacacccagctgcttaatgtctcaggcttactcacaagagatctgagagtggcgtgtgagtatttcccttagaaccagagaccctacgcacacactgttggttttgtacactag

SEQ ID NO: 399595 - DNA, 122 bp, Homo sapiens
tcatagggaacacagccaactcgagtgccaagggtgaggcttggttcaaagcagccgtgccgtgtcccagggcgggaattgtgcggggacgggctccacggaggaatcttctcttccttccc

SEQ ID NO: 399596 - DNA, 122 bp, Homo sapiens
gctaaaccgggtttgcgtaggtggaaggggcggccgggctctttaaggtgggtcccgccccgtaggcctcccctcgcgccagcccctcccatcccggaaaggctcagcccaagcccggcccc

SEQ ID NO: 399597 - DNA, 122 bp, Homo sapiens
tcgggtgcggcgggcgcggggtggactgagcgggcccgggcgggacgagaggtgggcgagcgccccgcaccctcggcgcgccgcgcgggatcagcgtcctccagccgcgctgccccggccca

SEQ ID NO: 399598 - DNA, 122 bp, Homo sapiens
tactgcgcttttccaaccggcttaaaaaatggcgcatcagattatatcctgcacctggctcggagggtcctacgcccacggagtctcgctgattgctagcacagcagtctgagatcaaactg

SEQ ID NO: 399599 - DNA, 122 bp, Homo sapiens
cccccacgtttccgggagcccggcggacgctgggtctgcagatgccatccaggcgcacggcgggtatagtggttccgcaaccttgggatgttcggctgagcgcctgcctaacatgggagcgc

SEQ ID NO: 399600 - DNA, 122 bp, Homo sapiens
catggcgcaggacccttgtcctggtggcacaagggatggggacgcgagggggaggggaggcgaggaacaaggagaaggggcaactttccttaactggcagttgagcacatagtacatttccc

SEQ ID NO: 399601 - DNA, 122 bp, Homo sapiens
ggccaggcacagtggctcaggcttctaatcccaccgatttaggaggccaagtgggggtgccgatcacttgaggtcaggagtttgagaccagcctggccaacatggcaaaaccccacctctac

SEQ ID NO: 399602 - DNA, 122 bp, Homo sapiens
cgagtctggtgggggaaccagaggcaaaatggggcaggcacagatcaagacagtctcaagcgacccctctctgcctcacctcccccaactccagtccaaaaccaaagcgcatctcctgggga

SEQ ID NO: 399603 - DNA, 122 bp, Homo sapiens
cagctttgccttccaggctttctgcccacactctctggcccacaggactactttattctgcgattttggctagaaaaattgggcttctttcacagatttagctgcctaccttgctgccacgt

SEQ ID NO: 399604 - DNA, 122 bp, Homo sapiens
ccttgcggggcccgggcagtgaagggcctggaggccccagagtctgtgccaggtctgagccgcggggcgtggggggaggaggggcctcggccggggcccaggagacccaggacaggtgggcc

SEQ ID NO: 399605 - DNA, 122 bp, Homo sapiens
ccgaggaggagtttgaaggtccctctttcccaatgccttctaactgacgtctcccgcgagcgactgctctgcccccacttgggaagtccagggaggcgcaaggcggccacctccgccgctcc

SEQ ID NO: 399606 - DNA, 122 bp, Homo sapiens
ttcccctactcctccttccaacgttgttcggactctcatgccgctggccgctgtccgagtcgaccatgctgtgtcatccctccagcccatgccgaggcctggttctctgttagggatgccgt

SEQ ID NO: 399607 - DNA, 122 bp, Homo sapiens
ccaggacccaggagagaggagctgtggggccggtccccaggacggcaggagaagcagcggcgcagggaccgggagggggcgggccgccgcgctcaccgggcgggcgggccgggtccgcgctg

SEQ ID NO: 399608 - DNA, 122 bp, Homo sapiens
tgtgccaaaggtctagtgaaacatcaccacggcccagtgttaaagcttaatgtccatccgcgctgctggtgatgagttttctttttggtaaagccgggaccttagacataacctctggccac

SEQ ID NO: 399609 - DNA, 122 bp, Homo sapiens
ggttttgccatgttacccaagctggtctcaaactcctgggctcaagcgatctgcccacctcggcctcccaaaatgctaagatactgcattcagcctgtttgcaattttcttatagagccaaa

SEQ ID NO: 399610 - DNA, 122 bp, Homo sapiens
ttttggagttttctaacagaaccgcccttcaggtaaacatccaaaaccttcctgtgaccccgtgcagaagcgcctcccacagcccccagaggagagaggtaacctcggcagatgctgagacc

SEQ ID NO: 399611 - DNA, 122 bp, Homo sapiens
ccctctgagcctccctcccgggtcctgccttagtgctgtctgtgccgtgtagccacaggtcgcactgcagggctgtggggagttatttttagtttcaggcagactcactgtttttgcctttc

SEQ ID NO: 399612 - DNA, 122 bp, Homo sapiens
gtggtcgatgggactgggcaccgtagagcagtgggcggcgctcgtcggagaggctctggccgcgcaggagcccatggaggccggtgggggaggctcaggcatggcgggctgcaggtccccag

SEQ ID NO: 399613 - DNA, 122 bp, Homo sapiens
caggctgcagtctggcaacgcggggaggaggggtgcccaggaacaggatcgatccttccacgtggctcagctccatgccaaccccagctccttggagggactcccaggaccctgtctgtggc

SEQ ID NO: 399614 - DNA, 122 bp, Homo sapiens
tctgcatttccaatattgcattttgtcttacttcctcttcacagagtgcatgaaatgcaccgtctccctgcctccccactcacacgtgctgcacacacgcggtgatcctgctggtctgttgg

SEQ ID NO: 399615 - DNA, 122 bp, Homo sapiens
taaaatcttggtatatctgtgcatacatgcacaaggcctcccatgattgcactgcttttacgaataatcatagtcaaaattcattttttaatactgctagctcaatttttatttcttattcc

SEQ ID NO: 399616 - DNA, 122 bp, Homo sapiens
aaacccctggaggcagtagctatagcaggagctgacgatctccagaaactcaggaccagacgatctccagacactcaggacaagtcagtgtccccaccaaggatggggctttgagaggctcc

SEQ ID NO: 399617 - DNA, 122 bp, Homo sapiens
ccccgcggccgccgccatggagggcagggcggtggtgagcagactgctgccgtccgggaccggcaccgggatggagtaggggctgtagcgcagccgcgggcgcatggtgttcagattgagga

SEQ ID NO: 399618 - DNA, 122 bp, Homo sapiens
cttgttaaagttactctgtaaggatcaaacccacaccaagccttcctggttggaaagaggcgctgcctgagtgtcgatttgcagtgggggcacgcgcaggctctccgggaaaacgcctgtca

SEQ ID NO: 399619 - DNA, 122 bp, Homo sapiens
tgccttcttctttgccagcctctccactctagcaccagaacaccgcagcggatacttgcacgccatctcccctgggcgcggccatgttggagaaaactgcactacatttcccatgagcccgc

SEQ ID NO: 399620 - DNA, 122 bp, Homo sapiens
cgtcccggccccggtcttagctcataaatctccttcacacagaggcccataaatcaggggcggtggagggaccccccagctccccgcccccgccccactcctggagaggcggggggggggcg

SEQ ID NO: 399621 - DNA, 122 bp, Homo sapiens
acggcagcgctgagagggatggaggggacggggtgctggtgtgagtcgcttcagggagtccgccccacacgaagccacctccccagaggccacgccaacagcaccgcccctgctcccctgct

SEQ ID NO: 399622 - DNA, 122 bp, Homo sapiens
attttaactgattacaaacaaaaagggcttaacagtttcccactgcgcaaatgtgccaaccgattcctacaacctcatctaggaaaccaggcgtgccacgcgaaccctaatgctatacaaag

SEQ ID NO: 399623 - DNA, 122 bp, Homo sapiens
ttcggagcccaagaggcggggccagaggcgtagggggctgcgaggggcggaccttgggggcgtgaccggggggggcgcttggggacctaggggcggggcgttagggggcgggaccaagggac

SEQ ID NO: 399624 - DNA, 122 bp, Homo sapiens
accacatgtgaccagtggctcccacattagaccaggcaggcctagagcaaataaaagcaccggaagcacccagagacaccttctcagtgatggccatttaaaaagtaatgttagacacaaaa

SEQ ID NO: 399625 - DNA, 122 bp, Homo sapiens
ccagagtagctgggattacagtcacccgccatcatgccgggctaattttttttgtattttcgtagagacggtttcaccatgttggtcaggctggtcttgaactcctggtctcagatgattcg

SEQ ID NO: 399626 - DNA, 122 bp, Homo sapiens
aacgctgcgttctgcgcgcagtgctccacagtttgcaaggagtgttttctccttgggactcgcagcgcgcgtacgcggttgcttcaagaaggggcctggcgggtgtaacgcgccccggggag

SEQ ID NO: 399627 - DNA, 122 bp, Homo sapiens
gctgacacccaacccgacgcccgctctggccgctccggcgggagccatggcaacgagcagcggaaccccagggtctgccaggagcccgcacatcgcacgcgacccaatccagctcagagtgc

SEQ ID NO: 399628 - DNA, 122 bp, Homo sapiens
ttcctctcccctcgcccaaacgtccctgagttgcggcctcgctcctgaccgaaatccccgcgggttctcctcgcagtgtctactggatcccgccaggaggcagcagaggcgccagcacccag

SEQ ID NO: 399629 - DNA, 122 bp, Homo sapiens
ctggggccgcctcggcccactcaggctcttcgaacatgagggtcgggagggcagggtcgccgagtccccgctcttctccacgtgcacagcgctcctctggaagtcggagcgctcagacctgc

SEQ ID NO: 399630 - DNA, 122 bp, Homo sapiens
ggacatgggcttctcttcgaggaggtaacatgtccgcgccctgagccacggctctctgggcgcggccatcttggtagatctgccgtacagaagggaaacagttgttcttgtgtcattaaacc

SEQ ID NO: 399631 - DNA, 122 bp, Homo sapiens
cccatttccctgaaccctcacaaacagttgagtactgttgtatttactaattttccaattcgatggtgaaaacaatacgttattgtttaagttagcaactcctgcatcattaggtaaataca

SEQ ID NO: 399632 - DNA, 122 bp, Homo sapiens
ctttccctctctggagtcctgtgactcaccgtgtccttacgagacccccgatgcgtcgtgcgcctctagcagtggggaggattctggcaggcattctgggcttcccccgtgagccagtggcc

SEQ ID NO: 399633 - DNA, 122 bp, Homo sapiens
agctcggccctggttgccaaggagatgcgagtaccggaaatgcggaattcggggagagcgcgcatgcctggtccggtggagggagggtgccgggcgtcacaggtcctgacagggaagaagtt

SEQ ID NO: 399634 - DNA, 122 bp, Homo sapiens
cctcattgcgtcgtcccgaggtgaccaccccgtgccctggctgccctgcggggatgtgagcggcaggccccggcagccctgcttgggtaccttgccttgcagtgaggacctcggaggctcag

SEQ ID NO: 399635 - DNA, 122 bp, Homo sapiens
cccaccacgcactggtaggctgcgtcgtccgccaatgagcactggctgatggtcagggtacgcttggcaccgatggactcaaagatgtacctgggtgggggccgcagggaagtggcaggaaa

SEQ ID NO: 399636 - DNA, 122 bp, Homo sapiens
ccatcgttcagttttattcacagaaacggtgccttcaagaaatcaaagcataagagccttcggaagcagcatgtaagtgcaacgtaactttcccgagtttggtgacgatgaatcgatgaatc

SEQ ID NO: 399637 - DNA, 122 bp, Homo sapiens
gagtggagcaagggagaggggcaggaggctccagaggagatgacggcaaattaaacagaacgaaggcagtcagggcgagaaagcagaagcaggctggctgggcctctcaacgaatccaaggt

SEQ ID NO: 399638 - DNA, 122 bp, Homo sapiens
gcctgtgattgggagttgctggagtcggtgcttcactcttaaggttccgatcacagactgcggagtgggtcaggggctgcgagggctgccccaagtcctaccgggtttgcacgggcgcgccc

SEQ ID NO: 399639 - DNA, 122 bp, Homo sapiens
tcatctgtcggtggcgggcttggcagttgctcgaggcaggatcaagtcccgggggcggggcgggtgggctggcggctgtcctccagcaacaggtgcacattcccgggctcctcgtcacttcc

SEQ ID NO: 399640 - DNA, 122 bp, Homo sapiens
tgcctcgggaagtgcatctgcgaccctaggtcggggaccaccgcgttagtgagggacagccgagtcggggggcagtctcccctggtggacagtatgaagtttggacagcaggggaaggaaga

SEQ ID NO: 399641 - DNA, 122 bp, Homo sapiens
gctcccgcaaaacttttattctctggggcccccggggtgtgtgaaggaattggaaccttccgccatctccgcgctccccttcggcggcgaccgaggggacctgcgtccctcgtccgccgggc

SEQ ID NO: 399642 - DNA, 122 bp, Homo sapiens
agttaaggaaatcctgttccaggttttcgggcagcccgagtgattgacacatgatatcaccggaggcgtgtcctggagtggaggtggaggtggaggcaaggagctgaaattctgcgtagccg

SEQ ID NO: 399643 - DNA, 122 bp, Homo sapiens
atgcaaatagtataaaatctaaaaggtacacaatgcggtatgagaaaaatacatggcccccggaacctttgtccccagccccctcccccactgccaccccagaggcaggccctgttaccggt

SEQ ID NO: 399644 - DNA, 122 bp, Homo sapiens
ggattacagaagtgagccaccacaaccagtcgtgaatactttaagtgatataaaatacaacgtaccaagaactcatcatttacgtattcttactctgcctgttccaagaaatattttaagga

SEQ ID NO: 399645 - DNA, 122 bp, Homo sapiens
gaggattatttcaacgttagtttggagagcggggatttgttagtgaacggtaggatagatcgagagaagatttgcggaaggaaacttgagtgtgcactagaattcgaaacggtcgctgaaaa

SEQ ID NO: 399646 - DNA, 122 bp, Homo sapiens
aaggcttccgactacagtgttctcaccttaaacccaggagatgagtgaaggcttgcaagacgtggttagggcctggcatagtaaagtgttcaataaacattgtagccttccagcatgttgcc

SEQ ID NO: 399647 - DNA, 122 bp, Homo sapiens
gaggggaccgagggacgagctgcgccaggaggactcaagtcccagatcccgaagtcgccgcggggaggcccgggtccctccacagctggatcctgctggattccaaccagcccctcctccaa

SEQ ID NO: 399648 - DNA, 122 bp, Homo sapiens
atgccgtcgactcaaaggggctcggggctggggaactggttctggcaaacagcacaacctcgcccgaatcctggtccgcagtaactcgatctttcccttaggcggcgcttcggagggaaggc

SEQ ID NO: 399649 - DNA, 122 bp, Homo sapiens
ctgttttgtatcccctgtcattttgggaacagtgtaacactgtggaggccaggctatacccgaggttagagaccccacctttaaaattattactctggggaaagcaggaaatattgtttcaa

SEQ ID NO: 399650 - DNA, 122 bp, Homo sapiens
tcgcctaacctggctgtgtggcctcgggtgggtcactcaccctccaggagcagcgtaaagcgacgaagttgttaggtgacttctagagtctctgagtttgaaaactccaagactccaagcat

SEQ ID NO: 399651 - DNA, 122 bp, Homo sapiens
gagagtgggagtattaatactcctttcacatggttgtagtgaaagaggtcatcctacccccgatgaggagtgtgattttaacatagccttgagtaggttaaaggacagactgaagcagacag

SEQ ID NO: 399652 - DNA, 122 bp, Homo sapiens
cctcggcctgctggggggcggggcccgagggccctgacgtcactggccgaggggggcgggcggctggaggagggggtgacggggccccggctcagcacctcggagagctccctccccggcct

SEQ ID NO: 399653 - DNA, 122 bp, Homo sapiens
aaacaccacatcgccgggccccgcgcccaactggtggcccccggccggggccaccgcccccgccactcccagctccgaggcctccacctggcagggaccccccgcccctcccggccccgcca

SEQ ID NO: 399654 - DNA, 122 bp, Homo sapiens
ctgtgggggccaggggcctcaggatgctgcctggaggccttgggcagaccccacccccgccggcccagcctcacctggcattgggaatagcctcccagctgaccggggagatgagctggatg

SEQ ID NO: 399655 - DNA, 122 bp, Homo sapiens
gtggactgtggtctagcggtagcctcagtgtcacggaaaaacagcggctacttagcagaccgggaaagggagtttagagaagactctgttcctccacctcttgtggagggcctgacatgagt

SEQ ID NO: 399656 - DNA, 122 bp, Homo sapiens
aacgtccccaggaaaggggcgatgtcagggaagctgggctgggaggaggcgagcccgcaccgctgagctccctcagaaagggctgggcccttgaagccagctggccagggttcccagaactg

SEQ ID NO: 399657 - DNA, 122 bp, Homo sapiens
gcgacgctgggctgggaactgtccaatcaggcacgcagcttgagcggagaggacggcttccgggatgtggcgggatttgtccgcttctttgtctttggctgccgctggaactccgggtctcg

SEQ ID NO: 399658 - DNA, 122 bp, Homo sapiens
atttgcacaacaacaaagtttgctggctggatgacctgtctaacattataaagaaggccccgaaagtcaagatcctgaacctctccaaaaatgaggtgacaagaaagggccagatcaaattt

SEQ ID NO: 399659 - DNA, 122 bp, Homo sapiens
acaaaaagaaaagaaactcagagtttagagaataaaggagtggagtgagatccactagagcgaatagaaggggcaggaccatgtaggattttatggaccatagtggaaagtttaggaccata

SEQ ID NO: 399660 - DNA, 122 bp, Homo sapiens
cggcagccggggctgagggcgggtcctcagagccccccgaagtgggagggtcgggctggccgcggggccaatccaggcgcacagggagcgggggcgggggctgggccgagtggggacagggg

SEQ ID NO: 399661 - DNA, 122 bp, Homo sapiens
gcggcgacggtgacgcgctctggctctgacaagcctggctccccccaccctaccgggtggcgccgttgctgaccccacgcccagccgttcccactcccgcctgaaactcctccgacagggct

SEQ ID NO: 399662 - DNA, 122 bp, Homo sapiens
tgggtaatcacactacctgcacgaacagcactttggagcccccaggactgaggtccaagacgggaggacagaaaggaaggtctgtagcacaggatctaggacacatggagtgaaacagaccc

SEQ ID NO: 399663 - DNA, 122 bp, Homo sapiens
cccctcctcacaaggagaacacaactgccttctgtcctttccctgaaatctcttaaggaccggacccacctagaagaacacaattgtcctctatcctctctctgaaattttattatctgttg

SEQ ID NO: 399664 - DNA, 122 bp, Homo sapiens
catctttaatcgcgccctcgcctccagacctcggttcccgctccagcacgttaagcagggcgcactcaccgcatccccgggtttgggaaaataacaactgttggccccccggagcgccgcgc

SEQ ID NO: 399665 - DNA, 122 bp, Homo sapiens
ctgtaacactcaccgcgaaggtctgcagcttcactcctgaagccagcgagaccacgaccacgagcccgccgggaggaaggaacaactctagacatgccgccttaagagctgtaacactcacc

SEQ ID NO: 399666 - DNA, 122 bp, Homo sapiens
cctgtctccactcatgtctccttccttagtaggtatctactcctgcataataaattacctcgatatttagtggcttaaaacaatagttatcacttactcctcacagtttctattggtcagaa

SEQ ID NO: 399667 - DNA, 122 bp, Homo sapiens
tttctccccgtctgcgtcgctaatccagcctggcccggccaccccaagggaagacacggccgtttcttttgatagtggaattggaggttgccaagttttcagatttaatgggaggtggaggg

SEQ ID NO: 399668 - DNA, 122 bp, Homo sapiens
cattcatggctggcccctcggctggcagctgctgggcggaggcggccgcctgtgtggcctcgtgttcgtagaagcgccgctcggcctcctcatacttgtgcttgtcttcccacacggtctcc

SEQ ID NO: 399669 - DNA, 122 bp, Homo sapiens
atatcacagtggaatctaagctacgaaccacgggcatctggatgtggcgctcatccctgacggaagagtccccatgtccccgcgcacaggtgagggatgggttacagagcaccatcttcatc

SEQ ID NO: 399670 - DNA, 122 bp, Homo sapiens
atgctcctcccaccccagtgactcggcagcgcggcagccgacgactgcgcagacgcagggcggcggccgcgcctctccaacgccccgcacccgcccccctcagaagcacgtgcgccttacgt

SEQ ID NO: 399671 - DNA, 122 bp, Homo sapiens
gctctgtccatagtgcctaggaccatgcttggcacacagtagagctcactaagtataaatcgaaagaatgaagaaaaccctgaaacccactgagaccagacaatagtacctgtagagctggt

SEQ ID NO: 399672 - DNA, 122 bp, Homo sapiens
tccagcgaggagcacctggagagttaccacacgaccccgacctcgccagcccaggcgccgcgtttaatcttgggctctttgtgccagccaccccccgaggctggcaatgagaatgccccagt

SEQ ID NO: 399673 - DNA, 122 bp, Homo sapiens
ctccccgaggtggccgggccaccatgctgaagatggccatgaagctcaaagcccgggcggcggagagcgagaagaagacggccgcggcggctgccgaggtggctgccgaagctgcggcggcg

SEQ ID NO: 399674 - DNA, 122 bp, Homo sapiens
cgggactaggaggggctcggggccaggccggagccgtggtaggctggtgcagcggctgcgcggcgcggcgcggcgcggggcgggcgtgctctccgcggagagttagaggagttgccgagctg

SEQ ID NO: 399675 - DNA, 122 bp, Homo sapiens
ttgactcccgcagcctgccgcccgcctcacggtgacagcccgcccgggcgctgaccatcccggcccggctctgtttacaagcggcttctcgcggtcccactctgaaatgcttccgccggcgg

SEQ ID NO: 399676 - DNA, 122 bp, Homo sapiens
cgcagagacatggcgacagagaggatccgtctcccctgctccggcgctcatgtttccagccgtgtgcactcaggtctcccggtatgcgtgtctgtaggcacctgtgtacgtgagtctctgtg

SEQ ID NO: 399677 - DNA, 122 bp, Homo sapiens
ctgggtaactgcggactgcagctagtgtaagtgcaagagaaggcaccctggccaccaattcgtttcacactccaatcacccccgcccgctctacaccccctgggcacccgatgcctcttccc

SEQ ID NO: 399678 - DNA, 122 bp, Homo sapiens
agccgccgaggccggtcatccgctctctccgcggaggagtcaacgccacggaagcagcggcggaacctctctaagaatccttccagcttgtgctcttctgtccagggcagccaatcgcgagg

SEQ ID NO: 399679 - DNA, 122 bp, Homo sapiens
ttgttagtccgaatgtaaataagattcagggcgggagtccccgcgccgcagcggctggtgcgctcctgccaggagccggcgcgcgcgggagcacgtccggggcttttacggccggaactcgg

SEQ ID NO: 399680 - DNA, 122 bp, Homo sapiens
cagcccagggttcccgggccgcacgcggcactggagcaggtaccatgtgatcccagggagcgcctcgtgccccagtgacacacttttccaacagccggcacgttgagctcttgcgcgcctgc

SEQ ID NO: 399681 - DNA, 122 bp, Homo sapiens
ggtggggagaagagggcgtggcagagcccacggggcacgtgtcagcatttgctgggtccacggggacagaagggaaaggctctgtgctgctgggattcttgcagtgcctctccgcgtttgga

SEQ ID NO: 399682 - DNA, 122 bp, Homo sapiens
aaaccccaaacccggaccgcaggatccccgccctctaggaaccaggacgggccctcctagcgggtatttggggacctgggtgtgtatctgtggaaacaattggtcaaaagtggctttttgtt

SEQ ID NO: 399683 - DNA, 122 bp, Homo sapiens
ccccgctaactttcccccactcaccaccccatggaccagaaactcaaaaagtttgcttttcgtggctttgcgcgcccctccggcaacttcgtccgcggccatcggggtgggctcagcggctc

SEQ ID NO: 399684 - DNA, 122 bp, Homo sapiens
gactgtccaaaagtatgtcaagtgaaaggggaagcaaggcattgcaggcagaaggaaacacgtatgtgaagatcctgaggcaacaggaaatttgatgcattccgagaacagagactgagcaa

SEQ ID NO: 399685 - DNA, 122 bp, Homo sapiens
ctcgggcctgctctccctcaccagcaccctctacctgcggctccgcaaggatgaccgagacgccagcttccactgcgccgcccactacagcctgcccgagggccgccacggccgcctggaca

SEQ ID NO: 399686 - DNA, 122 bp, Homo sapiens
caggtccccatcccaaaatagataaaggcacgccaaggaaggaaggccggcaggccctgtcgccctgggacatgtgtgcttggaggaacccctccaagcccagagttaaccaagctacaaac

SEQ ID NO: 399687 - DNA, 122 bp, Homo sapiens
acttctaactgatggcaggaacgggggtctgccctgacccagggtcctcccatttaggaccgtcttggatccgtctccttaagtcttggcctagccttctccttaagattttgatgacacaa

SEQ ID NO: 399688 - DNA, 122 bp, Homo sapiens
cctggaggagggggcgggtcgaggctgcgtggtgatggggtctccgcccccacgccctgccgggcagggctggagctggacagaagccagtgcctttaagtcatttgtgtcaaaaccctctg

SEQ ID NO: 399689 - DNA, 122 bp, Homo sapiens
gacaggctcggggttttgtttgccttttaaatcagggcaacacttgcattgtggttttgccgtcgtgcccttgcttcatgttggaatttttctaggacttattgcagattcagaggcagatg

SEQ ID NO: 399690 - DNA, 122 bp, Homo sapiens
aaacgaacaccacagggacagacttccttttgtccttttttctcttcgtgcagagtaacgcggagtcttgccgtaacccaagatggcaaccatctctcaaatgtcacgccgtacaatgacgt

SEQ ID NO: 399691 - DNA, 122 bp, Homo sapiens
ataattgtattactactccttatgtgggcagatactgagcaataactgaacacatcacatcgttgtaaaaatgaaaaagtaccacttctttgtcctatcttagcataaaaccagtgaaaaca

SEQ ID NO: 399692 - DNA, 122 bp, Homo sapiens
agggggcttggctggattgactagcggcgggtctgggggcgcggccggattgactagcggcgggtctgggggtgtggccggattgactagcagtgagtcttgatttcagcattttgctaaag

SEQ ID NO: 399693 - DNA, 122 bp, Homo sapiens
agaaggccaggatggagttgggtgggcacccgcctgtggtcgtacccggatcgtggaggccgcgggccctgaaccctagacactgggcgggaccctccctccattataaaaaaaagtaataa

SEQ ID NO: 399694 - DNA, 122 bp, Homo sapiens
cagagctggcagagctggctggccactccaagtgtgggacctgccaagcccacgcccactcggaacgcccgctggtccacatacgccagcatgcagccccagttcccgcccacacatctccc

SEQ ID NO: 399695 - DNA, 122 bp, Homo sapiens
gctgttgtccagcattggcgaggctctgggcaggtcctgaggcttttctctgctgttgtccggtgttggcgaggctctgggcaggtcctgagccattctgctttccactctgtggtctttcc

SEQ ID NO: 399696 - DNA, 122 bp, Homo sapiens
agcgattctcctgcctcagcctcctgagtagctgggattacaggcatgcgccaccacgcccggctaattttatatttttagaagagatgtggtttctccatgttgctgagcctggtctcgaa

SEQ ID NO: 399697 - DNA, 122 bp, Homo sapiens
ccatgatttctagacaaggtgacaataccactacaagaaacagagaggctggaagtttcacggcttggaaaaagcagcattctagctgaatgcatatgataacaacacaattttaaaatgag

SEQ ID NO: 399698 - DNA, 122 bp, Homo sapiens
gacgctctgccgagggaaacgggccagtcctaagacaaacaccgcatgattccactcagccgaggcccctagaggagtcaaagtcatagagacagaaagtagaagggggttatcagggtctg

SEQ ID NO: 399699 - DNA, 122 bp, Homo sapiens
agccacaataaaatactgatttaaatcccaaaagcatcttgtactggattctagtagagacgagcaataggtttcagaaaaactggagacattctcctgaggcttgggaagagactactagt

SEQ ID NO: 399700 - DNA, 122 bp, Homo sapiens
ccccacttccccatttgcataataaacggaggggcagggaagacccatctaaccaccccacgtgtacccatgtgtcacccttatcagatgcaggaggtgagctgagctgccaaatgcttggc

SEQ ID NO: 399701 - DNA, 122 bp, Homo sapiens
gtcatgagccttgccccacagggtggctgaggccccacgagaatttgagcacagcgcgggcgggcaggcagtgctggggcacccagcgcacactccgcagctgctggcccgggtgctaagcc

SEQ ID NO: 399702 - DNA, 122 bp, Homo sapiens
cagttgtgtctgcagcccaggcccagcctctcaggatgggtggggccccctgtgtctgcccgggcagctccttattgggaaacattagaactgggccagggagcatttttcccagcctctca

SEQ ID NO: 399703 - DNA, 122 bp, Homo sapiens
cctaggctgaggtgctggggagctcccgaggcggaactcctagcctccgggctaagcgcgcgcccctattcaaagtctttagggccttggctttcacagccaagaagaaataactccaacca

SEQ ID NO: 399704 - DNA, 122 bp, Homo sapiens
agggagaggcgttgagatcacctcccccggaggtcccagccttggggaggctctgcgtcgcggctctgggtggcctggaactcccacagacccttcaagggcccttcccttatatgcactct

SEQ ID NO: 399705 - DNA, 122 bp, Homo sapiens
acacacgaacctaagcagccccaggggataccccagggatacttacagctgcaccaacagcgtgtgcgctcctgcggagcacctcgcgcggtcttccccgtccgcgctgtaggtggcgccat

SEQ ID NO: 399706 - DNA, 122 bp, Homo sapiens
cccttcccttgggcaagtgcccagatggagggccacagatgtccccctccacttcagtcacgggggcccggcgccttttccgcggcactgacctctcgccttctctccctgcaggctgtgcg

SEQ ID NO: 399707 - DNA, 122 bp, Homo sapiens
gtgccgcaaccgcttcgtcaagaagaatggccagtgcaacattgagttcgccaacatggacgagaagtcacagcgctacctggctgacatgttcaccacctgtgtggacatccgctggcggt

SEQ ID NO: 399708 - DNA, 122 bp, Homo sapiens
tgttgattcagcagaaactactgctgcagaattcataatggtgatttttaaaggccccaccgatcgcgttgctcaccccacgtgtcagcctcattcgctgcccgccagagcactatttcccc

SEQ ID NO: 399709 - DNA, 122 bp, Homo sapiens
tctgataggaaacgactatttaacatggattatcactggcgaggagagctgggatcctggcgactactactcttgcttctgctcctcgcagcctggaaggtggggagcggccagctccacta

SEQ ID NO: 399710 - DNA, 122 bp, Homo sapiens
gttccttttcctttaccaagatggccgctgtgtcgttcgctcctcattggtcggattttccgcaggtgccgattctagccccacctactagctctccgttccaagtcctaaatcactgggaa

SEQ ID NO: 399711 - DNA, 122 bp, Homo sapiens
ggtctgcagtccaacaagtgatggcctggggcggcttcagggagtagggaggggctggaccgacgcccgaatcccacatatatgtgtaacgcattggagtctgcacttgcgtgaccctgtca

SEQ ID NO: 399712 - DNA, 122 bp, Homo sapiens
aggagtcaatggagtccgtatcctttgcaggaagagcaaagcagtgtggcagccaagggccggcaaatgggggggccctcgctgctagagcctgtctgcagacccgcacaatgggcttgcat

SEQ ID NO: 399713 - DNA, 122 bp, Homo sapiens
tcggtgcgtgggcggggcgggagctctaggcggttaggagtcggggctcagatgcgggggcggggccggagcgaggccgggtatcacccgggagtggaggaagtgcggggggttcgcggcgc

SEQ ID NO: 399714 - DNA, 122 bp, Homo sapiens
agggggccagccaggggctgtcgctgagtcaagggtgtctgggaccagggtggtgagaggcggtcagcctctggaggtgtttcgaagtggagccagtgaggtttcctgactgactggccgtg

SEQ ID NO: 399715 - DNA, 122 bp, Homo sapiens
tggagcaagagtgtagatttttgatgttggaatgagggttaaggtttacttaaaaagcagcgaaagtttgttaagcgcttgtttttaattaagcactctatatactgtgctttgagagggga

SEQ ID NO: 399716 - DNA, 122 bp, Homo sapiens
ataataaaaatggggcataagttctacaaaaaggaaaaaaatgggggaagggggactgggcggagagacacagggaatcattgatccatgacaaacacaatgttcccttcctcacacctctg

SEQ ID NO: 399717 - DNA, 122 bp, Homo sapiens
gggacgagcaagtcacaccactagccctgcactgggtaaacctgcgctgggtggaatctgcggtggtggcatctgcctgggtaaaatgcgggggccctgccagcagccccggggaaactcag

SEQ ID NO: 399718 - DNA, 122 bp, Homo sapiens
ctccagactcctgagcttttatatatccttgctggtgggtggggctctctccctggtctccgtggcttctttggctcagaccagtttgccttagaacatcttgtgaatctacacattaattg

SEQ ID NO: 399719 - DNA, 122 bp, Homo sapiens
ctcaggtgatccacccatctctgcctcccaaagtgctgggattacaagtgtgagccagtacgcctggccgaatatgtactattattgcttggggtgcttcaaacagatgcagagacagcagg

SEQ ID NO: 399720 - DNA, 122 bp, Homo sapiens
ctggtgctggatgcccatgagaacctgctactggctgagggcacgctccggctgctgacacgcctcctccttgaccacctccggctgctggcgcccagcaccagccttctgctgcgggctga

SEQ ID NO: 399721 - DNA, 122 bp, Homo sapiens
gggtgttcaaaggacggaccgaaggtaagattgaagtggggtcagaccatggcgggacagcgcaccggagaatgaacagcgattagggaagagtggcgagcgggtggcaaggacggagggcg

SEQ ID NO: 399722 - DNA, 122 bp, Homo sapiens
tgggtgtggtggtgcgcacctgtagtcccagctactcgggaggctgaggcaggagaatggcgtgaaccggagaggcagagcttgcagggagccgagattgcaccactgcactccagcttggg

SEQ ID NO: 399723 - DNA, 122 bp, Homo sapiens
gtacgctcccagttgcccagccctgggaagccagcatcgggttcccacgctggggaggagcgagaggaaaggagaggacgcccgaggggccggcccagggcccgggggacccgcggcgcccg

SEQ ID NO: 399724 - DNA, 122 bp, Homo sapiens
ggctccagcaggagacctgggggccctctgtgctgggaggctcacttcctgtccacggggcgggcccagaggctgttctccaagaacttgagggttccaagaattcagtgcacttcaattct

SEQ ID NO: 399725 - DNA, 122 bp, Homo sapiens
aagacgcggtgcagtccccagcacggagaagagaacctgcgaattccacgcgggaagagccggcgtttccatcagcaggggccctgcaggagacctcgcgtgcagaccccacacattcccca

SEQ ID NO: 399726 - DNA, 122 bp, Homo sapiens
cctttcttctggtgagtctctcctcgcatctctgtctgggtcatgtggccgggtgtcattcgttttccaggcggttacagtttgggttcgtgaccggtgggcaacgtggggagctacatgag

SEQ ID NO: 399727 - DNA, 122 bp, Homo sapiens
cgcgggcgccgcggcttcaatggcgccatcgcccaggaccggcagccggcaagatgcgaccgccctgcccagcatgtcctcaactttctgggcgttcatgatcctggccagcctgctcatcg

SEQ ID NO: 399728 - DNA, 122 bp, Homo sapiens
gtgttttcatagctatggcccagctatatcataggacatatatcctatgtcatagcatagcggtgacagcagcaggcggcgttggggcggggcggggccagagtgacaggcagccctgcggg

SEQ ID NO: 399729 - DNA, 122 bp, Homo sapiens
ataggataaataaactaagtcaagtctttttattttaaagatcagtttcttacctggactcggactctaggcagttcccgtggcacaagggttgtttgttgtcaccatcgttacattagtca

SEQ ID NO: 399730 - DNA, 122 bp, Homo sapiens
agcttagagggcgcaaattttgttaatgactcgcgcctgataaacttcaattaagtttcccgcctagagaaaaactgcatacttatcccctagccaccgtctccaccaatatgccccagcaa

SEQ ID NO: 399731 - DNA, 122 bp, Homo sapiens
cccaaatcctgcccgcgccccagccccgctcaggccgcgcccctgccacctctggccacacgggctgagacgtctggctcctgcacagcgcacttcccgctgcccttctccactggctgctc

SEQ ID NO: 399732 - DNA, 122 bp, Homo sapiens
cctgtgcgaagccagtgggcctggcccggggcacgctgcacgtcacacacttcgtaggtgcgcacgctgtgctgttcctcatccaggccgctcagttcctcccactgtgcagagaaggaggt

SEQ ID NO: 399733 - DNA, 122 bp, Homo sapiens
tccacccacacctagaggggggcgcccgggcagccgcgggcgagcttctcgctcgcgcagcgtcgcctacaggcctttatcctgaccgttagagaagaacccaaacctctgccgacaaaaag

SEQ ID NO: 399734 - DNA, 122 bp, Homo sapiens
ttattttcctcctctcatgtagacagctctgcctcgagtccacagccctgggtagccggacggccccgagcagcctccgtgcatcgtctgggcgccgagccacagcccttcctcctgggctt

SEQ ID NO: 399735 - DNA, 122 bp, Homo sapiens
attttctgaaacatgccttacacacctccttactagcttttgaaatctgcattgcacaggcgaatatcatgggcatggggtttggcaacccgggggttaagcaatgtcaggctgacgctatt

SEQ ID NO: 399736 - DNA, 122 bp, Homo sapiens
aatcagcccggggccaggtacaactcagacaactcaagacagcccttaggccccagagcccgctgaaacgatgcaaactagccagtcctaaacctgcagagcctggataccctgccttgccc

SEQ ID NO: 399737 - DNA, 122 bp, Homo sapiens
ttacacctgccatccctgtgctgtccttagttttctggcctattagatgaaataggttatcgtcttccaggcatatttcgcatttcaatttttcctgccctgttttaaaaatcactgctaca

SEQ ID NO: 399738 - DNA, 122 bp, Homo sapiens
aagggttcatgatgaggtatgggggtcactgaggagacccccagagtcactgacccctcccgccacctccacacaccaggtggccctgcagaatgagggttgggctgatagaatgtcaatta

SEQ ID NO: 399739 - DNA, 122 bp, Homo sapiens
ccaggcgcagcttgtccatgaccgtgatgaagagctgggggcaggtgtgcacatgaggctcgcgtgtccacgggtgcgggaggccccacggctcacgggccccaacccctcctcagccacag

SEQ ID NO: 399740 - DNA, 122 bp, Homo sapiens
tcgtctgcagcaccgtgtagatgccacccactgtgggcccaagcgtgtgagggcaggccccggccgaggtccatagttctggggcctggggtggggtgggccggggatgtagggggcactca

SEQ ID NO: 399741 - DNA, 122 bp, Homo sapiens
cacgccccccccccccccccccgcactcagcctagtccctgcttctaggggtaggagtctcggttgccagcaacccctagcacctccaaggacccagagatccagcctcccaagcctcccag

SEQ ID NO: 399742 - DNA, 122 bp, Homo sapiens
gatgttccacttaatgatgcaaatcttatacattttatgatacgtgtaaaagtaaaaatacgaagcagtaggatatagaagagtattactaggtttaacaattaaaaagttataatctgtgt

SEQ ID NO: 399743 - DNA, 122 bp, Homo sapiens
acatctcaaagtcatctatatttctccatttgtactgttcctgccctatacaagatatcacgatttctggcccatctcagtccattgcagtggcagcctgcagctggtcttgtaagttctac

SEQ ID NO: 399744 - DNA, 122 bp, Homo sapiens
ttgcacacgtttgatccctaggtcagtggagccgtgttggatcggggagccaggaatactcgagtcagcctcgtttgagaagtcaaagccatctgggattcaacatataacattttagtgct

SEQ ID NO: 399745 - DNA, 122 bp, Homo sapiens
atgtgcctattacccagcttctataactaccaattcacggtcaacctcatttcaatgttgcgttttaattcgcatccgattcctcacatgtattctcaattgtctgagaacttgaagaagtg

SEQ ID NO: 399746 - DNA, 122 bp, Homo sapiens
gatagatctgttctgtggtggatgatggaataaacaggtttcgaggcctggctcagcagccgctgcaggtgctggtggtgctggagctctgtgtgttcctgagccgctgtctgctcggtgtt

SEQ ID NO: 399747 - DNA, 122 bp, Homo sapiens
ttctccgcccatccccgtgcgcacgtgttcgctgtgctagccccgtgcgagctgagctgccgttagagtcggtagattacagcgaagctgcagtcagcagctcgtctgcctggccctgcaca

SEQ ID NO: 399748 - DNA, 122 bp, Homo sapiens
gaaagcaaaagaggccttttcagcaatgctggcagccccgtgagcagggcatggtttcgccgctccgtgggagtggcctgggccccaagactccagagacgctaccatgggggaactcggtg

SEQ ID NO: 399749 - DNA, 122 bp, Homo sapiens
cttggaaaggcttccgaacgcacaatgtttatgaagttcgcgtgatttgtgccactgacacgttaggcgaaacaacacacaccacctgcaccggacaaccctggttaagggatcctacccac

SEQ ID NO: 399750 - DNA, 122 bp, Homo sapiens
ctctgcaatttcataatctcacgttaaatggagtgcggggggcgggggcgggggcgggggcggaggtagtggaggaaaatttcaaggctccgtcagctgtcaagaagaaacccattcctccc

SEQ ID NO: 399751 - DNA, 122 bp, Homo sapiens
aacaaatgccccttgtgataagtcgggccccacgttccattgggtcctgccaagctctcgcgagacttgggcctttcccagtgcaaaggttttaacacctggtttttacttcccgcccgcca

SEQ ID NO: 399752 - DNA, 122 bp, Homo sapiens
ccggtgagcgggggaaactgaggcacgagggacaagaggtcgtcggggagtgaaagcaggcgcagggaaataaaaagaaggaaagggagacagaccaggcgcctaacagatggggaccaaga

SEQ ID NO: 399753 - DNA, 122 bp, Homo sapiens
ggccgatctcattcatatcccgaactctgaaaagcaaacgaggtctctgaatgcttggcacgtgccaaactgggctccagcgtttgctgttcatccggcgcacaaacagcgttccacgaatg

SEQ ID NO: 399754 - DNA, 122 bp, Homo sapiens
cgctccagcctccagctgtggcaagtgactaccccttctcctggtcctctaagcctggcacggagcagctgcgcaggcagccacacaagagcctggaatggcctgatgccccttctgcatgc

SEQ ID NO: 399755 - DNA, 122 bp, Homo sapiens
ttattggttcactgacccgctcgtctccttccttgtaccctccttggccgcaccgctcgccggtcactcaccagactacatctgattggagaaggaggtgggtgcaccctgcgggccgtagc

SEQ ID NO: 399756 - DNA, 122 bp, Homo sapiens
caaggagcagacaaggctgttccggctgtcctggaggctggggcagagggggtaggaggccggcataataaggggtgatggctcatttcttccaaccaaagctgccaagccctagccagctg

SEQ ID NO: 399757 - DNA, 122 bp, Homo sapiens
acctaggaccttggcccaccacggaccctgcccatcccggacccagcccactgtaagctccgcctatctcggaccccagcccatcccaattgccgcccacttcatggtctccagccaccgcg

SEQ ID NO: 399758 - DNA, 122 bp, Homo sapiens
ccgggccgagggcggggccgcgcgaggaccccgggacctgcccccctccccccgcagccgcgtcgccgctcgctccgggcgcctcctgctctgcacttacacgctcggcagctgcggggagc

SEQ ID NO: 399759 - DNA, 122 bp, Homo sapiens
gtattgtttgccaggacaccttcccgccaaggctggctgcaggcggtccttgtcctaggacgcttggcacggggctgttccgggcgccagagggaagtgtgtgtgtgcatgtgtgtggctgg

SEQ ID NO: 399760 - DNA, 122 bp, Homo sapiens
tcacctggcgatttagaactttccaaagcccaagctggcccctaggccagctagtcacaacgttgggagtgtgggatgcagacaccagtattgctcgaaagctccagctgattccagtgtgc

SEQ ID NO: 399761 - DNA, 122 bp, Homo sapiens
acctccctgcagaccaatggacaccttctaagagtttggcgagtcagtgactgaagcgcccgtccattccaaggtgtgtgcacggcgttttcttctttgacagctccggagtgggggagggc

SEQ ID NO: 399762 - DNA, 122 bp, Homo sapiens
ggaggggagtgcaggggcggaggtttctggctaggggctggggtcgtcgggggcctgggccgctggaggagagaagtcaaagtgggaaaagtcggtaaagggaaaccctctcttcctgtagt

SEQ ID NO: 399763 - DNA, 122 bp, Homo sapiens
gcgtctctgagcctcaattttcctctccgtaaaggaggtgtaatgattttaagtacttcacggactccctggggatagaaagatcgtgtttgtgaaaacactgggtaaactgccacatgcca

SEQ ID NO: 399764 - DNA, 122 bp, Homo sapiens
ccatgttccaagtcttcggccgctgcatgcagccagcagttagagtgcgggactggacagcgccggccggatgcttctgccttcgctcattgacggttcttgctggcttccgaaggcattta

SEQ ID NO: 399765 - DNA, 122 bp, Homo sapiens
cccgcactaattgaaacctgaggtgagggatttctcctcgctgaccagtagggggcgcgtcgtgactgcgccttctgctttcactccccgcgcagggaaatcctgtcctgctctctcaggga

SEQ ID NO: 399766 - DNA, 122 bp, Homo sapiens
gcagccacagaggtttccggccggaaaaatcggcaccccagagatcccatgagaacgtcacgtacagcactgagacggagccctaatgaaaactgtggctctgggtgataatgacgttactg

SEQ ID NO: 399767 - DNA, 122 bp, Homo sapiens
ggtgccagtgcctgtgcccactctgtgcctgctgggaggaggcccaggctctctggtggccgcccctgtgcacctggccaggggaagcccgggggtctggggcctccctccgtctgcgccca

SEQ ID NO: 399768 - DNA, 122 bp, Homo sapiens
tgataaactggcaagtggtcaaaatccgctctgtggcctgttgctgcacggccaagagctcggaatggtccgttactgtgaaaacgattagcgaataaggaagagtgtgcggtggagaccat

SEQ ID NO: 399769 - DNA, 122 bp, Homo sapiens
gtcactagtccctggcatatccacgctggagcagctacagctccctgcctttggcacttacgtgctgtgtgaccctgagcaagttatggcacctctctgggcctcagtttccttttttgttt

SEQ ID NO: 399770 - DNA, 122 bp, Homo sapiens
tcccgagcgtggggtgctgtgtgatgctgctttttggattcggagcctgcgcaaacacaccgagaaaaagaagctcatcgctgccgtggtgctgggaatcctactcagcaagatgctgagag

SEQ ID NO: 399771 - DNA, 122 bp, Homo sapiens
cttccctccagccccaattcctgcacaagccctgctattcctcctgatggcaagaggacccggtggactcttggccatgatgactctgttcctgtaccagtctgctccgttcctgaggaccc

SEQ ID NO: 399772 - DNA, 122 bp, Homo sapiens
agtagagaaaacactggtgagattcaaggaaagtccgtcgtttagttagtcccacgacaacgtccgtttctcagctctggggaccgtagcgtggttatgtgagttcacgttagcggaaggcg

SEQ ID NO: 399773 - DNA, 122 bp, Homo sapiens
ggctcaccctcggtcaccctgggccggccagcggaccgcactgactttgctttcaacccccgtttgtgtaggtcataaaaccccggcgtaagttggcgttccgctcaggagaggcccgcgac

SEQ ID NO: 399774 - DNA, 122 bp, Homo sapiens
gagacattgccaaccaggcacagctgttgtgatgggagggcctgctttggccaggctgaacgagggtaccaaggagtgacctttttgggatgagaatgcagacaagaagccaaaaggaaggc

SEQ ID NO: 399775 - DNA, 122 bp, Homo sapiens
gccagttggatttattccgtttggtagctccctgtggcttttagtcctcaggcgatatcacgggctctgcctccttcgcgcttcctctgttcagctcccacctcttcaccctctgagtcctg

SEQ ID NO: 399776 - DNA, 122 bp, Homo sapiens
gccggaagatggcgcagacgcacaaagcacaccgatgctgcgccatgatagggccggcgccgcagtgtcttccgggaaacatagtctttaggcgtaaaggcagcagcccggccttgaagccg

SEQ ID NO: 399777 - DNA, 122 bp, Homo sapiens
ctcccgtgagggagcagcctagggactaaggcccgctggctccgcgagatcagccaggcccgcatcatcccccaattacctgcagagggcgccgcagacacagagagggcgaggccgaggcc

SEQ ID NO: 399778 - DNA, 122 bp, Homo sapiens
gctaacaagcaagaggtaataacaatgagtatcaagacagtaatgtttaggaattttgaccgaaagtactaaaaaggaatctaaattttaaaaagtagtttctgaattgaaagatctaccct

SEQ ID NO: 399779 - DNA, 122 bp, Homo sapiens
gaggggtgacaagcccaccagctgctcactgtgccagctgggtagacccagagggtcaggcggccaggaactgggaccctgccctgcgtccactgccagcctcagtgctcaggtgccctgga

SEQ ID NO: 399780 - DNA, 122 bp, Homo sapiens
tgccaacagttagataaaaatcaatatatttcattaaaattgatcttctgtggattggcacgcaacaggcaaaaaattggctgtaactgggtaggagctgccccctttgggtgggtgtgggc

SEQ ID NO: 399781 - DNA, 122 bp, Homo sapiens
gagccggggaaggtcgccgtggagtcccgaccagaggccggggttggggtcggtgcagaccgagggctggtttccttgactgtgggagaaacgccgggagccggagtaagtagggctccggg

SEQ ID NO: 399782 - DNA, 122 bp, Homo sapiens
agcgtacctctgcccacgtcccttaactttggtatttcctcctaagattgagaaaatattcgaaatacttctcctttattttgatcattgttctgcttctctcaatgtgactggctagtttc

SEQ ID NO: 399783 - DNA, 122 bp, Homo sapiens
aaaggaactttttgcaaaggactctgagactgtagccacagctgcccaaagggggctgcacgtggggggtctgtgcgcattgtgtaggtcgcgcctgctctgggactgcgccatctgtgagc

SEQ ID NO: 399784 - DNA, 122 bp, Homo sapiens
gaggtcggcctgcgctggtggccgcagatggcctaaggctggcgggcctttgattggccccggctttgcccttgccacgcccctctgcgctgggattggcttagtgctgggattcccaccca

SEQ ID NO: 399785 - DNA, 122 bp, Homo sapiens
ccagttcctgaccccaagtgatccgcccacctcggcctcccacagtgctgggattacaggcgtgagatccactgcgcccagccaaagctgctattttttaaaagcggcaatgaacattcttg

SEQ ID NO: 399786 - DNA, 122 bp, Homo sapiens
gttgtagtacgtggccgtggcatcagccaggacggagatgaggctggtctctgtgggacccgttggtgtcacctgggagaccggaacatgcccactgagggccatggcccctgtggcggagt

SEQ ID NO: 399787 - DNA, 122 bp, Homo sapiens
gaacaccgcgccatcatggtggactctatgctgcataccgtgtaccgcctgtctcggggtcgttcgctcaccaaggcgcagcgtgacgtcatcgaggactgcctcatgtcgctctgcaggtg

SEQ ID NO: 399788 - DNA, 122 bp, Homo sapiens
acttgagtgctggtcatcagtaacatcttccattacatagggttttgccagagctttgtgcgcattatttcatagaatcccgcccaatcgtcagatatgattaccgccattttattgatgtg

SEQ ID NO: 399789 - DNA, 122 bp, Homo sapiens
gcagaggatcagcactgccagtggagatgggcgtcactactgctaccctcatttcacctgcgctgtggacactgagaacatccgccgtgtgttcaacgactgccgtgacatcattcagcgca

SEQ ID NO: 399790 - DNA, 122 bp, Homo sapiens
ggactctggaccagaaatgtgggcagcagctgggtacctgcgacttctgccccgtacctgcgcgcgcggcagagaggccttaggtcacgcgccgccccgcctacctccccctccagctcctg

SEQ ID NO: 399791 - DNA, 122 bp, Homo sapiens
gctttccagggcagccccagctcagactccccagcgccagcctttacaccgcttcctcctcggaaaaagaagaattttttcttgaactggaactgcaactaaagtccgttcggagatccaaa

SEQ ID NO: 399792 - DNA, 122 bp, Homo sapiens
ggccctcccctttgagtggcgttctagaccactctcttcgaccctccaaccacgcggacccgggtactgccaagctcacacccacctaccaccgacgaaatcgtcccccgcagaaagggtga

SEQ ID NO: 399793 - DNA, 122 bp, Homo sapiens
ttccacctccaaagtccctcccagatggtgagtggacggaggggtcctcccggtgaggggcggcggtgagtggacggaggggtcctcccggcgaggggcggcggtgagtggacggaggggtc

SEQ ID NO: 399794 - DNA, 122 bp, Homo sapiens
atttcaggcacagatatgtctgacagttattaccagcagaagagtttctagccttttcatcgtaaaattttaattacttaccttggaaattacttaacttcgttccttccaaatctggtagt

SEQ ID NO: 399795 - DNA, 122 bp, Homo sapiens
tcaacaccccgattggaggatgaactctagcatagggaattctgagatggagggagggggcgctggttcaggatgcttggaggttctagaaagaactgaggtcacctggaagatacaacgct

SEQ ID NO: 399796 - DNA, 122 bp, Homo sapiens
ctcctccagggagcctgtggggcacaaggaggagtcaccaaaagggccgggtgggggccccgctgcttcgggaggagtggctgaagggatcgccaacggacgcctcgtccagcaccatggtg

SEQ ID NO: 399797 - DNA, 122 bp, Homo sapiens
ccaccccggccgaattcttgcataaattatgccaggcgcgcctgacgtcaggtggcggcgcgcgggcgcgggcgcgggcgcggcgcggcccggagggagctggcggcgggcgcgcgcggccc

SEQ ID NO: 399798 - DNA, 122 bp, Homo sapiens
tcatacctaaaccagtcagatgaggccctcaatgcttgtcactgacctgggtcactactgcgtcacagcgttgagctggacatttttctggctcaagccatgcattttacagttgaggtaag

SEQ ID NO: 399799 - DNA, 122 bp, Homo sapiens
ggcagccgcggcagcgcagcgtggacgggcccggacacccggtgcctgcccagccagcgacgctgaaggcacatttcaagagggaaatagttcagtcctcggtaatttgtcaacctcgtgct

SEQ ID NO: 399800 - DNA, 122 bp, Homo sapiens
tggagcaggaagacaaggaaaaccgccgtgggcgagcatgacgggcgggcacctgacgcgcgggtcccgaggaaggccgaacccgacagaatccctggagcctcgtctctgccaggcagtgt

SEQ ID NO: 399801 - DNA, 122 bp, Homo sapiens
ctgagccgcccgcatctaggcagaggagggcagggtgggggaggcgaggcgaaatcgatacgccaggtccttaacctgtaattgcaccttccagggctgagcagaaagggaccctctgcttg

SEQ ID NO: 399802 - DNA, 122 bp, Homo sapiens
ccttatctcgttttgaagatgacaaatatggagacttttcaaccacggaggaagacagaacgcagtagcggaatgaaaaggagattaaagcaataaggaaagtagctttctgccccttgaca

SEQ ID NO: 399803 - DNA, 122 bp, Homo sapiens
gagcggggccttccggtcttcggaggctctgagtgccggttacgtaacggcggctccgagcgcctggggtcctcccagagctcctgggctcgagctctttccatgagcacctcgggccttct

SEQ ID NO: 399804 - DNA, 122 bp, Homo sapiens
atgagaatatccattaccagcactaaaaaagccgctttttactgtgccacacagtcaactcgtttgatcctcacgcaagagttagaatgaacaatagccccattttcccagtgaggaaactg

SEQ ID NO: 399805 - DNA, 122 bp, Homo sapiens
aaccaacagatttcacccacctttccactctggaggcgggctctaatggcacagtccagacgtcacctctccttagtttgaaaattggttccataaattggagtgagttcaaacacatgaga

SEQ ID NO: 399806 - DNA, 122 bp, Homo sapiens
tctcccgccagcagagggaccggaagtgcgcctgccccaggctcggagatgagagccaggcgtccacggtgaacagcaccagaaagcaccacggtttaagggcctggcctttggggcaagtg

SEQ ID NO: 399807 - DNA, 122 bp, Homo sapiens
ccagcgtccagcagcagtgaggggcacaagctgcctcgaccaccagaacaatgccgccagcgtccagcagcaacgaggggcacaagctgcctcgaccaccagaacaacaccgcaagcgtcca

SEQ ID NO: 399808 - DNA, 122 bp, Homo sapiens
ggaggcagaggttgcagtgagccgagatcacgctagtgcactctagcctgggtgacagagcgaaactctgtctaaaaaaaagaagttattttttatcaatatatattaacatgcaatggatt

SEQ ID NO: 399809 - DNA, 122 bp, Homo sapiens
caaagactagaagtcggagaggcgagacctctagggggcctgggctcagcgacgctggtgcggacacagacccctatgacccaagaaatcttgtagagcccccaaaaggcgagctctccaaa

SEQ ID NO: 399810 - DNA, 122 bp, Homo sapiens
actaggtcccaggaagcactggtttcggcgagtgttaccagatctcctgcaggggagaaacggtcacgaaacatgaactggtctgccctgctcttggagagttacagtggaaactggcatgt

SEQ ID NO: 399811 - DNA, 122 bp, Homo sapiens
caggagatgactccagcctcctttttgccctcgacgcttttttttctctggcctccctaacgttcccctgaaagcctacgagcctggcatcctgcccctgtcacccagggggacttcttgac

SEQ ID NO: 399812 - DNA, 122 bp, Homo sapiens
ggcctctcccgctcgctcaacctgtctgcggagggcgcgctctcgcgcaccctgctcccgcgttcgcttctttgttcccgcccacgcgaggcccattttgacggatccagttcgaggcctga

SEQ ID NO: 399813 - DNA, 122 bp, Homo sapiens
ctgacctggcacagaaagggcagcttcagtctctgcagtgtccattatctgctgttccttcgagggttccaggctgtgtgtggggcccaagcatgccccacccacccctcctgggcccaggc

SEQ ID NO: 399814 - DNA, 122 bp, Homo sapiens
ggacgggggacccgtcggcgccggggtgtgcaaaggagcgtgtgtgcggctggagggcggcgatgcgaacaacaatgcgcccgcgcccggggccaggctgcactggcggccgcgcgggccgg

SEQ ID NO: 399815 - DNA, 122 bp, Homo sapiens
ctgttcatcatggtttctgaaatctgtcatgaatccccttagaccattttcagtcctgcgcggtgtgtctctctctcaatgaactttttaaaaaaaggaaatcatggcccggagcagtggct

SEQ ID NO: 399816 - DNA, 122 bp, Homo sapiens
aaaacccaggtccagctgctatttaggtaaagtgatgttccccagttgtgttctgtacaacggtagcttgcccagatgttacagatgaacaaccaaataatgtaaaataaaggtttcatgat

SEQ ID NO: 399817 - DNA, 122 bp, Homo sapiens
ctgtcacatgaagaagggcacattttgtcttacagagacacataccctcgatgtcagccacggacacatacactcagtgggagcagagagacagggtccacaagcagatggaatcaaggatg

SEQ ID NO: 399818 - DNA, 122 bp, Homo sapiens
aggagtagtcgcggtgacttccacttacttcataaataagtgtattcctccaccatctggcgctcctcttcagctatggactcgcacattcagcccccattcactcggcttcattgatctcc

SEQ ID NO: 399819 - DNA, 122 bp, Homo sapiens
cagctaattttttgtatttttagtagagacggggtttcatcatgttagccaggatggtctcgatctcctgaccttgtgatctgcagaagatattaatagcacttaaattatacagctataga

SEQ ID NO: 399820 - DNA, 122 bp, Homo sapiens
aggggagataccatctcccctcaagtaaagtgggcctgtgcccttttgcactgcgggacacggctcaggaccagcaggcatgcctccttggtctcatgttgaccttagagtttgggattctg

SEQ ID NO: 399821 - DNA, 122 bp, Homo sapiens
tttcatgttctaaaagtatggttttagattaaatgaaaaataatacttctgaaaaataagcggttataaggtttttaagttttctttatgttggtgtaaacttataaagcccttcctatgaa

SEQ ID NO: 399822 - DNA, 122 bp, Homo sapiens
gaactggctcacctgggaaggggagctccagccgggagtcactgtgctgtttttccttaccgaggctctggttgtattttggcaaccaggctagccacgttaaatgaggaaacaaatgcggt

SEQ ID NO: 399823 - DNA, 122 bp, Homo sapiens
ggtgtttggtggtagagcagggaaggggggaacggacgtcgaccctagggatccctcacccgctcacgctccttggcgttggccacacgccgccgctccagcaccaactggaggttttcagt

SEQ ID NO: 399824 - DNA, 122 bp, Homo sapiens
tgatctcgagcacagcacaagctccgagctggcaccgggctgagtcaagatggcaagccccggactgaacattcgaatgtccctcagtcttccccgcgcccaagccccggtgcctctgccct

SEQ ID NO: 399825 - DNA, 122 bp, Homo sapiens
taagggataagtgcacagtaagtgcagaatcatacagtgtttccaaatcctcagggtagacgtgtgagcttagtaaatgagaggaatagcggacgaacctctccgtgtgtttgtgtctcgag

SEQ ID NO: 399826 - DNA, 122 bp, Homo sapiens
cccactccaagctcctgaagcctgcaaagccttctgggataaccagggtttcagtggacccggccatccacctcccagctaggctcatacaccctaatgtagtcacaacccctcctccagaa

SEQ ID NO: 399827 - DNA, 122 bp, Homo sapiens
tgataataattgcagcttcattcactcagtgctgcatttgctgtttgttggtttgtaattcgatgcgcagtcttcttgtgtctttgcgggagagttggttttagaggtggcacacaccaaaa

SEQ ID NO: 399828 - DNA, 122 bp, Homo sapiens
aaaggagcaaccaagagcagaaaatggaaaccagggtgaaactgggtgcttttaccctctcgataattacaggcttatgaagaaagtcatgactaccacaatgcctgccaaggtgaagagtg

SEQ ID NO: 399829 - DNA, 122 bp, Homo sapiens
atccctggttgccactgtcccatcaccacctagagactggtgcccatgcagtgaggtggccggtcaagttcaacgagctgccttcctctctgttctacctgtcacattagagcatttcctgt

SEQ ID NO: 399830 - DNA, 122 bp, Homo sapiens
tcagattttacgttacaaaataaagttcaagaaaagaaaggattcgaaaggaaaaaaattcgaaaaggatcacgtatgagaagctgcagttccatgtgtgaccaccaggtgccggaacaagc

SEQ ID NO: 399831 - DNA, 122 bp, Homo sapiens
ggttgtatgtggatccactagtgcctttggtttataatccttcatttttcacattttcatcgattcaaaatgccttgttatcttaaaaaattattcttaatcatttgttcacttccttgcca

SEQ ID NO: 399832 - DNA, 122 bp, Homo sapiens
ctgctgggtccatccagcattacaacaccacagccctctgaatggatattgggtgatgtccgcagggctgcaggaatgtggagagcagggtctgttggccccagcacaggatgtagtcttat

SEQ ID NO: 399833 - DNA, 122 bp, Homo sapiens
tctctgctgccatttttgctcagtactgagaaatgacgactaaagggaagcagggcctgacgctgcttctctggatggatagagaagcttttgtgccaggaagagttggaggcggcaaagcc

SEQ ID NO: 399834 - DNA, 122 bp, Homo sapiens
tccttgcagatgtcaggctggtaatcccagcgcacagtggcgcgcagatgccctggcgcacgtatggggcccttcctcgccatccccgaggaggagttgcccatggacgtgtccttgggctt

SEQ ID NO: 399835 - DNA, 122 bp, Homo sapiens
cctcccacttacaggggaacctgctgtttttgactgtcagcacaaaagccaatctgaacccgacagcagcccagctttcctatcgctccccacccacaggcgcagcccccctgctggcacca

SEQ ID NO: 399836 - DNA, 122 bp, Homo sapiens
agttttgaatagaaggtgattgtgttttccagagataagtatgtaagtcttttctgctaccggaggaggattctattttagtagtctattaagtagacaataagcgctgagttatgagttga

SEQ ID NO: 399837 - DNA, 122 bp, Homo sapiens
gctgggcaggccccgtcattgttccggctagatccgcggtcagggcttcaaatgcaaaatcgggctggggatggggtgggggcgccggtggcctctgctcttcctttaatagaccaaaggac

SEQ ID NO: 399838 - DNA, 122 bp, Homo sapiens
tgtggtttgatttttaagggcggagagatgggctcagctgctggtggaatccagcccctccgtctttgcgggatgtggggtctctgcctcctgcagtgacagcaccggcatgacccagcctg

SEQ ID NO: 399839 - DNA, 122 bp, Homo sapiens
tcccgcccccaggtgcgacggccagggccacatcaccgggtagtacgcgtcccactgtagcgcctccgggtgccccttggcagccaagcggacctgaatggctcccagttctcctggaagtc

SEQ ID NO: 399840 - DNA, 122 bp, Homo sapiens
actctgcggagggtttccgcgggatgctcaagggggcagtgtggtcctgccgaagagggccgcctcgcctcgaggaacgccttggccattttcacaggaaaatgtttaccctggaaattaaa

SEQ ID NO: 399841 - DNA, 122 bp, Homo sapiens
tttcttgttttggaacaaatatttgttttgggacaaatatttggcactacggttatataacggttatgtaatattaccaggttggatctgaaaagttttggcaattatcgtgcccctaataa

SEQ ID NO: 399842 - DNA, 122 bp, Homo sapiens
actgttgttttacatagatggcactgcacgtagggtgcatggggtgaaggggacggaagacgtggtcatggccctgtaggaatttacatcttataagagaaaaacaacatccttacccacag

SEQ ID NO: 399843 - DNA, 122 bp, Homo sapiens
gcaagcaggggataagaactgtgcctccctttctttgctggctccagagaggctccggggcggaagcagctccgtaagatatacctcgctgcagaggggagcaacagcggaacggagacacg

SEQ ID NO: 399844 - DNA, 122 bp, Homo sapiens
ggcgtgtcaggaggcgtgtccggggcgtgtcggaggcggggccaaggcgggggtaagcctcgcccctcggccgtgcgagaggccgagcttgctgcattgcagccgccgcggcgccgctcggc

SEQ ID NO: 399845 - DNA, 122 bp, Homo sapiens
aaaaacaaacaaacaaatcacaaagacaccatacagcaaaacctatctgaaccttaatgccgagaaataagaggcttgacgcgcaggcacagagggttccgtttatgtcttcctctattcct

SEQ ID NO: 399846 - DNA, 122 bp, Homo sapiens
cgcctatgacaacatcgtcctggtgctggacatcacctccggggacccctgcccggtcatcgatgggccaagatacaccttttacactcagctgcccgagaccctctccagcgtggccattc

SEQ ID NO: 399847 - DNA, 122 bp, Homo sapiens
cccttccgggaggcgcgaatcctcaggggctccttgagagggcgccagggagcagctgcgcgcggatgccttttggccctctgcggccgccgtagctccccggcagaaacccggaagtggaa

SEQ ID NO: 399848 - DNA, 122 bp, Homo sapiens
cgtcaatagtctttttggataagggggcgaccgaggcgtttactagcgaatgttcagcaccgctatctacaagaaagtcaatgtttccacccccgactgtcattctgaccagaggctctttg

SEQ ID NO: 399849 - DNA, 122 bp, Homo sapiens
tttggtttctgccagtttggccttgctgtagttgctgttgctctgctacccagagaaatccggggaaagaacaaaagagaaaaacaagtcaggtaagataaaactggaagcattagatagat

SEQ ID NO: 399850 - DNA, 122 bp, Homo sapiens
aacggaactcctatcacccagcgcattccagcaccccctccccctcccccgggaagtctgcgactgcatcctcacagggatggaatgggagtggaagctaggccaggctgggaccccggggc

SEQ ID NO: 399851 - DNA, 122 bp, Homo sapiens
cttcctctctctccttccggactgagattcaagccgagatgccttgtggggcaaaggagccggcggtgaggttccctccttcagttgcttcagcaggcacatagctccttctgatcttggac

SEQ ID NO: 399852 - DNA, 122 bp, Homo sapiens
ggcctctggaagccagaaagggcaaggcctcttcccggagcctccagcagaacccagccccgctgccacctcgactgcagaacggtgacaccgtgtccgattcccgacctccagaaccgtga

SEQ ID NO: 399853 - DNA, 122 bp, Homo sapiens
ggtcctcgaactcaacgaaggcgaagggcggtcccccgcggcgattcttgaggtcgatgtcgcggatagcgccgtatttgtagaacacgtcctcaatgtccttggttcggatgtctggaggt

SEQ ID NO: 399854 - DNA, 122 bp, Homo sapiens
tgcgccagcccacaggagggggccagcttgacctgaggctgcaccactccccacttaaagcggcgagtatcggcgggggagcgcaggaagcttactagtggggcgacccagtcgttccggcg

SEQ ID NO: 399855 - DNA, 122 bp, Homo sapiens
agtgcatagggaatatttttacaaaaacggaaatctgtaaggggtataatcgcctgcctgcgccctttgcagcatttcacgtgtgggctatggactccacctgtcctcacccacgttattcc

SEQ ID NO: 399856 - DNA, 122 bp, Homo sapiens
tctcctttcccaccacacacccacccttcactgacctcgccacgactgggccctggcatccgggcctgggggtgctaatcgacactatttcccgccaggtccccatgcccactccacactct

SEQ ID NO: 399857 - DNA, 122 bp, Homo sapiens
cttgaatttcctattcctcggacgatccatgtggaatccgtgagtagtgcgactcctttacgcaactggcgttatccgaagtgaatagctaggtggcgcgtgtacgcccatagcgtagcacc

SEQ ID NO: 399858 - DNA, 122 bp, Homo sapiens
gaatagccttggggagatcctttgcagtaggaaattcaccactcctagtcccagcacctacgaatgggagattgtcagggaccaggaagaggaagatttattctgggttgaaaattacatcc

SEQ ID NO: 399859 - DNA, 122 bp, Homo sapiens
ctgcagcagcaaccgcagtggtggtgatggtggctgctggactgagccaagtttgggagccgtggtggaaagcagctcccagggaaaggacacccctctgaccaatccaggaggagggatat

SEQ ID NO: 399860 - DNA, 122 bp, Homo sapiens
tcctcctatacggaaacggtccaggctatgtgctcaaggacggcgcccggccggatgttacggagagcgagagcggtgagtgccgtggggtggccccctgagggggaccagggtgccaagga

SEQ ID NO: 399861 - DNA, 122 bp, Homo sapiens
cgcagtgttcctattggcctcggactccccctcccccagctgcccgcctgggctccggggcgtttaggctactacggataaatagcccagggcgcctggcgagaagctaggggtgaggaagc

SEQ ID NO: 399862 - DNA, 122 bp, Homo sapiens
atgacccagagagaaaaactgcagttcgtgggacaaggacgaagtggcctctcagagatgcgggagtgctggctctcctccaccctccccgccttctccaagcccgggttcccgcccacccc

SEQ ID NO: 399863 - DNA, 122 bp, Homo sapiens
ctccaccccgaagcagggacaagagcaatggccgtacctcaggccccagatgatagttctcggaaaactctcttaggggtgggcttagccacggccaccgggccccccttctctctccaccc

SEQ ID NO: 399864 - DNA, 122 bp, Homo sapiens
ccgcctccctccagtctctgcctccgtgtcccgtggccgcctccctccagtctctgcctccgtgtcccgtggccttctctgtgtgcctgtgtcaaatctcccccaagagttccgtaagaaca

SEQ ID NO: 399865 - DNA, 122 bp, Homo sapiens
gcctacccaagcggcagccccaggtgtggcagacacaggaaggactgtgccagcaggaagcgggtgcagccatagaggggaatgcagtgtggtggccatgcagggaaggcacgggtttctgg

SEQ ID NO: 399866 - DNA, 122 bp, Homo sapiens
agccggcacaagacatgtttatctccttacattcaacacacaaaagcctccagaaatgcccgcaaacacctgcttgtgtcttattggtcgaaactggtcacatggctgccctagttgcaaca

SEQ ID NO: 399867 - DNA, 122 bp, Homo sapiens
ttcagacctcggcttcctacttccgccgctctcgcggccccacccctctcccgtcacttccgccagctgccaccaccccaaaaaaagccgcagactccgggcactcggggaacaatgtcgtc

SEQ ID NO: 399868 - DNA, 122 bp, Homo sapiens
gaaatgcaatttcaaattttccagcaatgtgcttaatatataaaataatctacacccaaccgttctcataaagctgcaagcctgctgagtagttctgtaacattataacctccagaatagaa

SEQ ID NO: 399869 - DNA, 122 bp, Homo sapiens
ctgtggtcgtcaggctttgggatgaagctggaggctgtcactccattcctgggcaagtatcgcccctttgtgggtcgctgttgccagacctgcacccccaagagctgggtgagtgatggtag

SEQ ID NO: 399870 - DNA, 122 bp, Homo sapiens
ctaggtattttttgtatttttagtatagacggggtttcaccgtgctggccaggctggtctcgaactcctaatctcaggtgatccacccgccttaaagtgctggggttacaggtgtgagccac

SEQ ID NO: 399871 - DNA, 122 bp, Homo sapiens
gtcgggcgcagcggaagggcctgctccggagcctggccagggctgcgcagtcatgatcaccgagaccgcggcggagcctacggtccctgcagtgcctgctgctgaggaggccaccgaagctc

SEQ ID NO: 399872 - DNA, 122 bp, Homo sapiens
gaaaaagagaggtgcatacttggcctttgatgttacagtgagtctcttgcatcagtctaccgcctatgggaaggaatttgccaagaatttcctcacctactcaagatcagatgtgatttcca

SEQ ID NO: 399873 - DNA, 122 bp, Homo sapiens
ctcctcagcccttgggtggtcgatgggactgggtgccttggagcagggggcggtgctcgtcggagaggctcgggccgcacaggagcccacggagggggaggggaggctcaggcatggcgggc

SEQ ID NO: 399874 - DNA, 122 bp, Homo sapiens
agtgtctgagacaggcagggaaaccaggcaggagaatgtgcacccacagcctgggttacacggctgcagctccctgctctgaggccacctcatgtgtaccaaggagacctttttgaaaaata

SEQ ID NO: 399875 - DNA, 122 bp, Homo sapiens
cagcgccctcccccaggagcatgccgagtctccagacgtgaggggcaggctgtcgggcatcgaggagcggtataaggaggtggcagagctgacgcggctgcggaagcaggcactccaggaca

SEQ ID NO: 399876 - DNA, 122 bp, Homo sapiens
gggattacaggcatgagccactgtgctgggccatggctaatttctgtattcttataaggacggggtttcaccttgttggccaggctggtctctgactcctgacctcagttgatccgcctgcc

SEQ ID NO: 399877 - DNA, 122 bp, Homo sapiens
tcacttgaaaccaggagtttcagagcagtcctggcaacagtgagaccctgtctctaccaacgaaaaaaaaaaaaaaaaaaaaaaaaacctgggcaccgcctgtggtcccagctacttactac

SEQ ID NO: 399878 - DNA, 122 bp, Homo sapiens
gcgcagagcctgcgtccccctgccgatgcccacccgactcgctaaagccaccgaggcagacgaccccaagactcccaatttccgacctccctggcccgcgaggggcggggccttcctctcgg

SEQ ID NO: 399879 - DNA, 122 bp, Homo sapiens
ggtttagcacccgggccagcagctgcagagggtgcgccaggtcccccagcactgccggcccgcccacgccgcgctcgaattctcgccccgggcctcagccacctccgcttggctgggctgag

SEQ ID NO: 399880 - DNA, 122 bp, Homo sapiens
cctctcggacgccttgcgaggctggtcccctagggcgcccgggggtggacgggagagcggcgcgcatgcgcaggatgcgcttgggcgaggagtggggagatcccaggcaagactgacacgga

SEQ ID NO: 399881 - DNA, 122 bp, Homo sapiens
gtgaaaggataatgaggaagacggagtgtggtcacgagggggcggtggctgctggcgacacgcagcagtcactctggctgcagccttgggccccatgccatttgactggaaccttcactctt

SEQ ID NO: 399882 - DNA, 122 bp, Homo sapiens
tgcgcgcccccgcccgaggctataaaagcatcgccacctgctgccactagccaagccgcgcgtccagttgcttggagaagcccgttcaccgcctccagctgctgctctcctcgacatggacc

SEQ ID NO: 399883 - DNA, 122 bp, Homo sapiens
ctagttaaagcaccagggccctggtgtcacaaagggcgctgcgtatgacgtcactatggtcgccgcctccgccaccgctgccgtagttgctacggttaccgctatggttaccgctaccgttg

SEQ ID NO: 399884 - DNA, 122 bp, Homo sapiens
aggtggccaactggactgagaggggtggcgcgctagggtgcttgtgttgacgttttgtgtcgatttatttcggatgcttatttgggagaggggttaaagacacctcttggctcctccccact

SEQ ID NO: 399885 - DNA, 122 bp, Homo sapiens
acgtcacggcgccactttccggccggtgacagagtccagcggagttgtgggggccgggggcgccatgggagccactggcgacgccgagcagccgcggggacctagcggggccgagaggggcg

SEQ ID NO: 399886 - DNA, 122 bp, Homo sapiens
ccgggcctgccccttccttctctgggcctcagttgtctcctgggagacccgtggatgatccggcttgggccatttgtttgctaagtccaggtccctgtgtgggtggcaggtcccggggctgg

SEQ ID NO: 399887 - DNA, 122 bp, Homo sapiens
gcgacgcagcgttgtgcaggggccggtagcgtgtgagcggcgagggcggcggctcgtcctcgtccaggctgcgccgcaaccccggaggatccaggcagaaagagcccccggccggggacccc

SEQ ID NO: 399888 - DNA, 122 bp, Homo sapiens
ggcggactcctggcctgactgcggggctttttaaatgcttccctggactgcggggaggggcggggggagggagggatttcttatcccgtttgttacattttgaggataataaaggtgtgtga

SEQ ID NO: 399889 - DNA, 122 bp, Homo sapiens
atggctcatttcttcacagtagagagagagaaaccatggttactcaattggcccaaagcacgagatatcaaaagtggaatgaggtttcaggcccaggtcttctgccatagagccagtgctct

SEQ ID NO: 399890 - DNA, 122 bp, Homo sapiens
cgtcctttgtagacgcagctggcgccgaggcagcccgcgcccccgccgcccgccgcccgccgctcacctgcacatgatctcgtgggtcagcagcacacggcacatctccgggttcttgtcct

SEQ ID NO: 399891 - DNA, 122 bp, Homo sapiens
aaaattggcaagaagatcaagtgcctgacatattccaacagaactctaaccggggtctctcgcagtactacctaaaattcccccaaatcaaaatctgtttttttttttctctcataaatgat

SEQ ID NO: 399892 - DNA, 122 bp, Homo sapiens
gtctgtgtatctgtgtgtcagtgtatcactaagactgtgttctgggattgtcagattctccgagaggcagctggtcactccaaaccggcttgaaccactttgtcttctggatgcaatgttga

SEQ ID NO: 399893 - DNA, 122 bp, Homo sapiens
ctcacggtgcccgccgttcccgccgcccggctttctaaccgggcccctagttccccgccccgtgccctctggagacctgcagctcctgccgccctgcgcccgctcccagggcccgtcgttcc

SEQ ID NO: 399894 - DNA, 122 bp, Homo sapiens
cccatttaacagataaggaaacggaggttcccagggcgatgacattattaactctgcacacgtcagatctcgattccccaagagacgctgtcggctctggtcccacgggtgggcccgctccc

SEQ ID NO: 399895 - DNA, 122 bp, Homo sapiens
gcggactgctgcgctgggggagtgggcggtcgggcgtgttcccgccacgcgccgccaccgcggcccctggaggtggttcactttgaggcctggatgctgcttcacggccccctctgcctccc

SEQ ID NO: 399896 - DNA, 122 bp, Homo sapiens
cggggctgtggataacgccagcccacggcagccacacgccccagaccaacacgagaagaacgcaggccgacaacatcttcatctatggtaggtgacccggttatcgttcctaagagagtcca

SEQ ID NO: 399897 - DNA, 122 bp, Homo sapiens
gctgccgcggagcgtgcacgggctgagcggaaactggctggcgtactggcagtacgagatcggcgtgagccagcaggatgcccactttcacttccaccagatccgcctgcagagcttcccgg

SEQ ID NO: 399898 - DNA, 122 bp, Homo sapiens
tcgtccgggaaagcacgacctggcgaggccgccctaaccccaggtcccggccccttagcgcgccagccttggtgagctgggcgaagccccccaacctggtcccagcggctctgagcgcgcgg

SEQ ID NO: 399899 - DNA, 122 bp, Homo sapiens
gctagtagacttacaaagcatttcggttcacacgggaaccagcaggatggagctgaacagcggggtgggctcgggacgagggtagagggctggcacagcagggtaaggtcctttggccacca

SEQ ID NO: 399900 - DNA, 122 bp, Homo sapiens
actatccaattgatctattcaaacagctgcctgttcccttaacttgtcttcagattttgtcgacccgagatgggtcctggcactaggaatgtaaaaccgttcctattattttggcttgctcc

SEQ ID NO: 399901 - DNA, 122 bp, Homo sapiens
gtggcgggcagacctgggctgtagtcaccctggcctgcgctggtagagttggggtctgtccggctggcgtgggcacctttgggacggggtgtgtgtggcgggcatgcctgggctgcagtcac

SEQ ID NO: 399902 - DNA, 122 bp, Homo sapiens
cgcgctcctgccatgataccagcctgcagcttgcggcccacttccggccccagaatgccgcgcggctgcacacttccgtcgcccaggccccgccccgttccccgccccgccgcgccatgccc

SEQ ID NO: 399903 - DNA, 122 bp, Homo sapiens
ctggaaatttatgataacaaagggtaaatgtggcaagatgaactcagaaggtgtgctgtgcgtgctttaaataatctcagtgcaaagggactaggtattcaggaactactttgaagatactt

SEQ ID NO: 399904 - DNA, 122 bp, Homo sapiens
tttgattggatcatccacacgtgctaaacctatcaaaatcatatatgacttctgggaagccgttctgcttggctggggtttcggcagcagcagggttccctttcctagaaagtccccagctc

SEQ ID NO: 399905 - DNA, 122 bp, Homo sapiens
gcaccaccatcggccgcaaggtgctagagagcggggtgaacgtgaccgtgtcccagcccacgctgctggtcaacggcaggactcgaaggttcacgaacattgagttccagtactccacgctg

SEQ ID NO: 399906 - DNA, 122 bp, Homo sapiens
aaaaggggagaaaagagtcacttaatggtggagaaacctgacaaacagcatgtgttaggccgttattgcattgctataatgaaatacctgagggtgagtaatttataaagaaaagaggttta

SEQ ID NO: 399907 - DNA, 122 bp, Homo sapiens
tggggacggtggctgcagagagccaatcccagcaaggaaccttgcagcttctggccagttcgttttaaccaaagggagccagccagtcacttttattctccttgtgaatcttagagcactag

SEQ ID NO: 399908 - DNA, 122 bp, Homo sapiens
cgggagaggcggagagacaaacggtggctccctggtgattggccagaacggagcgcagggcggggcaataggtgggaggtgcggtgattggcgaaacgctaagcggttggcgggttcgcgcc

SEQ ID NO: 399909 - DNA, 122 bp, Homo sapiens
gatggggtttcaccatgttggccaggctggtctcgaactcccgacctcaggtgatccacccgcctcagcgtcccaaagggctgagattacaggcgtgagccaccgcacccagccaaaaaact

SEQ ID NO: 399910 - DNA, 122 bp, Homo sapiens
gcagtggctggggagggcctataagtaaaagcgcaggcatcaggcacagctggatccaggcgccctcccaccatcacccgaggccgcccctctgcctccctgcagctcactcccaatgccca

SEQ ID NO: 399911 - DNA, 122 bp, Homo sapiens
gttcttgttgcccaggctggagtttagtgactgttggagtgagtgagccatcttggcccacggcaaccttcgcctcccaggtcaaaggcttttcctgcctcagcgtcctgagtagctgaggc

SEQ ID NO: 399912 - DNA, 122 bp, Homo sapiens
cattgttgaaagactaacgcaatttctccttcgggcagttgtctgctcagtaacgtccggcgatattaaccgtggtgttgtaactttacatagtcccagggtacatacaggcagagttggga

SEQ ID NO: 399913 - DNA, 122 bp, Homo sapiens
cagtgttctctttgtcttgaaaagggtaggcctgtcatgctggctcacgcctctaatccccgcactttgggaggccaaggggggcaaatcacgaggtcaggagattgagaccagcctggcca

SEQ ID NO: 399914 - DNA, 122 bp, Homo sapiens
gtggagctgcaccaagaatagctggggccatcatgactgcagccacgaggaggacgcaggcgtggagtgcagcgtctgacccggaaaccctttcacttctctgctcccgaggtgtcctcggg

SEQ ID NO: 399915 - DNA, 122 bp, Homo sapiens
gatcgtatttttctacaaaaattccttgaacaaattgtacagtcaaagcagactttccaacgcctcgtgagccaagaacgactagcttatactcacgcatgatgcaagcttgtcaaaaccta

SEQ ID NO: 399916 - DNA, 122 bp, Homo sapiens
gggcatttcctgggattcgggagaaactgcaatctcagctggtgctgctgatgtagacaccgtcattatctgaataggggatgtgggcctgtctgcaaatgcgcctcttccactttctggag

SEQ ID NO: 399917 - DNA, 122 bp, Homo sapiens
ctcacgcggcgcgcgcttgtagcgtgtgcatgcaatgtgcacaacagtcctcacacagcgcgtacgggcgtgcacgcgtccttacacgctgctgtacacagtgcacacacagaaggcgtgcg

SEQ ID NO: 399918 - DNA, 122 bp, Homo sapiens
ccccgcagccccggtcgttgggggcacatgggcacagtagcaggccctgcgcgtggggctcggcggccttctcgaagaaagtgagcagctgcctgaggcagacgtggcgctggcagtggggc

SEQ ID NO: 399919 - DNA, 122 bp, Homo sapiens
tgccgctcttctacccctggcattttagagtcttgatttgtggggagacgggaaagcatgcgtttagggccaagaccgtgtaatgaggaatattgcacagccttgaagcctgacacctggtt

SEQ ID NO: 399920 - DNA, 122 bp, Homo sapiens
tgggtagaattccaggaagtgggggtggggtgcaaggaaagagaagcttttttgagaagacgctgttttatgcctctgggcaggtatagaacctgacttctgagcttgcagccctgggcaag

SEQ ID NO: 399921 - DNA, 122 bp, Homo sapiens
tggagaggaggccaagggtcaggcatgcccccgagctcatcacataaagccgggggaaaccgcagcccctggccttgaccctcagcccagcgtgagacccatctggaaggaggagggtgggg

SEQ ID NO: 399922 - DNA, 122 bp, Homo sapiens
attctggtgtttggtatttcacttctgtttgcatcctggcgctgtaatgaaatatcatgtcgagttcccatagggctgataagccaccgtcagcccctaaagatagctctgcctgtgcatta

SEQ ID NO: 399923 - DNA, 122 bp, Homo sapiens
tccaggagagtgaagaggaacacatccacttgctgggagggtgaggcaccccagctctaccgggatggaagctcctgcgttcagtactcttccaggctttgccctgggtatctcttcatctg

SEQ ID NO: 399924 - DNA, 122 bp, Homo sapiens
gcgcgtggggcagtggctcctccagccgggaagctgttgctcacgctccggtggttgctgcggtcccgccagggctgcaccggggcttcgcgcagacgttctcccgcgatctgctgcagccc

SEQ ID NO: 399925 - DNA, 122 bp, Homo sapiens
gccagggacacggcttcatcttcctctttctccagcggaaagggggccctctccacggaacgccccacctgctagagtcctccacatcccgaaacgcaacgcccgagagcaggcgcgggtgg

SEQ ID NO: 399926 - DNA, 122 bp, Homo sapiens
ccgcgggcgcgagtgtgcgcgggtgtggaaggccggcgtgcgagccgtgaggggtgtgcgcgcgtgagccggagcggggctcgcccctcgccggcgcccgccgcccagccggtgattgctct

SEQ ID NO: 399927 - DNA, 122 bp, Homo sapiens
cgagcctccaggagtagtagctcagaagcacttttgtaacatactgttatccctcaagaacgtgtacgcgcaggggcgtttccttgtccgttaataacacaagctacaggccgagcgtggtg

SEQ ID NO: 399928 - DNA, 122 bp, Homo sapiens
ttattttagttcatgcttactttgctcccgaggggctgagtcctaagaggtagtgagcttcgatcccaagccatgtcccttccctgggacttccaggccagggatgaggcttagatccacga

SEQ ID NO: 399929 - DNA, 122 bp, Homo sapiens
atctgggaaaagcccctttaagaaggagtaaatacctccttctcccctagaggccgaagtcgccatttccctgcacggggcacagcacctcagaatacaagttcgcagaggtcaaagcagtg

SEQ ID NO: 399930 - DNA, 122 bp, Homo sapiens
tactttggaatgcacagtgcatatgcttttacttttcaatgaacagctggcttcctcacacgccctgataacctccccttcattgagtcccattttaaaaaagcatttctatgaagtatcta

SEQ ID NO: 399931 - DNA, 122 bp, Homo sapiens
taggaaacctgtgaaaaactaaattccaacaagacaattaatgcccaaacaagcaactcacgaaagacaaatagtcataaacataaaaactaagcctgaaattttaattttgtctgtatatt

SEQ ID NO: 399932 - DNA, 122 bp, Homo sapiens
gctggctgggatggaaggcacagcgagccaatcacgaaacacagcatggccttagcgagtcgcacaggtttgacgtcagcggttgtcatggtaacaggggcaaagatgctgatgccagtgtc

SEQ ID NO: 399933 - DNA, 122 bp, Homo sapiens
cacatgcttgctttatggccttaactaactgatgtcattacttaactgtccccgcggggacggggaactgaatgtattttcacaaacgtcagttcaagacagatttgtgggagaaaccacct

SEQ ID NO: 399934 - DNA, 122 bp, Homo sapiens
gcagcgaggcgcggctggactccgggcttggtggcgcggttgagagagacgcgcagctggcgaaatgccccgcgtctaaggccttcggagaccatagtctccgcggacccctggctggagcc

SEQ ID NO: 399935 - DNA, 122 bp, Homo sapiens
tgtctgtgtgcttgtcagtcggcatgcaggagcccgagtgtatgtgagcgtcagggtgtgcgagagagagaaccaagtcttcagctggccaagaggctcattagcattcctaacccatggac

SEQ ID NO: 399936 - DNA, 122 bp, Homo sapiens
tggacttaaacctttggtcttcacacacgatcaggttctcagccctgcctctgacgacaccgcaaagtcgactttgtgacatttaattcttccgcagtggcttgtctccgctccggctgctg

SEQ ID NO: 399937 - DNA, 122 bp, Homo sapiens
cattcgcagcggacgctgagcctgtgacctctttctttcttttatttaacacaaaactgacgtgtccgcattcagggccccacggccaagccggactcggtgcagacaggtcagctcggcct

SEQ ID NO: 399938 - DNA, 122 bp, Homo sapiens
gagagagagagagagagagagagagagagagagagagaggcgcacagggcagcctagactcgcggcctgagaaaggtggcacagcagcttcccgcccacgcgcctctctccgggaaagttcc

SEQ ID NO: 399939 - DNA, 122 bp, Homo sapiens
aaggcagccaggacccctggatgcatcttgaatggtgatgcctggggactgttgtctttccgcagagattacctttacttttataggcctgcaatggtgagtcatcacttatggataggttt

SEQ ID NO: 399940 - DNA, 122 bp, Homo sapiens
gagagaggaaggacttgagccgggaaagggaaggggaagcgagaatgagcggctttccgacggcagagcctgcaaggacggcgagcggctagaaccaaaacaccccctcccccttgctcgcg

SEQ ID NO: 399941 - DNA, 122 bp, Homo sapiens
gcgcggcgcgcggggagaggagtggaggctgcggttagcgggagcccgcggccgcgtgcgcgcctgccaggtagttgacccgctgctcacacctgcctgcgcggactgaatgggcgccgagg

SEQ ID NO: 399942 - DNA, 122 bp, Homo sapiens
agctgagggaagaggacgacaaatggcaagatgtgagttgtggccaaggcgcgcgggcagcggggaggcttctggcagcagaaaatccagccgggtgggtagacgtggacttgaaagccatg

SEQ ID NO: 399943 - DNA, 122 bp, Homo sapiens
aaaacattaagatcagaagaaggggaatatgaattgaagtccacagacttttattgattacgtacttggggaaaggcccagggccacgtgttggaggatgactaagataacaagcagagtta

SEQ ID NO: 399944 - DNA, 122 bp, Homo sapiens
aacagcaccgcggtggattcggagccgggtgagcagggaactgcgcctcagcccctcccacgggccgcccactgattccaggatccgaaaacgcttccagctgctccgtcaccccaggaagg

SEQ ID NO: 399945 - DNA, 122 bp, Homo sapiens
gctctcctgaacactcgtctaaggcagagaatctcaccgaagtagagaaaagctcgcactcgctgaaaaacaatggctcagtgagagcagctgaagttgcgtctggtcgttgtctgctgggc

SEQ ID NO: 399946 - DNA, 122 bp, Homo sapiens
agggccgtgtttccttacccggaacgcctccagctccttgtccgtgaggttggcggactgcgccaggtcccacaggtcaatcaccctgggctcctcgaactctgcaggggaggagcaagagt

SEQ ID NO: 399947 - DNA, 122 bp, Homo sapiens
aagaatagaaagagcagaacacagtggtaatgaacatgtgcaattaagcagtccaacatccgctaactgcagttagtgttcaaggaaaagcggtagtagggataaaggagaagaaatatttg

SEQ ID NO: 399948 - DNA, 122 bp, Homo sapiens
ataaaccttaggataactcactgcttgactaaatttttcacttttcagctgggtgtttggcggtacagacataaccacataagagttctgactaaccgtaataagatgtgtagaacaaggtg

SEQ ID NO: 399949 - DNA, 122 bp, Homo sapiens
ctacatggtgtccctttgcaagacgccagttagaaaataacccaagttgtaagtttccggcgctttacttgccggtatccctttcccaccttgcctaatctaatcgcagtccttctagtttt

SEQ ID NO: 399950 - DNA, 122 bp, Homo sapiens
ctccccctccccccaacaacaacaacaacaacaactccaagcacaccggccataagagtgcgtgtgtccccaacatgaccgaacgaagaagggacgagctctctgaagagatcaacaactta

SEQ ID NO: 399951 - DNA, 122 bp, Homo sapiens
gtggtcgttccatgagggtgggcgggaatactcaccctcggaatccgaaaagcgccgccgcgagcctgcacagcctcccatcgcatcaagttcaggtcccccgagggtccagggtcatagag

SEQ ID NO: 399952 - DNA, 122 bp, Homo sapiens
atctgttctctgcacagaactatgaatgccaacagactagtgttagttgcatgactcagacgctggcctccacaaggtcctcttgctgggtcatagacataggccagaaaagaagcttttat

SEQ ID NO: 399953 - DNA, 122 bp, Homo sapiens
tggcagctccagctctgctctcgcggctttccaggttttggggtgggtgattgagtaggccgcacctgggacactgtgactggaggacgccggaatttaaggaggggacgagggagacgcag

SEQ ID NO: 399954 - DNA, 122 bp, Homo sapiens
gtgggctgtgaccgagaggacagcgctgaagctgtggagtgtctgcgccggaagccctcccgggagctggtggaccaggacgtgcagcctgcccggtatggggtgggagagggctgggtcca

SEQ ID NO: 399955 - DNA, 122 bp, Homo sapiens
atccccctgcacccacacgcggtccaggggtgcacccgggctccaagcccacttctagcacgtccctgccctgccacctgtgccctgcgatgcccactgccagcagtgcccctccccgtctt

SEQ ID NO: 399956 - DNA, 122 bp, Homo sapiens
agcctttgtagctggtgtctagctccggccccgtgggagttttgctgcgaatgatattttcggtttgctgtatctgaaaacggctatcatccagggctttgcccagttgtcggatctgtgac

SEQ ID NO: 399957 - DNA, 122 bp, Homo sapiens
tgagagcaggctggaaaaggtcttcatcttgcttttctcttctggctgacaagggctgcccggagaactatatcgaagaggatcctgaggccaaatctggacaaaatgctgtgattaattag

SEQ ID NO: 399958 - DNA, 122 bp, Homo sapiens
aggcacgtggccccaagtgcctgggcccactctcagcccctgcatctgtgcccgtcctgccggctccatcctgcctggcacacttcttgctgtggccaaggcctccccccaccactcacctg

SEQ ID NO: 399959 - DNA, 122 bp, Homo sapiens
gttactctcctgtactcagtcaagtagattatgctcctccatggtcaagtacccttgaggcgatttgcacagttttgcagcaacagcaggatagaggttgtgctggtaccagcaggaagcat

SEQ ID NO: 399960 - DNA, 122 bp, Homo sapiens
gggaagcggtttgcagtgaagccaaagcgtgaccggcacatcatgctgaccttcagccttcggccttttggctgtggcatctgcaacaagcgcttcaagctgaagcaccatctgacagagca

SEQ ID NO: 399961 - DNA, 122 bp, Homo sapiens
gggcctgttggggcgctaggcagagcgcaaaccctagatcccttaagaagttggggctcccggtgtagccctcctgttctgcctcacctctgcccagcattctgtaccttccaaaggcccca

SEQ ID NO: 399962 - DNA, 122 bp, Homo sapiens
tgcgccgggggcggagccagaggccctgcacgtggaagctcgaagcccgtaggtggggcccgcgcaggaacggactcctgagagactttccatgtcctgaagcaaactgtgtgttcagtgcc

SEQ ID NO: 399963 - DNA, 122 bp, Homo sapiens
taactcctgtaaagcttttggtacaatggctggcatatggcagcatacaatgcatgttggcgttttagagagtcatcaaaagattgaagcaggttgctttatgaacaaataaatatatgctc

SEQ ID NO: 399964 - DNA, 122 bp, Homo sapiens
ggaactggagggctacacagaggaacttgagcatatctcttgatttttttcccttctccacgcacccaactccatcatgcttccctcactgcaggccaacccctctagttcatacgtcacca

SEQ ID NO: 399965 - DNA, 122 bp, Homo sapiens
cttcccctttcacagttttcctagccatctagatctgttacaaaatcctggtagaagatacgttccaattcaccttccatttctcacccaaagactcattagtagtcaatggaaagctaaaa

SEQ ID NO: 399966 - DNA, 122 bp, Homo sapiens
gctacaaacaaataccaaaagcgaatcactgagacaggccccgcaaagacagatttcacacgtagcacagcatccactcgctcactacaaatggtcttggaagcaagatgggtaagggagag

SEQ ID NO: 399967 - DNA, 122 bp, Homo sapiens
tggactgggcctcagctcccacctgtgcagagtggcggcctgggagctgagcgtggccctcggcagccctgcttctgagctgcatcagaggaacggaggggttctctggccctggcccggtg

SEQ ID NO: 399968 - DNA, 122 bp, Homo sapiens
tttttacctcagggtttttctgtcctctctgcttgtgtcagatgtttcctttcttctgcacgggtctgctaaagtcacactttattagtgaatatgtccttgatcactgtctaaaatagtaa

SEQ ID NO: 399969 - DNA, 122 bp, Homo sapiens
cgcgtcagcggcccgtgctattggattcaggctgtggcaccacatccaggggacaaagagcgcgtcggttgtccccaccctgcagctcttgggtccatgtcttctctctccgcgccataaag

SEQ ID NO: 399970 - DNA, 122 bp, Homo sapiens
ggacctcctctcggtgaggggctgtccccaggtaaggcttctggggcagaaggcagcctgcgctcaagccaggagggccgggccagagaacatgggggacggcggccgggccttcccctgag

SEQ ID NO: 399971 - DNA, 122 bp, Homo sapiens
aaggggcgtgttgagaagggccagcactgagaagagccagctgctgaatgcgcatgtgcacggtggacatcaaagaaagggctcgtgctgggaaagcgggcggggctgagagcggccctgca

SEQ ID NO: 399972 - DNA, 122 bp, Homo sapiens
cctgcagtatgtcacaaaactcacaagatgttgtgagtccctgccagtgccctcggttgtcgctctgcgcagatccttgcctaacttcctctcatgaattgctttctctgagtgaataaaga

SEQ ID NO: 399973 - DNA, 122 bp, Homo sapiens
acctgggttgacctgctggctcaggtatctctctctctctgagaagaaggaaaagagaagcgaggctgggggcgagaggcaccttcacatctaaattcgtaccctggaaaactggccccagc

SEQ ID NO: 399974 - DNA, 122 bp, Homo sapiens
gccgggaagatggcggacattcaggtgcggactcggggttggatgccagggtgcggggtccgccttggccttcaggggcgcgtccgggagggcagagcccggcggccaagttcgggggttaa

SEQ ID NO: 399975 - DNA, 122 bp, Homo sapiens
cgggccgggggatgcagaatggtttacagagggaccgcgaggcgctgattggtcgcaggccgcagtgacgtcggcgggcgctgcattaaggcgagggggcttccagagctcagccaacagcc

SEQ ID NO: 399976 - DNA, 122 bp, Homo sapiens
acccagcgccccctccacagctaccggccctgtgctaagtccctcactgcctggggccagcggcattggccgccactcagagtgcccggcccgccgggagctcacattccacactcagctcc

SEQ ID NO: 399977 - DNA, 122 bp, Homo sapiens
gcccgtggcctgcgtgacagtagaaatggcttcatgtcgggccgggcctgagctgcactccgcatggtgtggcctcacttttccacgttgataagtggcgtggccagctggagagctgtgta

SEQ ID NO: 399978 - DNA, 122 bp, Homo sapiens
tccctccacacttcccagggagcaggagaatattaaccagaagtacagtagcatggcccccgagctcccagctgagcccagcagcaggggaacctacagttgtagggagggtgcaacattcc

SEQ ID NO: 399979 - DNA, 122 bp, Homo sapiens
tttgggggagacaccctcttgccctacaacctttcggcagtatgtcacagcgctggggctcgaatccatggcctgacccgctcgcctgggcaagcgcttccctaggaagggggtagggagtg

SEQ ID NO: 399980 - DNA, 122 bp, Homo sapiens
tctgctggagctctacttgtcagacaggtccaacagtgcaggaggtatgagtcaggcctccggggcacccgtggctacactgcaagtaggtgcagtcaggctggggccccaggacatagcag

SEQ ID NO: 399981 - DNA, 122 bp, Homo sapiens
ctcatcgtcaatatcgtcaccttcatttctgtttattgtgcatcagtggtgcctacagcgcggaaccagaagtctcagtgcaaggcagtgattgagtagacaggcttccgaagtggaaacac

SEQ ID NO: 399982 - DNA, 122 bp, Homo sapiens
ctgtaaactcatttcagacgtttgaaacaatacccaatcactgcatccaccctcgaggagcgccccagaggaaatggcatcattactttcattttactccgtttgtgaacgactaaaggaaa

SEQ ID NO: 399983 - DNA, 122 bp, Homo sapiens
atcgtctatgcttcccttgccctctccagctccacctcacccagagcacctcccagccaccgtcccctcaagagcccccagaacgagaccctgtactctgtcttaaaggcctaaccaatgga

SEQ ID NO: 399984 - DNA, 122 bp, Homo sapiens
tgattagctctgttgctgtgtaataattatcccaacacttagcatctttataaacacttacgatctcatgcagtgtctgagagtcaggaatccagctgcaggttagctgggtggttctggct

SEQ ID NO: 399985 - DNA, 122 bp, Homo sapiens
tgttggtgatgcttctgcccatactgagtgccagactctggcagcttctggaggggggaccgtgagtctttcagtggatcctccctgtgtccaggggtcagtcattcctggtcagatattaa

SEQ ID NO: 399986 - DNA, 122 bp, Homo sapiens
ctcagtggtgctgagtccctggacggctggctggtcttggagagtgcggagttcgggcagcgaagctcctgggtcttggaggggaggtggtctgttgccctagtggggtctgcggagaggcc

SEQ ID NO: 399987 - DNA, 122 bp, Homo sapiens
tccgagccaggtgcgggatataatctcgtcgtgcgccattttttaagcccgtcggaaatgcgcagtattcgggtgggagtgacccgattttccaggtgccgtccgtcacccctttctttgat

SEQ ID NO: 399988 - DNA, 122 bp, Homo sapiens
cggggaggtgtgcgcggacgccctgcccgctgccgctgccacccccggcccggccccgcccgccccccgagccccggcctcattttcacacggtccctcccgggccggggcgggaagcgcag

SEQ ID NO: 399989 - DNA, 122 bp, Homo sapiens
ggcctgccgggccgctgagcgaggaccgagggtcaaagactgagtggaagcccgaaggcccggcgccgagccagcccgggcggggtctgctacccagagccgggttttccgggcgccctgac

SEQ ID NO: 399990 - DNA, 122 bp, Homo sapiens
cccggacgctgctcagggcggcagccaaaaccagttctccaagggtggcggggagtaaagcgtccccgtttaaagcactctgagcagcgcgcgtttgactccgacccgcagggccggtgtcc

SEQ ID NO: 399991 - DNA, 122 bp, Homo sapiens
gggatgaggggaggagacgggccatctgaaagatatgggaaagccccctggctggacttccgcggcctaggagtggggctgtgttggcggctgggggcgtctgtcacctgggtcctgaatca

SEQ ID NO: 399992 - DNA, 122 bp, Homo sapiens
agttttatctgagtctttcccacacttgttcagtgcaccccagcaaaaccaggagagttccgtgtcttcactccttgttgagacttggtgattgattggctggttattctttaacccattca

SEQ ID NO: 399993 - DNA, 122 bp, Homo sapiens
atgtttagggaatttcaaagagtgtggtatagaaaaatgcttatttatagttattcatcccggcactaagaacagtttagatatttaataaattgcaactgtgagtattaaagttatttaaa

SEQ ID NO: 399994 - DNA, 122 bp, Homo sapiens
tgttacaaaactgtctggttttgtaacaatttccccgccgccggccaatgaacagcgtggcggcacgtcacgtggtaccgttttatataacactttgctgagacaagacagttattaggcgg

SEQ ID NO: 399995 - DNA, 122 bp, Homo sapiens
ttttaaaagcaacatttggtgacctaacttatccctggcgttaaccctccatgcccaaggcgttgtccctgggaaattgtcaggagctgagcacagggttgatcctcaccctccagagtgta

SEQ ID NO: 399996 - DNA, 122 bp, Homo sapiens
gctgcgtgtctgagtgaactgtccccagctcagagtccctgattggataatgttaaaacccgccccttcaggccctgagggacggaagatgtgatcagatgctgggctgaatgaagtgtgac

SEQ ID NO: 399997 - DNA, 122 bp, Homo sapiens
cgcagggagtgcgcatgcggccgagtgcgggactggggctcctggctgtgggtgtggtaccgaggcttcagcgggtgccgcccgcctagagggagtggagcggtgagcacgtcaggggtggg

SEQ ID NO: 399998 - DNA, 122 bp, Homo sapiens
gaaagccaagaacgtaagtgttctacacatagggcgccttcaaattttttactttagcaacgtgatcttcctttaaggggaagtatgttccctcctagaaacactcccgccttggagaaggg

SEQ ID NO: 399999 - DNA, 122 bp, Homo sapiens
aaacatttctgacacttgagttgtttaggcccctttcctgcctacctgtctgtgggacgccgtgaggggatcaagggctacatggtctggtcctcagtccacactccagcagcgcggccggc

SEQ ID NO: 400000 - DNA, 122 bp, Homo sapiens
gtccaaactggatttcaccgactgactgttgaagctttcgggtctcagctgttggcccaacgaaccttcccaagaccttgaagaccggcagcctacccgccaccctgaaaggcggaagtgag

SEQ ID NO: 400001 - DNA, 122 bp, Homo sapiens
ccagtgatgctctgtgccatagagcccccataacttcactactacgtgatagtaaatccccggcaaaaaccagcagcgccttgcaagcccacgccaccccaagcatcccaggactcttctga

SEQ ID NO: 400002 - DNA, 122 bp, Homo sapiens
gttgtcaggagggaacagaatgtggactagtgattggaagcaggcggtatcagaacataccgaggggttgtggaggaacatcaacagaaaaatccattggcaactattccatatggtaaaag

SEQ ID NO: 400003 - DNA, 122 bp, Homo sapiens
ccagctccagcacggaggaatgagggcagggagtgagcgtggcgcccgtggagtacagcccgtgtggggccctcgccttggctggtgttagttcacagcccctggtgcagcctggcatagcg

SEQ ID NO: 400004 - DNA, 122 bp, Homo sapiens
tctccgaacctgccccctgggaggccccacccccgtcacacaccctccttccggcgcaggcgcaatgtggcgcccgccctgtgtactagcgccgccacatcgaccgcagccctcgcagccag

SEQ ID NO: 400005 - DNA, 122 bp, Homo sapiens
ccgcggcacggtgagcccgcagcatggtgagcccgagacggttatgacacagtgagctcacggcacggtgagcccgagacagagttacgacttggtgagcccgcggcatggtgagcccaaga

SEQ ID NO: 400006 - DNA, 122 bp, Homo sapiens
tagggatggtggtgacgatctccccgagtttcagcttgtataggatggtggtctttcctgcggcatccaggcccaccatcaggatgcgcatctccttcttcccaatcaggctcttgagaagg

SEQ ID NO: 400007 - DNA, 122 bp, Homo sapiens
tcttcttttcgctttgctaccttcaaggaccttctcccaaactgctaatttttcttcatccgttaaaggtctattgattcacattatttgctggcagtgtgtgaagtcaacgaacaagactg

SEQ ID NO: 400008 - DNA, 122 bp, Homo sapiens
agcgtcatttccggctcgaatgcccggcagccgtggcggctagagcgttcctccccagctcgaatgcccggcggccgaggcggctagagcgtcgcctcctcccggggaaccgcgtgtgacct

SEQ ID NO: 400009 - DNA, 122 bp, Homo sapiens
cgccgcgcgagacgtcgcgcgagcccggactagggagccaatgggaacgctggaagggttcgagacccggcactgagggcaacggccgcgcgccggctccgagacgagcgacgcctggcggg

SEQ ID NO: 400010 - DNA, 122 bp, Homo sapiens
cgccgggtctggaggaggaagcggccagagacagtgcaatttcacgcggtctctgtggctcgggttcctgggctgggtggatgaattatggggtttcgagtctgggagaaactgaggtggcc

SEQ ID NO: 400011 - DNA, 122 bp, Homo sapiens
gggacatggagatgggtgaggcaggggtaggggtggagttggggctgcctcggggagcagcggcttttcaccctgctatagggaggtgcgtttggctgagctgtccccccaccaaataaagc

SEQ ID NO: 400012 - DNA, 122 bp, Homo sapiens
tgatttcctgtatgtttctaccggagtccaagattccagcagtgctagcctagacagcagcggctgcatcctagaacccagaggtcaggagtgctcccaagtcagtgtgagggcatcttccc

SEQ ID NO: 400013 - DNA, 122 bp, Homo sapiens
cgtgccactgatctctaagaaatcatatccttcttctagctgaaagtcagtgaagaccagcgcaatggtgtccccgggctcagccagaatggtccaggtgcagtccgcgttgttctcgtact

SEQ ID NO: 400014 - DNA, 122 bp, Homo sapiens
ggatcccccactcggggacttcctcttcctctcagggcaggtgcagctgccacagtgagacgggcaccccgacccgggcatggaggggggcaaggggcccaggctcagagacttcctgagtg

SEQ ID NO: 400015 - DNA, 122 bp, Homo sapiens
agctcggcgcgcacccgtcagctgtgccgaggaccctgcgcccggggggccccgcggccacgtgacccccatctggctctcggcctggactgagggggctgagctcatcgcgttgctattcg

SEQ ID NO: 400016 - DNA, 122 bp, Homo sapiens
gtgtaccaggccccatggtcagtaggaaagtatatccctgagggtacaaaaatgaaaaagcgtacatccactcaccaaggacttcccactgtgccagggtctctagccccttatggggtgtg

SEQ ID NO: 400017 - DNA, 122 bp, Homo sapiens
ccctgtctgcgagccccgaggcggagatggctccccaagcctgatgcagacaagagagcccgcccctcccctgtcccgcacctgctgaactttggggtcagcagaggaatgtcccccgctgt

SEQ ID NO: 400018 - DNA, 122 bp, Homo sapiens
cgcgggcgcggctggtgttcatacccagccaggaagggcgggcgggcctcgggtgccacgcggcgtgcccggcgctttccccgcagtcccgcttgctgcccgtccctggactccttatcagg

SEQ ID NO: 400019 - DNA, 122 bp, Homo sapiens
accagctccgggagaagcaaagacagccacccacttgtcaggccacaggcgtgtactgcccgagagtgagcggagcttgcagtgtgccactgggacgggagagctggtccacatttgtagta

SEQ ID NO: 400020 - DNA, 122 bp, Homo sapiens
aacgagccttcctgatgcgttcctgccccatgactgccctccagtggcaagaggtggtggcgtgtaagtgatggggatttataaaaccagaacctctaaagtacatctgtgttttgctttca

SEQ ID NO: 400021 - DNA, 122 bp, Homo sapiens
tgtaatttcttagtcattgtaacactagttgacaaatgtttacagtcagcacaagatcggcgtttctgtgtcttttgtaacatcccccggggccatgaagttgggaaagctgtggtgttcct

SEQ ID NO: 400022 - DNA, 122 bp, Homo sapiens
aaaagtgctgggattacatgcatgagccagtgtgcccagcctaggggtagaattttctagcgatggaatcataccttatgtactccttttctatctgccctccttcaccttcataattattt

SEQ ID NO: 400023 - DNA, 122 bp, Homo sapiens
ccggctgccggtgcgggtggagcaggtcgtcaacggcgcgctggtggtcacggtgagctgcggcgagcggagcttcgcggggatcctgctggactgcacgaaaaagtgagcgggggcgcggg

SEQ ID NO: 400024 - DNA, 122 bp, Homo sapiens
tttgaagaaaaacacatgtaactgccagactgatctcttttcttggagatccggggtgaacggtatctcctggcaatgtcccaacctctgagcattgtccaaaagcatcctcagggtctcca

SEQ ID NO: 400025 - DNA, 122 bp, Homo sapiens
tgggcgacagagcgagactccgtctcaaaaaaaaaaaaaagaacaccagtaagcctctaccgcaggccctacacaagcaggcccttgtactcactggcatcgccctcccggggccgccagga

SEQ ID NO: 400026 - DNA, 122 bp, Homo sapiens
cacattaattggtgcttataagatgattaatctctgtaattcccctccagtcatttgaaacgttctataagatgcccttgtacaaaacatagtattttaacaggaattttacaaggcctttt

SEQ ID NO: 400027 - DNA, 122 bp, Homo sapiens
tgggaacgccgcgagtcgtggcgggggcgatcggtgcctttgcttcccaggcgggtttgccgctccacaccgcagcttcctgagctcgggaaggggaggtgcggcggaggcgtggggtcttc

SEQ ID NO: 400028 - DNA, 122 bp, Homo sapiens
aaactcctgcagcgtccagaacacagaaaatagactcatctcctaattcgccagggagctcgagggctgcggggccgcggggctgcctcccccgctcctcccccaacccgaccccaccccac

SEQ ID NO: 400029 - DNA, 122 bp, Homo sapiens
gcggtcccgagcgcatggactctgggtggggcgggaacccgcgctctgtgagccggctgccgccgcgccccagcgctgtcatcccggggcggggcctggtccccagctgtggtcgcttccta

SEQ ID NO: 400030 - DNA, 122 bp, Homo sapiens
gctcgctacacggtgccctctgcgcaggcgcacaccgagagccacttccggaacaagcgtcgcgtttctgaggagaaactcttggtgagaattcccagagtgataatggctacctacagcct

SEQ ID NO: 400031 - DNA, 122 bp, Homo sapiens
acaaagactcgacccgacccctgccccgcctccttccggagacccggccccgcctcctcccgttgtcttcccagacctcccgctgcaaaatgagaaacccaaatccgggccgtgcagtctgc

SEQ ID NO: 400032 - DNA, 122 bp, Homo sapiens
catgataaactgtcatccttagttgccactggggactctaagactgagaaaaatccattccgtgatgctgcttacagagttctcaaaatttctcttctccgagacatatctcaaatcagtgc

SEQ ID NO: 400033 - DNA, 122 bp, Homo sapiens
acagcgccggggacagggaaggcacagcgcgggggtgcaggggctgtgtgggcagggaggcgagctgagaaacagcagccccaagggccgaccctgggactgccagtgtgtgggacaccctg

SEQ ID NO: 400034 - DNA, 122 bp, Homo sapiens
caagagcagtcactacaacactgttagaacaaagtacatctagccagggcaaatggaggccggagagccaggatggagcacaatgccagactccagggtcactgcagaagtgtttgcctgga

SEQ ID NO: 400035 - DNA, 122 bp, Homo sapiens
gcatattatataaggttacatccctaagtgattgattaactagcgcagtgaaggtagttccgttcttttagtggaaggttaatcaggtctctaataccccaggcagtcgctcccctgcagat

SEQ ID NO: 400036 - DNA, 122 bp, Homo sapiens
ttagccaggcctctgttttgaagtttccatttccctggttcagccccaccctgggaactccgcagcatttggcaaacagacacacagaggtctctaaaaactttctgttgatttctgcacat

SEQ ID NO: 400037 - DNA, 122 bp, Homo sapiens
atataacttgcttaataaataatagtagttattaatatccaatggcaagccgccgggaaacgacggagctgggatttgaggattggctccgcgaaccccacaacacccggggactccagcga

SEQ ID NO: 400038 - DNA, 122 bp, Homo sapiens
catcgtctatccaataagaacaatccctcagccatttcagagctgtctacagctggaactcgcccaccttgtggccgtccctcgaagccctgtttcctctccttccttgctgcgtccacacc

SEQ ID NO: 400039 - DNA, 122 bp, Homo sapiens
tcggcatccaaacacaccatgatctcctcctacaggctctttctgcacttggcttaaagccgccctctcccttctgtggcctcactggcctctcctctgtgctgggagggaggcagggccag

SEQ ID NO: 400040 - DNA, 122 bp, Homo sapiens
gtgcgctctgcctgcaccattttcctctgcttaggtaggctgacagcactgacaacccggcgcccaagactgcttcacgaatgcgaatgcgtcagtctctaggcaccaggcgccagtggtga

SEQ ID NO: 400041 - DNA, 122 bp, Homo sapiens
gcagacgccggcttctcccgcagtgacttgagaagggtcagtgaaaacctcggccactgccgcagcgtctctagggagagagttaggggagatagtggccacagtcacagctgctcttggga

SEQ ID NO: 400042 - DNA, 122 bp, Homo sapiens
caccctggggaactttccttgaaagactggggattcgccgagcaggcaggatggacggttcggccgcgagggaccaccgctttccctgtgcccatggggggatgctctgggggagggggtcc

SEQ ID NO: 400043 - DNA, 122 bp, Homo sapiens
tagatttctagatggcatagatctctctaccaggcaacaccttctcattttcaccaaaggcgtttacttttactatcagcattaaaagcacccataatcattaatttgtccacagttttact

SEQ ID NO: 400044 - DNA, 122 bp, Homo sapiens
tctaagtgaggccaggctctgcgcagccaagcaaagaaccgccggaagctctggtttcaccgcggccgagcgcagatcgcgcaccggttctcacgtctgcaaacgtgcaactgcctgccgcg

SEQ ID NO: 400045 - DNA, 122 bp, Homo sapiens
ccctcagtctctttctgatccattctgtctctctgtgtctctgcctgtcactgtgtcgctcgctagttcatgtgtgtctccgtctttccctagtgctctcttgtctctccatttctctctca

SEQ ID NO: 400046 - DNA, 122 bp, Homo sapiens
tttgtctctcgctgcagcctgagctctaggtcttgttttccctgctttgtgttttctgctcgtggacgcccagcctctgtggccctgtggcctgcaggtattgggagatccacagctaagac

SEQ ID NO: 400047 - DNA, 122 bp, Homo sapiens
ttttcatcccatgtctttggctgcctggagatcttcatcctcatcctcacggctgttgaccgctatgtggacatctgtaagcccctgcactacatgaccatcataagccagtgggtctgtgg

SEQ ID NO: 400048 - DNA, 122 bp, Homo sapiens
ggtggtgcgtcagtccgctgacgtcacgccccaggagaggcaataggcaagtggcgggggcgggttctaggcccgaccggcagggggagccctggggcactgatggcagatgcgtttggctt

SEQ ID NO: 400049 - DNA, 122 bp, Homo sapiens
cgcagagcccgcggccgtcccgcctcccgccggcgctcccggcctttcccatccggcccgcgacgctccgcccgccccgtcccacatgacgccgcctccgccgcaaactttttcctccccat

SEQ ID NO: 400050 - DNA, 122 bp, Homo sapiens
gctaaccgcgcacaaaagtttgccaataaaattctagtttgaaaccgcggtttgccaacacgagtaaaggaagttggggtggtggagagctacagtgggcacggacggaaagggtggccacg

SEQ ID NO: 400051 - DNA, 122 bp, Homo sapiens
cccttcctctaaatgcctgccctgcctcctgcaatggtgggatggcctggaggtgcagaacgaggctggccctgccttctctggggagctcagccactggaggtgcctgagtctgggttcat

SEQ ID NO: 400052 - DNA, 122 bp, Homo sapiens
ttgggccttcatggtttccttctctgtttcaaaatgacttaacaactcttttcaggaaggcggctgctgtggaatggggaacgaagtgtggcagcctgggccattaggaaccaagggcagtc

SEQ ID NO: 400053 - DNA, 122 bp, Homo sapiens
attgacgagatggtgacttcctgtttgagagttagctccattctttgtgtatcatacccacggtgatagtactttgtgaggactgtggcaacagtgctgtgctctcctctgatgtaaagggt

SEQ ID NO: 400054 - DNA, 122 bp, Homo sapiens
gcggcattcagctcgtgcactgggctggcagcaggctgagaagaggcggcgcaggttctccgggtcagccagtgccctgctcctaagggtagagatctagctggggacactggtcgtccgcc

SEQ ID NO: 400055 - DNA, 122 bp, Homo sapiens
ggggctggactttggggccatgacccccggaacgtccctggggtccattgtgtgacaacgcgtctttggctgggaggacccccaggcaggggatgaggtgtaacccaaatgaggcccggccc

SEQ ID NO: 400056 - DNA, 122 bp, Homo sapiens
ctctgtcggcttctctctttcaacacccttgttttgtctagtgagtttttagtgcaccttcgttctccgaaatctgcggagagcccgcgcgcctgtgtatcaattttggctttggccgcttc

SEQ ID NO: 400057 - DNA, 122 bp, Homo sapiens
accgctggtacgtgacggtgttcccgttgcgcgccctgcaccgccgcacgccccgcctggcgctggctgtcagcctcagcatctgggtaggtgagtacagctcaggggcctcacgggagaag

SEQ ID NO: 400058 - DNA, 122 bp, Homo sapiens
tccagtggaatggagatttcattttgtcagcagcagtgaccacagccttaccaaagcagacgcgtgcgcgtgcacagatgcacacacacagatgtcttaaaagactagaatccacacttcct

SEQ ID NO: 400059 - DNA, 122 bp, Homo sapiens
cccacagtaagcactccagatgtgttggtgagacatgagagaacgtgttttgcacacatgcgtgtttagtgcatttagtgcctagtttacatacaagaagagaaatacaataacatattcag

SEQ ID NO: 400060 - DNA, 122 bp, Homo sapiens
gtaacacaatgagacaactgataaaaaggaagagaatatttagaacagcctaccaccacccgccagctctccagaatacaatgactcgggtctccaggctaggttgggcgggggttgagggg

SEQ ID NO: 400061 - DNA, 122 bp, Homo sapiens
cacctgcgggtggaggagtttattggacactgtcctccctgacaggagggggcctggcagcgcgcgggcacagggtgccggcctggggagagagacgagtgcgaggggccgggagggaggcg

SEQ ID NO: 400062 - DNA, 122 bp, Homo sapiens
cccaggaggtaccaggatcatctaccactggaaattcctgatggagtgttgaaacttacccgtgaccaaaacactcccaagggatctgcccaccattcccggggtcaccagccctgccagtg

SEQ ID NO: 400063 - DNA, 122 bp, Homo sapiens
aggatggcgaggaagtcggaaagggtttcctgagatgagagattacttccgtccgggctgcggcctctctctggagtcggctagccggggctcggggagcggggtgcgcagggctcggggcc

SEQ ID NO: 400064 - DNA, 122 bp, Homo sapiens
cagcgcgaatgcaccttcctgaaaacacacaaacagtgagggtcaacgcgttccagcagccgctgctgcagcctggccacagcccaggtgcgtctccctgggcccctcctgatggcgggagg

SEQ ID NO: 400065 - DNA, 122 bp, Homo sapiens
gaggacctggggtggctggaacaggacctggtgccgggagcaggcggggccggggattcccgacaaaggcttgatgtgtacttgaagtgagcaaagggttttgaataaaccaagaactggat

SEQ ID NO: 400066 - DNA, 122 bp, Homo sapiens
gcctgtgggtgcagttagtctatgtgtggtatgggcagcccaaggttgcatgggaaaacacgcccctacagaagtgcacttccttgagaggagggaatgacctcattctctgtccagaatgt

SEQ ID NO: 400067 - DNA, 122 bp, Homo sapiens
ggtggataagggccgtttcctgagaccagagctgtatccgcagcaggtcagcacttcgtgcgccctgtgtgcacctgtaaggaatggaatttaggccagtcggattttccaaatgtggagtt

SEQ ID NO: 400068 - DNA, 122 bp, Homo sapiens
aattcctttccctctttgctctccttccatctcagttccagcgaggggggtatgtgtgtgcgcgcgttgtgggggggcagggggagggctcgtggagggaggcgccgtcggagggagagtag

SEQ ID NO: 400069 - DNA, 122 bp, Homo sapiens
atagagagggcatctctgttgtcagcctgtgatacaagctttagcagcaccaaactgccacggggctgcccccagctttcctgagatacagtggggagatgctttgtgcagttcccccacac

SEQ ID NO: 400070 - DNA, 122 bp, Homo sapiens
actcatctgtgcctcaccgcttccggcgctgcgggatgacgtcagaggccggctgtatcgcgaccagtgacgtcaccagcacctctctaacggattggctgaaagaatcttgcccacttccc

SEQ ID NO: 400071 - DNA, 122 bp, Homo sapiens
gggtcagggtcagggtcagggtcagggtcacagctgggggagctggccacagcctccccacgcccaagacacccacctgggcccacgttcccatggattcccccttcggcagtgccctgcag

SEQ ID NO: 400072 - DNA, 122 bp, Homo sapiens
aagggaacagcaggcagtgagcgagcgccacctcccctcccacccctgcctgggcggaggcggacccctgagagggggatggaccaacccatgcctcccccagtgttttggttttggttttt

SEQ ID NO: 400073 - DNA, 122 bp, Homo sapiens
actcctgccagtttctaatccagggtccaggggctggagcatccgggctcccggtgcttgcgcttggaaacagaaatgccctcccacaagccccacttctctcaggggctccgacccaccta

SEQ ID NO: 400074 - DNA, 122 bp, Homo sapiens
tggggaccaccgggggcactcggaggagggaggcgacgagcagcctgggacgcccgcccccgccctgtccgagctgaaggctgtgatctgctggctccagaaaggactccccttcatcctga

SEQ ID NO: 400075 - DNA, 122 bp, Homo sapiens
gtggacgcggctggcccgggatggagctggcgcggccacagtgggggacgaggcagggcacgcggcgttccccgggctcggcctccctcccagcgcacgggcggtcggaggaactggagccc

SEQ ID NO: 400076 - DNA, 122 bp, Homo sapiens
gccttggtctgagtggactgtcctgcaggtaaagtacttctcttcctggtcaggttgtcacgctcttacttcctgccttgtccgcgagcgcctggaaaatagaggccttgagcccgagcggc

SEQ ID NO: 400077 - DNA, 122 bp, Homo sapiens
tctatcctgacagggacatctttgtctccaacaaccgcaattgctctccctcttgctgcccgttaggacaggccttgaggagaaaagagaaccctgagggtccctcactttgcgagatttat

SEQ ID NO: 400078 - DNA, 122 bp, Homo sapiens
ggtgtccgggagacgtcgtttcctggcgacgtggtcccagcaggcgactcggacctgagccgaatctgttgaccccaaattgtgcttttcccaccaagagcaaaagaaagagaaacattagt

SEQ ID NO: 400079 - DNA, 122 bp, Homo sapiens
gcggcctccattgctctttcagtttcccaaaaagttgggagtactcttttctcgtacagccggtgcacctccaacattatgaactgtactctcccggcctcctgcagagtgtctgggtgtgt

SEQ ID NO: 400080 - DNA, 122 bp, Homo sapiens
tggaggagaaacctgaagacaggggaactgacagagacaagtgcgttagactaaatccagcgtctaatgaagttccacagcaattacttgccatgctgtttatggaaacagtttcctgtctc

SEQ ID NO: 400081 - DNA, 122 bp, Homo sapiens
gcccagattcaagaggtgaggaaataaagtccgccacttcaaggcaggagttgaaagtcacgttataaagagaaaagatacatgtctgggtacagaattggggtcagttttacaatcaaccc

SEQ ID NO: 400082 - DNA, 122 bp, Homo sapiens
aaagcggatttgaaactaggagtcaaggaggacgtggggagctggcgccacaggagctaccgaggcggcggccgggggagcctcgcggcctgcgggagagcccggcggtcatgggcgagccg

SEQ ID NO: 400083 - DNA, 122 bp, Homo sapiens
taacgtgtccagtgggctcccgggacgacctgtttttaaattcttggtctccctgcaccgcgtccctcctttgctgcgctagctttatgacgcatcttggaagaacagggcagatttaaaac

SEQ ID NO: 400084 - DNA, 122 bp, Homo sapiens
agcctcggcctcccaaagtgctggaattacaggcgtgagccaccgcgcccgtctactgcgcgttttctaaaccttggctcctacgcatttatcagaagagagagcgcaatctgtctatgact

SEQ ID NO: 400085 - DNA, 122 bp, Homo sapiens
tcccacccctttcccccatcctgtcctagaactagcagtgaggcaatcaccctagaaactcgagttacacccattctggctaactcgattaaaagaaagaacatggatatcttattttccta

SEQ ID NO: 400086 - DNA, 122 bp, Homo sapiens
agctgcctgtctttaaatgtttgctttcatatttggaagtgctgagcgggcacttcagtgcgacctggatatcacctgtgggtttcagggcagtcatccttgagacctcttgttcctcggga

SEQ ID NO: 400087 - DNA, 122 bp, Homo sapiens
gtggaggaggcgcttgcgggggcgtggggctccccggcaggcgggaggcacggagcaagtcgcactggacaatgacctgggcagctcggcgctgcggacacttttagctgagggcgcgggcg

SEQ ID NO: 400088 - DNA, 122 bp, Homo sapiens
gcccgcaagtctggatgggccgaactaaaacccaccaaacgcgtgcgtcaagccagagttcgagaatcaaccgaagctgaaatggagccagcgtggggtggggggacccagaagggaggggc

SEQ ID NO: 400089 - DNA, 122 bp, Homo sapiens
gggagagggcgcggcgcggcggagcggccctggcagccggagggcgcgtgtggccagggccgatcctgcactgccctctgcgggatggcccggcccagtcctcgacccccagcacctccgcc

SEQ ID NO: 400090 - DNA, 122 bp, Homo sapiens
ttccttaaggctgagccctagtgtgactttcagtcagaaatgggttatactgtggccaggcgtggtggctcacgcctgtaatcccagcactgtgggaggctgaggtgggctgatcacttgag

SEQ ID NO: 400091 - DNA, 122 bp, Homo sapiens
ttcatagtaggtcaggtctgtgtggggctctgggtgtgcggtccctccacccccatctcccgcaggtttttagtcattgagcagcagaaatgaagttctgtgggcagaaattcatctccttc

SEQ ID NO: 400092 - DNA, 122 bp, Homo sapiens
ttgctttgtttcatagccaatattaatagatacccgaggcattggttttggcgagggccacgcacagcgcaggtcggggcctgggagccctgcagggatcagatgggggctaggggaatctg

SEQ ID NO: 400093 - DNA, 122 bp, Homo sapiens
ggtttcactatattggccaggctgctctcaaactccttatctcagttgatccgcccacctcggcttcccaacgtgctggggaaacttgattttctatagcattatgttactggatatttctg

SEQ ID NO: 400094 - DNA, 122 bp, Homo sapiens
actccccaaagaataaacgcctttatcgaacccggtgcggaaagaaatgagggccgggggcgggggctgtgggaagaaaagcagttcctttattgttggaaaaggcccctcggtcctggact

SEQ ID NO: 400095 - DNA, 122 bp, Homo sapiens
gtgtgcgtctgattctctggtcaaggtcaccacgggcctccaggtggcccaatccatggacgccttctcttacgagaccatgtgctgaactggacgctgccaatctcctttgcactgtgcgg

SEQ ID NO: 400096 - DNA, 122 bp, Homo sapiens
caggaacaaccacaggtcagcaaggtggctgaatattgagggtcagtcccgctgtggctacgggcagagggcaggctgtgtccatgctcagccctgactctggccctctgggacaccttggt

SEQ ID NO: 400097 - DNA, 122 bp, Homo sapiens
aaaggcctctgccgctcagtggggacccagcaaagccaaaaatcaggtccgggggaagagcgaacggtgcgtgatggaggctccgagggggagcgagaggcggaggtcgcacagtgtcctga

SEQ ID NO: 400098 - DNA, 122 bp, Homo sapiens
ttccttctcctgcctaattgtcctggccattggagaggaggagcatctcccagacagctgcgtgcctcagagaagccagcctcgctaacccctcaagcccaggggatgagaccctgctgaat

SEQ ID NO: 400099 - DNA, 122 bp, Homo sapiens
cgggcgccggagggggaactctgaccatgattggttcctcctaaccaggtgaccgcaggtcgcgttccggttggcaggcaccggccagggccagcggccttcagtcggtaggcggcggcgga

SEQ ID NO: 400100 - DNA, 122 bp, Homo sapiens
aatacagttcacaccttttcatgtctagtttagggcatttcccatcacactctgtttcctcgccaatgagatatttaacaatttacttcagttataaagttgaccttatttgtctggttatt

SEQ ID NO: 400101 - DNA, 122 bp, Homo sapiens
aagctcttttaacggtgagaacgcgttaacacttgccaaggggagtggttggtgcctgtgcggagctagcagccggcctgaggagggagggagaatgtgatccggtggaaattatcactatg

SEQ ID NO: 400102 - DNA, 122 bp, Homo sapiens
aggccttcatcatgggacaactttccaacaaggagcaggggtctcttgcaagtctgtccgcggagctccctgccaccagcactgttgccgctgtctttgtttactgcttgtcactaagcact

SEQ ID NO: 400103 - DNA, 122 bp, Homo sapiens
aggcatagcttcaagtatagcaatttatacaagtacctctctaaatatatgtcttggaatcgttgctaaaccaggtaataagggacattaccacttttgctaaggcatatttgtgtgacaga

SEQ ID NO: 400104 - DNA, 122 bp, Homo sapiens
tccggggcgggctcctcgccatcggccggcgtagtagctctggccgccgccatgactgctcggcgcaacagctccaaccgatcagctgtctctgaaaactgtcgcgatgcttcggctcgctt

SEQ ID NO: 400105 - DNA, 122 bp, Homo sapiens
tgtgatccggccgcctcggcctctcgaagtgctgggattacaggcgttagtcactgcgcccggccctagctgtggtttcttaaaagcgtgtcaactaaagtcagacaacttacacttcagaa

SEQ ID NO: 400106 - DNA, 122 bp, Homo sapiens
agtctaaaagatccctggtgctctgttgaaacaggaacctgacaccctttgaccttggtccgtggggaggtagcctgaaactccctcccaggcaggacaggagcaggggctcagcacctttt

SEQ ID NO: 400107 - DNA, 122 bp, Homo sapiens
caaaagaatgagaaaagacaagagagaaagcgggaccaggcggccaacgtatggaggctacgaaggcccccagctgtgggagcccacgctatttattggtgatcaaagaaacaggtggtgag

SEQ ID NO: 400108 - DNA, 122 bp, Homo sapiens
aatgaatctcgaatcttaagaggctctggagcccgccctgcacccccatcaccctgctctcgcccaccagagccaggaaaggagcacttggcatcagagaagagaaaggcggaggtgacatt

SEQ ID NO: 400109 - DNA, 122 bp, Homo sapiens
gacctttggcagcaaagggtgggacttctgcagtttctgtttccttgactggcagctcagcggggccctcccgcttggatgttccgggaaagtgatgtgggtaggacaggcggggcgagccg

SEQ ID NO: 400110 - DNA, 122 bp, Homo sapiens
gcccaaccctgttcttcagaatcaccctgcacacttcctgccgcacggcctttgcactggcgatttccacagccaggaatgctggtcctccagaatatttctaagcatggttcctcacttcc

SEQ ID NO: 400111 - DNA, 122 bp, Homo sapiens
tcgtcgctgacctccatcttcaacagcagcagcaccctcttcactatggacatctggaggcggctgcgtccccgctccggcgagcgggagctcctgctggtgggacggtacgggggtggggg

SEQ ID NO: 400112 - DNA, 122 bp, Homo sapiens
gtgaacacggaagcccttttcctaagtgccttggaatcttttccgaaactctgtgtagttcgattaaagccggacccacccaccccctccttccaagaatcgaaactaattggattttaaac

SEQ ID NO: 400113 - DNA, 122 bp, Homo sapiens
gccttcttcccaatagcaaggctgtgcatctagcctcaagctctggctgaactttgtggtcgacatcaatctaaagatacagtgtctgactataaccttgttccaaaaacctaggcaaagag

SEQ ID NO: 400114 - DNA, 122 bp, Homo sapiens
cctttcttgagggcagggctttttaacttcagcattattaacactttggaatggaaaattcgttttcagggttatcctgtgcattgtaggatatagtatcgctggcctctactcactacatg

SEQ ID NO: 400115 - DNA, 122 bp, Homo sapiens
gataatgtatggctgcgacttggggctggaagggcgcctcctccgcgggtatgaacagcacgccaacgatggcaaggattacatagcccggaactaggacctgcgctcctggaccgcggcgg

SEQ ID NO: 400116 - DNA, 122 bp, Homo sapiens
ggggccgggccctgagcccggggaggctgaattattcatctttaatctgcccgcagctgccgccttttcataccggtaacgcgagttctcccggggcctaaattattgatggtcggggtttg

SEQ ID NO: 400117 - DNA, 122 bp, Homo sapiens
ccggcgcgggagccttgctgtaatcccctgccaccccatctccgactgtgaggggcgcaccgggtgggggaatgggtaaataactggcccaaggcccagcttccaggtcctccctccacttt

SEQ ID NO: 400118 - DNA, 122 bp, Homo sapiens
gggctcatcaccaatggccccctctggcaaacagggccacacagcagccattcccattcccgggtgaccctaaggcccagtacccaaaattccagtggctcctctcggtccagcgaaactgc

SEQ ID NO: 400119 - DNA, 122 bp, Homo sapiens
ggttgcaaggttccgagctctgcagggtgtcttccttccttgaacaggcttgcgccgggacgctgcggcggacgagagatctggtcccggtacccctggagttcacacattggtagaaacaa

SEQ ID NO: 400120 - DNA, 122 bp, Homo sapiens
agagagtctcagcaggacagcgagcaagccgacaggtcccagagagtctcagcaggacagcgagcaagcagacaggtcccagagtctcagcaagacagcgagcaaggggacaggtcccagag

SEQ ID NO: 400121 - DNA, 122 bp, Homo sapiens
caaactcctgggctcaggggatcctcctgcttccacatcccaaagtgctaggattacaggcgtgagccacatagcacctagcccatagcagatatgggataacatgtcgaacatggcatgac

SEQ ID NO: 400122 - DNA, 122 bp, Homo sapiens
atcctgaaacctcacaggatttttcttctcttccctttgatctctcttccgctaacccaacgggacaggactcgccgcctttctttccggtcagaaaggagtcccttccggacaggaccgaa

SEQ ID NO: 400123 - DNA, 122 bp, Homo sapiens
gggggcggggagcgcgcgccgggcggaggccgagtggagggggaggggagggggtccgagcggcccttaggccctgcccctgtcgcctactgcgctcagaaggggcctcagggcctgccccg

SEQ ID NO: 400124 - DNA, 122 bp, Homo sapiens
taagactaacattccatcatttctcaccagtgtgggctgtctgatgatgaatggcgcgctcgtactctttacggtcttacacttttatgctcctatgaattctctgatgggctttaagggct

SEQ ID NO: 400125 - DNA, 122 bp, Homo sapiens
acttctgggttccgccctggcccggggcctctggccactaccttggttgaggtaggtcagcgtctcttcatgcagcttcacggctggggacgtggcagcacacaacacatattgcaggggtg

SEQ ID NO: 400126 - DNA, 122 bp, Homo sapiens
gcggatgctttcatcccatgtgtttcctcaaagctgagattccagcgctcttgctcttttcgtgttgttgttaggtttttaacttttttttcccgtttcctggcagaggattaacacgctga

SEQ ID NO: 400127 - DNA, 122 bp, Homo sapiens
gcctaaaactgaccagtgcagagtaacagggaaccggactccaacaaattaacagtgccacgtgccggtcacacttgtgcacagaggcaaccaaccgttctccttcgtgtgccagcaccgct

SEQ ID NO: 400128 - DNA, 122 bp, Homo sapiens
ggccggggacccactctgcccagccggagggacgcggaggaggaagagggtagacaggggcgacctgtgattgttgttattgatgttgttgttgatggcaaaaaaaaaaaagcgacttcgag

SEQ ID NO: 400129 - DNA, 122 bp, Homo sapiens
cctgtgtccaccagcccggctggggaagggctcctgctccaggcctcctacatgtggacgcggacgaaaagggggctctaaacaaccagtaggaaagaagtgtgtgataaggacatctgcgg

SEQ ID NO: 400130 - DNA, 122 bp, Homo sapiens
caccagccaggagaaaacactgcattgtggagggtatttctctagtctctcccagcccctcggccaatgtgtcaataatgtgagtcctgttttaaaacacttatgtgctgcctgttaactgt

SEQ ID NO: 400131 - DNA, 122 bp, Homo sapiens
tgcatcttcccactgctccctacagttggcctttccagagctgaatattctcagtattcacgggtcagatgaactgtcaggatgtcctctttcctctgtcccctgaaactctgctctcaagt

SEQ ID NO: 400132 - DNA, 122 bp, Homo sapiens
caaggagataactcacccccacaaggcggaaattagctctttaaacacaaaccagacccacgggtaggcaagaggagccccgcctgcctcctgctcctcctggagtgaggttgagggtgagc

SEQ ID NO: 400133 - DNA, 122 bp, Homo sapiens
gggccgcctcggcgctggcgctggtgctgcgctcccccggcgcctcctcgctgctccctgcgctgggctcccctggcgcctcctcgctgctccctgcgctgggctcccctggcgcctcctcg

SEQ ID NO: 400134 - DNA, 122 bp, Homo sapiens
cagcgggggtagcaggcatctgaagattggaatggggctggaggattccaaactctctcacgtggctgttggcaaagaagcctcagtacctcactacatgggcctctccaaatgactgctca

SEQ ID NO: 400135 - DNA, 122 bp, Homo sapiens
ctccctcatcaatgccctgcgtggcctggaggccgaggaccctggcgcggctctcacgggcgtcatggagaccacgatgcaaccgtcgccctatccacacccacagttccctgacgtgaccc

SEQ ID NO: 400136 - DNA, 122 bp, Homo sapiens
agcttgcgatctgttcaagatggccacagaaacacttccggtatctttccgcactaggcccgccccaatttgcgtgtttttaccgtgcagagggagggatttagagttagcctttgattggt

SEQ ID NO: 400137 - DNA, 122 bp, Homo sapiens
gggctgggcgcagggctcccggccaggctgcagggcagcgagtcgctgggggaggtactgcgggcaccagggcgccggagcaggtccgggtggaagccggggtggcggcgggcgtgcttggc

SEQ ID NO: 400138 - DNA, 122 bp, Homo sapiens
cccagtttctgcagatggctctgtggtcctgcactaggaaactgaaagcggcgtcagaagcgcccgaggaagaggtttccttaccgtgggtgcaccttgcctaccagcgtttcagaagccgt

SEQ ID NO: 400139 - DNA, 122 bp, Homo sapiens
gcgctcctcggtgcgtggggcacgagggtccgagggccgggaagccagagcagcgcctctcgcccaggcctcgctttctctggacgcccggcagtccccggggctagagcgcacggggcggg

SEQ ID NO: 400140 - DNA, 122 bp, Homo sapiens
agtggagctttatttagtttccttttctccagctgacaaagctcttgctccaatctcctccgatccctaggcatttcaaactctacctcctccagttctactcttaactgagctttcatcct

SEQ ID NO: 400141 - DNA, 122 bp, Homo sapiens
tgcatcttggtgaagttgagccagcacagtcaatcaggctctgccccggggactgagagccggcagatcagggagccctcctgtctctcgcccaccccgggagtcaattgttcctggttttc

SEQ ID NO: 400142 - DNA, 122 bp, Homo sapiens
cccaggaacatgactttagtcctaagagtccgtggcttgagagcaggagctcctgagaatcgctcggttattccacgcatcggttgtccctcaggtaagtggtgaatgatgcctcagcagcc

SEQ ID NO: 400143 - DNA, 122 bp, Homo sapiens
agtcagaggagcctgggtgtctgcaggacataatctaagaccacaaaccaccttgttccacgtgagaaggaaacaagaaagaagggagccaggggaatcctgcaaatttttaggcaacctct

SEQ ID NO: 400144 - DNA, 122 bp, Homo sapiens
tgctccaggaaacaccatcatccttgctccataccaacatggtagaggccacctggcagccggccttgtgagcacaaagggagtagaaaagaaatactactcctgtctcaacatcgctcact

SEQ ID NO: 400145 - DNA, 122 bp, Homo sapiens
cattttgaaccctgcgaccctagtgttttccctcttttcctagctcttcgccgtctttcccgatgtcggccaatcaggggaaaaggaaaaggcccaatcagcagaaagtccacagctgaagg

SEQ ID NO: 400146 - DNA, 122 bp, Homo sapiens
catcttgtagacgcgctcatgcttccggaccgcgggcgccccaccgggaagagcgctccacgctgaagaggaaggaaacttcacacttaattcatcaaattcaaactgagctgtggtgaaag

SEQ ID NO: 400147 - DNA, 122 bp, Homo sapiens
caggacccaggcagccccacctccttcctggtggactcgaatccgatgggaagttctctgcggtctgttttggggactggcagattttacaacaggacagttcatacaacggagcctgagag

SEQ ID NO: 400148 - DNA, 122 bp, Homo sapiens
tgtgaagtgattgcagatttgtcttaatgccaaagatgaggcctagatgttttagatttacggagtctcagttaaaacatttggtggctgttattaacagtttgaggggtgtaattcacgtt

SEQ ID NO: 400149 - DNA, 122 bp, Homo sapiens
ctaggtgaatagtttctcactaatctaatcctttcagattaaattaagcttcacttgattcggtagatggcatcttcaaaatgaaggggccctcagatactatttactcccattttttccca

SEQ ID NO: 400150 - DNA, 122 bp, Homo sapiens
agtaaacgcgtgggactgggaaggacccagtcatctgtatattggttaccaacacgtggccgcgtagaatcatgggggaaaaaaggccccatcccaatactaaccaacagaatctctgagaa

SEQ ID NO: 400151 - DNA, 122 bp, Homo sapiens
ggcgggaacttggctcactgcaagctcctcgccattctcctgcctcagccttcaaagtagcggggactacaggcgcccggcatcacacccagctaattttttttgtgttttttagtagagac

SEQ ID NO: 400152 - DNA, 122 bp, Homo sapiens
ggaggggagcacttgcgtttctgtgttggaaaaacccggcccgtgtgtggacttgaaagtcggagcgggtctcaggccagctgcagccgtgcggtcgtgactgtggccccctgggggaggtc

SEQ ID NO: 400153 - DNA, 122 bp, Homo sapiens
gaccgagcaaacgtccatgtgcatccttcccatgtacatttgtagggtttttctgtgtgtcgtcttctgtgtgctttcaagtgggagcttttagcgtacactttgttgcatccatcgtaatc

SEQ ID NO: 400154 - DNA, 122 bp, Homo sapiens
cccattttgcctgtagaattttggtgagagaaagtttgcctcaatttatacttatcttatcgtgacatccaacatatttattgtatgcaggtaggtcatcctaaggtttcttctcccagtgg

SEQ ID NO: 400155 - DNA, 122 bp, Homo sapiens
ggaacgtaaaaagcagtccatcttagcagccccgggcaccggcgatcggctgctggcccccgccacccttgtctgaaacgccctgtcctgcacccaaaggaaagggctcccctggcactctc

SEQ ID NO: 400156 - DNA, 122 bp, Homo sapiens
tgaatgcacgaatgaatagatggatggatgggggaataagtggatgaaaggatgagcttgcgaatgaacaaatggatatggatgtatggaccgacgcatggacacatacgagaaaaatttgc

SEQ ID NO: 400157 - DNA, 122 bp, Homo sapiens
cacagttcagaggtgggtccaatccacctcttaactgtctcaaatctgctcccttattcccgtctccaagactgttgctccaacttcggtcaacatcataatacttggttcttccctttctt

SEQ ID NO: 400158 - DNA, 122 bp, Homo sapiens
ccctggccatggctgatgcgcaccatcaccgctctgatagctaatgtaagaagtccaggccgggcgccgtgcctcacgcctgtaatcccagcactttgggaggccgaggcgggtggatcacc

SEQ ID NO: 400159 - DNA, 122 bp, Homo sapiens
cgggcgaggatcacgtagagacgtgtagagacgcgacgaagcacgaagacccgtgtttgacgggttgccaggtgcctacatcagagctcattaaattacacattaaatagatgcacgtgtgt

SEQ ID NO: 400160 - DNA, 122 bp, Homo sapiens
ggatttatgatctacttgtagccaagtggaaatgtttcaggcaagtactgagttcttattcgtcttgtgtctcctctgcagctggagctctcaaacactgctgtcctgcaccagatgcggcg

SEQ ID NO: 400161 - DNA, 122 bp, Homo sapiens
tcctccaggctcagctcaagagcctttctttcaggaaggttcagtgtgccccacccacagcgagaatgtccccctccctggctgcctcacttgttgtctctctaggctctcctgccttctct

SEQ ID NO: 400162 - DNA, 122 bp, Homo sapiens
gggaggcggtggggggttgaggagtgtatcagtcagtcctggcagggaacacaggaaacacgccaaggtttcattgaaggggcataaatgaagaggctatttacagaggtggggggcagctt

SEQ ID NO: 400163 - DNA, 122 bp, Homo sapiens
gggctgaggggctcgctcggggtgctgagtgagctggaggtggccgtgtccacagagttgcgcttgctgccgctggtggaggaggtgcaggacgctcggcgcggccactctggtgcacggat

SEQ ID NO: 400164 - DNA, 122 bp, Homo sapiens
ttatcttcaattgtacaaaagagaagttaccctgtacacagtacatatcataaggccagccgcctaatgataggggcagggtaagggtgtgtgtgcttagacagacaattgttgctttaatc

SEQ ID NO: 400165 - DNA, 122 bp, Homo sapiens
caggttctggacagctacgccgcctccagagacctggaccctgctacctcactgccctttcgcagcatcgccacccatggacactcaaacctcggcctcggcttccatccgctcggctccca

SEQ ID NO: 400166 - DNA, 122 bp, Homo sapiens
ctggcgcgggttccggggggcgcctgctgggcttgattggagacaatcccgtgcgtggaccgccgttccctcttcgcgggaatgttggccaggatagcaggtctccttctctttctcgcttc

SEQ ID NO: 400167 - DNA, 122 bp, Homo sapiens
ggaccttgggcaccgggtggaacgggcggggcggctgtccttgtgctcgggcagcgagggcgccggcgagaagcgcggctgcagctgagcgctccgcatccctcctgccgttgctcctgctt

SEQ ID NO: 400168 - DNA, 122 bp, Homo sapiens
tccgctgggccctccggagtcatccctgtcccctgccttccccatccagagccctggccccggacccatatgtcccatatgctgtcccatagcatacttgcggctatgctgccggacctgct

SEQ ID NO: 400169 - DNA, 122 bp, Homo sapiens
gtccccccacagaatgaaatcagcaccatgagagatatctgccttcccatgttcatgaagcgttagtcaaaatagcccaaacatggaaataacattttaagtgcctatcagtggaataattg

SEQ ID NO: 400170 - DNA, 122 bp, Homo sapiens
gagcgtggtcattgaggacaagttgacgagagatcccgagtacatctacagtcagccttgcggtaagcttgtgcgctcggaagaagctagggtgataatggggcaaactaaaagtaaaacta

SEQ ID NO: 400171 - DNA, 122 bp, Homo sapiens
gagggtccgggtctccggggtccttcttgcagcagcgctggcgagggcggacccagatggcgctcagtacagccccaggatggctgcgcccacgtccttggagggccggcgctcctgcacca

SEQ ID NO: 400172 - DNA, 122 bp, Homo sapiens
ggcccagtccgtgcagcccactgctcaagtaatttctgcggaacaccatggtgcccaggccggggcgggtaaacagggagtcgtggcctgagtcggtgctgacctccgagtgggcaggctcg

SEQ ID NO: 400173 - DNA, 122 bp, Homo sapiens
cttcctgcagctgactgacagcacttctcaggtctggctgactggaaaataatacatttccgacagatcatttggtttagccttttcttcttgtaaacaattatctaccagtgtgtgcttct

SEQ ID NO: 400174 - DNA, 122 bp, Homo sapiens
gcctccatcctgtaccaatggccagagagccggggggtgacagacaggggggccggcagccgagccaggcaggacgctgcgcgccgcgttactggagccggtgtcccggcaaccccggaacg

SEQ ID NO: 400175 - DNA, 122 bp, Homo sapiens
cgtgtgttggggcagagtgccagactgagaccacgaccattgcgcatgcgcactatgtttcgctagaaaggggcgtgttgagaagggccagcactgagaagagccagctgctgaatgcgcat

SEQ ID NO: 400176 - DNA, 122 bp, Homo sapiens
agccgctgcccggcttcccgggcggtgcgggcggtggcggtggtggtggaggcggcggtccgggccgcggtcccagccctggccccagcggcccagccaacgggcgccactacgggattaag

SEQ ID NO: 400177 - DNA, 122 bp, Homo sapiens
aataatgcattgcgattaatcatagaggggctctttgaaaggcgattggcaccgggccagcgctattcaaacccgctcgccttaatcaattagttcgtgatttgctgcagacccctgtctct

SEQ ID NO: 400178 - DNA, 122 bp, Homo sapiens
cagcattactgagtttggggttccccctattgtgtatttggctgcagtgaccaaataattcgattacgacgctcatttccctttgaatacttgaaaagccttctcaagaaggacaagtacaa

SEQ ID NO: 400179 - DNA, 122 bp, Homo sapiens
gggtaaggaagaggcccagggcccgagggtcgggaggcagtcagcccagccggagggaagcggaaggtggggagtgggaagaggaggacgctgccccctaggggagccgagtcacaggctgg

SEQ ID NO: 400180 - DNA, 122 bp, Homo sapiens
cctgctcaccaggcactagcctccttggagggtgtggaagattccaaggtgatccggccccgagtgatctcgtacaagcttttctggttagagagacggttcccaaagcccagagatctgtg

SEQ ID NO: 400181 - DNA, 122 bp, Homo sapiens
aaaagcgggaagttcagactgtggcctgacccaagcactttgcagtgggctagggaagctcgatttccctccagcggccgaactgtggtttcagtgggtttgggagccaagttcgggactgt

SEQ ID NO: 400182 - DNA, 122 bp, Homo sapiens
tcgccaccagaacctcctagaacagaacagaacaggatacaactgaagcaggcggctgtccggcctcctggccccgcaggggcaccttccatcctgcgcagaagcggcaccgccatgcggac

SEQ ID NO: 400183 - DNA, 122 bp, Homo sapiens
ccctccagcctgggcgtctgcggggtgggagtgacctggccttaccatgttgagctcctccgctgccgcagcccaacgctactacttgacctcaaccgccgctgcagctgcgcacgcccaac

SEQ ID NO: 400184 - DNA, 122 bp, Homo sapiens
atttcacctcgcgatatctcagcgcctcggtcatcgttgagcttccggttatgtcctcagcgattggccaggacggaggggtgcgtcctctaggcacctttctgaattccgttttccttgta

SEQ ID NO: 400185 - DNA, 122 bp, Homo sapiens
ctcttccccagctggccccgcccctcgaagccctgccctcatctctgccggccccacctccgcgccccggccaggctcaccttggtctccgccagttgtcgcttgagcagctgcagcgcttc

SEQ ID NO: 400186 - DNA, 122 bp, Homo sapiens
tgatttagactttctgttggttgcctcccaaaacattctaacagatggcaatctatctatcgattgatcaattgattgatgccagaaacgggtactcaccacatttcaatgaaatgcaagac

SEQ ID NO: 400187 - DNA, 122 bp, Homo sapiens
cgtgatccgcccgcctcggcctcccaaattgctgggattacaggcgtgagccaccgcgcccggccccctggagcctgtcttaatcacttacccgccaaataaaatctggctccagagagtgg

SEQ ID NO: 400188 - DNA, 122 bp, Homo sapiens
ggatgtagcttttcttctgattcttttcttcctaagctgaaacttaaatagttcccttttcgtggtagtggaattgttttttttttttttttgagacctggagaagttagtattctacttct

SEQ ID NO: 400189 - DNA, 122 bp, Homo sapiens
taatacccggaccttgcaagtaaactactgttaagttaggcctcttcctggcaccaactgcggtgacagcaccctcggctggtctgaaaaaagcaaaactctctgcaccgcctcccccatct

SEQ ID NO: 400190 - DNA, 122 bp, Homo sapiens
caagccttagccacctgccttagcctcccaaagtgctgggactacaggtgtgagccaccacgcccagcctgtttgcgctgttttctgaggctttccgccaaattgctttctttcctggcaag

SEQ ID NO: 400191 - DNA, 122 bp, Homo sapiens
gctgctgcgtgcgactcttccagctcccggcgcgtccccagaggtccctaccgggtggcacgatctattatctaggaagccaatcgatgtatgaccgcccggtgtaggtcaggagagaggcg

SEQ ID NO: 400192 - DNA, 122 bp, Homo sapiens
ataagaggaagatttctatctcctgctcatccttcggaacagaatgtcttggtgtaaagccgaccattcgttctactcttagataggagaaaaccagcctgtggctggaggcgagatatgct

SEQ ID NO: 400193 - DNA, 122 bp, Homo sapiens
catacaaacttagctcatcctgcctcagctgccagaagaattagggtttcactgcagggccgagtaattggggttggtgtttcctgggtgtattgtgcagctctgcgccagctgagacaccc

SEQ ID NO: 400194 - DNA, 122 bp, Homo sapiens
ctgccaacgggcagctaatgagggcagcagcaggaattgggtctctaaaggccgagcactcgtcatgcccagccaggcctctgctcttgcgcttcttcctctcttctcttcagtcttcttag

SEQ ID NO: 400195 - DNA, 122 bp, Homo sapiens
acacacacacacgcgcgcgggcctggggcacgccctccacacacatgcaggggtagggcacgcccccccacacacacacgccggcctggggcacgctcgcgcgcacatgcacacacatacac

SEQ ID NO: 400196 - DNA, 122 bp, Homo sapiens
cagaagagcaggctgagtaacggtctgcacctcccgatgcctggagggagtgttccgagccgaggctcagttacacgtgggaatcaagcagagcccatcccgggagcgaatagggtttgtta

SEQ ID NO: 400197 - DNA, 122 bp, Homo sapiens
atctgactgctctcagttcctcataggagtggcatcacacagtgtttgtccttttgcaaccggcttatttcactcagcataatatcctcaaggtacatccacactgtagcatgtgtcagaat

SEQ ID NO: 400198 - DNA, 122 bp, Homo sapiens
cacaaagagggggaggtcggctggtggaggggactgacaccggttgcatttcaggggcttcgcaaggggtagaatgagcactggactgagggttagaagaccagggtcccccacgtgtctct

SEQ ID NO: 400199 - DNA, 122 bp, Homo sapiens
accccagccctgcagggaccagcaggctgcgatcaggaaggaagctgcgcccccaccctccgcatcctgagtgccccattcatgtggccagctgggcggacagagccccattcaggaggcct

SEQ ID NO: 400200 - DNA, 122 bp, Homo sapiens
ctgcactctgtctctgagcacatgcacagatctgaattcttacactggcagatggagctccgtgggctcctgtgttaccacgcaggcttcaatgtcatataaaacagagcagggagtgaaac

SEQ ID NO: 400201 - DNA, 122 bp, Homo sapiens
ggagacggcagagggaggacagaccccggcagggggaggaggaaacactaagtggctccgcgtctggtcagcccgggcccgggatgccaagtgagaaaagtagggattaaaaacagctgtac

SEQ ID NO: 400202 - DNA, 122 bp, Homo sapiens
ggggcgtggctcgggtccacccgggctgcgagccggcagcacaggccaataggcaattagcgcgcgccaggctgccttccccgcgccggacccgggacgtctgaacggaagttcgacccatc

SEQ ID NO: 400203 - DNA, 122 bp, Homo sapiens
ttttccttcctcaaagaatcggaggctcacggccagaggctgttttcttggtaaagaaatcgggagtgttttccttccactattgtccccactcccgcccaccccccgagggattttcatag

SEQ ID NO: 400204 - DNA, 122 bp, Homo sapiens
cactgtggcactgctttaggcctgtgtggggctgtctaggcctgtctagggataattcctcgaatgaagcttttggaggacagaccccgtcgctttccgcgaggccctcccaccggcctcag

SEQ ID NO: 400205 - DNA, 122 bp, Homo sapiens
caaggctcatccatgttgtagcacgtgtcagtagtaccgcctgcctgccggtgctgcgcccgggattaagtgcatgtgaagccattccgcagtgcagtccatggtatgagtgctggcgttcc

SEQ ID NO: 400206 - DNA, 122 bp, Homo sapiens
tcctaggaccccaaacatctctgtgacctccttgctggaggtaaatccaaccttcccagacgtgtgagaacactaggaacatcctgcacacatagaggggtttctctgtcacagagaaaata

SEQ ID NO: 400207 - DNA, 122 bp, Homo sapiens
cgtagataggcacaagtcctctctgagtggaatatttgaagccagagggagtcagctatacgaatatccagagctattctgtagctctggattggccacaagagggtattgagcactggaat

SEQ ID NO: 400208 - DNA, 122 bp, Homo sapiens
aagtcttccaaggtctgaaatattcaaaggaaaacaaaccaaaactggctctttgaaacgcgtgtctagcaaggaatatgtactaaatataagcgattcctatttctactgacgtaaaagat

SEQ ID NO: 400209 - DNA, 122 bp, Homo sapiens
ggcagaggtcagagaggttcccactcagcccggcgtctggaagcagcgtggggtaggggccgctccagtaccccctcctccagtgtcgaaggtgggcaggccctcggccgggtggatgagcc

SEQ ID NO: 400210 - DNA, 122 bp, Homo sapiens
tgtattccgcttgaattgaatctcaggtgggcatctttgttttacaggtgggtcatggtgcgcaggggcggggcctagctaagggggcgaggcttacccggaggccggacggccacgtgtgg

SEQ ID NO: 400211 - DNA, 122 bp, Homo sapiens
ccgccgcgccccagctgcccccgggttgccagcgctgggtgagggcacctctccccgagccgctcggcggctttctgcagccctagctgcctcgcccccagtatgtgacgtgggtgacaatg

SEQ ID NO: 400212 - DNA, 122 bp, Homo sapiens
ccagccctgctgagcgaccccgccagtcgggtccatcctgcagtaaatgcacaacccggacggaagtgcctctccgacagcagatccaggctcggagctccagacgctgggacaggtgaccc

SEQ ID NO: 400213 - DNA, 122 bp, Homo sapiens
ctccctgaccccttgcgcttcccgagtgaggcagtgcctcgccctgcttcggctcgcacacggtgcgcgcacccactgacctgcgcccgctctctggcactccctagtgagatgaacccggt

SEQ ID NO: 400214 - DNA, 122 bp, Homo sapiens
cgggccggggctgccggggcccgagtgggcggggacgcgggggcggggccaggaagtgggcgggaccactggggtggggccggggagtgggcggggcagcgcagtgggcggggccgcggtgt

SEQ ID NO: 400215 - DNA, 122 bp, Homo sapiens
ggatgactttccccacggacacgggcagagtgtcacacttcacaagccacagatgccttgcgtggcctgtgtgtgtttagaccccgtcctgtgccccgccgggcccacagcacagacgcgcc

SEQ ID NO: 400216 - DNA, 122 bp, Homo sapiens
ccaccaaaaaacaaaaacagagaaaagaaaaagcgccttaaaaagtgcagagaaaagatgcgccctcccaccaggggtcacaataatactcctcgggacgcagccagcggaggcagggtcct

SEQ ID NO: 400217 - DNA, 122 bp, Homo sapiens
tcaaaggggagagataaggcgcagactagaaacgctaggctggacccgggccaggcgcgccgcggggcagagatgggcggagcgggaacgggggcgggggcgagaatgggggggcggggacg

SEQ ID NO: 400218 - DNA, 122 bp, Homo sapiens
gccagagggcgcgctgactccgttgccagaaccaggggggcaggggcgtgcgcccgaggtcgagcaaagcaccagtacagtggtgaaaagggggtcccctagatgcccccatcaggccaata

SEQ ID NO: 400219 - DNA, 122 bp, Homo sapiens
gataaaaatgaaggatggaccggggcttcattaagaaactgtgtccctgtgtcaggtatgcgagactacaaggcagagctgagggccttatgaaaacatatatgggccgggcgcggtggctc

SEQ ID NO: 400220 - DNA, 122 bp, Homo sapiens
ttcttgaagctataaactagggagcatggtattattaatataaatctcccagtgtcattgcgaagataatatgagatcatgcataggaatcaactgtcagtgacagacacaaactcagtgta

SEQ ID NO: 400221 - DNA, 122 bp, Homo sapiens
tgtcctagcccctctctgaagccacaccatctgaagttagccacgtctctccgtggtttccgacgctcagccacttgtatcctggaggttcagccgcttgtgttgctttcccagctgaagtc

SEQ ID NO: 400222 - DNA, 122 bp, Homo sapiens
ctggaaagccagtcagcaaaaaaggggctgcagtaatattgggccacatagtgtatccaccggtaaagatcagatttcttgaaaccttgaaaccaggagcctccaatcttcctgcttggaga

SEQ ID NO: 400223 - DNA, 122 bp, Homo sapiens
ctccattcagtcttctctgcagtaataacacctacactcctttttgtttcgacctcctttcgaaagtatttatttgttctcaaacattactcttgcaggatccagcttctgccctgattccc

SEQ ID NO: 400224 - DNA, 122 bp, Homo sapiens
agtatttgtcaaaacccaaagaacttcacaggacaaagagtaaactttaatgtatgcaaacgtaagcaaatcatttagaaggtcaaggaatcccaaggtggaatgcagattgtaacaaagaa

SEQ ID NO: 400225 - DNA, 122 bp, Homo sapiens
ctggaggagaagaactttgtgcaccgtgacctggcggcccgcaacgtcctgctggttaaccggcactacgccaagatcagcgactttggcctctccaaagcactgggtgccgacgacagcta

SEQ ID NO: 400226 - DNA, 122 bp, Homo sapiens
ctagtggtcacaagtaaaatcttacatttcctccttcatctttatttgatatttaatgggcgatgctgtctttttctctttaattcaggttgttaatgaaaatctgggctgttgaattatgt

SEQ ID NO: 400227 - DNA, 122 bp, Homo sapiens
aataaacaatagaagcaggaaggtcactgtcaccctccccctgcccttctttcctgaagtcgattatagacccttatgtgagatgtgccctctctgtacccagaggaaaggtgcatcctgga

SEQ ID NO: 400228 - DNA, 122 bp, Homo sapiens
tctggccggggctccccgggtgcagacaacctcccaacgaccgcgcatccgcccggcaggcgcgcctccctacctgtgcactgctggatgaagtgctggtactccgctccctgctcgccggg

SEQ ID NO: 400229 - DNA, 122 bp, Homo sapiens
cgacgtcctagagagcatggcatcactgggctgcttcagggaccgcgagaggctgcatcgcgagctgcgcagtgaggagtaagaccccaagacccctgcacccgtgtacccacgtggggcga

SEQ ID NO: 400230 - DNA, 122 bp, Homo sapiens
gggaaaatgcacattccaggtggcaggggcagcacgtgcaaagcccctgtggtgagggcgcgccggacagacatgctcagggcacagcaaggggcctgcagactggcccatgtaggaggggg

SEQ ID NO: 400231 - DNA, 122 bp, Homo sapiens
atgaagcacctctgtcaaagcacacgggagtacagtcctggacacagcctacccttggagcggagtttgccatgttaaatacgttggttgagacgggctcagagggagtacaatgatgcaca

SEQ ID NO: 400232 - DNA, 122 bp, Homo sapiens
cgcccaaggtcggccccttccgggcagtgaaagcaacttctagccggcctcccccttcatcggcttgggccgcgtcccagtgaaactgtggtcgataacccgtagcctctcccggttgccgc

SEQ ID NO: 400233 - DNA, 122 bp, Homo sapiens
caggtgaaatcacaagggccagaacgtgtgcttacggaggcaagtgctgatgaagtgagacgggagccctcctcccacacccgccactgggggccgacaatcaattgcagctttacacacgc

SEQ ID NO: 400234 - DNA, 122 bp, Homo sapiens
cagtattaataatctgtttcatcacatcctaagcatctcattctaaaccaagaaataggccgggtgcagtggctcatgcctataatcccagcactttgggaggctgaggtgggaggatcaca

SEQ ID NO: 400235 - DNA, 122 bp, Homo sapiens
tggctgtgtgtagggtgatgagtagcagaagcacgggtgacactgagctctttccactgccgggcacggtgccaagcacgccacgtatactgacttcatgaatcataaagccctgtgaaggg

SEQ ID NO: 400236 - DNA, 122 bp, Homo sapiens
agactctgtctcaaaaaaaaaaaaaaaaaaagtacatgggtaaactgtggaacatccggacgttggaatatttttcaaattaaacatgaactagctattaagccacggaaaggcacgctggg

SEQ ID NO: 400237 - DNA, 122 bp, Homo sapiens
agcttctgctcctctctggtatggaccgggatggacagtctcgtccatggtgacatcaaacggccctgcctcaggcctcttctctcttgatatgagtgtacccacatgcaaacggcttgggg

SEQ ID NO: 400238 - DNA, 122 bp, Homo sapiens
tgcccccacaggctaggctgcagcttggccctggtgcacccgagcccagagcagcggggacgggcgtccgggagctcgcccgggtgcggggtcgctcctgaggcctgggccggggctctact

SEQ ID NO: 400239 - DNA, 122 bp, Homo sapiens
tttattccacgtcgtccgatatttttacacaagtaaaataaaatgcatatctctatataccgcgatctgggtgggaggcggcgttctggaacaaacgctgccgccgaaccctgtaaacatga

SEQ ID NO: 400240 - DNA, 122 bp, Homo sapiens
ccacagcaaaaatttaataagcaggaaaaactagtggaggatggcatcactaatacttgacgtgtgaaaaaccgatgttcctatcacaaaggaaagaaatgactcattcttcatgacataga

SEQ ID NO: 400241 - DNA, 122 bp, Homo sapiens
gattcattctcaaatagtcacatacaacactcactctggaagaaactccctttcacatgccggtgtctcccctgcccagccacttcccagctttgaggttgggctcatctaggctggaaaac

SEQ ID NO: 400242 - DNA, 122 bp, Homo sapiens
tcagtgttgccctggggcccagtgggcaggtgagggagcagcaaggccacagcaggtccccgggtcatggagggcttggctgggagggagcaggcttgggttatggcccggggtcactctgc

SEQ ID NO: 400243 - DNA, 122 bp, Homo sapiens
ccaccgccagctgcaggacatctgccggctggagcgggcagtgtgccgcgatgagccctccgccctggcccgggcccttacctggaggcaggcaagggcacaggctggagccatgctgctct

SEQ ID NO: 400244 - DNA, 122 bp, Homo sapiens
tcctctgactgcgttggaatatggaggaaaggtcctgctcgaggttgagcccttcagggtcgctgtgggtttccaggaggagctccctcactactgacttagggggccctcggcttcccagg

SEQ ID NO: 400245 - DNA, 122 bp, Homo sapiens
tccctttcaaatggctccccaagaagtacatactcaaggactaagatgaatcaggaagtacgccaggaaaagaaatgagacagagagccagaaaaaacaggcactaaccctagatctttaaa

SEQ ID NO: 400246 - DNA, 122 bp, Homo sapiens
gaagtcagacctctgtggcaggctgtggatcatgtgggaagccacacactggccctgagacgaggaattattaggatggaggggaagcacaagagtgctggtcagcccaggcactcctaaag

SEQ ID NO: 400247 - DNA, 122 bp, Homo sapiens
ttgccctttccccctgctatttccgtttccgcgcttcaagcggatctcttccggttatggcgcccgctgggagtgtcttatcagccgcttataccgcggaaactttaacctgcgttttcccg

SEQ ID NO: 400248 - DNA, 122 bp, Homo sapiens
gacttgggtttcagtcttagctctagcactcacagtctatgtgatactgaacaaattgctcgcatcttctggggctcagcattcttgtctatcaaatagagataataccatctcatctcagt

SEQ ID NO: 400249 - DNA, 122 bp, Homo sapiens
gagataagggcatttgtttcaatgaaaaagttagtgttaaaggaagtgagtcagggagggcggagtttgttgtaaggcaatcacctgtcaaaacagaaattgggtgggaaaggagtctttat

SEQ ID NO: 400250 - DNA, 122 bp, Homo sapiens
ttccctcctggtccagggacatgggcggctttgccatctggtgcaagaaggccaaggccccgaggccagtgcccaagccccgaggtctcagccgggacatgcagggcctctctctggatgca

SEQ ID NO: 400251 - DNA, 122 bp, Homo sapiens
cctggacatctacgacaccaaggacttctccctggcagccacctcccaggacgaggctgtcgtgtcagtcccccagccccgctctcccaggtggcccgttgtggtggccgaaggggaaggcc

SEQ ID NO: 400252 - DNA, 122 bp, Homo sapiens
ggaaaccattggtttattgattagtgatgcctgtgcattgttaagctacagagtgtgttacggtgtccagagcagcatcaccaggctctttcccagctaccgggggccacagtgggccatgt

SEQ ID NO: 400253 - DNA, 122 bp, Homo sapiens
tgccagatattttactcttgcacacaccaaataatgggggtgaggatgcagcagattctacggctcttcagtctgtggtgcccatgcacgatttctacctgttttcaaaggttctcaccttt

SEQ ID NO: 400254 - DNA, 122 bp, Homo sapiens
tgctatgtgtttggtaggtgcttaacaaatacttttttttttttttttgagagggagtctcgctctgtcactgatgctggagtgcagaggcacggtgtcggctcactgccagctctgcctcc

SEQ ID NO: 400255 - DNA, 122 bp, Homo sapiens
tttggtcccaacactgaaccaaggaaattgcgcccaaggttgaagcacacgcaatccgtccgtcatgcagacaaatgctctttcaggggtcctaattaagtgtggaggcctgactttccttc

SEQ ID NO: 400256 - DNA, 122 bp, Homo sapiens
atgtcaaagcccctgggattctcttgccatgttcccttggtctctctttatgggcagcagcgacccctgtcgggtctcaaattcaacctcaatcggcgacttaatctaggtggaggtaaaga

SEQ ID NO: 400257 - DNA, 122 bp, Homo sapiens
acccggacactttggtaacggcttactgggggctctaagaccattaatcggtttcagaaccggagtccctgtgcctcccttgggaagcacttttcacataaagtaaaaagttcggtgacctt

SEQ ID NO: 400258 - DNA, 122 bp, Homo sapiens
ctttttcattcactcagcacattgtgagcttccagcgcgcctttctttcagtaggccagacgctagctggggtcgtcgggggatccccagcggtgacgccattgaaaagggtgcgctctggc

SEQ ID NO: 400259 - DNA, 122 bp, Homo sapiens
ccccactgtgggctcgcgcctggcgcccctcaccgggcttccaagcgctcttgtcggtgtcgctagaaaactcgcagagattggagctgagaaaaggcgggcaaagttccttttgataagtt

SEQ ID NO: 400260 - DNA, 122 bp, Homo sapiens
cagcagatgcaggggcgaggaagcgggtttttcctgcgtggccgctggccgcgggggaaccgctgggagccctgcccccggcctgcggcggccctagacgctgcaccgcgtcgccccacggc

SEQ ID NO: 400261 - DNA, 122 bp, Homo sapiens
gtcataaacaaaacttcctacgatgcagatttgtttactgattacccatgacgataacgacgactactaagacaataacactctccagtcccacctttattgcttttggtaacaataaaatc

SEQ ID NO: 400262 - DNA, 122 bp, Homo sapiens
tgatggggggaagcagaaacatcagtttggcaataaagagagctagatagaagggatcttcgaacagtaagaatgagagattagatcgggggtaatgggggccttaaatgccaggccaaagg

SEQ ID NO: 400263 - DNA, 122 bp, Homo sapiens
ggtaaggtggaggcaagtcccgtaactaagacaccagagtgagaattcctactgtaaactcgcgacccatccctgcagaaataaacaaaaaaattggagcaaagtactatgcgaggggcgaa

SEQ ID NO: 400264 - DNA, 122 bp, Homo sapiens
tggcctcttgcgagatggtttcttcattcatctcctttgtagcgcttggatggtggggaacgggggagggctgagtctcttttttaacctcagacagacgcagaagcagaaagaggggaact

SEQ ID NO: 400265 - DNA, 122 bp, Homo sapiens
aaaaaaattaccgggcgtaactgcacgcgcccgtagtcccagcactttgggaggctaaggcggaggatcacttgaaagagagagaaaagcagctacacatctatagattcggttcacagatg

SEQ ID NO: 400266 - DNA, 122 bp, Homo sapiens
caggagctgaggggtgagggctggggaccatgccgcgggctaggtcgggcccgtgcaggccggcgccttgggctgtacatagtgttccctctcatccccagggttcgtccccagcgtccgtc

SEQ ID NO: 400267 - DNA, 122 bp, Homo sapiens
tcaatctcatagtccactggcaggaagttgatagccttcacctggtcccgagtcaggccccggtacctgatgcccccttcccagggcgggtgtatgatctggcaacctaaggggtgagtcgg

SEQ ID NO: 400268 - DNA, 122 bp, Homo sapiens
aaaagaaaaaagaaaagaaaggcaaggcaaggcaaggaaatgaaatgaaacgaaacgaaacgaaaagaccctgccaaatgtggtaagaccacatcgctgtcacacagtgagcataactctag

SEQ ID NO: 400269 - DNA, 122 bp, Homo sapiens
gggagcagggggagtgtagagtgggccctggtaagcacggccagctcagagaccaaaggacgacagtggagaagatgataaaaatggcttgaatttccaaagtacttactgtgtaggaggca

SEQ ID NO: 400270 - DNA, 122 bp, Homo sapiens
ttcttcaatggataaagtataaaatccttcaccagtgcacgcctttcatgatctgatcctcgcttatattcccagcaccatttcacatcatttttcttctccatcatttccaggaattctag

SEQ ID NO: 400271 - DNA, 122 bp, Homo sapiens
agggaaggggtgtgtacaggctgctgcagaggctgctacaaaacctgaagcgccacagcccgcttagctccgtgaagagaggagtaagcacaaaggttctggagccatctcaagatggagac

SEQ ID NO: 400272 - DNA, 122 bp, Homo sapiens
catgctcaaccttgagtcccgtgaggcttaggaaacagctgctaatgtacgccaattgagcgggaagcccatgtaggaaggcctggaggccgggaagccagggaggacgcagcagccagggt

SEQ ID NO: 400273 - DNA, 122 bp, Homo sapiens
aatagccgagagacatgtgttttctggagccgtacacgctactttcatccgatggtgtggcgatgcaaatacgcccgggggcagtagcccctcgggcaggcacgcgggaccggttgctcccc

SEQ ID NO: 400274 - DNA, 122 bp, Homo sapiens
aagtccctgccctcaggggtcttactctggtggtagaagcagctatcacacaatggagaacgtcataataagggaatagaaactgctatggaaactcagaggaagaatgtctcaactaactt

SEQ ID NO: 400275 - DNA, 122 bp, Homo sapiens
ggccctgcatcccgctgtcctgaatgcacacgtctgtgtgccgtgggatggcctctagagcgattcctccctgaatccctgcaacagacacctctgagtccaggcacagcaggatttcagga

SEQ ID NO: 400276 - DNA, 122 bp, Homo sapiens
ggctcctcaaactctcccaccgtataaccctgcttgattcattcctgtttctttccccgacgccagtgtctccaggaggagtgggcatcacaggcggctgcgtgcttattaccccctcttcc

SEQ ID NO: 400277 - DNA, 122 bp, Homo sapiens
ccacggggtggggtgaaaatggctgggatggttaccagtggttactggtgcctcctgctgcgaccggcctgttcacttgggcatgtccaatcttgcgtttgttttttgtgcatgttctgttg

SEQ ID NO: 400278 - DNA, 122 bp, Homo sapiens
agtccttatcaacagaaatacccataacaggccagttcatcatgtttctgaaacaccatacggagaagctagttttctgagtaagaggttagactatattaccttgaatatttctcccaact

SEQ ID NO: 400279 - DNA, 122 bp, Homo sapiens
agggtgagaggcgggaggatcacttgagccctgaagtgtgcggctgcagttagctttgatcgtaccactgcactccagccagggtgacagcaggaccctgactctaaaaaaaaaaaaaaaag

SEQ ID NO: 400280 - DNA, 122 bp, Homo sapiens
cagccacgtgggctgcggactgtgtttgtggactacatctcccaaagtgctccgcaggcgcgcccacaggaagtcgccggagcatctcccgcctccacgccgaggcgaagaggttctatccg

SEQ ID NO: 400281 - DNA, 122 bp, Homo sapiens
tgccactctggaggagaatgagggctcttctggtagttctttccttaaagaacaggagcacgtttcttccccagaagtctccaaacttatcctcatatttcactgggctgaatttgattaca

SEQ ID NO: 400282 - DNA, 122 bp, Homo sapiens
ggagctctcccggggcgcctttgtggtagaaaagcaccggagcctcacggagatcaccgacgccacgggacccctccatggtggatctccgtggatctccacagtaagccgagatcgcgcca

SEQ ID NO: 400283 - DNA, 122 bp, Homo sapiens
taagtgagagcatcgcgagtagtgtggtcgcagccatgtcattgtcaccgctgcgggtggcggtggtgtgctggaataaccagaaccagagcatggaggcacacagagtcctcaacaaacga

SEQ ID NO: 400284 - DNA, 122 bp, Homo sapiens
agcgcagggcgcgaggagagcgcggggcaggagccgtgtgcgtacactcgcgcgcccacacgctctggaggcacacgcgggttcatacctgcacaccagacaattacgccaaacacatgaga

SEQ ID NO: 400285 - DNA, 122 bp, Homo sapiens
ctaaatagggcacacaaacatgtccttggttctcccaggccaccacttccctaattctcccgtcttcagtctttgacacaggtaatgaacccacaggtcaccgagaagagcatcacctgcga

SEQ ID NO: 400286 - DNA, 122 bp, Homo sapiens
aaccaagacgcaactttacctcgctaggtttccgggtgtgggccttgaccctccgcaccacgggaacaaactcttacctagactcttggggcagccatgacacctagaaccggaggtgaagt

SEQ ID NO: 400287 - DNA, 122 bp, Homo sapiens
ggcaggcaattagtggagggagcttcaaagatctgctttagtggagtgatgtcctggggccggcactgtttagaccagcatcctggcatccgcaaagtaaggggatatttccgaacagcgga

SEQ ID NO: 400288 - DNA, 122 bp, Homo sapiens
aaggctccccgtccagccccgccctgcctcccagcaacgcggagcgagagggaacccacacgcccacctgctcaggtagaaggagaagatgttctggtccaccagcttctgctgcatcaggt

SEQ ID NO: 400289 - DNA, 122 bp, Homo sapiens
gagcgaggggatggtgtccgcctcctgttcctccctgccgttttttagagaagcctgaaccgggacaaaacacgccgagacctacagacacaaagccggggggtccacgctggcgctggagg

SEQ ID NO: 400290 - DNA, 122 bp, Homo sapiens
agctattccctctccacatggtcttcccagcagggtagctgacttctttcatctggctcacgtgcaaatggcactttatttgccatggcccacagattccctatgaaggcttttttagatcc

SEQ ID NO: 400291 - DNA, 122 bp, Homo sapiens
gtatggacatccatgcgggaacacagatgaaccaagggacctgcactaatgctcctggaccgcaaggggaagcgcagcgagggctgttggtctagatttcttgaactttctgagcagcattc

SEQ ID NO: 400292 - DNA, 122 bp, Homo sapiens
ccagtgtctgtctattcaaattcacccttgtaatctagtgaagaaggggtgtgcttcaaccgcaccgtcacagcaataaggagcagacgtcataaaataaaagaagaaacgtttccttccag

SEQ ID NO: 400293 - DNA, 122 bp, Homo sapiens
cctttaatgaaaacaggtgatgctgcgggggctgcatacagtccagcaagccctgtcgagcgctggcttggctcaccctgtcccatggttgcaggccgctcctcttatccacttggccgcag

SEQ ID NO: 400294 - DNA, 122 bp, Homo sapiens
aagaaaaattttttttgagacagagtcttgctttgttgcccaggctggagtgcagtggtgcgatctcagctcactgcaagctgcgcctccggggttcgcaccattcttctgcctcagcctcc

SEQ ID NO: 400295 - DNA, 122 bp, Homo sapiens
attcacttaccctacttatatgtgaatattgcaattaagatggcaaaaggcaggcagcagcgcgagcacatgtggccatgatgaatgcaaatgttaaagattaaccttttttaaaaaaagca

SEQ ID NO: 400296 - DNA, 122 bp, Homo sapiens
aaaactgattccacagttctcttcctaagttctgcttcccaagtaattgggtaatatccacgtacatgcagtgcagtaggatcacctctgcctcacgcatccgtgcctcatttcctcactta

SEQ ID NO: 400297 - DNA, 122 bp, Homo sapiens
tgcttcagttccagaaggaggactctcttcctgcttgccctagtgtagtggttctccaagcgtggtccctgaaccagcagtgtcagcatcacctgagaagtatcagaaatgcaaatgttcag

SEQ ID NO: 400298 - DNA, 122 bp, Homo sapiens
ggcagaaagcctggtataaaggcaaagagtgcctcctaatcaggcgctctcgggccgtcacgtggtcccgcctatcactttagcccttggacagggggaagctctgagcctctgtgtcctct

SEQ ID NO: 400299 - DNA, 122 bp, Homo sapiens
gcacgagcaggggccggatcaggtgggggcttccacttccgtttaaggcggtaagctccacgtcattgactgtgtaagcagagaggggccagctgcgaggcaagcctggagccccggctctg

SEQ ID NO: 400300 - DNA, 122 bp, Homo sapiens
gcatgccaccacagccagctaattattttctgtggagacggagtctcgctttgttgcccacgctggtcatgaactcctgggctcaagtgatcctcctgcctcagctcccaaagtgctaggat

SEQ ID NO: 400301 - DNA, 122 bp, Homo sapiens
gcaattttagttttatcctttttgccaagtttcaaaagtggtaatgaataaagcagagcccgtgttgacatgaagtttctctctctctctttttttttttttttttttttttttttttggag

SEQ ID NO: 400302 - DNA, 122 bp, Homo sapiens
actggctgagctgcagttctgaggtcagactctgtgttccaagtaacagaaaagccaagacgcacaatggggaaattaattggctcatgtagccaggatgttcagaggaaggcttcaggcat

SEQ ID NO: 400303 - DNA, 122 bp, Homo sapiens
acacataaaggaagatgatgatgaccagagaatcacacatgcgagactcaaggtaatccacggagaaaaagactggagtgctccaggaaggcttcataaggtggtgtatttgagcttagaaa

SEQ ID NO: 400304 - DNA, 122 bp, Homo sapiens
ccacctgccagagtggcagcagacaggccagctaaatccttgacctatgatttaagaggtcgggcatagttcaatagagccctccaggctgagtcccagctcattcacacaggtcagaggga

SEQ ID NO: 400305 - DNA, 122 bp, Homo sapiens
gtgtagagcacacagatggtgcacacgggcagcacgaagcccaggaccaacgtgtagacacggctggccttgaaccagacctgctcgggccacgggaagctcagcccacagcttgggacctg

SEQ ID NO: 400306 - DNA, 122 bp, Homo sapiens
agagacctgtcctgcaatccaatgttcctcactctcacaagattttacagacgtggaaaccgaggcccgaggccccaaggggtaatcggcccgccttcccatgccaataaccggcagtggcg

SEQ ID NO: 400307 - DNA, 122 bp, Homo sapiens
cggaggggtgcggaggtggatgtccgccccgtcggtgggtgcccagcccgatgtccaccccgtccctgggtgctcttggtggcaactcgctgaagcctgcctcggtttccccagaggtgaga

SEQ ID NO: 400308 - DNA, 122 bp, Homo sapiens
gcttagtgactcacttcttatggatagaatgtggtggaaatgatgatgtgttaccccgtacgctaggtcataaaaggaactgcagctttgttcttgctgtctcccttggatcacttgcttgg

SEQ ID NO: 400309 - DNA, 122 bp, Homo sapiens
gaattttaacattggttccatgttaatctgtaaacctcattcagattttgcaagttgtcccgataatatccttaatagcagcttgtttttattaagtattcactccaaaatcatgtgttgtg

SEQ ID NO: 400310 - DNA, 122 bp, Homo sapiens
atgcagttagctgagagaatatggaactattaaaatactagtaaagcaagggtttatccacgaacctaaattccaaggcttatggtgattatgtgtagtgagtcatcagcaagagaattgct

SEQ ID NO: 400311 - DNA, 122 bp, Homo sapiens
agacctggcaaactccttacctagcactgtcttgtatgctgtaaggaccctctagctccccgcccccaggaccacctcaagatgtcaccacaccagaagcccttgccatccacctttcttct

SEQ ID NO: 400312 - DNA, 122 bp, Homo sapiens
tccgagggagcgggaaaaagggttccggcgagatccactgcgccggtgtgcaggctcgagcggtcaaagctctttccgggggcccggggaactactctccttgcctcgctctgtctccttcg

SEQ ID NO: 400313 - DNA, 122 bp, Homo sapiens
agtctaaaagtgaggcgtatttgaaatttgttctgtgtattgcaagtatattgcatgatacgcacaaagtgctcaaagtgcgtggtaccacaagaagctaaagccaggagctgtctctctga

SEQ ID NO: 400314 - DNA, 122 bp, Homo sapiens
ctgaaaatctactttaacagagaaagcgctctagatggcaggtgtccttagagctgggagcgaagcccaagcaagaactaaagagggtggctgactccacaaagccacccccacaaccccca

SEQ ID NO: 400315 - DNA, 122 bp, Homo sapiens
aaaccacaacccacattacttgagggctcgggcgtgcgcaaagctccgggttcagtttcccgcgctggaactttttcaatagtaaacgagcaaagctccgcgcgcccaggtggcgcgagcac

SEQ ID NO: 400316 - DNA, 122 bp, Homo sapiens
agtttccccacctgtaaaatgggacggcctcatcctggggcataatggggacgtttaacgcggttcctggggcaaagagaatgggaggagaatcgatgccatcttctcctgggtgcggtgag

SEQ ID NO: 400317 - DNA, 122 bp, Homo sapiens
agcagactctccaaaataaaagagctggatcagagtcatcgaacatttcagttcccctaccgctgcccccgccagcagccaggactgcgaggagcgggtgatgctgcatgtcctcccacttc

SEQ ID NO: 400318 - DNA, 122 bp, Homo sapiens
actaacttggctgattgcaaggcatggggtctgggggcaccacacttgaggtggtcggggcgcttgtcaggcccaggctcctggcctcagcgcggcgcccagctcccggtgcacagggctcc

SEQ ID NO: 400319 - DNA, 122 bp, Homo sapiens
tcgggccggggtgcgcaagggggaccgcatcctggaggtgtgagtatcggggctacccgccgccccatcctccccgcgcccctcctgcccctgcactcctcgctacccttgtcacccccagg

SEQ ID NO: 400320 - DNA, 122 bp, Homo sapiens
cgtgccctcaaaagcccggatatcatcaccggtacctcttttaagcttcacctctctgtgcggctccgcaagtatgttggtctccctgagagagtggggcctgcaacctgctgggcgcaggc

SEQ ID NO: 400321 - DNA, 122 bp, Homo sapiens
cagggatggagcggtggaatcaattccccaactgcactttgccagtgtcctctgatctcccgagcctccccttagccaaatcctacctgacacctgcgggcagggagcccgagtgatgggga

SEQ ID NO: 400322 - DNA, 122 bp, Homo sapiens
ctgtgacccagaccaccaacaggaatctttggggtctaaaccgcaaacaggcgaaattcccgccaccgcgcgcccgcgctccggaaaggcggggccacggcgcagccctcccccggctacca

SEQ ID NO: 400323 - DNA, 122 bp, Homo sapiens
agcaggagcctccccgggggctttctgacttcaaagtgcactcagatctgcgttttccttcggactctacaccggctcttatgttggcggctcttgtatgtttcttttttccctgatcatga

SEQ ID NO: 400324 - DNA, 122 bp, Homo sapiens
caagacgccatcggagacacccttgcctgcaacggttgtggtataaagcaaggtaagtagcgtgatattcactgctttttgtcccacagaagccatcgctgtgtgcggaaatccatgacctg

SEQ ID NO: 400325 - DNA, 122 bp, Homo sapiens
tgcctactgataaataggggatactaatggccagattttccattcccccaccccagcacccgctgtcactcaattaaaaaaagatagagggagagagcctgggggaggggcaggaggccttg

SEQ ID NO: 400326 - DNA, 122 bp, Homo sapiens
ctgatgggaattaccaggcggcgttggtctctaactggagccctctgtccccactagccacgcgtcactggttagcgtgattgaaactaaatcgtatgaaaatcctcttctctagtcgcact

SEQ ID NO: 400327 - DNA, 122 bp, Homo sapiens
ggccaggctgaagcagtgactggtcctggggcgccaagggcaagtgtgcctggccagcatcgccccctggggtctcctatacaggaccttcaccccctaccctgccacccaggaccctggga

SEQ ID NO: 400328 - DNA, 122 bp, Homo sapiens
gatatggttcataatatctcggagtggagagggtgttattactctctatattgcgggaggcgtgcacctctttgtgatatgatttgtaatatcccagtggtggaggatactattactcccta

SEQ ID NO: 400329 - DNA, 122 bp, Homo sapiens
tattctctcccgaccggcctcgtccctagcgtcccaagagcgggatcaggcggctgctagcgaaagacctacaggagcccagactcgaggcccgccaggatgcggagactgagggcgggttc

SEQ ID NO: 400330 - DNA, 122 bp, Homo sapiens
taccgccgcttttcggatgggctgtgatagatggagtagcagcgaagactgctagaagagcgttttcagtcggcctttagtgattcgtaaaaccaaattagctggtttctacttggaagggg

SEQ ID NO: 400331 - DNA, 122 bp, Homo sapiens
tgacagcgcctccccgtgcatttgccgtgcacagctccctttattccccggcgcgaggcacgattactccatggtctatggcagcaatctggccgtcaggacgttgagtcagcagaagctct

SEQ ID NO: 400332 - DNA, 122 bp, Homo sapiens
tacaaggctgtaagggtaaaagtctaaattttcaacaaaataaccaaatttgcatataaccggtctatgcaaaggcaaagtggaattgaaaaattcaagaaaatgccaggtagcctttttta

SEQ ID NO: 400333 - DNA, 122 bp, Homo sapiens
gagtcctctcagccgcccgagggcgctgcgctgagccttacactctatgattgctcctaccgactcccatgaggaagtgcgatcgggaacctcctatatacttccgtttgcctcgcggtttc

SEQ ID NO: 400334 - DNA, 122 bp, Homo sapiens
acctgacgcaacaacaaaatagaagcgttgatctatggggcaggcagactgtaaggttcacgcaacacaaattcccatggtgcaaggttactagttctagggcagaaggccactgtttttcc

SEQ ID NO: 400335 - DNA, 122 bp, Homo sapiens
gttaccattcccattgcatagatgaggaaatggaggctcagagatgttaggtaatatgcccgaagtcacacaggacacagttgatatggaatccaaacccaatctctttaggtccagaactg

SEQ ID NO: 400336 - DNA, 122 bp, Homo sapiens
ccaaactatcagagagtatcttaactatcaaaaaaaaaaaaaattcatttcagttaacgtcgggaatgagacaccaatgcctatcgccattgtattttcttggaggttttagtaaatgtaat

SEQ ID NO: 400337 - DNA, 122 bp, Homo sapiens
tatgtagatatgtaaagagagacaaagtgagaagcaaagcgaaagagatatgtagagagacggagagataagaaagactgtgagagcctcagagacagaggataggagacaaggtgtaatag

SEQ ID NO: 400338 - DNA, 122 bp, Homo sapiens
ctacccgactgctgccgtctcagagccggggtctcagcccccacccagggcaggcttgagcggcctctccatgaggacacatggcatgggctgcctgaccggcccccaccatgtctcctcaa

SEQ ID NO: 400339 - DNA, 122 bp, Homo sapiens
gaggtggggcctccagactcatggtgggaacagggccacacagggctactgcccacagaacgtcccttgacctggtcctcctcccctggggactctgggcctgctggcctcctctctggcct

SEQ ID NO: 400340 - DNA, 122 bp, Homo sapiens
cggatccagccttggctcggcctctaaccgtgcagtattgtggacccctttcttccgccccgggcctccaggccccattttataatgagggagggaatgcaatgacccccaggactggactc

SEQ ID NO: 400341 - DNA, 122 bp, Homo sapiens
tgggcgcggaaagccccttcctctaccctcgggcgcaccctccttcctcgtccgcggcgccgcagcttctcaacctgccgctgcatctcaactccctgcaagcagcagagctgtagaatacc

SEQ ID NO: 400342 - DNA, 122 bp, Homo sapiens
gcagggttcaccttcatcactgcccttttcctgctgctgcttggtctggtttgactctgtcgccctcatgtggtgtatacggggaagtgcaggagcttttcccttttgatcatcacaggtaa

SEQ ID NO: 400343 - DNA, 122 bp, Homo sapiens
cccggggatgcccgtcaggcccggggcaggtagagccgccgagggaaccacgggtgccagcggccaggctcagcgccgcattcctgacccattgcctcatgagaattgcctcatggtgattc

SEQ ID NO: 400344 - DNA, 122 bp, Homo sapiens
gcctgagtatgcttcatacgcggcttcatgtttgtcactgaccgcactctgtgagtgatccgcagcctgtggggttgacgtcagggcggtggagacgtgtggggctgagagtgaggggagtt

SEQ ID NO: 400345 - DNA, 122 bp, Homo sapiens
ctgcagcaagctgtagggtgcaagtcctatcggaaggagacaattgcctcccagctccagcggagtgttgccttgcaagaatgcaagcccagtgttgccagatagtccacattttaagagaa

SEQ ID NO: 400346 - DNA, 122 bp, Homo sapiens
cagctactgtggaaattcctttctccgcggtggttggctgggggcgccagccaatccgctcgcgacgctcccacatgggtcagtgacgtcacataggaaactggccaatggggattaggaga

SEQ ID NO: 400347 - DNA, 122 bp, Homo sapiens
ctcaagcgatccacccgcctcggcctcccaaagtgctgggattacagacgcgaaccaccgcgcccgactgtcctgtgttttaatgcttgaaaataatctgaatatggaaaatgagtgcacat

SEQ ID NO: 400348 - DNA, 122 bp, Homo sapiens
ctcctggggctcctccggggtgcgtggggtaatgtcccagcgcaggtcgagttgcagatccgagtccccggggttgttgactgtccttcttgcaggacatttcttaagggggtgagatggat

SEQ ID NO: 400349 - DNA, 122 bp, Homo sapiens
aggccgtagatagagggtacaggatggatggcatgtcggggagggtagcagggttttcttcggttaatgtttgtccacagaggttgtgctggccagcctgtgctggttaggctgggccatgc

SEQ ID NO: 400350 - DNA, 122 bp, Homo sapiens
gagacagactattaaaaagacaattgtttgtgtaataagtacacgcatgctaaaagtacacgacctgttccagttttgggttagcaagggattcctcgaaaaattaaaagaataaaccgcta

SEQ ID NO: 400351 - DNA, 122 bp, Homo sapiens
gggcttgggggtggtgggctgggggtgctggtgggcccagggtgctggcggggtagagtccggcgcggcccaggagccatgcccgcgtgccacgttcccacagagcggacccgttccaagcc

SEQ ID NO: 400352 - DNA, 122 bp, Homo sapiens
cttataaaccttacttatgtcttatttttttgcaatgcttttgaaagaaggcaatgtacacgcataaaaaccgagggagtaaaaatgaaagatgaattagaatgtcacattggacccagggc

SEQ ID NO: 400353 - DNA, 122 bp, Homo sapiens
tgggaggggaggctggcaagaggctctcggtttccccctgcatgctgccttccctggccccgcctctgcttggagtccccagcaggcagtgtcagccccacacaagacagagatctggggcc

SEQ ID NO: 400354 - DNA, 122 bp, Homo sapiens
agccccccagaatttgcatgtaattgacttagatgatgccacttttctgagtgcaaaattcggaagaccgcttgtacctggttggaagctttgtccaaaatgcacgcagataatcacggaag

SEQ ID NO: 400355 - DNA, 122 bp, Homo sapiens
ggctggggtgagccattggctgtcgagctcagggcacgtgctagggggcggggccttgaccggaaagggtggggcaacggcgagaaaggccgcgtcgagcggtaggtgcagtcgtcgctgtg

SEQ ID NO: 400356 - DNA, 122 bp, Homo sapiens
tggccaagacagtgggagattggcagaccccttggttcaggtgctgggactctttatttccgtcacaccaggcctaacagcatacaggtactgatgatccttataaaaccatgggagaaaat

SEQ ID NO: 400357 - DNA, 122 bp, Homo sapiens
atttgctgtagtccatgaaatcacgttcttggtccgtgacacacagcgcggccaagggatcggagccggcccaggcttcgcccctgcctctgtcctgccgcatgacgtggaccaggtggctt

SEQ ID NO: 400358 - DNA, 122 bp, Homo sapiens
tgtgagctgtaacatttaccgcgaaggtctgcagcttcactcctgaagccagtgagatcacggacccaccagaaggaagaaactccaaacgcggccgaacatcagaaggaacaaactctgga

SEQ ID NO: 400359 - DNA, 122 bp, Homo sapiens
ctgcagttgggttaataatgcccagcattaattaataagcaataaaatcagaagataccccgaatacaagtagctgacgctcagagagcagtattaaggcgagcacccgcagaccggacctg

SEQ ID NO: 400360 - DNA, 122 bp, Homo sapiens
ttccgcttccgccgagcgcgggaaaccccgccctgtgtgacgtcacatccctagtaaccgcggcagcggcactagctacccagccagccttaaagggccctgcgtaagtgttccggccccct

SEQ ID NO: 400361 - DNA, 122 bp, Homo sapiens
cggaggtctcggcctcgggcggtgggcctctcgccggcagcagggggcgctgcagaacctcggtccccatcctggagaaccacctccccggctcagccggtctgcgccgcccgccaccatcc

SEQ ID NO: 400362 - DNA, 122 bp, Homo sapiens
tcaccccagcctcaagtttgaaggggtttctggaggcctaaaccagctgcctccctgctgcgaactctgaaaggaagtcaccttcctttcactgcactttttcctccttactggtttgtcaa

SEQ ID NO: 400363 - DNA, 122 bp, Homo sapiens
caggatcacaccagctggagatgatgagaatcttgaggctccgagaggtggcggggacctcgttagcatgacacagctgcaggtgaccaggaagcccacaaaaagctgctcagcatcatcag

SEQ ID NO: 400364 - DNA, 122 bp, Homo sapiens
tgctcagggagagtgatttgagtaataatgaaactgttgtctcctgcacagtcggctctgcgtgaattactctttctctattgcaattccgctctcttgagaaatcggctctgtccaggcag

SEQ ID NO: 400365 - DNA, 122 bp, Homo sapiens
aatctcgattcccggccagactccctgcccacgtgttccccacccgcgtccccacagctccgtccgcctgctctggtcaacaccacagctgggccctgccccttcggaagctgatgctccag

SEQ ID NO: 400366 - DNA, 122 bp, Homo sapiens
aacgatcagcaaactgccagcccacagactagagagctctcacagtcaaacagggtggctcggatgccacaaacccaaagaagcaaagttccaaaataatataaaatttaaaaggttttgta

SEQ ID NO: 400367 - DNA, 122 bp, Homo sapiens
gccctggcccactccccggctccctccttccttccctccacctagcaccggaagccgcgacggcgactggagctgtgcggcgtacccccacccccagcccgggatacttcccacctccccga

SEQ ID NO: 400368 - DNA, 122 bp, Homo sapiens
ctttgcaggaactcaggggctgggggttctctgctacttaagagatccaggagtggagcccggacgcccgagccttcctgcttcgggatggggattaccgcggagccttagcaactggggtc

SEQ ID NO: 400369 - DNA, 122 bp, Homo sapiens
gcctctattctactaaaacctgctctccagtgggtatcttaaaacacattcttggctgggcgcagtggctcacgcttgtaatcccagcactttgggaggccgaggcgggcggatcacaaggt

SEQ ID NO: 400370 - DNA, 122 bp, Homo sapiens
gggggcgggggctgccgcagagccgggctgcggcgtgggaggaggaagaggaggaagatgcgctcggcctctgccttccgctccggagcgtcgcgcttcccaccaggtgagggccggggagc

SEQ ID NO: 400371 - DNA, 122 bp, Homo sapiens
cccggtgttgcttggtgaccacgctctccgcccagaccgttccatttcttcagcagggggcgccccgggccgggccggcactgaccagcctcgcagagccaccctcttccggcctgcccccc

SEQ ID NO: 400372 - DNA, 122 bp, Homo sapiens
aagaaactgggatggaaggccgggaagtaggaggtgtttgctcaacttctgaggacgtcacgcctctgcctcccgtagccaatcagcagccgccctgagggaacaaccttctcatctgccaa

SEQ ID NO: 400373 - DNA, 122 bp, Homo sapiens
aacatggagcaactgacaagggaaactgaggactattccaaacaagccctctcactggtgcgcaaggccctgcatgaaggagtcggaagcggaagcggtagcccggacggtgctgtggtgca

SEQ ID NO: 400374 - DNA, 122 bp, Homo sapiens
atgaatgaggcagaaaactgcacagagcagggacggccaggaaagctgggacagctgcggcgtgcagagggccagcgccacaggcttctggactgtgggcttccacagtcaaaatcccacct

SEQ ID NO: 400375 - DNA, 122 bp, Homo sapiens
cttcagcccactgcgccccaccagcgccaagcctgtcccacaaagagtgcgggctggggacgcggctcaggtcgcctctccgcctcgcacgtgaatgtgttgttttggaaaaacgaagcctt

SEQ ID NO: 400376 - DNA, 122 bp, Homo sapiens
gcccatgtctcggagggaaacgtttgtgtgagcgcaggaatgacccggaagaccttggcacggctgcagttttctgggaaatgtaatttcttggtccgggcgccatggcccttataagtaga

SEQ ID NO: 400377 - DNA, 122 bp, Homo sapiens
gtttgactctgagcctccctttgccaaacgtttgtggtttggtaacttcttctctaaaatcgtttaaaaaaaaaaattgagacagggtctcactattttgcctaggctggatttgaattcct

SEQ ID NO: 400378 - DNA, 122 bp, Homo sapiens
gaggcgtgcttgcaggcttcgggcactacgcggggctggaaataccacgcactgccccttcgcctagacccccgctcgggccactcgggttctgccttcaaagctagtagctgccccagact

SEQ ID NO: 400379 - DNA, 122 bp, Homo sapiens
gcatccccccggcagggcgagggccccgggggaagggaaggctccgggagccaaggagggcgccccccaggcggagagtctcggaaaaccgcgcccccggcccctgccttccctccaggcct

SEQ ID NO: 400380 - DNA, 122 bp, Homo sapiens
tccagagaatgcctgtcatctcttccgtgagaaattgcacttagactatgcagacagatacgttgctttcctgttctgagggccccttactgtcctttagtgctagtattgtgcagattgtt

SEQ ID NO: 400381 - DNA, 122 bp, Homo sapiens
aatctgacaggacaaatgtctggagttctcggacttcctgcccaactcatgaagtctgagcgtgtggccagtgctgttgtgagagagcggaaacatgcaaaggtcctgggtcctagggacat

SEQ ID NO: 400382 - DNA, 122 bp, Homo sapiens
ggcgcgaggtgcgggctccggggcggagcgcacgcccgggaggcgggaagtgggcagcagcgcccccgcctggcccctgtgcgccccgacccgacgcctccccgcccgaccaggtgcctcga

SEQ ID NO: 400383 - DNA, 122 bp, Homo sapiens
aggggcgcctcccggcgcggcggggcgggtgcagtcacgacgccgcgactccccgcaccccggctgggccccccgactcccaggatctgggatcgattccaggagtctttggctgtggtccc

SEQ ID NO: 400384 - DNA, 122 bp, Homo sapiens
tgggatgagcctcgcccggcagaggaggagctgtgagagccagaaatcccattctgctaacgaactaagaccccactgggaaaaaagacaagctgcgcacaaccgcacgcctcaccttaaag

SEQ ID NO: 400385 - DNA, 122 bp, Homo sapiens
gaatggggcattggcccccgcaggagtgggcggggaaggggcggagcgaacagaggtgggcggctcccgtcctatgacgtcagccgtaaggcgctgctgtcgtaaaaggacgtccggtccgt

SEQ ID NO: 400386 - DNA, 122 bp, Homo sapiens
ccccgccccgccgccattaccgattcgcagagcagaccattttccagctggggggggctacgaatgagaggcttttgctgaagatgaaaccgttgtccaaactagaatgaaagcggcccaat

SEQ ID NO: 400387 - DNA, 122 bp, Homo sapiens
agtccctgcgtccggccgagacgctggcccgaagccccactccctgtcaggcccctgtcgcgggagggaacagtagagaaagggcgtggcataactaaatgcccccaggccagactctgagc

SEQ ID NO: 400388 - DNA, 122 bp, Homo sapiens
caaagaaggtgaggatgaaacaggtcaccagcatgatacagccacagaagagcatggcagcggctgctcttcctcctacgtactccacgaggctctggcagccatcctgcggggggcctgct

SEQ ID NO: 400389 - DNA, 122 bp, Homo sapiens
tcgtgaaatgcagattctgattcagtgggtcgggggtggggcctgagattctaacattctcgctgattgggctgatcagagtcccatacatgacgttctcagaccttcccttccagcgcatc

SEQ ID NO: 400390 - DNA, 122 bp, Homo sapiens
agatacagtgtgtgtgtgtgtgtgtgtgtgtgtgtgtgtgtgcgcgcgcgcgcgcgcgcgcgtagcgaacgtgagctgataagtacgtctcagaaaacataatgattaggcaatccctacct

SEQ ID NO: 400391 - DNA, 122 bp, Homo sapiens
gacccaggcgaccctggggcacggccaccgttgttgtggtgggggggcacccccggggtccgatgccagagagctctcttagggaagccctcaggcagctgcgaaacctgctccagcataga

SEQ ID NO: 400392 - DNA, 122 bp, Homo sapiens
cacttctggcaatctggagcggcagccggctgggcggcgaggaaaccgctgcacggatcccgcctcccagcacacgcagtcggcagttgcagcctccaagaccgcggtgccaccaaaccaag

SEQ ID NO: 400393 - DNA, 122 bp, Homo sapiens
ctccgcagcaggacagcagcagccaccgctggaccatggtgcacagtggagaggagctcgcgctgggcccggcaggcctgctgctgccatccatgcggctccaacggccggtcctgggtgcc

SEQ ID NO: 400394 - DNA, 122 bp, Homo sapiens
gcagaaaacaatcctctagtgtagcaagctgtagcctgttcctgggcatgtgggtgggcacgcagatggaatctgagtgctggtgtgggtggggcatgggtgtccatgtcaagagggccaca

SEQ ID NO: 400395 - DNA, 122 bp, Homo sapiens
tgaaaatagactaattttagattcttaacatatctcaaatcatgcatacagcaaagccttcgcttcctatatttgataaacatgtcaaacattcaacaattagatacaacattcccaaatga

SEQ ID NO: 400396 - DNA, 122 bp, Homo sapiens
gccctgagctattaaaccttggcgttcttgtgaaatgtgccattctgttcactaacaccacgacatgtggtaggccagggttttcaaagcatgtcacttctccctgtgacatgtgtagactt

SEQ ID NO: 400397 - DNA, 122 bp, Homo sapiens
ccacgcaggaaacagtgggagcggtgcagctactgggcaagtcattttacctcttgagtccggctcgtcactgttaaatggggtcagtgattctctgttagggatgttagagaagcaaatgt

SEQ ID NO: 400398 - DNA, 122 bp, Homo sapiens
ccagcagctgaggagggtgaactgggtcccccagcagtgccagcccagcagcactgcgctcgatttctcgccgagccttagctgccttcctgcggggcagggctcgggacctgcagcccgcc

SEQ ID NO: 400399 - DNA, 122 bp, Homo sapiens
cccgaggggcttagtcccagagccagtgctgtcaggggctgagcatgtgaatagggcagtcggaagaccatgtgtgtctgtggcttttaaatacaccccgaacgtctatctcttttaactgg

SEQ ID NO: 400400 - DNA, 122 bp, Homo sapiens
gaggatgccgaggagaaaacagcaggcacccaagcgggcggcaggtaagagaaacggctccgcttcggggctgccctgtgcgccgagctcctcgcccgccctccttgcccctgggtgcccgg

SEQ ID NO: 400401 - DNA, 122 bp, Homo sapiens
tgctccggaagctaaaggtggccatgctgtgtgggaccacgtggccagaggcaagagtgtcgctctagtagtatatgcaacagtttaaactataggcatgttcatgtaaatatggtttctgt

SEQ ID NO: 400402 - DNA, 122 bp, Homo sapiens
aaatatctccttaacaaatttaaattgtacacaacagtgccacccattttaaagcaaatacggcaggtgtccaccattgttttggatacagcttttgagtttttgatttgcctgatgttcta

SEQ ID NO: 400403 - DNA, 122 bp, Homo sapiens
cgggcggtcggccggggtgcggcagcagcggcgggaagcgcgggggctggagctcaggggcgcgggcgccggggcggtggcggacggggagggggccgccgggcggggcgcgggatgcggga

SEQ ID NO: 400404 - DNA, 122 bp, Homo sapiens
cgctgccatattaggcccagtccccgctgcgcgctgccatcttaggcccagtccccgctgcgcgctgccatcttgggcccagtccccgaggcccagtccccgctgggcgctgccatcttagg

SEQ ID NO: 400405 - DNA, 122 bp, Homo sapiens
tttgtttgctttcaagagaccctgttgcgacctcattcttctttctcctcttccttctgccgtcgcaatcgccttaggtgatgttgaggcttacattatagagatgggagataagtgaaggc

SEQ ID NO: 400406 - DNA, 122 bp, Homo sapiens
ctggacaaaatgctttcagagagattaccacattgtatgaccaagcaagggttactattacgattttcattctgcagctgtgaaaatcaagactcagaaacattaagggccatgtccagtga

SEQ ID NO: 400407 - DNA, 122 bp, Homo sapiens
gacggggtttcaccatgttggccaggctggtctcgaactcctgggctcaagcgatcctcccgcctcatcctccgaaagtgctgggcttacaggcctgaaccacagcgcccggcctccacccc

SEQ ID NO: 400408 - DNA, 122 bp, Homo sapiens
gatttcctgggcacaattcaaatcctctaggaaaataattgttggacattttcaccatgacgcattaagagtacagcctgcacctcagtattgggctgtgatgctttcatagtacagcctcc

SEQ ID NO: 400409 - DNA, 122 bp, Homo sapiens
cgtgccagctcattggctgagccggaccaaacccgagcaaggacgcttgtttcctggcaacggctaaacgcaagggcggggtcgccgacggctatccgagggaggagcaccgcctctcctct

SEQ ID NO: 400410 - DNA, 122 bp, Homo sapiens
actgttagtctttacctctgaatttcatctggacatgaaccccaaagtccagttttgtaacgatataatttttttctcatgaggccatattttgagttcttaaatactaccaaccctgaacg

SEQ ID NO: 400411 - DNA, 122 bp, Homo sapiens
agttctgtgacccattccagcaaatgaccaaactcaaggaaggggtcgtgggaaccgccccgccccacccccaatttatagtaagtcagtcagaataccagaggccggggccaagctcagtg

SEQ ID NO: 400412 - DNA, 122 bp, Homo sapiens
ttaaggaaaaaaaaaagtgagctggtgtcaagctcctcctgggactagaactctccaatacgctgtatcaggggcacactcccaggatgagtgggttgtccaagcccacccctcctctccta

SEQ ID NO: 400413 - DNA, 122 bp, Homo sapiens
aataactatttttaaagggaaccattgtattcaatggactcctcctttttgagggtctgtcgtgggcaaaagattgtggtgcctcctgagagtgatacagaggcagtgagtccccgactctt

SEQ ID NO: 400414 - DNA, 122 bp, Homo sapiens
ggcactccggaaaatgtagtcaatttttgccttgttttcagctagccagaagggggcgcacgagagcagggcttggcttggggccctacttgcaactttgcaggctaaaacacgtggagtgt

SEQ ID NO: 400415 - DNA, 122 bp, Homo sapiens
tttccccactcttcttagccgccgaggctagctagagtcccggtgtcagccactacctgccgcaactcactaagaaatgaccttgacgactgtcaagaccatatccgggactccgaggcgct

SEQ ID NO: 400416 - DNA, 122 bp, Homo sapiens
ggccacccctaccagaaccggacgccgcccaagcgtaagaagccgcgcacgtccttttcccgggtgcagatctgcgagctggaaaagcgcttccatcgccagaagtacctggcctctgccga

SEQ ID NO: 400417 - DNA, 122 bp, Homo sapiens
ggagggctgaggtcgactgggcagtagaggcaagttgcccaaattcgctaacttccatcccgcaattccgctgaactcggcccgaaaagccccctcttgcctcaattccccgaagtaaatct

SEQ ID NO: 400418 - DNA, 122 bp, Homo sapiens
atgatggaaggttggtttgcattgctctttgtagattttgtctgtgcctctgcacggcctcgtagtatcccttggtggaattgaaccacatatgtttcctttgttttagatgtatttttggg

SEQ ID NO: 400419 - DNA, 122 bp, Homo sapiens
ttttcaggtaactgaaccaggtgttttcctcttgggcccttgactctgtgtccaggtctgcgataactgcgattcgataccgaatcccagccggtgtcctttgtgggggagacagggggtag

SEQ ID NO: 400420 - DNA, 122 bp, Homo sapiens
cactggaaaataaaagccacgtggtgagtgttttctttgtgatatcagaacttcatgttccgggtgaggggcttcagggtgcccgtgtccttgccggggggctccggtctccagtctcctca

SEQ ID NO: 400421 - DNA, 122 bp, Homo sapiens
ggcgggccctgcgtcaggttgcagtttcacttttagctctgggcacctccagctcctgctcgccggacggctcccagggagagcagacgcgccagacgcgccaccctcggggcgccgacggt

SEQ ID NO: 400422 - DNA, 122 bp, Homo sapiens
cattttccattttccgaggctcgggctggctgggtgggagccgccccgtctcagcctgcccgctgaaggtggcaatcgcagtcagcacacctgacctgtgcccaggtgggactcgccttctc

SEQ ID NO: 400423 - DNA, 122 bp, Homo sapiens
tgggctgtgccaggccaagcacgaagagaaagccccgcctgaaactgcctggaggccccccggctgtcactctcgccacattccgtggagtatgtggttgcaacttctgtcactcaaggtct

SEQ ID NO: 400424 - DNA, 122 bp, Homo sapiens
attatccaacacatattttcttattttgccacaaatttccacttaacaaataaaaaaaggcgaatgctgttttgcaatcagaaagtgaatttcttttgtggtagcgtacacgtggttcatgt

SEQ ID NO: 400425 - DNA, 122 bp, Homo sapiens
tctccgccctctcgtgtgttccttgtggagctaaccagaggcaagatgcccgaggtaagacggtttgcggtgggccctggcaaaagtaacactcccgccttggtcggcccctagtccccgta

SEQ ID NO: 400426 - DNA, 122 bp, Homo sapiens
tagtaattgtgttagttatctgcaatcatctattatagctagtcgtctaggatcctggatcgttctcctggttttactacagttttggatcagctcacccccaaatcccttgctgaagggtg

SEQ ID NO: 400427 - DNA, 122 bp, Homo sapiens
cttagaggctggtcctgaccctcccaccagctgacaggtgtgagcgtggctggatgtgggcggggcgcccacgtggagcttagccggcaagttcccgaggaagactggagctccgcctttcc

SEQ ID NO: 400428 - DNA, 122 bp, Homo sapiens
ttgctcccctgcacccaccaggcccacctaatggaggcccacccatgaatgttaccacagcgcccagcccaaagggtacctgttcttccacttggcactcttgccctgggcagaggccatct

SEQ ID NO: 400429 - DNA, 122 bp, Homo sapiens
gccgcagagaaaatgccctggccaggaagccggctggggtgtgtgatgatcaccgttctccggcctccgtcctgaacgtgaagggggcccgaggccgaggaagatccggagcccggctagaa

SEQ ID NO: 400430 - DNA, 122 bp, Homo sapiens
ccctggcggcggctgccacttcggcccccgcccccggagcacccggcggcccccagctcgcgggctcatccgccgggccagtgactgcagccccatctcagcctcccaccacatgtagttcc

SEQ ID NO: 400431 - DNA, 122 bp, Homo sapiens
tctgccagtgtcgtgacatgaagttctttctctcttatacaatcctgtccatttggcctacgtgcctagagcaggggacagccaaagcactttttccctctctgaaatggatgctacatcac

SEQ ID NO: 400432 - DNA, 122 bp, Homo sapiens
gagtgtcaacctctgcaccgtgcaaaggcgaccaggaaggactccagagagggccaggctcggctggacaccagggcgacggtcactaccggtgttttgtggggagagccagtgctgccgtc

SEQ ID NO: 400433 - DNA, 122 bp, Homo sapiens
tcgtggtctcacgggcttcaaggaatgaagccgtggaccgcagcggcgagtgttacagctcgattagagaaacgcgcatgtacccagagtgtgcagcggcaagatttataaaagcgaaagta

SEQ ID NO: 400434 - DNA, 122 bp, Homo sapiens
caagtgtaagcatctgcagtgaccaaggggcgccatgcaggagacacatacagaagtgcgcgaccctgtaaccaggggccctgacccaacaagagagattgaggaaggcttcctggaggagg

SEQ ID NO: 400435 - DNA, 122 bp, Homo sapiens
tgcgcgtcccaagcacccaccagcgcctacggtgtgagatgaaggcgcaccccctgggcgcgaagcttttaaagcacctgcccagggagacatttttgaagttgtcagggcccctcctctgt

SEQ ID NO: 400436 - DNA, 122 bp, Homo sapiens
tccagcatcttagatgcaaattccaaattacccaggtgcttcctccttacaagtgtcaaccgtcctttaatgcttctgaatggtgtaaaaggcacaggccttgcctttaaggctctctcaaa

SEQ ID NO: 400437 - DNA, 122 bp, Homo sapiens
gcgagctcaccgcaggccccgccccaggcctgccccggccccacctcctgagcaaccccccgagccgagctcaccgcaggccccgccccggacccgcctcctgggctactcaccaagccgcg

SEQ ID NO: 400438 - DNA, 122 bp, Homo sapiens
cagattttcaaacaaacaacagacaattcaaaaccaggcgctctgcttattcactgaaaccgtaagctgctgaaactcagggaaaagcttaagaaactggtcttaaagcttcaggccaaaca

SEQ ID NO: 400439 - DNA, 122 bp, Homo sapiens
cacaacatacaagggagttttgattaatttcctattcacacactcaggctcttgttacaccgagttacttgagactgcccacactttactatcagtgcctgccgctccctcccgctctctcc

SEQ ID NO: 400440 - DNA, 122 bp, Homo sapiens
tctctcttgccctttatctcttgccagtcccatggccttttctccgctagtttattgactcgcctgctccattttcccagtttctttgtccccttatcacctgaccacagcactgactccag

SEQ ID NO: 400441 - DNA, 122 bp, Homo sapiens
caagccactttcttggtcctgagcatgaccaccgacgaccggagcagcttcaacctgacacggagccaggccacacttcctgcacctccgtacgtgacctccgggtgtccctcgagtagctc

SEQ ID NO: 400442 - DNA, 122 bp, Homo sapiens
gggattgacagatcatgctgaactaaaagctgtgctttttgtggtgttcctggtgatttacgccattaccttgttgaggaatctgggcatgatcctcttaatccaaatcacctccaaactcc

SEQ ID NO: 400443 - DNA, 122 bp, Homo sapiens
aagatttgaccacagcagatcatatttacttcgatagattggttttctcatgggcacatacgggtggttgtgatttttataatgcacgtcaattaattatatagccattttccttcttcaaa

SEQ ID NO: 400444 - DNA, 122 bp, Homo sapiens
agcacgggccgcttccttatccggtaaagtgcgggggttgggtgggagggaaaccccaagcgcctgcgctggcccgaacaggcctttgggaactacaactcccggcgtgctctggggctagg

SEQ ID NO: 400445 - DNA, 122 bp, Homo sapiens
tcatctctgacgcttactggcttgagtcagccctttctgtcgcataccgtgcagcttgcccgaggctgcccaggtttctgcactgagagtcccaaacaaactgggcagttggtgaatgagct

SEQ ID NO: 400446 - DNA, 122 bp, Homo sapiens
tgtgcttctacctaactatgaatttattcctcagctcatcaatgcaattactaatcctgtcgattcatatttcatgtaacattaccaaatattgatgtatttttccaagagacacaatgatg

SEQ ID NO: 400447 - DNA, 122 bp, Homo sapiens
cgggtctgcaagctaggtgccagcggggaaagtttccctgcttcttatcgtctgctttaacgccttaaatagcccgctgaaggctgcagcaggtgctaggtagcagcctcccggccctcggg

SEQ ID NO: 400448 - DNA, 122 bp, Homo sapiens
ccccggccccgccagccccggccccgcccccttctctcagccccttgagcccgagcccctcgaaggccaccccgcaccccgctcccgacctggcttacgcggtcccgaccccgcccagctcc

SEQ ID NO: 400449 - DNA, 122 bp, Homo sapiens
agcctaaaaaggttatccacactactgtgaggactccagaaacctgccttcttgcagaaacgggatacttttgacatgagggcatgagatgaagattgcagactacttcgtaacacactctc

SEQ ID NO: 400450 - DNA, 122 bp, Homo sapiens
agcgcccttgcaaataacagctcttattatttcctccctgggcgatgcgaatccgaggatcggggtctgactcccagagaggcccagaaagcttctgttgaattgccctcgtcgccgcccct

SEQ ID NO: 400451 - DNA, 122 bp, Homo sapiens
cctgccatgccctggtctgtggagctgggatcccacctgcaggtgccaggtggaggcaggcgcttcggccagcggcatatccaggggggccgtgcgcgtggtcctgggggtccaggtgggag

SEQ ID NO: 400452 - DNA, 122 bp, Homo sapiens
tactttatgtgtgagagaatgtattatgtgttgtgtgtgagtatatgtaattggtgtgtacgtgtgtgtgattgggagtacatgtaagtgtgtgtgactttggatctgtgtgagtgtatgtg

SEQ ID NO: 400453 - DNA, 122 bp, Homo sapiens
tagctgtgttttggtctccttcgcctgcctgtgtttgtgatgaatgcttgatccttcatacgtgtcatcttccggtttcagataaatctgggtgtcctcttagatgtttcagtttcaataat

SEQ ID NO: 400454 - DNA, 122 bp, Homo sapiens
gtgtgtcccagtggctgcaatccctccagtacctgtctcttctttggcatttcgaggccccgttcagaccccgccacctggctgagtgccccggcgcctggccggcttccctccctctccgt

SEQ ID NO: 400455 - DNA, 122 bp, Homo sapiens
ggacgaggggaaatggcaaatattcaccagagtggagcctacttctttaagaattggaatcggagcagagaaagggaagggagggactggtggacagagggaggaagagtggcagggtctag

SEQ ID NO: 400456 - DNA, 122 bp, Homo sapiens
gggggaccgtcctgtgtgttataggatgttttgcagcatttctggcctctgctcaccagacgtcagtagcacaccccatcgcccggttgtgacaactaaaaatgtctccagacattgctgaa

SEQ ID NO: 400457 - DNA, 122 bp, Homo sapiens
ggcaggtggatcacctgaggtcgcgagtttgagatcagcctggctaacatcgtgaaaccacgtttctattaaaactacaaaacaattagcagggcgtggtggcgcgtgcctgtaatcccaaa

SEQ ID NO: 400458 - DNA, 122 bp, Homo sapiens
tcccatgtgatggtaggcagaggctacccaagagaggtcttgaggatgagacggcaggggcgcctcctgagtgtgaggcgggccgtactggatttgcagcctcatctgcgcactcactggat

SEQ ID NO: 400459 - DNA, 122 bp, Homo sapiens
cactgtttaaccttacctaggctcagtctgcttcctggtcaggtatgcatagtaatacctcgcaaagcatggtgagctttaaataacataaagaacgtgacagtggcttgcacacaacctgg

SEQ ID NO: 400460 - DNA, 122 bp, Homo sapiens
gatgccctttctgcaaaggtgaacaaggcttgctttttcaagtgagcaccgatgagtttgcggtggtcctttcatgtccttttacatggtcaccctaaagagcaaaggcattctttgtgagc

SEQ ID NO: 400461 - DNA, 122 bp, Homo sapiens
agtgatccgcccacctcggccccccaaagtgctgggattacaggcgtgagccaccgtgcccggccaatatggttgggttttaactcatctttggttgtgtcgtaatctttggttttaggtgg

SEQ ID NO: 400462 - DNA, 122 bp, Homo sapiens
tgctctccttcccttagtttaagcaaatctaactttttaataaaactataagtctagtatcgtatcttgctagatgcatattggagcatttttatgctgatattgatgagtaaataaatgca

SEQ ID NO: 400463 - DNA, 122 bp, Homo sapiens
gagcctctgaaaggctttgaggagtttgcaaatgccctgcaggggagcaacttcaggtctcgctgacctttatccctcaggagaggatctccagtgaggctgtgctctccgggaattctttt

SEQ ID NO: 400464 - DNA, 122 bp, Homo sapiens
tgcccctgaatcccaggagggtagcacttgctttcctgcccattgtgaaggcaaggaatccgcgtgttgtcctatcaattccattcatggcagggtagagacttttcaaatggaagaaaatg

SEQ ID NO: 400465 - DNA, 122 bp, Homo sapiens
ccatccctggcggtgtgtcgcggagggcacccctaccccggtgcaggcgcaggctggaggcgtagcccgggcccatccctggcagtgtgtcgcggagggcacccctaccccggtgcaggcac

SEQ ID NO: 400466 - DNA, 122 bp, Homo sapiens
gagggtgtacacagacacagctcacacaagcacacacccacaggtgtcacactcatggcacgaatagacacacgctcacaaacacacagacccacgagggcagggcagctgactctgcatac

SEQ ID NO: 400467 - DNA, 122 bp, Homo sapiens
cagtgtagaaaactcttcgatgttgtcggctaaagctgcgtatcaaacactgagactcagcgcttctactcctaggtacatagctaattataaaaaagcttatacaggctcaccttaaggca

SEQ ID NO: 400468 - DNA, 122 bp, Homo sapiens
gatgccaacctggacgtggccgagcgcgcccgggagaacaaaagtgcggcacagctcaggcggccagtgggaggtggggctgcccctggccaccactaacctcagccctgcccccaggctca

SEQ ID NO: 400469 - DNA, 122 bp, Homo sapiens
accgtagccctgtctgttcaaaggggttgagccaacaaaaggtctgccgaaacccgggatcgaaccagggacctttagatcttcagtctaacgctctcccaactgagctatttcggcgaaga

SEQ ID NO: 400470 - DNA, 122 bp, Homo sapiens
ttgatcacgccgcggcgggaggtggcgctcacactaactatagctatccagggcgcgggtcgagtggcgagaccagctcccctgggtatgagaacgcatctttgtgcggtcggctggctggg

SEQ ID NO: 400471 - DNA, 122 bp, Homo sapiens
tgctgggattacaggcgtgagccatggtacttgaccaggaaccttattttttaatcatgacgtatcatggacatattttcatgtttgcagatatctatgcaattattttaaacccctgcata

SEQ ID NO: 400472 - DNA, 122 bp, Homo sapiens
tcctccgctccccgcccccgccccaggcagaccctacctgagtgaggggcccacgaggagcgtcagccgccagctgtctagaacttcagccccgaaccatggcttttaacccctgaactccc

SEQ ID NO: 400473 - DNA, 122 bp, Homo sapiens
gccctgcgccctcccgcgggaactcagtttaataattaattaagctctcattccacaaggcgccaggtgtgtgcggcctgcttgcccgcacaccacttctttcctcttccccccagtctctg

SEQ ID NO: 400474 - DNA, 122 bp, Homo sapiens
tatggtacagtgtgtaaatgaacttcaggtctatctagcgccacgggggagccacgctttcgcaccactgagctctggggatggggagagtagtgcaggttggggccccgtttaggaaacta

SEQ ID NO: 400475 - DNA, 122 bp, Homo sapiens
gggagtctcgttcgccggggctgtgacctcgagtgggggctcggcgtgtaaaggggtgtacgggagcggcccttggcttcctgcctctgcggcctcccctgcctcccggccccatcccgtct

SEQ ID NO: 400476 - DNA, 122 bp, Homo sapiens
ccacctcctccagggtctttatttaattcctctaggcttcccagcaccattaagcagcttcgcgacctgcagccacacatgccataggcctccatcctcaggaaagtgattgagtctatcag

SEQ ID NO: 400477 - DNA, 122 bp, Homo sapiens
ctatcatccataggccctcatgcaagctgtagggtcaaggcccaggaaggttgcctggctcgctccagcagtggcactagaacctcatcttcctgacttgctgttgccccactgtctgcaag

SEQ ID NO: 400478 - DNA, 122 bp, Homo sapiens
ttgtgaggggaagtagtgttgtaactcagacaccacattcacttcaagtgttataagacacgggttgtaacagtaggaaatctttcgctcttccccagggtgcccattctccttatcccgca

SEQ ID NO: 400479 - DNA, 122 bp, Homo sapiens
tcgccctccccgatggacactcggcaggccccgcccagcgcccctgattggacgaagcgccgggccccgccccctcagccgtgagtgacaatagaagcccttggtaacggggctctgaaaac

SEQ ID NO: 400480 - DNA, 122 bp, Homo sapiens
tatagaaatcaaaggttaaatgcttttcggttatttcaaatattcaggctttccctaacccgtggccatagacggaattgggaactagacactggcatgatgtaaaatgggacttccatgca

SEQ ID NO: 400481 - DNA, 122 bp, Homo sapiens
gtcattggagtctctttcactagagtcgttcattcattccgcacgcattcattgaaccggcgacctgggccaggctccttcccaggctccggcatggagcagtgaccaagatcaagtggctc

SEQ ID NO: 400482 - DNA, 122 bp, Homo sapiens
ctctgcgcctcccgcgcccctaacccgacgggctgaggtagaggaagcgtacgtccgaggcggtcttgccacgtcctcactggcacttctggaaaagcagcgtctcagcccccgttcagggc

SEQ ID NO: 400483 - DNA, 122 bp, Homo sapiens
aaatattcattaacagacttaatctatagaatgaattctgcatcacatagacaggctgcacgagcatggtccagaaaatttccactaatgtttaaattttaaacagcctgggtctatactga

SEQ ID NO: 400484 - DNA, 122 bp, Homo sapiens
accgcgcccccgcctccccgcccgggcgactgaggccggggggttggagcactgcccccgcgcacagtccccgaacgcccgacgtctccgcgcaggttattgaagcagctgggcctggggcg

SEQ ID NO: 400485 - DNA, 122 bp, Homo sapiens
gaccgggcagccaatgggagggatgtgcacgagggcagcacgagcctccgggccagcgctcgcgtggctcttctggcccgggctactatatagagacgtttccgcctcctgcttgaaactaa

SEQ ID NO: 400486 - DNA, 122 bp, Homo sapiens
accaaagactggaagcggccacgtcacctacacgtaaccccacccccagtgacgagggggcggtcccacgcgtttcaagcccagcgacccgaaagacacgccccacacccaaacgcaagagc

SEQ ID NO: 400487 - DNA, 122 bp, Homo sapiens
gcgtgagcgttccgagcccggtgcagtcccggcttccgcgcgcccctgctctccgcacagcgctcccgctccgaaggtgctctgacaaccccgcaggcgctattcggagccggggcagggca

SEQ ID NO: 400488 - DNA, 122 bp, Homo sapiens
atgtggcagcagaaatggcatcaggcgctgagctgcagctggggccagagcagctccaaccggcctgctgcaattagagacgtaccggcgggcaggaggcactgggattttctttcttgtga

SEQ ID NO: 400489 - DNA, 122 bp, Homo sapiens
acagttaggcagggtggtaagcagcaggaagaagaaaaaatagcagtctaaaggaggtcacggtaatttacaaactgaatagataatctagagttggttgtagccacacaatagtgaaagga

SEQ ID NO: 400490 - DNA, 122 bp, Homo sapiens
ttctgatccattacagatagcctcgggaaaaagcctcaactgcaattcagggaaatgtgacgcactcttcaagaggggccagctaaattatctgaccttgcacaatggatgacctccaacag

SEQ ID NO: 400491 - DNA, 122 bp, Homo sapiens
tccatggaggcatctgagtgtgtgcccactttcccggttcaatgacaatttgcacctgctcgtgtagaggggtacgggtgaaacagagaccagtattattaaggggatggagaggagagacc

SEQ ID NO: 400492 - DNA, 122 bp, Homo sapiens
aataaaatttgttggaacacaaccaggctaattcatttagtattgtgatagctgctttcgcgctacactggcagttgaaacagttgcagagttgagtctttgccgcctgcaaatcccaaaac

SEQ ID NO: 400493 - DNA, 122 bp, Homo sapiens
gtccaacctttgaggcggggagggcaaaagaggccaggagttctcatggcacctcgtgggcggatgtgccaggggcttaattgcctcattagcatctgcctgctgcctgggcctgtctggtc

SEQ ID NO: 400494 - DNA, 122 bp, Homo sapiens
actttgtccaggcaagagggacacctcttttccttgctggccttgctaaatgtgggggaccgggaaagtctttcctcacagtccccattcagtctctccctctccacagattctattctcaa

SEQ ID NO: 400495 - DNA, 122 bp, Homo sapiens
tgcatgctggctggggctgagattccagacctgggcgggtggcgtccggctgccgaatcccgcggggtcctgggaaccctgagaagcgcagagccatccttgcctcagaactttccgcagac

SEQ ID NO: 400496 - DNA, 122 bp, Homo sapiens
cagtccaaataatccttcttaaatgtaggaccttgtgacctttgttgaccaaaacaaaaacgaaaaccaaccccacaaagcccaaactgtgaagtcttgaaagaggtttcttctgagccaat

SEQ ID NO: 400497 - DNA, 122 bp, Homo sapiens
ggtttaaaggagaataaaaagaatgagtagagatgtgaaaattggatcccataacaaacacgaaaaggttttaggggtgtttcccttaaattagagaaaacattgtaggtatcttcatttaa

SEQ ID NO: 400498 - DNA, 122 bp, Homo sapiens
ggcagaaattataacattgagcaagggtcagaagattgcagagcagttacccattcttggcgcagaaacctgaaagtcaggatcaaagagaatggcaacggtgaacacagatgccacagata

SEQ ID NO: 400499 - DNA, 122 bp, Homo sapiens
cccggcccccacgcccgagcctctccgggccttcccccgccgctcaccggcgcaggagcgcgtcttccagatcttcagcagcaggatgacgatggccgccaggtgggacaggtccccagtca

SEQ ID NO: 400500 - DNA, 122 bp, Homo sapiens
ggctgccgccccacaggcccgcgttgctgcttgagggactctcattgtcgtaggccgcctcggcatccactctgaatctaggctggactttctctgaccggaagcggggctgccacccggga

SEQ ID NO: 400501 - DNA, 122 bp, Homo sapiens
gcggaggacaatggctgggaatcccctttgttttccggggcgctgcctggggacagcccgcgaagcctcggcgcccggccggcgcggccaccacggaaaccgttagtttcacattttcctag

SEQ ID NO: 400502 - DNA, 122 bp, Homo sapiens
gccggcgagccgggggccggcagcagaggggccgcgggctggggacgccgccggagggagcgcgcaggcgaccgggcggctcctcagcgcgcggcccgggtcgcggccgggcctcctcccgc

SEQ ID NO: 400503 - DNA, 122 bp, Homo sapiens
cccactccttggccagtggatggacagtcacccatgtctctactgtggaccacaggacagcgaaggcaccaactggcagacaagtcccaggtgggagcgagtataaggatgcgtctcctttt

SEQ ID NO: 400504 - DNA, 122 bp, Homo sapiens
acagtacctggtacccaagagacacccaatacttgttcaatgaagaggagaatgacctgccggtctagtgcccggggcagtaagctcagaggtgtggcattctccagaatgaggtctgccca

SEQ ID NO: 400505 - DNA, 122 bp, Homo sapiens
cctcaacagttaatctgagaaccaagccaactactaagtaactaacggggcaggttgcatcgacagtttagagacactggacaaagggatgattcacatcatagatgggatggagcaggatg

SEQ ID NO: 400506 - DNA, 122 bp, Homo sapiens
aaaaatatctgtatttcaaaaatccagctgatctggtttggaggagctttctcgaatatgcgcaagtgatatgattaccatactctgaccactgtagcttagaagttgaccccacactgtga

SEQ ID NO: 400507 - DNA, 122 bp, Homo sapiens
acccaattaacagtagtaacttaattcaattagtggattcttccctgatgcagaagaagtcgagttttcacgattataagccatccatgttcccactgtctaactgctctgccactctgcat

SEQ ID NO: 400508 - DNA, 122 bp, Homo sapiens
gccggccggccgactgagggcaccccgggtaacccccgcgaccagccggggcgtgtcctgcgggacccagttagtgtgtgttgagtgaacggtcacctcgctgctaggcctaagcgagtggt

SEQ ID NO: 400509 - DNA, 122 bp, Homo sapiens
atggtgggagggagggagggagggaggggccaaggtgggactaaactacaactcccagagcgcccaccaaagaatcctgggagttgtagtttaccttgcggcagcctccaaccccctccact

SEQ ID NO: 400510 - DNA, 122 bp, Homo sapiens
acggtcttcaggccattgttttcccagctgtcaaatgggaaggccggcctcacccctttgcgggaaagatccgccaagacaggagcgctggggaactcccagggaccgagggagggtcagcc

SEQ ID NO: 400511 - DNA, 122 bp, Homo sapiens
cctattgtatatttgaagaaattcaatttaatgtcttgctatgctaagctcttagcaaatcgtttcttaataggaacttgtatttgaatatgctggctaaattcaggtggggcaaaagttgt

SEQ ID NO: 400512 - DNA, 122 bp, Homo sapiens
agtaagcgcgcctctttggcccgaatcaacatggaaacctaaggaaaaacgtctgacctgcggaggtagtttgggtggctacttggtgttggacttggctaaataaataccagaggcagata

SEQ ID NO: 400513 - DNA, 122 bp, Homo sapiens
agggaggagggaaccagccctgccaacgcctggtctcggacttggcctccagaacggtgacggccaattcctgtggcctgaggctcccgagtttgcggcattttgttccagcttcccacaaa

SEQ ID NO: 400514 - DNA, 122 bp, Homo sapiens
aagaatctaatttctatataatgaccttaacaggatgttcttgagccctctttctcttcccgttgttactagtcatctttggtgaagacttctggaataatttaaatagtggtcacaaaata

SEQ ID NO: 400515 - DNA, 122 bp, Homo sapiens
acttccgtgttgtcttactctgattacatatccaggcctgaggaccacaccagtgttgtccgctttgacaaagatgaacgggagaaactgtgtcggatagtcataattgatgactctttgta

SEQ ID NO: 400516 - DNA, 122 bp, Homo sapiens
aacacacatgagatctctgagcagtgtgtttcaggtgctttataataaacctctccttgccgggagagtgtcatcccatttcacagaccaggcaactgaggctcagagcgggtggtctagaa

SEQ ID NO: 400517 - DNA, 122 bp, Homo sapiens
acggagccacgcgccctgtagataataacccttagctctgggtttctagcccaggtgccacgcggccatgtgccctgtagataataagcctcagccctgggtttctggcccaggtgccacgt

SEQ ID NO: 400518 - DNA, 122 bp, Homo sapiens
atttccatctcttgtgatgtgtgtgtacagatagtatcacaattggctaaagttttgatgcgatagagatggtttctgttacctgtgtgatggtgtgaagacaacacactcctgggcacaca

SEQ ID NO: 400519 - DNA, 122 bp, Homo sapiens
aggggcggagcctcggaagccaccacggggaagctgtaaggggaagtgagtgagaccaatcggagacgaatctctgccccgttcggcacgcctcccttaactgtcgcgaatgcaaaggcaac

SEQ ID NO: 400520 - DNA, 122 bp, Homo sapiens
ttttttttggaggcagggtctcgctctgtcacccagtggggagtgcagtggtgccatgaacgctcattgcagcctcaggctggtctccgactcctgggttcaaatgatcctcctgccccagc

SEQ ID NO: 400521 - DNA, 122 bp, Homo sapiens
ggaggagggtgtctgccccatctgccaggagagcctgaaggaggccgtgagcaccaactgcggacatctcttctgtcgagtgtgcctgacacagcatgtggagaaggcctcagcctctgggg

SEQ ID NO: 400522 - DNA, 122 bp, Homo sapiens
tcttggcatctgtaccccaagggacccgaataccaggagagacctaaagtctgtgttccccggacccgaggaccccgtgccttgatgtgccattgtcatggggatgtttgccccttctgatg

SEQ ID NO: 400523 - DNA, 122 bp, Homo sapiens
aagaataggctcatcagaaagaatccagagtagcttaaaagctactcgggagggaggctgcggtcgagcaggataatcttaccaggaggaagcaactgtaaaggcgagatagtagccttcag

SEQ ID NO: 400524 - DNA, 122 bp, Homo sapiens
ccggccccagcccctcaccttctcccctagttggggtggaccaaagagcctgcctgttcccgccccacctggggaaatggggaccacgccttctgctccaccacaacgcaatcggaggaaat

SEQ ID NO: 400525 - DNA, 122 bp, Homo sapiens
gtcacctcagagaaagcgatcgtgaggcactggtgatatccatatcccccttcacacagtcgtccacagggctggcctttcctcagtacagtaggcaattacccacaggctgtgttccaaag

SEQ ID NO: 400526 - DNA, 122 bp, Homo sapiens
actgctccaacttggtgtctttccccaaatatggagcctgtgtggagtcactgggggagccgggggtggggagcggagccggcttcctctagcagggagggggccgaggagcgagccagtgg

SEQ ID NO: 400527 - DNA, 122 bp, Homo sapiens
ggctgctttcatagaccccacacactaataagcacatagggagtcggtcaggcggtgacccgtgcggtggagagaaggcagccggcgggacgtggaagggtcgaggttaaaccgaggtagtg

SEQ ID NO: 400528 - DNA, 122 bp, Homo sapiens
atagagatgagggcctcggcggagacagtctcacgcagaggtatgccaccttggcatctgcgccttccgtgggccagtgggtcttccgggagggattctgtgtccctggtattgtgtgtcaa

SEQ ID NO: 400529 - DNA, 122 bp, Homo sapiens
tacccaatttcaaaaaggtcgtagtatatagctcatgtcccagaaccagccacgtctcctcgtcgtcgtttcaccgcaacctcgccagcaatgagtattttcatttaaaaatgtttttgtct

SEQ ID NO: 400530 - DNA, 122 bp, Homo sapiens
gttatctttcctgatcctctccctcctcccaccttttcaccaacaaatcatttcgtgactcgactctagcttatgctgtttaatgcctttcctgctatgtttacctgacggaaatagtttct

SEQ ID NO: 400531 - DNA, 122 bp, Homo sapiens
gtgggaacacgctcattgacaacttcatttccatgagaatggttgctgtggtgattgctgcgtcttcccattggtcattgccgagcgtattgcggttctccgggagggttatattggttccc

SEQ ID NO: 400532 - DNA, 122 bp, Homo sapiens
aaagaggtacagagatggatggtggtgttatgaatatacttaccaccactgagctgtacacgtaaagatagttaagacggtaaattctatggattttatttttatttttttgagacagagtc

SEQ ID NO: 400533 - DNA, 122 bp, Homo sapiens
tagtgactaaggctgaaagtaaatatgggttgggaagacagataaatttgtacatgttcccgagaacaggagcaagagatatatgacaaagctatttcagtggctctttaatgtataaggag

SEQ ID NO: 400534 - DNA, 122 bp, Homo sapiens
caacccacggaatttctagtgacagccctctcccatctgtagaaaaggcgagccattctccggaccccagcgaatactttaggaagcacccacctgttcgcagatcagggctccggactaag

SEQ ID NO: 400535 - DNA, 122 bp, Homo sapiens
ccaggcgcctttgtcttttctctgatgccaggagaatgctcatgagtgtcttcccttgagcgtgatgccggcagtcatttgatgtgcacgtggaagtttttggttatattatgcaactaccc

SEQ ID NO: 400536 - DNA, 122 bp, Homo sapiens
gcgccccggaacctgaaccgagggctgagtcggaagtggcgcgggcgggcgcaaaccctgcgcgccttggccgagtcacgcgacgcgagtcctggggtgcgcgcgccgctccggggcgggct

SEQ ID NO: 400537 - DNA, 122 bp, Homo sapiens
cctgctttgctggttggtgggcacctgggggatgaggtaaactgaggcttagcatatggacgggccagaacagatgtaggcaaccctggttatacccataccctgattatagcatttctgtg

SEQ ID NO: 400538 - DNA, 122 bp, Homo sapiens
cgccgccacgctggtggctgtattggcaggactcctgcccgcccgccccgccaaccccgtcggaggctgagctctgtttccaggctctgccccaggcaccctcctgcacccagcggtggcag

SEQ ID NO: 400539 - DNA, 122 bp, Homo sapiens
ggccacagctcaaaaatgctgatcaattttgaaaatctaaatcagccttggccctgaaaccgagggaagaacctttgtggtaggggacagatttccaaaaactcaccacagtcctgttctta

SEQ ID NO: 400540 - DNA, 122 bp, Homo sapiens
tgccgaggacgctggaggtggcgctggcccagtgcggcctgggcgaggaggcgcaggtggcggctgtgcggcagcgcgtcaaggcggcggccgaggccgcgctggccgccgtgctggctctg

SEQ ID NO: 400541 - DNA, 122 bp, Homo sapiens
acacatcatcctctttccgggagggtcactgaagatgcatggatggtgattccatcaccccggagcccgttttcctcttcagctcctttaaaaacacattctttactgagtggaaatgcatc

SEQ ID NO: 400542 - DNA, 122 bp, Homo sapiens
gttctagggttttgagaggttggaggactagaactccagaagtccctgaacgaagtgggccggatttcccgtgacgcacctggcccaggtgttgcagccccgcccacctccctgccgctttc

SEQ ID NO: 400543 - DNA, 122 bp, Homo sapiens
gccagaaccggctgtggcaggaccccaggctccctgcaggcgacttcgggatttgggacccgagttctggcgcagttcggccctcgagctcctcggcctcaaggtggggttgggccagcaac

SEQ ID NO: 400544 - DNA, 122 bp, Homo sapiens
ctatcactcgcacgagcttctccatggcacggacggtatatggcaggaggtggtaacagccggggcttgctgggtagatcaggcccacctgcagcatcagccgctggctcttacaggtcagg

SEQ ID NO: 400545 - DNA, 122 bp, Homo sapiens
gttagttttcacaatggcggtgagcctgaaatgcgcacataaattaatgcttttgtaaaccgagttagattttaaatgcatgaaaggagccaactgtttaaaggaaactggcagagaatctt

SEQ ID NO: 400546 - DNA, 122 bp, Homo sapiens
gagcgccgtggatgccgtagagggagctgtcgtcgccctggaagacgatcccgagttcaacgcaggtaaatgtgcctttcagctagtaaataatgtgagtcaggtcaagctccttcttcaga

SEQ ID NO: 400547 - DNA, 122 bp, Homo sapiens
cagccacacgcttacacatgcacatgctaatgtgtgttgtgcactcacatgagcacgcgccgatgtgtgtccctgtgtgtgtgcatctgcgtgcgagtgtgaatgagtgtgtcgctgtgtgc

SEQ ID NO: 400548 - DNA, 122 bp, Homo sapiens
aataggctccctctacggaaccaaaaatagccttaatatgcttactttctccctgtactccgccccaaactgttagaacagcagaaaatttttttttgggggggggcggtttgggggaaggc

SEQ ID NO: 400549 - DNA, 122 bp, Homo sapiens
ctcagtttcctcaagggactgtctgggtgctgcaggacgagaagagacagaaacagggcccggactagggtgaacatcttgggagcaaaaactcagtcatcaagataaataatcttctaatt

SEQ ID NO: 400550 - DNA, 122 bp, Homo sapiens
tccgtccctccccagcggaccgcaatgatttagaagttcaggaatcccacgtgacgtcaccgggggggtgatgtaatgcactctaaatagaatgtattgtaatctttgctcagtccaacgtg

SEQ ID NO: 400551 - DNA, 122 bp, Homo sapiens
cattttagcacttgcactattactcagcagcagtaacatggtaacacttaaaatggtactcggggacctccaaagactaaactgacaagccttcaaggagcccaggggtaagttaacttgtc

SEQ ID NO: 400552 - DNA, 122 bp, Homo sapiens
cgctcagatccttactttgttctgacatgtctgcgccgtctggcaagggcagggcctctgcgtccaggagctcttcgagcctgcgctccctccgcggattcctggagaggaagtgcgcgttg

SEQ ID NO: 400553 - DNA, 122 bp, Homo sapiens
caaaagaagagggagcggatgctggtccaccggagacttacagcaaaggggcacctacaccgcagcgccactgctgctaagaattagcagtcacggaggctccgagctcctgtcagattgag

SEQ ID NO: 400554 - DNA, 122 bp, Homo sapiens
tcgaacagggcggggggagcgttggggcccgaggccgagctcttcgctggcgccgcctcccgggacgtggcctccatggtcgttgccgccgctacctcacagaaccagcaactccgggcgcg

SEQ ID NO: 400555 - DNA, 122 bp, Homo sapiens
acccgcgcccgcagccccacttaccatcttgcccgcgcggcccccgccgagcggcccctacgcacccggactgcgctccccgcacacccggttaagactgggcaggtccctgcaggcggcgc

SEQ ID NO: 400556 - DNA, 122 bp, Homo sapiens
gccactttcctggggggctgcagattgctgcgagtggcacccatgacaggaagatttagtcgctgggaaacaggaacttcatgggggttaacaaaagaaatgagttagcagcaagtttaact

SEQ ID NO: 400557 - DNA, 122 bp, Homo sapiens
agggctctcgaatcgcaaaagcaaacgtgttcgatttctgatctgcttctaactgcttcccgtgactgcagaaggaagaggcggagtgtaaagatatctcccaagcttccgcgaaaactaca

SEQ ID NO: 400558 - DNA, 122 bp, Homo sapiens
ggctgtggacgttcatgttccggatccactcgtgtcccatcatgcaggtggggtcccagccgtagatcacacagttatagccatacctagttaacacaggaggagcagtcagtccctgcaga

SEQ ID NO: 400559 - DNA, 122 bp, Homo sapiens
gatgctcacgctccggtccctgctcttctggtccctggtctactgctactgcgggctctgcgcctccatccacctgctcaaacttttgtggagcctcggcaaggggccggcgcagaccttcc

SEQ ID NO: 400560 - DNA, 122 bp, Homo sapiens
cccgccccatacctgcgcggcggccccgcctccacccatccattggctagatccgccgcccgtcagacgagcccccggggcccgcccccagccctgagctgcgcctcttagctctggggcca

SEQ ID NO: 400561 - DNA, 122 bp, Homo sapiens
gcccgcggtcctcaccagccggatcagcggccgccgttgcccagcctcctgccccacacgcggccttaccgaggcactgccccactggtgtgctgaacgggttccccaggaggaactccatc

SEQ ID NO: 400562 - DNA, 122 bp, Homo sapiens
tgcccgcgcaggcagtggtacgggccgtgctggaagacaactcgagctcggtggactttgcggatctgccggcgctgttcggcgtccccctggcccccgagggcatacggggctacctgatg

SEQ ID NO: 400563 - DNA, 122 bp, Homo sapiens
tgacccagggtgccatggtgtgggtgctgggcgagcggtggtgcacattgagcacacagacgctggtgacgatggagaaggtgaccagcaccatggtgaacatgaggtacttgccgatgaga

SEQ ID NO: 400564 - DNA, 122 bp, Homo sapiens
tcccacagccagtagatgattacttcgtggagcctccgcaggctgaagaggaagaggaaacggtcccacccccaagctcccatacacttgcagtggtcggcaaaggtgaggcagtctctgaa

SEQ ID NO: 400565 - DNA, 122 bp, Homo sapiens
cccatgacgtcaccggcggcggcaggccccgcctccagccccgggcggcaggccgcatgacgtcaccgaggccccacccctccggagcgagttcggtcctggcgttcatttcattcctgtcc

SEQ ID NO: 400566 - DNA, 122 bp, Homo sapiens
cagtcaggggagttgggggtccggctcaccgtgcagacaggatggcgtggatgtcgtggccggagcagatgtcctgcgtgatgtaggggttgacctcgcaggacgtgcccaggagagtgtag

SEQ ID NO: 400567 - DNA, 122 bp, Homo sapiens
ttagcccaaagaaagaggagccaggatttgtagaatgcactgtcccgactatttcaatgccgggatgataaaatcccagcttctttgcatgggaagcatggacttaagaatcagacttggtg

SEQ ID NO: 400568 - DNA, 122 bp, Homo sapiens
gactggaaacgcttcccctatttcttccgtagcggaccgggagagcttactggcgctctgcgaaccggctggaaagaaacaccgagtcactcgtacagactcttggtcgcagaacttggctt

SEQ ID NO: 400569 - DNA, 122 bp, Homo sapiens
cctcactgcccagcttcaccgccgcttacctctaagcttttacagaggttcactgctttccgtctcctcaggaaggcccagtgtcaggtaggactctgctgtccttgggttattgattagcc

SEQ ID NO: 400570 - DNA, 122 bp, Homo sapiens
tataatattttcccctttccaagtcatctgcccaatataagagaaatatttggataatatcgtcctcttcctcttcttcttccccctcctttttctcttcctcttctatggcaaatttctat

SEQ ID NO: 400571 - DNA, 122 bp, Homo sapiens
ggaagacagcgctcccctgctaagctttggcacattctccccaccagccaggctggagttcgtatagaagggagaggcgggatcgggggcgaggaagggagggcgtgagagtgaaggcagag

SEQ ID NO: 400572 - DNA, 122 bp, Homo sapiens
cttggagttctggagaagctcagggaatcaaccaagtctgacacaggccagtgaagcccgcgggaggcgcggccgcgtggctgcggaggtgtgcttgctcagtgacgtcaggcgcggctgcc

SEQ ID NO: 400573 - DNA, 122 bp, Homo sapiens
ctggggtgtctttggggtaacaaacgataaattataggcaagagcccaaccctagattgccggggctgaggtgaggacgggtcctgcccgagagggagcgccggactcacctggaggaggcg

SEQ ID NO: 400574 - DNA, 122 bp, Homo sapiens
cctcaggatgatccagtaaccaactgttagaggctcatgttgacgaaaaaagccaaactccgtaaaatgtttgaagaggtttattctgagcacaaggtgaggaccgtgacccatgacacaac

SEQ ID NO: 400575 - DNA, 122 bp, Homo sapiens
gagttagcaggaaaggtggcactgaaggaaggcgaggcagcgactctgaggcagtggaaacggaggcctctggtgttaattgtggctaattttccgttggctgttgagggaaggagaaagga

SEQ ID NO: 400576 - DNA, 122 bp, Homo sapiens
cgttctgagctcgaggctttggctcccaggcagcctgtgaggcggcgtttctgggcttttcgcccttgtgggcagtctgcccttgtaagtgggaagaagaatttggggataacttggctctt

SEQ ID NO: 400577 - DNA, 122 bp, Homo sapiens
aattcctctacttttcacaatgaccgaataccgcagtagccacagcggcacccactcgtgcgcttgaatgtcaggaatgctttcctgaagagcttcttggaaacttgcttcagaaagcagtt

SEQ ID NO: 400578 - DNA, 122 bp, Homo sapiens
cggccttctcgaagaaagtgagcagctgcctgaggcagacgtggcgctggcagtggggcccggagcacgcctccccgtaggccttgcgcagccggtcacacttgtcattgagagtacacagc

SEQ ID NO: 400579 - DNA, 122 bp, Homo sapiens
ggagtggaaagggagcgtgcgcgaagtcacgcttctggctgcgacgcaaccgccgctgggcggtgagttgccgccaaccgccctaacggccgaaacaatgttaatggctttcagagtctggc

SEQ ID NO: 400580 - DNA, 122 bp, Homo sapiens
acagctgtgcccacactttcactcctgcaaagaacgtctcattggcttcaattgctttagcggctcagcgtggtccctgtcgggagcacttgtcacctccttcccaagcagcccgcttgaca

SEQ ID NO: 400581 - DNA, 122 bp, Homo sapiens
tcaaggtaaccaactccaccctctgagatccacgactagccaaggcttgccattgctccacgttacatctctgttgtgagagccatcttgattctcatgtgtgagcccagatttggctctaa

SEQ ID NO: 400582 - DNA, 122 bp, Homo sapiens
ctctgctgcctaagactcaaccaggattccaaaacacctctggtgagcttagcaactggtcgataaaagtagatcacttagattaattataacagatggtttttttaaaaaaaaaaaaggaa

SEQ ID NO: 400583 - DNA, 122 bp, Homo sapiens
ggtcagcagcaggatggactgctccctcacgtctactcttgttaggatatctcccagaggcggcatctctccttctgctagacactgtaggggaggaaaaagaatcctttcctttacccagc

SEQ ID NO: 400584 - DNA, 122 bp, Homo sapiens
gtgttctcaaaggtgttatgatgattaaatgacatgtgattgcatcatgtttccggcctacggagtgagggtggctgtttcaaggaggtgcctggcacctgctcctgccccactctaggcca

SEQ ID NO: 400585 - DNA, 122 bp, Homo sapiens
acgtgatcgccttgaagttatgcgtgaaaggaggagagctcatcaattttaagaaaatcccggtaagggacagtcctgactaccatcaggtggacaggacccacgcgaaaaataccaggggt

SEQ ID NO: 400586 - DNA, 122 bp, Homo sapiens
gcctgttcctttctctcccaccaggaattctggcacttctgctcaagccggatgtcactgcgtcacttctccatccccaccccctcctcttccaaaggaagcaggggaaatgtctcatcttc

SEQ ID NO: 400587 - DNA, 122 bp, Homo sapiens
cgccaggcatgctgggagaagtagtttcttcaccgctttcggccgttgttcgcagggctgcgagactacaatcccagcatgcaaggggaatgggttggtgatgatacctggagagggcggtg

SEQ ID NO: 400588 - DNA, 122 bp, Homo sapiens
cccttcactctaagcttaacacttagtagggaagagattctcaaatgagaaaaagggctccggctatatgggcaacaaagagggaagatacaggttgccagttatacatttatagaaagata

SEQ ID NO: 400589 - DNA, 122 bp, Homo sapiens
cgaagctcctcctccccgcctatatataaagggctggcgcggggctcggcggcgccatttcgtgctggagtggagcagcctctagaacgagctggaggattctgcctaccgatacagagcct

SEQ ID NO: 400590 - DNA, 122 bp, Homo sapiens
tcatcgccccctgcggagctggcgtggaccgcagcgacttgggtccagccgacaggtggccgagggggcagccactgacctggtgccaggtgtccctggctccctgccaggtgccctgcagt

SEQ ID NO: 400591 - DNA, 122 bp, Homo sapiens
tggcttgcgaacttccaacgcaggaattggaggattaccggggaaggaatgcgaggtacccgatagcctcacacctgaacacggtcgcttcaatccactgggattcatttaaaaaaaaaaaa

SEQ ID NO: 400592 - DNA, 122 bp, Homo sapiens
agcgtcgccataggggcccgaacgctagcgtttagggaatccgcaggctagaagtggaggcgggacgccactggtcgtctgagcgctgattggctggtggcgctagtcaccagccaatcgtc

SEQ ID NO: 400593 - DNA, 122 bp, Homo sapiens
actgagccgcgctggcagctcgcgtcgagtcggtctgccctagccgcatcccgcggcgcccggtcgggctccgggcaccaggcaacacctaggccgttcccttcagacagccccgggccagc

SEQ ID NO: 400594 - DNA, 122 bp, Homo sapiens
cccttctcctaccccaggaacaaggagtgtcctacctgccgaaagaagctggtgtccaagcgatccctacggccagaccccaactttgatgccctgatctctaagatctatcctagccggga

SEQ ID NO: 400595 - DNA, 122 bp, Homo sapiens
ccaggagtcagacccggccgggatctgctacccttccctgcgcaccttaggcagaccacacgacctatccctggtttggtggcctcataataatcaccaaggtttattaagccgctgtgcgc

SEQ ID NO: 400596 - DNA, 122 bp, Homo sapiens
tagtggagcgcccgcgcaggcggggcctcggaggtggagggcggctttccggagctcctccgacggaggcccgtcccggaaggatccccgcgacccccgatcactccctccgtcttttcgcc

SEQ ID NO: 400597 - DNA, 122 bp, Homo sapiens
ttactgacaattacctttgattcctgtcccagtccccttgtgtcctcccctcttgccctgcgttccccttaccaagagaggagaggaccaccaggaccaggaacagcgagaggcggcgcgtc

SEQ ID NO: 400598 - DNA, 122 bp, Homo sapiens
cctgtctgatgtaacggctacgtggtacctggatggcctctctgtctatcctcggtggtgcgtgtcttccggccggggtgcgtgtcttccggccggccctcttcctgcttctgcttctcgct

SEQ ID NO: 400599 - DNA, 122 bp, Homo sapiens
cgggggggcgcggtgctgcgctccggtgtgttcgcccatgacctcggtggttcgaaggggcgggtgctctttaaaagctggaaatggaagaacagcagcgtgggagctcctggacactttcc

SEQ ID NO: 400600 - DNA, 122 bp, Homo sapiens
ggtttctccttgttggccaggttggtttcagacccctggcctcaagtgatctgcccgcttcggctcccaaagtgctgggattacaagtgtgagccaccgcacccggccagatgtgaggggtt

SEQ ID NO: 400601 - DNA, 122 bp, Homo sapiens
ggccagttgaatggattctgcttttacttttactaagcattgttcttccttcctagaggccgagataactccagcttaccttggtgtgactatctaggaatttaaaaacgcgtcttcgaaca

SEQ ID NO: 400602 - DNA, 122 bp, Homo sapiens
gtacttctcctccattggtcccaggctaactcccctgttcctctgtggtgtctgtcagtccgtctgtcttctctttcctctgcccttcccacagggcagtatctgctgatggattcagtcct

SEQ ID NO: 400603 - DNA, 122 bp, Homo sapiens
ctgagaaccagatgggagataggagccatgattagcacttgggaagctgagctgatattccgcagggcatctgagcccacagccctgaggccaagctccacagccaagtgtccggaggctct

SEQ ID NO: 400604 - DNA, 122 bp, Homo sapiens
ggctgcctgcggcaaagctcgacatacacttgattttcttccgatttggagaaaatgtcacgggcgagagcaaaaaaaaaaaaaaaaaaaaaaaaaaaaaccctaactgtaaatattatttg

SEQ ID NO: 400605 - DNA, 122 bp, Homo sapiens
tggattctttctcattctttctgggctaaaggttggcttccaagttcctttccactagtgcgccctcctggcggctctttacagccaacttcacacaaaggaggtttaaacagcatctggca

SEQ ID NO: 400606 - DNA, 122 bp, Homo sapiens
ccccgcccgaccctccgcgcccttgggacccccccctccatggcgggttcgcgctggcctcggcctcccccactgagacccctggaggcgcccccgcccccacgcgcgagaacccgcccgcc

SEQ ID NO: 400607 - DNA, 122 bp, Homo sapiens
tctggacctgccagcccgccatgcccgagcctccccaccgccatgggctcctgcactgcccgaagcctctccgacaagcgccgccccttgctccgtggcaccccgtcccgactgctcaaggg

SEQ ID NO: 400608 - DNA, 122 bp, Homo sapiens
gactccgtctaaaaaaaaaaaaaatttaaagtaatcatttttctcagcagttgaaaaacgcgacgtgaggtccaggcagcctcccctcagacagtgttatctcaggccgactgtagcgagcg

SEQ ID NO: 400609 - DNA, 122 bp, Homo sapiens
aacccaggcatccccacaccaccttccctcggatctgtttggcgccctcacacctccatccggtgcccttgcactcacccaggatgggctgcccgccatcgtaggcaggcggctcccactgt

SEQ ID NO: 400610 - DNA, 122 bp, Homo sapiens
tccctccccccgccccctggctccgaggctgtaatcagtttggatggagcacagcagacacgctgtgggggaggggcgtgtggggagctgtcggggctgagaatcattttaggattttgata

SEQ ID NO: 400611 - DNA, 122 bp, Homo sapiens
gcctcccgccagaccaagatagcagagagacgtgctctttggagaccgcctctagggcttcgctggcgtgaaagtttgccgcgccaggtctccgggtcccctcgctctctgacgcccctctg

SEQ ID NO: 400612 - DNA, 122 bp, Homo sapiens
acgaatatatgtttgtatattttaacattatatatgtgtttctttacttcttccacccatcgggagtccagtattttggggcagattatgtaacaattctaatgataacgttacccaaaact

SEQ ID NO: 400613 - DNA, 122 bp, Homo sapiens
tttcacgtctcatgtatttatatttgtttacaaataaagagttacttatttgcaaaatgccgtatctttaatacttgcttacatgtgattttgggaattcttttggaaccagtttttgttct

SEQ ID NO: 400614 - DNA, 122 bp, Homo sapiens
catcggcgtgggggcagtcactatgctcatgggcttcctgggctgcatcggcgccgtcaacgaggtccgctgcctgctggggctggtgagtacggatccctccgcagctgcctgcccatttc

SEQ ID NO: 400615 - DNA, 122 bp, Homo sapiens
agacctacacttaatttcctttaaagcctcacttggtcttgccatttcagccctttccttcgaagtatgaagcctgactttttttgtcttcctttcttcagccctgcagaggcagctgtggc

SEQ ID NO: 400616 - DNA, 122 bp, Homo sapiens
cataatcacattgacggttccagaaagagcgataaggagagtgctgttaagggaggcgagcgctgacgccagaagttgccatatccccagaaaccccagtttgccttttcaccgtcgcaagt

SEQ ID NO: 400617 - DNA, 122 bp, Homo sapiens
ctaaaactggaaggccagtggtgtggctctggtacctttcagccacagcccataccagctcggctctgcagggtactgagagagtgtgtgccctgtatgtttgctggctttctgcccttggg

SEQ ID NO: 400618 - DNA, 122 bp, Homo sapiens
gcagagtgcatactagagcatcctgaagcaattgtccctttttccctcaattaaaattcacggcatacttcacagctatgctgacttttttgcatatagttaaccatttgcaagctgctgaa

SEQ ID NO: 400619 - DNA, 122 bp, Homo sapiens
gaatccttcagcagtgctaacagaatgacaaagcggactctttccttatctgtggaatgacgaacgtctcagcacttctggaggcgctgcctcctgtctcccacagctgcctggcactgtga

SEQ ID NO: 400620 - DNA, 122 bp, Homo sapiens
acagtggctttggatccagcaaaggggactgaggaggaaccattgagatagggaaaaaaacggtagagtgctgagtcatggaagcaaaaagaagaaagtatttcaaagaaggaatagtccat

SEQ ID NO: 400621 - DNA, 122 bp, Homo sapiens
ctttcacagctggggagtggagtctgggcctgaggtctcccgtgcgcctctcggcgcctgcgcccgcgctgtgcaccgccccgcgcctgcgcccgcgctgtgcctttgcgagggcggagctg

SEQ ID NO: 400622 - DNA, 122 bp, Homo sapiens
attcccccgctcgacgacggcgagggtgtgggagctactggcaggcaaattggtgggagccgcccggcccagcctgccttgccgagtcagcgcgctcttgagccgctgggcccttcccggtg

SEQ ID NO: 400623 - DNA, 122 bp, Homo sapiens
ccgcgcagcaccttgcgaggacttcccggggtgctcgtgccacgctcaggcgccccgtgccgcccctgctgcccttccaggcgggctggccttggctaagtcgagacagccgcgtccagtgt

SEQ ID NO: 400624 - DNA, 122 bp, Homo sapiens
agctctgttctgtgacattggaacctcatccttcctggtgaatctgaaaatgctgccttacgatgtaaacaggtttgttctgagcaagaaaccacccttaaaatgagcagaaggtgttttgg

SEQ ID NO: 400625 - DNA, 122 bp, Homo sapiens
tgagtgcccagcaaaggcagtgagcgtgctattttggagatagcatccttttgtttaaggcgcattcaatcccctacaatgtatgagcacgggcttgcattttattgtctgcaagatcacgg

SEQ ID NO: 400626 - DNA, 122 bp, Homo sapiens
agcatcggggcaagacccttcaccagtgaaaagatatgtctcgttaaaggcttggatgatcgttagcattttttttagcaataaaatatttttagttaaggtatgtacattgctttgttttt

SEQ ID NO: 400627 - DNA, 122 bp, Homo sapiens
gatccacctacctctgtctcccaaagtgctgggattacaggcttgagccacctcgcccagcgtggaaaatgtatttcttagtatgggtcttcaacaaaaaggcttgaaaaacactgccctgt

SEQ ID NO: 400628 - DNA, 122 bp, Homo sapiens
gtgagccagggctgcgttccaccttatggctgaatcatactccaccccatggacggaccacgtcgtgtttaaccatcattagctgatggacgcctgggttgcttccacctgttggctcttgt

SEQ ID NO: 400629 - DNA, 122 bp, Homo sapiens
gcgccttcttcagagtcgctgggaggattaaatgagatgatgtatgcagagccgttaagacgctgtttggcacaaagttcagggcagctggtttagtttcctcgacttcactacctgaccct

SEQ ID NO: 400630 - DNA, 122 bp, Homo sapiens
tcggtgatcccaacaggatgattcagcaatttccccgtggtccgggccactgtgataactcggtttctgggaccccgaacaccgaagagggagacgaagagggtgacatcgcgaggctgaga

SEQ ID NO: 400631 - DNA, 122 bp, Homo sapiens
gagagccggccccagaacgtcctcttcctatgagccggttcccgcctggagggagcagagcgctggtaagagcaggaccatctcaggcccaggattttcccgaagtggaccggtcgccgagt

SEQ ID NO: 400632 - DNA, 122 bp, Homo sapiens
tcctaacactccctcccgctctgtccctaggcccctacgagaaccgctcggtgttcgagtcgctggacctgggctggaagctgctgcgcatcttccccaaggagatgctgaagcgcattccg

SEQ ID NO: 400633 - DNA, 122 bp, Homo sapiens
acgtttgccccattccctgcggtccctgggggagagcgtggctccagccctcacctgcctcggccctcacctgccccgacctccgttgtccttgcgaagtggcaggtgcgccgtttcctgac

SEQ ID NO: 400634 - DNA, 122 bp, Homo sapiens
ttcaagtgattctcctgcctcagcctcccaagtagctgggactacaggcgcacaccaccacgtctggctaattttttgtgttttagtacagacaaggtttcaccatgttacccaggctggtc

SEQ ID NO: 400635 - DNA, 122 bp, Homo sapiens
tgagataattacctagatacagagttataaccaacattaaaaacaaaacaagcggccaggcgtggtggctcacgtctgtaatcccagcactttaggaggccgatgtgggcagatcacgaggt

SEQ ID NO: 400636 - DNA, 122 bp, Homo sapiens
ccctaatcccctggaaaagcccagccctctgcaagcccctcctctttccagcctagtccccgcccctcatgcctgggctgacccgggcacagtgttatccacagcacgccaggaacccacag

SEQ ID NO: 400637 - DNA, 122 bp, Homo sapiens
attgcaggggccttaacaccctttcctgaccaatgaacaatgcaacctgttttaatcaaccgtgggcattctgccttagctacagtgcttgttttcaatccttagtataatcactataaatt

SEQ ID NO: 400638 - DNA, 122 bp, Homo sapiens
ctgcaaagttgataattcacatgactttactacctgcatttcctcttttgtgaagctggccgcctcatcccccaattcatgaagatacatgcagtcaggttttggacactgcatattcttta

SEQ ID NO: 400639 - DNA, 122 bp, Homo sapiens
cggtgggcggcccgccggggtgcacctctcaggcctgcagccctcggccggccagttcttcgcatctctagatcccattaacgaggcttctgcaatcctgagtcccttaaactcgaacccaa

SEQ ID NO: 400640 - DNA, 122 bp, Homo sapiens
tgcccttcccggggccgggggtgaggcagctcggcttcccagcgcggcacagcaagccggcgcccttttattcccggcgctgcgaggcttccccaagtccacgcctcggcacacccccaccc

SEQ ID NO: 400641 - DNA, 122 bp, Homo sapiens
gggggctccgggcagaaacaccctgtcaacacagacgttgtggtgagcaggctgtgagcacgggagcagaagtgggatcgtctcagcagtgctcgggtgtagccaggtgcaagagattattc

SEQ ID NO: 400642 - DNA, 122 bp, Homo sapiens
ctaattctgttccttggctgtgctgagcagagaactcctccaggcttcaagttcagaacacggccaagaggctttgtagatgccagacctcagcccgacagactgaggctcccacctgcctg

SEQ ID NO: 400643 - DNA, 122 bp, Homo sapiens
ttccacccccattcagtgacccgtcctcttctctcctgcctcatttctctctcttatgggcgccccatttcccagtgcttctcccctgcagcggcccctgtctctccagagacagaacaatg

SEQ ID NO: 400644 - DNA, 122 bp, Homo sapiens
tgaatggaaagaggcaggggctccggggaaagggaaccccttagtcggccgggcattttacggagcctgcactttcaaggacagccacagcgtgtacgaagtgaggaattcctttccaccaa

SEQ ID NO: 400645 - DNA, 122 bp, Homo sapiens
agcttccaccatttgacacgcacacgccgcggggagaccagggccggctcgtagcggtagcggcagggcaggatcacactggccccttggtaggtgaacagggtctcctcgggtgtctccac

SEQ ID NO: 400646 - DNA, 122 bp, Homo sapiens
ctgcacgttcggactttcagtcttgctcaaagcaaagaatctccaagagcgctgaggctacggattcattcgggtggggcgaggtgttattattgtgggattgtctctgcagagttggcctg

SEQ ID NO: 400647 - DNA, 122 bp, Homo sapiens
cttgagctagacaccgggaagaccgctcggatcaagaccagccaggcagaggaggagaggcggcgccgacttcgcccaagatttccatcaagtccacgcatgagaggcctctccctccccca

SEQ ID NO: 400648 - DNA, 122 bp, Homo sapiens
tttctttaaagacccttctccagcagccacatgctgagatagtgagagttaggacttcaacgtatgaatttggggggcaacaattttagccccaaatagtacctatgctttcacctgtggct

SEQ ID NO: 400649 - DNA, 122 bp, Homo sapiens
gcagaatgggtccggtggggtcttcatgggttcaggccccgggcaccaccctgcacatgccgcccctgccccacgagacctgggagctcccaccgcctcggggctccatccatgccctgaaa

SEQ ID NO: 400650 - DNA, 122 bp, Homo sapiens
aagaaaaggctaaaaacaagacacacagaacaagaaattgcactctctcaaaacgacagtcgccctgaaacggacgctggaagaggtttccaggcccgtggcgacggtgaggggggtgaagg

SEQ ID NO: 400651 - DNA, 122 bp, Homo sapiens
tgcacttaagaaggggcgacgggagggccaggctcgccgggctgagtgctgaggagggggcgcgtcccacccatgcaagcccggaacaaaggcgcctgtcactcgtcactctccacgcgggc

SEQ ID NO: 400652 - DNA, 122 bp, Homo sapiens
tgcctggcaggaggctcgcggggtccagcccggggtccccccgaccgtggtggagcccaccgaggacctggtacaggctcacaatgaagaggccaggtctaaagtcacaaagcctggggaga

SEQ ID NO: 400653 - DNA, 122 bp, Homo sapiens
tgggtgctgggcctctgctgcgtcctgctgaccttcggtgagtgattctggaggagcagacgtcccccctccacacacgcggccgcttctcgaaggtcctgggggcgttgaacgtgggaggg

SEQ ID NO: 400654 - DNA, 122 bp, Homo sapiens
aaaggcggcgctgcctcgcactggtgcatggactgcaacatgggcacggagcctgctgcccggggcagcctccccggcaacttccgaaaggtctggggtcttgagggactaggggcaggcac

SEQ ID NO: 400655 - DNA, 122 bp, Homo sapiens
gccatagctattggcctcattggacaggcctgggtgatgtgcacagaccctaaaggtggccggagctgaccagcttcctattgcactcttctgggtggcccaggcacccagttgcattggct

SEQ ID NO: 400656 - DNA, 122 bp, Homo sapiens
aagcctgaaggcgggcttcaaacgcaggcgccggggaccatgggagccttcaaatagctgcgctggcgcaatgataccttaatgatagattttccgttcttatttttagctctcattcgcct

SEQ ID NO: 400657 - DNA, 122 bp, Homo sapiens
atgtgggttaggaatttgcgcagggcacagaggagatatcttgcctccgctccatggtgtcgtgtctggggcctcagctggaaagactcaaacgctggaggtgacttgactggctgggagtt

SEQ ID NO: 400658 - DNA, 122 bp, Homo sapiens
gtgcagccagcacaagcccgacctgctaggggcctcagaacaagcggtgtggcccgaggccgtcacacagcacctgtgctgagagtgagctgacgtggacggcggcaccgtggccgtggcag

SEQ ID NO: 400659 - DNA, 122 bp, Homo sapiens
tctctcattccttctacatgtagtgcaacaatgggtgttcagtaaagtagagtgacacagcgaggtcacacagcacattagagggagtgctagaaccagagccccaaatttctcattcccca

SEQ ID NO: 400660 - DNA, 122 bp, Homo sapiens
gctctcagaagtacttgctggctggaaaacccaaaggggtgaaacctcagctacagccgccgcagcctcccagggaaccggctccgcggcgcccctaaaccccggcgaggagccggagcgga

SEQ ID NO: 400661 - DNA, 122 bp, Homo sapiens
acgtggcaacactggagcctctctgaacctattctggtttgggaggcggcctgattcactcgtttttttgctcaattaagctctgttaaatttaatttgtctaaggtttttcttttaacaca

SEQ ID NO: 400662 - DNA, 122 bp, Homo sapiens
aaggcaggactgagacgttttttctccgttttggacaccggcttaagtagttaaaactaccgcaggcagtgagtaggaacagaaaagtattaggtatctttcagcatccgggcgttttcccc

SEQ ID NO: 400663 - DNA, 122 bp, Homo sapiens
gctgtctgcagagcacgctgcaggcccttgtctctcgccctctctcacaggcatctttcccggcaaacctgcagctcgtcctcgtgcttcgcccgacgggttttttccaaaggactctctcc

SEQ ID NO: 400664 - DNA, 122 bp, Homo sapiens
tctgatacttgacatatttcttttcccgttcaattcatggtttctgcccaaacggagccacgtgaggacttctttggggatgtgtctccaagaaaagtgtgggctgccttcctcaccctgga

SEQ ID NO: 400665 - DNA, 122 bp, Homo sapiens
acaaacggagatgaggccgagagcagccaactgcgaccactcaagagagggccttctgtacgctcagcaccgtcctaaagaccttgcgtatattaactcttaaacctatagccactctacaa

SEQ ID NO: 400666 - DNA, 122 bp, Homo sapiens
gagaaggcatcctggagaatacattccaacctcctccaaatcagggaggcaagccgggggcggtggctcatgcctgtattcctagcactttgggaggctgaagtggggggaatcacttgagc

SEQ ID NO: 400667 - DNA, 122 bp, Homo sapiens
tcagacttattaggaaagttactcggatcagggcctctgaaatcacccagacccgagctccgtaactgctctggtatagagctgggctctgtgctatggagacagtactgacatttcatctt

SEQ ID NO: 400668 - DNA, 122 bp, Homo sapiens
gctgggattataggcgtgagccacctcccccagccataccactggtttctgaccacccaacggcatagccttataaggggccactcctggctccgcctctccaaagccccaccctggtctag

SEQ ID NO: 400669 - DNA, 122 bp, Homo sapiens
tagaccgggtcttggtcgggacaagcgaacgttgtgggggcgttgtgagaaaaacccccgcgaggctgggccggctgttcgtccttgggccagccttgacggctctggttggttggggcaag

SEQ ID NO: 400670 - DNA, 122 bp, Homo sapiens
ttgccgctgacgcgctcttgtactagttgctctgctggtcttaagtagatcgtcagggtccgtgcgcctctgagtgccggtctgtgtctctgtctccgcctttgtgtgtgtcagtccatctc

SEQ ID NO: 400671 - DNA, 122 bp, Homo sapiens
gcagcttagaagaggcagggtcgtccggaagcagcagggctgagagctgtgcgcgaggcccggaccaaccacgctctcctgtgcctcccgacacagaatcactgcagggtggagccgtgacc

SEQ ID NO: 400672 - DNA, 122 bp, Homo sapiens
gggacgaggcggagccgggcggggttgaggggacggggcggggcttggcgggggcggagccgcccagcgctgaatccaaatcgtatctaagctattttctagctctgacatcgtatacatca

SEQ ID NO: 400673 - DNA, 122 bp, Homo sapiens
cctcggctctaatacagggagtggctgctcgccaggatgcttgtctgaagtcagtgtgcccgcctgcgggctgttccgtgtgcttgagcctggacagagcccctgccacgcactcggcagcc

SEQ ID NO: 400674 - DNA, 122 bp, Homo sapiens
acccggatctcgcgagaaccggtcgagactgggtgactgggagatggtgtgtgccgggtgcggggggtgggagtgcggggggaggggagccatgggagctggggtcagggccgctgttgctg

SEQ ID NO: 400675 - DNA, 122 bp, Homo sapiens
gaagaagatatgaattgcatgtgtggtgctggtggctggggctgggttgtaagacgagggcgtttgtcccagctatttctgtctggctggaccttggggctttttgcccagagcagagagct

SEQ ID NO: 400676 - DNA, 122 bp, Homo sapiens
cctgtaccaacacttggccctgcagctgctcagaagtaaagatgctgatctcttgtctttcgttgggaaaagcttccttttttagttctttatcctcttcagctccttcaggaaactccttc

SEQ ID NO: 400677 - DNA, 122 bp, Homo sapiens
cttttgtagtgacattaaatttggctataaaagatggactacatgtgatactcctatggacgttaattgaaaagaaagattgttgttataaagaattggtttcttggaaagcaggcaagact

SEQ ID NO: 400678 - DNA, 122 bp, Homo sapiens
gttatgcccacggcacacctcagtgcagatcagccacatttcaggtgttctgtggacacacgtggcatatggctaccatattggacagtgtggctctgaagagtgattattttatgacccac

SEQ ID NO: 400679 - DNA, 122 bp, Homo sapiens
ttacaggtgtgagccatcgcgcccggcctgaaattcttaataattttttaaacaaagggtcgtgcatttttattttgcaatgggatctgcaaattatgtggccattcctgctcaggagattg

SEQ ID NO: 400680 - DNA, 122 bp, Homo sapiens
caagccttgactttggggggtttgttctggttttgtactttctctcctccctgtggctgccgcacatgaaaggctggggtcaggccccgcacgggggtgggaagcagggctgtgcgttttgc

SEQ ID NO: 400681 - DNA, 122 bp, Homo sapiens
ttctacttcctcctacttccgcaaacaaacgggcctcgggccacgtgatggcctgaccaccgctctccgccaatcactggtggccctgtcccaggcctcctctaggctccgcccccgcgccc

SEQ ID NO: 400682 - DNA, 122 bp, Homo sapiens
ggtactatgcttggcactttaatttataatctttgccaccaaagccctgccagaagtgcccggcggctccaggttctagatggggaagttgaggccggcggcaggcgcgctccaccgggcgg

SEQ ID NO: 400683 - DNA, 122 bp, Homo sapiens
cgggggccgcacgggggtgcgtgacgtcaccggcattggttacacgacgttctagaactccgccccacgtgcgccggggaggagggggaggaggaggaggagatgggggtggggaggaggag

SEQ ID NO: 400684 - DNA, 122 bp, Homo sapiens
ggctgaataatattccattgtttgagtacatatttgtttatctgtttatcagttgatggacgactgaattgtttccaccttttggctgttgtgaataatgctgcttgctatgagcatttgtg

SEQ ID NO: 400685 - DNA, 122 bp, Homo sapiens
tgctctacacacagccgcagttgggctgggccacagtctgtggggagcataaggaagtcccgagtagttaaaggctgaacaggaaaactttggcctcctcttctccagcttgagggctgggt

SEQ ID NO: 400686 - DNA, 122 bp, Homo sapiens
gaccaagtgccttcggcattatataaacggatcgatgtgtgcgggagtccccaaagccgtcgagcacgtgaaacgcgactttttactgccctccaagcggcgaccaagccccgctccacccc

SEQ ID NO: 400687 - DNA, 122 bp, Homo sapiens
gcgggggtggtagcatggggagctcagcaggattcagcccgcacctcggctccgggtagtcgggaaccgcgcggagcgccctgcaagaggccacggctcccccgccgctgtagaaggccgga

SEQ ID NO: 400688 - DNA, 122 bp, Homo sapiens
cgctctcctcatcccctcttcggtgttcggggtcccagaaaccgggttctcacagtggcccggaccacagggaaatcgccgaatcatccattcggggtcaaagagcctggaggatccccttt

SEQ ID NO: 400689 - DNA, 122 bp, Homo sapiens
caaggctgcccagaaacactaaccttttactccaaaacctcagctctttgtcccagcccacggatcttgtaacacttaacaggagtcacggtgtatagaactcagatcaaagagccccctta

SEQ ID NO: 400690 - DNA, 122 bp, Homo sapiens
ggaagtggcgttggtcggagcctccgaggaggcccgttactgtttccaatataattggagcgttcctgtccgctggacggcagccagctcggccctgctcccccgccacggcgaagtatgct

SEQ ID NO: 400691 - DNA, 122 bp, Homo sapiens
gcctgaagggcgcgagcggcatgggtggggagcttgagggggcgttgggctcccaccaagcgccagatccttgcgcgcctccagcgctcgcccgcgcggctggttcctttgggatgcggagg

SEQ ID NO: 400692 - DNA, 122 bp, Homo sapiens
ttcattggatacctgtaccttctgcatgtgaggtactagactgtgctctgcaatgtagtgcgacagcagaaagcagaaagagaaagtgcgggaagggcagctggtggaaatagcaaagctga

SEQ ID NO: 400693 - DNA, 122 bp, Homo sapiens
ggccaccccatcctcagtctccctcatttttctttacagttagcaccatttacccattcacggagaaccttacagttctcgcaacagggtgatcactcagtaagtactgttgtccctttggt

SEQ ID NO: 400694 - DNA, 122 bp, Homo sapiens
tacaaataagaaagccaaggctaacaaactaggacatggcagagctaagattctatctcacgtctaacttaaaatcccatggacttttcattaatccatttcattaatcatgacatttccat

SEQ ID NO: 400695 - DNA, 122 bp, Homo sapiens
ccatcatatagatggattttaaagccacatgattgaatgagatcatgcgtgtcatctcaacgtcacttagaatatgacatggctaagaatcagctctggaatcagaatgatgtcaatttgaa

SEQ ID NO: 400696 - DNA, 122 bp, Homo sapiens
ggtgatctgcccacctcagcctcccaaagtactgggattataggcatgagccactgcacccggcccagagtcagttattcttagagcaggtgttttggcttttgtctttaatgcttccctcc

SEQ ID NO: 400697 - DNA, 122 bp, Homo sapiens
tacaaatttagccagaactgtctatgtgtgcccctgcccggttataagccaaattcatgccgtgcctttgcctaagaggatgagacttcgaggcacagagagaaaggagggaggctgtcaaa

SEQ ID NO: 400698 - DNA, 122 bp, Homo sapiens
caagcacagcagtaggaccagggggatgcaagagcgggggcggccggggatcgtgcttctcgctcaggtccagattcccggcaaccaggccggcggaatcacgtgccatgctccaggccagc

SEQ ID NO: 400699 - DNA, 122 bp, Homo sapiens
taggttccagcttgggcaccgcttaacatcttggtggtgcagggatcaggctgatgataccgtggttgttctgtgggctactgggcagggtcaagccactcccaccctgatccaggtaccta

SEQ ID NO: 400700 - DNA, 122 bp, Homo sapiens
tctgtgactcagtctctgagcgttttaatacgatggtgtccccgcgggatcaaacttcagcgtcacagctgaggactggcttcgtggtccctgatgggagagcatgaacaggtggtatgtgg

SEQ ID NO: 400701 - DNA, 122 bp, Homo sapiens
cccagaatgaagaaggcaagaagccatggcagcgtccccatgtggtcccaggactctgaccgggagagtgtggacggcagccctggaagagaggctaacagttaacacaaccatgctaactc

SEQ ID NO: 400702 - DNA, 122 bp, Homo sapiens
ccaggtctccagatgggtgcgtgctccaccgtcgtggtggacgtgaggatggacttttcccgctcccgatcccggtcccgctctcgatcccggtctcgctcccgctcggacgaggacgtggt

SEQ ID NO: 400703 - DNA, 122 bp, Homo sapiens
atccgcctgagccgcctgcacaaccagcaggcattgagctccagcattgaggaggggctacgcatgcaggccatgcacaggtgtgagggtcaggagagaagcagaactgatgggatgggtcc

SEQ ID NO: 400704 - DNA, 122 bp, Homo sapiens
gaggggaagggctgggccccggggactggggcgcggtgggggcacacagactctccaggtcgcgcgcgcccttcctgctcctctgctattttcctgaactccccagaacccccagttgcctg

SEQ ID NO: 400705 - DNA, 122 bp, Homo sapiens
atatgctactcacaaacgctggggacaaacccgcacacaaaatgtgacctctgcaggagtcgactgaggaaggaccctacctcctggaccagtccaaaagaagaactcctgcgagagagctc

SEQ ID NO: 400706 - DNA, 122 bp, Homo sapiens
gagctccctgaaggccgtgcacaaatttgttgacagctgccagctgaccgcagacctcgacggctcctttccctacagccatggtgactggatctgcttccgtcaggtaggttcagcctgca

SEQ ID NO: 400707 - DNA, 122 bp, Homo sapiens
aagacgggtgcactgcatctcacagaggaggaagcagagccaagagacaggcctggtgcacgtgagggccgcagcccctgctgctgtgagcacgccctctgcacccactgaatattccccaa

SEQ ID NO: 400708 - DNA, 122 bp, Homo sapiens
ccgaggggttggaggtggggccccaggaggacctcgggctgtgggccgggagagcggagtcggggagtggggcgggggagcgaggtggcgccggggagcctgggatatggcgcggccagacg

SEQ ID NO: 400709 - DNA, 122 bp, Homo sapiens
tatctgcccttattggaatcctgctcacccaccaggctgggagccctggagggcaggccccgtgtgttttgtgttctggttccccattacccggcaggtaaatacgtataaatgaagtgctg

SEQ ID NO: 400710 - DNA, 122 bp, Homo sapiens
cctacctggttgcgggtcttgtgcgacttctgcatccaggctcgccactggtcgtagaggcggaagctgaggttggagcagtacgcgtgcttcttgagccagcccaggaactgcttgagctc

SEQ ID NO: 400711 - DNA, 122 bp, Homo sapiens
tgggaccctgagccctgcacggatctcagtttccctagaaggtctcccgagggcactaagcgttgcccctggccccctcccgctgcaggagactcggggctcggagcccgcctgagcgagcc

SEQ ID NO: 400712 - DNA, 122 bp, Homo sapiens
ctttttagataaggctctgaagccccaggtctagtttcaatccactaatgcggccagcggcgagcaggaggagggaggattggtccggcgggggcggggccagagcagggctcagaggcgtg

SEQ ID NO: 400713 - DNA, 122 bp, Homo sapiens
aaaaaaaaaagtggagtaggagaggccagctcttgattgacttctttctcttgacacacacggtcaggggaaggaatggatcaattgcctcaacttttcagcaggcattaacactgcatctc

SEQ ID NO: 400714 - DNA, 122 bp, Homo sapiens
cgagcggctgttcatgagtgccgccagcgagtagactaggcgcccggcctcgccggcgtccgggtcctgagcaaccacgcgtagcaccgcggtgcctgctgcctcattctccggcaccagcg

SEQ ID NO: 400715 - DNA, 122 bp, Homo sapiens
gagcggaggtgatatcggctcgaccccaaaagacagcctcaaaacactgagaggactcgccgcagacgccgagggacgccacggccccgcggctatcacgttccgccgggcgcctccattcc

SEQ ID NO: 400716 - DNA, 122 bp, Homo sapiens
cacgccctccacacacgcggcttcgggcagaacacgaggcgccctccacacacgcggcttcggggcttgtcatgaaaaaagctgaatgctgggggtgcagctttcaccaacagaatcccgtt

SEQ ID NO: 400717 - DNA, 122 bp, Homo sapiens
aaggacgcgtccactcattggtaagggtgggcgcactcggcccctgcctaggccggatgccgtctgaacctccatcttccacccatgtggtactggtcgtgagggctagaggtggagaattt

SEQ ID NO: 400718 - DNA, 122 bp, Homo sapiens
caatttaaatcatgccacataagcttactaataactgactgagaactgaattgactcattcgggctacagaccttcctagcagatgttagaatctgctctgaaatgctactgcttggtaaga

SEQ ID NO: 400719 - DNA, 122 bp, Homo sapiens
aatcaattatcgcatggggcattgtgagcatcaaaacagataatatgtgtgacagctcagcgcagtaagtactttggattatctactatgtggagccatcttgataccagcgactgcatttc

SEQ ID NO: 400720 - DNA, 122 bp, Homo sapiens
aaccggcctggagctgaactgcgtctatttatggagaagcgggactccaggccgcgtttccggttccctgcgccgccccgtgattggtttagggccatagagtccattttacgtaatcggcg

SEQ ID NO: 400721 - DNA, 122 bp, Homo sapiens
ttccctcatggacgccctgctgaatgaccggcctgagttcgtgcgcttgctcatttcccacggcctcagcctgggccacttcctgaccccgatgcgcctggcccaactctacagcgcggcgc

SEQ ID NO: 400722 - DNA, 122 bp, Homo sapiens
tgctgggggcccgctgcaccctccgtagttgctgaaccaggtgctaagcctctcactgcacggaccagcagcgccggcctgccactctaagtgcagggccactgagcccgtgcccacccgga

SEQ ID NO: 400723 - DNA, 122 bp, Homo sapiens
ggcccggctccgctccgcgcccctcctgctccccgcccgagccccgcccaccagcggctgcggcaaacgcgagcccgccctccggccacgccccccagggcagccaatgcccgggctggggc

SEQ ID NO: 400724 - DNA, 122 bp, Homo sapiens
tcacagttgcaccaggcactttctcctttacgtgttcctgacctggggaagtggcatcatcgttcctcctaccacttcctggttgtgtttgactcctccgtttctcactttgcacaagaggt

SEQ ID NO: 400725 - DNA, 122 bp, Homo sapiens
ccaaagccgctcgctttactgcttttgggttttcttctctccctctctagtctacagccccggcccgggtcagggcaaagcattcagagccgcccacgggccacgcagggggcggagagcgg

SEQ ID NO: 400726 - DNA, 122 bp, Homo sapiens
tccgatgggctggggttcacgtctacaccacatggctggagcacaggccaggaggggctccggctggggaagcatgtggggagcctggctgtgggacccaggcggccccgggccctgtcgcc

SEQ ID NO: 400727 - DNA, 122 bp, Homo sapiens
cctgggatactctctgaattccaggcctcgtcaagatttattgaagttgggcttaaaaaacgtgcttcagatgatttttcccattttctcagatttcaaaggctccctgcagtgcggctgcc

SEQ ID NO: 400728 - DNA, 122 bp, Homo sapiens
gtttgctcagggatcttacattttaatgggagaattcaccttccaggccttacaggaaggcgctaggcctgcctagagaattctagaacattcttaaggtcagaatacgggcgtagagcagg

SEQ ID NO: 400729 - DNA, 122 bp, Homo sapiens
ctccaggttggcattgctcattttagtaagacttaaatggctggtatcaccttaaagttgcgtatttctgaagcctcagatgggtaaatgcccagatagataaaatgcaaatcaagtcaagt

SEQ ID NO: 400730 - DNA, 122 bp, Homo sapiens
cactgtgtgtacgcgccttagcacgctgcacaattccggacacacggggtgcttataaagcgctgtggtgtatttagcagcatcctgtagccaccacatggtgcccagacagctgcaggctg

SEQ ID NO: 400731 - DNA, 122 bp, Homo sapiens
ccgctcgacacaagcagtgaggaggcgtgcgggtgggtgcgccagggcggcctcccccgtcgcgctcgctcctcttacagctcttcgtgcttgatgcggtgggagcggcgcgtcacagccgg

SEQ ID NO: 400732 - DNA, 122 bp, Homo sapiens
aatctgacgtggcaggttattcatcctaaggttcagttcccacctgtgtaaagtgggagccgcaagtcctccgagagtgacgatgatgtgcgtggagtgcccagcccagattgaagcgcggc

SEQ ID NO: 400733 - DNA, 122 bp, Homo sapiens
aaattgctgtccacctaagggagcctggtggtgcatgagcactcggcggccggaacacagcgggggcggggcggtcgcggcgcctccacttccggccaaggcgggtcctcccacctcgggga

SEQ ID NO: 400734 - DNA, 122 bp, Homo sapiens
ataaaaagctttgctatgaccaaggcattagtggacatcaccttatggagacttccatgacggtcaatgtgaggtccaagcctggaggggagggtgcaggatggtgggaaagcctgggccgg

SEQ ID NO: 400735 - DNA, 122 bp, Homo sapiens
ggtttgaaatatctgctgtgatttatagagacaagctttgacctggctaattaacaaaagcgcatactagggccaatcttacaaatgcttggacagtaaaattaactccgttttaaaaggtg

SEQ ID NO: 400736 - DNA, 122 bp, Homo sapiens
agtggtggacggcgggcacatgcccggcccagcctcagcaccgtacaccggcaccgtgtacggccgaccctctgcactggacaccccaacaactacccatccagctccagctccatgtccaa

SEQ ID NO: 400737 - DNA, 122 bp, Homo sapiens
cacccagttgttttgacatctattgctgcttctgaatcagggttgcacatgcaaccctgacgtctgtctctgaatatcttttatgattttactttttttgttgttgttttgagatatggtct

SEQ ID NO: 400738 - DNA, 122 bp, Homo sapiens
cccctctcgccccgccccctctcgccccgcccccggccccttctggaccaggcgcctccccgctactggccccagaccttccccgcatggccccgcccaccactctagccccgccaccttcc

SEQ ID NO: 400739 - DNA, 122 bp, Homo sapiens
acaggccaaggattattcccagacacagggagctctgcttgcagggaagcgagtagatgccgccagcaacagcccactgcagacacagctaaagtcataggtgaaatatgtgagaaggggca

SEQ ID NO: 400740 - DNA, 122 bp, Homo sapiens
taaaaaagagttcctgggaaaggctcctgtttccgagcattcgggcagcaaggggagtggcgcacacttctcagccgaagacactcttggtgggtccggctttgggcttctcaaagacagtc

SEQ ID NO: 400741 - DNA, 122 bp, Homo sapiens
gagtccagttggcttatgcgcatgcgtttctctggtgcaggttctcaccaaatccagaagcggcgggcatttgaaatgatgtaagccgggagtcgctctgcctgcccgtttctgcgctgcac

SEQ ID NO: 400742 - DNA, 122 bp, Homo sapiens
ctgccctttctacagcatgcgttgtttaaatgactccagggcaccatcagtgtcctgcaccgcgactggctcacaaacggggctgagtggagagggtggtgcatcacatgggcacatgggca

SEQ ID NO: 400743 - DNA, 122 bp, Homo sapiens
gcccggcgcaggtggtgctggcgctgtagcgaccgtcttggaggggctgcacagagcactcggttcctttctgtatttaaggtcctgaaaggcacaggcgctaaagccagaaggccgtccaa

SEQ ID NO: 400744 - DNA, 122 bp, Homo sapiens
cgactcaccagaggctgcagcaacaggtccactttgctctccagtctctttctccgacaccgctgaggcggtttcccaccgacttcctttccatacagcaccggcaggcaccggtgtgaagg

SEQ ID NO: 400745 - DNA, 122 bp, Homo sapiens
ctcacgtttcagggaagccctctccacagttacaggcagaaagggtgggccactgagcagcgtgagcccagatcttacccccaccaagtgaagcgggaaataacttgctactacccagcctc

SEQ ID NO: 400746 - DNA, 122 bp, Homo sapiens
gggaggggtgtgtgtgtgtgcgcgcgcgtgcgcgtgtgtgtgtgtgtgtgtgtgagcgcgcgcagtgggggtcccgagggaaaaactgagagtatatattaacaacagatttggatgctttt

SEQ ID NO: 400747 - DNA, 122 bp, Homo sapiens
gagagggggcgcggcaggagcccgcccgggagaggctggttagcgggccacggccagaggcgctggcacatccaacacctgaggaggacccaagtctggttaagctgggaggagtacccaat

SEQ ID NO: 400748 - DNA, 122 bp, Homo sapiens
cggaagaacacgtcggcaggagcaggcgcctagcacaaccggaaaaggaagtgcctccggcgcaagtggcattgagggacttgtagtcctgcgatttcgggtgtagagggagcaggggcctg

SEQ ID NO: 400749 - DNA, 122 bp, Homo sapiens
ggcctgcccagggtgtagccgcacaagccacctcccacccagaaagatcagtgaggaccacgtgctgtaaacagagtagagggctcagctccctgctctgccccccacctgctcccagactc

SEQ ID NO: 400750 - DNA, 122 bp, Homo sapiens
ctgctcagaggaagcatcccaaacccctcactggtttaggaatttaacactaccgagcaacggccccagaaggcaaggcgattgttaggaggaattaaacaggctagtgctggacccagcca

SEQ ID NO: 400751 - DNA, 122 bp, Homo sapiens
acgacaacacacacacaataggtgctctcagtaaacgctgatgataacaccagtgatacacgggatgatgcatacccagtgacatccgcacacagaggatacataaaaagatgcataaagca

SEQ ID NO: 400752 - DNA, 122 bp, Homo sapiens
cagcggcggcgtggcgcagcggcgacagtaagtgcgggccggctcgggctcttccggctacggtcccggccgcccccagactcgcgctcagcgacctccctcccgggccctgggggcggctg

SEQ ID NO: 400753 - DNA, 122 bp, Homo sapiens
gaggaccggtgaaaaggaaaagaagaaagagctaagaagtggagaaggggtggcaggctccggggggggcaacagccaggggactgtcaccaaaacccagaaaccactaagccctgaggggg

SEQ ID NO: 400754 - DNA, 122 bp, Homo sapiens
ggtgtgagctggatagggacaaagatgggggaacccgtggggtcactccttgaccccacccgggacacctagacatccacagtgtcgggggaggggccccagaccaggcagaagacccttcc

SEQ ID NO: 400755 - DNA, 122 bp, Homo sapiens
atgtccccacatttcatttgaaatggatctgaccacggcagatgcccgctgggtgcaagacgcagccacgaggctcctggctaccactcggtgtccaccagactccagaggtagtcgctgat

SEQ ID NO: 400756 - DNA, 122 bp, Homo sapiens
ttccacctaataaaggggtctgagccggtcgcctgagcctgaaaagtgctgtcacgtcagcggaaggaggcgtcccagatcttctcagctgtcttggtgggtatcctgacctagaacggggg

SEQ ID NO: 400757 - DNA, 122 bp, Homo sapiens
acccaagaggcggctctgccacccggccgtgtccctgcagattgactaccctgagatcgccgagggcatcatgccacgtcaccgcttcatgtctgcgtacgagcagaggatcgagcctccgg

SEQ ID NO: 400758 - DNA, 122 bp, Homo sapiens
agtttctcctaaaatctggtttctccctccctctgttcctctctccctccctcgggtttgcgtttgtgttttaagtctttgagctgcctgtggtccccgctatttggaaaatccattaaagc

SEQ ID NO: 400759 - DNA, 122 bp, Homo sapiens
aggcgcccctggacctcccaggttgagaggtggagcgggccaaacctcagctgcctttcccggggccgggacccggccgggggaggaccgaggcgcggcgctgtccgtgacgtcatcaggct

SEQ ID NO: 400760 - DNA, 122 bp, Homo sapiens
acaagatgaacagaatggtgatgtcagaagaacagatgaagttgccatccaccaagaaggcggagccgccgacatgggcacaattaaagaagctgacacagttagctaaaaaaaagcctaga

SEQ ID NO: 400761 - DNA, 122 bp, Homo sapiens
cctgaaggtgccccctaaaggagccactgttagaggggcaccccatctttgtggccatggcggtggtagagcggctgggaggggctctgcggcgagcaagggagcaggcggtaggggttctg

SEQ ID NO: 400762 - DNA, 122 bp, Homo sapiens
atgagccaccacgcctggcctataatctgttttatttctaagtcaccgttgctcatcctacgttcattcttacaaaatgagttaactatattattgagttaatccaaaatggaattttttta

SEQ ID NO: 400763 - DNA, 122 bp, Homo sapiens
aaattaaacaccacatcccgtggtaaaattgttcttgctctattaatagccagcttggctcgtgttgcactgaaaatccacggaggaagggtgtcagagagaagaaaaaggctacagaccca

SEQ ID NO: 400764 - DNA, 122 bp, Homo sapiens
cacttatcttccctgaaacattggcagccctgggtccctttctgctgaatgagttagtggcgccctagaagttatttgtacagtctcttatgaagcgcctggatttctcattaaagccacaa

SEQ ID NO: 400765 - DNA, 122 bp, Homo sapiens
cctcctgggctcagctgtatctctctgttctgggagcctgggtgctctgtgtaaggggaacgtatacccaagggcccccctgcaagacgcccagccttgtctgaggctgcagagaaagcgcc

SEQ ID NO: 400766 - DNA, 122 bp, Homo sapiens
gttatgacctaaatttcactgctatctacttcaaaattattttcagaaagcaaacattttcggttaatttacttcttcccacccccaactactaccattccccttaagcctgcaaatggtag

SEQ ID NO: 400767 - DNA, 122 bp, Homo sapiens
gtgccagctcccttcctaagccccgccctgccctgcagctgacttcctgtttcctgttgccggctctgactgcagcatcctggctctctggccagtgctgcagacaactaggccgttgccga

SEQ ID NO: 400768 - DNA, 122 bp, Homo sapiens
tgcaggaaccccttaacagctacctccatattatgcgtgcttcatgaatggagacacctacgttatatgaagttctctattgggctgtaaacttcctgagacaggccttctgggaaattact

SEQ ID NO: 400769 - DNA, 122 bp, Homo sapiens
caggaagaccggaggagagcgagcgcctggatgctgttgcaactctttccattgaaccctcgcatctaatttgttccctttattgggagggcaggggaaaagaggaaacatctacttctatg

SEQ ID NO: 400770 - DNA, 122 bp, Homo sapiens
tagaagacccagaaagatgtgagtcctttattggtcgaggtttataatcccaggcagttccgaagtcgcccgcagagagaagcgataccgacccagggttctgtgctgggcagggcgccggc

SEQ ID NO: 400771 - DNA, 122 bp, Homo sapiens
gtatgaaagaggcgtggctaggggctagatacttatttttaacacttccattgaaacacccggagtctcccaaggtctaacctctagaagtcgggtggcagaacctgaatcagaacccgagt

SEQ ID NO: 400772 - DNA, 122 bp, Homo sapiens
tgatgtggccagaagcacttgcacccactgtcaagtcttcttggcacctgaagctgattccgcctctagatctatcagtttacaagaaatatgggcagagaggatgtgtcaatctccaccca

SEQ ID NO: 400773 - DNA, 122 bp, Homo sapiens
ctgtagatcagtggttctcaactttagctgcacattagaagcacctaggtagctttcccccgaccccacaattggttcatttccaaacctcattaccagagattgtggtttaattgatctag

SEQ ID NO: 400774 - DNA, 122 bp, Homo sapiens
agcctgaaagccagaatggactagccctggtcaagaccggtttttcctcccaaaaggccacgtcctgctggaacagaccacagaatgccgggctgggaggcgtttccctggaagacccagca

SEQ ID NO: 400775 - DNA, 122 bp, Homo sapiens
tcccataggaaagaaggccctctgagtatggccacttgacgtgaggtggatggaatgtggcgacatggcctgcagacccaggacttataaggctctgaataaggacacaggggaagacagca

SEQ ID NO: 400776 - DNA, 122 bp, Homo sapiens
cagcagagctccgtgggggcgtcaacgtgaattccagcacggcaaggttctctagcaccccggcctcagccttctgtctatacagtggaattaggaagaaaataattaaaagaaaaaagagt

SEQ ID NO: 400777 - DNA, 122 bp, Homo sapiens
acaattcactgtagctgtaatagagggtaatgtcactttaagacatgtgatactttagagcggagggatgtattgaaacagactactgctacttacagcaccgtatagcagccctgctccta

SEQ ID NO: 400778 - DNA, 122 bp, Homo sapiens
gtctctgtcctggtgaggagcatgatcaccaacaggcaagatcttctggccttgaagtttcgcttgagttaaaagagctcatctcaggtaagtaacaggccaagaatggtgggcaccgtgac

SEQ ID NO: 400779 - DNA, 122 bp, Homo sapiens
tcgggatgacaaagacgcccagaagggcacgcgcttttatgtaaccgacctctgagctggcggatctcaggaggttggcgctctgagctcaggcgcggagaaaggacggcgcccctgcctta

SEQ ID NO: 400780 - DNA, 122 bp, Homo sapiens
attgggcatatctttctgacgtcatgagagtgcgataccaggattggtggacggagctggcgaccgccctaggcgcgctgggtcttgtgggtggaaacgcgctggctgactggggtcggcgt

SEQ ID NO: 400781 - DNA, 122 bp, Homo sapiens
ctttgggcacaggaggagggacatacctgtggagacacccgggtgctctagaatatggcgcgggaagttcatgttgtactccgctggaccccacccccggcgtgggaagttcatgttgtact

SEQ ID NO: 400782 - DNA, 122 bp, Homo sapiens
gacaaaagctttagtaggatactagtggcctgttagctgccaaagtcacctcactgctcccgataaaatctctgcacatcctctttgatgtaatccacagatgcctaacccagcctaacaac

SEQ ID NO: 400783 - DNA, 122 bp, Homo sapiens
tccaccgaggctatggcagagacacgctcccgggctccccaagtcaccaagactagggtgcgcggtgcccggtttcgccagaggttggtccttcttcctccctttcttcttcccttcctttg

SEQ ID NO: 400784 - DNA, 122 bp, Homo sapiens
ctgccgctggcctgagaggtccagccaggcccctcggacgttactgaggctgggcgctgccggaggtgggggagggggaggggtggggggccacacccacctcgcaaccgttcagtgatgga

SEQ ID NO: 400785 - DNA, 122 bp, Homo sapiens
ataaacggaatcttagcattgagaatcaatgagtggctttctgcttttttctgaggccctcgctctgcatttcttccattgtgaacatataacacaaatttcactgaaggtgtgtgaagtta

SEQ ID NO: 400786 - DNA, 122 bp, Homo sapiens
aaaatagtctgtgtatttgtgcttataataacacatatgtcagtcgtgggctttttgagccgttactccactggactgtcctgtaaggagataattgtttagcaacgtgttatcctttaaaa

SEQ ID NO: 400787 - DNA, 122 bp, Homo sapiens
ataataagtattgcctcatggataaccactgttacccggtggacaataagtattgcctcgcgggtaaccacagttacctgatggataataagcattgcctggtggattaccatggtaacccg

SEQ ID NO: 400788 - DNA, 122 bp, Homo sapiens
tccatttgagtccgcctcctccccacccggccccatacaggcccctcctccttctccttgcgtcacagcttaggtcccgcctcgatttggcttcttccaggccctgccccagcccagcacgt

SEQ ID NO: 400789 - DNA, 122 bp, Homo sapiens
atcgccctcttcaccatctatgtcctctggacgctggtgagtggctgtggttgtgcagcacgcgtctcgagctctgccgctgggagcagcagggccaaggatttggcccctggcttgtgggg

SEQ ID NO: 400790 - DNA, 122 bp, Homo sapiens
tagttcagaatttacataattctagaaatacttttaagcagaaataaaagcaaagtaagacgaatatgttcttggagggcacaaatctgtaaatactgtgattctttcatttccttagcatt

SEQ ID NO: 400791 - DNA, 122 bp, Homo sapiens
gcagtggcgcgatctcggctcagttgggcactaattttcatttgatgaacgcctctccttcgtatattgttaaaactaccaccatgatccagggggagataaaagaaatcctaaatccagct

SEQ ID NO: 400792 - DNA, 122 bp, Homo sapiens
ccgcgctctcccctcgcttccctttgcttggggaattggcagcggggcgcagggatccatcggaaacgcaaaactactttttccccctgctggtcactgtgaggaactgcacgtggtggaac

SEQ ID NO: 400793 - DNA, 122 bp, Homo sapiens
ccatgtgcagcgcgcagggggctcggcgcagccagctctaccgaccgcgagggggaggagcggacgcccccggccaccgcccgtcacgcccccgccccgccccgccccttgggagcgcgcgc

SEQ ID NO: 400794 - DNA, 122 bp, Homo sapiens
caaaaacaaattctagctcctctacttatttgctgtgtgatcacaggcaagttatatgagcgctcagagcctcattttactcatctgtgaaatggggcctctgccactcaccttgcaggctt

SEQ ID NO: 400795 - DNA, 122 bp, Homo sapiens
gcttggcgtgccccgtgcaggaagcgctgcagctcgtacgccgcggccagcacctgaccccgtgtgtccagcagctcaagcaggtcagcccaggcctcgttgagactgtccttccactcggc

SEQ ID NO: 400796 - DNA, 122 bp, Homo sapiens
atcccacgtcgctcatctgctcatccccacactcactgccgcccctggggtggccgtctccgctggttagccatcctcatgaaagggtggggaaaatgccttttcccgtctgctcagctgct

SEQ ID NO: 400797 - DNA, 122 bp, Homo sapiens
tgttcctccaacactgcatgggcaagaaacagctttggggcctttgtactcggcgccccgcgttctctggggactccccgttccccaggtctgcacctggctgacgtctttctttcagttag

SEQ ID NO: 400798 - DNA, 122 bp, Homo sapiens
aaggcagggccctgcacagcctccttccagaatagaccttggtctggtggacacagtctccgatgaggccacagcatatagaacccatcttgaggcattcagagataatgggttggagagga

SEQ ID NO: 400799 - DNA, 122 bp, Homo sapiens
gctgcctggagagggagaaagcaaaccggatgatcctcatcctggggagcctggagccagcgggcccttgtttaattctgaaggaatgtgcgaggttcccgcccagcggagcaggccccagc

SEQ ID NO: 400800 - DNA, 122 bp, Homo sapiens
attcgcactccagccgccttaaggcctggcccggtgggtttaggaaattcgcactccagccgccctaaggcccggcccggtgggttgagaagatttaggaggcttaggcctcacctcccccg

SEQ ID NO: 400801 - DNA, 122 bp, Homo sapiens
ttttaaaaacgcgaaacttagagagcaagagaaacatgccaacaggtttttctgtatttacgcttggcttccgaacagactaggactgaatgctttcaagcttgtcaactgatttatggttt

SEQ ID NO: 400802 - DNA, 122 bp, Homo sapiens
ggctgtgggtgcttgatttcagaaaagacaaaaatctccgcatttgggcacgaaagagaccgccgagatctccagtgctgccgctggtttcgtttggaagaacattttcttgcttaaaaagc

SEQ ID NO: 400803 - DNA, 122 bp, Homo sapiens
ggacgcggacggggtgcagacggcaccacacagagaggcacggggtgggggtgacaggcacggagccgcttggcgggaggggctcaggcagcctcctgtcggctgaaacgcgcggccacacg

SEQ ID NO: 400804 - DNA, 122 bp, Homo sapiens
gcggaaaaatatcctggcatggaaattgcggcagctggaggccgcgctccagggacccaccgcggggtgtcagcaggacagaagcactcccagcccatttctcacgcttctttagaaatgca

SEQ ID NO: 400805 - DNA, 122 bp, Homo sapiens
gctgggtccttcattcctggcttgaatgtgatctttgaccctgtatttattttatacttgcgtgagttatgtttttaaactttttgacaactatactttgaatatacatgaaacataggatt

SEQ ID NO: 400806 - DNA, 122 bp, Homo sapiens
caaatcccaagccccagcatatctacaaatacacaaaccttttccctagtggtgttgattcgtaggcacctacttgcatgtatatatgcctttagggagtctggctgaggcatgcctgatct

SEQ ID NO: 400807 - DNA, 122 bp, Homo sapiens
atgaggccattactttgctggtctcctctggtatttaatgaacataggacctggtaaaatcgtgcctcagtttttcctctgggtcacatggtctcgtggtagctcccctccctctgctgggg

SEQ ID NO: 400808 - DNA, 122 bp, Homo sapiens
agattcttcatggaccctactagagaggacagagaaaaagagcactggtgtaggagcccacgggtctggctcttaaccctggcctggtgacttcagctatttgaccttgagcaagtcacttc

SEQ ID NO: 400809 - DNA, 122 bp, Homo sapiens
caacggcagccagaggtcagtcgcggccacacgtgtggtcactacccgccccacctcacccgccaccctagcacacaaaggtagactctgtcggttgtttcatccgggtgcagccctcagga

SEQ ID NO: 400810 - DNA, 122 bp, Homo sapiens
aataaatgataagggcctgaacaaagacagcccaatgagactggaggggagaaaccagagcgaaaagctgccaagcagaggcacagaagagaatgcctactgtgatatcagggaggtcagtg

SEQ ID NO: 400811 - DNA, 122 bp, Homo sapiens
ggcactagggtcggactgggggattcatatcctacctttgccactgagaggccagtgggtcgcctgctgtgttgctcaatccctaggtgagtcagcgtcttcatctgcaaaatggggataca

SEQ ID NO: 400812 - DNA, 122 bp, Homo sapiens
ttcaagaattatccagtcccaggatgataagggggaagatgggaagaaacagacgggagacgcccgcccagaaagactgcgggaagaaagaaattcgagaggaaactgcacgccactgagcg

SEQ ID NO: 400813 - DNA, 122 bp, Homo sapiens
ctcctaatcagaccaaaccttttactcaattaattgctgctaattaaacatgcagtgttacgtactgaatttgtaactagtctttttgaactttaaatgtaatctgacacaaattagaagca

SEQ ID NO: 400814 - DNA, 122 bp, Homo sapiens
gggtggggtgattggagtccgatctggaccaatgggcagccggcgggacgggggcggcgacgacaaccgcggccgcaagaatcaacgccgcgccgggccaatccgcagccggggcggggcga

SEQ ID NO: 400815 - DNA, 122 bp, Homo sapiens
ggaacaatgcgcacctgaccttgcctgcacccacgcgaggatccgctgctgggggaagcccgctccagtatcctgtgcactttcacaggctggggagagagcttcctagccagcggcccagt

SEQ ID NO: 400816 - DNA, 122 bp, Homo sapiens
agggccgggggctggaggcctggagcttgagtgagggcaggggcaggcctcattaagcagcgctgaagagggaggagctggggaaaggaacagggcagcgggtgaggtaagcccatttgccg

SEQ ID NO: 400817 - DNA, 122 bp, Homo sapiens
cccatttggtatttctttttgtctgcatcacttatcaaataaattcctcagcagtgttaccggaaggaggagtgggaaagcaatagagtgctacatcctgagatgtggattcagtgacagaa

SEQ ID NO: 400818 - DNA, 122 bp, Homo sapiens
ctaggtccccatcgtcctagtgccttttctgagtgcgtggaggtgaagtctgtccgataccgcagctttgttccactgagcctgcttatctccaagggcgttcctctccactccactaaagc

SEQ ID NO: 400819 - DNA, 122 bp, Homo sapiens
ttccaccagagaaggcccttcttggatgatatgttctgtgtctcttgggaatgatcggagcgtgaactgtatttccagaaaccagctgtttctcttctgaatgaggcacatctttgtgcaag

SEQ ID NO: 400820 - DNA, 122 bp, Homo sapiens
gatgctccatctgagtgacacgctacctctgcagctccatcttgctctctgcgacccgcgcgggcgcaagtgcagcgtgtactgactgctcagggactgatgagatagacaagagcagctat

SEQ ID NO: 400821 - DNA, 122 bp, Homo sapiens
caaattcaacactgaaacttccccagcccctactgccttgaagacccagagtcaaaacaccgaacccccttcggtttagatacaggcgtccaaggccccacctgctgacgggcgggggcgcc

SEQ ID NO: 400822 - DNA, 122 bp, Homo sapiens
gacagacattgccgcatacgaggagcgtgtgcaggctgtggtagccgtggccagggagctcgaggccgagaattaccacgacatcaagcgcatcacagcgaggaaggacaatgtcatccggc

SEQ ID NO: 400823 - DNA, 122 bp, Homo sapiens
ggacaggctggctacctgcccagtgatgggacatgttggagacgctgagggcagcctggccgtggctggaagtcacagacacctgtgtccctggctgcaggaggatgggactggggctccct

SEQ ID NO: 400824 - DNA, 122 bp, Homo sapiens
aacatgttaatgactgattctaaaattttcttgtcaaattacctcattatcagccaggtgcggtagctcaagtaatcccagtactttgggaggccaaggcaggctgattgcttgagctcagg

SEQ ID NO: 400825 - DNA, 122 bp, Homo sapiens
gcagagggtggggggctgggttcccgggtccctaacctggggagggttctggggaccagacgtcgaggttcttagaagtggagatgaagagttttcaccgtaactggggcagacgcaggaag

SEQ ID NO: 400826 - DNA, 122 bp, Homo sapiens
acttgatatgggaacttagttaacccaaagatcccttactgcatgagaaccctaggatttcgttggagccactcatctctagtgaagaaaggaatccaaacaggtagatagataggcatttt

SEQ ID NO: 400827 - DNA, 122 bp, Homo sapiens
caagccccctcccctaaatgccctgcagcttatttcttctgagatgctgcccctacttcacgttaccagaacttaggtacagctgtatccacccccaggccaaaccacatcctggtactcta

SEQ ID NO: 400828 - DNA, 122 bp, Homo sapiens
acaagtggggcctgcgcaccctcctaccctacacctagcaaggaaccccgagctctgaaacgtggaaaggcccagatctgcagatttaatctaagtcctgcagtccccaagagatcacagac

SEQ ID NO: 400829 - DNA, 122 bp, Homo sapiens
gtgaaagccagaggttgactgtattctgatttcatgtctggggaatctgtagctcagaagcggggagcatccaaatttgaggtcagagtccaaattccaacacccagctcctgattccaatt

SEQ ID NO: 400830 - DNA, 122 bp, Homo sapiens
agtggtggccaaggcgctggccggggggccgagagctcagtgggcagtggctgaggagcccggccacaggccccatctgaccccactcctgaggctggcgtcccggcggatgggaagggtgg

SEQ ID NO: 400831 - DNA, 122 bp, Homo sapiens
tcgcccaggctgggctgagggtgctggtctcgtggttccgagactgagcggccctgggggcgggggcggcgggcagttgaatccctgcggcccccggagcccactacaccatcaaaggcgat

SEQ ID NO: 400832 - DNA, 122 bp, Homo sapiens
ccacctggggctgcccgtccttgtccttgtactggactatgaaggagtcaaactggccctcggggactgtccaggagaggcccacagagttgggggtcacatctgtcactgtcagctctcct

SEQ ID NO: 400833 - DNA, 122 bp, Homo sapiens
aaaacagaaccactgattccttcctgcttgacaagattgagtcgctatcaaggagctgcccgtgctttggaaatggtccaaatcgacgaggaactgccaaggagccccctcagacagtaagg

SEQ ID NO: 400834 - DNA, 122 bp, Homo sapiens
atgctgttcccaaaacacatgcctctagaattcttccaaatgtggcattgtcatttacttcgaaagttgctccctaagcaaaggctggaaaaatataaaacggactcaccaattattattat

SEQ ID NO: 400835 - DNA, 122 bp, Homo sapiens
agttcttaccaggatactgagctgccaagcctcaataggcggccacattgacaaacaggacgtgcttgcctgcaaactgcttgaattggatgtactcctcgccgttgagggtgagggctcca

SEQ ID NO: 400836 - DNA, 122 bp, Homo sapiens
acccctcctacgtctgcgaagtgctccgaactgatatatgacaatatctactttggatcacgtgctcagagagagagagactaagacggataacgcgtcatctcgccttcccaaattttccc

SEQ ID NO: 400837 - DNA, 122 bp, Homo sapiens
tctcattgatgtcccgcaggttgctgtccattcccaactccagcagtgactggacacattcggccttccctgcagctgcagcccagtgcagaggtgtcctggaggggccatgtgaaaaaagc

SEQ ID NO: 400838 - DNA, 122 bp, Homo sapiens
cgcactgacctccgcagctcccggcggcgtccttcgaagcgcggctgcctgggccagcctcggcaggaagcaggacggcggaaacagaacagagcccgaatctaaagtccttgcccaaatct

SEQ ID NO: 400839 - DNA, 122 bp, Homo sapiens
ctgcccagccaccccttgtaccttgcttcttccttcggttcagggcgagcatgtccacggcgtgggcgacgagcaggagcaggcagagtggcgcccgcatctgggcagccggatccgggctg

SEQ ID NO: 400840 - DNA, 122 bp, Homo sapiens
catttttcaaaccaattcaaatattgccttaagatacactagctgggggtgaagaaatggcggtgagtaacaagtgatcaagacaggaccaggcccactcaggcagactgagaattctggtc

SEQ ID NO: 400841 - DNA, 122 bp, Homo sapiens
ggggtgcttactacctgcactgccggaaaccttggtttagggccaccttgttcttggcttcggccccaggcgtctgggaaactgcgggccaccacctgggcctccgcccacaggccaggctc

SEQ ID NO: 400842 - DNA, 122 bp, Homo sapiens
cctccgtcccctcttcccccgccattacaaaatacaaaaaggactagaaatgaatacacacggtctcggccacctaaggacaccgagctccgcagagcctagaggagctagggaacctagcg

SEQ ID NO: 400843 - DNA, 122 bp, Homo sapiens
gatggattatggagatggcagtggttgacactgtctgagagcagctcccagataaaccagcgcactgtggttgatgggctgcctccaggtagagagtgaggccctccaagcacatcctggcc

SEQ ID NO: 400844 - DNA, 122 bp, Homo sapiens
tgaagccatccaagaacaactagacaggcatctgtaaagaatgctttgcaaagtgaaaaacggccacgtggtttcttttgttgctgttgtcattgttctgccaagtgaaaagcaaatgatgc

SEQ ID NO: 400845 - DNA, 122 bp, Homo sapiens
ttttttgagacggagtcatactctgtcgcccagcctggtgtgtgtgcagtggcgcaatcccggctcactgaagcctccacctcccgggttcaagcgattctcctgcctcagcctcccgagta

SEQ ID NO: 400846 - DNA, 122 bp, Homo sapiens
acagggggccagcaagctgccctatccgcacccagcctgccagggcctccccacacccaccgcctcccccaggaagagccccaccctggaatgctccccaggcgagccttcggggccaagac

SEQ ID NO: 400847 - DNA, 122 bp, Homo sapiens
agtaatcatggcaaagcagcagaatctgcgatgatgactgccccaagactcaggaggcctcgtcctgttttgccatccacgtgctagtaaactcggacgagtgattccaccttgctgaggaa

SEQ ID NO: 400848 - DNA, 122 bp, Homo sapiens
cagtagacgccatagaaggctgcccccaggagcgcgaccaccagcaggttgagcagcacccgcaccaaccaaaccctggcttgctggcccagcgtccgcaccgcagcctggcgccgcaccac

SEQ ID NO: 400849 - DNA, 122 bp, Homo sapiens
ctcccgctgcggctgttggaactggagcgcagcccatcttgaagccctgcggggaggggccggtgacgccagtgctggccagctctcaggggccataagaccctctcccccatcggcctgac

SEQ ID NO: 400850 - DNA, 122 bp, Homo sapiens
agaagagcaagagcggtaataagagatcaaactcacagcttcaagtgcttttatcattggcgtgaatttacttatgaaagtggggcccttatgccctaaacatctccctttaggcctcaccc

SEQ ID NO: 400851 - DNA, 122 bp, Homo sapiens
tctgctgtgcggatcccgggcaggcgggcgagccgctctaggcgacattgggcgggaagccgccccggggcgctgtctctctgcacctggacggcctattttcccagcctcccgctttgtgt

SEQ ID NO: 400852 - DNA, 122 bp, Homo sapiens
gcctttacttttctccattttctatacaggatttactatacttccaggctcgtcttctttcgatgtatggaaggtgaatcacgtgaaaagcatactatgaattgttaatgtaaatagtttag

SEQ ID NO: 400853 - DNA, 122 bp, Homo sapiens
gcgggttccgagctgcgccgccgccgtccctgcccctccagcactggactcctcctttcccgtctttttaaagggaagtaaccggacccgaccactactccacccgattcacccctagcggg

SEQ ID NO: 400854 - DNA, 122 bp, Homo sapiens
ttgtgagttacgaggcccggatgttgatcttttattactagcaacactggacccctgactcgtgcccacgcgggcgtctggagggcagccgcatggcctgctgggaacggcggggttgaagc

SEQ ID NO: 400855 - DNA, 122 bp, Homo sapiens
gccccacctccaggaaggaacctgggctgcgtgtggctggcggtctcctagcgactagagcggcagggatctggaacctcagaagctggagaggtggcacaacagagagggccaccatgggg

SEQ ID NO: 400856 - DNA, 122 bp, Homo sapiens
ttccacaccactacaacaatgctcaaggcctatacccttaactgattttcttaaaccatacgcttggctcaagagcactggcacactacaaagcacaccaggttaaaaagtaatacaatcac

SEQ ID NO: 400857 - DNA, 122 bp, Homo sapiens
aacagtaatatgtattttcatggataataagtaaatggtaaatgcatgaaaacatgaatgcgaataaaaaggcatcaaattgaggagactggctgtaaatggagaagggccgggggcaggga

SEQ ID NO: 400858 - DNA, 122 bp, Homo sapiens
ctcacaacccggcctttggagtttttctgatccgcggaacccagaggttcctcctgcccacgctctacgaaagtggggggctgggagggatctgtgacccgccctcccagtctggggccgcc

SEQ ID NO: 400859 - DNA, 122 bp, Homo sapiens
cctgtagaaacgggagcgagcatcaagcctgtgtgtgtgcatgcttgggcggagtctacccggaggagaaagaggcttccgggctggccctccaaagccggttgtacaggcggcagctcagg

SEQ ID NO: 400860 - DNA, 122 bp, Homo sapiens
cctcctctctaccccggcccaattggccgtgcctcagctcaagagtttgtgtttggtcgtcggttccaccttaatcccgcccatcagttctacttaggggttcaacaacccggggtggagct

SEQ ID NO: 400861 - DNA, 122 bp, Homo sapiens
tgaatattttcccaaataaggaagggggaagggggatgtgagttacaatggtgggacttgcggtttccaagggagaaatgggtgcagagcaggtaaccaagggaacagatgtgagttattga

SEQ ID NO: 400862 - DNA, 122 bp, Homo sapiens
ctgctcccatggggaagaaccctgcccctagaacagcctcccctccaggtgtcttccctacgctacccctccgccggccgggaactccgccaggcctagagacgccgacccggccctttcta

SEQ ID NO: 400863 - DNA, 122 bp, Homo sapiens
ctaaccttaagctggtgagacacacagctcctgaaagcttaaccggcgccgtcctgctcacgtaaaacagccccgacatccaattccgatggttgcagctgcgtggtctccctgaaaatctg

SEQ ID NO: 400864 - DNA, 122 bp, Homo sapiens
agaactaactaggtcaggagagcaaaggctcagcctagctcaggataagcgctcaacaaacggtagcttaaaaatagataatgaatgcaaaatagctcctggaaacagcatttgttgcctta

SEQ ID NO: 400865 - DNA, 122 bp, Homo sapiens
ggccagcacctccccgggcaccgacctgccgctgagcgagatcccgcgcggcgtgagagtcgccctggactacgaggcggggcaggtgaccctccacaacgcccagacccaggagcccatct

SEQ ID NO: 400866 - DNA, 122 bp, Homo sapiens
tctatgcatttcattagggcccttcttttcatgtctgtctataaggatatcagcctggcccgcacatatacatcagcaacaccagacactgaaacaagcaaatctactctccttggaaagag

SEQ ID NO: 400867 - DNA, 122 bp, Homo sapiens
cactcggaggtggcggtggatcttactccttccagccagtgaggatccagcaacctgctccgtgcctcccgcgcctgttggttggaagtgacgaccttgaagatcggccggttggaagtgac

SEQ ID NO: 400868 - DNA, 122 bp, Homo sapiens
catggtggaccagaaaatccgccccgcgtttgccggtcgaaccacgtggggccctttccgcgccgtcgatgcctagccagggcggggccctcacagaatttgttcacggtgggggcagatca

SEQ ID NO: 400869 - DNA, 122 bp, Homo sapiens
gctggccgccatccgtgaggaccggcacaccgtggtgtgcccagtgattgacatcatcagcgccgacacgctggcctacagctcgtcccctgtcgtccgcggagggttcaactggggactgc

SEQ ID NO: 400870 - DNA, 122 bp, Homo sapiens
attaaatctagtatgtccataagcaggcttcatctggaacattagaatgtgaggtctagacggtgtttaggaaaatttgctttcagatcatgtgtggtaaaactatacaaacagagatggac

SEQ ID NO: 400871 - DNA, 122 bp, Homo sapiens
tgcgggccagctggagttccgggttggcgtgggcttggcgggccccgcactcggagcaggcggccggccctgctggccccgggcaatgaggggcttagcacccgggccagcggctgcggggg

SEQ ID NO: 400872 - DNA, 122 bp, Homo sapiens
atttaatcagcagacatgtcaggaaatcgctgcccaagtcgatggatactacaagccgaccggcgctccctgcagaggctgtgctctcgtggacaagctggaagctcccggtcatgttcatt

SEQ ID NO: 400873 - DNA, 122 bp, Homo sapiens
aagggactgaattgaacgttttagcttaatgatccaacccctgtcacacccacagggacgcgaattccgattttataagcaggtgtgcacgtgcactcagatactcacacaaagccgcgtgg

SEQ ID NO: 400874 - DNA, 122 bp, Homo sapiens
gccgtcacttcctttgttcggcgtgctcaggttcgcgccaaactatcaccaatcagacgacgccttcatctaaagggctgtagcggagttttggcttcggtgtttcccacccacggtcgtgc

SEQ ID NO: 400875 - DNA, 122 bp, Homo sapiens
cctctctgagcggttggtgccgggtataaaagaaggccgcgcagccacggctgctcacgacgccgcggatcccgaagcctgtgtagcagtgagacatcagtgaggctgcaggacgagcagga

SEQ ID NO: 400876 - DNA, 122 bp, Homo sapiens
tcgtaagacccccgcccccactccagcctcccacggctgcaacccaggccctgcgccacgcgtttcccaaagacgcctccggagggacccgagcttcgggccggcaacaccagggcggcggc

SEQ ID NO: 400877 - DNA, 122 bp, Homo sapiens
aggaaagcacaaagtgctgctctgcagcagcgttttccgctgcgggcccttcagtcagggcgtttggcgagtcccgggaggcgaggatgggcccgcgagcgggcggttctggctcagtcaca

SEQ ID NO: 400878 - DNA, 122 bp, Homo sapiens
agtcatcgcggtccaaaatttacgcacgcgcctttgagggctcacagagcccgtctctcccggacgaatctcatccaatcagagccagccaggaagccgaggctcagcaaggcctcgcgacg

SEQ ID NO: 400879 - DNA, 122 bp, Homo sapiens
tgttgtctgaagcacctgctgaatcacaggggctgtgtctgtagcctgcagggtggggggcgcgtcccctgcactccaggacccgcccctcgggatgccgacccccaccccagactggggat

SEQ ID NO: 400880 - DNA, 122 bp, Homo sapiens
gggtaagcaccccacttggtagccagttcaaggacttggggatgttttcaacatttacagcgaggtttgaggccccattgtcatgcagcgctactcggccttggtctccttatctgtaaaat

SEQ ID NO: 400881 - DNA, 122 bp, Homo sapiens
gggactggggaggcagccaatgaagtcagcgctgggcgggcactggagcgagcctggctgcgcggagagctcatcccgggaccacagggcccggggcggggctcggggcggggctcggggcg

SEQ ID NO: 400882 - DNA, 122 bp, Homo sapiens
aaaatctcgtgtgcaggttcgcactccggctactttcaggcctctagggagcccaggtagcggcgcgcacgcgcacgcgcacacttctccctcgctggtcttcaggcccggcccgccctgtc

SEQ ID NO: 400883 - DNA, 122 bp, Homo sapiens
tgtgaaaagggacctggcttactttcatcttcaggtcctgcctcccagcttgatggtggccggcgtgtactgcctcgtggtggctgtcatctttgctactatcaagactgtcaattatcggc

SEQ ID NO: 400884 - DNA, 122 bp, Homo sapiens
aggtcctggatgagaagtcagtgttcttcggtgtaaagtgaagagcccgagggctggatgcgtggttgctgtgtcggctgtgtgcttgcacctcatacatgggacagcaggcccaagccttc

SEQ ID NO: 400885 - DNA, 122 bp, Homo sapiens
gaccggagtgcgaggtccggcttacgtggtgaaacaaacttttatgttcccaagcccggccgaagacacccgcctgaaccacgccggaccacgtgtgcacgacgtacgtcacttccgctcgc

SEQ ID NO: 400886 - DNA, 122 bp, Homo sapiens
tgcaggtcttccttttccctcttgcaattgctccctgtgtttccttgtgaagctgtgttacgtgagcccaagcagagattccgcctaggtattctattagcttttacagtaaccagtgtgta

SEQ ID NO: 400887 - DNA, 122 bp, Homo sapiens
gcacagtctcctttcctctagcccctgctcgttgctttggctctggacacagggaagccacggtggcgcggcgacacagcctcactgaggttagcttgtccccggcccccagcacctggcct

SEQ ID NO: 400888 - DNA, 122 bp, Homo sapiens
tgtgcccggctcgttgaaccttgggcgctgcccgttctgaggcgcccgctgtgcccggctcgttgaaccttgggcgctgcccgttctgaggcgtctgctgtggcccttaccgtctggcttct

SEQ ID NO: 400889 - DNA, 122 bp, Homo sapiens
tctagcccaaacctgccccgctgggtcttggccgatggaccagcaggggccgccgagtgccgacccccgggtgggcctgcctcacccggcggagaatgcacagccactctgtgggaaccgag

SEQ ID NO: 400890 - DNA, 122 bp, Homo sapiens
atgctggggatttggtgaacagtgtcttccctcagatttacatcagagtgcgaaagacaccgaaacaactattcagatttagcagctgtgaaaagttgctatgaaaagaataccaggtgctg

SEQ ID NO: 400891 - DNA, 122 bp, Homo sapiens
aagtgcccctcctgccctgtctccaggcagcatgctgtgagcgatgacagaaactggacccgcgcacagagaagctgcaggcacgccctgcccggccacccagctgcctgcctgcttcgccc

SEQ ID NO: 400892 - DNA, 122 bp, Homo sapiens
gaaaaaggtagatgaaacacattttggtgtattcatacaatacaatacagtactagccagcgatcaaaaagaatgaactcagatacatgcaacgtggatacatcttgaaaacattttaagtg

SEQ ID NO: 400893 - DNA, 122 bp, Homo sapiens
cccccatctaagttggccctctctgtgctccatatcattgccccctccttgacttcctttcgcaatttatcacgcgcatatgtatgtgtatgcataaacagatataattttgtttgctcgct

SEQ ID NO: 400894 - DNA, 122 bp, Homo sapiens
agtcgctacatttaatgaagtatcccaacgcttcgttggtctcgggaatacagctccacacgcaaaaaagtaaaaagtgcagcaaaacaacaacacaacgatcaacctcaaaggaaacaaca

SEQ ID NO: 400895 - DNA, 122 bp, Homo sapiens
attggccccaggatctcacatattgatctttacatcccccagcacacacctatttcccagcgactggccaaagtcatagcttcagacaaatccctgtgtggtttaatttcccttccatgaga

SEQ ID NO: 400896 - DNA, 122 bp, Homo sapiens
gcggagccccggccggcagggacaggagctgaggccggggccgccgagggtgggatcccgcggcccctgccgctcgctggcgccctcctggccccaagctgcgcgcctctcgcctcctcctc

SEQ ID NO: 400897 - DNA, 122 bp, Homo sapiens
ggtgtgatccaccatgcccaggcttcagccatgtttggcttataggctagagttgtctttcggcaggaagcagaataagaaagaacaagatgaagggaagagaggagtattttagtgaggac

SEQ ID NO: 400898 - DNA, 122 bp, Homo sapiens
ccggccctcggaggctgacggaaggcggtggctgaggagcggcgcctctggttgagcgctcgccgtgtgtcccgcacctgtctgtcctgccgccgcccggtaaggtaggaaaggtcagcgcg

SEQ ID NO: 400899 - DNA, 122 bp, Homo sapiens
cgcagcggcgcgagggggcccggctggggctggagcccaaacccaaggccgctgtgtccccgcccagctgccgtgtccccgcccagctgccgtgtccccgcccagctgccgtgttcccgccc

SEQ ID NO: 400900 - DNA, 122 bp, Homo sapiens
tcctcgggaagcggaatggcgtgtagccggaagttcatgcaggcgttggggctgagctagcgagccaagagctttgacctcctctgtacacgccctctagcgggcggcagagagaagacacc

SEQ ID NO: 400901 - DNA, 122 bp, Homo sapiens
gaataggaaggaatcttcgaagagaatgggccaggaaagtttgattgtagcctcctcccccgccctcttttcgagcgaagaatatgtgtgcttaaaagtagaatcggcaggccgcccccaga

SEQ ID NO: 400902 - DNA, 122 bp, Homo sapiens
ttgtggcccatggatttcaagtgccttagccaaaatcatatagctagttagcagtagagccgagactcagaaaaaaacaaagtaaaacaggcagactgaaacaaaaagtcttctaattccca

SEQ ID NO: 400903 - DNA, 122 bp, Homo sapiens
ccagatgacaaaatctggagatacctgcagagcaacctcctgtctcataatggcgtgatacggttgatttcaggatgaggctgtgagccagtgctgccatttgaagtagacaaggctggtga

SEQ ID NO: 400904 - DNA, 122 bp, Homo sapiens
gctgagtgtttgaatctggatcaggctgtctgcaaagtttttaccctcagccctaatccccgctgcctaggagggtaaggaggctgtctagagtgcaggttcaggggtcagtaggcctgggt

SEQ ID NO: 400905 - DNA, 122 bp, Homo sapiens
atcaatgtgaagctccagcgagcactcccatgcttttccttggggctgctgagacagtgacggcatcatggcctcacaaccaagtactggggctcagcacccttgttctcaacctgtcttag

SEQ ID NO: 400906 - DNA, 122 bp, Homo sapiens
agattgtcagcagtttctagggggtcggaatccctggatgattcaggtattcgctgtaagcgggtgttggtccctctggaacctgggaggaggttaaggttccatccacccagagaccctgt

SEQ ID NO: 400907 - DNA, 122 bp, Homo sapiens
acgggagccgccatcttggaagggcggtcatttctgccgcggagcccgcggtcccctactcgatatacccctgtgggattttccagtggccgaggcactgggccatggaatgtaccaccagg

SEQ ID NO: 400908 - DNA, 122 bp, Homo sapiens
ccgcccccaccacctgcagagcgacagcaggaaggttggcagccacacggggagcacgcccgcctctccccgcggcccgcgccctcacctgccgccccgcctctcccgccgctcccgggcgc

SEQ ID NO: 400909 - DNA, 122 bp, Homo sapiens
acccgaaccagcagcgagagaaggagcccggcatgcggcgactcagagtgacgacacacgcgagtctccgcccgagtacgtcacttccgcaacgcttccttcgcggggctttgtgggtagcc

SEQ ID NO: 400910 - DNA, 122 bp, Homo sapiens
gggagtctggctggagcaaggcctgcaagaggactaacagccacactcagttggaaaggccgccaggctggtcaggggctggcgtttggtggacgggaggggaagaagcagaggctctgggc

SEQ ID NO: 400911 - DNA, 122 bp, Homo sapiens
gatatgaacgctgccctaacagctgctatttctggttgagaaaggagagaaaaatgcttccgttttctcctacaggattggacaggaagttctctgttgcctgcaagttatgctcagataga

SEQ ID NO: 400912 - DNA, 122 bp, Homo sapiens
ggctaacaggactcagggcctgaggtctgctgggtacaaattgggagccttccccagccccggctgtgctccccatattccagagggggaaactgaggcccataaaggttctcttctgccaa

SEQ ID NO: 400913 - DNA, 122 bp, Homo sapiens
gaagagacgcctccttaaagccgaactccacctcatcccggatcacgtgacggcgtcccgcgagtagcgcctgaagctcccccaaccccacaaacacctcacaaaggtgcacacctcgggga

SEQ ID NO: 400914 - DNA, 122 bp, Homo sapiens
tcatcttccaaagaggaaaaaaaacaacaaagcagccgtcaccagggtccccattgccgtcgactgacgactcactggctgtcgtcacactctgctccgcggcccccgaattggtaacgagg

SEQ ID NO: 400915 - DNA, 122 bp, Homo sapiens
aaaggacagttagtgcctggaccaggaccatcacactggggaccggcttctctgctctcccgttatgggggtcgggggaatgatgggtcaagggtcttccgaagaaagcgagaaaggaacag

SEQ ID NO: 400916 - DNA, 122 bp, Homo sapiens
catgagatgaccgccgtgtggtaaactgatgaaccctgaccctgatcaacatgagatgaccgccgtgtggtaaactgatgaaccccgaccctgatgaacgtgagatgaccgccgtgtggtaa

SEQ ID NO: 400917 - DNA, 122 bp, Homo sapiens
caggcatgagccaccacacctggccaagtttaatttgttcatggctgagaacagttagctcggaatacttacattgttttttgaataaggaattccttattctgagtgagtcacgaatgaga

SEQ ID NO: 400918 - DNA, 122 bp, Homo sapiens
aaattaaatgtccctggcacactttgtaattcagaaaatgctgattaaacccccgctgggcgtccattatgacctatgggctccaggcaagtgctgctcccactccatctccatttaaagtc

SEQ ID NO: 400919 - DNA, 122 bp, Homo sapiens
aagcgataattatgcagtcataatttgtgaaaacccagtatgctaaaatcaatccgttttcggtagaatgttctaattcatgcctcttatccagtaaatatacataagcattttaacgatgt

SEQ ID NO: 400920 - DNA, 122 bp, Homo sapiens
ttcctaggcagtagtgaggggtttgacttccccgagtgtcacgctcagctgtgcccagagcgtgaggctggcagcgcctttaatcgcctttgctttttttgcagggagagcgcgtctccgcc

SEQ ID NO: 400921 - DNA, 122 bp, Homo sapiens
ttccggggccgccttcgtttttgtcgcgcgaggttttggtttgtgaggatcggcgagtggcgcccaccatctctgcttgctgaaaagctgcagaggccgccaggagcccacggtgagcgggt

SEQ ID NO: 400922 - DNA, 122 bp, Homo sapiens
gggggaaaagttttggcagcattcgtgtccttgagcccaagttacagtgaacttaggacacgaggcagtggaccagagacccccaccatagcaaacctctctagggaggactctccccactg

SEQ ID NO: 400923 - DNA, 122 bp, Homo sapiens
ggtgtgttaatggtgtcgctgtttgttttttaagaattaaacgataattcccatatatcacgtttgccatcctcatttgtcatcctcagcgtgactaccacagtctaggtcccatctttcac

SEQ ID NO: 400924 - DNA, 122 bp, Homo sapiens
aatttacccttaagatatgctcatactgtctatacattttactgagaagtaattcagatacgatagactaacttggttcctcagcattggtttgaaagcaataggtacctcagtagttaggt

SEQ ID NO: 400925 - DNA, 122 bp, Homo sapiens
tcctccgccggggtggcctggggcgccgggtcacgtggccggggaagaggttttatcccgcggcccctcggaaccccgccgctgctctgccgcccaggcccatggccgcagccctggcgctc

SEQ ID NO: 400926 - DNA, 122 bp, Homo sapiens
cgcaggcccagcaagcccccacaattaaaagcccagcgccgacccttcctgtcaattaggcgctgaagcgcaggcggtcagcatcgccatggagaccaacacccttcccaccgccactcccc

SEQ ID NO: 400927 - DNA, 122 bp, Homo sapiens
actgggcttcatattatatcctatcagtagtcacatactacaagtttgttagtgatactacgcatttggtcaaggtactcatctctgtatagtcatgtttttcttatagtaatctataagtg

SEQ ID NO: 400928 - DNA, 122 bp, Homo sapiens
ctccgtctcaaaaaaaaaaaagaaaaagaaaaaaaaagagagaaaacttagtgttaagtacggttatctaattatctagctcagagactaaaagcaggaaaattaaaaggtgacaaggataa

SEQ ID NO: 400929 - DNA, 122 bp, Homo sapiens
gcctcccgtgtttggaattgttgtgcacaaacatgttgtctgacacggccagcacgtggccgtccacgttgactgttgtcgatacaacaacctgcaaagatgaagtggatttgaaaatggaa

SEQ ID NO: 400930 - DNA, 122 bp, Homo sapiens
caaatggggaggggaaggctgaaggtagaagaatgaaacaggttccaagacaacaggcctcgatgctcactaaaagtccatcctgagagggcaagcggaacacctttgccaccacccacctg

SEQ ID NO: 400931 - DNA, 122 bp, Homo sapiens
tccgccccggcgcttctgattggacaaggtacaaggccccgccccctcagaactgagtgacggcagaagccctgggtaacgagccctgcaaagccggactgatcggttctagccacagcttc

SEQ ID NO: 400932 - DNA, 122 bp, Homo sapiens
aattctttttgtatgccactccgaagtgtcttttttttctgctcagttgacaaactgtatcgaatgtgaaatatgtgccaggcatgggaccacacgttggagacaacaagcacaaataggat

SEQ ID NO: 400933 - DNA, 122 bp, Homo sapiens
ccccggccccacctcccgccagcgccaccccaagctttcccagccgcgtgggcggcgcttcgctctccccggccaaccgcccggacctcggcgctttcttctaggatccgcatgaatcgctt

SEQ ID NO: 400934 - DNA, 122 bp, Homo sapiens
ccttcctcccccctggggggtgctgggtgccggacacccctccccaggggctatattagccgtgtgagtcatggtggaccggctgggaggcggcaggctggcaggcacagtgtagggttaca

SEQ ID NO: 400935 - DNA, 122 bp, Homo sapiens
tacgaaggctttcccaggctgagggcgagttggatccagttgagctgtctgtagaaaggccgaggtgatacaagcactgctgggactgtttcaggggagcagtgttgtcattcatgtcacct

SEQ ID NO: 400936 - DNA, 122 bp, Homo sapiens
tgcagtgttcacagactcctcatagtgaccacgtgttgatggccaacgcgtgttcaatgccgcccgtgttcgttatagattctacatcctgccttccagcttagagctagaaagtgctgttt

SEQ ID NO: 400937 - DNA, 122 bp, Homo sapiens
taaaggctgcctcgatccagtgggctgaccagtgacttgtgcaaaagaaaactattcgatcgctgtttgccctttcagcgttttcctcggctgcggaaacccggttttcctattattatact

SEQ ID NO: 400938 - DNA, 122 bp, Homo sapiens
acaacccaggcttttactgtatataaaattaagtacaaaataattatcctcatagtatgccgttcagtttctaaatttggggtgaaggcatttacatgccatttcctggcgcctgcagaccc

SEQ ID NO: 400939 - DNA, 122 bp, Homo sapiens
ccgacccctccccgaccccccgcaggagacccgccaagcacagagcagagggaaggaccgcgatgggctgaaggattttagtcaaagcaatacatttctgcctcttacagtggaagggactt

SEQ ID NO: 400940 - DNA, 122 bp, Homo sapiens
ggctgccacaacccccgctgcagggggggagcggtgagggggacaagagagggtggagcccgaggcggtgccatggcaacctaggccacccagagcccaactcccggctgaaggattgtctc

SEQ ID NO: 400941 - DNA, 122 bp, Homo sapiens
aaaaccagaaaagagacaaagccagaagtgcaggttggatttcttaacacaagctcactgcgacctctagtcctcatcacgctgacactaagcttaaacccagacccttctacagttttgtc

SEQ ID NO: 400942 - DNA, 122 bp, Homo sapiens
gcttctgagggaggaggacaacaagtactgcgccgactgcgaggccaaaggtagcttggacgtcgtcgctgcccacggtcggggcctcttgcgaccggtgaccttcccgccgctgcggcgct

SEQ ID NO: 400943 - DNA, 122 bp, Homo sapiens
cctggagttcagtggtatcaggccaggctcagagcaaacacggcctgaaagccgtgacaacgggctgccgtgctgggctttgtctgagctgacgctcggggacttagggaggctctcgagtt

SEQ ID NO: 400944 - DNA, 122 bp, Homo sapiens
tcacctcctgctgtgtggctagttcctaacaggtcacagacccagggagtttgggacccccgctctagggcacaaaatttaaggaggcactcattctcaggtttatgtaagtgttgaccctg

SEQ ID NO: 400945 - DNA, 122 bp, Homo sapiens
ctgaggctttccctgttggaggcctttggctacctcatcccaaggtgcaccttccatagacggtctatcaggctggccaagggaaagcaattcttgtacccaagaccctgtcacctcttgct

SEQ ID NO: 400946 - DNA, 122 bp, Homo sapiens
ccacttgctagaattttatttcagcttagcttccagcactttgcctacttctgattctcacgactggggctcattctcctaaagatatctttgactcttaatcttctctctgtgtgtttttc

SEQ ID NO: 400947 - DNA, 122 bp, Homo sapiens
ggaagtctgtggagccctgggctcagaaaggggctcctgtgggggctgcatggggcagagcgtctctgccccacccctccacccagccccccgccggcctgcgcgctccacctgaagcctgg

SEQ ID NO: 400948 - DNA, 122 bp, Homo sapiens
attgtgtctggcctacatttattatttcttaatttttttgaagacaaagtctcgctttgtcgccaggctagagtacagtagtgtgatcatagctcactgtaaccacaaaaccctgggcccaa

SEQ ID NO: 400949 - DNA, 122 bp, Homo sapiens
aggtcacgaaattgaaaggactataaagcaccgtatcagaaaaggaggagaaacccaaggcgtatccgttagtggctgcatatgccaatacgcaccagtccacgcttttctgagcctgccag

SEQ ID NO: 400950 - DNA, 122 bp, Homo sapiens
actggagtctagctggcaaagggtaaatgcccccaaagccttcctgccatatggtttccacgaaggcctgagagtcagctgtacaactgtcttgtcttggccatgtccctgtttggtccctg

SEQ ID NO: 400951 - DNA, 122 bp, Homo sapiens
cttaaggagacagtccctgggagtttctgcctttggtctccagttattgttctcttctcgcgagaactgctcctcccatcctcttctctcacgaagccccgcccgcggagaggttccatatt

SEQ ID NO: 400952 - DNA, 122 bp, Homo sapiens
ggacatcgtcagaaatattgggctggagagggagatcaggaagggatcagtacatgttgtcgagaaataagtgacatgatgtgcaattatgtatgtgctcaccactctatactcaacgccca

SEQ ID NO: 400953 - DNA, 122 bp, Homo sapiens
tcaggaagcataggaggagcagaggctcctggtacacccccgtgggagccgcactacgaccgggggatgcacagctggcaaatgagaaaaccccgcacagaggagcttccagagaccacctg

SEQ ID NO: 400954 - DNA, 122 bp, Homo sapiens
ttcccaggcattaccacaaggtgatgcagtgactttgcatattatttctccactcccgtgcgaccttgacattctcagtgaattccaacatttttgtaagcttgcctaagtctgttatctgt

SEQ ID NO: 400955 - DNA, 122 bp, Homo sapiens
aagaggtccagagttagaagagttggaaaaggtataaactagcgcgattcctccaaaaaccgcattcagaaagctttagacaggacagtctagacagtccaggcccgcgtctgcaggttgcc

SEQ ID NO: 400956 - DNA, 122 bp, Homo sapiens
gccaatcatcttcggcagacagtccgggcggcggggctggagggctcagaacggtccaatcgctggccgcgaggctccggcgaaccaatgggagcgcagcggctgcggcgtccgaacaccgc

SEQ ID NO: 400957 - DNA, 122 bp, Homo sapiens
ctcctctgagtttctctgtaaatttgtgtcctttaagagcagtcagcatttgccataacccgtggccatgagtgtgtggaaggctttagccattttggtagacttgccactcagttccaatt

SEQ ID NO: 400958 - DNA, 122 bp, Homo sapiens
acagcagagaatcttatactattgcacatggagccaacagcccctcccattctcacagcacgctaccttttatgggcaatttgctctcctcctaattggacatttaggtggcacacaacagc

SEQ ID NO: 400959 - DNA, 122 bp, Homo sapiens
ttcaagttatttcccttcagtttccatgaggtcaccggcccgcccacatccctcacctggcgcggggaagcgcgccctcccgcgcggcacaccctctgcacctaaaccccggacagcgccca

SEQ ID NO: 400960 - DNA, 122 bp, Homo sapiens
ctcctggagctgctggctggtaaagtgagtccgctgccgcctttgccgcttcttcttagacgggtcctcggcgcccacgtcctcattcttcccctgctggcttttatctttctctgaaaacg

SEQ ID NO: 400961 - DNA, 122 bp, Homo sapiens
cgcccgagcgcaggttaacattcctggatgcgcaggttaggaccgtgtggtgtagacccacgacgttgcttttgctggtgaacttgcctatgtcctgatcttttaaataagctgggtttgtc

SEQ ID NO: 400962 - DNA, 122 bp, Homo sapiens
ggccattctgtcggtgtgctcattctgataaatcctccaatccttaacctccctgggaaacgtcagtgtgaagtcctcacggaagcctggggtgttggtgtctgacacggtgttttaggtat

SEQ ID NO: 400963 - DNA, 122 bp, Homo sapiens
ccgcgggcccgccccgtcccgctcgccctggcccccggctgaaggcgggcgcgtcctgcgcgctccccggggcaccggccccgccaaaggaaccctgcagcggccccgtttgcagggcaggg

SEQ ID NO: 400964 - DNA, 122 bp, Homo sapiens
tactagcttcctcggagcaggcgaggcaccaggcccgtgagaaaacactgagatctggggcgtagctgtgacatggggtatttctggccgggatctcaccgggtaggctccacccgcgggtt

SEQ ID NO: 400965 - DNA, 122 bp, Homo sapiens
gctaccaaatcggcctccagcccaccccaggggcggggtagagaaagggcaaactgtgaccgggacttgtgcacccgattaattgaatattaatcaccccaaggcctaggccaaccgccacc

SEQ ID NO: 400966 - DNA, 122 bp, Homo sapiens
cttactgtgcctggctgctgctgttatttatcactaacacttgccacaccagctcaaacgcgcgtatttgcggaccaggcgctgagggtcacgtgagcagcttggggccgggaggatcccct

SEQ ID NO: 400967 - DNA, 122 bp, Homo sapiens
ctccctcttggccaaaagttcctaatccccaaaatgtcacagtttagtaaggtgatacggcgtccataccacccatttatgttttgggcaggacctagaaccataggggtttatagtatgag

SEQ ID NO: 400968 - DNA, 122 bp, Homo sapiens
ggagctgggggtgagccaggcctagggccagtcagcagcatccacatcagctgtgtgacccggcccctgtggcccgcatcgtagggcacgatccaggcctctgccacccctgacagaactgg

SEQ ID NO: 400969 - DNA, 122 bp, Homo sapiens
gcatgagccactgtgcctggcccccagtgaactcttctcatctttccctcccaaacccaccggtagtggacactgctgcctactgcacttcccggcattctttttgcccccgtgaccacact

SEQ ID NO: 400970 - DNA, 122 bp, Homo sapiens
acgcagcgcctttgggcggcgccgggcgtggtgggccggaaagtatggcggccgcttgaacgccgcgcggcggaggccattaaggcgtggagggcccgggaaggcggcctagggacgcaagc

SEQ ID NO: 400971 - DNA, 122 bp, Homo sapiens
cagacaaatatgtgaggtgggtagcgcagtatattacttggctttgcagcaggaacaactcgcaaatctcagtggcttacaatgacaaagtttatttatcattcaggttttatgtaagctgt

SEQ ID NO: 400972 - DNA, 122 bp, Homo sapiens
ctctcagcacagttgcctctagctgacggctcctgtcctgcccatcctgcaggttcaagacgatttaaactcagccccacctgcttcctcattcagcttctgtgcctgttttccctgaggag

SEQ ID NO: 400973 - DNA, 122 bp, Homo sapiens
acgcacctgcccgggcccggctccctcctcctctcccctccctctttccccgcccggccgcgggagcctcgtggctgcgtcaccgccgcccccccagacaagatggacaccgcggaggaagg

SEQ ID NO: 400974 - DNA, 122 bp, Homo sapiens
ttgcttccgaacgccaaggtcgcggtgcgccggggtagcgaacggccaggcccgaaaccccgccccgcagctaaacgcccggcccgctaccctgcgcccagctccagccgccgggtcccgcc

SEQ ID NO: 400975 - DNA, 122 bp, Homo sapiens
tcagtatttggaaactaatttgttctactttttcattatattgttgatatttattgtaaacgtgactacaactttctaataaagattggttgttctagaaaagaatataaaatacatggatg

SEQ ID NO: 400976 - DNA, 122 bp, Homo sapiens
tccccggggaggggccagctggggcctgtgggctctgcttccaggcagtgtgggggatggcgggcaatctcgtggctctttctactcacacccttcccatcacccaccctttccaaaaaatc

SEQ ID NO: 400977 - DNA, 122 bp, Homo sapiens
taccaccacgcccagctaatttttgtatttttagtagagatggggtttcaccatgttggccgggctggtctccaattcctggcctcacatgatccgcccacctcggcctctcaaagtgctgg

SEQ ID NO: 400978 - DNA, 122 bp, Homo sapiens
cacagcccctccccgagagcaaacacacgtggctggagcggggaagagcatggtgccctgcgtggcctggcctggcttggggccaaggctccctgctacataagctggggcccccaggggag

SEQ ID NO: 400979 - DNA, 122 bp, Homo sapiens
gccgggactgggcgacagcggaggcggcctggtgaggtaagggcctggcgggcctggccccggtgacccccgccccagaaccgtcggacgcacggctccgccgcggcctccacttaccccac

SEQ ID NO: 400980 - DNA, 122 bp, Homo sapiens
cttcccttcaggccgaccaggcaggaagcgtgcccgcagtgccttctggaaaatgtagtccgggggcactacctgcagactcggggtgggaggtcgccgagcttctgccggttttgctgtca

SEQ ID NO: 400981 - DNA, 122 bp, Homo sapiens
gtggcgcatagggcacattccgccaaagatacatactcacacgggcacacacacagaaaccgacagggagagtgaaagagacacacagagactgagagacacagagagaagagagaatggga

SEQ ID NO: 400982 - DNA, 122 bp, Homo sapiens
gaagtgaggagcgtctctgcccggccgcccatcgtctgagatgtggggagcgcctctgcccggccgcaaccccgtctgggaactgaggagtgtctctgcccgaccgccaccccgtctgggag

SEQ ID NO: 400983 - DNA, 122 bp, Homo sapiens
gggagcaggcgagcaggtgtgagggaggtttcctgcaccgctcttgtcagttgcagaatgcgcttcactggagtcaacagacgctgcatctccagaggagcaagcagaaacccagcagttca

SEQ ID NO: 400984 - DNA, 122 bp, Homo sapiens
gagaaagagttaaatgacatcgaaatcacagccgtggcgtgtgcctgacttacgttgcatcgaccctctccactccgcggaagtagccgacaccgtctgatgtgttgcgcaggtggtggcat

SEQ ID NO: 400985 - DNA, 122 bp, Homo sapiens
ccccaggctgcgcctcgaggggccaagctctgtcggggactggggctcgggctggggctccgtgacctccatggggtgcagcccaccaggctgcctacgaggatgcctccgagccttcaccc

SEQ ID NO: 400986 - DNA, 122 bp, Homo sapiens
tgggcgctgggctcgcggcctcgcgctgggccttcactctctgcggcgcagtccagatgtcgtcagcaccagcgcctgggctggaggacagagaagccttttccgttgccggtgccggccta

SEQ ID NO: 400987 - DNA, 122 bp, Homo sapiens
gttcatgcctttcctgttggaactcatgacttgaagccccttcgctgagagttttacccacgcttagaagagtttttgttgtcgtccattcccagcctgagctcacggtaaatgcctaccaa

SEQ ID NO: 400988 - DNA, 122 bp, Homo sapiens
acggaaagctaaggcttgaacataggaattttgaggcaatacaattcagtccacggcactcgcctacacaatttctttactgattgtctctaggcagaaattaaatctttgtatcgagagag

SEQ ID NO: 400989 - DNA, 122 bp, Homo sapiens
tccgcgtcctcatcaaagccacccaggtccttgcctaggaagacctcctggtggaagccgcgattgaggtgcccgtccatctccagcttcaccccgttcaggtggtctgggggcaggatctc

SEQ ID NO: 400990 - DNA, 122 bp, Homo sapiens
acacctatcgaacttcacgctaaggactgctcgttttactgatccggactcagcccttagcgctgggcggtaccacgcgccgccagtgcggatcatctgggcactggcgccacctagtgctg

SEQ ID NO: 400991 - DNA, 122 bp, Homo sapiens
gaccctagcggagccttttgttcccagccagaagtttgcatgccgggaccgtgacagctgcgggcggggaggacggcggggccgcggggccagcggcgtggtggagaatagaggcggctgct

SEQ ID NO: 400992 - DNA, 122 bp, Homo sapiens
tcgggcacacggacccctcattcagtgcgcagcccccagcccagggcgccccggccggcccgcacctcacccggctccgcggcctccacgatgcggaagctctgcgtcttgctgaagccgcc

SEQ ID NO: 400993 - DNA, 122 bp, Homo sapiens
ttatgctggagattgttcccttgtacctactttccctggtctggttctttctggcagagccggtgccctctgctgcccctagactaattctgctgccataaagtctttgcccaacatcagtg

SEQ ID NO: 400994 - DNA, 122 bp, Homo sapiens
gtgtgcgctcttcccgcaggcgcccaccctcacttttcccctctgcagtccccacccgggcgcaccgcctccaacccggtctcccccgccccaggccctgccaagccggggctgctgaggga

SEQ ID NO: 400995 - DNA, 122 bp, Homo sapiens
tccgcgccccgcccccgcctccttgccgacgcctccggcgcgcccaggtagacgtagaggcgagtagaggaagttccctagtctggtgtctcatctctcgccccggaggtcaaacctggagc

SEQ ID NO: 400996 - DNA, 122 bp, Homo sapiens
gtactgcttatgggaatggcttcccccaggggtcacccttgggttggttcttccctcttacgtgccttggtaaaaccccggaattctgggcatttaaagcactgggagatcagccccttatg

SEQ ID NO: 400997 - DNA, 122 bp, Homo sapiens
ccacatggaggcggggtggagttatcatattagacattttctgttccaagtgaatctgagcgttttcaacaactacagtggctgtcattaggacctaatggagctgacagtgactgctatca

SEQ ID NO: 400998 - DNA, 122 bp, Homo sapiens
ctgaatcggcaccacagcagccgcgccaagcagcggcggcctcggaggaagaggggtcgccgcccaggtttcttgcggccgccgctcttgtcgtcgcagtatttcctgttcggattatcttt

SEQ ID NO: 400999 - DNA, 122 bp, Homo sapiens
gctgcatgcccttgggtgggacctcacctccataggccccagtttcctgtctggggctctcggcgtcagccctgccctactatgtcccaaggtcgccgcggagatcaaacgcaaaagccacc

SEQ ID NO: 401000 - DNA, 122 bp, Homo sapiens
gttgggggagaggctggctgagagcatgtcccactccggactagggggaaccccactgtccgtctcagctccccatgaggccgtggagaaaatgtaagtagcccgggggcgggcaggggggt

SEQ ID NO: 401001 - DNA, 122 bp, Homo sapiens
cccctgacgccagcggcgcctctgtggctctgggacctgagcgcacgcgccttaaagccacgcctccgcatcggatcctagtaagggagcggggttatcattttagcgtagcgttgcgcgtg

SEQ ID NO: 401002 - DNA, 122 bp, Homo sapiens
cttctccatccccttcccccacgcctgcaaaccaggccggtgagggcagtggtcttggggcgtggtgacgatggggaccctctaggggaccctctctctaggaccctagaccggaccccttc

SEQ ID NO: 401003 - DNA, 122 bp, Homo sapiens
gaagtcctgcatgtccaggcagttggccaggtcgagctgctgctgcaggaaggccccgcacgcctccttcacggccgggaactgcagcaggtcggcggcgcgcagcagcggctcagcgttgt

SEQ ID NO: 401004 - DNA, 122 bp, Homo sapiens
cttccttagcactttcggaggtggagttaatgagacgcagctggtatgatggaaaaagctcggagccaggcgactgaacctgggttttaggccctgcccgattggataactgaggagtatcc

SEQ ID NO: 401005 - DNA, 122 bp, Homo sapiens
ttaaatctattatgttcaaaacagaagtcttgattttcaactgctttaccctaaaaatgtcgcacacccgttatcctcatcagttattcctgtcttcctgatggctcaagtcgtaaacctga

SEQ ID NO: 401006 - DNA, 122 bp, Homo sapiens
gcgagtcggcaacccgtcctcccccaactcacgcccgctgcagctgcacattcaaaatggcgctgccacaaactgcagttagaagaagagacgccggtgcaagtcccacccctccgccaaag

SEQ ID NO: 401007 - DNA, 122 bp, Homo sapiens
agggggcgcgcgcaccgagagcggatgggggcgttgggagcggctggagttgggggtcggcgcacggccacagggaccccacttcttaagctgcgaggccgccggaccggatgttgggagcg

SEQ ID NO: 401008 - DNA, 122 bp, Homo sapiens
cggacacgatggtggtgaagtaggtgctgagcccgtcagcggcgaagaaaggcacgaacacgttccaccaggagaggcccgggaccaggccatccacacgcagtgccagcagcacagagaac

SEQ ID NO: 401009 - DNA, 122 bp, Homo sapiens
tcagtaccatggacagcagcgctgcccccacgaacgccagcaattgcactgatgccttggcgtactcaagttgctccccagcacccagccccggttcctgggtcaacttgtcccacttagat

SEQ ID NO: 401010 - DNA, 122 bp, Homo sapiens
cacctcaattacttttcatatggcataaatttgaggcttctcaataccatgattattctccgaatgtgctctaatttgtcttttgttttccttcatccagtctcccacaatgatctaggtgt

SEQ ID NO: 401011 - DNA, 122 bp, Homo sapiens
ccccttgaaagggatgttggccacctgcccagtgagcctccttgaacatgcttattccaacgctttgaggggctggaagccttgacacatggaatcaggggcccgggatgtgattcaggaca

SEQ ID NO: 401012 - DNA, 122 bp, Homo sapiens
acaagcgcgtccagtaacaccagaaaaacacgtggcgggggtggggcatctggtcgcaaccgcaggtgagactctaagtcccatcattcccttcggcagccaagccaggctgttgagggcga

SEQ ID NO: 401013 - DNA, 122 bp, Homo sapiens
gcactttacattaatgttctgaaacctcttctattcacaaaactatgtaactcagattcacgagtagttccatcagcaaagtacagcagaaaacaccagaagcttttccagactcaaaggcc

SEQ ID NO: 401014 - DNA, 122 bp, Homo sapiens
ggtgtttccttgttcggaatggggttggctcctctttgattttttacttctggtgacccacgcaaaagcagtcccgacctggttgtattaataataaaggctgtaaggatcagccttttgaa

SEQ ID NO: 401015 - DNA, 122 bp, Homo sapiens
gggaggtggcaggcggctcagggatggagacagcagccttgcctggtcaggtcagctccacggccacagctgtgcaggcctcgaggagggcagaggaggagtccaggccagtgccagatgga

SEQ ID NO: 401016 - DNA, 122 bp, Homo sapiens
aggacccgggctgacagctgagctagggccatctgcaggagacgattcagacggggtcagcgctgcgattcgggggagtaaccagcggtgagcttcaggcctaaatgctggagtcctaaaat

SEQ ID NO: 401017 - DNA, 122 bp, Homo sapiens
gggggtcttgggttattctggggacaaggaagcacagtgcatgtaaagcacaccactcagcgcctgccccgttcttcctgccctggcgatatgctaaacaacagggtctccactaggccaga

SEQ ID NO: 401018 - DNA, 122 bp, Homo sapiens
cttcctcctctgacaccctcggatctggttccacctttcccggaccgcagctcagccccgcgcctctccagctcttcgatgaccggttcccggccgtgccccgggccctccctcggagcgcg

SEQ ID NO: 401019 - DNA, 122 bp, Homo sapiens
gctgctttttgttaaaagtgaaacctcaagagtggccctcactatctgcctcaataatttcgttctaggtcgtgtatcactacacacacacacacacacacacacggacataaatgttcaaa

SEQ ID NO: 401020 - DNA, 122 bp, Homo sapiens
tgctcattttacggatggggaaactgggcatccatgactcagctctcgttttttaagcgccggagtgtgttgtgagcactttgcaagcatggtgtcatatcattcttatctcctaccgctgt

SEQ ID NO: 401021 - DNA, 122 bp, Homo sapiens
cgcccaccggaaacggaagtagtcgactcgaggtgtgggactacctttcccagaaccctccgcagcgcagtccgatcctaggggcgatggtgtcgtaaatgcgcgtccacctcgagtcacgc

SEQ ID NO: 401022 - DNA, 122 bp, Homo sapiens
tcagcatgatttggtcgggcgggggggatttaggatgagttgagatcccagtgatcttctcgctaagagtttcctgcctgggcaaggaggaaagatgctacaagtggcccacttctgagatg

SEQ ID NO: 401023 - DNA, 122 bp, Homo sapiens
agaaaagaaaatgcacaggagacctcagaaactcatgtcaatattaggagcttgaagacccgtaagtaaacaagggggctgggttttccttttgtgtgtttgctttgagttgcctgctctga

SEQ ID NO: 401024 - DNA, 122 bp, Homo sapiens
ccttgcctaagaactccgttcgtccgggaggacgcaggcccacctgctctaacatgaacgcgtctgaattcagcggaggacacccaggagcccggttattctcctgccagcgtcctcccctg

SEQ ID NO: 401025 - DNA, 122 bp, Homo sapiens
ttcagacgttgattggcccaaagcatcgtgaatattcatgacagcagccacaaaggccggcgccgggtggcatcttgcggcagctccttcaccccgcagtagacacccgtgcgtctgtaccc

SEQ ID NO: 401026 - DNA, 122 bp, Homo sapiens
aatccattcctgggcggctggcgtccagctccttagcctgggttagcgctggggatggggcggccacagcagtgggcgcacggcagcttgcaggctgtcagttcagaagacgctgcagcagc

SEQ ID NO: 401027 - DNA, 122 bp, Homo sapiens
ctattcgagaggtctgggcaagcctcccagcagctgtcattgatgggatgcagactgccacgcagacgttgattgaggacgttggccaaatgcatccggctgcacccgtgctttaggtcctc

SEQ ID NO: 401028 - DNA, 122 bp, Homo sapiens
gtgttttgtgctccaagaagagtgagacataagagttttcaataatatgttgcagcttaacgagaatgtaggagaaacctgttataccagttggagatcagacttgaaaaaatggatttcct

SEQ ID NO: 401029 - DNA, 122 bp, Homo sapiens
aggtcacaaatagccctacagttgctctttggaaccctcgctcttagatccccgagccaccgtataagaagtccagctaccctgaggccgtggactgcagctgcactccagtctttaagccc

SEQ ID NO: 401030 - DNA, 122 bp, Homo sapiens
agctggacaaaaaatcctataaatcagacaccactttcttcttccccacaaagaagagagcggcaaaaggaaacccaaggcagcaattacaagaggctcagcactgttcctgcttttgttgc

SEQ ID NO: 401031 - DNA, 122 bp, Homo sapiens
gcccgactcctcggctccggctccgggtggcggcggcagcggcgtcgcggacgaagggcgcggcaagcgctatcgagacaataaccctgccgcccggctctgggggcaacggagaggaagcg

SEQ ID NO: 401032 - DNA, 122 bp, Homo sapiens
aggaagggtctggtctttaagtcttcctgacccacactgcttacaatagctcaccttcaccgaacacttcctacttgctaggcattggtctaagcctgcaatatccaagaaggcagacactt

SEQ ID NO: 401033 - DNA, 122 bp, Homo sapiens
cagctattgcacactagtaattttctgctctgcgaccgtttttctgcgctgtaataatcacgctaaaagtagtgcaggttttactgcttacaagggagtttttaacaattttcttaaactgt

SEQ ID NO: 401034 - DNA, 122 bp, Homo sapiens
aaaacgaccttctgttggaaaatgtcatccaggagtttcatactagaggaagtcaatgcccggcttcgaagcttcaaaagacaggctgactctcttcttaggggctattgtggctggtgtct

SEQ ID NO: 401035 - DNA, 122 bp, Homo sapiens
gcgctccacttcggggcgcagttggggtggaggcggtggccgggaccgccgcgcggggttcgtgcgcgcacaaatgtcgcctccagaacaggtggcccgggctagggcggcggcccagcccc

SEQ ID NO: 401036 - DNA, 122 bp, Homo sapiens
gctataggtttgttaagttttggggacctttaaattaatcatttacacccactttgggaacgctccgaccactatatattcaaacaacatttatattcctttctacgactttacttcttcta

SEQ ID NO: 401037 - DNA, 122 bp, Homo sapiens
gacctgagcggagagtcctggggaaaacgctgacttctttttcttcacatagttccggctcgctgagctcggcggaaggagacggtgggagcggtgcgtagcccgtttggaattttggcgcg

SEQ ID NO: 401038 - DNA, 122 bp, Homo sapiens
tgggctgaccgcagtcgctgggaatgggtctcacacccttcaatgggtacacagctgcgacgtggactcggactgcagtctcctcagtgggtatgaacataccctatcacggcgccagttac

SEQ ID NO: 401039 - DNA, 122 bp, Homo sapiens
ttcttcttgtagtcaaagtccaggcggcggccctccagtttcttcaggtggtgctggagacgtgggggacatgggtcacaccagtagcggccagagggccgccccacgcatggctttgaccc

SEQ ID NO: 401040 - DNA, 122 bp, Homo sapiens
caggccggtcccagccgcccggagccccagtgcgcgatggcggccggcaaactgcgcctgcgcactgggcctcaccgcggactacgactcccacaatgccgcgaggctgtgccgcgcaccgg

SEQ ID NO: 401041 - DNA, 122 bp, Homo sapiens
ttcgcgggcgaaggcaaagtcgatttccaaaagtgactttcctcactcccgtgaagtcggcggaaccctccactaacggcgtctgagcggacggctccgatgtgtaaatcccactcctcgag

SEQ ID NO: 401042 - DNA, 122 bp, Homo sapiens
tttcagacataattgtgaacgcaacacaaaattatagcaaaaagacaattttaatgctgccgtagaaaaaagggttatatgaagagtcacataatggtgcttcattgtcaacaaccaaacag

SEQ ID NO: 401043 - DNA, 122 bp, Homo sapiens
ccttgcagcgggagccggggcccatcagtaatagtgcatgcggcccagggtgcccgtggccgtggggctgggccccagcgtgcctgtgcccagcaggtccggctgcccggtgcgccagatct

SEQ ID NO: 401044 - DNA, 122 bp, Homo sapiens
agcagttcgtgtgggtccgctcccaagctagggctgggctgttgcgcttgcgccaggggtcgcatgcagtcacgcgctgccgaccgcttccggtgcgccgcgagggccgccgggacgggtct

SEQ ID NO: 401045 - DNA, 122 bp, Homo sapiens
cagaataagtctcttcaaatattttacagagttggactcttttcgttgacaattcaatgacgcttcaagcgtttttggcagctctcatcagtgggatccgcattaatagtgaaacggcatca

SEQ ID NO: 401046 - DNA, 122 bp, Homo sapiens
tccagggcctctgctgtcagacccggggccttgcctgcctgatggtcttcagggaggaggcgacccagacccccgtccagcacgtggcacagccccaggagcagtaaagacctggctgtggg

SEQ ID NO: 401047 - DNA, 122 bp, Homo sapiens
agcctctgtctaaacgtaccacatgagaagcttagagcctcaaattgttctttgtgtaagcgttttcttgtcattgattggttggttcatctccccaaattaggagacaatttttccatgag

SEQ ID NO: 401048 - DNA, 122 bp, Homo sapiens
gcaggaagctgtggggacccgtttgctgttagggtcacttgtgcacatggtcagtgccggcgggtacccgccatgagcacctgtgcacagcagggagccgctgccgtggtcatcctcaggga

SEQ ID NO: 401049 - DNA, 122 bp, Homo sapiens
caccagcacgttgccaggcaatgagccaagaccgagggctcagacaaaagacagagcggccgactgggctcagcggacacacagcgcagagccagctgctggctgggaggacgccctgcagc

SEQ ID NO: 401050 - DNA, 122 bp, Homo sapiens
attggaactaggggaaaaaaaagaagcaacactcatgtcaaggcttaaatagtatttacccgtgcagaccaggcacgattctaagtactttatgcacaaccttatgaattaagtactattgt

SEQ ID NO: 401051 - DNA, 122 bp, Homo sapiens
tctctcgctcacccatgtgatgccttctgccatgctatggtgcagcaagggcttaccagacgccaccccctcagtcttggacttcccagcctccagaaccataagccagtaaatttctattc

SEQ ID NO: 401052 - DNA, 122 bp, Homo sapiens
ctcgtgagcgctgattgccctcagctgaagtcctcttttctcctcccataacctgttgcgcgagaatctaagccgccactccttgtggaacctcaagagggtgtctcagcttcccaacccca

SEQ ID NO: 401053 - DNA, 122 bp, Homo sapiens
ggctagaggagcagccaccgagcctcgagtacccgggggcaggcgcgggcctcagcgagacgtgctgccgtttctattggagagacaaaatctaaatgttatcaggaggattttcatttatc

SEQ ID NO: 401054 - DNA, 122 bp, Homo sapiens
ttattaagtaaattaccactactggagcctaatctagctggaaactccaggagccagtgtcgactcaaaggtcaagaggagcagagaattaaaaaccaaccacaacaatcaaggtcagaact

SEQ ID NO: 401055 - DNA, 122 bp, Homo sapiens
tgttctcggtattttgtgtcaatggacccatgcatgggggtgggccgggcacctttcaaacgttcagcccccaggacggcccgtggcctccggattggacggcgcgagctgggtgtgtgtgg

SEQ ID NO: 401056 - DNA, 122 bp, Homo sapiens
aggtgtgggccaccacgcccggctaattgtttgtatttctagtagagacaggggtttcaccgtgttggctgggctggtctcgaactcctgacctcaggtgatccgtccacctcggcttccca

SEQ ID NO: 401057 - DNA, 122 bp, Homo sapiens
ccgacttctgggtggcggaccctgggggcggcggctccgctgactggaggccgcgacccgcgactccgacaacgcagcttggaatgtccagtgggacatgcagttccccaaagtcatctcta

SEQ ID NO: 401058 - DNA, 122 bp, Homo sapiens
tcccgagagcgcctcagtgtcccgacgccgggtccgggttgcagagccgtaaacaggtgccgctccctcgctgctttaggacttgtgtgactaggaggtgaccggagagcacggaaggcgcc

SEQ ID NO: 401059 - DNA, 122 bp, Homo sapiens
accggaatgtccatttaatccacggtgcagccttatgaaataaatcttatctcctttttacggatgggccgaaggctggcctcgatagcctgcgcgcttaactgttatgctgtgtaccctcc

SEQ ID NO: 401060 - DNA, 122 bp, Homo sapiens
gctacagatgtcaactgtcagtaagaccgacagttccattaggcagctgcccgctctccccgtgagtgattaaaacgtcgccatccatcccccatgctatacatcatctcgccaggctggca

SEQ ID NO: 401061 - DNA, 122 bp, Homo sapiens
gtgtcaagaccaagtttcatgggttcctggacgctcagccaggggtagtctctgaagggccgcctggcaattgggagcagaagccagtttcccgccatctgctctccgtggaggcagtgctc

SEQ ID NO: 401062 - DNA, 122 bp, Homo sapiens
gtgagcgcggacggcccggaggcggcggctctgagctggcaggcggagggctgtctcctgcgcccgcctgcccggcgcggtccgaggatgcgggggggcgatgcccggggccagggacgcgc

SEQ ID NO: 401063 - DNA, 122 bp, Homo sapiens
cccacttgagcttgttggggagggtgacgggacccttgggaagtccccagccttgagctgcgagggcttgagaaggagaggatagatcgatcgttcccggctgtcccctccggggaggggcc

SEQ ID NO: 401064 - DNA, 122 bp, Homo sapiens
tcttatttttgtttattttagtgtacggtcttagaggctttgaccatatagtctatgtcacgccttcagcatggtcaaaattcagccgataatggtgatgtttgtttcatttccaatatagc

SEQ ID NO: 401065 - DNA, 122 bp, Homo sapiens
cgctgttgcgcctacgtatgtttgactcctcccatccacccgttactgacttttaaaagtcgtagctgagggttccgtttcttcgtttctttttgaattaaggcataaaattgaacaagaca

SEQ ID NO: 401066 - DNA, 122 bp, Homo sapiens
gctaagaacattcttatcttttctgttgggtatatatacaggaatggaattgctgagtcacggggtatatttctgtttagctttagtaaattctgccagtttacactcctaccagcaatgta

SEQ ID NO: 401067 - DNA, 122 bp, Homo sapiens
ccgccccctttccttcccaaggcaatagtgtaggggacgcccagtaagttacggaaaaggcggagacagaggtttcgttcccgcccctccaattcagtctccaaaaaggtccgcataattga

SEQ ID NO: 401068 - DNA, 122 bp, Homo sapiens
tgcaacttcacagtctcaccatcctcggctttggagtggatttggcagtgaggacaaggacggaacgccggtaggggagtagttgcttgtctcttgtttattcttctcctcttttccagcgg

SEQ ID NO: 401069 - DNA, 122 bp, Homo sapiens
agtgattctcctgcctcagctgtcggagtagctgggactacaggcacccaccaccacacccggctaatagagacaaggtttcaccatgtcagccaggctcatctcgaattcctgacctcagg

SEQ ID NO: 401070 - DNA, 122 bp, Homo sapiens
agccacgcaaaactccctgaccccgatgtgatttttctccccggggattcgagagccatgcgtgggacactggaccctactgtctacacgggcttgcacacagcaggtgctcagcaaatgtc

SEQ ID NO: 401071 - DNA, 122 bp, Homo sapiens
tccatgaggtgctctgtcctatctttcttttcctctctctttgtcgtgcgtgtgtgtgcgcgcgcgcacgtgtgttggggatgtttggagatagtgagccggataggacatgaggaaagaga

SEQ ID NO: 401072 - DNA, 122 bp, Homo sapiens
ctcccggaagcctcctcagcggccccggcctggccccggcggcgtcctccgcaggcggcgcggcgtcctccgcccagacgcaccggtccttcctgggccccttcccgccgggaccgcagttc

SEQ ID NO: 401073 - DNA, 122 bp, Homo sapiens
ggccctggtcagccctgtgtagccgctgatggttctgttccccatgggtctgggggtttgcgaggagagctctggcgtcccggggcctctgaggcgtccacactacccaccccctcactcat

SEQ ID NO: 401074 - DNA, 122 bp, Homo sapiens
ggaaagtaggatgccccatggataaagtgtcaactccgtctttatgacaggccaactcagcgggtgcccaccacgcttggctccaattcaaagagccaccatctttggtccccacctcagtg

SEQ ID NO: 401075 - DNA, 122 bp, Homo sapiens
ctatggccgggtgcggtggctcacacctgtaatcccagcactttgggaggccaaggtgggcgaatcagatcaggagatcgagaccatcccggccaacattatgaaacgccgtctccactaaa

SEQ ID NO: 401076 - DNA, 122 bp, Homo sapiens
ggcccccgaaggcacgaagatgggcgccgtgccctgccgccgggctcttctgctttgcaacgggatgaggtacaaactgctgcaggagggcgacattcaggtctgtgtcatccggcacccgc

SEQ ID NO: 401077 - DNA, 122 bp, Homo sapiens
gcgaggtgctgtgtcttattaagtcataagagaatggacacagaatgggagaatggggaacgtggaggtaaaggagggaacctaatgtaagaatactgaatttgccaattaaggcaccagct

SEQ ID NO: 401078 - DNA, 122 bp, Homo sapiens
gcccacccacagcacttccttggaactctaagctgcttctctaatctaaggaggtctattcgaaaggatagtgcttgactttcaatttataaaagattattggaaacaccttaagtagtcct

SEQ ID NO: 401079 - DNA, 122 bp, Homo sapiens
aggtggtgggtggggagaaggggagaggtgaggtaatacagggaagacagacaaaaatgacggtcactggccgggcgctgtggctcatgcctataatctcagcacttatgggatgccaaggc

SEQ ID NO: 401080 - DNA, 122 bp, Homo sapiens
gattacaggcgtgagccaccgcgcctggccaactacacaattgttgagagcctacccactcgaggctgatcaacagccaaggctaggacagttctgctgggacaaccagtcccacgtcttcc

SEQ ID NO: 401081 - DNA, 122 bp, Homo sapiens
ggccgtacaatgcagaggagtgttctggacagaagcttaaatgttgggaatcaccggcaccgggaaccaagagggtgcaccctgcccaggaaaggttagactaccaggctgggaggtcccaa

SEQ ID NO: 401082 - DNA, 122 bp, Homo sapiens
gaaaatatggaaccaatgtgatgggctttcttagctcagtaagatgaaattcttgaagaacgggtcagatggccttaaggctaggaatgtactcattcacttaatagtcattcaacaaatat

SEQ ID NO: 401083 - DNA, 122 bp, Homo sapiens
agctcgtccgcactctgaacgcggccaaggtgccggccgacaccgaggtggtttgtactccgcctactgcctatatcgacttcgcccggcagaagctagatcccaagattgctgtggctgcg

SEQ ID NO: 401084 - DNA, 122 bp, Homo sapiens
cctcgcccccctctttctgcactttcaactccgccgaggagggggtccctgggaaaaccgcgtccccacttggatgccggggcttctcacaaacttcgaggccgactgggggacggcggtgg

SEQ ID NO: 401085 - DNA, 122 bp, Homo sapiens
gcctgtaaaatcaagctgcagacatagataaccaagctggaagcttgcacaggtgaatgacggcggctgtgcattgcaataggggaagcctacctgggggccaggtaggttcaacatggagg

SEQ ID NO: 401086 - DNA, 122 bp, Homo sapiens
gagttgggaccgcccgtatctagttcctcggaggggtggatctggatgtccggggaaaggcgaatgaagagtagagcaaaacatgtgccggctgttgagggctgtcgatgcgatggcagatg

SEQ ID NO: 401087 - DNA, 122 bp, Homo sapiens
ttttttttcttgcatttctgtctacttatgtgatacaacacttggggttatgttttcagacgcccaagtaccctcctggtccacagccagaattaaaatgaggcacgagcctcaggtgcaga

SEQ ID NO: 401088 - DNA, 122 bp, Homo sapiens
tcttgtctatgcaggcatgcacactggcagcacattccagctgcccttctgtcggtccaacgttattcatcaattcttctgtgacatcccctctctgctgaagctctcttgctctgacacct

SEQ ID NO: 401089 - DNA, 122 bp, Homo sapiens
ttcaaatctgctgcacctatacctattttagcccggtcagccaatgcatttgacttaatacgttgataaatgaaagtgatcagacaaatactatctcatatttatacatttctattagtact

SEQ ID NO: 401090 - DNA, 122 bp, Homo sapiens
cacagcccggttggactcaagttcttctaagtttgcagctggccaaggagcagagagagacgtccctgtcccccaacaaggggttggcatggaaacctgcccaccccagacgactgcccggg

SEQ ID NO: 401091 - DNA, 122 bp, Homo sapiens
ggcagagctggtcacgaggagtcctggctgccctcccagcctgatctagaggaagaagggcgcatggggtgaaaacaccagggagctcaaggcaggattcagaaatcagacactgcggctgc

SEQ ID NO: 401092 - DNA, 122 bp, Homo sapiens
tttacataaccaacttcaacgcacagcttcgtgctccgccactcggagtcatcaacaggtcgcggggaagcggacgcgaaggaaaacctaagttcctaacaactatggaaaatctgggaaac

SEQ ID NO: 401093 - DNA, 122 bp, Homo sapiens
acaaataaataaggcttctgctttacgtaaagaagtgtctgggctttacagattcccaaacgaaacagaagagcacagagaagaaagtaaaaccagctagaaatgccagaaaccagacatgg

SEQ ID NO: 401094 - DNA, 122 bp, Homo sapiens
atggcaatgaggtggagcctgatgatgaccacttctccattgtgagtggctcatgtgggccgggcaccgtggcccatcctccatgccagggcagggctccagggacttgggtctgtgactca

SEQ ID NO: 401095 - DNA, 122 bp, Homo sapiens
cccagtcagcctccgccgcagcccaggaagccagccgggacgccgccgccccggaccccgcgccctaacctccacctcgggggcctgcacccccagattgaatcgggaattccggaaacccg

SEQ ID NO: 401096 - DNA, 122 bp, Homo sapiens
tacgcaagccattcattctcactttaaaattgtccacccccccgccccgacccccgtccccggcagcccccatcacaaaattgatgctcacaggttgaagtagagaacatcggtacgagccc

SEQ ID NO: 401097 - DNA, 122 bp, Homo sapiens
ggaagaggaacggtcctgctgaatcctctggaggacagcgactagcgagcaggccaggggcgcatggaggtgccgcgggggcggtgcggctcgccagctgcgcggaggagcgtgcacgccgc

SEQ ID NO: 401098 - DNA, 122 bp, Homo sapiens
cccacccccggggtgggtgggtggtgggcggtggctggttacccactggtgcagcctccccggctcgccttccagagtaactcccgtcgactgtgggatattcgctttctaccccaaatccc

SEQ ID NO: 401099 - DNA, 122 bp, Homo sapiens
gaacaggtaccgagtaaaagtttatttgaaggaaagaaaagcgacacagcagtcttacatcgtccctcggtagtttaaagttgtggctagatacgtatcaattaaggaatcaagctgaggca

SEQ ID NO: 401100 - DNA, 122 bp, Homo sapiens
aattgtaatttcctgctcactcgctgatttccccatgactcagagagttatgacatggagcgaggggagggacaaggtctgtctcaggtgagactctcgctgctgggcacaggggctcggaa

SEQ ID NO: 401101 - DNA, 122 bp, Homo sapiens
ctgggctccgccccgaggcggggacagagggtcgcgccacccgtctctccttcccccacccgcctcagggactcgactctggctcgggccccgccccacctaggggcctgcggaacccgccc

SEQ ID NO: 401102 - DNA, 122 bp, Homo sapiens
aggttttactatgttgggcaggctagttttgaactcgagctcatgtaattttcccgccttcgactcctaaagtgctgggattagaggtgtaagccactgcactccacccgtacttctgtaca

SEQ ID NO: 401103 - DNA, 122 bp, Homo sapiens
cctgtagctactctatgtttaccttatcttatgtaaagtgctgatttactgagcaggagacggatacataattgattcttcctctacctgctctttttctcttgcaacatgtggattcaatc

SEQ ID NO: 401104 - DNA, 122 bp, Homo sapiens
ggtgctgcagcgcccggggagtcgcggaggggaggggtgaaaatgggcttgcgggactgacgcacgcgcattgggataccagatccccgcctcctgctccaggtttcccctcctccttcacc

SEQ ID NO: 401105 - DNA, 122 bp, Homo sapiens
aatatcaagtaagctccatgcgggcacagctatgatctgctttctttgctgccgaccctgcgcccagcacggagactgtagttactactaggacctcgcctacccgcggaacacactgagag

SEQ ID NO: 401106 - DNA, 122 bp, Homo sapiens
ttaaaatcgacctgatgtggctggttctcacgtggcttctgttccatgccacactatccccgacactggacttggcacttctttgcgttgactttacaaaatcctttcacgccccacatcat

SEQ ID NO: 401107 - DNA, 122 bp, Homo sapiens
tactgtccattttcataaggttaaatcatacaacacaggtaaaagcgcttcagcacgcaacgaaatttttctaacgtaacgaaaaactcctcgttgctccttgccttgcccttaacctcaac

SEQ ID NO: 401108 - DNA, 122 bp, Homo sapiens
aagcctgcagctggccgggtgctcccgctcctgtggtggtggcagtccagggctatcaggcgctctggctgtcccggctcccgcctctgcctggtgggcagaggggaggattggcagtttgc

SEQ ID NO: 401109 - DNA, 122 bp, Homo sapiens
ctcatgggaacatgatcttcgacctcatgcttgctgatcatagtttattgtgccttttatcgttgatggttttgctggttacaggattcttggctgacatttccttgagtgtcttaagttat

SEQ ID NO: 401110 - DNA, 122 bp, Homo sapiens
tacaaccacgtaacactcacaagtcctacacttctaagatcagccctactgactttgtcacggtaagagttggctgttggaggcaatgattcaacaatctaaattctgattattcctttttg

SEQ ID NO: 401111 - DNA, 122 bp, Homo sapiens
aacggaggcagagggtgggggtctggctttccagggtagacccgcctgcccagtctgatccgcagccccggcccctgccggcaacctcgggagacgggccgggctccctagtgcacttgggg

SEQ ID NO: 401112 - DNA, 122 bp, Homo sapiens
cttcttaccccagatagcctcgggtgctgcctgtagtcatgctgacagctgtacagtagccgccaagactgctgacggctggagacggttctggtttcaacaactacggtatattgatatcg

SEQ ID NO: 401113 - DNA, 122 bp, Homo sapiens
gtgcacgaagaggctgactcatggaccagagtgagcagggtgaggcgaggagagacaggccggtgtgtccctcaccctgctggctgacgtggggcacagggtacacaacacagcggccgtaa

SEQ ID NO: 401114 - DNA, 122 bp, Homo sapiens
gcatcagggaccccagattgtggagcagacaacaacgccggctgacctcggacgacgtctcgtcccgtattctatgtctcatgtcctctgtgaaatggaagagcctccatccctaaggggac

SEQ ID NO: 401115 - DNA, 122 bp, Homo sapiens
ccggtccgcaggcagtagagtgaagcgcgcagctgccaggacttgcgcggtgacgtgcgccgctgccaggaccttgcaggtggagagcatagttgccaaaatcaaggcggaggagcgcaccg

SEQ ID NO: 401116 - DNA, 122 bp, Homo sapiens
ctcccacttgtttacttcgtggcgagagggcgaacactgcgcctgcgcactctccgtagccggatccaccttcagcgtctgcgccacgtgactccgatccaccctcgaggttccagtggaat

SEQ ID NO: 401117 - DNA, 122 bp, Homo sapiens
cctggctctgcgcggtagaggtcgcgagtggcgaaggctaggacgcattttgtcgaactgcgaggcgcggctggtgaggcgggtgggtatgagagctgcttatgtttttaaggctttcctgt

SEQ ID NO: 401118 - DNA, 122 bp, Homo sapiens
cagagggttcacccctggctttccagtgtccacgcactcccaaccacagccaacagagggcgctgcccagccgtgtgggatctttgggtctgagctggacagctcttcctccaatccttaag

SEQ ID NO: 401119 - DNA, 122 bp, Homo sapiens
atgaatggtgtgtagatacgacatgaaattacatagaacaaccaagcctctttttgtatgcggcaataacacaaaagcatgttccctcaatctttgaattgagattggcatgtttttcttct

SEQ ID NO: 401120 - DNA, 122 bp, Homo sapiens
taaaaatgaaaatcatgagggttacaacactgtcagaaatgccttggaacttgaggctggcgagaaagccatctgtggccagctttagcaatttacaatttactcttcacctcctggagctg

SEQ ID NO: 401121 - DNA, 122 bp, Homo sapiens
ccccagaagggtagaagtgggacacaaggcagagcaattccgggggtgcctcccctggggcggcccgtgcaagggttgctggcatcagggacactttggggggttctggggaaagaggacga

SEQ ID NO: 401122 - DNA, 122 bp, Homo sapiens
ggccttcttagaaataactttggccctcacttggctgtagcagaaaggaatcgaggcccccgtccataatcgcaggtgtcggcgtggaaaggagccacgcgtgcacactcatgggtctcacc

SEQ ID NO: 401123 - DNA, 122 bp, Homo sapiens
gactacgtggcgcctcaggttctggagggttcctctacctcctcccttcctcccattctccgcacttaaaatgagacacggattccttcccgaccacatacggggggcttcccccagcatga

SEQ ID NO: 401124 - DNA, 122 bp, Homo sapiens
tggtccccgcgtgcaacgcgagcgccggggagtggctcctgctttgcccctcgtgggggccgagccaagaccagtctgcaaactccatcccgccggctggaagaagtcgcggagccggcacc

SEQ ID NO: 401125 - DNA, 122 bp, Homo sapiens
gccgctccgccgtggtcgcggcgcccccggcgctcgcagtcgtgcctcacctcccatccccgccgcccaggagaggagcagaattaacactctcagcaacaccatcttccgctgccgctgcc

SEQ ID NO: 401126 - DNA, 122 bp, Homo sapiens
cccataagattataacagagctgaaaaattcctgagtgaagtagccattgtaacatcacacgttaccttttttatgttcagatacgcaaatacttaccattgtgttacaatggcctgcagta

SEQ ID NO: 401127 - DNA, 122 bp, Homo sapiens
gcgcgatgcgctcgtcagggacctggacgcgcaggagaagcagtgagtgggcagtggggtcgggtcgaggctgggccacctgccgaggggccgagaagtgtgcggaaagttcaatccagagg

SEQ ID NO: 401128 - DNA, 122 bp, Homo sapiens
tcccctcccccacccaacaagggctgggcagctttaatgcggaacgccggtgcagcagcacggagcacactcccagactacagtggcgcccgcactcacgcccttcaagtgccccacccctc

SEQ ID NO: 401129 - DNA, 122 bp, Homo sapiens
caccagggcgtcaaagatccgctaggcccagaaagccaagggcagcaggggatgggctggcgtcaccaggagcggaggagtgagggctgccgcgcgcctccctaggcccagcacctggaaga

SEQ ID NO: 401130 - DNA, 122 bp, Homo sapiens
agcaacaggcggcggcccgcttctcattggccaggcccgcgctgtcgtgttttgattggccgcggagcctcccggccctgcttctgcagtcgctgccgactccattttgtcggtagaggcag

SEQ ID NO: 401131 - DNA, 122 bp, Homo sapiens
gggtgcctgaagaatttccttgagctccaattagagtcagtgtggtagaatgaaatccaccgcgtctgggtattcccacttgtgaaacccaactgcagcgcgcgcgcgcgcgctcagacgcc

SEQ ID NO: 401132 - DNA, 122 bp, Homo sapiens
tagaaggaccaagatattacaaaggaaacaatagatgcaggaggaagcaactaaaatacacgagactgtctgattagcctcagtagtcttgctcaaaaaatgttgtgaggagacggaaacga

SEQ ID NO: 401133 - DNA, 122 bp, Homo sapiens
gagaagttttctcatcctctgggtctccactataaccccaacttgcatgccccaaagacacgcacacccttcccaaaaacccagcagttctctgtgagtctggtagaaagtccccattattt

SEQ ID NO: 401134 - DNA, 122 bp, Homo sapiens
aggaggatgggcctggccggggacccgtggaggatccgcctccagtcccgaggaggtccccgttttgtggctgtagtgatgtggcgtaaaagtcaagtcgtggacttttctattggcctttc

SEQ ID NO: 401135 - DNA, 122 bp, Homo sapiens
agtagctcctcagagctggaagtgaatttgatgaatgattgagttaagtggtggtggtggcgaaatttggaattttctatgcgtaccttatttaaatagaataaagctaccatatatgtcaa

SEQ ID NO: 401136 - DNA, 122 bp, Homo sapiens
ttccaaggcctggaaagtcctactgcaatggcactcatggaggagggagcctgggaagggcgtccctgggcctggaggtgtccaggtgtgaggtgcagccccactaccgctgggctggacgc

SEQ ID NO: 401137 - DNA, 122 bp, Homo sapiens
ctggtggcagggaagaaatctggttaagagattcagaaagcagaaaattctttttctctgcgcaagcagtccacaacagcatttagctaggatttataagattcttggtggagcaaggggag

SEQ ID NO: 401138 - DNA, 122 bp, Homo sapiens
tgatgtcctaatgcagaaaccgggccttcctgcagtgggccgggtcagctcggatctccgcgcggtcctgagtcgccgcccccaacccagccaaggattaatttaggcgagctatcccgccc

SEQ ID NO: 401139 - DNA, 122 bp, Homo sapiens
ggctccgccgctgacaccgctcgccccgcccaggcccgtgggccccgcccatcccgtgcgcgggcccagagagccgggagaccgcaactggaggccacgcccccccatcacgtcaggagagt

SEQ ID NO: 401140 - DNA, 122 bp, Homo sapiens
cgcgcctcttccagtgctttccacctcatttctggccgagtgcctcgagagggtagagggcgagaaatcctttgcctcaaacatcccctaaatgggtcggaaagatcaaagagaaacgtttc

SEQ ID NO: 401141 - DNA, 122 bp, Homo sapiens
aggacagatgagggaacacgtgatgccacgatgggggtgccaggatgaggtgggtgcggtcgcggacaggcgcacgaggagcccagcggagcgccacccggagcaggcgcggaggagggctg

SEQ ID NO: 401142 - DNA, 122 bp, Homo sapiens
cccatccgctgccagcttgggtagagacaaatccgattgtccacgtccacgttgggaaatcgcaggtagccccctgccagccctgccgagggctgaggagaaactaaaaaggaattagaacg

SEQ ID NO: 401143 - DNA, 122 bp, Homo sapiens
ggggtctgttctgcgcaatggctgctgagctgcagcgatggggtggacgccgaggggacccgggcagccgagaggcagcatgaggagggattgggttctgtgcatttccatggtgcagccat

SEQ ID NO: 401144 - DNA, 122 bp, Homo sapiens
aggccggagcggcggtccttctactcgacccccttccgcagcctgccgggagatgtagttcgttccgcagcaaatcacacgtgagaccagggcacgccgggaaatgtagttctagttgccgc

SEQ ID NO: 401145 - DNA, 122 bp, Homo sapiens
atctcacagcatctacaggccaaacccatagtacgtcagacggagcggcgagggccacctcgcagccctgcacagcctgcagacccagggcatgggcttctcacaactacagaaaacaactc

SEQ ID NO: 401146 - DNA, 122 bp, Homo sapiens
cgggaacagctcaggcaggcgggagttgctgcggcattagccaatccataagctctatcccgcctgggtgggctctgcggcgacgcgcgccaagaaggggtcgggagttttttggcgctcgc

SEQ ID NO: 401147 - DNA, 122 bp, Homo sapiens
tgagagacgcttcacacctgttatctctctccctattctctctccactcctactcccgcccggcagctccccgctgtcagcaccagaaatacccgctaagaatacgaaaagcaacgctggcc

SEQ ID NO: 401148 - DNA, 122 bp, Homo sapiens
cgttactcccaatatagcactgggtctgcatctaccccgtgatattgctcctaatattcacggaagaagcatctgatattactcccaatatcgcaggaagtgtacatccccatgtgagatgg

SEQ ID NO: 401149 - DNA, 122 bp, Homo sapiens
atgtgtgtggggaggagcaggaagccaggccgggtggggccggcaccgagggtagcaggtcgggccaggggaaggtaggccgggccccagaggagatgacgcagggcctcagccctctccca

SEQ ID NO: 401150 - DNA, 122 bp, Homo sapiens
caccgtcccattgagggtcagggattcaacactggaattctgggggggacacagacattccgtgtggagcacggacctggctacgggtgttccatgctgtggggcggtgacaaagacgtgct

SEQ ID NO: 401151 - DNA, 122 bp, Homo sapiens
tccgcggggacaatagcagccagtggacgggagcccgcaccacacagcagcaaaggaagccggaggagaggctctgcgggctctctgctccgtcagcaggaatgtcctccgggccagcagct

SEQ ID NO: 401152 - DNA, 122 bp, Homo sapiens
taatctcagtgtttagcttttcactatataaaccttaattaggctgggtgtggtggctcacgcctgtaatcccagcactttgggaggccaaggtgggcggatcaccaggtcaggagatcgag

SEQ ID NO: 401153 - DNA, 122 bp, Homo sapiens
aggaaaatctggtgagaccaggttgggggccttttcccgggcccacgagttactcccccccgcccacggagcaccttctgtccgggcgcctcccaggccgctgctgcttcttggttctgctt

SEQ ID NO: 401154 - DNA, 122 bp, Homo sapiens
ggttgcgactccgcgggaagagggaggccctgacttggccggggagtaggggggctactacgtgcggccgaggccgatcactttgtactcacgctctgcctccagctcgtcccgaagggcct

SEQ ID NO: 401155 - DNA, 122 bp, Homo sapiens
ccttgctcgtcctctactatgcactcagcagcagacgaatttttggaaaataactgaaaacgcacaccgtgataccaatgaattcttctgctgtctccgcgagagcctggctggaaattctg

SEQ ID NO: 401156 - DNA, 122 bp, Homo sapiens
aacttcccgagtctctaccccctcctcccagtgcaggctggtggaagattctccggggaccgtcccccttatcttcctcctgcatctatcagaatgtcctaccacaatttatgaccactcag

SEQ ID NO: 401157 - DNA, 122 bp, Homo sapiens
caaaatgcaccatcagtttggtgcaagaagcttatcttgctctcttggctctctcactttcgctgcttttccctgtgcctaaggtctcctgctgcctaaggtcggccacctaaggtctacca

SEQ ID NO: 401158 - DNA, 122 bp, Homo sapiens
cccccacccccatctccttttttgtcctgtccagctgcactgctggcactgtgtacactccgcagacacacgtgtctttcctgcctcccaggacttgagtgtcctgtcccatttgcctgcac

SEQ ID NO: 401159 - DNA, 122 bp, Homo sapiens
gggtcacagaaaagaaccgcgaaacccagcgattagtgttcagctcgattaggacgaacccgggcccttagctgcgcaggaacaaccgcaagcctctagcctgaacgggagcggcaatgggc

SEQ ID NO: 401160 - DNA, 122 bp, Homo sapiens
gaagcagtcatgtggatcagaggccaagagataattaagtggaaataagaactctatatccggcctctttggaaagaggtagcaaatcctcctaatcaattctgattcctgccggctttgtt

SEQ ID NO: 401161 - DNA, 122 bp, Homo sapiens
ctacaaaacccgaggtcatttggttaattccactgccgagctccccacggcgcatacccccggatgcttcggcccagccaggttccttgctaagggcaagttttacgaccttgggaacattg

SEQ ID NO: 401162 - DNA, 122 bp, Homo sapiens
ctgcacgctcgcacagcggagcagctaacctttaggacagcgcccggggcagagccagctcggagccagcgctgcacagctgtgaggggccggctttaggctcacaccgcctgtatctgaaa

SEQ ID NO: 401163 - DNA, 122 bp, Homo sapiens
tcctgccgtggggcggggtttccggttgtcggaggcgaggcttgtcggctgtcaaaggggcggcccggcccggcccggaagctacagcagcggcgcggagactgcggggcgggccatggcgg

SEQ ID NO: 401164 - DNA, 122 bp, Homo sapiens
ccggctgcgctgaatcgggctgcttttgccgccgccccggcagttgggccctgtttccgccggcgccctgggagaggcctcaccactcggctgggctccctggcccctcccttcccctggcc

SEQ ID NO: 401165 - DNA, 122 bp, Homo sapiens
aaatacagctcaacaacttcatccaactcaactgcagatttttcacagtctttaagtcaacgaattatcctggctttttctagagagtctttcacaaaataagattttattcctaacctcaa

SEQ ID NO: 401166 - DNA, 122 bp, Homo sapiens
ttagaaagtcatcactttgcaaccaccagtgtgataatcaactcaagtgaggattatcaacggatgctaaaatcaccggatggaaggtagctgaggaacaggatagccatggagtctcaaag

SEQ ID NO: 401167 - DNA, 122 bp, Homo sapiens
ccatgttgctgtggacccaattattctgctaggtcaaacatgcaaatctgcaggtaaaaacggtataggaaagtggggatgaagaggcaaggagcaagatctaccttgattagaccattact

SEQ ID NO: 401168 - DNA, 122 bp, Homo sapiens
cagttcttaaatagctcaccaagaatttacatgaaaataacaagctattaattggctgtacgttgttctttatatcataattccaggaaaggaagttcatgggtgaaggcagcgggtccgga

SEQ ID NO: 401169 - DNA, 122 bp, Homo sapiens
agaaggccaaagggccaggcaggccaggcccgagatggcaccctgcgactagctggagggcggaggaaggagaaggagggcccacaggctgggtccgaggcggcggcccaaaaagcacggct

SEQ ID NO: 401170 - DNA, 122 bp, Homo sapiens
ataagtccaaaatttaagaaaaatgaatctcacgatgagcttcctcaggcttcggccgtgcgtggaccagtcagcttccgggtgtgactggagcagggcttgtcgtcttcttcagggtcact

SEQ ID NO: 401171 - DNA, 122 bp, Homo sapiens
tgttttgcagagttgtgagagttggttcatcgggccatgaggacatgttgggacataccccgtgtgccgatgatggaggcggccgtggctgcccgagagatgcgtgacacccaggagtaatt

SEQ ID NO: 401172 - DNA, 122 bp, Homo sapiens
gggaatcgcccgggctcctgccttgggctggggggtctcccagaaggcccctttctgcagcggggccggcctccctccccgatcctgggatggcctgcgggatgatcccgcactcatctcgt

SEQ ID NO: 401173 - DNA, 122 bp, Homo sapiens
aaagaagatagaaatgaatgagaggagactgataacaggcgtgaacagaaaactacatcccgacacacccgtgagtgaaaggccaattggggaaattccaaacttagagagaacaaatggaa

SEQ ID NO: 401174 - DNA, 122 bp, Homo sapiens
atcgggggctcccgggccgggatcctgtggggcgggggcctgggacagacactcgggacccggcctgtctgcgccctctggcggtggcggggtggggggctgttggtgcgggagcgcctgcg

SEQ ID NO: 401175 - DNA, 122 bp, Homo sapiens
caaactgtctgaggcacgaaatgagagcaaaaagggagagagcaggaaagcgagcacaggcgagtacagtatacaaagtgttttgagtttctgactggcgtgccggaaagatcatgttagca

SEQ ID NO: 401176 - DNA, 122 bp, Homo sapiens
ttcatgtactccacaggttctctctccaccttcaatcgccatgatgagctcaccatggaccgcaccaactgatggcggaaacttaagtatttcttatttctcattaaaacattcagttaatc

SEQ ID NO: 401177 - DNA, 122 bp, Homo sapiens
caaacgctgcccaggattacccgccagctcacgccgcgcagtgcgcttttccgctcctcgcgccccaccaccaacattgttctctcaggactcctgggtcccaggggccggaattgggcctg

SEQ ID NO: 401178 - DNA, 122 bp, Homo sapiens
gataggctctctgttgcccaagctagagtgcctagaggctctctgttgcccaggctcaggcgatcctcccacctcagcctaccgtgtagctggggccagaggcttgctacaggcatttcttg

SEQ ID NO: 401179 - DNA, 122 bp, Homo sapiens
ctgttcctcactcaaatgaactaattgctgtctttcagttcctctaaaaaccttggggtccgtggcagggtgtgggcttaggactcacctgattacttgtcttcccaggtggtctctgggct

SEQ ID NO: 401180 - DNA, 122 bp, Homo sapiens
tgtcagtgacggctgtgtcaccatggccttgctatccccaggaaaacctaacatgcaccccgcgcctgtcctctgggactcccatcctcctcctttgtctgacccctgagaggcttaccgtt

SEQ ID NO: 401181 - DNA, 122 bp, Homo sapiens
acagagcattcacctcattctacctcattgccactaggtgggagtagaagttcagctccgcgcttggatccactaacaccaatcggggagagaagatggggtgctgactagcactgccttga

SEQ ID NO: 401182 - DNA, 122 bp, Homo sapiens
cgagtgtacaacccacatttgagtgacaaatcacgaggacaatcgacaaaaacaactaagcgcaaagccgcccgaatccatctccctctctgtgcgtgtgccttttcaactaactttgggaa

SEQ ID NO: 401183 - DNA, 122 bp, Homo sapiens
caccgcccaggaggagaagccaagcccgtgcggtcgctcagtgcggcagccgccgagcctcggcccacgcccgccctacctgtgccggaaagcttctgcaacgccacgcgcaggcgctgcag

SEQ ID NO: 401184 - DNA, 122 bp, Homo sapiens
tcacagagtatgtataaaacactcagccaagagcctggcacacagtaggtgtgaaggaaacgtttgctatctcactgccaggcaacacagtgggaaggaaaaccagtgccctacatgagtta

SEQ ID NO: 401185 - DNA, 122 bp, Homo sapiens
tcatcagaaaaagcagctgatgctaattcaccatctatcaagtttctcttcaccatttcccggagacagattaaagacatgagcaaattgtgctgatgcaagtgataaaatgtgtgtggggg

SEQ ID NO: 401186 - DNA, 122 bp, Homo sapiens
taagggtgccctaaggtcagggctggccctgagacaaattatgaaattatacaatatggccgggtgcagtgactcacgcctgtaatcccagcactttgggaggccgaggcgggtggatcaca

SEQ ID NO: 401187 - DNA, 122 bp, Homo sapiens
aaatcaccgccagtggggacaactacatctgggaagacagagatgccgctaggtctgttccgcagccggcagaatcttaggctgcacgtgccagatgcctaaactgtgcagcctgaatgact

SEQ ID NO: 401188 - DNA, 122 bp, Homo sapiens
tgtaccatcttccttgacccccagatctttagccttctatagtaccctgtctctttttgtcgtactagtcacagttgcactttttttttttttttttttgagacagagtctcattctgtcac

SEQ ID NO: 401189 - DNA, 122 bp, Homo sapiens
agcggtggggaggacgggaggtggaggccgcggggagtcacttcttgtctcccgcagagtcgcaggaggcggcgccgttatcaggtagggcgcccaggacgcgcgattcctgccagggccgt

SEQ ID NO: 401190 - DNA, 122 bp, Homo sapiens
gaaacctagaacctgttcagcagccagaactcctcttcgacgggatatgcattgcctgcacgcacacacagacgtccacagacacagcacgctcacacgtggtggctgatctcctatttttt

SEQ ID NO: 401191 - DNA, 122 bp, Homo sapiens
attgcttgaaaggccgggctgggagcgctgcggcgggagccggaggactatgagctgccgcgcgttgtccagagcccagcccagccctaccgcgcgcggcccggagctctgttccctggaac

SEQ ID NO: 401192 - DNA, 122 bp, Homo sapiens
atttttattttatcatcaacagccattctttagacatgaacatgcatacgtaatattctacgcacacatcacagcttttaacgttagttaataaaggttaaacacacaacatacatccttac

SEQ ID NO: 401193 - DNA, 122 bp, Homo sapiens
gtctggggtctttgagatgagggtcacacccaaccaggtgtctttagctgagaatggtgccgacatctcttcagaggtttcattggaaatgattctgtaacaggcggcatcaggtcaggatc

SEQ ID NO: 401194 - DNA, 122 bp, Homo sapiens
ccgcggccggaagtgctgggggcgcgcgggggtctcggaggcggggacaaagacccggagcggcggcgactccgccccgcagcaggaagaggtgtgagcccgggtcccgccgtgggagtcca

SEQ ID NO: 401195 - DNA, 122 bp, Homo sapiens
aaatcatcctagattctagcaggtctccaatggcaagatttccaaccttctcttcctgaccgttaaactcttttttaaaaattataatttagatgaaatacaaaagatacaaaggtagtatc

SEQ ID NO: 401196 - DNA, 122 bp, Homo sapiens
cggcgtggtgggcacctggcttggccaggctcgcaccgctgtgggcggcgtggtgggcaccggcttggccaggcttgcaccgcctggttgaccacaccatgggccctgggcaaattgccaaa

SEQ ID NO: 401197 - DNA, 122 bp, Homo sapiens
ctggacctggtcatggtcatcctgttcaagggcatcccgctggagagcaccgacggcgagcgcctggtcaaggctgcgcagtgcggtcacccggtcctgtgcgtgcagccgcaccacattgg

SEQ ID NO: 401198 - DNA, 122 bp, Homo sapiens
taaaataggccgggcgcggtggctcacgcctgtaatcccagctctttgggaggcctaggccggcagatcacgaggtcagaagatagagacgatcctggctaacacggtgaaaccccgtctcc

SEQ ID NO: 401199 - DNA, 122 bp, Homo sapiens
actgatttttgagaaatgtgaattagctacttgtaccccccgcgagccgggggtggcgggcggggacgtctgctcgtcagagtcattcaatgaagatatagccgtgttcgccaaacaggtca

SEQ ID NO: 401200 - DNA, 122 bp, Homo sapiens
ccgcgaccgcgcgtgcgcttacggaaacaccacctttcggaggcctcattggctgaaggtcgccgtcgcccaacgcaggccattctgggtaatgttcccacaggcgcacggcgggagagtga

SEQ ID NO: 401201 - DNA, 122 bp, Homo sapiens
tccctctagctctacaccctcagagagtctcctcccaggcagagaatgttttctttgtcacgtatttttctcccctctaccctccacccatccccccgcttcttctccccttctttctgtct

SEQ ID NO: 401202 - DNA, 122 bp, Homo sapiens
aaacccacattattctaaaaccaatgtggaaacacccaagataaatagaataagagtaaacggcaaattgtttatcttctgtgctctatgtgcatgtgtttgttggtgggggcttgtgtgta

SEQ ID NO: 401203 - DNA, 122 bp, Homo sapiens
tgagaatggacaggacacctggggtggggaaggggcacagaacccagacaccagcctggacgcaggcacctgggataatctcctattcattggaaagttcgagtctctgagcggggaacagg

SEQ ID NO: 401204 - DNA, 122 bp, Homo sapiens
tctccctgttggatggacaaagacctctttcagcttgggcaccgaggaagggaagcgtagcgtcagaacagagagtggatcacactgtcgggctcagcacgaaagactgacagtctgggcac

SEQ ID NO: 401205 - DNA, 122 bp, Homo sapiens
acagtgaagcggatcctacttttcccttctccccatgcagcccagcacccgcccccccaacgccacccttttagcgtcacagaaccgagttgccaagttctctgggaccgggagctgacctt

SEQ ID NO: 401206 - DNA, 122 bp, Homo sapiens
ccctgtctcagaaacaaaaagtaaaagtaaaattcagaaagatacatacaaggccgggcgcggattaaggcttgtgcctgtaatcccatcactttgagagaccggggcaggtggatcacttg

SEQ ID NO: 401207 - DNA, 122 bp, Homo sapiens
cggacgaaatcatctgttccaggtggctccccggggtgtgaccggagccgtgtgtgaccccgctgtcaccgttgtgctcctgcacatgctcccgggttgtattttgtggttttgggggaaaa

SEQ ID NO: 401208 - DNA, 122 bp, Homo sapiens
cgtggggcgcggagaaggggaggggaggcgcgcaggcagagaacagcatgtacgaggccccgcatcaggaaggcgcttggcacgttccaggaacagtgagaagccaggaaagcccaagtgta

SEQ ID NO: 401209 - DNA, 122 bp, Homo sapiens
gtcacaggcatcaagtactttacaaggtaatagaatatcacaaggcaagtggaggcagggcgagatcacaagaccacaggactgaggcaaaagtaaaattgctaatgaagtttcgggcacca

SEQ ID NO: 401210 - DNA, 122 bp, Homo sapiens
catggtcagtgtcatacagtttcgactgcactttcatagagttcatcttgtctccctctccgagctcaggccttagtggggcatgaggtgcgggtgggccaggcttctgggccacctggact

SEQ ID NO: 401211 - DNA, 122 bp, Homo sapiens
ccaggggactcagtaaacaagcagaaaattcttgtccctgggagctgtgcggggatcgtgcgtttggtgaggaattttcctctgtgcaagctggaggggaaacacagagattccaccctggt

SEQ ID NO: 401212 - DNA, 122 bp, Homo sapiens
gtgtcccactggtgggggtggacagttgggattccaaaggcagcatctggacctggagagcgtggatgggagttcaagtcccaactctcctgcttactggctctgagactggacaagcattt

SEQ ID NO: 401213 - DNA, 122 bp, Homo sapiens
ggttaaaaataactccggtatataaagacagcggagggtccccttgttcgctcactcgggcgccggccggctggacgcagggccgagcaggtggtttggggcctcgggaaggccaaaccccc

SEQ ID NO: 401214 - DNA, 122 bp, Homo sapiens
tccatgctctctggctgtgatgggcctacagactgacctttgtcaagggctggagaacctcggacggctgccaccaagccccaggcagagcctaaagatttgtcagggttgggggtggggga

SEQ ID NO: 401215 - DNA, 122 bp, Homo sapiens
cggagattttctatctgctctgtctctgcattgctgggtttccagctcccaacctaaccccgcctccccgaacgcggagacggaactcggcccccttgtttggggggcggcagccacgtgtt

SEQ ID NO: 401216 - DNA, 122 bp, Homo sapiens
gcgcctccacccagctgttagcatgatgtcttacctcaaacaacccccatacggcatgaacgggctgggcctggccgggcccgccatggacctcctgcacccatccgtgggctatccgggtg

SEQ ID NO: 401217 - DNA, 122 bp, Homo sapiens
tgaaataacccatccagacccctactaccctgtgaccttgggttaggcagtgactttgcccgtggtggccgtcactaaaatgggaataataatacgtttcacgtactgtaatcttaattaac

SEQ ID NO: 401218 - DNA, 122 bp, Homo sapiens
gccatcgcgcccactgcggggtcaggaatgagcggaggccgagcgcctgcaggagccgggcgctacggcactgaccccgggaagggcggggcgggggcggagcacgccttaaaggggccacg

SEQ ID NO: 401219 - DNA, 122 bp, Homo sapiens
acctggggtgaattaactgcaatgctgttggactggatttcctctctgggtaagaattcacgaaatggatggcctttacggtcaattccaagtctaaaagtctagccatccatactaatgga

SEQ ID NO: 401220 - DNA, 122 bp, Homo sapiens
cttcagcgtgtgaatggataagcaaactatggtgcattcaggtaacagaatattactcagcgctaaaaagaaatgagctatcagccatgaaaagatgtggggggtattacggccatattact

SEQ ID NO: 401221 - DNA, 122 bp, Homo sapiens
tcagacccattctttcctgaagtctgctaaaacaaattctactgaataatcattatattccgagtcatcaatccttggtgataaacttttgctgtctgtctcgaactgccggcttggtcagc

SEQ ID NO: 401222 - DNA, 122 bp, Homo sapiens
tgttgattagcttggatgagccgcttcttaggatgaggaattcaatccagcaggagatcccgcaggcctctcatgccccgagaatcgcacaggtgtgtttgggcggcgtactctccacgtgt

SEQ ID NO: 401223 - DNA, 122 bp, Homo sapiens
gcatggcagcgttcctgaatcacatctctaaagccgctcatggtatctgcatccttcgtccgtcacaaattttgtgaactatcatctgtttatcttttctgctttcttgtgcctcccttgaa

SEQ ID NO: 401224 - DNA, 122 bp, Homo sapiens
ctgggaagccctggctaagacactttgactctcttggcctcactttcctcctctgcaaatcgctgcctgagatatagtgatttataataagaaataatgtacttggtctttatcctggttta

SEQ ID NO: 401225 - DNA, 122 bp, Homo sapiens
ccactcaacaaaccccttgtacctctagctgtaataagtaacaagcagtatcctacagggcgcctcggtgcccaggagcggatgcaaaggcgctgggcgggcacaaggcagcgccaaggaca

SEQ ID NO: 401226 - DNA, 122 bp, Homo sapiens
gaagctgaggcgggaggaggggaggtactgtgtcaaggtcaaacgttgggtggtgccaggcgacagaagccaggcctttgagaggcaaggctgtggtagaaatgaaaggggaggtggtgggt

SEQ ID NO: 401227 - DNA, 122 bp, Homo sapiens
aaactcctaatagaatagagaatagatcaattgtagcaattcgtttcgaagcaaagacaacgcatggtggcgctgcaggctaaggcttcaaaaaaaggaaaaggaaaaagcccatgaaatgc

SEQ ID NO: 401228 - DNA, 122 bp, Homo sapiens
atttcaagggcgaatggagcccggatgctggcagcccctcctgcccagcgccttggttcccggggaattgagccttggctgctggctcagcctcctctgaaaccagcagcccagggttgcct

SEQ ID NO: 401229 - DNA, 122 bp, Homo sapiens
ccacctccgccggtcctcgcggttggtcaggcctcggggggctgctcggtgcccagagggcggcccatcgcccgactcggtggcgctgcccctaccccatcccggcgcgggcccggcgacgc

SEQ ID NO: 401230 - DNA, 122 bp, Homo sapiens
caataggcggcgactgatgcgacttccatcctggcggggaaggaggttccctagtcggctcgacgcttcaacaccatggataggagtccccccacggcctcggcgatggttttccgactgac

SEQ ID NO: 401231 - DNA, 122 bp, Homo sapiens
tcatttagtacgcctctgtgatttcccttagtttattatttttctgtgtcaggatcttgacgtgactcggtgcatgtcgctgtttgtgtgacattgtgtatcattcttggggtgtgtatggg

SEQ ID NO: 401232 - DNA, 122 bp, Homo sapiens
cccgcgcacacgcacaaagactcacgcgacattgtgtgaagctgacgccggcccgggcagcggccaggagtccagcggcaggactgattcgctagggggtacagacttcttaggaccgcaga

SEQ ID NO: 401233 - DNA, 122 bp, Homo sapiens
tggagatagcgagagcaacgaagagaaaacattaattacccggtattagtattaatacggcggctccattcccacatggacctgggggggacaaacaaagtctcctaatcttggacagctgc

SEQ ID NO: 401234 - DNA, 122 bp, Homo sapiens
attcttattcatatatattcattaaccacaactttatacattgaccaagacaaacaaccacgaaaagatttgtcctctaagtatcctgcttttgaaggttctatttcctttcatcttagagt

SEQ ID NO: 401235 - DNA, 122 bp, Homo sapiens
agaccttcttaccctaacctgaattggaggacaaccagtgaactaccccttcactaccatcggacaagtagcatccgtactatacttcacgacaattttaatcctcataccagccacctcct

SEQ ID NO: 401236 - DNA, 122 bp, Homo sapiens
gtttaaaataatttcattcacaaaatgaccctagttgttagagacatttgattcttttcccggaggccctaggatggtcaaggcgggctgcaggaccataactctcaaacctcactgcgggg

SEQ ID NO: 401237 - DNA, 122 bp, Homo sapiens
gatgttcggcccagggctgcgggacccgcccccgccccgccccgccccgccccgccccggcgaggagcctggaaacagacacccaccgcccccagccgcgcgcacacacccgggctcatgcc

SEQ ID NO: 401238 - DNA, 122 bp, Homo sapiens
caagtaggggactcctccaggtctgggcctggtatctcacagtagcgggtaaggcaggcccggcagaagttgtggccgcagtcgatagtgaccggctccctcagggtaccctgacagatggg

SEQ ID NO: 401239 - DNA, 122 bp, Homo sapiens
cttttgtaaattgccccgtctgaggtatgtctttatgagcagcgtgaaaatggactgacacgcagactctctgcagagtcccgagacggcacggaggatcacacggggaggggtcgagtgtg

SEQ ID NO: 401240 - DNA, 122 bp, Homo sapiens
cgagagctgcgcggagggccattggtttgctaatgccctcgagttgaaaggcgcgggcggcggtttatagggaaggattgtaattagaggacaaattgccccgctgccccgcagctcgagaa

SEQ ID NO: 401241 - DNA, 122 bp, Homo sapiens
tctaacaacgcctcctcctctagggaggccccgcccaaagcccctccctaccccaattaccggtaggatctgaaactctggagttggcatttccacccgttattctgaatgctactctcaat

SEQ ID NO: 401242 - DNA, 122 bp, Homo sapiens
tcctcctcttttccttgccagcttccttctttttttctctgactgaaagggctggacaaccggggaaaaggaaacttgtgctttccagcatacctctcccactctacacacacacacacaca

SEQ ID NO: 401243 - DNA, 122 bp, Homo sapiens
gcactgattgcagcgaaccctccagactgggcatcacgcgtgcccgtcaggagcagcagccgctgagactgtgattctcctgcagctgtggggaaacagaagtccagtgtttatccagatgc

SEQ ID NO: 401244 - DNA, 122 bp, Homo sapiens
agtcactggattaatatgtcttctcttctagtcactagaggtccaggaaggcagaagccacgcctgttcaattttctgtcctcactacctagcagattgcctgccatcttcacagataataa

SEQ ID NO: 401245 - DNA, 122 bp, Homo sapiens
ggaccggctgttccatgagctcattcctaggaaacagtggctgagtagcagaagcctgaccggtctccatttccgcccaaatgtgggatgtgtgcacgtggcatagagcctcgcacgttgct

SEQ ID NO: 401246 - DNA, 122 bp, Homo sapiens
aggaatgcgcatgcagatgaggcgggcgggcgcatgctaatcgcatgcaaatgaggggcccgccgctgccgcggcagcgccgcagcttcccggatccgagcccagacggcggcggctccggc

SEQ ID NO: 401247 - DNA, 122 bp, Homo sapiens
ctatggggctgctccgggaggtggccgccaggggggcgcagtgtctcggaacgcgaggaccgcggggccagctggcgttgccaggctcgccgccgtggccgttgccaggtgacccgccgctg

SEQ ID NO: 401248 - DNA, 122 bp, Homo sapiens
cgcctggattccagccacatgtccatccctcccgcagggcttcgagtaccaggagcagagcgggcagtgctgtggcacctgtgtgcaggtcgcctgtgtcaccaacaccagcaagagccccg

SEQ ID NO: 401249 - DNA, 122 bp, Homo sapiens
ccagacttctcagggctccaggagcatgagcttctatggcttcctggtccaatgttcccccgaggcagtgatgttgaaggtagaacagacaagacaacttggataaacaactacataaaaat

SEQ ID NO: 401250 - DNA, 122 bp, Homo sapiens
ccagccgtcggtgagcgagctgtcccgggccgtgcggaccaacatcctgtgcaccgtgcgcggctgcggcaagatcctgcccaacagccccgcgctcaacatgcacctagtcaagagccacc

SEQ ID NO: 401251 - DNA, 122 bp, Homo sapiens
ggccccgggagtcggctcgggctaagctggccagggcgtctccaggcagtgaaacagaggcggggtcggcgggcgattagcggccgaggcacgctcctcttggggcgggctgggcgcccctc

SEQ ID NO: 401252 - DNA, 122 bp, Homo sapiens
agaataaattctggaggtctttgtacagcatggtgactgtacaaagttagttaataataacgtgtcatataattgaaaatcaccacactcacaagtgataacttgagacgatggggatgtta

SEQ ID NO: 401253 - DNA, 122 bp, Homo sapiens
gaatgaagtggactatattatccaacattccaataaggtaaaataatcacaatgatttctcggttttggaaaaaacatttctcttattctcctacattattaagattttttaaaaaacaaga

SEQ ID NO: 401254 - DNA, 122 bp, Homo sapiens
gcctatcgcagctgcggactgacctggcctagttaggagcccaatgagaggcggcaattccgtagtggaggcgggctctgggagcaacggccccgccccttttgggggttcaccgaggttgg

SEQ ID NO: 401255 - DNA, 122 bp, Homo sapiens
acttagaatttagtaacgcaaacctctggactcagtgcataaacaggaaacaatacgtttcggtgggcccatttgtaaacttcccagctgtgtctctgtagacacagcacttaaaaaagtta

SEQ ID NO: 401256 - DNA, 122 bp, Homo sapiens
gccggcgttctgtgtggaggcatcgcacgagctctgcctctgtctcaacacggcttctcccggtgtgcacgtctgtgtccaaatgtcaccctttcacaaggacaccagtcgtccgggagtag

SEQ ID NO: 401257 - DNA, 122 bp, Homo sapiens
gttcttttttaaaggatcaacatttcacgcatcaacagttatacgtgaggtattgtgccacgtttgtgaaattaaagatgagtaagatcaggccctgtctccaaagagcgttttaatcagag

SEQ ID NO: 401258 - DNA, 122 bp, Homo sapiens
ctgggtccggtcgccaggactgtctctgaggcagaaacgccggctgggcgccggggaggacgatggccccgaccctggcagcgagaggagaccaggaggctaggaccctggccgcgcttggt

SEQ ID NO: 401259 - DNA, 122 bp, Homo sapiens
ccctgctcactcaccaagggtccagggcgccctgtgtatcccatggggccagggggtccacggagcgccagctaggggagcagggggacagcagagctgagggacaggcagtgggaaccccc

SEQ ID NO: 401260 - DNA, 122 bp, Homo sapiens
taaagttgttcagatgtctgtctccaatcccgaggatccagtggctgatgcatatcagagcgtgagagctggcgaagtgggagcggagcgccaggaaagcctcagggcttgtactcatcctc

SEQ ID NO: 401261 - DNA, 122 bp, Homo sapiens
tcatgttgaattgtaatccttcatgctggaggtggggcctggtgggaggtgattggatcacgaggtggatccttcatagcttgatgatgtcctcatggcagtcataagatcaggctgtttga

SEQ ID NO: 401262 - DNA, 122 bp, Homo sapiens
gacagggagttagcaaagctgagaaagtcgggaaaggaatcacgtccgtcgcgctcctgacgtggctacacacggtgcatccaattccgtcgagttgtcatttacaacacacctgcagtttg

SEQ ID NO: 401263 - DNA, 122 bp, Homo sapiens
ggttcctgcggcacccctggaagaactggcctacagacggtcgcttcgcgtggctctggacgttctgagcgagggctcgatttggagtcaagaaagctctgcagggacaggtagagctgacc

SEQ ID NO: 401264 - DNA, 122 bp, Homo sapiens
gattggttgctttccacaaccagtcagacaaattgtgtgccaagtcttcatttgcataggcgtgtaactttataacttcaatttatcctctaattggcaattagacatttgcatgggtataa

SEQ ID NO: 401265 - DNA, 122 bp, Homo sapiens
ccctcgagtcaaacccagttagccgggacaacactgagcccccagcccctactacaaccccggcttaggagggaaaaagacgctagtaaacacccgcctttctgccttcaggaacccgacca

SEQ ID NO: 401266 - DNA, 122 bp, Homo sapiens
agggtgcattttagaacaggttttctgctttggtcttcacatgtcagtatgtattggggacggagcagcacgctggcaggttataaagcttcgaggttcaattatttttgtctcttaccatg

SEQ ID NO: 401267 - DNA, 122 bp, Homo sapiens
tcacagcttgagactattttatgtcttctgtctctgaatttcattcactgtccaccattccgttctctttcaaagaaaatttaacagctctgaacattcaaagccacttttaaagcacctgc

SEQ ID NO: 401268 - DNA, 122 bp, Homo sapiens
gagggccgagctccccggtcttccaaaatgggtgctcaggcctcggcccgcctcccctcgcgtccccctagccacagtgaaggagttgagcgcccacacctcctatgaaacacggggtggag

SEQ ID NO: 401269 - DNA, 122 bp, Homo sapiens
gtcctcgtttatgccacggcttagaagattgtccttgccatctttagcaactgtctcagccgtcacttattttcactcgtcttacgaggaccaacctgccgactttctcgtcacgggggcat

SEQ ID NO: 401270 - DNA, 122 bp, Homo sapiens
aagaccaggccctcacggagccctcactctctgaggaggaacaataagtcagagagcgcgcgagtgcagcccttcaggcaaaggatttcaggcccaggtcaggaaggccttgtctgaggagt

SEQ ID NO: 401271 - DNA, 122 bp, Homo sapiens
gccgcgaagacgtgggccccggcctgggcctggcgccctcggccaccctcgtgtcgctgtcgtccgtgtccgactgcaactccacgcgttcactgctgcgctctgacagtgacgaggccgca

SEQ ID NO: 401272 - DNA, 122 bp, Homo sapiens
attgtgttagtgggtaaaaccggagcaggaaaaagtgcaacaggaaacagcatccttggccggaaagtgtttcattctggcactgcagcaaaatccattaccaagaagtgtgagaaacgcag

SEQ ID NO: 401273 - DNA, 122 bp, Homo sapiens
ctcctgcagggttgagaggaccggcggggcgaggtcggggcggggctcgcaggacctgggcggggctcgcaggggctgggcggcctgggggcggggctgggcggagcgcgcagccgcgcagc

SEQ ID NO: 401274 - DNA, 122 bp, Homo sapiens
ccgtatggtttccgtgctcagcagccagcagcgacggcgtccacggccacaccgcctccccgcaaggcacctggcgctaggcctcagcccaatgtcacttgttaaccttccgatcccccgga

SEQ ID NO: 401275 - DNA, 122 bp, Homo sapiens
gtcgccacctaggattactgcatgttcagctacgacctcatcaacatggctgctggaagtcgtctacaggaaaaagaaagaaatgacactgaaggatcacttccgcttccgttggcgcaagc

SEQ ID NO: 401276 - DNA, 122 bp, Homo sapiens
gctctcggggctgctgcagggggcccaccctgagccagcccctcggtcccacagccctgacgtagaagactctttgctggtaaatctcggaactcactggaagcttccacaaagtttaactc

SEQ ID NO: 401277 - DNA, 122 bp, Homo sapiens
attattacagctcactgcagcttcaacctccctggctcaagtgatcttacctcagcctcccgagtaactgggtcgacaggtgtgcattaccatttcaggctaatttttgtatttttttatgg

SEQ ID NO: 401278 - DNA, 122 bp, Homo sapiens
aaaggatttagaaacatcgtgattcggaaaccacgaagccaacgtaaactgctcagactccggcactactgtcaaacactactggcaaaccaagacccctcccaaacgccatctgaggtaaa

SEQ ID NO: 401279 - DNA, 122 bp, Homo sapiens
ggagctacagggagagaaacagaggaggagactgcaagagatcattggaggccgtgggcacgctctttactccatgtgtgggacattcattgcggaataacatcggaggagaaggtaaggga

SEQ ID NO: 401280 - DNA, 122 bp, Homo sapiens
tgcgccagggcggccacgcaggccaggcagaccacgtggccgcaggacaggttgcgcgggcgccgctgctgccggtggccaaacttctcaaagcacaccttgcactcgagcaggctgatctc

SEQ ID NO: 401281 - DNA, 122 bp, Homo sapiens
tcccctctcccatcactagggtgcccacagattggtgccacctgcacgccgcacgggattcgggtttccccgggtgtcacctgatgttcttccgctccaggatcccacccaggaaacatgac

SEQ ID NO: 401282 - DNA, 122 bp, Homo sapiens
gccccaccgtccgtcattaaaagccactccgagacaccagagaataaccagcaccccttccgccctcccgacgccactcgccgcccccatccattttcgcagcagactcgtccctaacccca

SEQ ID NO: 401283 - DNA, 122 bp, Homo sapiens
gggagaggtcaaagcagggccctgcctcgacctgattcccatggggactccaagaacacccggcctgcgggccccaccccagtggctctgggactcccaacttccacccaggccagggcagc

SEQ ID NO: 401284 - DNA, 122 bp, Homo sapiens
tgcattatgtcaaacggtgagcattactcagctgccagaatttcattgtcagaacctcatcgaggtaggctctgttcttttgtccaatgatggcaaggaagaaaagtaccctgaccatctgg

SEQ ID NO: 401285 - DNA, 122 bp, Homo sapiens
ggccacatggtaacactgtgcttgacttttttgaggacctgccacactgcttcccacagccgctgcagcagttttcattcccgccagcagtgcagaagggtcccattttgtcctcatcctca

SEQ ID NO: 401286 - DNA, 122 bp, Homo sapiens
tgccggcgcctttctgaatcagagatccgtttagaaaccatgaaagctgcagacccctcccgggaaaacgcacacaccctcctggagctcgccttctgcagccgctccgggagcccgcccct

SEQ ID NO: 401287 - DNA, 122 bp, Homo sapiens
ggtgagaggtgacatcgtgctggcagccctcgctcgctcttggtgtctgctcggcctcgacgcccactctgaccgtgcttgaagagcccttcagcccgccgccgcactgtgggagcccctct

SEQ ID NO: 401288 - DNA, 122 bp, Homo sapiens
ttgggaaagtttgtgtttgttgctggcaaagcgccggatgggaggcgcgggcgggcgctgcggttcttcccttctgctttcgggaagcggtcggggctgcacactcggatcggcggggccgg

SEQ ID NO: 401289 - DNA, 122 bp, Homo sapiens
aatacatcggaccataaatattgtattccattaattatcaccccactggcttatcctgggcgccggcgtcctcgagcgacgcagggcaaatgaggacgcttcctgagcatatttctaggctg

SEQ ID NO: 401290 - DNA, 122 bp, Homo sapiens
tgtcgctgcggtcgccctcctccaggaggtcgtcagacgtgtgccagctgccgggtgctgcgggggcgcgtctggtcagggatgccctggagcccaaggctcacccaacagccagcctcacc

SEQ ID NO: 401291 - DNA, 122 bp, Homo sapiens
agcacccgccaaagacagctcattctcttccttggggtgctgggggacacgggcgcccctcgggggcaggaggatcccagcgggaggacactgggcactgcgtgaagtctcccctgggagcc

SEQ ID NO: 401292 - DNA, 122 bp, Homo sapiens
cacacccaggtgggggaggaggaagccactgcatctgttggctcagggccccagcctgtgcgagcagggcgcctgggctgttgtgtctcctgtctgtgccgatctctattaaaggactccct

SEQ ID NO: 401293 - DNA, 122 bp, Homo sapiens
atgctgggggagagtgcctaatgtgggagaccaaatagggatcaccaggctaatggggggcgtcagcagctttctctccctcctatcttggcctgttcttttttgttttttgagacggagtc

SEQ ID NO: 401294 - DNA, 122 bp, Homo sapiens
cagcccagggcccccgagagctctgggagcccggggcaaatgctagaaatttgcttagaacgtccgggtcccacggaaggcgcccttgccgccctctctcgggtcgtagctccctgacgctg

SEQ ID NO: 401295 - DNA, 122 bp, Homo sapiens
tattgttcttgactctgggcctgtccctgtaaccaaagccaatgagttgggggcaggggccggcacaggctgcaggccaagggggaaagctgccagaggaaatttcacagggtaaagaggct

SEQ ID NO: 401296 - DNA, 122 bp, Homo sapiens
tggtgggaggtggatcccgacactgacccagcctccccccacaagtcagtcacccctccacggggttcacacctctccaggccctgtcacctcaacaatgaagggtggcggctccgagctct

SEQ ID NO: 401297 - DNA, 122 bp, Homo sapiens
gcaagggtatccaaaggctgtgagtgctatgctggccgttctccaaacacagggagctctcggcagtttaagttgaaactcacagccctgacattttaagccatagcagcgaaggtccagac

SEQ ID NO: 401298 - DNA, 122 bp, Homo sapiens
attatctcccatactgagattcagactacagcccagatttccagactcccaatgcagtctcgactgttctcctttccaactgctatctatgcatgattaagaggtaggtcatataactgcca

SEQ ID NO: 401299 - DNA, 122 bp, Homo sapiens
ctttctttccaaccaaaactgtagagacaaagacacatttccactgcaactaagtaatcccgaagtttctccataagccaaatttgattgagctaatactgacctttccacaggcacagctt

SEQ ID NO: 401300 - DNA, 122 bp, Homo sapiens
cgaaccgatccgctacgctattcccgaggagctggacaggggctcgctggtagggaacctcgccaaggacctggggtttggcgtgggggatttacctactaggaacctgcgggttattgcag

SEQ ID NO: 401301 - DNA, 122 bp, Homo sapiens
ctcgcctgcccggcttaagctccgttctggctgggaatcccaaccgaacctggggtctcccgcaacccggctcctacccgcagcgccgcgactcccgcgggagggggctagagggcgagggg

SEQ ID NO: 401302 - DNA, 122 bp, Homo sapiens
cgtcacggtagggcagagcaagcctgccactgcaggcgccgcggaaggaggcgggctgtgcgctcgggggagggagctagaaagcgccttgtgtgccggcggccgccaggcgtctggaccgg

SEQ ID NO: 401303 - DNA, 122 bp, Homo sapiens
aaattctcagctctcgtggctgtggccgccctatgcactcttcccagtggtggacacaaacgttaatgtacttgttattatttaaggacacaaaaatatagaaggtggcatttttcgctttc

SEQ ID NO: 401304 - DNA, 122 bp, Homo sapiens
gtagcccaggccggtgaggttgagcctggagccggcgggcacctccagcatgctgccccacgcctggtcgcacagcatctcgacctcggccgagtagaagaggcccccctggccggcgtggt

SEQ ID NO: 401305 - DNA, 122 bp, Homo sapiens
gtgttggtttcaactgaaatgacattaagctatcgtggaggtaaaggagaggggttgagccggtcaggaatccaggcaacctgaccctatttgccagtgtccgcttttaattttggtcgcta

SEQ ID NO: 401306 - DNA, 122 bp, Homo sapiens
ggaccgcgggccaagtgtccacttcacctctgatggactgcgggccagtccttcatagggcgtagccaactgggggcctctcgagggcacccaggggtgttgccaagttctttagcttaata

SEQ ID NO: 401307 - DNA, 122 bp, Homo sapiens
agaccctcccaatgcccttccatcccaaccccagctgcatctgcctatggatccccagctcgcctgggctctgtagcttctctcagtagaaaggattcttccatggctggggtgagcgggct

SEQ ID NO: 401308 - DNA, 122 bp, Homo sapiens
aagatctcccggcacttgtcacactggtccttcatccgcaggcagcccgtggagttgtggcggatctcccggcacacagtccggtcatcgtcgccttctggggacacacgagggaagaagag

SEQ ID NO: 401309 - DNA, 122 bp, Homo sapiens
aaccctcctgggtatggtggaggacgagcgccacctagcgggcatccctctagggttgtgcgtacttttatggggaggtactggaataagtagtacacgaaacggactgttttgcttctagt

SEQ ID NO: 401310 - DNA, 122 bp, Homo sapiens
ttgacagcacatttgtttagagtggcagctccttgcaagcaaggcccagtctcatcagatcgagactccgaatacgtgctcaatgccacagtgcatgccttgaccctaccgctggaggggag

SEQ ID NO: 401311 - DNA, 122 bp, Homo sapiens
tgttaagctaaaaataataaagattataagaaattattgaagtagaattgggaaagtccacgactctgagactgcttttaatgcaataaagcattcacttgctataatattttattgttttg

SEQ ID NO: 401312 - DNA, 122 bp, Homo sapiens
ccccttctgtgccttgggatgccggagctgggggacctggaggcccatcagccggagccacgtgaaaggtactgaagaaagctgagacccggctgtgaggagcgcctcagcggtgaggtggt

SEQ ID NO: 401313 - DNA, 122 bp, Homo sapiens
gtctccaagtcatctttgcagaggtaggggctccgtccaggacccacaaggcagaccaggcgtcctgcaccctttgggtccccacttctgaggcaggcagcccaggcgagaggaaggaaggc

SEQ ID NO: 401314 - DNA, 122 bp, Homo sapiens
gataaaacatccttttagcagcaatctgataaatatggtagaatccttttaaccaacttccgcttaaccaactgtccagattaaccaatgagctccattccccttgtaaatcatactgactg

SEQ ID NO: 401315 - DNA, 122 bp, Homo sapiens
aacatgctgcccttcattttcacttgctatcttcctatccatggtcttgtttggagaaaccgactaatgttgcaggatgctaaagctggtagacctctccttctggctcactatgtctaagc

SEQ ID NO: 401316 - DNA, 122 bp, Homo sapiens
tggcaggaggatcacttgaacccaggagttcgagaccagcctgagtggcatagcgagactcgagtccctaaaaaataaaaagtgccacatgcctgcctgtagcctgtagtcccagctatgtc

SEQ ID NO: 401317 - DNA, 122 bp, Homo sapiens
gccgccaccgggttcctccacctccttcccgatctcaggctggagaagtggtgcaggggtcgctgcgaaaggagaggagcgtgtatgacgccacatccggcgcgcggcggaactggcctcct

SEQ ID NO: 401318 - DNA, 122 bp, Homo sapiens
gactgttcccagcccctggccttgcccggtcaatatcctggtcagtcatcattggagtggcgcaccccggccctgagctcctcgaacacagagccacatggcgtgggtccgtggctcagcgt

SEQ ID NO: 401319 - DNA, 122 bp, Homo sapiens
acccgctgccccccagcgttggcgtggttgacaagaaagaggagacgcagccgcccatggcgcttaagaaagaaggaataaaagaattaacctaaattaaaaaaatgcaaaaattagccggg

SEQ ID NO: 401320 - DNA, 122 bp, Homo sapiens
gtggagtttagaccactcctcccggcgccgggctcagcccgccttcgccttccctctccccgcggaaccccttctcgtcgcccgaagaaacccgaaggtcttcggcaagttccgtccccagc

SEQ ID NO: 401321 - DNA, 122 bp, Homo sapiens
tgcttccataaagtctaagagaccttgtcaaacgtcccattgtcactggcaggcaggactcggacactgagattaaaggggcccaccgttcccttcacagaaccagcatcttcactcaccgt

SEQ ID NO: 401322 - DNA, 122 bp, Homo sapiens
caagaatgggtactaggcttaataccttcgtgacaaagtaatctttacaacaaacccctgcgactcgagtttaccccataacaaacctgcacgtgtgcccctgaacttaaataaagggcgcc

SEQ ID NO: 401323 - DNA, 122 bp, Homo sapiens
attagggtcagttctccactcaggggtccaccttctttataggagaatatcaatcttcagcgagggtcttaaaatgtcaatcattgcctgacccctgctacatccaacacgcccagtgactt

SEQ ID NO: 401324 - DNA, 122 bp, Homo sapiens
gcctctgggtgctggaaggccagcgggccacgctgcggtgccgggccctgggtgaccccgcgcctaccatgcactgggtcggtcctgacgaccggttggttggcaactcctcccgagcccgg

SEQ ID NO: 401325 - DNA, 122 bp, Homo sapiens
gctcaggcacagaggctgggccatcaccaaggtgcggaggcactcggggctcctcctggccgcctcactcctgaccaagcagggagcatcctgcttgcatcgcgtctggaattctctgaaaa

SEQ ID NO: 401326 - DNA, 122 bp, Homo sapiens
tctgaggcctgaattacagtatgatgggccgtcagaagtcatgaagatcatgggtgacaacgtcggtcaggccctggcacagtgcctggcacagtcatgacagccaatctttagacccctca

SEQ ID NO: 401327 - DNA, 122 bp, Homo sapiens
aggggagggatcaccaggacctcagattgctgggggcggaggggtggacgctcgtgagtgcgaagttcgggtgtcacttgggtgtgtccagtgtctacaagtgggaatcctacggtttcaaa

SEQ ID NO: 401328 - DNA, 122 bp, Homo sapiens
gatattcttcctaatatccaaaaaggaaaagaatgatattactcccaacagcgtaggaaacgtgtccccgcgctgtggtatctttcccagtatccaggtggggagaggatcatattacttcc

SEQ ID NO: 401329 - DNA, 122 bp, Homo sapiens
agccacgtggggaggagcaaaacccggaggtcccgggcaccttgggcagagccagagcggcgggagccggtcctgggcgcgttgccccgggagcgcccgtcgtccgggcagagcgcagccgc

SEQ ID NO: 401330 - DNA, 122 bp, Homo sapiens
ttaaagttagactttatgcctttattagatgagcttgcacatgaaaataatggctgagctcggttccctgaaatgagagtgaggcagccatacctgagaaatgcagaaaaaatgttactagg

SEQ ID NO: 401331 - DNA, 122 bp, Homo sapiens
ccaaaaggattaagagaatcaagcccttcctctactcactcctccaaagagtaaaacagacgctggtaaatatttgtttaagaaagatcttttctgataaccaaactggatgccttttcaga

SEQ ID NO: 401332 - DNA, 122 bp, Homo sapiens
accttggacttcaagtcccaggaagcaacgcgtgtccgttttccgggcgccccgccgcggcgccgtggttcccagtgtgccccgctgttgttattccttttatgtgctcccagccctcttga

SEQ ID NO: 401333 - DNA, 122 bp, Homo sapiens
ctcccgccagctgcccctcccccaggactgctggaacacggaatgcggggctgggggaagcgcctggggaactgcgaagccccaaattcacaccaaggagcctcaggctcgctctccagtcc

SEQ ID NO: 401334 - DNA, 122 bp, Homo sapiens
tcttgtcgcgtgctgacgtcacatacgtgcttatgcataggcgagggccacatgcatcctcgtttttgctttctaaagcagcgcatcaggccacacctctgagcttcctcttgcagttttgg

SEQ ID NO: 401335 - DNA, 122 bp, Homo sapiens
ggccagcatgacctgaaagccaggcccggacgagggcactgcaggaaaacccgagacccgcgcccctccagagcacaggcacaaagacccccgatcccggcaagccggccccggtagccaag

SEQ ID NO: 401336 - DNA, 122 bp, Homo sapiens
ctgtcaagactcagcactagcggccgcttcacgaggccccgcaactctggagaacgcagccgacgctctcgagtgtatggaggagccctcaagtttctgcagctcagcacccaagcctggag

SEQ ID NO: 401337 - DNA, 122 bp, Homo sapiens
tttcaggaaaagttttaaaaaggaaacagaagggcgttttaagtcagacaaggaagggaacgtaatgaggcaccacagactcgagaaatcagatcccatgtttttgggggtctggatttatg

SEQ ID NO: 401338 - DNA, 122 bp, Homo sapiens
gctcgctcggggtgctgagtgagctggaggtggccgtgtccacagagttgcgcttgctgccgctggtggaggaggtgcaggacgctcggcgcggccactctggtgcacggatgttgcgccgg

SEQ ID NO: 401339 - DNA, 122 bp, Homo sapiens
tgaaggtggagcaggccaagtacgtcagcatgaccatcaaaggcgtgacctccgaggactcgggcaagtacagcatcaacatcaagaataagtatggcggggagaagatcgacgtgacagtg

SEQ ID NO: 401340 - DNA, 122 bp, Homo sapiens
ccaagaggtgctctggaaagggctgatgcaggctggctggtgtggggccaccaggcaggtcgccaaccatctccttggcgtcagcggctggcaggctccaggaagcctgaggccagctgttc

SEQ ID NO: 401341 - DNA, 122 bp, Homo sapiens
acgaaggtgctgggccctgcaggctgcggtagctgaccctcgtagggactgctgctcccgcgagtcatggcctttgtccttgtagacgcggccaggttaaaaaacaaaaacttccaaagttg

SEQ ID NO: 401342 - DNA, 122 bp, Homo sapiens
aatcccacagcctcccagggctgctgtgagaatcaggcagcgcgggaggcgcaggcagcgcgggaggcgcaggcagcgcgggaggcgcaggcagcgcgggaggcgcaggcagcgcgggaggc

SEQ ID NO: 401343 - DNA, 122 bp, Homo sapiens
ggggaaggggctctgttcagggaccagaatcggagtgtgggctgggactccattgagaggcggaacatgacaggagacggtggagcagcgaaaagtttgttagaagacagggttccacttcg

SEQ ID NO: 401344 - DNA, 122 bp, Homo sapiens
gttaagaagtcaaagaaaaagttggaagacagtttgtggactttgcatatctgggctttccgggacgtaggcctgtgtcccatccaagacactgctcacgtcttagcctgattacctggccg

SEQ ID NO: 401345 - DNA, 122 bp, Homo sapiens
ccaggccattgagcaagaagaaggtggttgcaagacccagccttgttaatcagcctttagcggatacctctcctagactggtgctgatcctctgtggtcagccttctgccactgtggacaca

SEQ ID NO: 401346 - DNA, 122 bp, Homo sapiens
tatttctttttgggggctggatgtgttcctggcagggccgatgatggatgcgcccgccgccgcccgcctgcccgccagctttccctcccgctcattcccgctccgcttcaacgcagccctga

SEQ ID NO: 401347 - DNA, 122 bp, Homo sapiens
agctgcttcccctagtcaggccgcggcgtgggagggcgagaccccgagcaaactttctagcggcttcggcccgagggtggtgacgcccggggctggtcgcggcggctgcggcagcgggctcc

SEQ ID NO: 401348 - DNA, 122 bp, Homo sapiens
gctaccgctgggtgcagggcgaggacatcctgagcctgcccgagggcaccggtgagcaggcggcgtcggggaaggaggcacaaggtctcgggaactgctgcggggctaggagggcagagtta

SEQ ID NO: 401349 - DNA, 122 bp, Homo sapiens
tgcgagatgaaaatgaagaagagagagagggaaataaagaaaaagaggaagaagaatatgcgacaaaacttgtatgtgaccagcaaagttaaacattcattttggctaaggacagatggaat

SEQ ID NO: 401350 - DNA, 122 bp, Homo sapiens
ctacaaaaggtaacaataagtactatctcagtcacagtgatactgggggaaagggtgcttcggactccccttgattcacatacaaattcctgagtggagagaacggttctagtctttagtcc

SEQ ID NO: 401351 - DNA, 122 bp, Homo sapiens
tcggagaggcttcgggaggacgcggctgccccattggccacgtgcccggtcatcacctctcggaggccaacacgggaaactgaggcgtggaggagccctcctaagccccacagctctgggat

SEQ ID NO: 401352 - DNA, 122 bp, Homo sapiens
aggtggggtggaggcgcctaaataatattgtgccccgcccccagctgcccaattctctctcgaacctgccatcgtcccgggcttcagaatccactgggcttggttcatcatggtttaaggtg

SEQ ID NO: 401353 - DNA, 122 bp, Homo sapiens
ttgatgacgacagcatgacttcagagtctaatgggacactattcccaaagttctagttaacgtcgcaaaaatctgacctaattcttacaggttcaaatgtctgggctgctggtttgtgtaac

SEQ ID NO: 401354 - DNA, 122 bp, Homo sapiens
cactgggaagcattatttgctcacacaatgcctgaccacatgtgcaagccattaaaagggcgtagctcccctgccattttgatgcagtccaaaataaaaatataaatgccaatggaacagtt

SEQ ID NO: 401355 - DNA, 122 bp, Homo sapiens
cccaagccggcatcctcccactctcagcatctcctgagctccctctgtgtgacaggccggcggttcgcaacctcgacgcacattggagttacctagagagctttaaaatttccctgtgtcca

SEQ ID NO: 401356 - DNA, 122 bp, Homo sapiens
cccagatccagcgccggtggtaggagccgtagctcgactacagtaattccccagctcgggcggcttgaaactgctcgggctgaatagcatttgctgttccgtcctgcggccgcctcccgccg

SEQ ID NO: 401357 - DNA, 122 bp, Homo sapiens
tacagagagagactcaccagcccccgacccccgggcagcagtaaagcgagctgggcactgcgcctagaatcccagttcttaccccaggatcagaagcgcgctctgcagctgtccccgcacct

SEQ ID NO: 401358 - DNA, 122 bp, Homo sapiens
ctggcctgggtgtcagacgacagcgcagcactttaaccaggatccgggtgtgaaacatgacgcggctgcttccttcccaagctctccgctgctgggaatgatgacaccccctccctggggtc

SEQ ID NO: 401359 - DNA, 122 bp, Homo sapiens
ccccgtcgcctggaaaggtgagtggatctcgaagagaccgacggcctcgacctggcggggcggtggcctcgacctggccgggcggcggcggcggcctcggcctcggcctggccgggcggcgg

SEQ ID NO: 401360 - DNA, 122 bp, Homo sapiens
cttggtaagaaaaagcggatgagaagctttttttggaaaactattccggaggagcaagttcgaggcaaaaccaacatctggaccttggcagccaggcaggaacatcactaccaaattgatac

SEQ ID NO: 401361 - DNA, 122 bp, Homo sapiens
tatcctcccaactgcaagggctctagtagggggtgccctctcctcccctcaatacggtgccgttgttttgaaactcatcgtctcccctcgacacagcaagagtagtggatacacacatgtga

SEQ ID NO: 401362 - DNA, 122 bp, Homo sapiens
gagatgatcatcaccaaacagggaaggtaatactacatttttggctgccgctgctctaggcgcagccggggacaagtgcacctaggctgtgactgccgcggcagcgacgatttggggtcggg

SEQ ID NO: 401363 - DNA, 122 bp, Homo sapiens
gagagtgactctccgatgagtcacagctgcttctttgctgattggtatggccacaaggagcgtcctcttggccctcgtggtccttaacttactcttctatgttccaccaggtaaaatggagt

SEQ ID NO: 401364 - DNA, 122 bp, Homo sapiens
ctgcctcgtcggcatcggaggcgctgacccacatgactacagtgccaggggccgcggcctcggacactgaggccttgtaatgctgttggctgaagagaggtggttggtcattgaggtcagcg

SEQ ID NO: 401365 - DNA, 122 bp, Homo sapiens
tgtgtaaatctaacaaaacatgcaagacttgcaagctaaaaactatgtaatgctggtgaacgatatcaaagaagatctattcagtctctatctatgtggagagaaatactgttcatggattg

SEQ ID NO: 401366 - DNA, 122 bp, Homo sapiens
agcaatttggaaatggcttaatctgagcctgtgagatacccatgtgtttagaaagaatgtcggatggactgttgaatacccaactctgccaggccttgctagacataaggatatggagctat

SEQ ID NO: 401367 - DNA, 122 bp, Homo sapiens
gatgcttgccgctccccacccgcgctgaaatgtgggcaccatgagggcacgcaccctgtccgtctccactgctgcacccctagcccttatacatagctgggcacggagagataccttatcat

SEQ ID NO: 401368 - DNA, 122 bp, Homo sapiens
cgccggtctcactgtgcgcgcaggtggggcgcgtgccagaacagggcctgggggtcaggccgagaccggcgggcaccttcaccagggccgcccgtggcgttcccccagcccctctgccgcgg

SEQ ID NO: 401369 - DNA, 122 bp, Homo sapiens
gctcacacgctaagcagaagtaggagcaggttcgccaggctgtgtggatgcaggtggtcccgctccacaccacatgcgtggcctcaaaagaagaaagctctgtgcttagtcatgttctgtcc

SEQ ID NO: 401370 - DNA, 122 bp, Homo sapiens
cacagcacacgcaggaatgcagaaggcagttggtggccccagtgctaagcttgtgggggccgccatccatcccctcggccacgggctccgaggcggcctcctgggtggcgaccgcagagtcc

SEQ ID NO: 401371 - DNA, 122 bp, Homo sapiens
gtgcttagctctctccctcctgacctctgggcagccagtcatcaaagcagagagacgtggcggcatgtgggcagcatgcccaggttccttgctgactcagcacttatttctgtagttttaaa

SEQ ID NO: 401372 - DNA, 122 bp, Homo sapiens
aggccctgcctttgccgtgcaggcctgtccgaatgcttccaggtgaatggggctgactaccgcggccaccagaaccgcactggcccgcgcggggcgggccgcccgtgcctcttctgggacca

SEQ ID NO: 401373 - DNA, 122 bp, Homo sapiens
ttcatgaaatttcagctttaaagtgttggcagaagcagagattcttgagtcttttctaaccgatgcatacttgaacttgaaataatcaattctttctttttcataaactgctataataatca

SEQ ID NO: 401374 - DNA, 122 bp, Homo sapiens
tgtcaagcaacagcgtccatttctgtacttctttgaccccatgcatttgggattaggaggcgcgaccgcctgggcttctgggcttctcctggtgaattttgttgaacgtttcaaagtcagtg

SEQ ID NO: 401375 - DNA, 122 bp, Homo sapiens
tgcagaggatgccttctccgggacagattggatgttggagaaaatggatttgaaggagttcgacttggatgccctgttgggtatagatgacctggaaaccatgccagatgaccttctgacca

SEQ ID NO: 401376 - DNA, 122 bp, Homo sapiens
tcgacagcgcgctgctgcctgcagtccgccgggcctgagcacacccgaggctcccacctgcggagccgctgggggacctcacgtcccagccaggatccccctggaagaaaaagggcgtcccc

SEQ ID NO: 401377 - DNA, 122 bp, Homo sapiens
atataaacatatgtgagacgtatctgtcaacttatcctttgatgggttccacccataccacggtttcaaaggaaaatactatcatctctgtgttgcaatggccgggcaacatcattctgccc

SEQ ID NO: 401378 - DNA, 122 bp, Homo sapiens
gtgcaaacgaccatcggcggcaggcgagcggtacgcttggcgtccgggccttcctgggcccgtctgaggaaacttgctgctcgaggccaggctgcctaggacctgtcccttttttctatact

SEQ ID NO: 401379 - DNA, 122 bp, Homo sapiens
ggctgaaagcagccgcatttacagcctcagccagggaaaagtgccttcagtgcagacctgcgtgggcctccgcaaacaattcccaggcagcgctgcggggctctgggacttgggaagggccc

SEQ ID NO: 401380 - DNA, 122 bp, Homo sapiens
cggatcgccatggagacatactacgaggaggtgcgccgtgctgggcggcggagcggagggcgggcaccgagctgggcggcggggcggagggcgggcaccgagctgggcggcggggcggaggg

SEQ ID NO: 401381 - DNA, 122 bp, Homo sapiens
gtctatcttgctgtctttccctggcttacccagagcacctgccttggtgtaatcctccatcgctgccacatggaagtgttttttcccttcctaaacaagttcctcttctggtatggctgtca

SEQ ID NO: 401382 - DNA, 122 bp, Homo sapiens
gagggcgtctttcgggacctgtctctcctgactgcactgaccttttccttttcccaaggccgcatgagtacttaagctcatcggttgtgaaaacaaatctgatgaggtatcgaaggagccgt

SEQ ID NO: 401383 - DNA, 122 bp, Homo sapiens
gtgctctacagactggagctgcacgaaggcgaccagcggactaccgttcctaggaggcagcgcggcggtgcgcctacggctcccggcagcccccgcgcgccattctctttttgagttcgcgg

SEQ ID NO: 401384 - DNA, 122 bp, Homo sapiens
ctgccccccccaacacccttccctgctgcataccctgtctgaagtaagaagctctcaagccggtcaagctgacccttggcctcagagccaaaatcctcagggtgagaggccagccaggttga

SEQ ID NO: 401385 - DNA, 122 bp, Homo sapiens
agcccccgccccaaggcccccaccaaggcccggcgagtcagcagtaggcaaatatcacagcggaatttattgttttaagaaagactacaaaaaggtagaaaacagctcggcacactagacta

SEQ ID NO: 401386 - DNA, 122 bp, Homo sapiens
cactcccacacttctattcaccttccaagcacatccagaacctgaccatgttgcccatctcgccctccctgccccatgacaaccacccctagatgttcggcagctcccatctgggcagacag

SEQ ID NO: 401387 - DNA, 122 bp, Homo sapiens
tacatattttcacgtgtttcaggatcgaaaccatgaaaagtcatgtgcgaaaggctcccccgcccctgccttcgtccactctcattggccacagcccggaatgagacatgattggattcttt

SEQ ID NO: 401388 - DNA, 122 bp, Homo sapiens
cggaacaagctgagacggtgcgtttaagcggcaggtggctactcagtgtcgcatactatgcggaaaataggtttggttcccggtgttgtggggcctgaagttacaaactttgggaagctcac

SEQ ID NO: 401389 - DNA, 122 bp, Homo sapiens
gcctccgcacccggtcccagcgcctgcgggagggctgacttgcccgctctgcgcttcccccgggcaggcccagctgtcgccgcaagtggaaatgtcagaacgccctacatatctaaagatcg

SEQ ID NO: 401390 - DNA, 122 bp, Homo sapiens
cccaccgccgcgcctccgggccccctcgccgccggcacaccgcgctctgattggctggcgcgatgggtccctggcacgcgcctatggatgttgttataagaatcctcgcgtgccggccctca

SEQ ID NO: 401391 - DNA, 122 bp, Homo sapiens
tatttgccgcagctgcagcttgctgctgaaataagttggctggatacaccccccatggaacgccgtaatactgaggtggaaccactgctggacctaaaccccacacccgacccccgaataaa

SEQ ID NO: 401392 - DNA, 122 bp, Homo sapiens
cccctctcctgtccaggagcagggcctcctcctgctgagagaggaaggctgcaggctcttcggttactgctgcatagactggaaagactgacggagctgcctgcacagctaagtggcagagg

SEQ ID NO: 401393 - DNA, 122 bp, Homo sapiens
gtcttcaatacccgtgacgtcgctgcccatatatggactgaggaacagggctgggccaggcggcttttgccgtcacatggctgatttgcatacacgggctcggccgcgcggactccgccggg

SEQ ID NO: 401394 - DNA, 122 bp, Homo sapiens
ctatgctggctatgatgagagactccttctgcttgagaaaaggagggggaagagtaaagccgactttgtcttgaagcttaggtaccatattggccacagagggatagagaaccaagtgggct

SEQ ID NO: 401395 - DNA, 122 bp, Homo sapiens
tgaggctggtcaaaccaagggggcttgtttggtgggatctggtcgtgtggcccggggccccgggggccggcagctgcaggatcctggacccctcctggagcttcgtactctgaagagccagg

SEQ ID NO: 401396 - DNA, 122 bp, Homo sapiens
gactgactgtgccttgctgcaggctcgacacccggcactgcccagtgtctcatgcaggggcgctcaggctgtgaataaatggggcagacaccgcaggacggccagagcgcccacggggaccc

SEQ ID NO: 401397 - DNA, 122 bp, Homo sapiens
aaatcgccacctgttaatttttgatcccctattagaggtgttatccaccaactactaacacgaaggtcactggtcctcaacccacatttcaccaccagggcagtcgggcctagctgatgacc

SEQ ID NO: 401398 - DNA, 122 bp, Homo sapiens
ggtgggccatgggctacccggccaggtttatggagtacctactatgcgctgctagtgcttcgaggcttttaatccctacctgaggcaatccgagaagttattttcaactatgagggcagaga

SEQ ID NO: 401399 - DNA, 122 bp, Homo sapiens
actgagcatccaggacagaagccaaggcgcttggcttggttgaaggccagtgcgcatgcgcgagtttacccttcgcggactgggcgagctcttgccactcctacctccgggcttcagtcttc

SEQ ID NO: 401400 - DNA, 122 bp, Homo sapiens
tcctgcctgctcattggcttttagggaggtgcagagtcctttaggacagagcctgtggtccgggtattgctcataggcagattctcaagctccccaaagttacattttctctggaactctcc

SEQ ID NO: 401401 - DNA, 122 bp, Homo sapiens
tgcacgcacatgtgacaccggctctgacatgctgctgactggacgcttgtcccgatgggccgccagctgcggcctccaagaagctcctgggcgcccccgcccgacccgcacctagggagaac

SEQ ID NO: 401402 - DNA, 122 bp, Homo sapiens
cgggtttagaggccgtacgtttgcgatatagcccaatagcagtcgttatggtgggggaggcggggcgagacctacgacgccggcgagcagtggccgttacggccgaaaagatggcggtcttg

SEQ ID NO: 401403 - DNA, 122 bp, Homo sapiens
cccggccgggcaggtccagacgccaaggtctgcacaggggtcacccggacacacctgactcggaccatgtggctaagtttgttttgaaatttcactgccccagcgtaacccagagtccaggc

SEQ ID NO: 401404 - DNA, 122 bp, Homo sapiens
ctcgaaaaaaaaaaggagtgaataaacacgaagattaggccctgtgacccccaacacacacgcacacacacacacatgcgcgcacacacacacacacactcctttttattttgagatagagt

SEQ ID NO: 401405 - DNA, 122 bp, Homo sapiens
tgggagggacatggttcagcccctaggagagggcagcatctcccatacagtggctcctcacgtgctcctggctgtgccatcggcccccctggtttccagagctccaggcctgggcaggtccc

SEQ ID NO: 401406 - DNA, 122 bp, Homo sapiens
attacggccggaccagggaatcgggattccagcatcaccaccaggagctgtacccaccaccgcctccgcgccctagctaccctgagcgccagtatagctgcaccagtctccaggggcccggc

SEQ ID NO: 401407 - DNA, 122 bp, Homo sapiens
agctgcctggactgggcctggcgctgccttcaggcctggtgtgatccgggcgcactggggcgttgacagtcattccggcaccggccacgcagctctccatctgcccaaggccacgctcctga

SEQ ID NO: 401408 - DNA, 122 bp, Homo sapiens
tcgacctggacagctgtggtgaccatcccccacatccttcagcacagagagagcagcagccggcacctgcccccttcgagctaggggctggggtcccgggcgccctaagaccccccgacctg

SEQ ID NO: 401409 - DNA, 122 bp, Homo sapiens
gctggagggcagaggctgctgtcctctctcttgtaaacaaaaaggccaagccgcagtccccggccaccaggacaaacacacactcccgctgcgagggcacccccatgcagcgtgagcacggc

SEQ ID NO: 401410 - DNA, 122 bp, Homo sapiens
gagacagctgttcatcctaatgaggatgccagcttcgcggcgtttccgctgatggagacccgcggagggagcggaatgttccagaccaggcagtggtgtgcggcgaggaggtgctgcactgt

SEQ ID NO: 401411 - DNA, 122 bp, Homo sapiens
agtgtctgaacttggggaggaggagctgaagttggaacttgttgggagaagagctctctgcgtcttgtggacctagaatggaagcatttcagtgggccgtctggtggaagccctgtccttgt

SEQ ID NO: 401412 - DNA, 122 bp, Homo sapiens
gcacggagaacctctttctctttgacaccagctttgtgtgggcctgatgacacgtttggacggctctatttctttgaaggccaacctcagaggcccacggacgcgtcgggcactgtccgtgg

SEQ ID NO: 401413 - DNA, 122 bp, Homo sapiens
catctagtgacagctccatcacactacaagccttgtctttgacacctggagtctgaggctcggccttcaaattttcctcaaggaatgtgtcaaacagtccttttattccccctcggataaca

SEQ ID NO: 401414 - DNA, 122 bp, Homo sapiens
cattagccaacctcttttcatcccccttctccaattatgccatttgtttagactatgaaacgtatatagaaagaatatttatctttctatatcaataaaagttggtttttactgttaagggt

SEQ ID NO: 401415 - DNA, 122 bp, Homo sapiens
acgcctcctggccccggcacaggctcccgctccaggcaggccccgactccggacaggccccgcccccagcctccaggttttgcctcccgagaggccccgccccacgccgcccggccccagta

SEQ ID NO: 401416 - DNA, 122 bp, Homo sapiens
ccacccaacatgtattgaacaagggcttggaggtcctttctctaaggccgcaccgataaacgattaccgactgttgacctcacggccccttcgcttccggccgcaccgcctcgctgcccacg

SEQ ID NO: 401417 - DNA, 122 bp, Homo sapiens
gccgaggaggtccgggtgaggagcggcaccctgaacttcccgtcttgtcgctgcaggccccgcagacagacccaagctctgggacagacgcccagcgtcccagacagcgccttcctctgggc

SEQ ID NO: 401418 - DNA, 122 bp, Homo sapiens
ggtagctcccctttcccgcctgctctgctggatgctgggtttcagtccaggtccttcgggcgccctggaaccctcttccgctccccgacctgggcctgtcatgggccactttagggccctgg

SEQ ID NO: 401419 - DNA, 122 bp, Homo sapiens
gcggcgccccggcacccctctccctccccggcgggctccgcggagcattgtactcacatccggggctgggttttgctttaatgcgaaacgtaattaacccggaaaaaagagccgagggacgg

SEQ ID NO: 401420 - DNA, 122 bp, Homo sapiens
aaatttgtccgctaatggcgcaggcgattatctgcggggcgctgagtgttgtgtgtcctgcgggcagggccggagttacaagcgccaggaatccagacggtgtttggagagggggggcggcg

SEQ ID NO: 401421 - DNA, 122 bp, Homo sapiens
tcctctcacctagggcaagcactctcaaaatagtccctgcccatgggacctgcatgctggcgagagggggagacacccaaatagggacattacattcatttaataatatgtattggctggtc

SEQ ID NO: 401422 - DNA, 122 bp, Homo sapiens
ctgcacaggtctgggggccacatagcccacctgcatgtgctggccgtgcaccgcgccttccggcagcagggcaggggccccatcctgctgtggcgctacctgcaccacctgggcagccagcc

SEQ ID NO: 401423 - DNA, 122 bp, Homo sapiens
ttggttgatactttatcagtgatataatgtcatttaaatgagcattactttgagaggtttcgacttaaggggcaagtttcactgttaactcttaattttttagtagtcagatgtttatgtgt

SEQ ID NO: 401424 - DNA, 122 bp, Homo sapiens
ttctttcttcctctctaccctctggcctggggacaccggtgctggagaagaccctgggaacgggcagaatctgagccgcgtctctgagtcgcagtgggaaggcggctcaggaaatgcgccct

SEQ ID NO: 401425 - DNA, 122 bp, Homo sapiens
gcaagtcttggaaatctggtatttacacttaaagcacatccaattcctactagctgctaccgcagtgggcggcacaggtctaatcggtatacaaataactgacccaaggcaaactgagaaga

SEQ ID NO: 401426 - DNA, 122 bp, Homo sapiens
tgagcaacagtttccaaagaccttctctgcagcccgagcctgacgggtatccagggtaaccgcgagggggcggagcttcgggttaggtcccggcgaggttcttcccgcagccaataacgagc

SEQ ID NO: 401427 - DNA, 122 bp, Homo sapiens
cccaccgttggctgccttggttcagcaacagtgactgtcacacggagccctcaggagtcgcgctgacaatgggtgggccctgccttcaagttccacactgtctgtttgtgtcattacaacac

SEQ ID NO: 401428 - DNA, 122 bp, Homo sapiens
tgggcaatatggcaagactccatttctacaaaaacgaaaaaatacccgggcgcgatggcgcgcgcctgtggtcccagcaattcaggagaatgaagcgaggatcgcttgaacccgggaggtcg

SEQ ID NO: 401429 - DNA, 122 bp, Homo sapiens
cagtactatatacagctgaccaaagaaccagagagaaggaaataaagatactaatcaatccgaagcactagcggagaggccatatgcggagccatcctctgaaatgactcaaataaatttaa

SEQ ID NO: 401430 - DNA, 122 bp, Homo sapiens
ttggtgctctgggctcgcagggttgggaaggggctctctctgccccgggccacgtggttgcgggtggggcccaccggagtctcatcttggactgcgtgctccgcatccctggctggctggtg

SEQ ID NO: 401431 - DNA, 122 bp, Homo sapiens
ccagcggctgctctgcggcgggagacccgggcaccgtgcggtccctgcagctcggccgggcggagcaaaaccaaacccgactggtgccccggcccagcccactactgcgcaccttgcggccg

SEQ ID NO: 401432 - DNA, 122 bp, Homo sapiens
ccaccggcgctgcgctcgatttcttaccgggccttagctgccttcccgcggtgcagggctcgggacctgcatcccgccatgcctaagcctcccaccgcctccatgggctcctgtgaggcccg

SEQ ID NO: 401433 - DNA, 122 bp, Homo sapiens
aggaagccggagcgcagatacctcgattgcaactcctctgagtcgacgccggcctccccccgcggctcccagcgtccacacacaccctcggccccccagaccccagccatctccccgggccc

SEQ ID NO: 401434 - DNA, 122 bp, Homo sapiens
cgccgtccccgcccgcacaggcgggcaagcagccggagagaagcggcctagcctgccccccgcccccgagccacccaccccggccagaggcgccgccaccgcccagccaccccgacgcgcac

SEQ ID NO: 401435 - DNA, 122 bp, Homo sapiens
tggcgggtgcgcgaagtagggccggcttgggagggcgccggggaggcggggccggctgggcgacagctgggagggggaccgacgccttcccggacagcggaggtcggggcgccagccacctg

SEQ ID NO: 401436 - DNA, 122 bp, Homo sapiens
aatactgggtagtctgtacatttggtgaagggccacttgcccacaccctacctggtggcccgtctcctgccccagaaactaaaaaggttcacccctggcccacagaaaagctggccagcccc

SEQ ID NO: 401437 - DNA, 122 bp, Homo sapiens
ggactcctctcctctcagctgcaaattccgacccacgacggcccaaggcacagaccttcccgccggtactctccccaagaaatgagaaacagaaatatacagaagctccacttcctagtccg

SEQ ID NO: 401438 - DNA, 122 bp, Homo sapiens
ggccgggtgcggggggtccggggatcttcctgaggccctggcggggcgagtttccagcagcgcgcgtctgtgtggagtccgttttgctgcccggggcctggggaaggccgtttcggggctgg

SEQ ID NO: 401439 - DNA, 122 bp, Homo sapiens
acattttccaatctgtatggtggctgtcttctatggcagaaggttttggggaataaatagcgtgaaatgctgctgacacttccctgtgcatctcccacatggctgccaagtgccccttcctg

SEQ ID NO: 401440 - DNA, 122 bp, Homo sapiens
tctccgcgcgcgcgcccagggcctcatggcctatcgttgggctcgcagatcacctgggggcgtgtgcttgctctggaaatggtaagacttgccccgccccatagccagagcaggatagtgtt

SEQ ID NO: 401441 - DNA, 122 bp, Homo sapiens
gggcctcagtttccccgtgtctcgagtgggagcggctccttgcacctgtgaggtgtttaccgctgccagcgtaggtgctgcccagttatatcagttgacatcggctgttgggtggagcctca

SEQ ID NO: 401442 - DNA, 122 bp, Homo sapiens
ggccctgccctcagctgcatgccaccctcatatcccacccccatccccagcctcctgccccgacacccccaggctccctgctctggttgaagtattttctccaaggcaggaatgagtccttg

SEQ ID NO: 401443 - DNA, 122 bp, Homo sapiens
cgtgccctctcgcctctaactagagaacgcctcgcggtgtgagtgaaactctggcggcctcgctaacacgccaaacctctgtcctcagaatacgaagggcaaagtgtgtcccactcacgcgc

SEQ ID NO: 401444 - DNA, 122 bp, Homo sapiens
cacagcgacatctaaaggccggcaagtgcaatgcagaatccacccagggaactcgggccccgcgcctacccccggggtaaagggggccagcctcgcacaggtgggtccgttgcaggcgtctg

SEQ ID NO: 401445 - DNA, 122 bp, Homo sapiens
gagcgcccctctgtgtgtgccgggcaggtgtcctgcgcaggctgggaagcggggccccgacggaagctgggatgaggatgatcaagaacaacaatagccatttattgcacttaatcgttgtg

SEQ ID NO: 401446 - DNA, 122 bp, Homo sapiens
gagcctattgaatctcttgtctttataaattacccagtctcagatagtacagggtgagaacggattaatacagaaaatatatgttgaaatcctagctacttgagaggctgagatggaaggat

SEQ ID NO: 401447 - DNA, 122 bp, Homo sapiens
cttaaagctgggtcgggcaggctgatgtgaaaagtagttgtcggtggcgcggagaaggcacgctcttagctggagctaagggctggttccgggaaggacagggaatgcacccttgggccctc

SEQ ID NO: 401448 - DNA, 122 bp, Homo sapiens
gttgcagggcggtaacgcgcgcgtgtggccacgtgtgatggtgtgaggcgtctgtggcaacgtgggctgttgtctgtcacagtgtgtgtgaccgagcccgtctggtgacagtgggtgtctct

SEQ ID NO: 401449 - DNA, 122 bp, Homo sapiens
cagcttggtgttgctgcagccacaggctgctcactcctaacagtgacacacgacaacagacgcaacagcgcagtagagagcacgcatcacccaacaggagcgtgaggttcagacacaacggc

SEQ ID NO: 401450 - DNA, 122 bp, Homo sapiens
ttaaccaggggaccagctgggctgctgtgatttcactttcgcagaaaatgaaactgaagccgtggtcacgtgacaggacatgtagtatatagcaggctgccagcgactcctgctcttgcttc

SEQ ID NO: 401451 - DNA, 122 bp, Homo sapiens
ggaggagaggatgtggggtaccaggatggttcccttcaggtcaccccaagcccttctccccggagccagggagaggagcatgtcaccaggatcctcgcctggggtgggcggggggtgtgacc

SEQ ID NO: 401452 - DNA, 122 bp, Homo sapiens
ccggggacagctgccacccttctgtggtgccggcctccttcccgccatgcaccatgcccacggcacccagatggtggagccgccgccggttcacactctggggagttttcccagcaacaggt

SEQ ID NO: 401453 - DNA, 122 bp, Homo sapiens
agaggattcggttgcaatatgctgggaaaccccaatttgcattgtcctaagcattcaaagcgagggcaaggaactcctacactgtgttgttttcattcagatagaaatgttcaagacaaaac

SEQ ID NO: 401454 - DNA, 122 bp, Homo sapiens
cgagccccagagcgggcggggaggcggtctccgcagtctcctgccagagaggcgtgaggccgcaggcaggctgggccctgctgctcactccgcaccgcccccaacttcagccctgccttccc

SEQ ID NO: 401455 - DNA, 122 bp, Homo sapiens
ggcgctggggtggggtttctttgtgtgcggaccagcggtcccggggggaggcacctgcagcgctgggcgcacaatgcggacagccccacccagtgcggaaccgcgcagccccgcccccccgc

SEQ ID NO: 401456 - DNA, 122 bp, Homo sapiens
accggagcaggaagcgtcgccccatccagccgtcggtgtgctcgccagctcggaggccctcggcgggccctggccagacccgttgtgatcttcagcctgtacacagatgtgtcgtaggcctg

SEQ ID NO: 401457 - DNA, 122 bp, Homo sapiens
ctggccggcgtggtactgccagggcaggtggttgtagaggccgggcgcctcggggtgcagcgccagcaccctggcgtacacgatggtctcggccagctcggcgcggcagccctcgctcaggg

SEQ ID NO: 401458 - DNA, 122 bp, Homo sapiens
gcgtggctttcagccaaggggcgtggccattgcgattgggcgggactccgaaacgagggccgcaatcagagaacaccgccaggacttccaggacttggtctccaggactgaggtcaactgac

SEQ ID NO: 401459 - DNA, 122 bp, Homo sapiens
ttgtcctcctgctgccgggcctgcttgcccctccccctccggtacctctactccgggacccgcacctccggcagttcattcaggatccgtagtctgcccctaaccacccaccgtcttggctt

SEQ ID NO: 401460 - DNA, 122 bp, Homo sapiens
gatcagtcatttttctatcctggaccaaactttgcacctttcttttttaggaagcttgggcgggagcggtcggggggtgtgcagaaagctccagggttaacgctttcagggctggggcggaa

SEQ ID NO: 401461 - DNA, 122 bp, Homo sapiens
aagaggccctagacacccctgtggtttgttcccctgagtgaccactgggtccccgcagggcgtctgtgaggagctgacctacgaggagatcagggacacctaccctgaggagtatgcgctgc

SEQ ID NO: 401462 - DNA, 122 bp, Homo sapiens
aaacagcccggctgctgcggcggtggcggtggagacatgtgcaagcgagggggtggggcacgtggccctgcccgagccaagggaaggcgctcgctcagcactgcctccacccctccccagca

SEQ ID NO: 401463 - DNA, 122 bp, Homo sapiens
ccggatccctgccattgagcgagtgcgcgggctccagatgatcccagccaggatccctgccgccgagcgagtgcgcaggctccagatgatcccagcccggatccctgccgccgaacgagtgt

SEQ ID NO: 401464 - DNA, 122 bp, Homo sapiens
tagtagaagccttgggtagtgagttgagaacatggccattagaagatcacctgtcaataccgaataaatgatgatttctaagcttgttagaggaaaaaagcaaaacaaattgtcataggtct

SEQ ID NO: 401465 - DNA, 122 bp, Homo sapiens
atttgtcgagcactaatccacgtctgtaaatcccgcaaggaggacaatggaaaccagccccgtgtgccatttctcaaaaccttcgagggcaaagtgatcctcactcctctcagtatggaagc

SEQ ID NO: 401466 - DNA, 122 bp, Homo sapiens
aagagaaatgcttaccacaaaattaagagcgtcaaccatttggccgggtgcagtggctcacgcctgtaatcccagcactttgggaggccaaggtgggcagatcacctgaggtcaggagttcg

SEQ ID NO: 401467 - DNA, 122 bp, Homo sapiens
gtgtttatggaggaaggggcccacaaagtcaagtgttttcaggatccataaaaggcataacgcagccatcactcattcattcacaaatctttaagtgctctggaagacatattttgtttcct

SEQ ID NO: 401468 - DNA, 122 bp, Homo sapiens
ggcgggacgacctgggcgggtgagagctggacctgcctggccgggctgatgggatagcggcggactccgccgccgtcggcccttgctgcagcagggcgccatgtgctggagcgcgcctgcgc

SEQ ID NO: 401469 - DNA, 122 bp, Homo sapiens
gcaacccactttcccatcctgctgcaggttcatctttgctaagatgcttcttagaagcaccggtttgctttgctattatgtgctaggcaacgacactgaaagagatagcacgtggctgcgga

SEQ ID NO: 401470 - DNA, 122 bp, Homo sapiens
tgagaatttcattctagtgaagaattaagtaacctgttttctgtgatccaccagaaacaccgatcacgtgtacaaaagatgagaaaatctgggttcatggttgtaagtgagataagaaaaat

SEQ ID NO: 401471 - DNA, 122 bp, Homo sapiens
aataaagcaaaagctcatttcactcacacctcagggggccaacctctgggatttagggtgcgggtagcggtcgaggcttcgaggaccggaaggggcggggcggggccggtcactcaccactc

SEQ ID NO: 401472 - DNA, 122 bp, Homo sapiens
gagcaaataactgcggctctcctggcgcctggttgctcgcaccatgtcgaggcccaagcacgcgaaatcccagcacatcatttcggaggaggaccagggcgagcagcagccgcagcagccga

SEQ ID NO: 401473 - DNA, 122 bp, Homo sapiens
gttagcggaaaatatctgtaatttagaccccggagggcgggcctgtgagcgattgctgtccgcggtgctgaaggaaaggcagccacgcccagaggaggaaacctaatgagggcagggcggtg

SEQ ID NO: 401474 - DNA, 122 bp, Homo sapiens
tacaggaggagcccgcaggagacgggggcaggagggcggccaccccaggctctggccctccgtggctgctcaaatacgtcaagccctggtgtctcgggtcccttccctgcccctctggccag

SEQ ID NO: 401475 - DNA, 122 bp, Homo sapiens
cagcacaggacaaatcctggaacacactcaacattgtacttcccatgaagagagcagtcacgtctgggcctagaagctcacagtcagcctccggggctctgaggagaaggggccattacctc

SEQ ID NO: 401476 - DNA, 122 bp, Homo sapiens
gcctgagggtccccggactcgcccaggctctgagcgcgcgcccaccatgagcgcccggaccgcccccaggccgcaggtgctcctgctgccgctcctgctggtgctcctggcggcggcgcccg

SEQ ID NO: 401477 - DNA, 122 bp, Homo sapiens
tcggccacttgcagccatttctgccccaggctgggccttgctaggcagggagtttgctagcgattggcttttgtgctgccctaggcacggggtggagcagggaggaagcaggaagaggagga

SEQ ID NO: 401478 - DNA, 122 bp, Homo sapiens
ttcccctggagtgtgaagctgaccagctcgcgccctcctgaggccctgatggcagctctgcgccaggccacagcagccgcccgctgccgctgccgccagccacagccgttcctgctggcctg

SEQ ID NO: 401479 - DNA, 122 bp, Homo sapiens
cggcctcggcccagtgccaccacctctgtgggccgccgtttcagcctccagatggggtggcggcgggccccagcccttgccccaagtctctaaggaagggtctggcctggcccgcccagatc

SEQ ID NO: 401480 - DNA, 122 bp, Homo sapiens
tggatttcataaggcctggagttgcaggttgacatagaatcacttctgccatattcagtgcgttggggcagtcacagagcctgcccagattcggagaatgaggacatagaccctgtctctcc

SEQ ID NO: 401481 - DNA, 122 bp, Homo sapiens
tacaataagacactatacaagcatttaagtaacgatgcaatacaatatttaccaaactgacgacatgtccatgttatattgctaagctacaaaaaaaagtcatataatacatactctaagat

SEQ ID NO: 401482 - DNA, 122 bp, Homo sapiens
caccccgcccagaactgggctaccgtcgcgccccacccggcgaccgccgcccaccattcccggagcccgaccccaacccagctaccgtgcgcgggtcgtacccacccctcagcgctgcggcc

SEQ ID NO: 401483 - DNA, 122 bp, Homo sapiens
tcttagtgcaaaatatatgcaggaaagagctgcgccgattggccggcacgccactgggaccgccccctactcccttccaggtcctcccgcttccctgcttccccgcctccccccacccccac

SEQ ID NO: 401484 - DNA, 122 bp, Homo sapiens
gacagagctacagcgaacgagagagcggcgaaggcgggtagaggggcgcgggcgaggcggcgcagccatccccggaccaggggccgcgccgccaccatgctaaacaacctgacggactgcga

SEQ ID NO: 401485 - DNA, 122 bp, Homo sapiens
aaaattttgaggagtatttctgagtctttcctctctcctattacatatttgtagcagattcgtaagttcttttgattatatcttctcagcatctttcatatttatctcatctactccagtcc

SEQ ID NO: 401486 - DNA, 122 bp, Homo sapiens
ttccctcatgtgagtgccggggttggggggtgccgggtgggcagggcacgcagggggcttcgacagcaacagtcactgcccccccagacgcgcaccaccgtgaagaagttggccgtgtcccc

SEQ ID NO: 401487 - DNA, 122 bp, Homo sapiens
caagcccggtggcggcttgtggggctgcccgtccacttgctctttttgcggttctacaagcgtgacaaagacgagcattaccggtaagagagaaatgagaaaggacccaaactataatcagt

SEQ ID NO: 401488 - DNA, 122 bp, Homo sapiens
cagcgagggcgctatggctggcggcctcgcctcctggaaaggccatggtcgctgaggcgacgagcgagggcggggcagcgccgacggggacactcatcccgggagccagagccagcaccgag

SEQ ID NO: 401489 - DNA, 122 bp, Homo sapiens
gggggcgcctcgttcttcttgcccagaatctttagaaggctcttggacatgtagtagggccggtccagggagccgttgttccgctccaggtcttccactgagccgcaacagagaccggttag

SEQ ID NO: 401490 - DNA, 122 bp, Homo sapiens
tgctgcgccggcggtggagctggaagaggtggcagtagagccggtaccttccttgcgggacgccatctttccaagcagacaggaagaaagagaaacgtgagttaccggaagcggaagtacaa

SEQ ID NO: 401491 - DNA, 122 bp, Homo sapiens
tccaccgaggagccggctgggcgtcctggaaccctggctcaggcttctcctggcacagcccgtctccacccggctgggcctggcagaggggcccagggagacctgtctctggtccccactcc

SEQ ID NO: 401492 - DNA, 122 bp, Homo sapiens
attttaagagctggagtctccctaagtcactcaggctggccttgaacttctgggctcaagcgatcctcctgccttggcctcccaaagtgctgagattacaggtgtgagccaccacgcccggc

SEQ ID NO: 401493 - DNA, 122 bp, Homo sapiens
aggggcagggttctgtgaaaaggaacagtgtggtttgggagaaatggataaactgagcctcgcttgccctcgtgcctgggggagagaggcaacaagtcttaacaaaccaacatctttgagaa

SEQ ID NO: 401494 - DNA, 122 bp, Homo sapiens
ctagaaatcggcactgcccatccacaccgcagggttcacggacatctcttcttagtgtcccgggtcacacctgacaccaggcagggctcagtgtttcgcagcaggagtcccacacatcctca

SEQ ID NO: 401495 - DNA, 122 bp, Homo sapiens
tataggcaacacatggttagagttggggggttaatctttaacctcaggcctggtcagtggcgtcggttggttttgccactggctccattcctgttgtttttcagcttttactccctcctcct

SEQ ID NO: 401496 - DNA, 122 bp, Homo sapiens
gcaggtcacagagccacagagtctgggcctctaggagcagaggacaaacagcagtgaagacgagaccggagctccggctgcagcaagagacaaaggccgcgccaaacccggaagccgccctg

SEQ ID NO: 401497 - DNA, 122 bp, Homo sapiens
attttttctgccagggtgagatggagcaaggaaggatcatggagggggattcggagacgacggtggaggggacctcaagacacccccagcaaacccagccggtccagatttgggcccacgtc

SEQ ID NO: 401498 - DNA, 122 bp, Homo sapiens
cgcgggggtagagggcacgaactccccggcttttgcccggtaaatagcatctccttcgtacgagtcattcaaataatagatgcagcctaggtagcttcaagagaagttgggaaggggaaggg

SEQ ID NO: 401499 - DNA, 122 bp, Homo sapiens
ctatgagccttccaatggcaagagaattaccttggtaattacatggtggctagcatgtgacggctactgcccgtgctggatgtagatgctggttaacacacaataaaacaccaaggaaggaa

SEQ ID NO: 401500 - DNA, 122 bp, Homo sapiens
tccacaactaaaaggtctggagatgtgtttcttctctgagctgtccttcctgaatgaaaacgttgatggctgcagatcagtaggagggctcatgtagtctggattccatcaagcagtgtttt

SEQ ID NO: 401501 - DNA, 122 bp, Homo sapiens
ccagcaggtgctgattggcggtcaggttgaagcgcagctcgcgcccgcggtattgtagctcgtagaaggcgggcgcgtctcggcgcacagatacatcccgcttgcgcagtgcgcggggccac

SEQ ID NO: 401502 - DNA, 122 bp, Homo sapiens
ctcagtctaccctgcccttgccctcgggaatctattgacatcctcaggcaacgatctcttcgggagtcattgtgttctgatcgtcccgcatttgttccagccttatatactaaatggaaaga

SEQ ID NO: 401503 - DNA, 122 bp, Homo sapiens
acaaaaagggaagcgctaaggaaagtttgggagaaaagaaagtatcagtttgatcaggagcgggcactcagagagcaaggctgctgctttctgtgagattttacaacgtagggttcctggca

SEQ ID NO: 401504 - DNA, 122 bp, Homo sapiens
ggagggcgaggcctggggcccgggataaggcgaagaggccccagcttctcacctgcggctcgcagagcttggcgcagtaggacgcgggcggtcctgaccgccgctccggcctctcctcgaac

SEQ ID NO: 401505 - DNA, 122 bp, Homo sapiens
tgacatttttgtcatatccacagactgatgcatgtctgtgcatggtttataataagtgcacgtaaaaatagagaaaataagtagaaaaagagagagatttaactctcaccccccacccccca

SEQ ID NO: 401506 - DNA, 122 bp, Homo sapiens
aagagggtgtggtcagaggcagggcagttattgtaggaagaacccccaggagcaggtggccgacgcaggcaccctcagatctgagatccagacaagaggcagcgctgggttcagatcaccac

SEQ ID NO: 401507 - DNA, 122 bp, Homo sapiens
tggttacggccttgcgagttgaacaaacttgctgcaggcggattggcggctgggagctctcgggctggggcgttgtatttattaatttatattccgcggcgccccgcgcgggcggctccttt

SEQ ID NO: 401508 - DNA, 122 bp, Homo sapiens
ccgactcagtccctccggaggcgggtccgacacgcgaggcgcttctttggagtctggcggcgaaagctatccatgacgtcagtcactatcttccagccaatggacactcggccttctacctc

SEQ ID NO: 401509 - DNA, 122 bp, Homo sapiens
ggtggctggacaccaggcagcagtggcaggaaggctgtcctgctcacacagagagggctccggcagtagactccagggaagaagttacactgcctctgagctgccttctctacatcgcagtg

SEQ ID NO: 401510 - DNA, 122 bp, Homo sapiens
gaagaaaggaggcataaggttctatggccttcattctcaatcttcctggccccacactcccgacatctataaacttacaacttcgcctagaccctgttcccgatgactcagaaagacagggt

SEQ ID NO: 401511 - DNA, 122 bp, Homo sapiens
gaggcccagaagatgctcaagaacctggtcaaggtggccctgaagctgggactgctgctgcgtggggaccagctgggcggtgaggagctggcgctgctgcggcgcttccgccaccgggcgcg

SEQ ID NO: 401512 - DNA, 122 bp, Homo sapiens
aagtggtgacagacagcacctggaaaatcgggtcactcccacccgaatactgcgcttttccgacgggcttaaaaaatggcgcaccaggagaatatatcccgcacctggctcggagggtccta

SEQ ID NO: 401513 - DNA, 122 bp, Homo sapiens
gcagcagcttcagggtgaggcctgagaatgtgcatttctaacaagctccaggcacacatgcgctgctggcctgtggacaacactttgactaacaagattctgatatctacataaaacaggct

SEQ ID NO: 401514 - DNA, 122 bp, Homo sapiens
ggcattcagtaaaatgaggtgagcagggctgcaaagagcaaggcggggcgtgccctccaccgcccccaaccgctccgcccggcccctcccccgctccctcccccacccctcccccttcctgt

SEQ ID NO: 401515 - DNA, 122 bp, Homo sapiens
agagcagcagcaggaacggtaacatcctggacatctgaaaccaaaagtgacaaatgttaccgaaagaacctgtaaccaaagcaatcccggaacattaaagtcctgggtaggcccagagtgcc

SEQ ID NO: 401516 - DNA, 122 bp, Homo sapiens
ccctcggccacaggctcggagctcacggcccccagggggcgctcaaggactgctcatctgcgcttctgccgcgggcagctctgacccctcccgctgcgctcctccagccgcatccctgcagc

SEQ ID NO: 401517 - DNA, 122 bp, Homo sapiens
ccggccccctggcacccagactgcacggtgagacaacggagcccggagtggtgggaccagcggcggaaacagcgctccatccgggctttattgacttgtaaacggtaccattaaagaggaag

SEQ ID NO: 401518 - DNA, 122 bp, Homo sapiens
tttaagaagtcagcacctgttagtggaaccgcgactgctccgcagagctgctggtatgagcgcccgtcgccaccccacatcccaggcccagccattctgacaagaactagactttgggctcc

SEQ ID NO: 401519 - DNA, 122 bp, Homo sapiens
gcacattccattcctctggctatggcaccagttcaactgggcatgtgacccactccaatccgatgaagctcaggaccatgcttggaatgctgggccagaaatattcttttggataaggaagc

SEQ ID NO: 401520 - DNA, 122 bp, Homo sapiens
gctactggtattttatttcctgtgctatataaattagccacttcacctcttgatcgccagcgaaaagaagacagaaagagtgaggaccagaaagctctgctctctagctccgggctaaatga

SEQ ID NO: 401521 - DNA, 122 bp, Homo sapiens
tgcaaccctcacctccttcccttctgatgtcctcactcccattggtcatgtgacccttaacgcccatcccaagctcagtgccaattccttgccccagggtcctggggattgacatggatccc

SEQ ID NO: 401522 - DNA, 122 bp, Homo sapiens
ggaggccgcgctgggcatgctcagtcagctgggccgcctcagctctcggagtaggaagctcgggcgctccggctgtaaggagccgcggcggggggaaaatggagcccttcaccaatggtgag

SEQ ID NO: 401523 - DNA, 122 bp, Homo sapiens
acccttcgtgtccggtggttgctgttgcttggcctggtgggcccagtcctcggtgcggcgcggccaggtgggtgtccgcgccccgggtcggttgggacggctgcttcctagggacggggcgc

SEQ ID NO: 401524 - DNA, 122 bp, Homo sapiens
aagacagtgccaattccaggcaaaaccttcatcctctccgcagctagggcttgcagagcgcgctctgtaggagacttcccctgaatctcgggaaccagccgtgcccagcaccctgccggggg

SEQ ID NO: 401525 - DNA, 122 bp, Homo sapiens
acctcaagtgatccgcctgccttggcctcccaaagtgctggaattacaggtgttagccaccgtgcccagccgtgaattctgtttttcaagaagtttggtaaggtaggcacattaaatgcgaa

SEQ ID NO: 401526 - DNA, 122 bp, Homo sapiens
tcccagctgggggaggattccaaggccagttgcgaattcctggcaccgggaacttggcctcgccccttattcatcaagtccaggcacgagtcactttctgctcaggtttggcctttaagatt

SEQ ID NO: 401527 - DNA, 122 bp, Homo sapiens
aactgcttcagcctggctaaacagcaataagccgtgaagaggattctggatgttgtagtccgggagctccgagaattttgtcacactctccgtaaccctctctcactcgctcgctccgtttt

SEQ ID NO: 401528 - DNA, 122 bp, Homo sapiens
ggtccccgcgcgcccggggcggggcggggccggctgggggcggggctgagctggcgggggcggcaggctacaaagcccgggggcggtgccggggcgcagagtccccgcagcgccggtcggga

SEQ ID NO: 401529 - DNA, 122 bp, Homo sapiens
ctgaccgggaccagtggctcgggattttctaggaccgcgacgggagggggccattgggtgcggtgggaacctgtgattggacaatgggggatccagaaatctaggtcctgttccttctggtc

SEQ ID NO: 401530 - DNA, 122 bp, Homo sapiens
ccgcccgccacgcgacaacagctgcccagcaagaagcctcggtagcaagtcatcgtgggccgggccgcggccgcgggcttgggctcgggccccttgcctcagctccctaccgccgggagtgc

SEQ ID NO: 401531 - DNA, 122 bp, Homo sapiens
tcccctcagtctcctccaggaagcgggcgctgacggacaccagcgcatcttccggccactcgtggaaccagtcgatggccgtgcagttgaccacagctgggaactttctggctcgtacccgc

SEQ ID NO: 401532 - DNA, 122 bp, Homo sapiens
cttggcttccagcggcttgtgctcactctgtctgccaggtatgagaagaacacgtaagaccgccaccacactcaccctccctcaaggccctgtgccataggggtggccacccgacctgcccc

SEQ ID NO: 401533 - DNA, 122 bp, Homo sapiens
gctttgtgagcttgatgataggatttgagctcagccaggggaatgaaacgtttcatcatccgaacaaactgtacatccacctatgtgacaacagtgtacatgacagaaagacgtgtctaggc

SEQ ID NO: 401534 - DNA, 122 bp, Homo sapiens
cgggggctcctgagggtctgcgggccatgcctgagcagagcctggggcgcgtcccgggaacgaagccgccgctgcagatgaggggctttgtaggtgggtgggcgactgaagccccctggagg

SEQ ID NO: 401535 - DNA, 122 bp, Homo sapiens
aagagaaagccagcaagtattttggttatataagctccttgttgccattttttattcatccgttttttattcatccattgcaagattgttcttgatattgtctttgtaaagcaccaccatta

SEQ ID NO: 401536 - DNA, 122 bp, Homo sapiens
ctccctccaagatcccaccctgaagtggctgaggtgggcccaggaattggttccaggactcggggagccgcgcggggcaggagccaggcccacagacagcaagcagcgttctgcttggctga

SEQ ID NO: 401537 - DNA, 122 bp, Homo sapiens
ttgtgcgggagaaaccacgcgagtccttcccccggagcggactccttgtgggttggtttccgggcccgcgatgtcagcatagcatcgtcggcctctgccccaacggcttcaagggagggact

SEQ ID NO: 401538 - DNA, 122 bp, Homo sapiens
ttatttaccaaataagtttattaggaatccaattataattagaagatattcatcagtgatcgggggaaatacctggtataattaaaatagaatttgatgaaaatataaataaagaactaaat

SEQ ID NO: 401539 - DNA, 122 bp, Homo sapiens
agattccccgcgcaggcggggcgcgggggcaggggagaggcttgtgtgtccgcgtgcctgcgtgcacccgatggaaaagggggtgccgaaaaacaatggtgcttactcttgtgcatagtcat

SEQ ID NO: 401540 - DNA, 122 bp, Homo sapiens
atccgacgccatcatttttctttctaattacggaggtgtcaggtcgagctgtcatgcaggcgctgattttcaatttaactgatcatcatacattcattttcccatttgataaatctgctatc

SEQ ID NO: 401541 - DNA, 122 bp, Homo sapiens
cagatttttctcatgggtgtgtttccctgaaaggaattctggggtccctggggtgcggggcggaaggatctgtcatgctgtcccctggggtgcggagcggaaggatctgtgatgctgtcccc

SEQ ID NO: 401542 - DNA, 122 bp, Homo sapiens
tcctgcctccttttttttaatcgtttctaaggcagcctgatcaggagactgacaacaacccgccttctgacagagcaaggaggacatgatgggggcgtgttccttgctatgtagctagctgc

SEQ ID NO: 401543 - DNA, 122 bp, Homo sapiens
gggatggagaattactagtctggattctggtcctcagaggttcactcacgttaatcaacccgagtccatcttggtgggattgtcttgctccgaggccctcccactgagctttattttcctgc

SEQ ID NO: 401544 - DNA, 122 bp, Homo sapiens
ctcgggagcctcagcccctccagccgcccagcgccctgccaggcctcttcccggcgctcccgccgccaggcccgcattattcaccatctgggcagcacccaaggcctggagggggcggggca

SEQ ID NO: 401545 - DNA, 122 bp, Homo sapiens
aggggtggctggcggcagtcacagtgacatttgggaaatgccaggggctgggtcccagcccggaaggcgggtgtgggcggtgacaggggtgggggctgggttattccccgaggctgagacca

SEQ ID NO: 401546 - DNA, 122 bp, Homo sapiens
tccagggttcacctggggggtcttcctcccccgcttggtagctacagccctgagggagggcgcgcgcgcctcctggcactacggcccggaaccgcggcgcggctggtgcggcctggctaggg

SEQ ID NO: 401547 - DNA, 122 bp, Homo sapiens
ttaaagctcggtcgcagccagtcctgggggtccctctggaggtgccacaaggttctgggccgcggggaaagtgcaggaggcccgggccctctctgggtgtcccgggggcacgcagtactcac

SEQ ID NO: 401548 - DNA, 122 bp, Homo sapiens
aacacgtggcatctggtaacccgggaaacgctgcgactgtggcgcagtgcgcaacaggggcgggggaaccaggcggggctctggggcgcaggggaaagctggagatttgggaagggggtttc

SEQ ID NO: 401549 - DNA, 122 bp, Homo sapiens
ctaatgtgggccaacatttcctgggtatccatgacacaagaggaatcttgggaaaggccccggccctgaaggaacttagactggcctagaggaaaccaggcatagaccagtcataggtaaat

SEQ ID NO: 401550 - DNA, 122 bp, Homo sapiens
ccctaggaatgtaaagacgagtctgggactgtggactgaggtttgagtcccttcccgggacgcggtggtaaatgactccctaaagtctcctggccattccgatggcgccaaggccgcaatgg

SEQ ID NO: 401551 - DNA, 122 bp, Homo sapiens
tgagtcagaggagaagatggaccacagagtgtgcccaccactgtcccacagcgagagcttcggggtccccaaggggaggagccagcgcaaaggtacttgtgcctccacctccctctgcgcac

SEQ ID NO: 401552 - DNA, 122 bp, Homo sapiens
gcgcaggcgggaaatggggctgcgagcggcgctcaggggccagcgcgagttctgggtgggcgtgggctcggggggcccacactcagagccaccagccggtgccacttgccccgggcagtgag

SEQ ID NO: 401553 - DNA, 122 bp, Homo sapiens
atcatcaaggatcagtcttcaatggtctttccatcttttggagctgtcatagtaaccatacgaaatgacttcctttgtggtcataaaatgcctgtcacagctctaggtcttatatcctcaca

SEQ ID NO: 401554 - DNA, 122 bp, Homo sapiens
cgtctcgcggaccgagaccggcggtgaggatgggctgcctccctcatcctgcgctaaactcgctttgtctgtcgcctctaggctaagtgggactgaccggggcccagagtggacgaaccgcc

SEQ ID NO: 401555 - DNA, 122 bp, Homo sapiens
cagtccaaagcatttattagggaaacttacagagtgctccaacaatcatcaagacaggaacgaaaaggggtgttctaccgaggcacagctgcagctagggggtcaggacatggagttcagat

SEQ ID NO: 401556 - DNA, 122 bp, Homo sapiens
aaaagaaaggcgcccggagttgcttcccttctgcacaggcgcgttaatgatggaggcgggcgtggaaggaagtgacgcaacgtagaggcgggaaccagctggttgttagggcaactgacctc

SEQ ID NO: 401557 - DNA, 122 bp, Homo sapiens
gatgaaattccacagggctctgccaggctgatacgtgggaagggtggcagagggctactgcgacctacaggcagggggtggtcctaggcaggcaaaggcattggtaggaatgcagagagggc

SEQ ID NO: 401558 - DNA, 122 bp, Homo sapiens
gtgggagcctgcggtcagctgggccacccccgagaccggcctcctgtcccggctccctgccgtctcccacctgggcatgtaggaaggcctgcactgtcaggagctccaccagccgcttctca

SEQ ID NO: 401559 - DNA, 122 bp, Homo sapiens
tgatcatcgccatctgcgcggtatccagcctgctggtgctcacgctgctgctgtacactgcgctgcggtgctcagcactgcccactgagggcgggtgccgggcgggcaagcccactctggtg

SEQ ID NO: 401560 - DNA, 122 bp, Homo sapiens
cgacccttttaaggcgcagggcgcgaaagaacagaaacagaagtgtccgttcaagtaggtcggccggggtgtcactcgtataaaaacctatgctttgaaggttctcgtgtgtctcggcctgc

SEQ ID NO: 401561 - DNA, 122 bp, Homo sapiens
gccaggagccagtggcgggagccaccggtgggaaaaccggcaggaggctgcgctggaccccgctgggcagcgccaatccctaaggcagccgggcgggtgagctaacggcggcgggggcggct

SEQ ID NO: 401562 - DNA, 122 bp, Homo sapiens
tttgacaagcacatagttctgaataggaaaagacacacacacatcacatgaacaactgcacgaagctagtcactgttcatggtggattatgaatgaaataacttgtgagaaatctctatgaa

SEQ ID NO: 401563 - DNA, 122 bp, Homo sapiens
gtgcagagagaagctgaaaggcagccaggccctgaaggaatttcagtggaatttcttcaccggaggagtagttaataaatagagcagatttctaagggcagaaactagagcagttactacaa

SEQ ID NO: 401564 - DNA, 122 bp, Homo sapiens
gtgccgacatctagacgagggggatgcgatggcgtccgaaaacatggagaagccagcaaacgcagagccccaaggagtgttacagcttttgcttggagagtccagaggtctgagcccccagg

SEQ ID NO: 401565 - DNA, 122 bp, Homo sapiens
cctcgtgatccgcccgctgggatccaaagtgctgggattacaggcgtgagccaccgcgcccggcctcatgtaatcgatttaaaacattaatggccgggtgtggtggctcaagcctgttatcc

SEQ ID NO: 401566 - DNA, 122 bp, Homo sapiens
aggtgccatccgaggtccttctagctggccttaccctgggggccgggcgggggcagcaggcgtctagcagggaggcccagcggggagggagctgcaggggggccgcgagcgccagcggggac

SEQ ID NO: 401567 - DNA, 122 bp, Homo sapiens
agtgggaccggaaaaagacgtggaaaagctgcgaaaacgagccttcgaatcatggacgcgcgggcccagctcctcctccgagttcctcatccggggccgtcactcacatccggggccctcac

SEQ ID NO: 401568 - DNA, 122 bp, Homo sapiens
tgctgaaactctggtgtctacaggagctcatataacaggctggaggtgactgtagacgagcgccccggctcctggagcggttgggaggcgcctggatggctggcatctgtgcttgccgcgga

SEQ ID NO: 401569 - DNA, 122 bp, Homo sapiens
cgtgcgtgaggggagcagccagagggggaggaacccagcagagacggagacagtggggagcggagtggagagaggcagtgggcgtgcaggtctgcttttaaaaagtattcagttaattttgt

SEQ ID NO: 401570 - DNA, 122 bp, Homo sapiens
ataccatgatcatgatgagctaacttactgtgctggttcatcagcatccgagtagaaatacggttcatgtaaaatcgatccaagaaatattgaagattttgattggtgactgggtcaactgt

SEQ ID NO: 401571 - DNA, 122 bp, Homo sapiens
gttggatccagaaggagaaggcagggctaatgctggccatttccctctgcctggggagcccgtggcatgtactcaggaacagttaggtaactctccacaccccagccctgccccatttcaca

SEQ ID NO: 401572 - DNA, 122 bp, Homo sapiens
acacagcccagcctgcagcaactgtggaatccagaccagacatgactggggttggcaccccgagatgccacatgtgccttccgccttgttcttcggggaaatgaggaaaacgtaagcaacag

SEQ ID NO: 401573 - DNA, 122 bp, Homo sapiens
gtgggcgcccgcgcagcgcatgctaatgagcccgcggcgccgctcgcggattggctggcgcggattccagctgctttccaagtcagcggcgcctagtgagagtcaggggggcccggcccgcg

SEQ ID NO: 401574 - DNA, 122 bp, Homo sapiens
agcaattgggtgatgctgtggggagataagtggtcaggcttaagccagccttgcctgtgacgcctgggactagaagccggggatgggcagctgtgccactctgtcaagatgccttgtgggcc

SEQ ID NO: 401575 - DNA, 122 bp, Homo sapiens
caggagcgagagtagagactgggaaggtctgtgcatcctctaagcaagaggcgttgatggcgtggaccgggtggtggcaggaaagacagagacgggatgttttggaggcagaatagttgtga

SEQ ID NO: 401576 - DNA, 122 bp, Homo sapiens
gatccaggcaccccgattgtgactccattacagttcttccgtgactttcacccttggtgacgctgcgcgccccttcccctttccaaatctctagcaagagcatgtagtaaacgctccttaaa

SEQ ID NO: 401577 - DNA, 122 bp, Homo sapiens
acatgatgccctggactcctaaatacctcatagtatattcccaaaaatcaagcacattttcgtaagtagccacagtacaactaaaacatgagtccatactgacatttccaattccagtccag

SEQ ID NO: 401578 - DNA, 122 bp, Homo sapiens
gtgtggtttccatttccattaaaatgtacgtttttgcacctggctatgttaaggctctgccgtgtggaatgtgataggcccagctgagcatgctgttcacccgtgtctgatagcctggacaa

SEQ ID NO: 401579 - DNA, 122 bp, Homo sapiens
gttggtggatgcctatcctgtttctggattttatgtgcagatttatgtaaaaatagcaaacgtgttttttaattttagagctctggctgttcattttgtgctctttataattaatttttttt

SEQ ID NO: 401580 - DNA, 122 bp, Homo sapiens
gaacttttggacgaagctcggtgaagccttttgtgggcctgacatctaactctgtgcctgcgcagccagggtgtgtgcgtgtgtgtgtgtgagcgcgcgtgggggtgaacaggtgtgcacag

SEQ ID NO: 401581 - DNA, 122 bp, Homo sapiens
ccctcagtcgccccccatccctgggctctgctgtctggcgtctttcccgggcacagaacgcgcctccagctacattttggagactacaaggcgccggacacaaccacgccctttacaggggc

SEQ ID NO: 401582 - DNA, 122 bp, Homo sapiens
gcgcccgacgtgccttggcgacacgggcggcgccgcgccccgcttcgtgcgtcccgtccccgccgtgccctcagctgggcctcgtggctgggccgccctctgtatttgtatttggattccta

SEQ ID NO: 401583 - DNA, 122 bp, Homo sapiens
agccttccaggatcgcacccggcacgcgctccacgcctcgttgtctgttcttcggagcaccgaccatgatcacaaatcagctcgctcgctgtgtttcctgccgggtcgctaccgccatgatc

SEQ ID NO: 401584 - DNA, 122 bp, Homo sapiens
gagtcaggtgggaggcaggagaggtaggtcatcgagtccaaggctctgagcacccacattcgtcaggtggctctggtgtcagtctctcaggactaatctcctgatagacaacaaataaacat

SEQ ID NO: 401585 - DNA, 122 bp, Homo sapiens
agtggccggctctgggctcggaagagacacatctggcgggagctaaagctccctagtaaacgtgcagatcaaactacccctgccgcggccggcctgctctgtgaaggcttccccttctttct

SEQ ID NO: 401586 - DNA, 122 bp, Homo sapiens
ctagcatcttgtttgggataatcaggcagcgtttcagtggatggagccaacattgagggacgcagagttctgtgatgaatcagggtacttgaggtcatagggaagtttgtacataaaggaga

SEQ ID NO: 401587 - DNA, 122 bp, Homo sapiens
cccataccggctccgccgcctgtgcgcggtccgcgcgcgctcgcagcgcacctaggccgacgccgaaagcagccaagggggccccgcccctacaccgcgccacgaggccccgcccgccgcgg

SEQ ID NO: 401588 - DNA, 122 bp, Homo sapiens
ggtcccgagtttccctgcttcctgggctgtacaatggacaaaggcattcattcattcattcgttcactcactcatcaaatatttaatgtgccagactgctccgtgccagactctgtcctacc

SEQ ID NO: 401589 - DNA, 122 bp, Homo sapiens
atccactggctgaagactttctataatatccctttattgagacttcctttctcttttgggcgttgcactaacatgcttaagatcaacatgctataaatcagaccttcctggtgaggttgggt

SEQ ID NO: 401590 - DNA, 122 bp, Homo sapiens
taggcattgttttgggcttttagggtacaaaattgacaaaatgccctgcccactgaaatccgtattctagcagtaattgctgttgtgcttattagttttgcaaagttacagatggggttgca

SEQ ID NO: 401591 - DNA, 122 bp, Homo sapiens
gcggccggggcgtcccaccgccggcagccacagcttcctcctccgcccgggacctctggccggaagcagtccgttcgccttactagacccgctccaagcctttgagcagttcgtgtgggtcc

SEQ ID NO: 401592 - DNA, 122 bp, Homo sapiens
ccacaaggaccgaggcagaactctagacccatcccccttcacgctgtgctcgcccggctgcgctcagaccctgttggcagctgagactcacccaaaggctgtaaaagccccacaacaggaca

SEQ ID NO: 401593 - DNA, 122 bp, Homo sapiens
atcactagggaggtaaatgtgctgcaatatcgttctcagtgatttatcctcagaatgcaacggaaatctgtcttttggctccttttctgtaatgtgaataattgagagcccattttcatccc

SEQ ID NO: 401594 - DNA, 122 bp, Homo sapiens
cccgcccagcccctgcctcaggcggggagggcttcagggaagctcaccaaggcagaagggcgggagagattgtcagagccccagctggtgtccagggactgaccgtgagcctgggtgaaagt

SEQ ID NO: 401595 - DNA, 122 bp, Homo sapiens
ctatgcccttttttgggtttccggccagaggcatgctgggagcgtcacatgcaaattgagcgtgcacccagcgttccgccctttctacgctgggccggttatcgacccggcccagtgcgcag

SEQ ID NO: 401596 - DNA, 122 bp, Homo sapiens
aacgcctagaatggagctcagggccttcgggaggggcgaagccctcgggctgcaggctgccgggccgggccctgggcttcctgagcctctcccgggctgtgcgcccgcgtccaaggcgccac

SEQ ID NO: 401597 - DNA, 122 bp, Homo sapiens
atgaaatcggctaagtccaggtgtgggtgcgttcagtgcagcacccacgtgcaggtgacacgcccatgcaccgccacaaccacgctcacaccagaacattccatcatccggaaggcccgtgt

SEQ ID NO: 401598 - DNA, 122 bp, Homo sapiens
tttccctacacgtgtcagggaaagtcccaactctgcgcagtgaccctcgcttgccattttcgccggtctctagggggcgctgccccgagactgggtggggagggaaagaaggtggtgcgaaa

SEQ ID NO: 401599 - DNA, 122 bp, Homo sapiens
tccctcctgcctgtgggaccgctgtttccctggcaaccagatgcgcgatgcttccggtctcgcgatagcggaaagggctgtaccatccggaaatgggaccggggccggcggctgttggagcc

SEQ ID NO: 401600 - DNA, 122 bp, Homo sapiens
tggagggagcctggttactgtcagctctcaggagagagctgcagattaggtgctgcgagtcgctgaggggaaggcagggcagggtgcctccctcccccagagggactgcgcatccgagatgg

SEQ ID NO: 401601 - DNA, 122 bp, Homo sapiens
cttggccgatggaccagcaggggccgccgagtgccgacccccgggtgggcctgcctcacccggcggagaatgcacagccactctgtgggaaccgaggagcttccgcaccactcaggcctggc

SEQ ID NO: 401602 - DNA, 122 bp, Homo sapiens
tgaacatatcgttctggctgtttatattcttggcatccagcactgctgtgcattcccaagcgccagagagcacggagcgcagcagtagctttccctaaaaggcctgtaaagccatgactagt

SEQ ID NO: 401603 - DNA, 122 bp, Homo sapiens
cggccgttcagaccggatgtggttgtggctgaggtcagttccggcgggtgacggtgcggacgggtcaggagcgtagaggcggcggcaaaatggcggcgcctgaggagcgggatctaacccag

SEQ ID NO: 401604 - DNA, 122 bp, Homo sapiens
aacggcctccgtccagctccagcagtgacaggtgggtgctggggctggggtcccctctggcggctcctccatcggctgaggggcagggcgggctcctgagggaggaacggaggtccccaacc

SEQ ID NO: 401605 - DNA, 122 bp, Homo sapiens
ggaggggacagtgtggtgcctttttgttcaggcttcgctcaggtcagcctcaccctttcccggggcctccatgcggcagaagggctctgttagtgcgcctctaagatggcgacgcctttggc

SEQ ID NO: 401606 - DNA, 122 bp, Homo sapiens
ttctggaggttcaggccggaagtgaaataaaagtcgagaggggccgggcccggcacccaccgcatcctgcctccgggcctcctcgggcccctcacacggtggggcagcccctcctccagtgg

SEQ ID NO: 401607 - DNA, 122 bp, Homo sapiens
tattcaaacacaacttcccggggcgaggtgggcggggtattgggggggtggggaagagaacgtgaacttcactgggtgagtcacgtgcaactgcggaacatcttggccgatactgccaaatt

SEQ ID NO: 401608 - DNA, 122 bp, Homo sapiens
tagagcgtgtgcgagtgcagcgtctctccaacagtggtctacactcgagacactcggcagcgtttaaaaatagagcgtgtgcaagtgcagcatctctccaacagtggtctacactcgagaaa

SEQ ID NO: 401609 - DNA, 122 bp, Homo sapiens
gtccctagccagggcccaacctggttctattaataactaagcaaactagaacacctcagccggaggctggggtgcgcggctgctgcacctgcagcctgaacccgggggtcctgacacgccgc

SEQ ID NO: 401610 - DNA, 122 bp, Homo sapiens
ccacctcaaaaaacggggtacggcacttgcctctccatttcaggacatcagcgtgtggcccggaggggtagcgatggcacccagtgtcttccaagactcttgcgggccgggccccaggcaag

SEQ ID NO: 401611 - DNA, 122 bp, Homo sapiens
gcggacctcggcgtccttgcgtgctgctctcccgccagccggcgcagcttgggtacgcagcggcagtggctatttgtcctcaggagccgcagcgctgtgagccacgcagccccttcctgggc

SEQ ID NO: 401612 - DNA, 122 bp, Homo sapiens
gcaccaacatatacacttgtttatctgcacagcgccagcctaatatctgacccctgatgtcgcatcgtggggcggtggtcagcagtgccatatctgagttttcagcagtgtgagatgggtgt

SEQ ID NO: 401613 - DNA, 122 bp, Homo sapiens
gtattctgcaaagtccctggcttaagggagttttctgtttcctagtatctgtttgctgtgcggaatccaaatctgctcggtaacagcaagggttttatgcctctggtaggatgtttcctgct

SEQ ID NO: 401614 - DNA, 122 bp, Homo sapiens
actactagcgtggtgccgccgctgctggccaacctgcgcggaccagcgctctggctgccgcgcagccactgcacggcccagctgtgcgcatcgctggctctgggttccgccgaatgcgtcct

SEQ ID NO: 401615 - DNA, 122 bp, Homo sapiens
aaggccatatttgaatcccgccaaaaacctttgctgtggggtccaatgggctcatacttccggtctcccaacagccaatcctagcactgggcatttgcgggtggcccagcaagtggcctagc

SEQ ID NO: 401616 - DNA, 122 bp, Homo sapiens
agttctcggtgggtgagtgagtgatcggagaatgaaaaggaacgcgatatccctgtcctgcggcttaagtggtgaatgggaatcccttaatgggccatagaagatcgtaaacggatgcccca

SEQ ID NO: 401617 - DNA, 122 bp, Homo sapiens
gaccaagtctcaaggagctgggatcttctttctcttgtcagttgctgaagccagtagcttcgtcaaaaacatatgaattcatataaggaagccctttagatggtacattcactaagacgtgt

SEQ ID NO: 401618 - DNA, 122 bp, Homo sapiens
aggccaggccagggccaggggtggggggtgctggccaggcgtggggtagagcctttcatccgggcctgccaagagcggggagctgtgggggagtggtggggaggcgggtgctctttgggctc

SEQ ID NO: 401619 - DNA, 122 bp, Homo sapiens
gtttataaaatatttacgtgtgtgcacacgcatgtaattcacttccttcgacactggggacggcgtcgtagcggcactccaggccaggccactgcggtccattcctctgccctgcgtttgtg

SEQ ID NO: 401620 - DNA, 122 bp, Homo sapiens
ggttctccagatgcccggagccacaggtgtcttggcaggtgcttctgaaggggccacagccggagcgcctggagaccaccactgtccacgtgcgcaaagcgacgtcccagtttcctcacgcg

SEQ ID NO: 401621 - DNA, 122 bp, Homo sapiens
gggctcggccgcgatgcggccgtagggatgcagcgacagcctccgaataaggcctggtcccgcgccccgcgccacctcctccctcctccccgggcgagcgaggctggccaacggctcgctga

SEQ ID NO: 401622 - DNA, 122 bp, Homo sapiens
tcgggatggcgcccacgcacgctcggaggcacaggaagctccccctcgggatggcgcccacgcacactccaaggcagcttcatcccaaggctccagtgggacttccaagaggaccgtgtcac

SEQ ID NO: 401623 - DNA, 122 bp, Homo sapiens
gggctcctgcggctgcaactttctggctgcagggggccagggccggctccgacgctcaggcgagcagttcccagggaggtgagctgtgcagaccggcagggcctccactgaacactctcctg

SEQ ID NO: 401624 - DNA, 122 bp, Homo sapiens
gcctgaggctgcaggaaagcgcttcctactgagaactcctgataagcgctcacggtgtcgcgaagccgaagtgacctccctcagcctcaactccccgggggccgctggccttcacctgggag

SEQ ID NO: 401625 - DNA, 122 bp, Homo sapiens
ctaggggccttattttgcaggcctgcccagtggaccctggaagattaggacccctttgaacgcgctcaactttattggttccccgccgggcgaaccaggtgggaggaagttcctaccccggc

SEQ ID NO: 401626 - DNA, 122 bp, Homo sapiens
aggtccgaggggtccgcagaggtggtggcaagggactttctccccattgtaaacctttcccggagaccacctcagttagggttgtctctgcttggcacagtcagggagaccagcggggacag

SEQ ID NO: 401627 - DNA, 122 bp, Homo sapiens
tgcccctcatttgccttaatgcaagtaccaacgcacattataattcttttctcaggagaacggaggctggcttcagggccgaccggagggagtgggggaaggtctgcacgtgcaggtgagga

SEQ ID NO: 401628 - DNA, 122 bp, Homo sapiens
gagagggcgaacgggcgagtggcagcgaggcggggcgggctgaggccagcgcggaagtctcgcgaggccgggcccgagcagagtgtggcggcggcggcgagatctgggctcgggttgaggag

SEQ ID NO: 401629 - DNA, 122 bp, Homo sapiens
ttgattggtttcttgcttttagcggcctaaagtgaccataggtggaacacgcacactggccgacaaagcagatctcaccagcgatttccaagggaaagttgagcgggccagtttacatttcg

SEQ ID NO: 401630 - DNA, 122 bp, Homo sapiens
cacttggctctgagggacaggtgtggcgagacctgatttctcctgcgtgttctcagaggacggcgagaaatgcctctggagctggaacccagcttacattttgttatttctatttttataaa

SEQ ID NO: 401631 - DNA, 122 bp, Homo sapiens
accccacagagtgctccccaagagctggggaaatgaactgctggtagggaaaactgctatcgggaaaacttagaagtcaggaaatgcaatcagagaaaagcggtcatattttgttggcgtta

SEQ ID NO: 401632 - DNA, 122 bp, Homo sapiens
gtaggcattcagcaaaagctagtgcttatttagtaactaatgcattgataataaaggagtcgtgaatctgcacagtgtttctgcttcttggagcccttcacagccatcatttaaggtggtac

SEQ ID NO: 401633 - DNA, 122 bp, Homo sapiens
gtggatcctagtgtaggagaagcagagtggctcaaggttgggaaaggaaaaacaggcttgcgcaatcgtggcgtcactttctggcttccggtggcaaaacttgggccccttcccaagcccct

SEQ ID NO: 401634 - DNA, 122 bp, Homo sapiens
ggagggaggtgcgaggagcgggttgctctcagagagacagagttgaacaactaccccttgcggtgtaggaagtatcttgcggccttctaggccaattagttggcttcgaacagtccagtggc

SEQ ID NO: 401635 - DNA, 122 bp, Homo sapiens
tctgaggacgcgcggacccgccctcactctgcgcctctccgtctcttacagaagctgcgccgcctcgcgccgcctttgcctttatagccgccgatatgctaatcacccgagccgggtagcca

SEQ ID NO: 401636 - DNA, 122 bp, Homo sapiens
gcgggtgtctcggggatcatgcagcggaacccatctttggtagaactggccatctaagggcgaaggggcgagccaggggtaaggggcgaccggcgggacgcacagggtggccgtgaggctat

SEQ ID NO: 401637 - DNA, 122 bp, Homo sapiens
gtggggccgggaagacgggcgttgacgacagaaggctacttccggctgtggtgcgtatgacgtcagggcgagtcggaccgacccagccaccgagaagccgaggaggcaaggctcgcgagagt

SEQ ID NO: 401638 - DNA, 122 bp, Homo sapiens
catttcccttttacagaagaagaaactggctcaagaagatgagacatgatgctttgtagccgaggaattgcctcaggtgtcaccatccccgtccctgcgaattggaatttcaggcgggggcg

SEQ ID NO: 401639 - DNA, 122 bp, Homo sapiens
ccgtctgggagaggcctctggagcaggaggcccagtggctcttctgacccaaggccccgccgtccaggtagggggctgtggcctctagggatcagggactacttacctgcgaatcccggttg

SEQ ID NO: 401640 - DNA, 122 bp, Homo sapiens
ctgcgattcttcaggtacaccaaggcaagaacccgggatacagaaatccctctctccttgcgataaggaagggggcctattgagctggttaacatgagccgcctatagacaccttgtaacag

SEQ ID NO: 401641 - DNA, 122 bp, Homo sapiens
ctggcagcaaagataagcaaattcttccagcaggccaaatttgaccccgcacttgatgagcgtggtggacacagagggttttttaatagcataggaatgttttttgcttcccaccggaccca

SEQ ID NO: 401642 - DNA, 122 bp, Homo sapiens
ttacagtcccctgctatgcacaagaccattggaatgctggaacaattacacattttaaaacggcaaaaagcaaagcaaggagataacatgccagccttagagaagctgtcttgaaagtgcaa

SEQ ID NO: 401643 - DNA, 122 bp, Homo sapiens
ctagggttctgctcagcaccccctcccctccctcggcttctcgccgcggacctgggaggacggaatccctcagccgcatcccctgctatgggctcccagcagcccccacctcagccccctcg

SEQ ID NO: 401644 - DNA, 122 bp, Homo sapiens
cgtttagctaaaacagtgaattgttagaattgcagcaaaacaatgaaccaaaccgtcaaccgcgagcaacctgtacttgggaggtgaaagtcagaggtgagattgtaagggctctgggtcac

SEQ ID NO: 401645 - DNA, 122 bp, Homo sapiens
cacgtggcctcccgggttcagacaccctaggctgatgctgtggttccatgtgcctgaacacgagcatccgaactcatttccggcctgcctgtccccccatgcaacggctcctgaaaaagggg

SEQ ID NO: 401646 - DNA, 122 bp, Homo sapiens
cccaaagccttgctatatggacatctctagctcaactgtgccatgtggctactgagacatcgccttcacaattatgaatttaagcatcatgggatttcaaactagaacttcacagataacgt

SEQ ID NO: 401647 - DNA, 122 bp, Homo sapiens
cccctggggtctctcctcaccagggtgtggtctgccacaatgtacagttccaggtacttccgggtcctgcgcgcttctcgcctgccctgcggaggtgcaaatggggaccctgagtggaagct

SEQ ID NO: 401648 - DNA, 122 bp, Homo sapiens
cagcacacacaggccagtggctcgggatacgagtgcgctgactgatgagccaggcaggtccgaatgttcctcgaagtcagtttctttgctgtgtctccggcctctgcagggccgtccatagt

SEQ ID NO: 401649 - DNA, 122 bp, Homo sapiens
agctcgccaccgtgggatcacgggaaccagaggcaagaggctgcgaatgagtccaacacccgcgttcctcgagttttaaaagcacacctggggccagagactgcacagccaactaaacggag

SEQ ID NO: 401650 - DNA, 122 bp, Homo sapiens
aagagggaacggagacaacagacctaatgaagtgcgggctgcccgcctgcatatggagtgcgtttccaggctgagagctttcaaaggctgcctttgtagcacggctttgattgggccgcggg

SEQ ID NO: 401651 - DNA, 122 bp, Homo sapiens
aaacagcatgtagcaaatacatccacggatgtcctcctggtttaattggttctgtggcctcggtttctgtcttcctgatggcacctctgtgacaggagctcagaccccggcatcagaccggc

SEQ ID NO: 401652 - DNA, 122 bp, Homo sapiens
agataacggtcaatcgcctccggttgtcctggtaacagccagcaaccacaaccctgcctgcgtaactcctcccagaacaccgtgcgtcttatcgcttcacttccgggttcggagggccgact

SEQ ID NO: 401653 - DNA, 122 bp, Homo sapiens
gccccccggccgcggcgagctgtggagcgtcgggcgaggtggcggcggtggcaggggaggcggtggtgtttgcaggagggaggggagagggtggctcgcagcgcaggagggggagtgttatg

SEQ ID NO: 401654 - DNA, 122 bp, Homo sapiens
ttctcccgccgtaatattcgaggctgttcggcaaacctccttcttttgtttcctcttccccgtgctgctctgccgtccttctgaggggcctgctttgattaatatcaaccctccctcccaat

SEQ ID NO: 401655 - DNA, 122 bp, Homo sapiens
agggtcttataatttgtaagagaaagaggtaaattaaccagtaattacagcaatatgaaacgtgctgcagtaccggggtgtgatataaggaaagctcttaactgtacttctgggtcatcagg

SEQ ID NO: 401656 - DNA, 122 bp, Homo sapiens
gaccgacgatgtgagagtgccggggagcacaggagaggttgggggcttctggggaacgggcgctgagggtctccagccaggagcaaagggccccttgctgctgctacagtctctttttaatg

SEQ ID NO: 401657 - DNA, 122 bp, Homo sapiens
cagaggcctgcttatgtgacaggtttatcagcttgcctggcccagggccggctctcataccgttttgatttaaataatagattgctcacagaataaatgtatgttggtttaagctttcactt

SEQ ID NO: 401658 - DNA, 122 bp, Homo sapiens
agcagttcctcacgaccatccattgcagatgcgcagacatggcggcggcttctctcgcagcggcctcaggggcaatttaaaaggtaacacagattactttgttcaacgatttgaattccgaa

SEQ ID NO: 401659 - DNA, 122 bp, Homo sapiens
gggtgtagaggaggtgatcccaagagcttcccggaattcagggtgttggggaggcaggggcgccccgggagttggtgtgggagctggcgtcaggagggagatgcgctgctctggcagcatgg

SEQ ID NO: 401660 - DNA, 122 bp, Homo sapiens
cattattttcttttcaatctctgcctctgtgttacagtttatgttttctcttttgtcctgcggatttttgatacattttaaaaatatcttgtcctttttctaagtttttgcgttgactacag

SEQ ID NO: 401661 - DNA, 122 bp, Homo sapiens
gttctaaggctaggtgagactatcctctaccctagaaggacatgcactttaaggacaggccgctgagatggagctgggcctttcctgcaagtaagtgaacgtgatggtagggtatacctgac

SEQ ID NO: 401662 - DNA, 122 bp, Homo sapiens
aagcgtggttaggctttataccttctcccggtctaaacagttctttataaagtcctttcacgtagaaacaaagaaggcattagtttactgcctgtaaagagagcagatcaaggctgaggaac

SEQ ID NO: 401663 - DNA, 122 bp, Homo sapiens
agcaaccctacctcaaagcacaaaagtggtgctgtggccagcctgctgagcaaggcagagcgggccacggagctggcagccgagggacagctgacgctgcagcagtttgcgcagtccacaga

SEQ ID NO: 401664 - DNA, 122 bp, Homo sapiens
tccctctggccgcctgtcttcctggaaacaggtgtttgctctgattgtgctggaggcagccgaaccgcagtcggtctccggagatctcttccctcccctcccctgcgccgagttcagggctg

SEQ ID NO: 401665 - DNA, 122 bp, Homo sapiens
caagtgctgggattacaggggtgagccaccgcgcccagccgggagcccctattttaaggacgctattgctgtggaggagtaaccccacttttaggaatccttttccgtgcgaaaggctgttt

SEQ ID NO: 401666 - DNA, 122 bp, Homo sapiens
tgcgcacgctgaggttccaggctggaggcaggaaggtggcacggtgtctggggagacccacggctgagtggtctgacctgcacctaccctgtgttcagcctaaggagcccgcagtccccggg

SEQ ID NO: 401667 - DNA, 122 bp, Homo sapiens
tctccctcaccagaacaactcccccgcccccggctaagtgcctagtgcgtgccgatacaccgcaagcacccagcaaaccctgttgtccggaatgccattcagagacaagggagctaggctca

SEQ ID NO: 401668 - DNA, 122 bp, Homo sapiens
ggggcctccctccaagggctgttttggagaactatcaccaagcaaagttacacatccgagcgctcccaagctcccaactcacgcctaatcacaggaagaaacagttggcggagccatcacct

SEQ ID NO: 401669 - DNA, 122 bp, Homo sapiens
cttaacaccaaaacttctttcttgtaaactgcaaaacccgaacccctctgtgggacccagcgcccctccagggcagctgtccggtaggcggcggctgagacctggctgctggactttccagt

SEQ ID NO: 401670 - DNA, 122 bp, Homo sapiens
ttgtgatcagccacgagtccccctccccagactgaaccctcagcattcccagtttaaagtcgactttcgtgcgtcagaactctagccaagtttgcatgcgtctgcgctgaatggcgaagctc

SEQ ID NO: 401671 - DNA, 122 bp, Homo sapiens
gctccaggcgcccccggggagccagcctccgcagccaccgtcaagaggaagccgaagagccggtggaggcctgaagagaacaaagtagagctctcacctgctgagctggtgcagagggacgt

SEQ ID NO: 401672 - DNA, 122 bp, Homo sapiens
tcttctttccctggacgccttacttacgtaaaaactacatttcccatgagcacccacaggcgtgcacgcagcgcagccctccgtcgtcgctcgcgccctttatactcacttccgcccgcgag

SEQ ID NO: 401673 - DNA, 122 bp, Homo sapiens
aggagcaggcaaggggcttggaggatgctattgtcttgctgagtttctgtgactccctcccgtgttggtgggaaaggcttgcttaccaaaggcagaacttgcaggcacaggcactcctaaag

SEQ ID NO: 401674 - DNA, 122 bp, Homo sapiens
tggctgcacagtctctgcaccccctatcctgaaagcctctcttaactatttggaaagcctcgtgtcctgtctcatacagggatcccctcatcctaatgactgcaatcttccattgctccatc

SEQ ID NO: 401675 - DNA, 122 bp, Homo sapiens
aggacccgcagccagtgcaggcactctggacctctcagggtggcgatgaagtttccagcgcggagtaccaggggagcaaccaacaaaaaagcagagtcccgccagccctcagagaattctgt

SEQ ID NO: 401676 - DNA, 122 bp, Homo sapiens
gcagtggggggtggggtgcggtgggtgggggcgtctgctttccacaggactcccaggcttcgccgccgatctacaatttgctgaaggagcaaagaacatcctcggctctaagtagggctttt

SEQ ID NO: 401677 - DNA, 122 bp, Homo sapiens
ttaaacatcgaaggattcacactggagaaatgcagtgattgtgtgaaatcctttagccagcgtttcaacctcattcaacaccagaaagttcacagtggaaaaaatcttgaaggtaacagatg

SEQ ID NO: 401678 - DNA, 122 bp, Homo sapiens
tggtgtatccaggcctggcgaggcggctgggcgaacctggtgtatccaggcctggcgaggcggctgggcgaacctggtgtatccaggccgggcgaggcggctgggcgaacctggtgtatcca

SEQ ID NO: 401679 - DNA, 122 bp, Homo sapiens
cagacactcccatccaaggcctctttctcatgactttttaatctcctgctcggaagtctacgaggacgcttccgggtcacgcggcgcggacaccaggagtcatgtgatgtcaagatggcggc

SEQ ID NO: 401680 - DNA, 122 bp, Homo sapiens
aaacggattgggcgggatgagaggtggggggcgccgcccaaggagggagagtggcgctcccgccgagggtgcactagccagatattccctgcggggcccgagagtcttccctatcagacccc

SEQ ID NO: 401681 - DNA, 122 bp, Homo sapiens
tcctgctgctgccagaaagaagctctgtcaccaggcagtggcttgttcctcctgggaccccgcttcctctcctgtcagatggacacagcatctgtgcctggtggccaacgcaggaaatgaag

SEQ ID NO: 401682 - DNA, 122 bp, Homo sapiens
gcaaatcagctcatctccagcagaacagaagccgccttttcagggaagcgtggcagctgccggcgaacacaaagcagctctgtgatggttgaagccagcaaagaaaagcgccccctccgagt

SEQ ID NO: 401683 - DNA, 122 bp, Homo sapiens
catctcagacataccataggcaccaaggtgtggagccagtgaaagaacaggcgcagcgaacgttccggcaggcattgccgtgcacggacacacaacttcacaagggcctcttgtgcacgtgg

SEQ ID NO: 401684 - DNA, 122 bp, Homo sapiens
ctcaggacaatgatgaacttgagttgctcctgccactggagcatcatttgggagcgaatccgtctcaggttccagccaaggtgtagggcgaggggattggcccgtgcgtcgggccaggctca

SEQ ID NO: 401685 - DNA, 122 bp, Homo sapiens
tgcctcatcctagtctaagcactgcaaagcaaggcgcttgtccctccaaacacacctggccgggccccagctcctcccctccaagacccactcctcccctctccccaccccgcacccctttc

SEQ ID NO: 401686 - DNA, 122 bp, Homo sapiens
tgttaaaaaggaaaacagttgaatctttggctcttttgtaatggtatttgaagggtaatacgtagattcatatttgcaaagctctagatacgtagttctagatatatttttctctttttacc

SEQ ID NO: 401687 - DNA, 122 bp, Homo sapiens
ccccctccccagccaggctgcggcagcggtggtggcggatggctgtgtctctgtctctgtcggggtgtcggtgccaagggggcgacgggatttgggggtgtcctagccccggccgatggagg

SEQ ID NO: 401688 - DNA, 122 bp, Homo sapiens
gttgggtgattttcccaagagtttctgttggagttttacagctgcaaggaggcgtcattccgaatttgggtgtcacccagcttttcgaatgctaatatgcatacgatttcctggggatctcg

SEQ ID NO: 401689 - DNA, 122 bp, Homo sapiens
cgcccagtcccggctccgcgccgggagattttcctcgtcacctcggcctcctcggtccgacggcccgcgtgtccctgctctccccgagcccggctagtccctggcaagccttctctgcctcc

SEQ ID NO: 401690 - DNA, 122 bp, Homo sapiens
ttgaatgggagcagtctttttccattgttacagaagaaaggcagagagtatggaagaatacggatacagatgcaggcaggttgatagatctgatgacatgaagatgagacagcttctgattg

SEQ ID NO: 401691 - DNA, 122 bp, Homo sapiens
tcttggcctgaatagcttggtcaggggtgagctccactaaaagcttctcaagcctggctgcgaccccgtccccagaagcgcgggttcgggaattggagggaagacaaagacgcatttgccgt

SEQ ID NO: 401692 - DNA, 122 bp, Homo sapiens
tcgctgaaggaaggagcaggggacagggaagcggaatggggagcgctaggcctccaactacgtccatctggccatgtttgaagagccacaaaatggaggagggaacccctcagagcgtgcca

SEQ ID NO: 401693 - DNA, 122 bp, Homo sapiens
ggcacatgcctgtagttccagccacccgggagcctgaggtgggaggattgcttgagtctgcgaggttggggctgccgtgagcccagattgcgccattgtgctccagcctgggtgacaaagca

SEQ ID NO: 401694 - DNA, 122 bp, Homo sapiens
ggccgtcagaggtcaagctcagggttgcagctccctcatgccgggcagcctcagaggggccgaccctacccaggatgagcagcgccagatagccggggacgctcccggggatccacgggccc

SEQ ID NO: 401695 - DNA, 122 bp, Homo sapiens
ttcaaaatgtgcaccatcaaaagtgataactaatgacaccctcacgcaaatattttattgcggcaaatgtgaaggtatcgtgcaacaaaataaaatctaatatgtatgatacatagcaaatt

SEQ ID NO: 401696 - DNA, 122 bp, Homo sapiens
ccggcactagtgaccccaccgtctgagagcttctaacagggggcgagtttcagcaggctccgtggaaagccctcagtgaggcctggtgaaaataggccccccgtacttttgtagaattttcc

SEQ ID NO: 401697 - DNA, 122 bp, Homo sapiens
gatctggaagaaatattgtcactaataggaatatgagtcaggaaaagatcctgccaataacgaagataattcaggagaatcatctaatgtcagaaaagatgagtcattgcttttagaaattg

SEQ ID NO: 401698 - DNA, 122 bp, Homo sapiens
ctcaggagcccagctgacttcacctagtggatcccgcacccggaccacaggtggagctgccgccagtcccgcgccctgcgaccgcactcctcagcccttgggcgattgatgctactgggcgc

SEQ ID NO: 401699 - DNA, 122 bp, Homo sapiens
taaagtacttgcagaggaagatcgatgagttctgagtgtcgggctgcccactggtgacaccgggatcgggctgagcaggagaacatcaccggctccagttcccctgatccattctcacagcc

SEQ ID NO: 401700 - DNA, 122 bp, Homo sapiens
tatgaaatatgacatggttagtgtcaaaacagagctcgagaacagacccatcagagagggcgaaatgacaacctgtggaagtctgctcgcaggagaggccatatgcctgtacaaagtcttga

SEQ ID NO: 401701 - DNA, 122 bp, Homo sapiens
ctgggcacgcacgctcacggaggcaagttctcacctcctcgtgggcttctcttcactttacgtggaaaaactgtgtacgtctcaaattaaaagcagctcttgccccgcttagagccggtgaa

SEQ ID NO: 401702 - DNA, 122 bp, Homo sapiens
gtgaagcccaggctcgcgccctgtgaccccagggtccctctgcaacccctccccggtagacgggcggggtaatgtgcactaattagaggttattagctgtacccagagggaggggcgggctc

SEQ ID NO: 401703 - DNA, 122 bp, Homo sapiens
cacgaaaccaccttttgaaaacaaagtgcgagggctgtgccatcctggctgcagcagggtcgtacctgcttccctaaccaatgtaccaccttttccagaaatagaacaaagacaaaagcgga

SEQ ID NO: 401704 - DNA, 122 bp, Homo sapiens
ctaatgcttaattcagcttgggggcagaaatgctggggtgagacacggccaggtccgccccgttcctccagggaactcccctctccgccctccctctccgtctcctcttgcccacctcctcc

SEQ ID NO: 401705 - DNA, 122 bp, Homo sapiens
atgcgagcggcttcggcaaggggcggggccgctggacgtggatgaaagctacagagccagcgtggaccaatcagacctctttggggcggggcctctgtggataagtgggcgtggtctagggg

SEQ ID NO: 401706 - DNA, 122 bp, Homo sapiens
tgggcggccgttctctcgggtgctggaggctgtggttgggaggcgggataggcttgccgccgcgcctccggagcccgctgtgccctcgaattggccactgaggagagaagccggaagcccgt

SEQ ID NO: 401707 - DNA, 122 bp, Homo sapiens
aaatgtcgaaacaagaaagctgtgttcttcagccttggccctgggtccccctcaccctgtcgcatttcccagcactgtgatgctttgaaggccgacaccgagacccgccgtgcacgacagcc

SEQ ID NO: 401708 - DNA, 122 bp, Homo sapiens
gtgctgcttctcttctggcattccaagtcagagtcctgagatttaccttggttaggctgccggagtcacactcccttctcaaaccattgactgtggcccggagatggcatgacctgagcgac

SEQ ID NO: 401709 - DNA, 122 bp, Homo sapiens
tggtgtctgggccccacccacagcagctgccaggaaaagaggacccttgcccgggtggcgcggccgaagcttcaggcaagcatggtggctcggcagcccccagccccgccctgcggccaggc

SEQ ID NO: 401710 - DNA, 122 bp, Homo sapiens
ttgagctcctgcaatcacaatcacacagaacagacccagggttggaagcaatgcaagaaacggaagtttcgcattttctctcactctgcgttgccactgatggttcgacagcttttctggaa

SEQ ID NO: 401711 - DNA, 122 bp, Homo sapiens
ggcccccatccccgggcaatccatgagcctgtgctgagccccagtgggttgcacctccaccggcagtcagcgagctggggctgcactgtgcccatgctgccctcccatcaccccctttgcaa

SEQ ID NO: 401712 - DNA, 122 bp, Homo sapiens
tccaaggagtattggcagcctattggcctcctgcgcaggctcactgacagttgagcccttcgggcagggcagcctagcggctcttgccttgggctccctgcgcaggcgcaatggcagtccag

SEQ ID NO: 401713 - DNA, 122 bp, Homo sapiens
ctatgagatagggcctgcgattatccccttttgtcagtaaacaggctcagagataccaagcgacctagctgaacctacacagcgaccaggatttggcccaggagtttgtcctccagggctct

SEQ ID NO: 401714 - DNA, 122 bp, Homo sapiens
ccaccatctccgtgtgaagaaactcaaacaacacagtatccgccatgccccctcctcgcacgcctaaagatgcgcccagcgcttccagctctcattggccaggcttggtaagccacgcctct

SEQ ID NO: 401715 - DNA, 122 bp, Homo sapiens
acaaaggacttcaggcgcaataatgcaaagaacagcagttatttagataaaggagtgccccgaagtattaagacatttccttaaacatatggaacagtaccagagaagcaacatcccagact

SEQ ID NO: 401716 - DNA, 122 bp, Homo sapiens
taaactcctgggatcaagcgatccacctgcctcagtctcctcagtagctggaactagaggcgtgcaccaccacggctggctactttttaaaattttttgtagagaaagggtttcgccatgtt

SEQ ID NO: 401717 - DNA, 122 bp, Homo sapiens
cagttgacagagcgaatcccgagtaattgttttccgagggggtccgtgcgcgctcggtggcgccgcctcggtctgggttcccccgaggaaaaatacccacccgcgagggctcggcggctttt

SEQ ID NO: 401718 - DNA, 122 bp, Homo sapiens
gtttcccggcggttccggtttgggggtctgggagggcctgggcaatgccggcatctgcttcggaaccgcaggggttttcgtcccctccccatccggagcagcctctttgctaggctagatcc

SEQ ID NO: 401719 - DNA, 122 bp, Homo sapiens
taatcggggggaaatttcccagagaacatgacggagaagcatctgtgtgagagtggcatgcggcgtggtgatgggttggtatagtccccaccccctctccccgacgtagcttgaaagggagg

SEQ ID NO: 401720 - DNA, 122 bp, Homo sapiens
ggatgtgttgccgctggctgcttttctggtcctaggatacggcctttgccgacgtgttgccgccggctgcttttccggtcctgggatacggcctttgccgacgcaccttgctcttaggcaga

SEQ ID NO: 401721 - DNA, 122 bp, Homo sapiens
tgcggtccggaaaccagaactagagaactctatgacccacctgagcttccgctcccgccccgctgaaacagaagagggcccttgtgggctggttttggctagtttggtttacttttcgtagc

SEQ ID NO: 401722 - DNA, 122 bp, Homo sapiens
gctatgccttcgtggactacccctacaagaactgggccatccgcgccatcgagaccctctcgggtaaagtggaattgcatgggaaaatcatggaagttgattactcagtctctaaaaagcta

SEQ ID NO: 401723 - DNA, 122 bp, Homo sapiens
aaggtgagttaaaggcaggagtgctggggttgccgacagacgtcgagttgtgtcacatgacgtggggaagctcgggctacagtgctgaggtgtgggtttccgctccgcgtgcctatgctggg

SEQ ID NO: 401724 - DNA, 122 bp, Homo sapiens
cctgccgtggccgggggctgtgcccgtccgtgttgcggggtcgcctgtggggcgggtgtccggcccccgaggggcggccgcacgtgtggcggggcccgcgccgcgcttctccgcagacaggg

SEQ ID NO: 401725 - DNA, 122 bp, Homo sapiens
gctttgcttttccccttcccacaaaagaagaccctgcagctgcagacatgctgtggtttccggagccttggctgtcatggggccagtcaccagggtccacctgcactcagatgctgtcctgg

SEQ ID NO: 401726 - DNA, 122 bp, Homo sapiens
aacaattaatggctgctccttccggggccacagcgtacagttcgtaatgatttcggggtacgccacggctggcccagccacagttagttgtgtacaccctgggtctccccgtggagatcatg

SEQ ID NO: 401727 - DNA, 122 bp, Homo sapiens
cgcgaccccggcggtgcccgaggctggcgcgccctctcgcggccacgccgggaacgccgccggctgagaccctcgcgtcctcggagaagcctgtggttggttccagcctaggcccggcgggc

SEQ ID NO: 401728 - DNA, 122 bp, Homo sapiens
gggatccggggctgccggctgcgccactgggtcctggggtcctgggggctggggcttctgcggagttgcccgcggaccgtagcgcgctgagggcgctggctccaccccgcggcccgcgccct

SEQ ID NO: 401729 - DNA, 122 bp, Homo sapiens
cgaggaactgggcgagatccagctggtcagaatcgagaagcgcaagtactggctgaatgacgactggtacctgaagtacatcacgctgaagacgccccacggggactacatcgagttcccct

SEQ ID NO: 401730 - DNA, 122 bp, Homo sapiens
tgactgttcctctcgctcagctcaaaggggaccacgcagtgaggacagtcctttattagacgtgtagacacaaagtgtgtgtgcatgagcctggccaaagctgcacgcatattctctgcgtg

SEQ ID NO: 401731 - DNA, 122 bp, Homo sapiens
ttactaaagctgcataaaaaactactccaaaacttagtcctgtgaaataccatcttgttgcgctcactctgtaggttaggaatttggtcagggcataatggggatgacttgtctctgattca

SEQ ID NO: 401732 - DNA, 122 bp, Homo sapiens
gatgagaaagctatgttcagggagcttgggccactgtccaaagccatgcagctgtttggccgtggacttggttgttgaatccaggaattcagcttttagaattaacctcttgtctgtgttga

SEQ ID NO: 401733 - DNA, 122 bp, Homo sapiens
catggaacagctttggagtgaggtgttgctttgctgcctgcttccatctctcaaccatggcgagggtcacaggaacacaattcttccccttcagccctctggggactctgtccccatcttcc

SEQ ID NO: 401734 - DNA, 122 bp, Homo sapiens
gcgaccctttccacctccaggtttccatttccccgccactcccacaggctgggcagaatgcgctctctctctggaggccccactttgtattgctttttgtgttttcggtagggagtagcaca

SEQ ID NO: 401735 - DNA, 122 bp, Homo sapiens
accggccaacctgccccgaaaagagcagaaggcaccctgcgggatctgcagatcagcttgcgtctcattctggggcaccgacacggtggaatgcaagacaccccactaccggaagtttcttt

SEQ ID NO: 401736 - DNA, 122 bp, Homo sapiens
gggggagagggggtgcccaagggccacaagagtatgacggggctgtacgagctgctgtgacgggtgctgcatgcgctgctccgtctgcaccgcacgctcacctcctggctccgcgttcggtt

SEQ ID NO: 401737 - DNA, 122 bp, Homo sapiens
cacgtgtttttcaggttgtccgggtgccaaaaagcatgagtttctgaccagcgttctggacgcgctgtccacggacatggtccacgccgcctccgacccctcctcctcgtcaggcaggtacg

SEQ ID NO: 401738 - DNA, 122 bp, Homo sapiens
ttgagcagagacactgaagccccgtctgatcgtctgatcgtgacagcgcacgagactaaacgtggactcagacgccttctgcaaaacacctgacccgtgagcacaagtcagggtcaaggtca

SEQ ID NO: 401739 - DNA, 122 bp, Homo sapiens
cacctccaaatccctgcccctcctattgcttaatgcctctctatctcctcctatcccctccggactattttgtgtggtgtgggttttctcgtggggccacacctttctagagtggtggttga

SEQ ID NO: 401740 - DNA, 122 bp, Homo sapiens
cacagattggtggttgccagggactgggatgtggagggcagttaaccacatggtaacactcggaagcttttggaatgatggaactaaatcttgattgtggtgatgactacacaattgtatgc

SEQ ID NO: 401741 - DNA, 122 bp, Homo sapiens
ctactgggtaggccctggacagaacaggccctgaggtgcagcccgcaggtgggcaggatgcgcctgggcctggggcctccgaccgctccccgctgtcctcctagtctctctacctggggccc

SEQ ID NO: 401742 - DNA, 122 bp, Homo sapiens
cctttcctagtcaaagaaaggggtgatggacagcacctggaaaatcgggtcactctcacccgaatatcgcgcttttgggacggccttaaaaaaacggcgcaccacgagattatatccccgca

SEQ ID NO: 401743 - DNA, 122 bp, Homo sapiens
ctgtaacctctctgatcggtttcacgaacacgaaaatggaaagtcccggaaacggagacacgacagtgtggagaacagtgacagtcatgttgaaaagaaagcccggaggagcgaacagaagg

SEQ ID NO: 401744 - DNA, 122 bp, Homo sapiens
tcccgcggcgggtcctggtcttgaggcagcggtggtagtctgtggcgggcgggggtcacgcggcaagccacgcccattccaggacaggacccgcccctccactgctcgggccctcccagttc

SEQ ID NO: 401745 - DNA, 122 bp, Homo sapiens
ctctgttccaggaaagatttaaaggacgcaagtaagaacgcaagcccgtcaaggctgctccgattttaaatgtcagttcagctcctactttatggggtttggcaaatagagttaagggcctt

SEQ ID NO: 401746 - DNA, 122 bp, Homo sapiens
aggaatgcatgaagggtttcagtgactttgccataacaaaggcgccaccattgcggggctcgccccgcccctgggtgaaggcaaacaaattcttgcacttgtattagggcttttaagaccat

SEQ ID NO: 401747 - DNA, 122 bp, Homo sapiens
aggagctggcattgatttccttcctgaatctgtaagcaggtaaataatggaatcaccatgcggcatcagactgcgaggcaccgccacctgattgagggtcctggaagaagcagcgaagcctg

SEQ ID NO: 401748 - DNA, 122 bp, Homo sapiens
agtttaattatgaaaagaattacacttatgccttgattcagaagggagggagggaggaagcgatgcaaactccaaagcaccactgagtctcaccactgggggatcctacagagaaactggga

SEQ ID NO: 401749 - DNA, 122 bp, Homo sapiens
caccgcaacggtattggcgaaccggcaggatgaaagtgagcagtccagaaagcggcttatcgaacagagccgggagttcaagaagaacactccagaggtgaggcgcgtgaccatcgtgttcg

SEQ ID NO: 401750 - DNA, 122 bp, Homo sapiens
ggccctcccagggcggctcctgttacaggctgcctctgggctgcggtcggggacccttggcggcatggaggggacccaggaggggcctggcctggcgcacttccctcctccgatttccactc

SEQ ID NO: 401751 - DNA, 122 bp, Homo sapiens
ttctgtgtttttgtttgtttttgagacagggtttctgtcatccaggctggagtgcagtggcgtgatcacggctcacggcagcctcgaccttccggactccagcgatcctcccacctctcagc

SEQ ID NO: 401752 - DNA, 122 bp, Homo sapiens
aggccgacgacctgggccctgggcctctgaaggcaagtgcgggtgcatgaggtgggggtccgggttgcgggggtggtctggcagggtggaccagcaggcagcctgccccgcggaccctgaca

SEQ ID NO: 401753 - DNA, 122 bp, Homo sapiens
aaatggtaagttggaatctcacttctgagagattcattcctagtgaggccctgacgactccgatccattcctgacgatctgcattaattatttaatgagtcacgtgacctcaaagattacaa

SEQ ID NO: 401754 - DNA, 122 bp, Homo sapiens
gaccccggcctggggatggggtgcaagtatggaccacacaggggctggcttggtcactcacggctgcgtcaggctgtcccggtaacggctgcgctggcagggcagtgctcggggccggctgg

SEQ ID NO: 401755 - DNA, 122 bp, Homo sapiens
cccttcccctccccccacgcgggctcgcgagggcccggggccaccttcaccctcgcaccccgcccagtgtttagggccaggcctctacttgggggtacgaattaccagacacccccctccac

SEQ ID NO: 401756 - DNA, 122 bp, Homo sapiens
acgggacccctgaggccggctggggcccggtcacacgcagggcggggaatcagaggggtgcgttgtgaaatgagtaagtcgataatcaacaatcaatgaacaggtttagaagcgggcagagg

SEQ ID NO: 401757 - DNA, 122 bp, Homo sapiens
gatggttaccgaggctctgccgtaggccaggcactgtgccacgcacgcgactcgcgagcacgcgttgaatccttgcaaacatcccgggaatgaagtcggacaattattcccacttttcccaa

SEQ ID NO: 401758 - DNA, 122 bp, Homo sapiens
cgggcgaggcacaggtggccggggccaagctgcccaggtgaggaaagtctggaggactcacgccttaggtgtgtttgatttcaccaccgcaaggaaagcctcctcacgtgcaccgcacgggc

SEQ ID NO: 401759 - DNA, 122 bp, Homo sapiens
tcacacacacacacacacacacacacacacacacacacacacaccctgttacccaaaaaacgaaactctgtaaaacattttaaagaggtttattctgagccaggatgagtgaccacagcctg

SEQ ID NO: 401760 - DNA, 122 bp, Homo sapiens
ccaaacccgcccccttactccaagcttcccactccagacctactttgggtccgggaaaagcgaggcttccccagccagcccatgctgccccgaggcgggagccatccctttccccagcccca

SEQ ID NO: 401761 - DNA, 122 bp, Homo sapiens
gcgccttcttcacagggcggcaggacccagtgagcgagggccagcaggagaaaagccagacgcttataaaaccatcagatctcgtgagacgcactcactatcacgagaacagcacgggggaa

SEQ ID NO: 401762 - DNA, 122 bp, Homo sapiens
ctccgaggataaaactcagtgaagaacgaaaccaaagaggtgttacctgcagccttctgtcgcctcccccctgccaaacccatgaaaacaaacccatcaattttatttagcagtttcttcaa

SEQ ID NO: 401763 - DNA, 122 bp, Homo sapiens
acacctacacgtgcgcacactcacactccgtgcacacacgtatgtgcacactcatgcacgcgtgcacacacgtctaccagctgagtgcagtaaaagaaccacatgaaaaccttgcatcctgg

SEQ ID NO: 401764 - DNA, 122 bp, Homo sapiens
gtgaagtccggcggctcaggctgagcgttggaagccattttggctgcaacctacctgaagcgatgtctgcctttggtcacgacgaggcctggatggaggccggaggctttggtctggaggct

SEQ ID NO: 401765 - DNA, 122 bp, Homo sapiens
gcacacctatctataccacatatgcacacgtgcacacctatgcataaccacatatgcacacgtgcacacctatgcagaaccacatatgcacacgtgcacacctatgcagaaccacatatgca

SEQ ID NO: 401766 - DNA, 122 bp, Homo sapiens
gtcctcgggaccccatggctccagctgctgacagatgtgaaacgtctggcctccatcacccgggtcgccccgacaaggatctgtaatgggggcaggggtgggggtggatgagaaagtaggaa

SEQ ID NO: 401767 - DNA, 122 bp, Homo sapiens
tcaccactagaacaccaagttcctgacatacagtttcaaggtccagcaacatagttgctacgaactagctgcctttaaagttctctagatcaactatatagattagcaagtcttttaactaa

SEQ ID NO: 401768 - DNA, 122 bp, Homo sapiens
cagggcagcagcagaggcggtgccagggggctgtagcgctggcaagttctcatccggggtcgcccggtcccccgaaggcgcgagagcgagcacgagagggaggtgcgcgctctgtacgagga

SEQ ID NO: 401769 - DNA, 122 bp, Homo sapiens
cggcggggacgcgggccggtggcaggaagggcgtggagggcggtgcagcgtgcgagcccccgccgagggccatccccgcctccgctcggccgcccgggcaagtcgcctatttagggtgcggc

SEQ ID NO: 401770 - DNA, 122 bp, Homo sapiens
agggcatatgcacatgtgcatgcacacaaacacacaacaaaaataaattacacccactcccgagtattcggtgtgaatgtttcactcttcttacaggaggctgaggaagaacagaagtgtta

SEQ ID NO: 401771 - DNA, 122 bp, Homo sapiens
acataagacacccagtgctcatcgttacacccttaggtctgcgcctgcgggtgggggccacgggctgtgccggagcgcatagccgcgggtgtgcccttaattttcatatatataatgaagtg

SEQ ID NO: 401772 - DNA, 122 bp, Homo sapiens
ggagagtggacagcaggggattgaggagaccggctgggactgggaaatgggcattcgggtcgcatgcccaccgcagtggcccagagcccctgtccggaccgctaacaagttgcttagcaacc

SEQ ID NO: 401773 - DNA, 122 bp, Homo sapiens
ggagcgccaaaaatacaccccaagcttggacggttccttttggggagagacacccgccggcggatgcgggaaccacattcatccatggcaaggacccagggccctattcagacgtcgttctc

SEQ ID NO: 401774 - DNA, 122 bp, Homo sapiens
aacgctacgaggcaggaggggttgcacaaggttcatccggaagccagaacctactcgcggcgaggggaatgggccccgcaaaaggtccacaccgggtgagaggggcgcgcaaggcccgtcac

SEQ ID NO: 401775 - DNA, 122 bp, Homo sapiens
cccgtgaggagagaggacacagggatcccggggagcggccccagactcgtaaattatggccgcatctccgcacactctctcctcacgcctcctgacaggtactgtacccgccttgggcacga

SEQ ID NO: 401776 - DNA, 122 bp, Homo sapiens
cctcatggtctgttccctactcagcctcagtttgctattcagtccctgcaactctggcctcgcgagtcagatttctgggggccgccgctagaggcgcctgagctcaaaacccggctcccctg

SEQ ID NO: 401777 - DNA, 122 bp, Homo sapiens
ccccggcgcgcgagatccgcccctttgtcaaggccagaatcgcgccggggacgaggtaggcgcagggcgggcctggaggtcccccccggccttagcagtgctctcgggggagtcgggtttgg

SEQ ID NO: 401778 - DNA, 122 bp, Homo sapiens
taaccatccagtgtctgccaagcaacggtctgattgatggtaaacaaccaaatcagaacacgcgtctctgtgcctgaactttccctatttcatttaacttttaagcatagatggggcttaat

SEQ ID NO: 401779 - DNA, 122 bp, Homo sapiens
taataggaaagtagggaagggaggaaggagaggaagaaagaaggaaaagggaaatagtaacggcacaaattagaaactgcaatgagcaaacagcaattggtttctgttctcagctaccctgt

SEQ ID NO: 401780 - DNA, 122 bp, Homo sapiens
tccacgcccacggtgccacgcgcctcgagtaccccatgttctatgaaccctgcacctggacgccccatcttctgcgcaccctgtgctagagaacccgcacgcccagggtgccctatgcctag

SEQ ID NO: 401781 - DNA, 122 bp, Homo sapiens
agcccaaagtgaggtgtgaggcccgcgatgcggcgtgcgcgcccacggagacgggctgctcggccaccaaactgttgctctcgctgttctctgttcagtggaactgaaactcggggagggtt

SEQ ID NO: 401782 - DNA, 122 bp, Homo sapiens
ttatagatatatgacagaccacctgccctcattcccagccctgctgctgggcgaaggaaacgcttcaaaaacagctcacaaagggcggcaaacaagtctgctacggtgcagcctaccgccga

SEQ ID NO: 401783 - DNA, 122 bp, Homo sapiens
agcacctctcaaactttcatgagaaatttggggtgccctggcactctgtgtttttctaaccggctcccggccgacactgaggctagtggttcttgaaccacgcgtcggtattagggtgctgt

SEQ ID NO: 401784 - DNA, 122 bp, Homo sapiens
tccatcatccctgagtagcacagtgccaggcactgcctgtcaatagctgggttccacaaacgagtgaccacagacagactgaattttcagctttgagctagccaggtctctggttttgtatt

SEQ ID NO: 401785 - DNA, 122 bp, Homo sapiens
cagcacggcaccagtcggggggcttccgggagcaggcaccagtcggggggctcccgggtccgtgaggtgggggctatgctggccagttctcctcaaaccctcgagctgctgccttcgtgagg

SEQ ID NO: 401786 - DNA, 122 bp, Homo sapiens
atgatgtgacgtcaccctgaagagccatgcacattgaggtttgccttcccttattgctgtcgggcaccctgaagccaccactgggtgaagaactctgagccagcctacaggaaaaggacaga

SEQ ID NO: 401787 - DNA, 122 bp, Homo sapiens
ccaagaaaatctagttttcaatgaataaaggctaccctttcaaccaatttgtggtgtctccggagcaaggaattgtgtcgatcgtcaccacaaaaatgcacaggcagagggcagacaggcag

SEQ ID NO: 401788 - DNA, 122 bp, Homo sapiens
tcagggatcagatccgccatctcttcccatgtgatggcactggggtgggcagaggctggccgagggccgctgaaggatggacacatcaccgctcaaaggcaaggaatgagagccagaaattt

SEQ ID NO: 401789 - DNA, 122 bp, Homo sapiens
agccaattccgtaatatgatcatggaaactgatcattgcctgatccttctaccgccttggcgcgctttcttgaggaatgtctttggttaatggcttcacggccatggaggtgacatcatgtg

SEQ ID NO: 401790 - DNA, 122 bp, Homo sapiens
tataaggctgaggagacggcggtgctcccctggaggagagaggacaagctaaaattaaggcggcctagatgactccagatgaagccggggaggccgagcccctgacagctgctcacctcctg

SEQ ID NO: 401791 - DNA, 122 bp, Homo sapiens
gtgtgtaggtcccaagaatcccccaagattgcaggtgcaacatgccccatgatttacaatcgcagcccatcatccccttcttttttattttttcagatggagtctcagtctgtcatccaggc

SEQ ID NO: 401792 - DNA, 122 bp, Homo sapiens
catggcagagagtctgacatttttgtccggaaggacttggggatgaaaacactgaatccgcggtttcccaaaggtccttccaaaggtgacggccccggcacgagttcacaaaccacagctcc

SEQ ID NO: 401793 - DNA, 122 bp, Homo sapiens
attatgttttccttccttaaaacatccctatgcacactttgtcatcatgtttttctctgccgaaccaaactttaattgttgatcagcaaacgcagccaaaacctcagcggcacagcgagcga

SEQ ID NO: 401794 - DNA, 122 bp, Homo sapiens
gaggtagagcctggacggcgccgaggagcgcagagcggcgcgcagcccgcccgccccagacggccgtctggcctcgcgcctgcctgttccctccagcccggacccccctgaaatatgttcag

SEQ ID NO: 401795 - DNA, 122 bp, Homo sapiens
cacagcttctgataccggcctcccgcactgctataaaatgcccaggttaacactgaacaacgtgagccactggactgaccaccacgtccccgctgcggactcccggcctagacttcacagtg

SEQ ID NO: 401796 - DNA, 122 bp, Homo sapiens
ctgcaccgttctggccactcttctgcttgccacactgttcctaaaaaaataatagaaatgcggccgtacctaagggtagggagactaatgctgtaatagctacagtcatattcatattaata

SEQ ID NO: 401797 - DNA, 122 bp, Homo sapiens
ccggccaagtgtccatccctgtgtcaaatggatggaatgccaggtaatccttgtactccccgtcaatcagtttggcggcattgttcctggcaaaccagcagtctatctgctcttccccgttg

SEQ ID NO: 401798 - DNA, 122 bp, Homo sapiens
gagggcgggctcgcgggagttttgcaaaccccgcccccagcacacgcgcgcacgcgtacacgcacacacactgctgggctcaccctgcctttgagaaacgcacggctggggaggcggacggg

SEQ ID NO: 401799 - DNA, 122 bp, Homo sapiens
ttgtttttgaaccccagcgcaggcagcagatggggcaggaggccgggtgagagaagtgagcgcactgctgccccgggttccacagccacgggggctgcacctcgaatggatccaaatagaaa

SEQ ID NO: 401800 - DNA, 122 bp, Homo sapiens
aagagaagggagagaggaggtgttagttaccactcttatttacagatgagcttaagcctacgaactgagcttcagcaaaaaatgaactatattgattcttgcaatggaaagtccaggagtag

SEQ ID NO: 401801 - DNA, 122 bp, Homo sapiens
cagaactgcctgggtgggaactctcccatgtctccttgatttcactgccacctctgctggcgtcctctctcatctccgccgccagcccccgcctcctttctcgggaagcttgggtctccctg

SEQ ID NO: 401802 - DNA, 122 bp, Homo sapiens
gcctaatttttaaataaatagagacgggggttgggtgtcactatttgcccaggctggtcccgaactccgggcctcaaatgatcctctgcctgggcctgtccaaagtgttgagattacaggcg

SEQ ID NO: 401803 - DNA, 122 bp, Homo sapiens
cacacacgatgtatctatgactgcacacacaggttcatcaacaccatgacagaggcgacacgtcacaatatgataaccagaacagaggacgatgacagtgagaaatgggtttcttttatggc

SEQ ID NO: 401804 - DNA, 122 bp, Homo sapiens
cgctgtgcacacctgtgccggggcactgtccggggccccacggagcatgctcaggatggccgaactgtgggcatccaccatccacttgcatccggctgaagactcctggctggggagccact

SEQ ID NO: 401805 - DNA, 122 bp, Homo sapiens
ggaacacacacccgcaacacagacacatgcatgcaaacacagcagcacgtacacatgcaacgctacacacaatgtgcacaatgcacacacacatgcatacaagcacagcaacacgtacacat

SEQ ID NO: 401806 - DNA, 122 bp, Homo sapiens
ccggaggggccagcgccgctgcctgggttcggttacagaagcggccggccgctcccccctcgctttcctgcgccgccccccaaagttggcagcccttgtgtttggccctgccccgaggttgt

SEQ ID NO: 401807 - DNA, 122 bp, Homo sapiens
tcatgtgtgggcttttgtggttttggcttgattttatatccttttgtaataaaagaaagtcggttaggtctcttagctttattctttgggggctcatgatctgaaggctttgaaggtgatcc

SEQ ID NO: 401808 - DNA, 122 bp, Homo sapiens
aggacctggctggccctaacagttttccagggaagatcttgaggagaaaccccagcatcccgcgcctctgccctctccaccatccccaaaagccccaggttccagactgaagccttcctttg

SEQ ID NO: 401809 - DNA, 122 bp, Homo sapiens
aatggtgttgatggatcaataaccacctcaatggcaatggagtgctccctcatcgcccctcgctgagacccagtggctgtgtctccatggcacagtgcctcatgtgactctggtgtgtgact

SEQ ID NO: 401810 - DNA, 122 bp, Homo sapiens
ccccgaacccaaagctctttgaaaagctgccgaagctccaaggttcctccgcttcctgcccgcaggcggaaccttagagcttcagccatggaaattaacctcttccggttggggccggaagt

SEQ ID NO: 401811 - DNA, 122 bp, Homo sapiens
ggcagcggaggcatgggagccggaacctaccgtggcaaagggccaggtcgggacgcccctcggcgcagccccaaatcctgcccgcgccccagccccgctcaggccgcgcccctgccacctct

SEQ ID NO: 401812 - DNA, 122 bp, Homo sapiens
tcccaccaccactgctgccccggctggaactgccaagggtcccctcaccgaggcacggtgcgtttcctggtgggaatgacaggaaatcaggaggccaggggagccctccacctgtgtgttta

SEQ ID NO: 401813 - DNA, 122 bp, Homo sapiens
tgcccatcccatttcctaaaggggtgtgcttttatgactttgcatccactgatcctgcctcggtggctcctgggctctctaaaatgacattttagtttcttctgatgatatcagagacacaa

SEQ ID NO: 401814 - DNA, 122 bp, Homo sapiens
ggagctacgtctgtgtgtgtcctgacggcttcgaagaaacggaagatgcctgtgtgccgccggcagaggctggtgagtggcacggctgccctccacacaggctgccctcccctgggccgcag

SEQ ID NO: 401815 - DNA, 122 bp, Homo sapiens
gagaccggccccggcggctgggccgccagtagctccagccatgggctcggggcgcgtacccgggctctgcctgcttgtcctgctggtccacgcccgcgccgcccagtacagcaaagccgcgc

SEQ ID NO: 401816 - DNA, 122 bp, Homo sapiens
ccctccccccgaatccagagccagacgctctcctttcgcagctcagctggattatctcatcgcttctcgcccttaggggcgggctggggtctgccccctcgggggacgtgaaggaggattgg

SEQ ID NO: 401817 - DNA, 122 bp, Homo sapiens
aaaaataaaaaggtattttagaatgtgtggcccggccagcagggcctgcaggccccctcccgaagccctctgcggcgcccgggttggttgcttgggcaacgtctgccgccccctaggggaca

SEQ ID NO: 401818 - DNA, 122 bp, Homo sapiens
tgtcttgggtttcagaacccgccagcaccatgcaaaagttaggacatggcctttttttgtcgcccaactgattctccgactgagatccacaagtgcagtcaccccgaggacagggaagttgg

SEQ ID NO: 401819 - DNA, 122 bp, Homo sapiens
ttcacagcaggcaaacagcctcaggtcttgtgcagggttcagacagcttagcagggaggccggggaggtttacaggagcaccagtggagactacctttgtctcaaagcagaaactgattcag

SEQ ID NO: 401820 - DNA, 122 bp, Homo sapiens
agctgtgtgtgtctgtggtgcagctgcaatgcggggtcccgtcagggaacaggagcgaggcgtttacgccataaggaggtggagaagggatggtgtgtgagtttggcaggtgctgagggcta

SEQ ID NO: 401821 - DNA, 122 bp, Homo sapiens
gtgcagcatgtggtgaggggagaagcctggggatgtgctgtccttgttgatgcctcccctcggtggctgggagctgctccggtcaaaatggcccccgtggctacatttccctgggttgggga

SEQ ID NO: 401822 - DNA, 122 bp, Homo sapiens
gaagccaagcgtaatctaaatgctatgctccttcgaggccgtaaactgacagacccgctgcgtggctgattcagtgtattgcgtttgaaaatgatgtatccattggtgtaaattacaagtag

SEQ ID NO: 401823 - DNA, 122 bp, Homo sapiens
gtactgatgggtggaaaggcaggtctaaaggggtcacgaagttctgggaggttaagggaacgaggaaggagattgagcaacaaggaaagagcttgccaagaaggaggtgtgaatattgggac

SEQ ID NO: 401824 - DNA, 122 bp, Homo sapiens
agcaaatactgaggctggaaagggcctgaacttggcagtccatagatccaggtcgagttccggtttccctgcttacggatcgggcggcctccctacgttgcgataacctctctgagccccct

SEQ ID NO: 401825 - DNA, 122 bp, Homo sapiens
tatggggactctctctattaaacccaggactccagcgaaattacagggaattcgtggtcacgggaccggcctccgccaatcgctcgtctgggcctggtggaaaacagagagcattatttggt

SEQ ID NO: 401826 - DNA, 122 bp, Homo sapiens
cctgggccgcccctcgggcctcgcgcctcaccgcacagcctgcggcctacctgcgtccgccgcgccctcggagccgctgctgctgacccccgctgacctccgctgaccccgcgctaaccccg

SEQ ID NO: 401827 - DNA, 122 bp, Homo sapiens
cggcctcgcccggcggccccgggatgggccggcaggaggccgccggggtaactccgccgtcgcgtcctctccgcccgcctcaggatgcgctacgtcgcctcctacctgctggctgccctagg

SEQ ID NO: 401828 - DNA, 122 bp, Homo sapiens
tcgctcagtcccctccctctgcagcccccgctccccctcctcttcctcctcctcccaaggcgattgtcatatgatagctaagaagtggcacattaatgaagcgccgctacaggggtcttttc

SEQ ID NO: 401829 - DNA, 122 bp, Homo sapiens
ctgctaggcactgcttaaccagagctgtgcccccgtgctatgggctggggctgaggaccacgggcctcttttccatcagctttcctgccctgttaggaccaagccgggccctgctcttccca

SEQ ID NO: 401830 - DNA, 122 bp, Homo sapiens
tccagaagctgctcatcaatctcttttagagacagacataaggcctcaggcctctgtacacgggccacttgcccagctccctcaatttctctcccctctgcccatggctggctttgcctcaa

SEQ ID NO: 401831 - DNA, 122 bp, Homo sapiens
agtgagaggagggcccggtgggcacctggaggccttgtgcctgctggcaggggcagtagccgggtgggagctgtcacgtggggctcaggcccagcaagactgtcacctgatgcttcagggcg

SEQ ID NO: 401832 - DNA, 122 bp, Homo sapiens
tgtgtacgtgcggccgtggcggggctggacagggtccgggtcgttgaggattaggctgctcgggcgtaaccggagctggggcgcggctgccaagggccggcccggaagtcccagcggtcttt

SEQ ID NO: 401833 - DNA, 122 bp, Homo sapiens
gcgggccttggctggtccctgggctgttccctggactgggtgcttgtcctgcccacttggcgcttccagtctaaggtggattcggacaaagaggctgtctcagaaaacaagctcaaggggtg

SEQ ID NO: 401834 - DNA, 122 bp, Homo sapiens
gagcgtcgccgatggtggagcgggagacgggcgtggggagccccactgcagtgctgggatcgaagtggtgctgaccccaagacctctcccctcctcctcccccgggagcttctccagggtta

SEQ ID NO: 401835 - DNA, 122 bp, Homo sapiens
ctggagacactattaagtgtcaatgaatgggacgaagagagccctactactactactacacgtttcgatcactccccaaggccgccagcatttgcttccggatggtctacagaacttggaga

SEQ ID NO: 401836 - DNA, 122 bp, Homo sapiens
aacgtgcactcccggggtggcgcttctcctcaggcagatctcgcgtggtttggtgatggccggctagtatgaaggttttccgtggcgttgagatcccacccgcccttttttttttttttttt

SEQ ID NO: 401837 - DNA, 122 bp, Homo sapiens
atataacaatgaaccagacaaggtttgtggactgaatgaatggtgagagaacgcatccaacgcacatcagaccaggcctgtggaatagacaaagtgctggcaaagtggagagactgattctg

SEQ ID NO: 401838 - DNA, 122 bp, Homo sapiens
tgcatggcctgaagagaaggcggatctaagtcctagaccccgcttcctggcgaccccacgcgtccccggaactcccacgtaccagctgccccctcgcatccctggacctcccacaacccgcc

SEQ ID NO: 401839 - DNA, 122 bp, Homo sapiens
agccacacacacacacaagtccctgagccatgcacaagcgttacactcagaacagattttcgcgcaacccatgcccaccggcccactcataccaacacgcctcacaccttcagttatccttg

SEQ ID NO: 401840 - DNA, 122 bp, Homo sapiens
caggtcctgggggatgccgacactgatacagccagtctggggaccacacttcgaggatcacgtcctcagcccctgactcacataagtgtcattcagaacagatgtctgattctaaggagcca

SEQ ID NO: 401841 - DNA, 122 bp, Homo sapiens
ttcaggcgattctcctgcctcagcctcctgagtagctgggattacaggcgtgagccacagcgccggccccaggtagtatatttttattggcacaactgccggtatttgcctgtgcaagcttt

SEQ ID NO: 401842 - DNA, 122 bp, Homo sapiens
ccaaaacgggacatcgaggtcacctccaggtggctgccatggtggggttgcgggggaccacgttcacacccactccgagggcacatcctggctgctgcacacccttcacctctgcgggatgc

SEQ ID NO: 401843 - DNA, 122 bp, Homo sapiens
tcggtagaagccagggccaccctgcatgggggatgatgccgcatccagcacagagccttgcgatcagtcactctcctccctccacaatagcggggacctccctgcccgccgcacccctgccc

SEQ ID NO: 401844 - DNA, 122 bp, Homo sapiens
aaatctcatgcatttacttttcctgtttttctgaaattcaaataagatgtgagcgacaggcgctgagtgctccagcccccatgctcagcaatcgcaagctttcttcagacctctctttgcaa

SEQ ID NO: 401845 - DNA, 122 bp, Homo sapiens
aagaggctcgagcccagggtcaccaaggggcagaaaggctaagtggggacacaggccacacgcctaactgcagaactgagcaggggacagctgctgccactcacagccccaggtactgccct

SEQ ID NO: 401846 - DNA, 122 bp, Homo sapiens
ctccgaggaaaagtgtgagaacggctgcaggcaacccaggcgtcccggcgctaggagggacgcacccaggcctgcgcgaagagagggagaaagtgaagctgggagttgccactcccagactt

SEQ ID NO: 401847 - DNA, 122 bp, Homo sapiens
ggatcagttagtcagagtctggtggtcagtgagttgcaattgttttaacattgtttatctcgaggccagtacttgcttagctactagataaaaagaaaaaaccttttgacaattagaacatg

SEQ ID NO: 401848 - DNA, 122 bp, Homo sapiens
gaaatcgtgctcacgcagaccgggcagtgcgggaaccagatcggggccaaggttggcagccggggctctgagggcccagcccgggcctgccgggtggccggggaagatgttggcagcggcgg

SEQ ID NO: 401849 - DNA, 122 bp, Homo sapiens
cacctgcagggccggggcgtgcatggcctcagggatggcctgttcagctgctgggtgactcgggtccaggtgcctcaccacctgctgagctctgtgtgatttctggacacttctgctcgttg

SEQ ID NO: 401850 - DNA, 122 bp, Homo sapiens
ccctggccgcgaaggtggcacccgcagcgggaggcggggccgggccttcgggacaaagatcgcgagatttaatggcgagtcacagctacttcttcctggcagagaccggaagtgcggtccgc

SEQ ID NO: 401851 - DNA, 122 bp, Homo sapiens
cagaggccttgaatatgaggaagtggcctttccggataaagaaactaagactcggccgggcgtggtggctcaggcctgtaatctcagcactttgggaggccgaggcggacggatcacctgag

SEQ ID NO: 401852 - DNA, 122 bp, Homo sapiens
gagcgtggacaagagcgcggggcaagtggctcggaacacaggtgaggcaggggccggggccgggccagcagtgtgcatctgggccccgggcgagtgctggggcggggtccgtgggatgaggg

SEQ ID NO: 401853 - DNA, 122 bp, Homo sapiens
cggcgcctcggccggggcccgggcaccgccgcgggagcaggcgcggctccgcacggcgggcgcactcacctcctccgtggaccggccgctccgccgccggctgtcactgcagcccactccct

SEQ ID NO: 401854 - DNA, 122 bp, Homo sapiens
aactggaatatactatatacataagattcaattacctcctactgtgtcccttccacaacacgtgggaatcatgggagctacaagatgatatttggttggggacacagccaaaccataccacc

SEQ ID NO: 401855 - DNA, 122 bp, Homo sapiens
taacactcagctgaattaaggcggtttgtcccgtcaaagccccccacggcataaaggagacgattgaggacagccacgcccaccccgatccttcgtgtcagcattggggccaccaagtgcca

SEQ ID NO: 401856 - DNA, 122 bp, Homo sapiens
ccatggcacctgctgagtgcctgacctgccccctccatcccccatggcctgcctgctcctcggtgcaaggatcacctcagctgtcacagctttagaagtgagctgtgcatgaacccctgaac

SEQ ID NO: 401857 - DNA, 122 bp, Homo sapiens
gcatgtgtagatgtgcaccgatgcaggacgtcggccagagtgcagagtgcagagtgcagccggatgtgacaggcagagcgggtcagtgggaagagctgcccagtaggagtcagggcccccag

SEQ ID NO: 401858 - DNA, 122 bp, Homo sapiens
cgctgccctccgcctgccccttcgcccctgaccccgcagtcggcgcgctgggcctgcgcccgccatccccagcgccccccaccgggccgggacctccgccagcggtcctcggcgcccttcct

SEQ ID NO: 401859 - DNA, 122 bp, Homo sapiens
ggccaccggaagcttcgggaacttccgtccgacctttaacccccattgttcctgcctccacgtcgctgtgattggttctctaagcttccgtcagtttacaatccttgcaccaggcccgtctt

SEQ ID NO: 401860 - DNA, 122 bp, Homo sapiens
acgttttttatttaacaaaccaacacaggattccagtggaatgacactggtgatgcttgccgccgccggagggcaggacgacctcctgcgactcctcatcacaaaaggcgcgaaagtgaacg

SEQ ID NO: 401861 - DNA, 122 bp, Homo sapiens
cagatggcagccccggaggcgctggtgggaggctgtgtcctggggtccaccactgctccccggtaagccaagcccgactgcccctacatggaaaattcatccctcctccagatgggggattc

SEQ ID NO: 401862 - DNA, 122 bp, Homo sapiens
ccctggggggtttacagttctgcagcagtctccatcctaattaatctgcataagaacatccgtccgcagggatgtcctgtggccctgtggccacgtctgacatgcagctaaacactggacgt

SEQ ID NO: 401863 - DNA, 122 bp, Homo sapiens
ttaccatagttctgagtctggtgtctgtcatatctgagtaaatcacccagctatgaatctcgtgaactcattgtactgagtaatcttcttggtaatctctttttttgttttttttgagatgg

SEQ ID NO: 401864 - DNA, 122 bp, Homo sapiens
taatgagactcagctgatgcctaccagctgaatgttgccctgtctctggacagcaaggcacgtctcagggtcctgggatctgggacaggtagggacattgcaccagtcgaaggggaattttg

SEQ ID NO: 401865 - DNA, 122 bp, Homo sapiens
caacaaaccagaggaattaattagaccgctgattttctccggaagcgcgaagcactaggccgtttgaggatctccgctccgctttgcctgggaccaggaaaagacgcgagagacggaactcg

SEQ ID NO: 401866 - DNA, 122 bp, Homo sapiens
aggtggccgcgctgctgcctccccggggccgaaggagtgccaacgacgagctcttccgggcgggctccagactcaggtgagccttcgccccagaacaaagtcctctggggtgaggcccaggt

SEQ ID NO: 401867 - DNA, 122 bp, Homo sapiens
agctgcccctcccctatcagaagggacccaccccccgtgctacccccacgccagcacccccggctggctgccctccccacgaccagaaggaaactgtcctgtattctctgaatacacagcct

SEQ ID NO: 401868 - DNA, 122 bp, Homo sapiens
acccagattgaggagctgaagcaggagcggcagcagctcatcctgatgctgaaccgacaccgccccacctgcatcgtccggaccgacagtgtcaagacccccgagtcagaaggcaacccact

SEQ ID NO: 401869 - DNA, 122 bp, Homo sapiens
actacttatataaatagctgcttgttggatatgtgggagcaaatttgcttgcttggttgccgtggcgcatattgggttctgcagtcattttgatgctgatgttaacacatagcacctcccat

SEQ ID NO: 401870 - DNA, 122 bp, Homo sapiens
tgccagggcacagattcccagcactctgccacgtccctggcttctcaacccaaggggagtcgactcttctggccattggcagcgccagacaattaacagtcgaaagtaattgctcttggccg

SEQ ID NO: 401871 - DNA, 122 bp, Homo sapiens
agcccgcttcgcacagcccttcctagggtgtggagagcgggccccgccctgaaggggcaccgtgggctggggggcctgttttggagcaggcaccggtggccgagctccgtgaccatgaaggt

SEQ ID NO: 401872 - DNA, 122 bp, Homo sapiens
gcgcttgcaatcccccaaccgctgagggctttagagccatactagggaggcagacaggtgcggagacttccgcaaagcaggtgctgaaaccgagggtcccaggggtcctgggaaaagaggcc

SEQ ID NO: 401873 - DNA, 122 bp, Homo sapiens
ccagcgtggatgtacacagataactatgtagctacacatcgacgcgtgagccttgagtggcggccgagcggtggccggacgctggccgcggaccctgcagagccgctgtcggagcgcccgcg

SEQ ID NO: 401874 - DNA, 122 bp, Homo sapiens
gccgcggcgctcgcgcggggacgcgggagcccagggtcggcgctgcaggcagcggggcggcgccagcaaggccagctccccggggaccctggggcagcctcgcgccctgcctgcctccctgg

SEQ ID NO: 401875 - DNA, 122 bp, Homo sapiens
tccgccttctgcagggttcccaggcccccgctccagggccgggctgacccgactcgctggcgcttcatggagaacttccaaaaggtggaaaagatcggagagggcacgtacggagttgtgta

SEQ ID NO: 401876 - DNA, 122 bp, Homo sapiens
ctcagtcctcatggcttgcatctggaggctatgggcgggggagtgctttgaatatctatacgtggaaagccttgttttttactttttaagaaagggtcgttaaattcgtgctttgtagacct

SEQ ID NO: 401877 - DNA, 122 bp, Homo sapiens
gtgtttctgggggccacaagatcggggcactcttccggtagcagctcgctctctggccaccgtcttccccagccaaccaggcctcccggaggcggccggccagaaagcatcggcgggacccc

SEQ ID NO: 401878 - DNA, 122 bp, Homo sapiens
gggacgtggcttctggagtgtgacgaataagtgcaggtgccatcaggcgtcacccggccacgggaaaggtccttgagacatggcaggagaacataagagtaatattcctgcccgtgtcccag

SEQ ID NO: 401879 - DNA, 122 bp, Homo sapiens
tcttactatgttctgggcacacttcttagcactggggataaagcagtaaacaaatcctctcgggctgggctcggtggctcatgcctgtaatcccagcacttttgggaggctgaggcgggcgg

SEQ ID NO: 401880 - DNA, 122 bp, Homo sapiens
atgtactgttttgaaatttggatgaactcttgggatctctagaaaatgcagagcaggtcacgcctgtaatcccaggactttgggaggccgaggcgggcggatcacgaggtcaggagattgag

SEQ ID NO: 401881 - DNA, 122 bp, Homo sapiens
gacctgaggggtcatctggtcaaccagcttattttacaaatgagacacaggctggcagctcgcccacagcctgtctgtcacacagggagtgggtggtacacacaagacgataactcaggctt

SEQ ID NO: 401882 - DNA, 122 bp, Homo sapiens
cacccctgcagctgacacccggcacccaggaagaagcccgtcagcccttcccttccgagacgatcctgaattccaagcagcaccgacatgccagcagggcgagccgctgctccccgcaccca

SEQ ID NO: 401883 - DNA, 122 bp, Homo sapiens
aaaacagcctgaaatactcaagtcacagaggcctcaggcgagggtccatgaagtccccctcggcactcgtgtgtgggtgggacagggccggtcctgacttggccccctccttcctccctggg

SEQ ID NO: 401884 - DNA, 122 bp, Homo sapiens
ccctgccggggctgtcgtggggaaaagatgaccctaagcccaggctgggcccacggtgaacggccactcaacacggccgctacatggagcatggttgcccgtgacacgccatgcggagacag

SEQ ID NO: 401885 - DNA, 122 bp, Homo sapiens
ggtgcagctattttatcattatttttaattgaatatatattggattgtcatcttcttgctcgttgtgttgagggggatttatcagagttacaaaaacatgaaagtttggtatatttatttca

SEQ ID NO: 401886 - DNA, 122 bp, Homo sapiens
acggtcgcctagcaacgagcggggatgcgcggggcgcctgggtgggcgaggggtgctcgccgccgccgccgcgcgccctcgggcccccgggaccgcgggaaaacttcgcggctcctcggcgc

SEQ ID NO: 401887 - DNA, 122 bp, Homo sapiens
cgagtcttcagcactgggccgcgtatgacagcatcttagtgggtgcggagcgggacagcgcgccgggggcgtggcaggggcgtggcctgtccgcggggcggggagtgcggggcggggcttcc

SEQ ID NO: 401888 - DNA, 122 bp, Homo sapiens
ggtaaacaaccaaggccacccctgcccaggcaacagctccaaggggcaggcgatggttgccggcattgagctccctgctggcgccttctggcgggacagccagtgccaaagagcgcccaggg

SEQ ID NO: 401889 - DNA, 122 bp, Homo sapiens
ttaagtccccgcgcgcgccaccagtaacggtcgcgacccaggtggagcgactgcgtgtgccgaaaaagagcttatttgctgattggcttctgccgctgtctttcacaaccgcagccagtcga

SEQ ID NO: 401890 - DNA, 122 bp, Homo sapiens
cattttgcagacggggaactgaggccccttgaggcaggacacatccagggtgacgctgctcgtaagcgtcagagcattcttttttttttttttttttttctgagacggagtctcgctctgtc

SEQ ID NO: 401891 - DNA, 122 bp, Homo sapiens
catcggaataggggagaaaagcctcagatgggcgtctgggtaagtgccctaaaaacaatgcgcatgctcagttcccaagggtgaggtgggcacagcgcatgcggaaagcccatcttaaaggg

SEQ ID NO: 401892 - DNA, 122 bp, Homo sapiens
aagcaaccaagattggccaggtgcctctgctgtgggctcctggcacgaaagggtgaagtccgtctgagtccaccgaccaatggtgacgcgcagcgccttcgcggcgcttcctgattggcggg

SEQ ID NO: 401893 - DNA, 122 bp, Homo sapiens
cggttgtggatgtgccagtcctccgcgaccctttcctgctggccttctgctttttataaacgaaaataaaagtttgatttaggcttaaagaaatgtcattctggtcgttcctccctgaagcg

SEQ ID NO: 401894 - DNA, 122 bp, Homo sapiens
tcacttaaaaaatagcagtgattgcggtccaagagatttctgtccctcgaatgtttggatcgtgatggcaagcacatttccaagagaagggcatttttatgtgatgagagcggtagtttgac

SEQ ID NO: 401895 - DNA, 122 bp, Homo sapiens
cccaggaaacgcgagtgagccgccttccggaacctggcgcacatcactttcaaaacgcagcggggcctggaaccaaggccaaggccgcctctttcggtttcacttggacgcttgttcttgct

SEQ ID NO: 401896 - DNA, 122 bp, Homo sapiens
tttccttgggaaatgcaggaagccagcaagcggccggagtctccggagcccgcaaggaggcgcgttggctgcgcagagagcgcgcttcccagctggagagcctaggaacggtggcgcgggcg

SEQ ID NO: 401897 - DNA, 122 bp, Homo sapiens
cggaggagggggcggtgaggctggctgggttggagacggaggtgtgcgcgctccaatacccgggatctctcctttgcccctcctcccaccatagggaaggaaatatggacatggttcgggtg

SEQ ID NO: 401898 - DNA, 122 bp, Homo sapiens
acctcgtgatccgcccgcctcagcctcccaaagtgctgggattacaggcatgagccaccgcgcccggccccaaaaatattttcttaataaagttagtgagaaaagtggcactgttatatttt

SEQ ID NO: 401899 - DNA, 122 bp, Homo sapiens
cttggtgcggcgtggcgcagggcgcggcgtggggcgcgcgtgggcgcggcgcaggcggcccgggtcaccatgaggactctccgcaggttgaagttcatgagttcgcccagcctcagtgacct

SEQ ID NO: 401900 - DNA, 122 bp, Homo sapiens
ctgaggtacatggttaacacaggctgtgcgtgaaggggcttttgacttttcccccggctccggcctctcgcgtctctctcctagggctgcggctgctgctgcctggcgggcacaagccgggc

SEQ ID NO: 401901 - DNA, 122 bp, Homo sapiens
gccagcacataagctgctcctgggtgctcctcatttctggcggaccccgagcctgctcttcgtccatatctgggcctagttacaccaatctgggaaaggaggcttgtactggggggttccta

SEQ ID NO: 401902 - DNA, 122 bp, Homo sapiens
ccaaagtggcaccgcggagacctgatcgccgggtccaccctgcaggaactcgccccggcgcgttgagcacagtgccccggactcagagcctggaaagccgccacgcccccggcccgccccca

SEQ ID NO: 401903 - DNA, 122 bp, Homo sapiens
aatcgtccccgtagtttgtgcgcgtgcaaaggttctcgcagctacactgccagaatagaacgtgctcctccgcttttataccccggaaaaaaggcgtggtcagttgtactcccttcccgcag

SEQ ID NO: 401904 - DNA, 122 bp, Homo sapiens
gcttcctcgctggggcgctggcgggcgggacggcggcacggactgctgtgggctctgcagcgccgccgcggcgccctataaacgctggctggggatttctctggggcggggtcaggctcggg

SEQ ID NO: 401905 - DNA, 122 bp, Homo sapiens
gccgcagccgaggaccggatagcccgccgccttcccgacgcgcactgcgccaccgcctgccggccagaggggccccatcagcgcacgactgctccagaagaccaacctggagcgccctcgcc

SEQ ID NO: 401906 - DNA, 122 bp, Homo sapiens
ggagagcgggcccgaggaagggtcactgctcgggcgcacgaaagctgtctaaggcttgggcgtatatggggaactctggcttttgccacgcacttttgggaatgggcaggagacctgcttcc

SEQ ID NO: 401907 - DNA, 122 bp, Homo sapiens
actggccttctctcatgaaaactggagagacccaggaccgtaaatagcatgggtggcaagcgtctgatgagaagggggcgaggaggcactgtgggaaactgaggcttggagaagctcagcct

SEQ ID NO: 401908 - DNA, 122 bp, Homo sapiens
gcctttcgtggtgaccaactctattgagattttttcagattatccagaagtcatgggaaccgtgggacagcagaggagcaccggagccttagtcccagcaggcctggtatagtgagagtcat

SEQ ID NO: 401909 - DNA, 122 bp, Homo sapiens
acatagagatacattctgattggtcatccaatcagagccctaaaagatgttcattttcttcgcaaaaaaaaaaaaaaaaaaactttaaacaaacatataaaggaccccattctaagaaaaag

SEQ ID NO: 401910 - DNA, 122 bp, Homo sapiens
gaatggagatggtctccacctcccacaggctggcggtatactcgggcgagggctatggggcggctcttccctgaggccccaggcctggaccccgtcgcgctgtctggcagcgtgtgctgcat

SEQ ID NO: 401911 - DNA, 122 bp, Homo sapiens
agggatgtaatactacctattaggtacaaggtgcactgttcgggtgacaggcacactaaacgcccggacttcaccactatgcaatatattcatgtaacacaactgcacgtctacctctaaat

SEQ ID NO: 401912 - DNA, 122 bp, Homo sapiens
gaggaggcgggcgccccctgctgcccgcgcgggctcctgcaggctcccagcctttcgtaccgtggcccctgaggctttcccaggctgatgatgaatgagcccagggcccgacggaggcatcc

SEQ ID NO: 401913 - DNA, 122 bp, Homo sapiens
aggtcctagcaggggtaccagaccagccagaggccccgcagccaggtccaaacaccactgcggcccctgtggactcagggcccaaggctgggctggctccagaaaccacagagaccccggct

SEQ ID NO: 401914 - DNA, 122 bp, Homo sapiens
agctgagtcaggcttcattatgttcttctcatacagacttggcagcggctgacgtgcgtgcgcagctcccctgccttcaaggtggacggcgtaggcttcctaaaacacgacacagagacaga

SEQ ID NO: 401915 - DNA, 122 bp, Homo sapiens
gcttgattaatgataaattataactacatttctggccagaacctaacatgcaattcttgtcgaccctgtgagggtggtttcagaatttataagttcagacatacatgcagactgggtggtct

SEQ ID NO: 401916 - DNA, 122 bp, Homo sapiens
tgggggatcataaccttcaaaaaataaatgggactaattcggctcggcagtctttggaaacgcaagtagctcactttccccataagcgagtctcaaggggcggtttgctgggtgagatggag

SEQ ID NO: 401917 - DNA, 122 bp, Homo sapiens
agggcaggctgctggggaccaagccctgggacacacagagcatcctgaaatgccagagaccggcagagtcacactgggaattacttgtcttcaatacataaaatattggtggggatggcaac

SEQ ID NO: 401918 - DNA, 122 bp, Homo sapiens
aaagtagcaatcctcatattttaaacaatttgcataaattcaaccaaaagcaagcctcttcgtgtaacattctgggccaataaaacaaaataaagagttcttctgaaatgttgatctattta

SEQ ID NO: 401919 - DNA, 122 bp, Homo sapiens
gggataaatactagttctgaactcccggcgccagcctaggccatttgttgtttcgggtttcggcctcattagtatgcgcctacgagggaaaatgagacttccccacaggttaataaacaacc

SEQ ID NO: 401920 - DNA, 122 bp, Homo sapiens
caggcaggcagaaattggctgttggacccggggctggcccccgcgagtcctcgcccggcccgccccactctgtccaggatctgggcaagcgctcaaagtctccccgaggcggccagaggcac

SEQ ID NO: 401921 - DNA, 122 bp, Homo sapiens
cctcccagggacggcagagaagggctggcccgagcaccgccttcgcggcgctgccggcgacggtcgctaccttcagcgccatgacggaaagtgagagcctccgcacgtcccgacacgcagat

SEQ ID NO: 401922 - DNA, 122 bp, Homo sapiens
tttttgtgttgctttttgcacgtgactttttgaagattccttgattttcttttctgcaaccgacctccattctcttttatccaagggcaccaatgaggcaaatgaaaattggttaggagatt

SEQ ID NO: 401923 - DNA, 122 bp, Homo sapiens
agtcagcagttattaaagaggaggtgtgtgggcacttagacaaggaagacgtggacgatccgcatcggtgagtaggttccctaagaactcaccctactaggggaagctttttgcttttctga

SEQ ID NO: 401924 - DNA, 122 bp, Homo sapiens
gcggcggggggtgcagctgcttgtcttctcgtgggcaggctggacagtgtgcagcatcaacgggaccctgtaccaggtaagagccacggagctcagaccccctcagccatagggacggagct

SEQ ID NO: 401925 - DNA, 122 bp, Homo sapiens
agggcggatgggatctgcctagcctgggctggagtccttgctttgctgctgctgagctgccgggcaacctcagatgaccgacttttccctttgagcctcagtttctctagctgagaaatgga

SEQ ID NO: 401926 - DNA, 122 bp, Homo sapiens
gccccgcgcgcgcggatggcggggcttggcggcgctgtggatgctgttggcgcaggtggccgagcaggtgagtcccgggcgctcccaccagcgcggaaaccgcgggtccggacagctggagg

SEQ ID NO: 401927 - DNA, 122 bp, Homo sapiens
aggacatcagggagcccgggcctaagcctggaggcccgccctctccggcgttcacagttgcgcagtcagaattgtgtgcgtcccaccgcctcagcccccagttctccgacgcccaggtgccg

SEQ ID NO: 401928 - DNA, 122 bp, Homo sapiens
gttttctttcagtaactactgaatgagagtgtttatctcaactctctatttcccaaacaacgctattaatcagacccatctccatatccactgtgagtgagacaggcatagttcaggccttc

SEQ ID NO: 401929 - DNA, 122 bp, Homo sapiens
gagtggccccaggccccacagccacgggagcagcactggacaggaggctggggaggcgtgcggcctcgtcagcacaggtggaatgcatgagaaagaattgtgcaaatagcacaattttcaag

SEQ ID NO: 401930 - DNA, 122 bp, Homo sapiens
gaggaggacaagaagggaagcagaaggtgctttggaacagtccggtgcttctgtaagaggcgtttgaacctgggcaactccacctggaataggagctgggtaaaatgaggctgaaacctact

SEQ ID NO: 401931 - DNA, 122 bp, Homo sapiens
gtttctcactctgcagtggagatgccgtcgctggttagcaatcctgcttgtggcgatattcggagacatttattgttctgcaaaccagcgtgactctcttctcctgctattaatctctatga

SEQ ID NO: 401932 - DNA, 122 bp, Homo sapiens
ggaagaatggatccagaaaaacaaccaggggctcttaactctagtttcggcaggagatcccgagttacagacctgagctcgtaaacaaacgctcaccactttacagtcgccgcctcatcctg

SEQ ID NO: 401933 - DNA, 122 bp, Homo sapiens
tccgtggggccctggctggtgtcggagccctagcgcagccatctcacaggtagaaacgcccgcgcggggcgctcactgcctcggactcggcccttccgctgcgaggccctgctgtctcgggt

SEQ ID NO: 401934 - DNA, 122 bp, Homo sapiens
cctccataggggcagtcctgtgctgctgtgcctcggtacccgcacaaggtgtctggggaccgcccggacccccccttccatcggcggcagcgccacctggcggccatggtgcggtggtgtgg

SEQ ID NO: 401935 - DNA, 122 bp, Homo sapiens
tccatgccaatggcattctaaagccctccccaagacttctgcatattcctgagggacttacgcgctctaggtcacctctgcttctgggctcccatgtctaaggtgctttgttcacaggttat

SEQ ID NO: 401936 - DNA, 122 bp, Homo sapiens
ctaacagaagaactggaacccatcccgagtgcccaggtgaggaaaaacagaagggaaagccgaacaactccaaaaaagcaaactgaagtatctggggaaatatcctaagaagcagacaacac

SEQ ID NO: 401937 - DNA, 122 bp, Homo sapiens
gtccgcgctgcaggggaacgggacctggggtccgcgctgcggggaacgggacctggggtccgcgctgcggggaaggggacctgggctctgcccagggactccacaattccttactaatgtta

SEQ ID NO: 401938 - DNA, 122 bp, Homo sapiens
tgaattgaaggacaggaaaatataaacagtgtaataaattaacattgggatagaaatacacgactgaaaagtaaagcccaagagggaaaaatgaaaatacaaaggaaagggaagcaatctca

SEQ ID NO: 401939 - DNA, 122 bp, Homo sapiens
gcaggatgtgggtggggccagataagggaataaaagcaggcgccctgggcgcagcagcaacgcgttggggtccacttcagcagtgtgggaggtttgttttttcagtcttttcataaatcttg

SEQ ID NO: 401940 - DNA, 122 bp, Homo sapiens
agtgtgaaggcaggtagcccttggggttgttgcccttgtctgtgttctggcggccccattcgtagccactgggggtcagcttgtaggccgtcagtgtacaggagcctggcgtgaagctgggg

SEQ ID NO: 401941 - DNA, 122 bp, Homo sapiens
aaaactggtgctcccaggaggaggggagcagattgaggaattactgacaccttctaggggcgaccagccagatgtgcaggtgaagcacaagacaggttctcttcatgcctccactatcctgg

SEQ ID NO: 401942 - DNA, 122 bp, Homo sapiens
aaagagaagatgtggagagactggagaggtctccatcgcgctgaaattggtgtggaacaacgggcttgcaagtttctttagctgtcgcccaccgagacacgtagccgcatgtgatcctagtt

SEQ ID NO: 401943 - DNA, 122 bp, Homo sapiens
tgctggcctcgtggtccagggggctggggatggttggcggtccggacctggccttgacctcgggcctgtcggccagctggcccaccggccgtgggttctcggcggtttcatacgataatccc

SEQ ID NO: 401944 - DNA, 122 bp, Homo sapiens
gtttttgtagctttcatgttgacagaacatcctggccactctgctgagagctccatctcccggctcccgatacactgagtcatcttccaaagaggaaaaaaaacaacaaagcagccgtcacc

SEQ ID NO: 401945 - DNA, 122 bp, Homo sapiens
ttatgactctgttaagactcctattcaacgtgcaatgcaagtttacaagtacaaagaagacgtcacagatgcatcggaagaagattagatggttttgaatttactagttaattgggtatttc

SEQ ID NO: 401946 - DNA, 122 bp, Homo sapiens
catgtctgcaacaagcaattgactcactgtgaggtccctaaatcacctgatgcccagtcacgaggaattattcaattcaaataaactattgaatagaaccacattctagactaacactataa

SEQ ID NO: 401947 - DNA, 122 bp, Homo sapiens
tgcatcaagagctttgcggagcctacagcccggatgggacgactgaggccctcccgctggcgagctggccgagggctcgtccctctccagctaaagcgccagcttacgatacagccaaactg

SEQ ID NO: 401948 - DNA, 122 bp, Homo sapiens
cagtttcgacttatcgaatttctccatctcagccatatcgggtttgtcagacatagttgccgaggaaaagcggagtgaggtgcgtgagaacgagcgaagtctggtctgcgcagtggccacca

SEQ ID NO: 401949 - DNA, 122 bp, Homo sapiens
tacgtggcggcaggcgagagagtgtgcaggggaactgccctttatactaacatcagatctcgtgagacttaatatcaagagaacagcacgggaaagacccacccccatgattcagttccctc

SEQ ID NO: 401950 - DNA, 122 bp, Homo sapiens
tgcgttaggggaggaggtggtcctcagcgtcctggaacgacaccacctgctccaatttcccgtctggaggttctggtcgaggctccgaactcgggttccctgctacctcccagactattcaa

SEQ ID NO: 401951 - DNA, 122 bp, Homo sapiens
ccacctttccatcatgtgtaaaatggggataataacacaggctggacctctgccccatcccggtccagatgtgctctaccatccagtacagctaaggaagagtcacactgggtcaggaaatt

SEQ ID NO: 401952 - DNA, 122 bp, Homo sapiens
agtcttaagcgcttttaatatggagacagatgagagcccctctccgctcccgtgtgggcccgcaggagaagcggtgatggagagccgagctcgccccttccaagcgctgccccgtgagcagt

SEQ ID NO: 401953 - DNA, 122 bp, Homo sapiens
ggggcgctttcgccgaccggcgcccggctccatggcaaccgcgggtcacgtgccgacgcgcgtcactgcccggagccatggcaaccgtgacctcaccggcgggctcgaccttcccgcgtggg

SEQ ID NO: 401954 - DNA, 122 bp, Homo sapiens
ctgggtcggggttttctttggaaagctggaccggctgtgccctgtgtgtgggagctggctcgtggggcttggaggtggcgagcgggagagtgaccacgcccctctcttgcagggaacccgag

SEQ ID NO: 401955 - DNA, 122 bp, Homo sapiens
tctcccacggcagctcctgttgggcctggcaagttagtgcccagggcaggatggggccgacgccagccccccaccctgcacagcacaaccgagccattcaaacagactcggacaggcacaag

SEQ ID NO: 401956 - DNA, 122 bp, Homo sapiens
atggtggggttcacagctttgcctaagaaatctgttcagtgtgtacattaacacaatgcacggggggaaggtgattcacaccaattcatgggggaaggtgattcacaccaatgcattgggga

SEQ ID NO: 401957 - DNA, 122 bp, Homo sapiens
aacaagtcttctccctcctctccgaagaggggcgccggaataaggcggatctcacctccccgggtcctcaagccgccgctgctcctacagacaaagtcgtccgcacctgactctgctgggcg

SEQ ID NO: 401958 - DNA, 122 bp, Homo sapiens
caagcaagaaaaaccagacacagtccctattcttgaggagcccccagtctgaaaacaagtcgtggatacacagaaaaaacattcttgtgtgtgtgatggatggtagggaacgtgtcatcaat

SEQ ID NO: 401959 - DNA, 122 bp, Homo sapiens
gggtaagctacttgatttcttaaacctgtttttttttatgtcaagtggaaatacttttgtcgtaaggttatcttgaagatttaatgaaataattatataaagcatttgagatcttttctacc

SEQ ID NO: 401960 - DNA, 122 bp, Homo sapiens
gggagaggccagcgttcgtgtgctggcccgtggcttacggtgacacctagcttagggccacggccaaccctatagtggtgtttacctgtggcagcagctgtccctgttcaaagttggcatag

SEQ ID NO: 401961 - DNA, 122 bp, Homo sapiens
ggtgggtctcacccacaggcaggtacttccggttggagctggttacagttgcccaatacccgtgtcgctgtgtgggctgtttgggaaagctgggctgagggcttggttcggagagcccgcgg

SEQ ID NO: 401962 - DNA, 122 bp, Homo sapiens
cactcctgacgctagcgagagcacgaaccccccgggaggaacaaacaactccagaggcgccgcatttaagaactgtaacactccccgtgagggtctgcggcctcattctttaaatcaatgag

SEQ ID NO: 401963 - DNA, 122 bp, Homo sapiens
tgcccctttcgggaagcgcgttccaatcgaggtcgcaatcctgtgcgtgacccttctcggcgacccggaaaaacttgtaaatataggctgggtgtttcaatagcaagcgaggtgggagggat

SEQ ID NO: 401964 - DNA, 122 bp, Homo sapiens
atttaaaaccgagcgcttcctaatttcaccgttttcagctcagctctcgggccatgaccgcgccaccgctgctttgggtagagaatagctcattccagacccttctgggccccatagagcag

SEQ ID NO: 401965 - DNA, 122 bp, Homo sapiens
gccactgccccgcagttatccacctggatgtttgatgggcatctcacattaacaattctacgtagaaatcttgatttttatatctaacttgttctgtccccagttgcactaaataataccgc

SEQ ID NO: 401966 - DNA, 122 bp, Homo sapiens
tcctcttctagcctctgctggccctgctgactcagctctcggctgtgctgctgagtcatgcgcttcctcccttccgaggcccagcaccttcatggctgggatatgctgagcctggatcctag

SEQ ID NO: 401967 - DNA, 122 bp, Homo sapiens
gagagctcttgtcagagctattagctctgctttctaagcagaagtttctgcagacagagacggtacctctactgctgagtccaaagtcaccgcggcatacccagctcggcagactcccctta

SEQ ID NO: 401968 - DNA, 122 bp, Homo sapiens
ttttgtctctgtgaacttattacccagcatgtcttcacgcctttacattcagcgtgttcacgtgctcagcgcggtgttcatgcccgcaccattgtgtgatcaccatcactgggtgaagggct

SEQ ID NO: 401969 - DNA, 122 bp, Homo sapiens
gcgcggaagcggagggatctcaggaattgtagtccgcggggtgggcgcggttctcgcttccggccagtttgtctggcctgcgcttgcgcgggtctccgccgcctgggctcctagggactgtg

SEQ ID NO: 401970 - DNA, 122 bp, Homo sapiens
gaccaggatgagacatcgagtgtgaagagtgatggggctggtggggcgcgggcttccttccgtggccgtggacgggggcgtggtcgcggccggggacgcggccggggtggcactcgaagtac

SEQ ID NO: 401971 - DNA, 122 bp, Homo sapiens
gagtcctgaaataataagggatggtcagaggttctccccctgctccagagagcagcatcacgcccaactcgagtagtgggggggcccgctctcttttgacagacagccctgaggagcgtgct

SEQ ID NO: 401972 - DNA, 122 bp, Homo sapiens
ctgtgagctgccgtgtgcctgggccaccttgggggtgctacagctgtgatccacctgcaccgtgacccacaggggcctgcgggactgtggtgttgggtgtccgcgcctcgttactgggggac

SEQ ID NO: 401973 - DNA, 122 bp, Homo sapiens
gtccaatcggctgggagcctcgtggaggctgaggtgagtcctggaggtgcgtggttggggcggagagcattatctgcggctccgattttgcagattctggctgaggcgttcgtgatgtcagc

SEQ ID NO: 401974 - DNA, 122 bp, Homo sapiens
gaagaggcaaaccgagtgaaattgcttacataaaagccagatagagcctggctattccaccgaaggcaataattataaagctgcttcagagcacagagagttccaagaatggaatacgcatt

SEQ ID NO: 401975 - DNA, 122 bp, Homo sapiens
tcacctacactaggaccacacacgcgcatgcacgtgggcgcgcacacacaggcacacaaacggttgtcctcacacagattcagtcagatcatcctatgtggctgcagacattacctagacga

SEQ ID NO: 401976 - DNA, 122 bp, Homo sapiens
ggcagccgggcctcgggctgggtgggggcggaacttggcggaagtgcgcgctactcccctcgcagatgcaagtggggaggctgtttgtcccacagcgggcagggggaagtcaggaaaacgta

SEQ ID NO: 401977 - DNA, 122 bp, Homo sapiens
cttgctcctgacaatatactactgttacagcaattctgtagccagtaagctggctggcaacgtgtaaagtggattatatctacaccatggcccagccttccttccccatgaggaagaggctt

SEQ ID NO: 401978 - DNA, 122 bp, Homo sapiens
ttctgctggtgcggggaggcccgtggcgcatgcgcctggctcagcgtttgtttttaagcacgggcaagaccacgtggtttggagggacgggctcagcagcgcctttctacttgcgtgcgagc

SEQ ID NO: 401979 - DNA, 122 bp, Homo sapiens
actacaagtactcacgctcagctatttttccttttcttttctttttttgagatggagtctcgctctgtcacccaggctggagtgcagtggcgccatctcggctcactgcaagctccgcctcc

SEQ ID NO: 401980 - DNA, 122 bp, Homo sapiens
tccgaaggggtggggcgatccctgaactggagttagtgggcgtggcctcagaggcgcctgcgcggaggcggttggagggaggcccgattcccctttgttcgggttcgccattttgctaggca

SEQ ID NO: 401981 - DNA, 122 bp, Homo sapiens
acatttggggagcactgctgcacttctaaagaaagaagaaaaggagatttgtaatttatgcggcatgcatgatgaatgtactccacagcagacaatgtcctccattcaagataccaaagcag

SEQ ID NO: 401982 - DNA, 122 bp, Homo sapiens
cttacagccagtaggggttttcatctatgcctgaaccccaggtagtacagaaatggtgaccggttcatggttgggggcttgttatttcctgcttataaaatttttgttgattttgaagggcc

SEQ ID NO: 401983 - DNA, 122 bp, Homo sapiens
tggacgggaagaaggcacaggagagagacaagatggaaagagggtggaccagggacgagccgggagtctcaaagccatggggtcaaatcagttagcctggggcagacgctagggcggccaac

SEQ ID NO: 401984 - DNA, 122 bp, Homo sapiens
atgtcctgctgcttctgcaaaaaactcagagtggggtggggagcatgttcatttgtacctcgagttttaaactggttcctagggatgtgtgagaataaactagactctgaacaactgctttg

SEQ ID NO: 401985 - DNA, 122 bp, Homo sapiens
cagtacgagctggacctgcgggagcctgcgctgggccagggcagcttttctgtgtgtcgccgctgccgccagcgccagagcggccaggagttcgcagtcaagatcctcagtcgcaggtggga

SEQ ID NO: 401986 - DNA, 122 bp, Homo sapiens
tgccggtcccaggctgttgagggcgcctcctcagagtccctgtggcccccgcagcttccccggaagaaacccgtgcatccatcggctagcccaagcccaagctcctcccggagctccccgag

SEQ ID NO: 401987 - DNA, 122 bp, Homo sapiens
ttggcgttccttttcacctcttcctttatgcatttgtagttggcgttccgggccgcgtggcggtgaatgccttggctgtaggagaacccggaacggcctccaaaccagcttctcccattgga

SEQ ID NO: 401988 - DNA, 122 bp, Homo sapiens
ttattctggcactgtgctttgtttggctggttaaagaacctgccttgggtaaccagagatcggagttttctaaagtcagcggggtttgtctggggaccccgaatttacatacagacgatctc

SEQ ID NO: 401989 - DNA, 122 bp, Homo sapiens
tgtgacagctgaccaactgtttttgatttctaaaggactgttctgcttccaaaccattaccgtaaaagcaatttttaacctcttccctcaaattagtttgtaattcctttcattttgtcatt

SEQ ID NO: 401990 - DNA, 122 bp, Homo sapiens
tcccacagcctccgagctcacggggccagcactgtgggcacaggggagcccccgacctagcgcggccgagctgtctgtccaagcctgggccccagcacccagcgcaagctgctgctaagatg

SEQ ID NO: 401991 - DNA, 122 bp, Homo sapiens
ctctacatccattttggggttgagggggcactaccatttgtgttcctctgctaacaagggcgagaaaccccacctcagggctggggtcgccaaaagccacaagtacctcagggaagtgtgcc

SEQ ID NO: 401992 - DNA, 122 bp, Homo sapiens
gctgcctgagaggaggaagcatgttcccctaaatcatcattgtattccccagacccagcacggtgctacctggcaccctgttagctataacggagtcgctgcgcaataactgaatgaaaggt

SEQ ID NO: 401993 - DNA, 122 bp, Homo sapiens
gtactaataaattcaatcaatatacttcattcatttactctttcaataaatatatactaacgcccctacctgaaggcagataacaagcccagcactgcaggagtagtgaaaagagggacacg

SEQ ID NO: 401994 - DNA, 122 bp, Homo sapiens
accatttgggatgaacatgacaacaggactcgactggtggagaggattgatactgtcaaccggtggaaggagatgctggacaagtgtctgacagatttagatgccgagatcgatgccctgac

SEQ ID NO: 401995 - DNA, 122 bp, Homo sapiens
cattccaaccacccagcgacggcgaatctcaggcgtgtgcacaacgagcgggggcccttccgtgcgtgtccccccagaatccttgaaccgccctctaggtgcgaccctggacgttcccccag

SEQ ID NO: 401996 - DNA, 122 bp, Homo sapiens
gaaacaaagaaactcccaacttctccctctggctcgcgctggcaccctctcggctggcaacgccgccgtccggaccatcgccacccatcgccacgctgtgcctggcccccgcagaccctctc

SEQ ID NO: 401997 - DNA, 122 bp, Homo sapiens
accaggtgctgtataagtgtttaatgggttaatcaaccaatcaactccacattaaaggagcgccgtcacgtgcatgggtataggaggaaaggtcatgcaacagtctgttcccacatggaggt

SEQ ID NO: 401998 - DNA, 122 bp, Homo sapiens
ctcttcctagtgacataaacccactctgcacataccagttgctctgtcccagctgtgctgcggtggtgctgggacaaaagaagcatgagacgcagactctgtccctcaaagaactcccagtg

SEQ ID NO: 401999 - DNA, 122 bp, Homo sapiens
ttaactaatttcataccaacaaccctgtaagactgatattatcaatccccattttaagtacgtggaacaaaagaagaaagaggcaaacaacatgctcaaagatttacaaagccaagaaatca

SEQ ID NO: 402000 - DNA, 122 bp, Homo sapiens
tcccatcccattaaaaggcctagatgtctgcaagtcaaattcagccttgcttccccttctcgccctctggtgatttaaaatagggatacatcatctacttggaataaatgactaatttttct

SEQ ID NO: 402001 - DNA, 122 bp, Homo sapiens
cataacctcctggaccaagtcccaagcaaggcccagaggagctcaaggacccactctccccgggacactcctcgctctctagttggaaggaggaaatgaatgtcccccagtaattgaaggct

SEQ ID NO: 402002 - DNA, 122 bp, Homo sapiens
gtctttcagcgccgaacagctgcagctgctggagctcgtcttccgccggacccggtaccccgacatccacttgcgcgagcgcctggccgcgctcaccctgctccccgagtccaggatccagg

SEQ ID NO: 402003 - DNA, 122 bp, Homo sapiens
ggtggtgagttttgccagccatggccagggtttggctccactggtggcacacgtggcctccgtggtatggacctggtggcttctccatcccactgtggcctctgtggtatggacctggtggc

SEQ ID NO: 402004 - DNA, 122 bp, Homo sapiens
agcccggcttgcataggtcacagcgctctccctgcacatgctccttgcacacacactgcccggtcactgggtcacagggagcccctggcactgccccatccggatcacactcgcaggctgag

SEQ ID NO: 402005 - DNA, 122 bp, Homo sapiens
ctgtgttcggcggggaggcgagagcgccggttcagccggagaccgctggggggaaccgcgcggaacacgctccgggcggccattttgtaagtcgacaaaagttatttttctttaagcatttt

SEQ ID NO: 402006 - DNA, 122 bp, Homo sapiens
ggaaattatatataatttcaacaaacatttattgatctctcactcttcggtgtggcaatccgctgtctctagtgaaaagatatgaaggaaataatgttaagtaacaaactagagtacaaaaa

SEQ ID NO: 402007 - DNA, 122 bp, Homo sapiens
attatgctaaacatttagtcagtgtctaagaaagccttgattgatgggctgatttagatccggaggcactttcagcagtaaaatgtgaatccttttgtatgctaagtttttatttaatttgt

SEQ ID NO: 402008 - DNA, 122 bp, Homo sapiens
gcccgcgtttctaaactttgtctggataaggcgcacgcttggcgacgtcgaaggtccgtccgcagttaaggaagcttttgcagccggacaggtcgcgaagcacacatggggcagggtccgcg

SEQ ID NO: 402009 - DNA, 122 bp, Homo sapiens
ccccggggcgcttagcgcagcgcagctggagcagctgcgaaaattcaaggtgggtgcgcccgcgcccccatccagcgtccaccaaagtgtagctgccccaggactggggccccagactggga

SEQ ID NO: 402010 - DNA, 122 bp, Homo sapiens
acctgaacgagtgagcggaccctgtctcataaaaaaagaaaaaagaaaacacacaagatgcgcctagttaacaccgccaattggtcactgctagtcgcgattccatatcgggagcttaacaa

SEQ ID NO: 402011 - DNA, 122 bp, Homo sapiens
cttctggcaaaagcgacctagcagaaactctaggcaccctccctcagctttgcctaatatcgggtgtagcgggaagcccagaggagaagggcctggcactggccctggcttctcagagacct

SEQ ID NO: 402012 - DNA, 122 bp, Homo sapiens
ccgacacccacacactgacctgcaaagagtcccttggtgcccgactcggcccggatcctccgcagcagcagccaggtggagtccacatgcagggggttcactgcaaacgcgaggccggctca

SEQ ID NO: 402013 - DNA, 122 bp, Homo sapiens
gctggttcatttctctttaaatctggcagcacgtggggctgcattgtgaagccaccaacccgcctccccccttccactccgcacacggacgtctccactgcgcatgctccgcgcacacagtc

SEQ ID NO: 402014 - DNA, 122 bp, Homo sapiens
cagcctgcggagtgtacctctatagctgtcatttcactcctgtgttttctcggccttgggcgaggatcccatgctgctggtaatgaaagctgcctgttccctcggttgttttcacagtccct

SEQ ID NO: 402015 - DNA, 122 bp, Homo sapiens
agggttggtgttgtggatttatgagtcatgcccatgcaaggcctggtggatgaggtcacccgaggagggagaatgtggtttctgagactaatagcttccctctgtatattgatatctatctg

SEQ ID NO: 402016 - DNA, 122 bp, Homo sapiens
agattcgagacataaacgccgagtcctcgcacagagcctgataggatcattgcaaagattcgagacataaacgtcaagtcctcgcacagagcctgatacatggcacatgatgatcacatttc

SEQ ID NO: 402017 - DNA, 122 bp, Homo sapiens
gctggggttgtggaagatgataaggaccacaatggcattttcacaggagatgagggttcccgaggtacacaagacaatgtcccaggggttgactacgagctcaggctctggctctacggcag

SEQ ID NO: 402018 - DNA, 122 bp, Homo sapiens
catatctacagaaaattcttacgctctgtggaggtagtgaatgtgtgtgtgcgtgtctgccggaggtcacatgacggtttcattctatttggtggagcagcttgactttttttccccttgct

SEQ ID NO: 402019 - DNA, 122 bp, Homo sapiens
aaactcacccaatcaacctcacacctcaaactccggggaagcccgtgcccaaaattgtgccgaattttgtaaatgtcctgaactggagtaaacttgaggtggacaaaaaaaaaagcacaact

SEQ ID NO: 402020 - DNA, 122 bp, Homo sapiens
ctgtcgttcgcctataaagaagagaccgcgtcagtctcggcagcgatgataggcgggctgcgccacggctctgcccccgagatgggctgggcgatcacggggaggacccggcgtgcaagtgt

SEQ ID NO: 402021 - DNA, 122 bp, Homo sapiens
aagctgtctttcttctagatctctctacacatctttgtatactttattattattatttatcgttttcatttttaagcacaatactcaacaatacacttaatcttatgaggaaggctttaggg

SEQ ID NO: 402022 - DNA, 122 bp, Homo sapiens
gcccggtccctggccgagatgccgtctagcctcctggctggccccgggtcatccggtccacgcctctgcctctggccagctctgccagatggcaaagaccttttctgtccatagggacccct

SEQ ID NO: 402023 - DNA, 122 bp, Homo sapiens
aaatccacacagtttttataaagcagccaattgccaacaagttctttgggcctgactgagcgcctctctttctataaaataaatcatgtttacttttaaagaagtaaaacaattgattactc

SEQ ID NO: 402024 - DNA, 122 bp, Homo sapiens
tctttttatctttatattaatttgctttgctgcagtgtttctgaaagagaatgggccgctcgttctgaagatttaaggtgtttctttgccaataaagaaatagcaattgaacatattttatc

SEQ ID NO: 402025 - DNA, 122 bp, Homo sapiens
ctgggtggcaggtaagaccagaagagaaaatgttttacagatgtcagagggttgggacttcggagctgcccacattcgctaaatgagctaagccgacatctgcagaaacgccctcgtaatgg

SEQ ID NO: 402026 - DNA, 122 bp, Homo sapiens
tgggggctgcagaaggcccaggctgccggcaccggatagaagtgagcacgaagctccctgcgccagtggaacttttatcccggctcccaccgcgaagcgtttaaattgcttccccagggcca

SEQ ID NO: 402027 - DNA, 122 bp, Homo sapiens
aatttcccattcttacttactaaaatatatatagaaatatatacgaacaaaacacacgcgcgcacacacacacatacacgaaagagagagaaacaaacttttcaaggcttatattcaaccat

SEQ ID NO: 402028 - DNA, 122 bp, Homo sapiens
caataacctgccatctgccaaggactgttgtgtaccctgctaaattaatatgttgaagcccgaatcctctcctcactcctatgtgactgtattggagacagtccttttaaggagataattaa

SEQ ID NO: 402029 - DNA, 122 bp, Homo sapiens
cttgccctgctgcctctcacctcttaaccagaggcttgcttttaatatccctggttttgccggctaggccacgagatggagaagcagggagggcagctgctgaagccttcagctaccagcac

SEQ ID NO: 402030 - DNA, 122 bp, Homo sapiens
atccaatcagaggtgccggggcagggccctgcccattgtttatccaggcacagagtgggtcgcattcctgtcctcacctttgtccttgcgcagccggtggttgatatccgctgtatccatcc

SEQ ID NO: 402031 - DNA, 122 bp, Homo sapiens
aaggatggaaggaattgctttcttgtaacttatgacatggaaaatgagtttccaggagctcgtcctggtggaattagtcctatttttcccatgccagattttcagccaatgaataatattca

SEQ ID NO: 402032 - DNA, 122 bp, Homo sapiens
tggccatgatgtcgccgcagatgcttaccccgcaacagatgcagcagatcctgtcgcccccgcagctgcaggccttgctccagcagcagcaagccctcatgctccagcaggtgagtctggcc

SEQ ID NO: 402033 - DNA, 122 bp, Homo sapiens
agaggtgtgctatccaaccttctgtaaagtagaattccttcattccgtgcttcatttttccgcatgacacttattattgcctgacgttacagacttgtttatttgtttaccttctgtcaccc

SEQ ID NO: 402034 - DNA, 122 bp, Homo sapiens
ctacttgcctctgtccccaccccgccacgtgcgcaggcagggagggcggtcctcaagcttcgaacaaggtcaaagacgttgttcagacgttgctgctgtggcttaggagaggagcagcccag

SEQ ID NO: 402035 - DNA, 122 bp, Homo sapiens
cgctgtcatcatccacgtacacggaacgcaggacgtacaggaccccacacaccatgaaggcgttggatgccgagcgcttgtcgtaacccgtctcccacgtgccctcaaagcgcagtgtgtag

SEQ ID NO: 402036 - DNA, 122 bp, Homo sapiens
cagtgggagctccgagcaggggatgaggtcgtccaggaaggggcgggagacgcagcgtgacgcactgacccagggcccagctcagatgccagtacctcacccggtggggtccagcctccgcg

SEQ ID NO: 402037 - DNA, 122 bp, Homo sapiens
tcgtcactgcctccccggagctgcggggcagtcggacgcagagctgcctaaccgcaagaacgcctggccggagctgccctctgcagccgagccggcgccccctgcccttcgccgccgcgctg

SEQ ID NO: 402038 - DNA, 122 bp, Homo sapiens
gttgggtatcagcgcatcgcccggggaaagttcgtaggcaacattcatttgcacaacgagcgcactttgaaagactccagcgcaggcctgtgttcctggccgcaacaaaacacctgcttgaa

SEQ ID NO: 402039 - DNA, 122 bp, Homo sapiens
gattatttcttggaaggctttccagcccccatctcatcttagacatgaatgtgctcggagcggctggtgacctgcccaaggtcagccagctagataaacctgtcagcggagaggtttggggg

SEQ ID NO: 402040 - DNA, 122 bp, Homo sapiens
aaacccctgcggggtgaaaatgtttttattataactttggtcagacggggcacagccgggcgggggctctgagggtgctgggaagctatccagcccccaactcccccctcccccgggcgcgc

SEQ ID NO: 402041 - DNA, 122 bp, Homo sapiens
tgggcagcgtctgtgggtctagtggcgaggtctctagttctgagtctccagggagaggtgcgcagggagcccagggccccccttcccccacggcacacaaacgtctatctccccgcagcctg

SEQ ID NO: 402042 - DNA, 122 bp, Homo sapiens
aactggcccttacctgcatctgccctgctttattttcctgagtaacacgcacgtaacacgcgtcaccacctggcctgctcactgatgtgactgctcattgaccctcccagactcagtggggt

SEQ ID NO: 402043 - DNA, 122 bp, Homo sapiens
ctggagagattccatgttgatgtgtgagatccccgaaagcaagcttgtgggacgcgggtgcggaggtagcagccaggcgtgctcgtctcgacttgccccccagaacggcagtcgtggggatg

SEQ ID NO: 402044 - DNA, 122 bp, Homo sapiens
gccgaggaggtttgggttttctcaggtacagacgctatgcaccgcgtcccctgaggagcccgggcagtggcgagccgtccggcccctccgctgcgtgtgtggggattaatgtcccggcgtgg

SEQ ID NO: 402045 - DNA, 122 bp, Homo sapiens
acacacccgtgctatttcgtttctgtgctctctccgttgggctctaccgctggaagcccccgttccagagggaggaggccttgcagagaccctgcaacaatcccactgagtggaagctgaag

SEQ ID NO: 402046 - DNA, 122 bp, Homo sapiens
gcggggcaccacgggatatagagtccccaggcctgggaattcacttaaatgacacgtcgccgccctacaactcccaggaggcatcgcggcgcaagtggccgcgggagtcgtcggaggcgtgg

SEQ ID NO: 402047 - DNA, 122 bp, Homo sapiens
gacagggcattctgactttcttggtgactgagaagcataaaccctctaattagcagttcccgattcacagttgaggaggctgaaaatccagaaagaggacaatgctggtgccagtagttcat

SEQ ID NO: 402048 - DNA, 122 bp, Homo sapiens
attaatgcagtgtatgtatgctacaaatgggttacaaaggcaatgagatattgactccttcggtccttagggtggccggaaacctcatgatggtcagccttgccctggcgggaagcagcttc

SEQ ID NO: 402049 - DNA, 122 bp, Homo sapiens
ccccgtcttcccctcactgaggggacctccgctctccagaccccgggccgggggcaacagcgacccacagccgctcggacgcccaaagtcgcatcccacccggcagcccctcacgacagccg

SEQ ID NO: 402050 - DNA, 122 bp, Homo sapiens
ccagtgtcgggcccaggaagagcgggatgaaagggggagggaagcccgctggtagccaggcggagccagaaaaataggaggtgcagagcgaaggcctctgctaggccgctggcctgccacct

SEQ ID NO: 402051 - DNA, 122 bp, Homo sapiens
actaaggttaagagagggcaagtaaatttgtccgagatcgtatagctggtacttggtgaacgtggtctaacccagacaccgcgttctccctggtgactccattttgtaaaaccagagctgtt

SEQ ID NO: 402052 - DNA, 122 bp, Homo sapiens
aatgtgaccctcgagccagcgcagcgtcaatgtgggcaaggagggcgcctcacaggatgccggtgtcccacagaggatactcagggtcaccccagaggagatagggggagtagccagtggtg

SEQ ID NO: 402053 - DNA, 122 bp, Homo sapiens
ggctgaagggctcctcaagcgcggccagagtaggcgccaaggccgaggaggcgcggagagcgagggagggctgcaagggctgccggcacgctgtcacctctcaaaaatacaaaaaaaaaaaa

SEQ ID NO: 402054 - DNA, 122 bp, Homo sapiens
acagtgtgatctgtgatcaggagggtaggggtgtctatttgggggtattgtgggggtgtgcgtctcagatctggaggcaataagaggtgttgggggtcatttatagggtgatatacacattt

SEQ ID NO: 402055 - DNA, 122 bp, Homo sapiens
atgagcctggctacgttgtagatgtcgttgaccaggccctcgatcagtgccaggaagccgcgatctgagcccacctccagggtcgggttgaaggtcagcccatcctcgtccagctccatgcg

SEQ ID NO: 402056 - DNA, 122 bp, Homo sapiens
ttctgcaaaatgtcgaaggcacaaagagcagtcaaccactcacatctaattccttactaccgctaactccagtcataaacgtttaattttcttttggaaacctacttttttctttataaaaa

SEQ ID NO: 402057 - DNA, 122 bp, Homo sapiens
cgccggcgccctctgccggcaacctccggaagcacactaggaggttccagccgatctggtcgaggggctccacggaggactccatttacgttacgcaaattccctaccccagccggccggag

SEQ ID NO: 402058 - DNA, 122 bp, Homo sapiens
gtagtcccgcggagacagcaggcagccgtggctgacgcgggaccaaggcttggcagggagcgcgctgctgtggaaggtccttgggaggctgcgaccgcctcggagagggcgggcgggggaga

SEQ ID NO: 402059 - DNA, 122 bp, Homo sapiens
ctgcgctcccagtccccgggccgcgcttcggacaaagttctcaggcgcgcgcggtgatctcggctctccgccgctgcccggagcgtcatccacgttcggttccctcccacattagacaagaa

SEQ ID NO: 402060 - DNA, 122 bp, Homo sapiens
aatcctgtcatttgcagcaacatggatggaactggaggacatgttaactgacttaagccacgaacagaaagttaaaacactgcatgttctcactcatatgtgacgcttttaaaaagttgatt

SEQ ID NO: 402061 - DNA, 122 bp, Homo sapiens
catacctcagtgccctgaagacctaggtccagcttcctaacctgctggccataagaccctcgtagcggcacacattggccatctctcccaaacaactgcatacccgttactcttccaaagtc

SEQ ID NO: 402062 - DNA, 122 bp, Homo sapiens
gtcatcaatcacttcttttagaaaacgtacccactacccatatcactctagagttggtttcgatgcccttgtgttattcttagcattcgtcatactgtatggcaattctgtttcctctatgg

SEQ ID NO: 402063 - DNA, 122 bp, Homo sapiens
catgcgaggaggttccgcatgcgcggtggagtgagcgaagcgcacgctgaggaggatcggcggccggtgagggggaagcaagtctggtctctgtgattgaagaagtcggctctgggctccag

SEQ ID NO: 402064 - DNA, 122 bp, Homo sapiens
gacatctgctctccttctcttgcccaaatacggtttctgaatagacaagtaattctgatccgtggtcttctggaggaagcaataatagaagtagaaatcttatacctagagaggaactggag

SEQ ID NO: 402065 - DNA, 122 bp, Homo sapiens
gatgctgcgggacatgaccggcctcccgcacaaccgaaagtgcttcgactgcgaccagcgcggccccacctacgttaacatgacggtcggctccttcgtgtgtacctcctgctccggcagcc

SEQ ID NO: 402066 - DNA, 122 bp, Homo sapiens
ccagagcactttgcacgcatctctgctatagcagttgtcttgttgcttttaacatttgtgcgacaggttataagagtttacatgaggccttaagaaatttggctcagggccagagctagtat

SEQ ID NO: 402067 - DNA, 122 bp, Homo sapiens
taacacacaaagagctcttcaaacacaataaaaagacaaaaagaccgacagaaaaacagacgagaaatatgagtaggcaaatgacctaacagctccactggccaggaaatttatgaaaaggt

SEQ ID NO: 402068 - DNA, 122 bp, Homo sapiens
gagcgcgacgcagccaagcacaggctcgtggtgcttgtcaaggacaatggcgagcctccgcgctcggccaccgccacgctgcacgtgctcctggtggatggcttctcccagccctacctgcc

SEQ ID NO: 402069 - DNA, 122 bp, Homo sapiens
cggctagcggcagagaggagcttagcaactgggccagtagctgctgtgctcgacttctcccggccttagctgcctccccgcaaggcagggctccgaacctgcagcccgccatgcctgagcct

SEQ ID NO: 402070 - DNA, 122 bp, Homo sapiens
ggcaggaatcagctctcagaattccacaccaaggccttctgggctcccccggtcttcccacggacgagacacaagtgacccttggaaacttctagagaaatgaaaggtgaaatgacaaattc

SEQ ID NO: 402071 - DNA, 122 bp, Homo sapiens
tttaagtgagcagtacagagaaacgagcccagggctgggcacccagcccagcaggttctccgtgatgggcagcccctttccactgctctgagtcaccccatctcccgacgacgcacatgccc

SEQ ID NO: 402072 - DNA, 122 bp, Homo sapiens
caactacacgagcggcgctgccaccggctggcccagcatggcgcgcatcgcgcagagcaccgaggtgctgttccagggccaggcatccctcgactgcggccacggccaccccgacggccgcc

SEQ ID NO: 402073 - DNA, 122 bp, Homo sapiens
gcaggaagcccagggtggtggcagtatcagcagcagcagctctgccctaccttgcccatgcgtttccaggggagccaagaattattttgccgcaacactgaggtgtggctgattggaaaatt

SEQ ID NO: 402074 - DNA, 122 bp, Homo sapiens
cttggacaagtagtgccaggtctgatgccgggtgtggtgagtgccgccgggacccaggtgcgccgcctcgatgaggtcccggcgtcgctccggctgcagcaccacctccagctccgcgaagg

SEQ ID NO: 402075 - DNA, 122 bp, Homo sapiens
atcctctcagaatagtaacatttaagttgagacagagcttggtcttcggtaggtgcttaacgaaaaccattttcccacaaacttagttctggaaacgacaaagagaggaaaaagtgtactca

SEQ ID NO: 402076 - DNA, 122 bp, Homo sapiens
gggagggccctgtcccctgtccctttaaggaggagggccaaacgccggcctagagtgcggcgtagcccccacccgccgtgccctcaccccagagcagctgcagcctcagccggccgcccctc

SEQ ID NO: 402077 - DNA, 122 bp, Homo sapiens
tgttggtgcccatgacctgcaagtccaaaaggaaactccaacttgttctgcagggaaattcgggcacgctgagttcaccgagaactccaaggagtcaacgagggcgggtgcccctacacttc

SEQ ID NO: 402078 - DNA, 122 bp, Homo sapiens
gtctgagtgttagcttctgatattgttcttcattcattcaccatatatttatggggcatccggtaagggcctggccctctttagcatggagaacacagcagatatcaacagacagaatcacg

SEQ ID NO: 402079 - DNA, 122 bp, Homo sapiens
ggccccacctgaggcgggcggggcagacgggggcggggccgcagggccggaggggcgtggcgtacccacctgaggcggcctggtgagcggggcccggccggggtgggcggggaggaggcggg

SEQ ID NO: 402080 - DNA, 122 bp, Homo sapiens
atttatttatttatttatttgacagtctagctctatcgcacagaccggagcgcagtggagcgatctcggctctctgcaacctccacctctccggttcaagccattcttgtgcctcagcctcc

SEQ ID NO: 402081 - DNA, 122 bp, Homo sapiens
atacatactactgctttgagatcattaaagaaaaaaaaagttttaaaattgtttaatttccgaagtcctttctagttggcaaactcaactggagaaaagccatgagagtcaccgatgaacac

SEQ ID NO: 402082 - DNA, 122 bp, Homo sapiens
tcgccagggtgttatcgccagccagtccccttccgcatgcccaagggcagcctcaggaagcgagcccaccaccgtcggcccagcgcctgttgatcggccaggccttctgggccggtcatact

SEQ ID NO: 402083 - DNA, 122 bp, Homo sapiens
acagaatcctcttcctgttctttttaaactgcaattcctgaactacaaatcctggccgggcgtggtggttcaggcctgtaatcccagcactttgggaggccaaggtgggcggatcgcttcag

SEQ ID NO: 402084 - DNA, 122 bp, Homo sapiens
ggccagctggagttccgggtgggcgtgggcttggtaggacccgcactcgcagcagctggccggccctgccggccccgggcaatgaggggcctagcacctgggccagcggctgcggagggtgt

SEQ ID NO: 402085 - DNA, 122 bp, Homo sapiens
aaagcaaataggaaaggcacagggctagaaagcaggagatataaactccggtctgtgggacgccatcgctcatgctcctaccatgtggcctttgcaggtccgggacaagggggtcggagcca

SEQ ID NO: 402086 - DNA, 122 bp, Homo sapiens
ttgctactaataattaaattcttggtgttttttttttaagttttcccacgagcaaggcagcgaaaatagaatgtggtagatagaattccaagcagccttcaagattcttgcccactggtata

SEQ ID NO: 402087 - DNA, 122 bp, Homo sapiens
gccaagatcacacagctgtgactcatactggacaggccgagtcctagaacagcacacacacggctctccagccattgagggaaggcaaatggaggtgaagtaatagtggtaagttcctgcca

SEQ ID NO: 402088 - DNA, 122 bp, Homo sapiens
aaatgtatagctcaatacattttcacagcaggaacagatctgtgcagcgtgcacccagaccgagaagcagagcatgaccagcagcatggaaacccccactctttgcggtcactgctcagact

SEQ ID NO: 402089 - DNA, 122 bp, Homo sapiens
gcaagatccgggtgaggcccgtgccggtcgggggtgggaagccaggtctcggcgagcgggcggttgtcaggagtaacggggactgtgggcccgggtggacgccgcggcctggcctccgctgg

SEQ ID NO: 402090 - DNA, 122 bp, Homo sapiens
aacctgggtaaggatttggggtaacgtaatgacgagaacatttcccccttttcagtgtcccgggcccaggggatggagtgagggggtggaggagctcccggcgcgcgggtcccgcctggtgc

SEQ ID NO: 402091 - DNA, 122 bp, Homo sapiens
caccaacggagcctacaacagcctcctgtccaactcctcgccgcagggataccccacggccggctacccctacccacagcagtacggccactcctaccaaggagctccgttctaccagttct

SEQ ID NO: 402092 - DNA, 122 bp, Homo sapiens
cctggacctattgagtcagaacagtggcaggggcagggatttgcatttctaataagctcccggagtgtttcttgtgcatacccaaactgccctatataagcatagtttgttcactttgatca

SEQ ID NO: 402093 - DNA, 122 bp, Homo sapiens
cctgggggctcctggatccccgcaggcagttactagggcaggagaaggcaaggggcactgcgatgggagagactgggttcctcactgcaacctggttcgaggggccctgggggagtccataa

SEQ ID NO: 402094 - DNA, 122 bp, Homo sapiens
cagggagaccctgtctctactttaaatttatattaaataaattttatatttaaaaaaattcgtaaaacctataaggaaaatggacaaaggccataaacagaggaggaaatacaaatggccag

SEQ ID NO: 402095 - DNA, 122 bp, Homo sapiens
atgttggcctttagggcaggaatgggccaggcagagggcaagtgggaagcaggaaaaaggcgaccttgtataaagttcatgttggcaaatagagagaagatgggaaagcagggtaaggccaa

SEQ ID NO: 402096 - DNA, 122 bp, Homo sapiens
cgctgcccggagccgggtctcgggcccgaacatgcgtcccagccccacgcgcctaccttccgggcccgggcgtcatcttccgcctggatctcaaactcgccgtcctccgagtcgctgccgcg

SEQ ID NO: 402097 - DNA, 122 bp, Homo sapiens
acctgccagaagatcaaattgcaatccgtgtaatttaaagatctcactgggctttgttggcgattctagagtggggcagcactgcattccatgaactagaattaagagctccagtgaaacac

SEQ ID NO: 402098 - DNA, 122 bp, Homo sapiens
gcaaattcatttcatggtgactgacccttgagcttaaacagaagcagcaaatgaaagaaccggacaaataaggaagggcacaagcctacccgactctatttacagtctgtaactttccactc

SEQ ID NO: 402099 - DNA, 122 bp, Homo sapiens
gctagttacacagtggactggctgagtgatgaactgccttgactgttgtaaagagagttccgctttggaggaggagttgggatggggcgcatcaacgccccttcccagtcccactccactcc

SEQ ID NO: 402100 - DNA, 122 bp, Homo sapiens
gaatctgggtaaacctggatgagagagacgccttacaattgcaaacatttctcaggaggccgcctgaaaacgcccaaaccatagagctcagttcctagctaggcctctaccagccacttccg

SEQ ID NO: 402101 - DNA, 122 bp, Homo sapiens
aaatgataaaatgtttagaggatgatcattagaatacaggatatttatactcttgaaaaccgctttcccaagtacttcttcattataagtaaggtgtctctaaaagggacagatctcctaga

SEQ ID NO: 402102 - DNA, 122 bp, Homo sapiens
gcctcctcaccgcgtccaggaagtggcacagtgacaactccgaggagactgtttcaaaggcgccagggcgtttcaacagagaaaggaaagtcttttccaaaaggacatcttccgtattaccc

SEQ ID NO: 402103 - DNA, 122 bp, Homo sapiens
actttgctcggctcctgctgttgatgcttgtggttttgcagtttgggatgggatgcgttccgggcagatccctacctgtagggaatgccccgcttcaaagttgacctcctgagccatgacaa

SEQ ID NO: 402104 - DNA, 122 bp, Homo sapiens
tgacagctcttaaggcagcacgtctagagttactcattcctcctggtgggctcgtgggctcgctggcttcaggagtgaagctgcggactttcgcggtgagtgttacagctcataaaaggagt

SEQ ID NO: 402105 - DNA, 122 bp, Homo sapiens
ctcgagtgccctcccattgggcggtgctgttatccggaagcctatggaaaaggccaggatcgcaacaggtcccgcccccatgtgtcgcgcccgttccgatttgttccagtgccagggtccgt

SEQ ID NO: 402106 - DNA, 122 bp, Homo sapiens
aaagacctcttcgtcgttgatgaggccttcgatccagtccatgagcaatgccatatagcgcggcgcagagagcttggcgggccgccggtactggcgctcgtcctgccagcggtactcgtagc

SEQ ID NO: 402107 - DNA, 122 bp, Homo sapiens
cgcctgatcattccaatggcccattatgaatgtgtgtgctgcagggccctcccacgatcccgtcagcactgtgcatgttgtggggaggtgctgggagaaagactgggtctcagaagatgggt

SEQ ID NO: 402108 - DNA, 122 bp, Homo sapiens
ggagctcctggcacggtgtcttgaggaggagaggaggtgcggtgggaggaggcacggaggcggcaggaggaagcacggagccagcatcaccctcagagccagcgtcacccttggagccagtg

SEQ ID NO: 402109 - DNA, 122 bp, Homo sapiens
aaaactgagactcaaagttgaaatgagtagtccacgatcatcacctgctgacaggagccccggttacccaacccaacccagtgctctttccactgcccctctcagcctgcaaaaaccacaga

SEQ ID NO: 402110 - DNA, 122 bp, Homo sapiens
cggcgagctaacccacggccagctaacccacggccagctaacccacggccagcttacccacggccagctaacccacggccagctaacccacggcgagctaacccacggccagcttacccacg

SEQ ID NO: 402111 - DNA, 122 bp, Homo sapiens
ctggcttttgttggtttttattttatcatttttgttttgtctgtgcctgctggtgtttgccggttgcaggcttattcagttctaagtctggtgtatgtaaagcaaaaaggaaacccaggtga

SEQ ID NO: 402112 - DNA, 122 bp, Homo sapiens
tcatgttctctgcccttcccgctctgtgcccttggcagctcccctcccacccggtcactccgtccagcaagcacgcagacagcaagcccgcgccgctgacgcccgcctaccacacgctgccc

SEQ ID NO: 402113 - DNA, 122 bp, Homo sapiens
ctgcgtgagaccaagcgccgtcatgagacccgactggtggagattgacaatgggaagcagcgtgagtttgagagccggctggcggatgcgctgcaggaactgcgggcccagcatgaggacca

SEQ ID NO: 402114 - DNA, 122 bp, Homo sapiens
ctctaatctgcgcgctgacaggagcatgatctgtgcccaggccagggctgccaaggtaagcgggcgtagcgcggggacactgtctgccgccccttcccccccgcccttctctgggcggcttc

SEQ ID NO: 402115 - DNA, 122 bp, Homo sapiens
gctccggtgtctcgggccggaactcctgtggctccagcgttcgcgccggccactggccagcgcttgggcctcgccctgcagctccggggccatagggcacagctttagctttgacctccccg

SEQ ID NO: 402116 - DNA, 122 bp, Homo sapiens
caactctgccttgtcctctctgtaaccggagtggctgtcagggcagggaggctgtggggccgggtgtggacgccggggactcaggctgccgatgggccctgggcctgcgatgccgccgggct

SEQ ID NO: 402117 - DNA, 122 bp, Homo sapiens
ccgccggggaagccgccgaggaagttgcgcgcccgccctccccgcgcccctcggcggccccgccgccatccatcccgcggcgccccgcggtcacacttaccggacaattgctggtggccggg

SEQ ID NO: 402118 - DNA, 122 bp, Homo sapiens
tgcgccggccaagggccctcctttgggctccgggcgcgcccacccagctgagctgtgaagcgcaagctgcctccccgacgaggctttcatcacttgcctgtgcacgattcttaatacacttt

SEQ ID NO: 402119 - DNA, 122 bp, Homo sapiens
gccttagcgctctggtgacctccgcgggattctgagaaaagcactgcggaacggcgggagcgggccctgctgcttgcttcgcgccccccacccgcccggggaccgcgactaagtccccgacg

SEQ ID NO: 402120 - DNA, 122 bp, Homo sapiens
gaatttcggagtaattgggagggtgcaaacggccagcacaaacgcctcacatgtgccattcgaaggtcattttgaaagactcgataattgtaacttgttatttactaggcaaaggaggcggc

SEQ ID NO: 402121 - DNA, 122 bp, Homo sapiens
tgccccgaagcccaccctggggctggtgttgagagaagccacagccagcctcgtgagcttcggcaccaccttgttagaggtggggtactggggggcttaggatacgcggcgatcgggtagcg

SEQ ID NO: 402122 - DNA, 122 bp, Homo sapiens
tgggtgcctacagcaggacgtccaggacgggaacaccacagtgcactacgccctcctcagcgcctcctgggctgtgctctgctactacgccgaagacctgcgcctgaagctgcccttgcagg

SEQ ID NO: 402123 - DNA, 122 bp, Homo sapiens
accagaggagccgatgcagccacccatgggggaccctgggctccaggtcaaaggctaggacgcctttccccttccccccatccccacggcagctctatggctgggcccctcctcctgcccac

SEQ ID NO: 402124 - DNA, 122 bp, Homo sapiens
ccagagggtaggtgtgcaaaaaagtcgggggacctaacagtctgcagaatcgggattggccggctcctgggatcttggcaagccctgaagtcccccgccttttctgtgggccactcttgagg

SEQ ID NO: 402125 - DNA, 122 bp, Homo sapiens
cgcttccgtgcgcgcgtccatgcccagccattgcgggctgcgggctccaagggtcgcacacgctggagagtgcaggttgccgggtccacccacagggctgtagacacccctagggtcacaca

SEQ ID NO: 402126 - DNA, 122 bp, Homo sapiens
tcatgttttattcaatcatcataaccatatgaagtagggaaattacctctatatcacagacgatggaagaagctgaggcttagagatcttaacttgtgaaagatcacacaactagtaattga

SEQ ID NO: 402127 - DNA, 122 bp, Homo sapiens
tcttaagccatcaagtttgtggtaatttgtttcagcagccttggggaatgaatatatagccgaaaagggctttgtttgtgccaccccacagaaccagagaaccattaatgctagtctcatta

SEQ ID NO: 402128 - DNA, 122 bp, Homo sapiens
taaaaggaagcagtactcttgacagcctggtgttcactttaatgtagaatccctcagccacgtgctccaagagaaggctctgtccagtcctgctgtttttggccagttgagcctgagtgcca

SEQ ID NO: 402129 - DNA, 122 bp, Homo sapiens
gccactgtgctgacctagctgagccaaccagattcccttcctcagaacgtggaagtatttcgaagttagacacacagggacctaggcagactctgaagaccactgaactcagtagatgggta

SEQ ID NO: 402130 - DNA, 122 bp, Homo sapiens
aaggcgatggacttgaaatccattggggtttccccgcgcaggttcgaatcctgccgactacggttttaccaggtgcagttcccgcctttcctcaaaacttacccaaattcttgtactccatt

SEQ ID NO: 402131 - DNA, 122 bp, Homo sapiens
ctgggccgtgacctccgaggcccccagatccgcccccgaacgaggcgggcagggagaggacgcgtggcccccacccactcagctcccagcgcggagtcccgggaccaccttgcggagaaaag

SEQ ID NO: 402132 - DNA, 122 bp, Homo sapiens
gccataacctgggtcacctttgctgtctcgggcttctaaatttggcagcgagaacagactcgcttcctttgagcaattgatctgaatagcagaatcccattctgatggtccgaatcacattt

SEQ ID NO: 402133 - DNA, 122 bp, Homo sapiens
agaatttttggaagacttccttaattctgtaggaggagtgtggtgactaccacttgctgacgagaagccgcggaggattctgcagcgtgacaatatgtatatccgtattataagatgtcagc

SEQ ID NO: 402134 - DNA, 122 bp, Homo sapiens
cccgcgcagaattagcctctctgtgccgccgggaaatcggcaattagaacgctccttgcgcgcggcacccaggcagccctcgagaatgcctgcactgtggcctgcccatcctcgcccttccc

SEQ ID NO: 402135 - DNA, 122 bp, Homo sapiens
agccccgcctatgtgaaattatggagcggccacagggggtggcgaacacaggcaacagtccgtcattcaacaagattttattgagcacctactgcacaccgtgtaaatctcagaagagctga

SEQ ID NO: 402136 - DNA, 122 bp, Homo sapiens
aacctttctttgtcttctatgacattgacatttttgaagaattcagtcaaaaccccctgtcgtttctggttgttgttgttacagtgatgttgtttccttctcagtgggtcacatttgaaggc

SEQ ID NO: 402137 - DNA, 122 bp, Homo sapiens
ggctgggcgcccccgagccgccctgctgcgccgcgcccgacgccgcagccgcagccttcccgccctgcgctgccgccgcctccccgccactctactcgcaggtccccgaccgcctggtactg

SEQ ID NO: 402138 - DNA, 122 bp, Homo sapiens
ggagaggaaaggaccccgagaacccggaagcctagattcctgccggagctgcaagtgctgcggaaatgggggaagaaggtttctgggcgctttaaacaaatggctgcctcccagcgctctga

SEQ ID NO: 402139 - DNA, 122 bp, Homo sapiens
ttttaaatctctgatgcgccatcagaaaattatttctgcctctgcccctggcgtggctttcggagatgcttgtctgtcagccaatggggaggatcggattctggcagggggctgtgcttttc

SEQ ID NO: 402140 - DNA, 122 bp, Homo sapiens
gcatgggatcacatgtcaccagcttcccttagcacagtaacccaatcgttaagtttctttcgttgttaattcaaattgtaaaccctcaggcgtgcacattgttctctaaagagatggcttaa

SEQ ID NO: 402141 - DNA, 122 bp, Homo sapiens
tcctaagcctctctgagctgggcttggccaccttccggggtgtgagcgtccacgggagatcgaccacaccaggcacccaggagcaagtgctttgaaatgcggctttctccggaccttgcagg

SEQ ID NO: 402142 - DNA, 122 bp, Homo sapiens
caggtaaggatttaggaaaggtctggaaggatgtgcaaaatgttccgcctgcgaaggttccgcggtggcggggacactgctccggctccgctcccgcccgcccgagcgctcggatggggccg

SEQ ID NO: 402143 - DNA, 122 bp, Homo sapiens
ccgcgggctgagcctggccgggggtggaatggcgcgggggaagcggggctcgggcgcctccgcccgccccatggcccgccccgccccacacttgcaatttttttacattactatggtgtgaa

SEQ ID NO: 402144 - DNA, 122 bp, Homo sapiens
cccccgggtcgcccgggtcccggagccggcgggtgtgaacggggccaaagccctccaggccgggcgtgtcagccccgcccccgaggctctttgcatattcatgaccttggcgggcatgcgca

SEQ ID NO: 402145 - DNA, 122 bp, Homo sapiens
ctgcaaactcacgacggatgagccccaccgtgcgcgcaaagcttcctgccggctttgcaccgcctagcaattcatgtgacaagcatcacagacatgggagaaaagtgttgtacaggaaacag

SEQ ID NO: 402146 - DNA, 122 bp, Homo sapiens
agcggggggactgtcgttaattcactgcctaatgaccgcggcccgcgcgctccgagtaatcgggtgatgtatgtggactgtgcacacctcgtggcagaggtgaaaatcatttcgacaagtca

SEQ ID NO: 402147 - DNA, 122 bp, Homo sapiens
cgtctccctgagctgcctgtcaagccagtggtacatttcattccctccccattgactcaccgtgcggaatcaggcaaatgagtaacttttcttctctctcccaaacttctgcttagacctaa

SEQ ID NO: 402148 - DNA, 122 bp, Homo sapiens
taacacgaatgacaagtgggtgattttcaagaagcgcccggtccctctagagaatgcgtccgaatatcagcggagccgactgcgtatgcctccggatgcccatctataaactctcttgcttg

SEQ ID NO: 402149 - DNA, 122 bp, Homo sapiens
cactcccgaggcagccagcactgggcgcactcagggggcagccaggacagacaaggagggcggagggggtgcaacaggggagagggttcccagtctcaaagggagggggcatgggctgtgga

SEQ ID NO: 402150 - DNA, 122 bp, Homo sapiens
tgcacgcgcgctgcaagcgcactttcaggcacttcttagtccctatctctgactcttttccgagtctttttctagagatgtccatcacagtgtttgcccgttcacgccgctagtcttttgca

SEQ ID NO: 402151 - DNA, 122 bp, Homo sapiens
ggaggacccaaggctgccacagttcgcgacttcgggacagcccatccctgatctccgggccgtgagcccgaatccccgatgttaccagctcagctgccgatactcccgacgtcacaccccgg

SEQ ID NO: 402152 - DNA, 122 bp, Homo sapiens
agaaaatcaggctcaaagactttcaagccacttcctagtgtgatgtcacattccttcctacgctccactggggaaggcaggtctgccccgcccacggtggcggggaaatacctaggcatgga

SEQ ID NO: 402153 - DNA, 122 bp, Homo sapiens
atcttcttccttcttgttatataatcttacagttaaaagtttctaggaatatttttattacgtgcaattggcaacttcagtattttttaaagggtgttggtagcattatttccgggagctac

SEQ ID NO: 402154 - DNA, 122 bp, Homo sapiens
ctgctggacagaccccgtggcccgtcctcaggatgccagaacaggctgctcagtgacatgcgctgaagcgggcagggacgggcactgggagatcctgcctgtgcagaaaaagtcctcccagg

SEQ ID NO: 402155 - DNA, 122 bp, Homo sapiens
ggtatttgccgtcgcttactatggcgttgggctcgtcgatggtaatgtcgtccgtgcccacgttaaagatcacccccacggtgccctggtcctggggacatggaggtggaggtcagcgacca

SEQ ID NO: 402156 - DNA, 122 bp, Homo sapiens
tatctgcaaacttgtccactaaaatgtttaatgaatccttctgtaacagtccattgtgctcgattgttccgtttttgttacaaatcccaaagaagtaacctcaatctgctatcctttgagaa

SEQ ID NO: 402157 - DNA, 122 bp, Homo sapiens
cagagatgctgaaaagagttggaaacaagaataaattcctttctcttcctgccaccttcccgtctctaaagtgccttcaattggcagaatttaaagagaatctgagacatgtagggtacaga

SEQ ID NO: 402158 - DNA, 122 bp, Homo sapiens
tagggtggctgtgctgttggcagaggtggtgtgcagccagcctgtctcgcagacagggcccgcctgggtgtgccaacagcacctggttcatcagttaccttactctcctgctgcccctgtaa

SEQ ID NO: 402159 - DNA, 122 bp, Homo sapiens
ttccgccccatccatgacgtcacaggggagtgagccaatggcagccgttcaggcttggggcggggctgtctccgcggagcgggaaagggtgatgcggtctgggtacccttaccctgggccga

SEQ ID NO: 402160 - DNA, 122 bp, Homo sapiens
cacaaccctcagagttcccaggagagtaggaggctacctatagatgggaaataagtaactcgagattgggtagatgctactaaaacaaaatcagtccaggtgcagtggctcatgcctgtaat

SEQ ID NO: 402161 - DNA, 122 bp, Homo sapiens
cttatatctctaaaacagtggttctcaactagaggcaattttgtgcccctacccttaccacgggacattttaggttgtcaccactgagagggggctgctactggtatctagtcggtaaagaa

SEQ ID NO: 402162 - DNA, 122 bp, Homo sapiens
atgcaggatgtggaaagctacgatccagttttgaacccggtgctgaaccgtgaagtgcggcgaacaggggggagagtgctgatcactctcggggaccaggacatagacctgtcgccatcgtt

SEQ ID NO: 402163 - DNA, 122 bp, Homo sapiens
ccacacctggctctcctccccggcgtctcctctccgcttctttgtttggagcggaggccccgccccaccccgcccccaggcgcactcgcccggccattccggttcagccggttccagccccc

SEQ ID NO: 402164 - DNA, 122 bp, Homo sapiens
gccgggagcccggagccgggacgcgagggttgggggttggggatgggtcccagtgtcgcgcgggagttcaaagcccggcactggcacggggctccgccgccgcagccgctggagccttgggc

SEQ ID NO: 402165 - DNA, 122 bp, Homo sapiens
gtcccgaccaaacaaggcacaacgaatctcaacattctaccaaaggacatggcgacgtggcgtgatggtagggtgtggtagagtgaccacatgtctggtttgcccagagctgcccagggtat

SEQ ID NO: 402166 - DNA, 122 bp, Homo sapiens
aggccctaaatgtagttcctccaagacaggcctctgatgttcagaaacaggtggaaaagacgaacgtttcttggcctcactggaaagggcctcgggccttcatttagttcgtggggggttgg

SEQ ID NO: 402167 - DNA, 122 bp, Homo sapiens
gtcacatcagcctgtgcccaaactgcaaagggcaaactctcctctttccaaagataaactcggccgggtgcaatggctcacgcctgtaatcccagcactttgggatgccgaggcaggcggat

SEQ ID NO: 402168 - DNA, 122 bp, Homo sapiens
gtgtcggccggacttcacttcctctgaaacatttaagagagaaacttccttgcctcttctcgcttctggtggccgctggcaatgcttggtgttccttgtagatgcatcgctccaatctctcc

SEQ ID NO: 402169 - DNA, 122 bp, Homo sapiens
aggtcgagtgctgggggatagagctgagttataaaaagaaggtgtcggaaactgtaacgtcgcagcgccgcatcggtactactgcctgtcctgtgaatatgtcaacatgatcagagggcggg

SEQ ID NO: 402170 - DNA, 122 bp, Homo sapiens
gctgcgtctaccgcattagagaaagacaaaaacagcaggagttgtggctactcacagtcacgtggtcaaagtcttgccccatttccggggaagaggccactagctccttttctgaaatccac

SEQ ID NO: 402171 - DNA, 122 bp, Homo sapiens
ttcaatccatttcaccctatcactgtctccactccaagtgaggaggagagaggatgaatccgataaatcagaccctgacatctatccactgagtcacgtgtcatgagtggcaaaagctattg

SEQ ID NO: 402172 - DNA, 122 bp, Homo sapiens
gcagcatcctggcctctagccaataggtggcagcaataccatccttccttgcagttgtgacgaccaaaaatatctccaaacattgccgaatgtcttctagaggtaaaaataaaaacaaacaa

SEQ ID NO: 402173 - DNA, 122 bp, Homo sapiens
tggtcccctagcaatggaaccgctcggcgctctaatccatcaaatgtcccccaggacaatcgctccgcacacgttcccctgaaccggcggcggtgggggcaggcccggagcaggcaggaggg

SEQ ID NO: 402174 - DNA, 122 bp, Homo sapiens
cctcagcccggttgctaagcagcctttcctccgcttccatgtaaatactgtgcaaatccccgcctttgacacaggcgaccttcgctcggctcgctctccctgctggcctgggaacttagcga

SEQ ID NO: 402175 - DNA, 122 bp, Homo sapiens
ccgtttgaggaggatggttaagatatctaagtccttgggtagcgccagtgccaaataacccgttcgcctttttttctctgaaaatgttcccccaaaatggaggatttcgcagactctgaaga

SEQ ID NO: 402176 - DNA, 122 bp, Homo sapiens
tgcaaaacaaacagtataaagagaaacaatgaatagtcatttgtgggaggcctaagagggcggatcacgaggtcaggggtttgagaccagaccgagcaatatggtgaaaccccatgtctact

SEQ ID NO: 402177 - DNA, 122 bp, Homo sapiens
tccccaagcagcccgcgcgcccttccaggggccagacctgctccatcctggacggcgaaacgacctcgggagaccccggttaggaccttactccagggatcaactggaatcaaaatccaaag

SEQ ID NO: 402178 - DNA, 122 bp, Homo sapiens
ccgctcccggccggggcgtcaggaatgggccccaatcgccgtgggccccgcaccctgcgtcgcccgtaggccccagtagccggaggccgaccggcctcccactacccctcgccctagccaag

SEQ ID NO: 402179 - DNA, 122 bp, Homo sapiens
aaattcataaaaacctcagcttggccttaatggttggatcttaagatgagtgacaaatgacgaaatattgggtatgagagagaggcaggaggtgggaggagagcaggccctgcaatcagaat

SEQ ID NO: 402180 - DNA, 122 bp, Homo sapiens
gcccgagccgcggtgggcgtgtgtgtgcacggggccaggggaggcggaacctgccttcctcgccccctcctttctcgctcagcgctcaatgtgtatgtagagctatgtataccgctccacac

SEQ ID NO: 402181 - DNA, 122 bp, Homo sapiens
tgcttgcctgaggaagcccatgcatcacgatgggggccaacagggctccccagttacacacggggagtgaggaccaaagcgggagagcaagtgcctgctggtccccttggaaacaacacaag

SEQ ID NO: 402182 - DNA, 122 bp, Homo sapiens
tggcaaagacgtttccgaacggggtcgcccgggggcaggctgggcttgaggacagctgggcggcacccggagccttcgggactcagggtgtggagttggggtgtgcagtacgtgcccacagg

SEQ ID NO: 402183 - DNA, 122 bp, Homo sapiens
ttagtaggccctgagcgttcatcttcatccgtccttctcagccggagcaccttgagctggcgcgtgttcaggtgcctctgagtctgtactccaaattatgttgggcgcaccttcagcctatg

SEQ ID NO: 402184 - DNA, 122 bp, Homo sapiens
ccactaccttgaggtccctgtggatgatgggcggcttctgccggtgcatgtgctgcacggcgcggcacgtctggtagaagatcttcagaaccgtgtcgcacgaaagggggcctcgagattcc

SEQ ID NO: 402185 - DNA, 122 bp, Homo sapiens
acaaaataatggttataactggagtattccccaggctgctgccttcaggaattcctcgtacgtcgccaaaggagctgaatttccagcctctccccctctgtgccccacccagcctctccccc

SEQ ID NO: 402186 - DNA, 122 bp, Homo sapiens
cggccactgcgcacagccaggtgtgccggcggctgtggtggggcgggcatctccaggcgccggcacaggcaccggctgcttgcaaggctgtgcctggaccaggcgtactgcactggacttct

SEQ ID NO: 402187 - DNA, 122 bp, Homo sapiens
cgggacccgcagcccgccatgcctgagcctccccccgactccgtgggctcctgtgctgcccgagcctccccgacgagagccgccccctgctccacagcgcccagtcccatcgaccacccaag

SEQ ID NO: 402188 - DNA, 122 bp, Homo sapiens
acatttccgattcagtgttcattcatcgagtccatgagagaaaaggaaagggcagaagtgcgaaatgtcacgaatagcgaaagagcatgatgcaaatgagaaacagaaaagctctccacagg

SEQ ID NO: 402189 - DNA, 122 bp, Homo sapiens
ccggcccagcccccagaagcccggcacggtgtctctcgggacccaggacacgcaggtcagcgctgcagccgttactggctgtgttgtgataccagcagggcactgactgtccccagaaggaa

SEQ ID NO: 402190 - DNA, 122 bp, Homo sapiens
agagtggggtgacccacgctgccgaggagcggaatcagacggagcccagccccacaccctcgtctcctaacaggactgccgagggagggcatcagactatacctgggcatgagcaggatcac

SEQ ID NO: 402191 - DNA, 122 bp, Homo sapiens
gggaggacacagcccagagatgaacacttaattgagagagaaatcaggaggactgctgaacgactgagtgatctttcagagcaaagcatcacaaggaaaagggaaccagctccagggggagg

SEQ ID NO: 402192 - DNA, 122 bp, Homo sapiens
aaggcctcctgccccaagcacatcgccaacaggccggaccaacgggatgaagcttaaagacgcagtcaggacagcagggaacgcgggaccggggtggaggcacgaaccgtgtgtggggagga

SEQ ID NO: 402193 - DNA, 122 bp, Homo sapiens
tttcactagcccagcctctagataagggcatggtcagctgacactttgatttctgccctgcgagaacctgagcagaggacccagccaaaatttgccagactcctgaccttgtttctttttag

SEQ ID NO: 402194 - DNA, 122 bp, Homo sapiens
taaccacccccgcccacccaggtccactacagaggcaaaatggaaacactgattcgggtccggaatccctggggccggattgagtggaatggagcttggagtgacaggtaggtgtccccaac

SEQ ID NO: 402195 - DNA, 122 bp, Homo sapiens
ctcccgccagaatttcctccacacgggcatctgcatttccagaggactgtgcccagagtgcgatcatctgtaatccacagcacccgttaacagcctggccaaagtgagaccaacagaattta

SEQ ID NO: 402196 - DNA, 122 bp, Homo sapiens
aacccaccccggagccacgcggctggagcacgtttttacacctgctcggccgcttaattacgagagcacctgtagttgggatttttttcattgcaaaggcatcgattttagcccttctccta

SEQ ID NO: 402197 - DNA, 122 bp, Homo sapiens
aagagtacaaggggagttggaataattcaggttaatatttactgagaaaaagtcatatatcgaagggaaaatgggagtaagtaagtctgactgccatagtcagacttactatgtgcatggag

SEQ ID NO: 402198 - DNA, 122 bp, Homo sapiens
aggagggagggtggcgtggttgcagctcaaggacctaggcccttacgagcccttccggggcgagggggaatcttaccgtatatttgttcacctacgttgattatttttcccagatacgtaca

SEQ ID NO: 402199 - DNA, 122 bp, Homo sapiens
ccccactggcctgctctgctgaggttgtggagcaccgggaagcaggggccgagccttccccgctctgtgcctgggggctctgggcactgtctacacctgggaggtggtcagcatatgtgcgt

SEQ ID NO: 402200 - DNA, 122 bp, Homo sapiens
aatcaggttctgctctaggggagaaggtggccttttaagttcttgtttaacgtgtggagccgggagagatcatttcaaagaaaacattctggaacagttgcctatgggcacggcagggtgac

SEQ ID NO: 402201 - DNA, 122 bp, Homo sapiens
gggaaggccagctctccgtaagaacctgccaggggaagggattctctgggccaaggggaccgagggctcccgagcaagggctggggcgccctgaaagcatacctttccactggcgccaagac

SEQ ID NO: 402202 - DNA, 122 bp, Homo sapiens
acgccctgccctgacgtggggtctccacaaaacactcacccttgctttctgcatgacagccgctgtcctctcacatgctagatcccgggagcccatggcaatggggagaagctgggtgcctc

SEQ ID NO: 402203 - DNA, 122 bp, Homo sapiens
aatgaggattaggccgtggttcgctcgagccccgccccagtagaaatctaattccaactgcggcccgctaagaagtcggtctccgccttcgcgcctcagcccctctggactccgacccccag

SEQ ID NO: 402204 - DNA, 122 bp, Homo sapiens
ctgcacccccagggtgcgcggcggcccatttgggtgcgtccccggtgggccgatttttcgcgcttccccttcggtttataggggccgctgctatgggtcggtcctctgaagaggctggggcg

SEQ ID NO: 402205 - DNA, 122 bp, Homo sapiens
tccccgggtcggcagaggcggatggagttcagcctctttttcaaaactgccaaagccacccggtctgccaaactcccccaccagccagctctggggcagccccccggagcccgcccgctccg

SEQ ID NO: 402206 - DNA, 122 bp, Homo sapiens
ttctgcctattgtacaaccaggaagctgacaataaagtttatttgagcgtcgacgtgcgccgacgtggccccgcctccccagccggagccgcgattggtgggcatttgccggcggccaccgc

SEQ ID NO: 402207 - DNA, 122 bp, Homo sapiens
cccagctactcagcaggctgagtcaggagaattgtttgaacccgggaggctgcagtgagccgagatcatgccattgcagtccagtctgggtgacagagtgagactccgtctcaaaacaaaaa

SEQ ID NO: 402208 - DNA, 122 bp, Homo sapiens
tactggacagactggaatctgcacagcattgagcgggccgacaagactagcggccggaaccgcaccctcatccagggccacctggacttcgtgatggacatcctggtgttccactcctcccg

SEQ ID NO: 402209 - DNA, 122 bp, Homo sapiens
ccctgttctcccagctctctaacccaacctgagccccttcaagcgcacccactcccttcacgcagccagtcacacacaataagagctagggaagaaactgacacggggaaactgacaggggt

SEQ ID NO: 402210 - DNA, 122 bp, Homo sapiens
tgttctgagcagaagagggcaatggttcaacctgtttgaccccgcccgggtctccttctgcgggaacatacgccccagtcagctgaggtgccggctgactttccccagacagtgccaaaatg

SEQ ID NO: 402211 - DNA, 122 bp, Homo sapiens
ccctttgcggccccgcccggccccgccccgtcccgctcgactccctctccccactccggccgcccctccgcctcactctcggctcaggctcggcgccgccatgttggatccatccgcgccgc

SEQ ID NO: 402212 - DNA, 122 bp, Homo sapiens
gtagtaacggagaagtagggcccggcagggtccgtagtctaggggcaggagacagatctccgcgttatttcctgaagaaggggcagaaggagagcaaaagagagggaaagtggtcaggcgta

SEQ ID NO: 402213 - DNA, 122 bp, Homo sapiens
taagttttgaggatcggttaaaagctttgccgcattcttcacattcataacgtttctctccggtatgaattaacttatgttcagtaagctttgaggcttggttaaaagctctaacacatttc

SEQ ID NO: 402214 - DNA, 122 bp, Homo sapiens
aaactgatcgcatgtcaatgtgactcacatagaaaataaacaagaggggcccatcacatacgccaagttatcaatactcctttcaccatttctgctcaatctagaagactcagcttggaatt

SEQ ID NO: 402215 - DNA, 122 bp, Homo sapiens
ttttcaataatgaattaacctaaacatgtattaaaatatgctcatgaaagctgtgggaagcgacggtgggcttcctttgtctaagcatgttaatttttacgcacctggtgtatcacgtgcag

SEQ ID NO: 402216 - DNA, 122 bp, Homo sapiens
ctgcttctgtaactgtctcattcacacctgcctggctcactggaaatcctcttttgagcgcgggatatggcttgcccttgtccgtgtgcccccaggactttgcctctacagcattttcttac

SEQ ID NO: 402217 - DNA, 122 bp, Homo sapiens
gccaggccaggggccacagagttggtaacaaggcaagaggtggtgattgagcaagagccccgggtgtgtgtggattctaacctcatcagccactagcccctggccagcccctgtggctccac

SEQ ID NO: 402218 - DNA, 122 bp, Homo sapiens
acagtactgttattattctgatacagaatttttacacagcaatactgatacaggtacaaacggcaatccattacaatcgacctttcagttacaaacaaggtttaaattacaacttaatactg

SEQ ID NO: 402219 - DNA, 122 bp, Homo sapiens
agtgtgaactctccagataggtcctgctgtgataggccaggggagtaggctgtgcagtgacggcttagggtaataagtaatggttggaggacaccagcataggagcagagtttagaacttaa

SEQ ID NO: 402220 - DNA, 122 bp, Homo sapiens
gtttttgtcctgggcctccaggctgtgagcacagatacgcagtattttggcccaggcacccggctgacagtgctcggtaagcgggggctcccgctgaagccccggaactggggagggggcgc

SEQ ID NO: 402221 - DNA, 122 bp, Homo sapiens
tgttggtacaatactagcagatgactcgggtgtctgagccacctgctgtgcagcccattgcgccccctggtcctgccatgctgtactgcagatgtaccacttccatctcactgtgggttact

SEQ ID NO: 402222 - DNA, 122 bp, Homo sapiens
gatggtctttgcaggagttcaaaatatatgcagccaacttgatgtttttcaggccaaactcggaatggtgaggaaggaaggggatccccaagtagccagatgggcccaatcagccctcctaa

SEQ ID NO: 402223 - DNA, 122 bp, Homo sapiens
tcactcctccactcctcaggtacttcttgtccaaaccttaaaatctgagtttggggtttccgatctgggccttgtgctcattccccctgggagatgtcacccattccccacgtgcagccacc

SEQ ID NO: 402224 - DNA, 122 bp, Homo sapiens
agtttatctaaaatgttaacctggctgcatagcacatttgacattattgcccacataaaacgggaaaacaaacggatttacaataacttttggccgttttggattctgaaaagtgtttatac

SEQ ID NO: 402225 - DNA, 122 bp, Homo sapiens
ggagaggcgaggtgggcggagcagagggcgtggcttcggggcagagtgggccgggtaccgcgcttggtcttagcgcatgcgcactcccggcagctacgcgacctgtgaccatggtggctgtg

SEQ ID NO: 402226 - DNA, 122 bp, Homo sapiens
ttcagccctgtcacctctgctccgtgctttctggtttccagaaattaaaatttaatcaaacgcggatgagttttctagccccagtccccgtgtttggctcctcctggatgagtaaggggttt

SEQ ID NO: 402227 - DNA, 122 bp, Homo sapiens
agataaaagagcgacacaggagaatgtcagtggccctgaaggccctgcctcggatctccacggtcgcgcgaattcgggcaatttttctgaaggttctcagactcggggatgggggaggaagg

SEQ ID NO: 402228 - DNA, 122 bp, Homo sapiens
catcacctgctcctcctagcaaagcttgcctctgcgcatgaaaaaacagcccaccgccctcggggaggagctgagcgaacacactcagcagccactttctggagccacactgcccacacagg

SEQ ID NO: 402229 - DNA, 122 bp, Homo sapiens
ccctcgtgcagaaggccgcgctagccggctcttcagcagcgagtgcagattgctcccccgcggccgcagatctcccgtttgcgccgcgttcagctgctcccgaacaacttttctgccggccc

SEQ ID NO: 402230 - DNA, 122 bp, Homo sapiens
tccccggacccgcctcgtctccgggaccgccccgctcgccccgctcgccccgctcctgggcgcaccctcccgggacgcctgctccgcccatctccggaccccgacccgccccgatcccttcc

SEQ ID NO: 402231 - DNA, 122 bp, Homo sapiens
gcccgggtcccccgacgcccactgcaaagggcagtgggaatgacagactgtaaaccctctcgcctgcgtccccttcaagcaccagaaacccaagttggaactaattctttctttcggaaggt

SEQ ID NO: 402232 - DNA, 122 bp, Homo sapiens
ttcgggtcgcagcaggtggtgccctgcaagctggagccggaccggttctgtggcggggggcgtgacgcgcttttcgtggcggcgggctgcaaggtggaggcgttcgcggtggccggccagga

SEQ ID NO: 402233 - DNA, 122 bp, Homo sapiens
cctaggtgaatagggggcacctgctccctgccaggtgaaagctggtgctgaatagagcaacgtgcaaagctgagcctcgcgcagagccaggagcgactcccccagggtgggccctgagctgc

SEQ ID NO: 402234 - DNA, 122 bp, Homo sapiens
cacagatgggcgctgtgttccagtgaaactttaccactcactaccagtgaggccgaaagccgccgtaacgacacagatgggcgctgtgttccagtgaaactttaccactcactaccactgag

SEQ ID NO: 402235 - DNA, 122 bp, Homo sapiens
gtgagtgaagctatgtctagcgcccctgctaagcttcctatgctcagcaacatgtttcatcgtcatactgtcctgtaaggtcaggcttgtggtcctccctacttcacagatggggaaactga

SEQ ID NO: 402236 - DNA, 122 bp, Homo sapiens
acagatgtggagatttgcagccggtgaaatggaagcttccccaggtggagctggtggcgccggcagccccaggggtgctgttggggagagttgcttttcggtttgggggccgatcatgccag

SEQ ID NO: 402237 - DNA, 122 bp, Homo sapiens
tcagcaggtccgccgagcctcccccgtgcccgaggctgaaagagaagggggcgcggagcgcggggcacgctggtcattgtagtccagtccatatgagctcccggggcactggactacaactc

SEQ ID NO: 402238 - DNA, 122 bp, Homo sapiens
ctttggggaaacaagtcaaagcttgacaaagtgtagctgctgatctatttgaacgaagttcgatccctaaccagtgatcccatgaatgaggtggatgccctatggatggagaagctcacacc

SEQ ID NO: 402239 - DNA, 122 bp, Homo sapiens
tgcaattggtcacaactattcatgcttcctgtgatttcatccaactacttaccttgcctacgatatcccctttatctctaatcagtttattttctttcaaataaaaaataactatgagcaac

SEQ ID NO: 402240 - DNA, 122 bp, Homo sapiens
ctctccttaaccgcctctaaggtggctaacaagaagggggtgggtggcgggggggcggggcggcgatctctccaattcgccggactctggggacagagatggtggctacctcctggaaagga

SEQ ID NO: 402241 - DNA, 122 bp, Homo sapiens
ggcactcgagtttcttcagttttgtctgcgcaccccctcccttcggtgaccaacagaggacgctggtggtccaggattggattgaggattaaatttttcaaggcacttttccaaagagtttg

SEQ ID NO: 402242 - DNA, 122 bp, Homo sapiens
tgcagcatgcagatggggaaaagtcaaatgtactccgcaagctgctgaagagggcgaactcgtatgaagatgccatgatgccttttccaggagcaaccataatttcccagctgttgaaaaat

SEQ ID NO: 402243 - DNA, 122 bp, Homo sapiens
ggagggccgtttgtgagctgagaggtcgggtgggacgttgggggcctgtccctccggaggcgccccccggccaacctggcacctccgggcctctacgccggcactggactcgttaggcccgg

SEQ ID NO: 402244 - DNA, 122 bp, Homo sapiens
cctaagaacagggcttggcatgtgcataggaaatgtctgtgaaataactaaacaaacgcacgccagccacaccggcctcctggctattccgcactcatgccaagcacagtctggcctcgggg

SEQ ID NO: 402245 - DNA, 122 bp, Homo sapiens
ttggcaaagagcttctgcacagaatgaaccaggtgccggatgcggctagggctctcactgcggggctctggggcagtgcccgtccctggcgctggcccgggccctgcccctgctggccctcg

SEQ ID NO: 402246 - DNA, 122 bp, Homo sapiens
ttcgtcttgacgcgggaagactttttatagctaagtaaagtggcgctcccggtgcgccgccggggtcttcatggggctcctcaggatgtgcatcaaacagaaaaaacctccatttttatatt

SEQ ID NO: 402247 - DNA, 122 bp, Homo sapiens
ctctccctaaaagggtgggattggatttggaggtgggaggagaatctgcaatggagttaccgacaccatgtaaggaaaaccttggaggctgctattcccatttggagggatcagcaaaaagg

SEQ ID NO: 402248 - DNA, 122 bp, Homo sapiens
cgagcctgccatgctgaggatgagtgggtaagcaactggaatggtaggcaggggagggggcggtgagaataacacaaagccccatggaagtgagttgaggggaactcctttacaacaattaa

SEQ ID NO: 402249 - DNA, 122 bp, Homo sapiens
gacccgaaagaggggaggaagctgccagtcatgggggacggcagaggtggctgtttctcccggcagcagaagtccaccccagggcctcaccgggggggggtgggggggcacacgggcaggca

SEQ ID NO: 402250 - DNA, 122 bp, Homo sapiens
tgcatttgaattaaaattctcctgaagctagtcactgcatcactcttggaaaagtattatcgaacttaactgagcaacagcacatcacaacacatggcattatagaaagcacagaaggatgc

SEQ ID NO: 402251 - DNA, 122 bp, Homo sapiens
cagcatccttcccaggtgggcacctggcaccaacatcgacggttacagcaggtgcaggaccggcaggagcgtggggctgaggcaggaaaacaaccactccctttcaggggtcctggctggtg

SEQ ID NO: 402252 - DNA, 122 bp, Homo sapiens
ccccacctcgcctcactcacacttactcacctgtcacacccacagcggacactgggcccacgcgctgcccctcgtggaggccgtacaggtgcatcttgtatttgcacccgggctccaggccc

SEQ ID NO: 402253 - DNA, 122 bp, Homo sapiens
gcgtgggcaggagccggggctgtgcgaggcgctcgcggactggtgcaggttctgggtgggcgccagctaggcaggccccgcactgggcgcagccggccagcgcctgctgggcttcatccagg

SEQ ID NO: 402254 - DNA, 122 bp, Homo sapiens
gtccttctttgttcagccccagtcggggacgcagggcgcggtgttcctccgcgctcgccgcgcagtccctgcccccccgcggctttggagagctgccattcggcaccggagtcgctccgcgc

SEQ ID NO: 402255 - DNA, 122 bp, Homo sapiens
gctgtgacataacactttgtaatcgagctttctaatcagcatagaaaaggcaaaaggggtcgcagggccaccaaaaatgctacctggccaagaaaacgaagacccaatatcctcccccagtg

SEQ ID NO: 402256 - DNA, 122 bp, Homo sapiens
tgtaattgcccccttctccctgtggagctgggagcctggtgtaagctgcagagacggccccgcaacaggcaggggagctcagtgcctttggggagcccggggaccctgagttgacataagtg

SEQ ID NO: 402257 - DNA, 122 bp, Homo sapiens
ctcctgccttcagattgtgaactttccaggttggtagatcagcttaggtagaacagttctcggtgagggccagctacatacctggctaagcgctgcccactgcagaaaagctcatcacccgg

SEQ ID NO: 402258 - DNA, 122 bp, Homo sapiens
aggggccacggacgcctggggcagagggcgggggaccgccgagcgggactggggcgagggcgagaccgaggaaagccagagtgcaatgcctggacgctttgagacccagaaaaaacagagaa

SEQ ID NO: 402259 - DNA, 122 bp, Homo sapiens
ggggaggcgagagcaagaaacctgtgggacctgtggggagccgcgtccgcggggctggcgcgcgcgggggcggcctcgggctcgcgcgcaaaggcgcgggcgcgggcgggggcggagtggcg

SEQ ID NO: 402260 - DNA, 122 bp, Homo sapiens
atggagctgctcaggaaagaaagggcccgtgattcaacagttggggaaatgtgggttcaacgggctcccttcctgcagaccttcacggagcctttgatatgtagtgatgagcttcctgaatc

SEQ ID NO: 402261 - DNA, 122 bp, Homo sapiens
tggcatgcaggtggtggtagtccctgcagaccgcgcctcccacaagctgcacaaccaggtcgtctgcttagcccaggtttagctcctctgcggagggctgatgagacggtggagcggctgcc

SEQ ID NO: 402262 - DNA, 122 bp, Homo sapiens
ccctccccaagcctcagtttcttcacctggaacatggggatcataactcccctcttacagcgtgagtctgagtgttaaaagaggtggtgcatgtaaagtgcttagagcagatctaggcacat

SEQ ID NO: 402263 - DNA, 122 bp, Homo sapiens
tttgtttgcttcatttctgtgcaccaagcagggaatataaaaataaaaagatgaataagccgcaggccctgccattctggtactctcaatgtggcaaggcaggtacgcaggcaaatatgtat

SEQ ID NO: 402264 - DNA, 122 bp, Homo sapiens
ggggaaagtcaaccgtgccctgagccctccaagtggagaatgacccagtttagagagcatcgtgcatcatttttctggcagcttgcttcttgaaaggcggctgtttatatgtgaagatgaga

SEQ ID NO: 402265 - DNA, 122 bp, Homo sapiens
tgtgtgagggacaggcctgcagaggaatattcccagggaggcagccgtagctctagtgcacgtgaggcatctataaagaaaaaaaggacacaaaacgcctctcctggtccacacagatttct

SEQ ID NO: 402266 - DNA, 122 bp, Homo sapiens
ccggcccccgggcgcgcgcccctcccccgcccggcgcctcacaaaggccctttgtcccgccgagcccccgggactccagttcctgaaaagttccaggagaaaaatcaaagagagagcaaaat

SEQ ID NO: 402267 - DNA, 122 bp, Homo sapiens
agtgacggagaaacccacggcaccggccctcgcttgtgagtgcacggcttgtggtgtcaccgtgtgcttggtagttgccaggtaccatggatggtgcctcacctgcccagcctgaggtggcc

SEQ ID NO: 402268 - DNA, 122 bp, Homo sapiens
ggactgtgacctggggaggtgcccccaccatcagaagtcctaccagagagtaaggctggccgcaacctggggtttgtgggtgcccatcccactgtaggatcccaggggcctgccttgtaaat

SEQ ID NO: 402269 - DNA, 122 bp, Homo sapiens
ctttgccttccagatccagttttactactcaggtgagtgttccggggctccatctggctccgcacaggaccctgtctccctgtcctgccctgctgccctgcccatctgtgtgcctggcacac

SEQ ID NO: 402270 - DNA, 122 bp, Homo sapiens
agaatcccccttttctttggggttagaactgacagctgctaagagtgtatgtgactctagcggggaaagcggctcatccaaaaataatgattgccaaatactttgcagtaatactatttgtt

SEQ ID NO: 402271 - DNA, 122 bp, Homo sapiens
atagtattccaagaaaaagtttaaaaagtatacgagtacaaatggctgctgtccaagtggcgagacgcatgtttgggaaaggggaatcccgactccaaacaagcctcaattaaccccttttc

SEQ ID NO: 402272 - DNA, 122 bp, Homo sapiens
gctggggaggtagcagatctggtgcccggttctagagtgcttctcaggcctctactaagccgcgggtgccaggtggggacacagagatgcccaggtctccccggccgtccagcccccccccc

SEQ ID NO: 402273 - DNA, 122 bp, Homo sapiens
tgctagcctggacatccaacatttggcatcacttatgcagtctgaggtctcaaagacaagcggccttggagtcttccagtccatatcttcactgaatctctcccatatacagtctcttgtca

SEQ ID NO: 402274 - DNA, 122 bp, Homo sapiens
tctcgctggtgtgcgcaccaggagcgttgcggccgcggcttcctcctgcggcgaatctgccgttgcatcacagtggctagtctcagggcccgcaacgtgacgcttgtcgaatctgctgcggg

SEQ ID NO: 402275 - DNA, 122 bp, Homo sapiens
aggaatgtgttgagtgaatgaatgcgtgaccagccattgtgagctcagaatgtgcagcagcgatttgacagtgccaggaacttggctcagagaggcagtgcaccttgccagggcttcaaaac

SEQ ID NO: 402276 - DNA, 122 bp, Homo sapiens
cccacccccgccagactccggcctttgctccgcacctggccccggccccgccccgcccctcgaaactcacctttgagtcgcatcgagtcccagccccgccccggccccgcccctccccgccc

SEQ ID NO: 402277 - DNA, 122 bp, Homo sapiens
cgggttctcctgcaccgatctgcttgcctcccaacaggcccattttcctggggtgggggtcgggggcactttggttcccagggtttggaggtttggcctagaggagttacagcgcctgcgtc

SEQ ID NO: 402278 - DNA, 122 bp, Homo sapiens
tgcgacactcacgcgggtgccgtctcagcagctcacggtgtggaaactgcgacactcacgcgggtgccgtctcagcagctcacggtgtggaaactgcgacactcacacgggtgccgtctcag

SEQ ID NO: 402279 - DNA, 122 bp, Homo sapiens
tggatcttttgttttattttattaactaattcatttatttgagacagagcctcgctctgtcgcccaggctggagtgcagtggtgtgatctcggctcactgcaacctctgcctcccgggttca

SEQ ID NO: 402280 - DNA, 122 bp, Homo sapiens
ggagacaaaggaagggaagtgactgtttcctggcctggtgtgtgggcccgttgcctgttccgttcagcgtctccgtgcagttggactttccacctaggcaggcaggcataggtgtgcggttc

SEQ ID NO: 402281 - DNA, 122 bp, Homo sapiens
acgcgcctccccgtccatctccctcccgctgtcggtccctcctcccgtctgtctccctcccgcctttcctgagctctgcggtggattatttggtttgtggtggattattcaggcatccttgt

SEQ ID NO: 402282 - DNA, 122 bp, Homo sapiens
gggcctgctagttgtgggcaatatcattattctggtgagactcgccccagtgctgggagccgagtggttgtgtggtggggaggggacagtcctgagctcggggtgggggatgagggtccaga

SEQ ID NO: 402283 - DNA, 122 bp, Homo sapiens
cccggggctctgggagggggaggcatggactgttcctcatttgcctcggatttctcaattcgcattctgccccaggcacgtggaaggtaacactgcaatgggtctcttcatgcagatggggc

SEQ ID NO: 402284 - DNA, 122 bp, Homo sapiens
tagctgagagggaggcttctctgccctcatctcccttctcagctgccccagcctgggatccggggaatgtttcctgatctggggtctcccagagctccaataagttcagcagagcctccgta

SEQ ID NO: 402285 - DNA, 122 bp, Homo sapiens
agcaaagaactgaacctaagaggacctgccgagccaccgtagggactgtcggccaacccgcgcgcgcacatcttccacccgtggactcgtcagggcgtgaggacccacctcacgtgaccatt

SEQ ID NO: 402286 - DNA, 122 bp, Homo sapiens
taaaagtcaacaggacagcgcaaatagccaactacccaaggacacaaagtgacctggaggcgttctgcggtggcgctgccgtcaaggccggggccgcctggccagaccctccctcagacgcc

SEQ ID NO: 402287 - DNA, 122 bp, Homo sapiens
ccgggggcgggggccccagcctctctgcagccctactccggaggcggacggagtggaatgcgagttttttctctgggctttcgcctcgcagctagggatgtgtgtctgcatcgtgggggtgg

SEQ ID NO: 402288 - DNA, 122 bp, Homo sapiens
tttatttattgaagataccatcccatacagctctggttgacttcagatgtatactaattccgggaaatggtgccccatcctctcagggtgttctctccaagttggtaccttaacaggtttca

SEQ ID NO: 402289 - DNA, 122 bp, Homo sapiens
cggcgaggggatcgagggcggcctagcgcccctctgccggccggtggttggaggccgcggcggctgcgcgttgagtcgtttcctgccggatgacccgacccttttttgcagtctcaggacgg

SEQ ID NO: 402290 - DNA, 122 bp, Homo sapiens
gtcaagagcagtttttaagagtaggggcagaactgagcctgccttgggaacctagcaactcgagctatagggagaagaaggacattgaaactgagaatgcagctgggtcttgtagatattac

SEQ ID NO: 402291 - DNA, 122 bp, Homo sapiens
tttaaggaagcaatagtatcccacaaaagctgataattctcagcccgagaaacacttggccgttgcatagcgaaagctggtaacactcaaactgagctcacagaacccagttgaagaggaaa

SEQ ID NO: 402292 - DNA, 122 bp, Homo sapiens
ggcaccgagaacctgccggtggccgccttccgcgcctcgtgggggggtcggggccacggacggtccccggcgccgcaagtgggtctgcgcgaacaacaagcactgcctccccgggcgggctt

SEQ ID NO: 402293 - DNA, 122 bp, Homo sapiens
gcacatcttacgtggcagcaggcaagagggcgtgtgcagggaaactgccctttataaaaccgtcagattctcatgagacttattcacaatcacgagaacagcatgggaagaacccaccccca

SEQ ID NO: 402294 - DNA, 122 bp, Homo sapiens
ggggagggggtggctggctggactcggcgtctgtccccaggatgaagacaagcctgaggacgagatggcccaaaagcgggccagcctgctggagcggcagcagcggcgagcagaggaggcgc

SEQ ID NO: 402295 - DNA, 122 bp, Homo sapiens
gtaagtatacagtgcctccgggtcgcggtcattttgagcccctgtctggatgacttcttgcggctgttctacccctccccctccccgcggtaccttgcacttttctccctccctgccccctc

SEQ ID NO: 402296 - DNA, 122 bp, Homo sapiens
agggcacctgccttcagtatcatttccctatctcatcactttcaggtagaataacaaaaacgcagctaaatttacagttctttagagaacgctgttttcaaagttgcagcacttggtgttct

SEQ ID NO: 402297 - DNA, 122 bp, Homo sapiens
ccaaaagaacccatggctattaaagctgccatgaggatcttctgaactgttaaaaccttacgtcatgctaccaatctgactcactttcagtttcaataactgatagaaatttcttaccaaga

SEQ ID NO: 402298 - DNA, 122 bp, Homo sapiens
ggggtcaacagggaagattactaatggagactgcagggacaaggagagaaaggggctggccgaggtgctccctagccagggatctggtgttatgatcagaccccagatcatcagcccccctt

SEQ ID NO: 402299 - DNA, 122 bp, Homo sapiens
gaagtctccctcgcagggattgagggccgatgggggtgctacacaggcacacttgcacgacgagcctgaggtgatggtttccacggtatagaagtcttccttcctggaggcccccgcattga

SEQ ID NO: 402300 - DNA, 122 bp, Homo sapiens
ggaagttcaggctgtactggccttcttccgcctgagagccgatcaccacgtggaactgggcgggcggggagagaggagggctcagcctgggggacccgtggtctggggcgacaatcagcttg

SEQ ID NO: 402301 - DNA, 122 bp, Homo sapiens
agcagggcacccggcagcatccacgtgaaaaggcaccatgccagcccccagcagtgcctgcgcttgggtcccggctgtgcccccgggcagtcatatgcctctctgggcctcagcactctgct

SEQ ID NO: 402302 - DNA, 122 bp, Homo sapiens
gtggtctataaagaagctaacccacaatagaacaagctacagataaacagcttcccaaagcggagaatgcaaggaggacagcaaaacccgtcaggggagccgagcagggcttctctcctggg

SEQ ID NO: 402303 - DNA, 122 bp, Homo sapiens
aattttaatttttaaaggagaaactttttgactatctgggttagaggaagatatgtgtaccgcctttagggcattttgttatttccgctgaatcattagttattaggatagataaatttttc

SEQ ID NO: 402304 - DNA, 122 bp, Homo sapiens
ttctattcccacattatattctcgctttcttttattgaacgatgtctaggaagaattaaacggcttcagggacaaaagctcctgccttgttaagtaatgaaccttgttatagattataactt

SEQ ID NO: 402305 - DNA, 122 bp, Homo sapiens
cggctcacgcaggtgctgggggagcaggagcggggccctgcctgccccagcaccttgtctcgattgttatcgcgaggggtcactgctcttgccctgtccccgctatgctgaaatcctttcat

SEQ ID NO: 402306 - DNA, 122 bp, Homo sapiens
gaaatgcatggtgctattgaaggcattatggaagaatatgaccaaaaaagaggacagggtcgctttcttatcagtgaatatcagctgagcaattcaggtgccactgcttccacctctgggca

SEQ ID NO: 402307 - DNA, 122 bp, Homo sapiens
atgcaaattgcagcgattgcggaaataaacaagggagttgggagaggagagagggactgccgaatcgattgcaacttctgcaaagtctcgtacaatccaaagcacgcaaggcaaaaccagag

SEQ ID NO: 402308 - DNA, 122 bp, Homo sapiens
taacacctggggggcagaggttgtggtgagccgagatcttgccattgccctccagcctggcgccatggctcacatgggaggctgagacaggcagatcacttgagcacagaagttcgagatca

SEQ ID NO: 402309 - DNA, 122 bp, Homo sapiens
aatacatttctgtgtactgacctttctcagcagcctttattatgtagagtgaagatatgtcgcaaaaatagccaaatagaattattgtttgtacaaagactcatttactactttctaaagcc

SEQ ID NO: 402310 - DNA, 122 bp, Homo sapiens
agattggcagggaaggatgggctcaaaaatatggaatagagcggacccagggtccgggggcggagcctggccaggacctggccaatcccaggcctggggccctggtctggttcctagttagc

SEQ ID NO: 402311 - DNA, 122 bp, Homo sapiens
ctctatacccggctgcgccttcatggggacccttacccagccgaattggtgatggggaatcggagactgctgcgcagcatctggcgatgccaggaaccagcagggaggggaaagggggagag

SEQ ID NO: 402312 - DNA, 122 bp, Homo sapiens
tcactgggtcgccctgcatgggccctcgtcaccgggtcatcccccacgggccctggtcaccgggtcatcccccacgggccctcgtcaccgggtaatcccccacgggccctggtcaccgggtc

SEQ ID NO: 402313 - DNA, 122 bp, Homo sapiens
tgtatatatgcatattgtatgtgtgtgtatggggatgttatattgtaaaacccaaacctgcgtctgtgcagtacgatagggctggagaaaaaatacacagtttatggactcttctcacttta

SEQ ID NO: 402314 - DNA, 122 bp, Homo sapiens
taagctccttgagggcaaaaccaggcgctctcacacactgggtgctcaacgaatactgaacgagggaatctcagcatagctggtgctcaaacattgctttctgatgaactgacttaaatatt

SEQ ID NO: 402315 - DNA, 122 bp, Homo sapiens
tgcgcacccaggtttttccggaagccagagtgaggcacgggagacctcagctgtgcataccggtgggtctcaggcgaaattaaggaccctcagccaacgatcgctttcctctgacacgctct

SEQ ID NO: 402316 - DNA, 122 bp, Homo sapiens
gcgtccaccacttgccctcagtggctgctgctcgtctgagactgcagcgccctgggtccgcgcaggcgcattccacaccgacgcaggtccgtcctccaagtgcgcatgcgtgcagtctgcgc

SEQ ID NO: 402317 - DNA, 122 bp, Homo sapiens
gcacgggcgggaaccggggctgcgcgctgcgcttgcatgccagcttgagttctgggtgggcgtggtttggcggcccccacactctgagctgtcggctgccccggccagcccgggcagtgagg

SEQ ID NO: 402318 - DNA, 122 bp, Homo sapiens
ttttctatgaagtgttgactttgtaaatctgcccacacccagctggccatatccacccctcgacgccgggatgagccggctctgcctgtgtcacagtggaggggtcctttagggccaggctc

SEQ ID NO: 402319 - DNA, 122 bp, Homo sapiens
ttttatgcttaatccataaagtagttgggggaggggtttgggaagaaggaaagcagtggccggaagagatctgaactggtcagggcacacgagctgttcagacctttaaccccggcggctgg

SEQ ID NO: 402320 - DNA, 122 bp, Homo sapiens
tctagggacaggccgggcagtgtccccacacacaccttagagtcgaaggccccagggccccgctgtcacttgcccaaaagatcccttccggcaggtaagggactaccaatgcttacgtcaaa

SEQ ID NO: 402321 - DNA, 122 bp, Homo sapiens
ctccattcagcgtcacgaaagcccattcgaaatggatatcagctgacgttggcctgcacgcgtttgccttcctcccctcactccgcttgtgcgcctctctttcggctggctttcctctctcc

SEQ ID NO: 402322 - DNA, 122 bp, Homo sapiens
aaaatctgctgttgctgatctgacaggcggcggagctcaggcaatccatggccaggagatcggaaacccctgctcccaggtctacaaatcttttgacacagccttatttccacttgctggga

SEQ ID NO: 402323 - DNA, 122 bp, Homo sapiens
aagttaggaaggtacgaccccctaggccgaacagcctgtgggctagctggcgcctcctgccgcagtaaacacaaagtggggtacagaaacgaaaactccgggaagaaacggccagcacgggc

SEQ ID NO: 402324 - DNA, 122 bp, Homo sapiens
agaaggttacatcaccccagcaaagggaaggagatcctggctcacagtgtgcaatcctgccgaaaggtcaagtgaggtgaagactgaaaatagccattcgttttagcaacatagaagtcact

SEQ ID NO: 402325 - DNA, 122 bp, Homo sapiens
ggtggtcgatgggactgggcgccttggagcagggggcggcgttcgtcggggaggctcctgcgcacaggagcccacggagttgcggggaggctcaggcatggcgggctgcaggtcccgagccc

SEQ ID NO: 402326 - DNA, 122 bp, Homo sapiens
ctagcctaccagcagacctcggccttcgcccggcagccccgcgatgagctggagcgcgtgcgtgtcagctgcaccatcatcttcctggccagcatcttccagctggccatgtggaccacggc

SEQ ID NO: 402327 - DNA, 122 bp, Homo sapiens
catcccatatacacagcaccccaaggacagcaccctatcgcccacgcgtccaccagcccccgaaaatactggagacaaaagctgacgtcggcagagcgctcctagtccccgtcttctggtcc

SEQ ID NO: 402328 - DNA, 122 bp, Homo sapiens
tcagatgatgaggtcaccgttggcaagttctacgccacgttcctgatccaggagtacttccggaagttcaagaagcgcaaagagcagggccttgtgggcaagccctcccagaggaacgcgct

SEQ ID NO: 402329 - DNA, 122 bp, Homo sapiens
ggctcaagaacagaggaaaatgcaaacttcattcgcggtggtctccaagtggcgataccgcgccactctgggcgatctgattggttcgtttaggcatggaaggcgggaacaaccagaaaagc

SEQ ID NO: 402330 - DNA, 122 bp, Homo sapiens
ttagagattctgtggaatgtgatctaatctgcagctgtgtagacctcacgaaatgaccaccgaccacagatgcaggacttccaagccctgtgtttgcttgcttgctccttcccaatgagtga

SEQ ID NO: 402331 - DNA, 122 bp, Homo sapiens
ctagatctagcacatgcaagttcttactcagattctggcaattgttgtctaagaatatatcgacagagtacatacttttaaaaagttaatggactggtgtataaccaaagccacaacacccc

SEQ ID NO: 402332 - DNA, 122 bp, Homo sapiens
caagctcccggccgggctgactcaagcggaggcgcgcggaacagtcgccgaggcgattcccgcccaggtagttcagcgccccagtccagctcccggtaccgttccccacatggtctgttttg

SEQ ID NO: 402333 - DNA, 122 bp, Homo sapiens
gctgtgcgcggccgcgggaggtgtaacaggactggactcccggcagccccagggcaggggcgtggggagctggtcctagctcagcgctcccggaggtggagcttctgcaggctgggtgctgc

SEQ ID NO: 402334 - DNA, 122 bp, Homo sapiens
ggagaaaggggcggggaactggggcctctctggggaaggctcccctttgtcctgggactccgggcgccccctctctgccctcgccctgccccgcgaggccgccgccgggcgcctcacagtca

SEQ ID NO: 402335 - DNA, 122 bp, Homo sapiens
tgcatttccttgttggtggttggttccttcttggattttccattcctgagtgcccatttgcgccctggaatgggctcccacactgctggctgccctggaggtgccgtccctcctttccagga

SEQ ID NO: 402336 - DNA, 122 bp, Homo sapiens
caattgaattggcccagtgaagtaatcctattaaaaacaaaaacctttctcaagaggccccggaagagttgtgtgttatttgcatagatttgcatatcaattcatagctggtgaaattcctc

SEQ ID NO: 402337 - DNA, 122 bp, Homo sapiens
ccccagcgattcagggacacttcaacatcctgacttcaaatgaaaaatcaggttgcttttcgagagttgtaaaagactggaaactccctgaccactcgccaactcacagatgccagaaactc

SEQ ID NO: 402338 - DNA, 122 bp, Homo sapiens
tgtgaatctggcggtagcacaggaggtgcgacctgcggttgaagaccttcccgcactccacgcacttacagggcttctcccctgtgtgaatcctcatgggtcgaacgaagtcgaccttttca

SEQ ID NO: 402339 - DNA, 122 bp, Homo sapiens
gccccataagtgtctcttgaggctaatggggatgggggtctctcatcccaagctcactgacggtcgttttcccttagggaagcccggggagaaccgcccgccgcagaggaaagcgggctggc

SEQ ID NO: 402340 - DNA, 122 bp, Homo sapiens
tatggccttgggaagagcaatgggcccggagtcgccgcatctaaccctgctgtaactggtcgcaagtcacagtttgctcatctataaagtgagcgaaagtaatgtaatctttattgggagta

SEQ ID NO: 402341 - DNA, 122 bp, Homo sapiens
ccaggtgcgcagccgaagcccagtgccaaggaggccggggacttgggtgcccgcgtacaccgaaaacagtctctgaggggtcctcagagcatctttccagcatgtttttaacagcagagaaa

SEQ ID NO: 402342 - DNA, 122 bp, Homo sapiens
gatccccaactcctccagctccatgtcgccgccgaaagcacgtggaaggacctgccgctgcggccaaggtgtaagcaccaaccagctgccagctcggcccgtcgagctcagaagctcgcgct

SEQ ID NO: 402343 - DNA, 122 bp, Homo sapiens
ccccgaggcttggggtacttacgccaaaaaaaatcaacactgcctcatttctgcatttgacgtcaacccagactattttaaaagaccgaagaagaccaccaacttgcgtcccactcccactc

SEQ ID NO: 402344 - DNA, 122 bp, Homo sapiens
ctaacctgatcaaaccgttctggcagccctgagaagagctggtgtacactgagacccccccgccctccacacaatcccacccagtggttgggtctgggcaggacaccctgacacacgctccc

SEQ ID NO: 402345 - DNA, 122 bp, Homo sapiens
agcagggttctgggcaaggtcacacagggcaaacagatcaccagttttggtccactccaccgatgacgcacggggacaccctccggagtataaacagccaggggcttgcacaggcacactca

SEQ ID NO: 402346 - DNA, 122 bp, Homo sapiens
gtagcagagtcagggggtggttgggaagcagggcgacaaaagggagaaagacggagggagcgggaagccaaaagcctacagcacccggtattcccaggcggtctcccttccaagcactgaac

SEQ ID NO: 402347 - DNA, 122 bp, Homo sapiens
cctcctcctcctcctcctcctccactgcgggaggaagagtagtgcttgcttgagctgtatcgaacagacatggtgatgctgtttagcccagggagtgcctgctaccaaggacagtgacaagc

SEQ ID NO: 402348 - DNA, 122 bp, Homo sapiens
aacacccacctgccctcgtggccagcagtggcctgcgtggctgggagcccggtcagaggccgccggggccctcagtaggtgcgtcgtgggcgctggggacggcagcgggtgccctggcgggc

SEQ ID NO: 402349 - DNA, 122 bp, Homo sapiens
gcacgccgtcgccatcttgcggctgggcctcgtgggcgcgttccgcgtgggttctggcgtcgtcaccttccaccccaagccccgtcagtggtcacctctgtaagccagggcacttccctacg

SEQ ID NO: 402350 - DNA, 122 bp, Homo sapiens
aggctgaggcaggagaatcacttgaacccgggaggcagaggttgcagtgagccgagatcacgccattgcactcccacccgggcaacagtgcgagaccccatctcaaaaataaaaaacaaaac

SEQ ID NO: 402351 - DNA, 122 bp, Homo sapiens
caaacactttctcaaacttttgccgaggggtggcgagaaggtagacttccaggtcccacccgatatagattaagggctggaaacacagtcaaggggaaattatgaccaagacaacctttgct

SEQ ID NO: 402352 - DNA, 122 bp, Homo sapiens
cgcgtcgtttacgcggcgatttcatcatgctccgagccgggcggcgcgcgccgcttccgtcgccaccctctctggacagcccagggccgcaggctcatgccctctccgcgtccagtgctgct

SEQ ID NO: 402353 - DNA, 122 bp, Homo sapiens
acgtctcaagaatctgggcctccatcttctaggcgtctcccttggaggcccttcagggaccgcccacagcgctttctctcagcctcctccccccccccatcccctcccccacccgccccgtc

SEQ ID NO: 402354 - DNA, 122 bp, Homo sapiens
gagccgaggcgagtgggcgtggctctggcgagtgcccgccccttccctggcaccgcaggccgacctggcccctcccacactgctgggccttgcatggtcctgcagcgcctccttgtgagcgg

SEQ ID NO: 402355 - DNA, 122 bp, Homo sapiens
gccaggcggggcacaccaccctgcagccaacctcggtgccatcggctcacctgacctcatcggcccctgaggatgcaggccaggcaccatcattgcttccactgccgaaagaggaaacagtg

SEQ ID NO: 402356 - DNA, 122 bp, Homo sapiens
tgtagggtcctgccctccggaggagcagcctcgaggctggtggttttcagagcaggaggccgacgttttctccgcattggaagagcccgccgtctgcaggggcctggaggaatcactgggga

SEQ ID NO: 402357 - DNA, 122 bp, Homo sapiens
catcagcccgctgcggccatcgatcgggtggcccctgcccccgtgcaggccggcgtgacccggctcctaggtgaggctggagagaaggacctcgttttagcggattttttcctttttttttt

SEQ ID NO: 402358 - DNA, 122 bp, Homo sapiens
cgcccacagggcgaagatgtgtgcgtggataactcccagagccccgcctgtgtggcaacacgcaggcgcaaggtcgcgtgccctgcgctgcaggctctgattggtcgccacgggtaagggca

SEQ ID NO: 402359 - DNA, 122 bp, Homo sapiens
ctggatcaccgccttccggaagttcagcttggagtcggtcgaccccatgtctctggagcccgctccggcccggcccccgcccagactccaacccggctccggcttcagctccggctccagct

SEQ ID NO: 402360 - DNA, 122 bp, Homo sapiens
caggcacattccactctccatcctaggctgatgattaactactgaccctcccaggcgatgcgtccgtgggaaaaacaagaccagctgtggtccatctctgccaacaccccaaagtaagggaa

SEQ ID NO: 402361 - DNA, 122 bp, Homo sapiens
acactaccttgaatcaaatctatagcctatatgacatttctgaagtctctgttggcattacgcgaaaaatcccccacgtcttctgaatagttagaattgaatcctacaagctgcttcgaatc

SEQ ID NO: 402362 - DNA, 122 bp, Homo sapiens
ttgagaaactgagcgtctcattcacaagctggcggcgaggagggcccggcggagcgaggacgcagtccgggagggggagacagagaggagcccgggcgggggaggggaccgggagggggagg

SEQ ID NO: 402363 - DNA, 122 bp, Homo sapiens
tcagcttgccggaagctggttgttcgctgcggcgaccagctccggaaagcgcggtggggacgcgctgtgttctcgcagctcagaggcgggtctgaggctcggtggcggcgcccagggtggcc

SEQ ID NO: 402364 - DNA, 122 bp, Homo sapiens
ggaaccgctgggccattctgacctcgaaccagaaatagccccgacccccctctttctccccgcgcccccagccggaccgccccccgggaccccagccaaaccacagcgtccggcatagggcc

SEQ ID NO: 402365 - DNA, 122 bp, Homo sapiens
tggtatacctttatccaaggtacgcaaaatagtctcacattttccaaacacagtttcttgcgtctcctttaattagaatcagtaccatataagcctccgtgaattgtattaaatccagccac

SEQ ID NO: 402366 - DNA, 122 bp, Homo sapiens
aaggatagccttcagaatgatgagtttgaggcttgctgatctcctgatgttggaatctaacgagtggacttgtaggcttttagaggaactatgtagatggatagttatagaaatccttggct

SEQ ID NO: 402367 - DNA, 122 bp, Homo sapiens
ggtactatgcaaaatgaatcataggagctgcaccttttgttcattttacaaatggggaaacggaggtttaggagagtttagtgactcgttcaaggtgacatactaataagtggtagggctga

SEQ ID NO: 402368 - DNA, 122 bp, Homo sapiens
ccaggcaggaaagttccttctgctcaatgcagggcagcacccagctgagactcggtgctccggtaaggcctccagaactgcccaggtcacataaggggggccagaggggctacgaggtgcca

SEQ ID NO: 402369 - DNA, 122 bp, Homo sapiens
gaagcctggggtctgagcggcgcgggacctaggccgctcctttcctgagcttcagtttcccgcctcaaaatgatgggtggattggctgagctacacccacctttcccgcccctcggcgcttg

SEQ ID NO: 402370 - DNA, 122 bp, Homo sapiens
ctcatttaattatcaagaattaattaagcttttatttttcttccataaattccaagttcccgatagctaacttccaaagctaaaagtaatgttacttttgactcttttgctacaacaaataa

SEQ ID NO: 402371 - DNA, 122 bp, Homo sapiens
ctctgttggccgtggctttagtaagcacacacctgcctgctactctggttatcgtggcgacggcaggtctggattgccagacaggtttttctttttacctcgaggctttctctgaagggagt

SEQ ID NO: 402372 - DNA, 122 bp, Homo sapiens
cctcgcttctccatctcgctctgttctccaagacgcccaccgcctccccttcaccgccggcggtcaaacgccctagccagtcccgcgagggcggaagtctcccacctgcgcctcgtacggta

SEQ ID NO: 402373 - DNA, 122 bp, Homo sapiens
tattaaataggttggaaaaacaggccaagtgtagggacctgactcctgcaaagggcctaccgcagccctctgcactcaagcagcagccccatccagaccaggagtgtgttctgttctcctgg

SEQ ID NO: 402374 - DNA, 122 bp, Homo sapiens
ctgcccaggtcctatccaacccagatccctacgacgctctgagtccatgctgatggccaccgacgcagcccagcttcaggctctgcttgctttagtggcagcgggttcctgaacaacaattg

SEQ ID NO: 402375 - DNA, 122 bp, Homo sapiens
gactctctctattaaacccaggactccagcgaaattacagggaattcgtggtcacgggaccggcctccgccaatcgctcgtctgggcctggtggaaaacagagagcattatttggtttaatt

SEQ ID NO: 402376 - DNA, 122 bp, Homo sapiens
aacatggtgaaaccccatctctaccaaaacacacacaaaaaaactagccggtcgtggtggcgcgcacctgtagtcccagctactcgggagcctgaggcaggagaatcgcttgaacccgggag

SEQ ID NO: 402377 - DNA, 122 bp, Homo sapiens
ggcgtatagaaggtgggaaggttgcagaattatcagggcggaagcttgcaaggaaggagtcgtgattgtctcttagaagggctgattcgcagtctgtattatcttcatgcttctagcaagtt

SEQ ID NO: 402378 - DNA, 122 bp, Homo sapiens
cccagcaattccactttgagaagtgtatcctacagatatacccctacatgggtgaaacaacgtgtgtacaaggttacacaatatagcaaagtacaaaacagtgtgttttacatgccattatt

SEQ ID NO: 402379 - DNA, 122 bp, Homo sapiens
gtccccttctcaggcaggctgtgggggttggggttgggcttcgcgagcccaagcggacgccgcaaagagaatgagaacctcggagcgctcggggcgggcgggcccagcccaggctcttccta

SEQ ID NO: 402380 - DNA, 122 bp, Homo sapiens
tgggggcgtcaagcactttcgcgccgtatccctccgccccccttcccgacaccctcgcggcgagcggttcttgccgcatcctgcgcagcccctgcctactttggtgcagaggcgtggggggc

SEQ ID NO: 402381 - DNA, 122 bp, Homo sapiens
cttcttgggcacaggtgcggagacgatgccagtgcccccgtgtgcagggatgaggcgcgccggcacagagccgcagcggcctgtcaccttgcaagggacggtgtggggcttgccgatcttgt

SEQ ID NO: 402382 - DNA, 122 bp, Homo sapiens
ctgtcttgggaagcagcagtggccaagcagatggagcccctgcccgtttgaagcatagagcgtggtaggtgagcagacgttacagaaatgattgcctagatatggatttatttgtaatgtga

SEQ ID NO: 402383 - DNA, 122 bp, Homo sapiens
gagagaggaattgacttttacatgcattctatcttgttcagcaaatggctgttaacttgccggagtgcaaagtcctttcctgtgccctggtgtgagttctgacttccctgggaacatgcgta

SEQ ID NO: 402384 - DNA, 122 bp, Homo sapiens
cccagcttaaaatagcttattttatagtctctcttgcagccaaatgtggctatgtgactacgttttagccaattaggtataaattgtgtgcatgtctttagggacggcatctaaaagagagg

SEQ ID NO: 402385 - DNA, 122 bp, Homo sapiens
tacctcaggagccaggagcagacagcaatacttcgtccacacctgggatcgcgcagggcccgcagggcacaggcgcccgacagccgggctgagcggagtctgggttagccaggcctgcgtgg

SEQ ID NO: 402386 - DNA, 122 bp, Homo sapiens
gaggcctgtattgttaaaggcattttcacttccttttctgtgtgcaggaaatcctcatgccggtaattactagctagtaacattgctcctgcaacgtggagcagttggcctattgtacatgc

SEQ ID NO: 402387 - DNA, 122 bp, Homo sapiens
cactcggcctgtgctcttctcaggctgtgtaagggaggctacctcggaccccgggggtgacgaagacgattcggcaggaacttctgggaggcctggagggacaggaaatgagtgtctgctct

SEQ ID NO: 402388 - DNA, 122 bp, Homo sapiens
tatgcctcccattctcccataccgttggtcgacttattgctctcctaacgacaactgaaacgacatccttccggcccagcacgcaatttctgaggtgtggtgggagaagagttggataagaa

SEQ ID NO: 402389 - DNA, 122 bp, Homo sapiens
tgaagcctgtgtttgtgactgtaatctcactcacgggtgacagggccctgaggatgactccgtgtcctagactgcgggtattaacatggggcctcttccgtgcctttccgaggcgaaagcct

SEQ ID NO: 402390 - DNA, 122 bp, Homo sapiens
ttatctccagggcaacataaagtttgcaggaggcctgttcactccaggtgttatcgctgtcgctgagatggtgctaagcctacaggcggcagaaggccaattgctaaggcagagggagcctt

SEQ ID NO: 402391 - DNA, 122 bp, Homo sapiens
aacttccacttccctctgacaatatcacctgtggctttattttgtttgctccagatggcccggatgcccccaccatttcccctctaaacacatcttacagatcaggggaaaatctgaacctc

SEQ ID NO: 402392 - DNA, 122 bp, Homo sapiens
agcgctgcccttccgaggaacgtgggtgggggcaccctcactagagcggctgtggacatacgctaaatccctgcctacacacccaaaattgctagggctgtggactttctcatccgccgcct

SEQ ID NO: 402393 - DNA, 122 bp, Homo sapiens
gggctctgagcgggaggggcgctggcccgagaccctgggctctctggtcagggtctggggcgcgtacctgtcgggcgaggggctcggtgagcgtctccccgtaggggctgagcgggtgcgcg

SEQ ID NO: 402394 - DNA, 122 bp, Homo sapiens
ctctggataaagacacgctatggattcagtcttccagtgtagagtctctacataaaagggcgatcagatatgaggcaaagcagattctaaaatgttagcttgcatcggtcatctggggggaa

SEQ ID NO: 402395 - DNA, 122 bp, Homo sapiens
gagagtgacctgagagcacaccttgcaacacaggaccccacgacacgaaggacttactcgcggtgacatgggtacccccactacttgaaggacccacttgccacctaaaaggaaaaaccaga

SEQ ID NO: 402396 - DNA, 122 bp, Homo sapiens
gaaaagagcaatgtggccagcttgactaagccgccagcgcacagcgcggcaggacgcgcccgggtctcagcggacttgtgcatgttagctgtgtagatttatgtgagggcttgtaaaactct

SEQ ID NO: 402397 - DNA, 122 bp, Homo sapiens
cgggcgtggtggcgggtgcctgtagtcccagctactcaggaggctgaggcaggagaatggcgtgaacccggaaggcagaggtgcaacagagcgagactccgtctcagaaaaaaaaaaaaaat

SEQ ID NO: 402398 - DNA, 122 bp, Homo sapiens
acagcacagcgagctgggtacttgaacccagacttgcctggcccttcagtcttccccagtcgcgtccctgttcccactccccaggcgcggacctgggcctgaccttaccttgttcacaggtc

SEQ ID NO: 402399 - DNA, 122 bp, Homo sapiens
gttggcggaagccccggaagggttgagtccggctccgcctgcgcggtcggaggagccctgcgagcagccactccttgttcaccccagcggggaccacgcccgggacgctcaggacccatccc

SEQ ID NO: 402400 - DNA, 122 bp, Homo sapiens
agctttgtggaactccgggcgatgcatctcctcaccggaagagctttgtggaactccgggcgatgcatctcctcaccggaagagctttgtggagctccgggcgatgcatcccctcaccggaa

SEQ ID NO: 402401 - DNA, 122 bp, Homo sapiens
tataaagaattttctgagaggtaaagttaacccaggatggactggtcatctcagtggtgtcggttcgttcctaaggcaagtagcttaaggataagatgctggaacattgcagaaaagacaga

SEQ ID NO: 402402 - DNA, 122 bp, Homo sapiens
acaacagcttgcggggccagactccagctcagcaggtcatgcttcccctggccaggggagcggagggaccccatcctggtacagcaaccccttcctcccacaaggatcaaggtctcccaact

SEQ ID NO: 402403 - DNA, 122 bp, Homo sapiens
gcccgggcaccacccacgctccaagtccgggcgccgcccacgctccgagggacccacacccggatatcacccacgctctgagggacccacgcctggatatcacccacgctctgaggcctaca

SEQ ID NO: 402404 - DNA, 122 bp, Homo sapiens
agccaggggtatccggaggcaggcatctgagggaagtggtgtgtttgctctctaactgggcgactgagggggacgagtcacaggaagtccaagaaggctcttccaggagctacctttatgtt

SEQ ID NO: 402405 - DNA, 122 bp, Homo sapiens
actcagccctcagcccgcctccagggccccagagccaccaactggggccttggggattcacgagtcccccgtattcacggtaaggggccatccgagaagcccacagcagaggggcctccgtc

SEQ ID NO: 402406 - DNA, 122 bp, Homo sapiens
tcacatctgtcatctctcaggtcatatccaacacactgggccacccacgcacagggacgacgcgacagccctgtggctccaccgcacaggacagccacgactggcaatcctgtgccggccct

SEQ ID NO: 402407 - DNA, 122 bp, Homo sapiens
ccaggctctgggggctcagcagagcttcctaggtgtttgaaccccatctaaagacagagccggtgttagcttatactgcagagggagaattgccaggacctcccaattaatcggatgaagaa

SEQ ID NO: 402408 - DNA, 122 bp, Homo sapiens
gtctttttgtgatcaaagtgatatttctaaaatgcaaatctgctgtcattcctcttctttcgcaatcattccccattgctttcagggtgaagtccagactccctggcatggcatacagggac

SEQ ID NO: 402409 - DNA, 122 bp, Homo sapiens
tcccaggctctccccctgttccccgcacctggacgggactctgcacagaagagagtctcccggtctcgtgtcaggctctgagttcatccagcttcccaaaatccatgttgatatgaacgttt

SEQ ID NO: 402410 - DNA, 122 bp, Homo sapiens
ggctctcgggagtccgagagagcactgcattctgggatttgtagtttctctggtggataccgtcggcgttgggaccgaggcagccctgcatcctgggacttgtagtttctcgcactgcgtgt

SEQ ID NO: 402411 - DNA, 122 bp, Homo sapiens
tgcctgatgctctgctgccaagagcagacgaggccactgagggcaggcaagggccccaggcgcaagcagcctgcgcctccacaaggaaaagctgccacccgattcattccagtctcttgaca

SEQ ID NO: 402412 - DNA, 122 bp, Homo sapiens
atcaaaatttaacaaaatcgatcctcttcctgctaccccaaggacactcctgtgtgaaaccgtgctgatccgtgtctcctacgagagcaggctgctgggccaggcgctgacagctcgcccca

SEQ ID NO: 402413 - DNA, 122 bp, Homo sapiens
aagcaaatacaatgctattcaccctgttgcccacgctggcctggaacttctgtactcaagcgatcggcccatctcggtctcctaatgtgccgggattacaggcatgagccactgcacccggc

SEQ ID NO: 402414 - DNA, 122 bp, Homo sapiens
gctaattgttccgtgttcgttcgcctttcactttgtgtgtctcccccgccccacgcttttcgcttatgtgtatgcccccccgccgcgcccccgggctatattgcccaggcaggtttcgaatt

SEQ ID NO: 402415 - DNA, 122 bp, Homo sapiens
ctctagacaaccaaaatattcacagaaacgggggaaattgttaagggagagtcaaagaaacgactcatagaagaatgagggggaaaaatagaggctagcactctggagagccttgaacacat

SEQ ID NO: 402416 - DNA, 122 bp, Homo sapiens
agagactcggtatttcagaacccagacctttgtcaaaagtgccacataattttaagaaaacggagtggggctgttttcttgtgattacttaaaaaaaaaggcggggggggggggaggaaact

SEQ ID NO: 402417 - DNA, 122 bp, Homo sapiens
aggattatctgtttctttacttgtctgtttctacctttaaaccatgaagtttttgaaggacgagtcaggggtttagtaatcttttagttcagttaaagatgactaatattggttaattgctt

SEQ ID NO: 402418 - DNA, 122 bp, Homo sapiens
tccaccctgcccccatccccgcccccaggcagttgccccggtgacacatcaagacaagaacgaggtagtctttcagcaacacagttacacaaggaacagaacagtctctcccgcccagccct

SEQ ID NO: 402419 - DNA, 122 bp, Homo sapiens
attgatccttgatgtgatgttcttttgcatatttccttcattctaaagttgttccctggccgggagcgttggctttcgcctgtaatcccaacactttgggaggccaggacagatcacttgag

SEQ ID NO: 402420 - DNA, 122 bp, Homo sapiens
taagtgaaatgaaacacacaagacctggatcaacagcatctctcctctccccagccaccacggcttttccaggtggggtcactcacccgatcacctcgggggccagctcccgacgggcccgg

SEQ ID NO: 402421 - DNA, 122 bp, Homo sapiens
agcatgagggcgtattgtgggtgggctggccggtctggggggcggggaccctgtacagaacgccccggccgcgtggagtggcaggttcgtcactgcctgggggaggagaacactgggtattt

SEQ ID NO: 402422 - DNA, 122 bp, Homo sapiens
ttaccagcagggggctcccacccactgccccagccatgctgcctctgccactgtggtgaacgtccatatagccccaggcaccctggcatcaattagcaccctgctgcagcaaaagagcatgc

SEQ ID NO: 402423 - DNA, 122 bp, Homo sapiens
cctttcagcttttccataaccgagagatactctttctttctcgagcgtcccgacccctggcgcagcgcctgaacagcggactccggagtctccgggcatctattctggctgtgaatttcagg

SEQ ID NO: 402424 - DNA, 122 bp, Homo sapiens
ggttccagcgacagcagcactggactcgtccagagggcggcgggtgagcggctggggccccgtggagccaccatggaccccgcaggggcagcaggtgagcgcttaccctcccgaggccccgg

SEQ ID NO: 402425 - DNA, 122 bp, Homo sapiens
gaggcagtggccacatatcacagagtttaaatgactgtctatagggcagcaaaatcatgtcgttatcagtttaaagcagttgctgctttactcctggggacaaaacaagaattggagcctcc

SEQ ID NO: 402426 - DNA, 122 bp, Homo sapiens
ggactttgtacatattaacctagaagctgcgaattacatggagaatggccacgcatggctcgggggcaacggtcccgcaacagccacagctgtctgtggctgccgagcaaacgccaagtcca

SEQ ID NO: 402427 - DNA, 122 bp, Homo sapiens
tgttccttctggtgttctgacgtgttcagggtttttttccttctggtgggttcgtggtctcgcaggcttctggagtgaagctgctgatcttcgctgtgagtgttacagcccttaaggtggcg

SEQ ID NO: 402428 - DNA, 122 bp, Homo sapiens
ggttgagtcgtggtggtgcggacgcgctcgtgctcgggaactatcggattaaacttgaatcgagtgaaattacacaaaggagcgccgcggaggaggcggcccggggacccggacaccctgaa

SEQ ID NO: 402429 - DNA, 122 bp, Homo sapiens
tgagtgctaagcccctcactgcccgcggcagggccggcaggccactcggagtgcggggcccgccaagcccatgcccactcggacctctagctggcccgcaagcaccgcgtgcagccctggtt

SEQ ID NO: 402430 - DNA, 122 bp, Homo sapiens
agcagggctaactcctacgcagtgtgcccagagtcagcctgttttttttcaatatcttcacgtcatccaatcttcttttcctttaaaaacctacttgtgggctggttgtggtggcttgcacc

SEQ ID NO: 402431 - DNA, 122 bp, Homo sapiens
ttttgcccacatctgtatatttgtctattaatgtgatgtatttgagtattgttgtgggggcgggtatgtctgtatataaatctgtgcagccactagtcaacaaatactgtgtatgcctagca

SEQ ID NO: 402432 - DNA, 122 bp, Homo sapiens
ggagcaagggagaaactgctatcttttcttcaaacgctcggacctagcacaagtacagaacgtagtggctgcaggctcggccgtgctcctaacagcgctgacagctggattggcggacgcac

SEQ ID NO: 402433 - DNA, 122 bp, Homo sapiens
cttcccctcccccacctgggcaagccctccaggttctgggcacccatggtgggcaggacccgggagtggcctggctggtggggcctggcagagcatgagggccactggcccagcctgggagg

SEQ ID NO: 402434 - DNA, 122 bp, Homo sapiens
gcccaaaggagcctggtcttcagggctgcataggatgcaagtgccttctctgcttctcaccgtgggtggcactaatttcctccttaaccagaactttgttccagccactgacccattctaac

SEQ ID NO: 402435 - DNA, 122 bp, Homo sapiens
cctgtgcgagtccgtgctggtgacacagcagtgaccaacgacagccccgtgttgtcctcccggagcttacggttcagtaagggacacagacacgttcccagtgctgacccagaatgggcagg

SEQ ID NO: 402436 - DNA, 122 bp, Homo sapiens
tggacacgcccccactgatactgtttctaattgcagcatgggagaggaggatatgacacgcgatatccgagagagtggaaaaacccctgtgatactcttcttaatattcagagaggaagagg

SEQ ID NO: 402437 - DNA, 122 bp, Homo sapiens
tgggactgttttagagctaactggcaggtattgcaaaatgcatagacagaaacacatgaacgtgtgaacaccatgtggaactccctaaagagaatcatcaaagtgctcctcatccacgtgta

SEQ ID NO: 402438 - DNA, 122 bp, Homo sapiens
aggccaactcggctggaggcaccaactgaagccaaggccacgggtcctgtgggcggtgcacgggctcaggcacaccgggaatgtgccacgggtcctgtgggcggtgcacgggctcaggcaca

SEQ ID NO: 402439 - DNA, 122 bp, Homo sapiens
cggcgccaccggttaggcctgggcggggtctgaagggtctgaacctggggttgtagaggccgccagcatgggccctgctgggcacccgggtgagccgtgagaggaggccgggtccagggtgg

SEQ ID NO: 402440 - DNA, 122 bp, Homo sapiens
catcaacattgtcaatgtcatcattatcattatcgttatcattagaggaattccgcctcacggtggccaagaatttgcaggcttatgtccttagcctgtccctaacatagattctaatttac

SEQ ID NO: 402441 - DNA, 122 bp, Homo sapiens
ctgggccccatgctggcctgcctgctggccggcttcctgcgatgatggctcacttctgcacgcagcctctctgttgcctcagctctccaagttccaggcttccggtccttagccttcccagg

SEQ ID NO: 402442 - DNA, 122 bp, Homo sapiens
tcctcttgccggaggggcagagtcaaccactaatggcatcgcctccaccctgtcccagaccgtgggaaaacctgagcctgagagcagagagccattaacacagcagtggggctttgtgcaag

SEQ ID NO: 402443 - DNA, 122 bp, Homo sapiens
cagtcccgcttcaacgtaatttaggtcctttagcatctaaactacagtaactactatctccggttttcagtggcccaccaccgctccccatactcctcaatcctcgtccaaaaacattacat

SEQ ID NO: 402444 - DNA, 122 bp, Homo sapiens
gttatcactcaatctcgctgaggagttggggggggctttcaagggttttggagtggtgatcgctgattggttagggatgaaatcttaggcgtgggaaacctccctgagtccgcctcagtctg

SEQ ID NO: 402445 - DNA, 122 bp, Homo sapiens
ggaaggaggtggaaggtgtccgggatcggccctggcagcgtgtagggacctgggtgctgccgctgccgtgcgcttgtgcgtgcgtgtgcgcgcgggtataggtgtgggcgcgcgtgtgtgtg

SEQ ID NO: 402446 - DNA, 122 bp, Homo sapiens
tcacagatgacagcatcttgcacagtgatgtaccacaaaagacactggtgaaaggctggccgcatgggggacggtggagccttaagataatgcggaccctgaagatggtaacactgcacttt

SEQ ID NO: 402447 - DNA, 122 bp, Homo sapiens
ggcagcaatttatccaccgacaggggttcctcagcgctggcgtgggagccatggctgtgacgagctagactttaaaatattagcaaattggccgagcacggtggctcacgcctgtaatccca

SEQ ID NO: 402448 - DNA, 122 bp, Homo sapiens
ggatttagattccgttgtgctggtatattatttcttattcctagtctgtgtacatatgtgcgttatatatgtgcatgtgtgtgtgtgtattcgtgtaaagaaatgtattcaagcatttgttc

SEQ ID NO: 402449 - DNA, 122 bp, Homo sapiens
ttggacaaattcagagccaaattttatttggctgtaaatgtggcaggcaggactctaagacgactcccatgaccctgttccctggtggtgttcctgtgattacataatgtcacatgacaaaa

SEQ ID NO: 402450 - DNA, 122 bp, Homo sapiens
ggccacgcctccacatagcaacaaatagagtggacggagccgagataacttgtcactcagcgccctgcctccgcgctccacctcccggagaggggcggggccaggcgagcctcacccacggc

SEQ ID NO: 402451 - DNA, 122 bp, Homo sapiens
atctggcatgctcttctggggcttcccaggctatataggagagtggccaaattctttaaccggctcaagttcccctcaattaagcttcgacctaggttcttctctgcgattacaccctttcc

SEQ ID NO: 402452 - DNA, 122 bp, Homo sapiens
tggcgaaaaagtaaaattaaccaccaagaggcgtctagaagtgaacaatttatcatctgccgttcatggccccagcccagccattctttaccctagctgcaggctagaatcacctggggact

SEQ ID NO: 402453 - DNA, 122 bp, Homo sapiens
gaaatcatcccaaaaggcctgagattttaaaaacagagatcaaaacacactggcattcaacgtctcttgctggtggacccggagcagatgctccccacattccatggggtgcctgtctcaac

SEQ ID NO: 402454 - DNA, 122 bp, Homo sapiens
gcgccctcccccagcacatcttcctgcagctggtagacgtctgccgggcagcggggcgggcgtgagagggaccctggcttttccccgctcccggctcccccaatgcccgccatccccgctca

SEQ ID NO: 402455 - DNA, 122 bp, Homo sapiens
gatgatttatggaaggttggagaggtcactcctttctgtgtcagcgcctctgctggaaagcgacacaccttacgctacagcacattaaacagaagcgtgtgctcaggccccggccgagagag

SEQ ID NO: 402456 - DNA, 122 bp, Homo sapiens
gtgagctgccgccgccgccgccgccgccgccgccgccgccgctgccgggggaggggcggccgccgcccgcctgcgctcagagactcacgcagccccagtcccgccagtccgccaacacagta

SEQ ID NO: 402457 - DNA, 122 bp, Homo sapiens
tatgcctttatttttaaaagtttgaattaatttcaatatgaaactcattttgccttgcaacggatcaaagtttagatgagaattttcggagttcagtaaagcccctctggttcctaatattc

SEQ ID NO: 402458 - DNA, 122 bp, Homo sapiens
actggtggtgatgaggttcagaagtgatgccagggtgacctgttcatgcaaacatgaatgcgaatgaatggctaagttgtgagccatgtcctcaatcagaagcatgattccagggattctgg

SEQ ID NO: 402459 - DNA, 122 bp, Homo sapiens
cacctgcttcgacatcagcgttgcagccagtgctgccatcccggggccgcaggaggtggacgtctgaggctgggcgccggacaagaggagggggcgtgcagcgggctggaggacgggacgtg

SEQ ID NO: 402460 - DNA, 122 bp, Homo sapiens
aaagcaatagagctctcagcgcagccatgtttgagccgagtcaggtgacagaacccactccgaacagcggtggtgggggtggtgacaaagactgaaagccccactcctattggctcaaggca

SEQ ID NO: 402461 - DNA, 122 bp, Homo sapiens
gtcattgaaatgtgacagtgatgtagaacaaaacctttccgcagtgggggctggctgcaccgaattccttttgcaacaaggaaattaggtcagaagaaatttaggtcaacaccttacagaga

SEQ ID NO: 402462 - DNA, 122 bp, Homo sapiens
cggcccagccgccgcctttccgaagctctggttaagtggcacgtttgtggcctcttttgacgtgactggcaaaaagctccatgggatttctctgaaattctaggaattaagtttttttgttt

SEQ ID NO: 402463 - DNA, 122 bp, Homo sapiens
tccctactagtgtcaacacagagggcatgtagactgtgatgttggaaatggacatagtgtcgttgggtctcctgatgcaaacaaaagaagtttctcagtcagtgttactgttcctcttctgc

SEQ ID NO: 402464 - DNA, 122 bp, Homo sapiens
atctcatatatgtttttgaaaccaactcctacttatgtgcataaaactacattatgtttgcgtgtagtaaactctggaaggacacatgctccacctttaacaccattcagggcagggtgaga

SEQ ID NO: 402465 - DNA, 122 bp, Homo sapiens
cgtgcttagcccgaggaggaagaagagggtttccagctaagagtcagcaccaagggcacccgctctcattcatgtgtcaatgaagaattcctgccagacttccagtactgtcctcgaccatg

SEQ ID NO: 402466 - DNA, 122 bp, Homo sapiens
tctggatcgttccctttctctcaaactctgcgtcccatccattgacaactcgtgtggattcgtccttccaaatctgaaatctcacgaccgcctacagggccaccaccctggtctaagcctcc

SEQ ID NO: 402467 - DNA, 122 bp, Homo sapiens
tgttgacttagcggaaggaagggctgactcactgttcaccttccctgtacgttaccagctcgaggtctcaggatgcgttggaccctattttggtctccggaatttgtcatcatgcagtgcta

SEQ ID NO: 402468 - DNA, 122 bp, Homo sapiens
gtaggtataaagataggccttgctggagatttgtcccggatcctccagcttatctccggacgctccggttgcctagttacgagaacgagctacctcgagctccgcctccttcttatagagta

SEQ ID NO: 402469 - DNA, 122 bp, Homo sapiens
aatggaagctctgaagctgaggccacccttcagaattggcctgagttgaaaggagggagccggagctctatacagctccttgagcaaccactgggttgagtcgccctggaaggtgggagata

SEQ ID NO: 402470 - DNA, 122 bp, Homo sapiens
caccttcctcccttctgctgatgagatttatgactgcaaggtggagcactggggcctggacgagcctcttctgaaacactggggtaaggatgagttccaccacttcatgggtttctaataat

SEQ ID NO: 402471 - DNA, 122 bp, Homo sapiens
gatggctgaaagattgcttccttacactacttctcggccatcagggctgaataaaggacccgcctccgccctctactccggctcttctctggctgtctcttccccatcaagtcataaagcga

SEQ ID NO: 402472 - DNA, 122 bp, Homo sapiens
gactgaccaatggcgagtgaagcgccaagtcccgggctgggccgctgccagggacggtcacgaatgtacgaaccttcccatggaaacattgcaaggggccgagcaaaattccgaccgtcgcc

SEQ ID NO: 402473 - DNA, 122 bp, Homo sapiens
gtcggcaggcaggcctacgggtggggcgagctccttgcccaaggcagagggtagctggcccgtgagcccaagtcccttgacgctttgtaatcacggacctccacagtgcaggaccccagcac

SEQ ID NO: 402474 - DNA, 122 bp, Homo sapiens
gaagggggtgaagggggtgtcccgggggacgggctgaacctcagtcaggaccgcctgcaccgcagtccggggatcgggtcgaggggagaagaaaaaggggtgctcgggagcagcccccggct

SEQ ID NO: 402475 - DNA, 122 bp, Homo sapiens
gaagggggcctcaggagagccccagtaggagtgtgtcttcatcagacatcacccggctgccgctgtcggtccgcttctctgcattgggaattgcagcatccacacctgcctgcggagctggg

SEQ ID NO: 402476 - DNA, 122 bp, Homo sapiens
ctcagcgcggcagtacgggccccaggccggcgggacgggcggcgtgaggggcagcggtggcggctttaagtgctgaatcaccactttgcaacccgagcgccaaaccgctgtgacccacgggg

SEQ ID NO: 402477 - DNA, 122 bp, Homo sapiens
ttccttcaggtttccagagctcaatcaccgacaccagttgggagactgggtaataacacacgctccgggcacagggaccgcgggccaacgaaccgcgcgtgcgccgcgccagcctgcgtcga

SEQ ID NO: 402478 - DNA, 122 bp, Homo sapiens
gccccgcccctttggccacatgtcgcgcatgtcttcccgtcggacggcgtgccacctcgccgcgcagctttacgaacctagagcagcgccgccccgcctcctgtctccgtcctcacctcccc

SEQ ID NO: 402479 - DNA, 122 bp, Homo sapiens
cttcaccgtggccaccaggccctcatgggccggcttcagcttcagggggcccagggcctgcgtcttgtaggcctcggtcaggtcccgtgagggcggtgggggcggaggcgtgccctcccgct

SEQ ID NO: 402480 - DNA, 122 bp, Homo sapiens
tgaatttgtaaaagcctcttcacaattaaaaactaaaaataggccgggcacggttggtcacgcctgtaatcccagcactttgggaggccgaggtgggcagatcacaaagtcaggagatcgaa

SEQ ID NO: 402481 - DNA, 122 bp, Homo sapiens
ttatgttaataattgtcaagggtaatgaatgtagttaaacatgctgtgacatttccaccacgaacccaaacaaatatgttgtaacccagtgtaggaaacgagatgcccagaaaaacaaatga

SEQ ID NO: 402482 - DNA, 122 bp, Homo sapiens
ggaggctgaggcagtagaatcgcttgaaccccggaggcaaagattgcgctgagccgagatcgggccactgcactccagcctgggtgaaagagggagacttcacctcaaaaaaaaaaacaggg

SEQ ID NO: 402483 - DNA, 122 bp, Homo sapiens
cttccgcccgcatttcttcgcagtgcattctggggaatgtggttcgctgtggcccagaggcgcgagggccggcggagtttcttcagaggaactaccgccctgggaggaagcgtctgtttagt

SEQ ID NO: 402484 - DNA, 122 bp, Homo sapiens
tttgggaaatggggctcaacgagccagtacaggaaaagctgattccctggctactactatcgctgtgagtaataaagtcctttgtgtctaatgcaggagtctcatgtcttctaccctgaaat

SEQ ID NO: 402485 - DNA, 122 bp, Homo sapiens
gccggtaccaggcctccacggccagctgcagggaccctgggtccaggagctggtgggctccggcaggcccagcgccacctaggaggtaggagtagagcttttcctggcaggaccagctgggt

SEQ ID NO: 402486 - DNA, 122 bp, Homo sapiens
cgggcaggcccagcgcgtctccaccccaccgcgggctctgtcggtgcactgggccgcgtgcgcccccagccgcctgcacctgcttgctggccgcccccgaccccagattccctccgcgcatg

SEQ ID NO: 402487 - DNA, 122 bp, Homo sapiens
caaggtccctgggattccgatgcctactggagtggggaggggaggagccagaggtgcggtcggtcgtgtgtctctctcagcctagtttctatgggaaatgaagtaggaaggaacgcagccag

SEQ ID NO: 402488 - DNA, 122 bp, Homo sapiens
acaacatcatctgaccaaggtttgcatgcataagcattgctaattaacgataagtctccacgatgtcctcctctcagtaagtttgacacacagacctcagcgaagctgtatgtactgcctaa

SEQ ID NO: 402489 - DNA, 122 bp, Homo sapiens
aacaaatattcgctgcttttgccaggctatgcaataaacgctggggttacgcaaggggagcgcaaaacaaaacaaaacagagaacaaacaaaaaccacaactcccaaaagtccattaagacc

SEQ ID NO: 402490 - DNA, 122 bp, Homo sapiens
acaccaactgtatgtcaaatacctatcactgcaggtgattcaaagtgacaataacaacagcgaacatttacaaaaattggggcgcaaggtcacacttgtttaagtgatggagttggatggca

SEQ ID NO: 402491 - DNA, 122 bp, Homo sapiens
gtttacattgtgtttcttgagggagaaaaggctcttggtaaaacaatgccttattcctttcgtttggaagttctttctgcagaatacagctcaactgggggtccccaaaaggcccctgaata

SEQ ID NO: 402492 - DNA, 122 bp, Homo sapiens
ggggtctgtgcgctgccttccgggactggtagttctctctgggctcctcgcagctcggcgcgtcgagagcgaactccatctcccaggaggcattgcagcgagttgctctgcgccccgcctcg

SEQ ID NO: 402493 - DNA, 122 bp, Homo sapiens
gaggtcgttggagtcacttccccgtcaccagctcctgtgcctgccagtcggtgcccctcccgctccagccatgctctccgccctcgcccggcctgccagcgctgctctccgccgcagcttca

SEQ ID NO: 402494 - DNA, 122 bp, Homo sapiens
ttacctgcgcatcgtgcattccttggattattacaacacctgtgagtaccccaacgaggacgagatgcccaatcgctgtgggatcatccacgttcgggggcccatgccacccaaccgcatca

SEQ ID NO: 402495 - DNA, 122 bp, Homo sapiens
cccgggtcggcggggccggggcggtgggggctgagccggccgtggctgtgaaggcgctgccgcggctgtcgggagggcggcgcgacactcgggctcgggcggccgggaagcgacgggatggc

SEQ ID NO: 402496 - DNA, 122 bp, Homo sapiens
acggctctgcttcccagcgggcacacgggtccggagcctcagaatgaagtggtgcagaggcgcagggcacacctaggagaagctcaatgaccaccaaagcccttgaggagagacggggtttg

SEQ ID NO: 402497 - DNA, 122 bp, Homo sapiens
gcgaggccggtggacgcgggactcgctcctctgacctctccccggccccccgggaggtagcgggagattgcacacgcgatcctgcgagtttccgaactttggaagatcgtgacccggagaga

SEQ ID NO: 402498 - DNA, 122 bp, Homo sapiens
cattgggctagtggagtcagtggtccagacaccatccaccctgcacctgcccttctgccccgatcggcaggtggatgattttgtctgtgaggtcccagctctaattcgactctcctgtgaag

SEQ ID NO: 402499 - DNA, 122 bp, Homo sapiens
ggtgcagggcgacacgcttgtgccactcgtgcacgtggtgtgggttttggcgcagcaagacgctgttgaggagcaggggccgccggctgatgagctgctcgaagcgggccaggcgcagctcc

SEQ ID NO: 402500 - DNA, 122 bp, Homo sapiens
agtcaggaaataaagaagagtgcaagtgtctggtttgtgcccctagctctcggtgcaaagcgttcctgcagaattgcttccacgtaaagggaccttcgggaaatttcgctggataccggctg

SEQ ID NO: 402501 - DNA, 122 bp, Homo sapiens
catcacttggcatgaaaaagcttctgattcagttgccatttacttattgagtgccttatacgtattatctcacttaatcctcttatacacaaatgagctaggtattatttacaattttgaag

SEQ ID NO: 402502 - DNA, 122 bp, Homo sapiens
aaggaagagatccaaggaggcagaaggctgcggtcaaaatattttggggtggcagagtcacgtaggatgtggctgtgggttctggcagcccagagattcagctcccgcctcctccctcagag

SEQ ID NO: 402503 - DNA, 122 bp, Homo sapiens
cgcgaggaccggactacgagtcccagaaggcgtggcgtcagcagccatgttggtaaagggcgcccggaaaatgtgggaacggctagagagttgtagtcctcccgaatactctgattggtcag

SEQ ID NO: 402504 - DNA, 122 bp, Homo sapiens
ggcgggggttatgaagagggcggtgaagggggaacactggtaggagggaagggaccgcgccgaggaaggcccaccacaaagactccagcaggcgccaatcaggggacacaggggcggcgggg

SEQ ID NO: 402505 - DNA, 122 bp, Homo sapiens
cgaagaaccaggcgccccctagtgtgggataagcgggccatcgggttttttttggggctgcgtcagccagtggcatttagggcgatggggcgctccgccgcggagactcctgggaaagagag

SEQ ID NO: 402506 - DNA, 122 bp, Homo sapiens
tcccacggtgcagcggcaggctgaaggctcctcaagcacggctagaatgggcgcggaggccgaggaggcaccgagagcaagcgagggcagcgagggctgccagcatgctgtcacctctcaaa

SEQ ID NO: 402507 - DNA, 122 bp, Homo sapiens
gcctccttccgatggtctctgttcactttgcagtgagctgcctttcaccatccttttgtccggtgattctcaaagtgtggtccctggccagaagcatcaacatcacctggacttcgttgata

SEQ ID NO: 402508 - DNA, 122 bp, Homo sapiens
cctttgatagagcagtttagtaacactgtctttgtagaatttggaagtgtatactaagagcgctttgagttctatggtagaaaaggaaatatctttgcataaaagctagacagaagcaatct

SEQ ID NO: 402509 - DNA, 122 bp, Homo sapiens
cagaagggagatggttttcccctggaatctggccattcagcagcgcaggctctcctcctccgaccctgtccaaactccatgttctgccggtcgatggcctgctgacctgccggcgtctgtcg

SEQ ID NO: 402510 - DNA, 122 bp, Homo sapiens
ttttctggcgcttggcctggttgtgccctgcttttgctttttaaagagaagatttgaaaacgtgaaggcaactgcgaccggaagaaacctccttttaaatgtatagtagtatttttagctga

SEQ ID NO: 402511 - DNA, 122 bp, Homo sapiens
gcacggagtttcctctggagcacggggctccagccgcaggatgctgggcgccctctggggcgtggctgactgtccctgtcggacctgggggtttctctggggccgggctccgtctgttggaa

SEQ ID NO: 402512 - DNA, 122 bp, Homo sapiens
ttaaagcattgcaacacaaggtcttccagtatctggatccgcttgtacctttccttgcctcgtttcacgtcctcccacccccatcttctagcgacttcacttctgggtccttgccattccct

SEQ ID NO: 402513 - DNA, 122 bp, Homo sapiens
aggccccgccccgcggctgcgcgcattcccgtaaaagcccggtggactgcgctcctgggccgcttggaatctgaggcctccagtggtctcctgccgccacctggaccggggacagtaacgcc

SEQ ID NO: 402514 - DNA, 122 bp, Homo sapiens
tttattttatttaactgtgaacgcccttttactccctgcattgaggtgagacagaggacacggctctcaaggagaggaagaagttgttgggattcccaggcttcatgaggccgggctgtccc

SEQ ID NO: 402515 - DNA, 122 bp, Homo sapiens
attcggggaaccaggggaccctctgcacggtgagggtcgaggcttcgtgtggagcctcgccgggcagagagcctcggcccctgggatgatcgttaccttgggaagaggagaaggagtgggca

SEQ ID NO: 402516 - DNA, 122 bp, Homo sapiens
cagacccagctgcacggatggaggcattccagacggaaaagccccattaggtcatcgctacgccgcctgcaatgccgttcagccttccgctgtgtaatctccagcacactccggggagactg

SEQ ID NO: 402517 - DNA, 122 bp, Homo sapiens
actcttgggactgtggaagcccaggagaccagatttcgtttcctgcatctccaaacatggcgacctaggagaaggggaagaacaattttttctcctcttttgggaaggtttgtgtctagtag

SEQ ID NO: 402518 - DNA, 122 bp, Homo sapiens
ctcaaagccatcatcctcacaaacgtaaagtgatgcactccaaatagagatcaaggaaaacgaatgccacgcaggtcaccaggcttggaaaatagaaggcacccgaagttgttctacgtggc

SEQ ID NO: 402519 - DNA, 122 bp, Homo sapiens
tcaggtgatccacctacctcggcctgggattacagtgctgggattacaggcatgagccaccgctctcagccagggtgtaacattttaaggtacatgatttataaaaagcttttttaaatagc

SEQ ID NO: 402520 - DNA, 122 bp, Homo sapiens
tcgcacccgggtctttcaccccaaaggactttgctgcggacgctgctctgacccaagacgcgggagagaagtcccaaaggctacagccaggggctgggggactcctctgctcaccttagtcc

SEQ ID NO: 402521 - DNA, 122 bp, Homo sapiens
gttaggtgacgctgcggggcgggcggacagactgcgggacggacggtggacgctgggacgcgtttgtagctccggccccgccgttccgacccccgccgccgtcgccgccatgacggggctag

SEQ ID NO: 402522 - DNA, 122 bp, Homo sapiens
cagaaaggggcggcggtgctctaaagtgaggcggagctggagggctctgaggaaatgccccggggcaccccctccccaaggcagcctggagtggacgcgcggctgccaggcttcccgcggag

SEQ ID NO: 402523 - DNA, 122 bp, Homo sapiens
ggggccgccggagctgcgcctggacgaggcggacgaggtgcccccggcggcaccccatcacggacagcctcagccgccccaccagcagcccctgacattgcccaaggaggcggccggagccg

SEQ ID NO: 402524 - DNA, 122 bp, Homo sapiens
gctctggaacagtgcggggggggggggggcgcctccagagacggacccaaccccgagagacgcatggaggtgactgtgccctgcccgcccctctgcgctctggaacggtgggtgggggtccc

SEQ ID NO: 402525 - DNA, 122 bp, Homo sapiens
ttcaacaatccttttatttagctctttggtgccgacgcagtgcctatgtacctatatgcacgcccccctcccccaaggcttacagtctgagggaaaaaaaccacagtccccacccaacctgg

SEQ ID NO: 402526 - DNA, 122 bp, Homo sapiens
tcggtgagggccagctacatacctggctaagcgctgcccactgcagaaaagctcatcacccgggacctgatctccaggactcagaagcacttggaggaaggcctattcacttagaagcagtt

SEQ ID NO: 402527 - DNA, 122 bp, Homo sapiens
gctccctgcactcggcctgctgctctggggacccggccagctctaggctctggggggccccgctgcagcccacactgggtgtggtgccccaggcctctgtgccactcctcacacacccggcc

SEQ ID NO: 402528 - DNA, 122 bp, Homo sapiens
agcacggagggctgggctttatacctgtgccaaggacaccaacggcagcatcagcaagtccgtgttgtctcccaaataagtggtgttctccaacaagcttttagcagtaataaagctgacat

SEQ ID NO: 402529 - DNA, 122 bp, Homo sapiens
tggtttattgctcatggttcaatcgggaaattaggcagcgtgtccccatgacagcagacgcgggtgacggctcttgcctccctccccagtgcgcacccccgctggagcgcaggagcttcctg

SEQ ID NO: 402530 - DNA, 122 bp, Homo sapiens
acagcaaagcgctgcccaaggactgcgggaagtgatccagctgccttcacacggaggacacgagactgcttcctcaagggctcctgcctgcctggacactggtgggaggcgctgtttagttg

SEQ ID NO: 402531 - DNA, 122 bp, Homo sapiens
cggggcagggcggggagtggagtggcgcagaagggctgggcgcggaggggcggggcctcccgcgtacctgagccgcgctgcgcctgcgtcctccgcgactccgcgcttggcagccccttcct

SEQ ID NO: 402532 - DNA, 122 bp, Homo sapiens
ccccccaccacccccccggagtacttaagggagttggcggcgctgctgcattcattgcgccgcggcacggcctagcgagtggttcttctgcgctactgctgcgcgaatcggcgaccccagtg

SEQ ID NO: 402533 - DNA, 122 bp, Homo sapiens
aggtgggaaaagaaatgcagcgtgggagggtggttgttagagtcctcaaagtgagactgtcgagagcaaccagatgcttcacccattataccctgagtgcatctgactctgagcctggtgta

SEQ ID NO: 402534 - DNA, 122 bp, Homo sapiens
tagccaagcaattaacctatatacccacccttgggtaataggttctcctctcttatagtacgtgccacacttccaagtgtagactgatgataatgaagacattggaataatgccctttgaga

SEQ ID NO: 402535 - DNA, 122 bp, Homo sapiens
gaattaggtcacccagaaagagtcctaaggttctagcagtccctggcacggttaattattcggggctggcgggtggcgggccaggctccaggtgcagatgcctgactttcttcagttaggag

SEQ ID NO: 402536 - DNA, 122 bp, Homo sapiens
gcccgcctccccgagtcggcccccacctctgcacgcagagacctctcctcacctcccgcccggccagatcacagggccgccgagtcagatgggatccctgcccccatcagcccttctgcact

SEQ ID NO: 402537 - DNA, 122 bp, Homo sapiens
gtcactgctttctttgcctgttctgctttgagtctgattgcaggcctgtgaagttgtccccgtttgtcaggtgagaaatgagaaaatggtgggaacaggataaaagggagcaggaacaaatg

SEQ ID NO: 402538 - DNA, 122 bp, Homo sapiens
ttatggagattggccagggttttactctagtaaccaatcacttcagaacaagggcgggcccgttgatatctctcacactcattggttgagaggttgcggcgcaatggaaggtcttaaaccga

SEQ ID NO: 402539 - DNA, 122 bp, Homo sapiens
cctacctgccgcacctagtaaccgcagagcgcctacctgccgcacctagtaaccgcagcgcgcctacctgccgcacctagtaaccgcagagtacctacctgccgcacctagtaaccgcagcg

SEQ ID NO: 402540 - DNA, 122 bp, Homo sapiens
gagaaacaggcaagcattttcttactcctgcccatctgctttctttctcaagactgcctccgacagatcgcccaagcacacttgaagcctttcacagggtgccctcaggtggccttttgggg

SEQ ID NO: 402541 - DNA, 122 bp, Homo sapiens
tgaatttgatagccaaaaacaacctgatctttttgaagaatagcttttggctatacatgccgggtaaactcatccacctctctgtcagagtgtctatgtggctgaatcgtttccagaaaaga

SEQ ID NO: 402542 - DNA, 122 bp, Homo sapiens
actttgttgggtaaagttgcacaactgaaaaacaggagaagaaatgtacagattatcttgcgtttgggattttatctttggttcaggggtcaaagcagggtttcaatagcaaattactgaag

SEQ ID NO: 402543 - DNA, 122 bp, Homo sapiens
aaacaccaccggctggaaatgtggctctgctcccgatctttgtctgcgttggcgagacaccggccgctctgggccggaatctctcatctacgaaaaagtgggtagatggagaccaccctcac

SEQ ID NO: 402544 - DNA, 122 bp, Homo sapiens
acctccgcgatggtggcggagccgcggcggagctgctgcaccgacccgccgcccactccccgctcgggcccggcccacctcgcagtatcgcgcccctccattggtacagcgcggtgtgacgc

SEQ ID NO: 402545 - DNA, 122 bp, Homo sapiens
ccaacccccgatcacacctcttggtcacactccccactcacagcccccggtcacacccctcggtcacactccccagtcacagcccccggtcacaccccttggtcacaggctcgggtttcgtc

SEQ ID NO: 402546 - DNA, 122 bp, Homo sapiens
gcggcctgcgggcctcttagcttcctgacacccaggggtgcgatgctattttgtaggaatcggcgacaccgccagagcctcgctttcaaattgctgtttccaaactaatgttgttggtgatt

SEQ ID NO: 402547 - DNA, 122 bp, Homo sapiens
cctctgcggactacaactcccaggtaccccgtgccgggtcgtcgcgccattccccggggtcgtgcgcaccgcctcccggatgcagtattccgctgccctgccaggtcccgcccccttccggc

SEQ ID NO: 402548 - DNA, 122 bp, Homo sapiens
cggggtgggctcacgccttgtgctgtttgctggtcttgaaggagacctgcagcacgcgctcgcccaggcgatagccgttcaggctggcgatggccatggccgcctcgtcatagttggtcatg

SEQ ID NO: 402549 - DNA, 122 bp, Homo sapiens
ggtctttgtattgatttccccttcccagtaaatggaaacctgggttattttttttcgtgacgatctcttaagaatcccaccttatcttagactttcatttccaggcggcaatgcctcatatc

SEQ ID NO: 402550 - DNA, 122 bp, Homo sapiens
atcttggggttggcctttgcatgggaggcaggtggggcttggatcagtaagtctggttcccgcctccctgtctgagagaggaggcaggagccccagggccggcttgtgtttgtacattgcac

SEQ ID NO: 402551 - DNA, 122 bp, Homo sapiens
tccagaataattcctcccttcctgagaacaaagctcacacctctggcaggagtccaacatcgcagcgtcacattgctgttggcagggaccaccgagctgggccaggcactgagggacggctt

SEQ ID NO: 402552 - DNA, 122 bp, Homo sapiens
ttgtgcccatacaaggagcggcgggccctagatggcatcgtggcgtcgcgacggcgtgtgcgtgtcgcgcttcctagtgccgtttatagggtcccggcacttccgctgtcgggttagaagcg

SEQ ID NO: 402553 - DNA, 122 bp, Homo sapiens
gtgggccaggtgtccagccttgggagccgtaggagccgccagagccgccagagccgccggcgccccgccccgcctcctccggccgctctcgccggctcaggttacctgaggccggtgggcgg

SEQ ID NO: 402554 - DNA, 122 bp, Homo sapiens
ctccctgccgggtcaggttctcagagcgggtctccggcggcggcgacgggggccgggccgcgcgtgacccgccgcagtcacgccgttcttaatcactagtagctggtgctccaggctggcgg

SEQ ID NO: 402555 - DNA, 122 bp, Homo sapiens
acctcgtgatccacccgccttggcctcccaaagtgctgggattacaggcgtgagccaccacgcccagcctctttaggaattttatgacagcagcactttaccaatatgtggagtagcatgaa

SEQ ID NO: 402556 - DNA, 122 bp, Homo sapiens
gattctatgacacccctataatccccccaaatccttgttaccttgtcccccaggaaggcccggggcagctgccagtaatagaggcttccaggaagcagagagaagccttcgtaggagagaga

SEQ ID NO: 402557 - DNA, 122 bp, Homo sapiens
gcggctcctgcgcgttcccgccgaggcagtggcggcgggagcggcagagacggcagcggccggagtcccgttgctgagtctcacatccgggttctggccgtgacccagctgcggccgccgcg

SEQ ID NO: 402558 - DNA, 122 bp, Homo sapiens
gctacccccggggcccctccccaggttccgggtctcctgcacctctttagcttctccgctcggccccagatggagctcagttccctcaccccgcggctcctcgccggctgggcagccagagc

SEQ ID NO: 402559 - DNA, 122 bp, Homo sapiens
gcgcctgcggagactgcgcagcgcccggctggccggcagccagcgcacggcccgcggcaacggcgcacagccgcttggagaatcccactggctcccgcaccgcccctccgcgcccccacgct

SEQ ID NO: 402560 - DNA, 122 bp, Homo sapiens
ggttctggagcatcccccgggcctggccgggcggggacacgggggtcagccaggtccgggcggctccctgaatcctggggacccaaaatgacaccctcgacctgagagctcaggccctacca

SEQ ID NO: 402561 - DNA, 122 bp, Homo sapiens
gccctgcccacctcggggtcggaactacggtgggcctgggatgggggcgtcaagcactttcgcgccgtatccctccgccccccttcccgacaccctcgcggcgagcggttcttgccgcatcc

SEQ ID NO: 402562 - DNA, 122 bp, Homo sapiens
ttggcagccacatggggccgagttccaaagaggaaagattgtgcgcagaaggagctcagacgctatgtagagggttctccttacatccgccaaatactattcagcacatgtatgtgagaaaa

SEQ ID NO: 402563 - DNA, 122 bp, Homo sapiens
gaatgtttccaaagatctggggcgggagcgggcggagactgccgccaggagcctcccggccgccccagggctgcgcagccactggagcccatcacccaactccagacgctcctggctcctct

SEQ ID NO: 402564 - DNA, 122 bp, Homo sapiens
tattggtactgcgggagcaggcggcgctgggcgcggttatgtggaaggctgagtgattgccgctactctaatcccaccggcttccttggttcctctgtgagagcaaatatccccttttggaa

SEQ ID NO: 402565 - DNA, 122 bp, Homo sapiens
gttctgcaagcccctcttctgggtctgcgacagtgtgaacgactgcggagacaacagcgacgagcaggggtgcagtgagtgctggggaggggctgcctgggcgggcaggtgggcggggcgac

SEQ ID NO: 402566 - DNA, 122 bp, Homo sapiens
catattaactcacttaaccctaacttcataataccactgcttttctgagaagcaagttaacgttctcaaattcatacagctgatacatggtggtgctgggataccaactcaggctgaataaa

SEQ ID NO: 402567 - DNA, 122 bp, Homo sapiens
ccgctggtgggggtctctctcctgacagctgcagggactggccccctccccacccaccgccggcgcagccagaagcagccacgcagacgtgcgaccccccacaaaccgcctcgggacgaggt

SEQ ID NO: 402568 - DNA, 122 bp, Homo sapiens
ctcggatctacaaaggcctttcacgcaaaacctgctcagatactcactgcccgttcccgtcgccatcttggccccgaagtctccaaccctgaggagagacggtctggaagggccgaaaccct

SEQ ID NO: 402569 - DNA, 122 bp, Homo sapiens
cataatcatcaacattaagggaaaattggagtaacagaatcatcgggaactgtaatcatccggatgcaaacttcttagagctgccctccttggagggtaaaaggggggcctgggagttggag

SEQ ID NO: 402570 - DNA, 122 bp, Homo sapiens
aagccacaggctgctttaaaaagcccacaggtgattcccatgtgcagctaggtgagagtccgccctgatataggagtatttaactcccaggactcctgggcaggctgtctctgagaaattac

SEQ ID NO: 402571 - DNA, 122 bp, Homo sapiens
caagacctgcgggggcgccaccggtaggccgcagcggggccggggtcgcgtggaggggggcgtcctagagcttagcccgggctcctggactctgactggcctgccggtgtctgagggagcgg

SEQ ID NO: 402572 - DNA, 122 bp, Homo sapiens
tcccatttcggagtttcctcttcccaaacaaaaatagatgggtcactccctagaagatctcggggagagtctcctatacgtgttgctgtgtagcttccgtaccgcaaaatggcgccattcta

SEQ ID NO: 402573 - DNA, 122 bp, Homo sapiens
tgggaggttgtgggggggcgggggggggggggcggtgcgggggcaaacccgtggctggggcgcttttctggcagaaaggggcagttctcccagttcgccccagggactccactctgccttcc

SEQ ID NO: 402574 - DNA, 122 bp, Homo sapiens
actgacatccaaacactttaaagctgccaaggtggacggaacaccttgaattcccagacgcgctccactgagcatgcccagagcctcaggccaaaccccctcctacccgccaaggggaggtg

SEQ ID NO: 402575 - DNA, 122 bp, Homo sapiens
ctggcctagggccctcgcctcagagtggcagctgtctagccctttgttcacacaaaaatgcgaccactactctacggcagagcttcctccagccagggctttagagtctccttcccttactt

SEQ ID NO: 402576 - DNA, 122 bp, Homo sapiens
cgcccgcggcggccgccgagtggcagcgctggactcgcggagaagcttgggtacctgagccgcggtcccgggtgacaccctcagtgacgccaggcgcgttccttcctcttcctctctcctct

SEQ ID NO: 402577 - DNA, 122 bp, Homo sapiens
ctggaggacaattgctttcttcacggtctgtgctggtgcctacacatacaactgtatcatcgcatccactacctaagcaagagggtgaaaaaggagactagcccccttttcaaaagagattc

SEQ ID NO: 402578 - DNA, 122 bp, Homo sapiens
tgccacctggggagggagcccctgatacccaaaagcaaagactcagaccagcatttctcacgtgccgacacatgtactgatgccgccaataagaatataaaccaagggcacgtgatttgtgt

SEQ ID NO: 402579 - DNA, 122 bp, Homo sapiens
cattggccaccgagtcagcgggaggtggggctgctgccgtcgccatcttgttgaggggcgcggccggcttggtgcggacatgtttatgaggggcaacctctagcttgagacctcagcctaga

SEQ ID NO: 402580 - DNA, 122 bp, Homo sapiens
gagtgcgacccccgggggacgcattcgtgtccagggcgtacgaaaaatagggcgagcgtgcgcaagcatggtgcaggtagtgaacatgctttgcggggaacagtggccccaaattgctgctt

SEQ ID NO: 402581 - DNA, 122 bp, Homo sapiens
cccagcgggcctcggcggggctgggaaaccggctgaggttcgcctcacggtggggaggagcgacgggaggcggaagcccttcggtccgggccccgcccccgcactcgccctcgccccgccgc

SEQ ID NO: 402582 - DNA, 122 bp, Homo sapiens
cttcttgatttctaggtttaactttctcccccacttgttctacccaacagccctcttggccgctcctccctggaatcatttcctgtcatgacatttttagaaaccaaaataacagcatttac

SEQ ID NO: 402583 - DNA, 122 bp, Homo sapiens
aactgtctactgctttagcatttgtgtcttcaaatttctctcctttggttatataccttgcgtattccgcacattgataaagtttctttcttacagaagttctgatattgaattaaggaatg

SEQ ID NO: 402584 - DNA, 122 bp, Homo sapiens
tgcgtgaattcaaataagtcacctcacttctcccagcctcggtctcctctgtagtaaacccgggtaatgtattcaggtaaggcaatgaaaggaagcctgcacctggcggatccggatcggat

SEQ ID NO: 402585 - DNA, 122 bp, Homo sapiens
ccatcgaagactggtgcccacctacgagagcgcgtccatccgccgattccaggagggacgcgtggacaacatcagatcggccactccagaggcactggcttttgtgagagccgtgactgacc

SEQ ID NO: 402586 - DNA, 122 bp, Homo sapiens
gtgagccgtcgagtggggccgtttgggagcccttcttcgtgggtgagcactgaaggaacccgggtcccataagcccgtgcttctatgggggctgccccctctcccatcgcagggtaactggc

SEQ ID NO: 402587 - DNA, 122 bp, Homo sapiens
ttccacagcgaagggagctgctccgggcacgtcgcggagggagtcccatttcttctgactcggcaggagcccgggacgttctggaaggagggacgagccgaggcaggaggggccgggccgac

SEQ ID NO: 402588 - DNA, 122 bp, Homo sapiens
tttgctggagagccttgctactgttctgcatgaggtgggggatgccttctgcgcggaccccgcgtccaggcaaaactctggaacgcactaggcagccaagcccggggggaagagatggaacg

SEQ ID NO: 402589 - DNA, 122 bp, Homo sapiens
gcccgcacccgccgcacccgccgcacccgccgcacccgccgcacctgcccgctcgccgctcggtccgcagtgtctccgcgcgcccgctccgcccgcatttcaagccccacaggccccgcccc

SEQ ID NO: 402590 - DNA, 122 bp, Homo sapiens
gggtactcgcgggttcccaagacgcggccggcagtgaggttgaggccatggcagaggctccgggcctgggagtgggtcctgcctgcctgtgtgagcgtgggtgtgacacaattatctgcctc

SEQ ID NO: 402591 - DNA, 122 bp, Homo sapiens
aggctggaaagaggagcgatgcttttaggaaggtctgagcgtgtttgaatctgtggttgccgggggtgggggagttgcccattaattcattcaggaatatttgtagactgaccacctacagc

SEQ ID NO: 402592 - DNA, 122 bp, Homo sapiens
gcttagtgatagtggtttgcctatctaaagaaccagcatttagtatatggtttttctctgcggataggggcataatttgctatttttcatgatcagatattttaaaaggtctttttgtatgt

SEQ ID NO: 402593 - DNA, 122 bp, Homo sapiens
gtaataccctcagcaggtggccccacctcaatgagcctgtctcccattcaaaaagcagaacgagtgagagggcggggcctggagctttacccaatcagtggcgtcggagtggaaatcctcca

SEQ ID NO: 402594 - DNA, 122 bp, Homo sapiens
tttttgagacagggtctcactctcttgcccaggctggagggcggtggcatgaacacagttcgctgcagccgcaacctcctaggcttaagtgatcctcctacctcaacctcccaagtagctag

SEQ ID NO: 402595 - DNA, 122 bp, Homo sapiens
catgatgaattctttatgtaattatctaattgtgtggtattcactagattgtaaatgccacgagggcaggaaacaggtctgttttgttcccacctgaatctccattgcctagcacagattct

SEQ ID NO: 402596 - DNA, 122 bp, Homo sapiens
tcttgacccagatgctcctttctattcatcccaggtcttcagataataacttagctgtttcgacaaatttccgattggtaaatcttgaaatccacatatgacctagaagcgtccacttcaag

SEQ ID NO: 402597 - DNA, 122 bp, Homo sapiens
ttggaagccaaaagtacgagctttttctcccagccttggcagtaagtaataattcctcatcgccatggtaaccctggcgggcttccagccgacactcgggagctgaaacactgtgaggcctt

SEQ ID NO: 402598 - DNA, 122 bp, Homo sapiens
tccttccctccttggggtgagccactttcattttcccagcggggccaggcagtctttgctcgggcccatcctcttagctgctgacgttttgatctttgtcttattgaagtgctggaatacag

SEQ ID NO: 402599 - DNA, 122 bp, Homo sapiens
atatacatatatatgtcttctcttgggctccacccaagagcaacctggaactaagttattcggcaacgaactgttccactttgttgtgaggcaatagatgtggaaattccctgacgaggggc

SEQ ID NO: 402600 - DNA, 122 bp, Homo sapiens
gctgcctggggagatcagcctgtaccccggcgctggcctccagacagccaggtgctgcctcgcacggtcttgcttgcaggctggggcatgaagcaccctggtatttacgctgggattggtct

SEQ ID NO: 402601 - DNA, 122 bp, Homo sapiens
tctactccctgccaggcttccagcaatcattgtccacccggtaaacccgtttacattaaacgcacggtgggtttaatatgtgtgtcgggagaggacagagagtagaaggggagattctggct

SEQ ID NO: 402602 - DNA, 122 bp, Homo sapiens
ggaggtccccagggagcacgaacatgaactctggggagctggaagcagggtactggtccccgcctcctgcagctctgcccagaggacttggggagcccggatggagaggcgcaggatctccc

SEQ ID NO: 402603 - DNA, 122 bp, Homo sapiens
acaaagcttttctcagttactagttggaatgcatttatctctctcaccattccaatggatcggttttttaccgccccccaaaaggacatgctacctttaaagataccatcggtctcattaat

SEQ ID NO: 402604 - DNA, 122 bp, Homo sapiens
agcggttcatggcaggcaggctgggtggactgcagccgttgctctggcctactgtggacccgacaggtactaacgcgctccgtgcacgctctgcttcacccgaaaatggggttgtgggcagg

SEQ ID NO: 402605 - DNA, 122 bp, Homo sapiens
ttgttaaagaagtgatggccactcaagccgatctgggtgtcccccatcccagggattgaccggcttgcttctgccttcacagtgtactccccattctggtgcccactcctcacttcagtgat

SEQ ID NO: 402606 - DNA, 122 bp, Homo sapiens
gcagtaggtccacaagtggggagaatccagggcatgattctcaggcaccgacagaaccctcgctctgcatgcccaagggctgtgcgaggaaggcaggtgcccagctccccagttcttcgatc

SEQ ID NO: 402607 - DNA, 122 bp, Homo sapiens
cgcaccgcccgacgctgctggccagccgcagcccgcatccgcccgtatcgccgccgctgccgcctcagcacggctgcccccgcagcgtctgttttgttttattctaacagggtctctctctg

SEQ ID NO: 402608 - DNA, 122 bp, Homo sapiens
aaaatgtccagaacaggcaaatccactgagtgaggagatagatctgtggttgcctgcaatcgcaggggcagggagtggggagtgtgtttaatggatgtggggtttctggggggatgatgaaa

SEQ ID NO: 402609 - DNA, 122 bp, Homo sapiens
tctgcggtgcttagcgcctcctcctacagcgcctcctcagagcgcgcctcccctgcagcgcgccttcccagagcgcgccttctagatgcggcctcctcaggcccctcctcccagctccttag

SEQ ID NO: 402610 - DNA, 122 bp, Homo sapiens
gcagggagccggacactgctgcggggcgcaggcgctggtgggagggcaggacttgaaatacggtccctgccaggcgaagtggctcaggtctgtaatcttagcactttgggaggccgaagcgg

SEQ ID NO: 402611 - DNA, 122 bp, Homo sapiens
ttccacaggttaaagagccccaaacaaaacacgcattgaaacctgcctccacagccctctcgggcctgcacagggctgaccggcacccctggagcctgtccacctctggaagggcagttgca

SEQ ID NO: 402612 - DNA, 122 bp, Homo sapiens
tgagactgggggcgtctagatgatccaaggggtaggcagagtgtgagcagcggcaggtatcggggacacacccgcggagccctaggaaggggactgaccgggacatggaagaggtctggacc

SEQ ID NO: 402613 - DNA, 122 bp, Homo sapiens
caaagaagtgtgttgccctctaggaaatgtgtgttgctctgatgtaattaggttgacatacgtttccctggtagccaatataaggaatgggtccactaacccttgatatcagaaaattctgg

SEQ ID NO: 402614 - DNA, 122 bp, Homo sapiens
cccactcggtgggtgatggattatcagaggaggagcggcggagctccggcttggccaccccgaagctccgactcgataacgtgataattcactcaggggcacggggaagaagatttcccaac

SEQ ID NO: 402615 - DNA, 122 bp, Homo sapiens
gagggcgggggtgaaaatgacagttagcgtaggcctgcctgcccgcctaggcctgggggccgtctccggtggggctcggagtggcagcaacggctccatcattcttaggatccctgaaaccc

SEQ ID NO: 402616 - DNA, 122 bp, Homo sapiens
gaacattcattttctttctataatgcccattcccgaggccgagcctttgggcgaggtgtacgcgcccgcccgcgcactcacccatggcccgaggtcctgcttctctgcagtccccagaggag

SEQ ID NO: 402617 - DNA, 122 bp, Homo sapiens
tctcccatccacgtactaaccaggcctgaccgtgcttagcttccaagatcagaggcgatccggcgctttcagggtgctatgaccgtagacagaaacgaactaagactcagtttcctcatcaa

SEQ ID NO: 402618 - DNA, 122 bp, Homo sapiens
agtactattttgaacacatctttcaaagatggaatatctgttgattgtgacagcaaaaagcggggccacagttgcattcattgttcagtgagcttgtccacacagttcaacccaccgacagc

SEQ ID NO: 402619 - DNA, 122 bp, Homo sapiens
cgggcgaggctggctgcgggaaaccgagtgagccctcgcttttcctccggggtccgcgcgcgggaccctatttctggcctgtctcgcgcttcgcctgcgcggtggtctccacgctgggactg

SEQ ID NO: 402620 - DNA, 122 bp, Homo sapiens
aaaaaaagaaaagaaacacaggtatgaaggcaataaagcatgatgtatgtagtctggccacgccaccatccctgctgctctggacagaaatcagaagcagcagcagatagaagcagaaaatc

SEQ ID NO: 402621 - DNA, 122 bp, Homo sapiens
cccattcctgatgggagagatctcagtgatgagggtgtgaaaattatatcagctcattatcgtcactcacacccaagttctgtgtctgcctggcctgatgaatggattgcatgacaaacaaa

SEQ ID NO: 402622 - DNA, 122 bp, Homo sapiens
aaatatagttgggatattgttactgtggcagttgggagggtctttagccttcacacagtgcgtggatgcttcgtgtgtaaatgcttgagccacaaacttgtgagaataagtgacgctggcaa

SEQ ID NO: 402623 - DNA, 122 bp, Homo sapiens
ttacattaggaaatatatttcacctttagtttaatatttaactcctcatttatactaatacggatgacaataccgggcttgaggtcaagtggtataatgaaaaaaaaatgtgtaagtcacct

SEQ ID NO: 402624 - DNA, 122 bp, Homo sapiens
ctctgcccagccccactccgggcctcaggcccccggacgccaagccgccgccgcttcagacgcagaccctaccgccaactctgcagcagtccgccccactcggcagcaagcggcgccttaca

SEQ ID NO: 402625 - DNA, 122 bp, Homo sapiens
ggggcggggcctcgggcgctgttcaactgcagggcgtattcccggagggcagttggggagcgcagatcccgaagcagcgctgggagcgtaagtgcgggcagagcactgcgccgtttgggaac

SEQ ID NO: 402626 - DNA, 122 bp, Homo sapiens
ctgacaaaaatgcattctaacacctgcatctaacaccagctttattgaataatttcatcacgtttcaaaatctgtgtctcctagaccagttgagctcacaacaaaaagcaattgtagagagt

SEQ ID NO: 402627 - DNA, 122 bp, Homo sapiens
cagtggataactgggtagaagctgtgcgccccagtctttctgaaacctgtgatcacacttcgggcactgtcccctctacagtcaatctgtgttttcagaagtggccccaggttcactcgtct

SEQ ID NO: 402628 - DNA, 122 bp, Homo sapiens
agcagcgccgtgagcagatccgatagggacagcgacaggatgaaggcgttggtgacggtgcggagctgccggtgcttcacaatcacccccatcaccgcgcagttgccaaggctagacagcag

SEQ ID NO: 402629 - DNA, 122 bp, Homo sapiens
agaaggaccccaggagccgagaggctccacgaataaataaaaaccgtaaaaaaccaagcccggagaaaggggaaagcggggtggggcgcatccttataggagagaagaggcgtgtagcgaat

SEQ ID NO: 402630 - DNA, 122 bp, Homo sapiens
cccgagagaatctaaaaaaaacaatggaattagagaagcccacgcgggagagcaggacggcggcttcggcagctcaggatccacccctgcgacagcgtcgacaagctccctgaaatggcggc

SEQ ID NO: 402631 - DNA, 122 bp, Homo sapiens
ctttaaacacgtcactaagttaaaatgagatgatgagggtgggccctaatccaatacaagcggtgtttttgtaagaagagaatattagaacacagacttgtacagagagaagaccatgtcag

SEQ ID NO: 402632 - DNA, 122 bp, Homo sapiens
cgtcagcaggtggcgccggcgggagcctcgcggaaccgactggcagaaggaggacaaatccggtttccgcgcggaaatgcggccatgccggctagtgcctaaccctcctcactgtgctgaga

SEQ ID NO: 402633 - DNA, 122 bp, Homo sapiens
tcccaaagggcgacacaatcctgaggcagctgttcgcaaactcgaggcctcaatctttgacggaagcggttttcagagaaaagaagttcgaggcacaagcctgttgggtggggcgcaactgc

SEQ ID NO: 402634 - DNA, 122 bp, Homo sapiens
cctgcccagcgagctggcattcctgggcctcgagaatggcacggacacagacacggtgcccggggcagggctgtgcgctccgggtgccccagctggaaggcagggtgtacctggtgaattct

SEQ ID NO: 402635 - DNA, 122 bp, Homo sapiens
cggagctgcgggctgcgtggccgggatgagcgccagcacgggcggtggtggggacagcggcggcagcggcggcagtagcagcaggtagggctcggctggggcacccggagcccctggcgtct

SEQ ID NO: 402636 - DNA, 122 bp, Homo sapiens
tggggctggccaaggccgaagccagctccctctgctcgccaggaggtgtggagggagaggcgccggcaggagcccacactgtacagggcactcaccggccagcaggggctccgtgggccggc

SEQ ID NO: 402637 - DNA, 122 bp, Homo sapiens
cccctcccctcacctgccaatagaaaccggcccactgtacagacgcgcaagtttataacccgggaagagctgctctcagagcggagggagaccatataaccctgggactctgccgtacctcc

SEQ ID NO: 402638 - DNA, 122 bp, Homo sapiens
ataatttctctctgcctcctataacatatttcccccctctgaaatggaatccctaactgccgttagggggaattgggtgatgacttcttctggctacttcctgctggagaggggcattgtgt

SEQ ID NO: 402639 - DNA, 122 bp, Homo sapiens
ttacagctcttaaggcagcgcgtctggagttttttgttcctcccggtgggctcgcggtctcgctgggttcaggagtgaagctgcagatcttcgcggtgagtgttacagctcataaaagcacc

SEQ ID NO: 402640 - DNA, 122 bp, Homo sapiens
gcagagttcctgggacaccatctgcagccccgccacgcccctcaaagtcaagggcacaggcggctggggcttccccgcccgcccgacgacttcctgctgccccagcagccgccacagtcacc

SEQ ID NO: 402641 - DNA, 122 bp, Homo sapiens
tgcatacacacacatccatacactctgacaatctccacgctagtgtgaacgcctctgtcccgaggcgcagcaataataaggcagctgttgaatgtgaagggtccctttggaaaattaaccta

SEQ ID NO: 402642 - DNA, 122 bp, Homo sapiens
acagtgaagagctgcagagacaacatgcctcttcagctacactgggcatatggtcaacaacgcaccagtactcagaatcccacacctgctgcttcctttccgcatgagactcctaaatctgg

SEQ ID NO: 402643 - DNA, 122 bp, Homo sapiens
caatcctaaagcaacagtggcgagggctgggccaatcgaaggtcaaggctgggagggtcccgccctctgcaggccagacccccttaggggagcgcgagcgccccacctcgctggggaggccc

SEQ ID NO: 402644 - DNA, 122 bp, Homo sapiens
gaacacaatttggcttctccccttcctgcactgcaccagatggggtgagcgctgaccttgcgtgggaagctttcaggaagagcttcctgtgtgttggcagagcagctgcagtgagcctggga

SEQ ID NO: 402645 - DNA, 122 bp, Homo sapiens
aaataaacttctcatatatttatcacaggaggtcgttttcaacctggattaaggtgctggcggaagttaagctcccagtttcccataggaattggaaggtagtagctctgtctccgttaatt

SEQ ID NO: 402646 - DNA, 122 bp, Homo sapiens
agattcacaacaaatctagttataagtatgttcccaaatattgcacgggacatgctaatacggaaaaattactcgctagtctgaaattcaaatttaattgagcgacctgtgtgtctgcgtgt

SEQ ID NO: 402647 - DNA, 122 bp, Homo sapiens
aagactgctgcactgcttggtgtgtgcctgccatctagtggcaggacacattaatgctaccgtgaaagccctagtgtgcctgaaaggcaggtttgccagggacagtttgctccactttacat

SEQ ID NO: 402648 - DNA, 122 bp, Homo sapiens
ccctggcacctccaagcccatcccattgacgaagtaaccgcccgctggaggccgaaaaagcgttcctcgagatgatctttttcaatcatcgaggacaattctctcgcttataactctgcctg

SEQ ID NO: 402649 - DNA, 122 bp, Homo sapiens
cggctcgggggcaggcgtaccgtggccagggaccaggagcggatgagctgcacgtcgcggcgaaggctctgccaggccagaaggctcttcatgtccacgtgcaactggtgccacagcgtgac

SEQ ID NO: 402650 - DNA, 122 bp, Homo sapiens
ttagcacccgggccagcggctgcggagggtgtactgggtcccccagaagtgccagcccaccggcgctgctcttgatttctcaccgggccttagctaccttcccgcggggcagggctcgggac

SEQ ID NO: 402651 - DNA, 122 bp, Homo sapiens
gccggcaggggcgcgctgggcctcacgggcggctgttgggctgcccctgccggcgggctgcgcgcgccatgccctggtggagtaaactctgcagtgagtagcacgtgcacccaagcggcagt

SEQ ID NO: 402652 - DNA, 122 bp, Homo sapiens
ctctgtgctcctacagctcctggtgcccacctacccctctcttagcataaaggtcactaacgtcaccattcctggccctgaagttccatgaggacacagacagggttgggtttgtctctatg

SEQ ID NO: 402653 - DNA, 122 bp, Homo sapiens
ggcggagtttcgcgagggccgaagcggggcagtgtgacggcagcggtcctgggaggcgcccgcgcgcgtcggagcagctccccgtcctccgcagccgtcaccgccggccgtcgccgcgccct

SEQ ID NO: 402654 - DNA, 122 bp, Homo sapiens
aggtgccacacgcggccccagcgcagtcccaagtttcccaagtgtgagcggggattggggcggacctgtggaggcaggaagggcgggcagcagggcagagggagagccagggcgcgcccttg

SEQ ID NO: 402655 - DNA, 122 bp, Homo sapiens
cttgaacctgggaggcggaggttgcagtgatcccagcctcggtgacaaaagcaaaaactccgtcaagaagaaagaagaagactcagtaaaatgggacctttggaatcagatataagacttgg

SEQ ID NO: 402656 - DNA, 122 bp, Homo sapiens
gtcatccctgctccagccgctccagggaagccagcctcggcagccaccgtgaagaggaagcggaagagccggtggaggccagaagagaataaggcagaactcccacctgctgagctggtgca

SEQ ID NO: 402657 - DNA, 122 bp, Homo sapiens
tcccgccaagcgcagcgcaaggcgcactgggagcctcagacacgggaagcctcagcgccacgtctcaggcagtggaaaagccagacagaagggggaaggttaagtaactgcatgtgcagtta

SEQ ID NO: 402658 - DNA, 122 bp, Homo sapiens
tggatggcaagaagaaagggaaggataatcttcagactggaggggaagaacaaactttgacgagagggaaatgagtgaagagttgggatttagagatcaaatgattactcttaacaggctga

SEQ ID NO: 402659 - DNA, 122 bp, Homo sapiens
gaccctgccagcccaggcaacctcccccgcgcacggccaccgtgaccccagcgcgggcgccgccgccggacccccgttacctggggccaaacgcgacttgtcgccaccttgcgtcctgggcc

SEQ ID NO: 402660 - DNA, 122 bp, Homo sapiens
ccggggcgggacttccggcaaggcgcggaagcggcggtagctgcagctggcgaagttgggcgactggcggatgcaggccttgcggcacgtcgtgtgcgccctgtccggcggcgtggacagcg

SEQ ID NO: 402661 - DNA, 122 bp, Homo sapiens
gtggcgtttccaccgtgctgcaggaacaagatgcacatcgtgcaggagccgcagagcacgcgtgcagaggtttcggtggctttgccccgcagctaacgtgtgcgtgtgtgccttgacttata

SEQ ID NO: 402662 - DNA, 122 bp, Homo sapiens
aataaatggctaaccgaatgaataaacaaatatttttcttttggagtccaatggactccacggccaaatatggcttggctgtgtccccacccaaatctcatcttgaattgtagttcctataa

SEQ ID NO: 402663 - DNA, 122 bp, Homo sapiens
ctcaacaggtcttgggtggagcctgaggtcctgcatttctaatgagctcccaggtgatgtcgacgctgctggtccgctggtccgtgaatctcaattctagcaacaaagaatgtacaagatca

SEQ ID NO: 402664 - DNA, 122 bp, Homo sapiens
caaatccctggggctgatagagatggcgggcggaaggccggccaataaggctcccggaaccgggctgggcgggaccccgggggtgccttcctgggttgggtggaccggtccctggttcgccg

SEQ ID NO: 402665 - DNA, 122 bp, Homo sapiens
atcctcctccccaccccacccccgagttaggctccatctttcttctttcccacttggggccgtttggaaccgctagggaaaatgaagcttgccgaaatgtggaacctgcgcgttatgggata

SEQ ID NO: 402666 - DNA, 122 bp, Homo sapiens
catgagacactgtgagcccgggaaagcccttggcactttgcctcctaccccccacgcctacgccaaatgaaaaaccagtcgcagcccaagcacccgaggccgtggggagcccctcgatggga

SEQ ID NO: 402667 - DNA, 122 bp, Homo sapiens
ggaggatgggcagttttcctgcgggggaggcgcttgggcctgtccccgcttgaggaggagcgttcctggcagggcggagtccccggagtgacgcagaggaggtgaaactctccagcccagat

SEQ ID NO: 402668 - DNA, 122 bp, Homo sapiens
cgagccagcaagccagcgagcctgcagctggagtcagcagggaggtcccgcaggcaatgccgcctttggtgaagaggcatctcggtgtgttcttgcccgtgctgatgtttgacccttgagca

SEQ ID NO: 402669 - DNA, 122 bp, Homo sapiens
ggagctccacaagattcaaccgttatatcaacctccccggcccaggtcttaccatcacagcgtcacaaactccaggtcgcctaggcgctgcgcaggaagcgcttgccagccccggacttctg

SEQ ID NO: 402670 - DNA, 122 bp, Homo sapiens
cagccgcagccgccgccaccgcgccacccgggcggccccggctcgggttcgagctcccggcggtcggggctgcggcactgacaagaacaacaacatcaatgactaggaagaagggggcggaa

SEQ ID NO: 402671 - DNA, 122 bp, Homo sapiens
ttgcaccaggcactagatgaataaccacgggcaagtcagtccgacactctgatttctccccgccgagcgggcacagcgacatctcggggattcggacatggagatgagagcctagatgttgg

SEQ ID NO: 402672 - DNA, 122 bp, Homo sapiens
cgaagccaagggcaccctaagaggcaggaaggagcctccctagagccgtgggagggaccccggccacacggtgccctcaggcttccgccctccacagccatgagggtggactttgcgtttcc

SEQ ID NO: 402673 - DNA, 122 bp, Homo sapiens
ggcctgagcgccgagcctggggctggggccgcggtgctgaggacgcaaatgtggtgagcacgcgatgcgggtgcggtgaccggggctggtcgggccgggaagaaggggcgccggatccaggt

SEQ ID NO: 402674 - DNA, 122 bp, Homo sapiens
ttttgtaacaatttccccgccgccggccaatgaacagcgtggcggcacgtcacgtggtaccgttttatataacactttgctgagacaagacagttattaggcggcgcggggcggccggcatg

SEQ ID NO: 402675 - DNA, 122 bp, Homo sapiens
tccaagtgttaccagaaaggggtcccgatccagaccccaacagagggttcttggatctcgcgccagaaagaattcagggcaagttcataaagtaaaagcaagtttattaggaaagtaacgtg

SEQ ID NO: 402676 - DNA, 122 bp, Homo sapiens
ttgtacatgagttgctcaggaggaatgattaaggaccaagagttgaagcatgtgacatgtcgtgtttacataagtaacagtaatcagccagaaactaggaagatggattggcaaaatgaaaa

SEQ ID NO: 402677 - DNA, 122 bp, Homo sapiens
cgtgccaccatgcgtgtcagtgtgccggatgtagtctctgtgtcacggtggcgctgcgcacgtcaacgggtattggtgtaccggtcaccatctttgtatctgcgctttgtatctggggtgac

SEQ ID NO: 402678 - DNA, 122 bp, Homo sapiens
taggcgcacgacgcgggcaaaggcggggtgcccgtgggtgcccgcggagaaagtggcatccgggcctgggctgggcagggctgccccgccccaactccgggtgaagataggggaggggacac

SEQ ID NO: 402679 - DNA, 122 bp, Homo sapiens
gcgctgtgggggtggctgcagctccccgcgcgctccctcctttgggggggtttctgggctcgtgacttttttttaaataaagaatgagcggatgcccgtgacaagttaatagctctcgccgc

SEQ ID NO: 402680 - DNA, 122 bp, Homo sapiens
gaaagcctggtcggtcctggtgtaactgttgcgggctctgcctttgtgtgaaagcccggtcggtcctggtgtaactgacacgggctgtgggtttgtaagagagccgggtaggtgctggtgta

SEQ ID NO: 402681 - DNA, 122 bp, Homo sapiens
gaggaaaggtctggagagataaacacaggcatggcaaaagggaaatagaaacatcagaaccggagagggaagaaacagggatgtaggctgctctataattcatggcttgattaaagatgcac

SEQ ID NO: 402682 - DNA, 122 bp, Homo sapiens
cagtcacgtggcaaataccccactgagtgcgcatgctgcacagatctgttgctgcgcatgcgcctttctgcccaccttctgtctaggcagagctctgcaaggagaggttgtgtcttcgttct

SEQ ID NO: 402683 - DNA, 122 bp, Homo sapiens
atatcattttacctttgaagaaaaccagaaaacattcaaaagaacttcaacaaatcatcacgtaacaggatcttcagaaaaactaccctgtgactatgaagaaaatatatattgctagccca

SEQ ID NO: 402684 - DNA, 122 bp, Homo sapiens
acagcaaagagctgcagcggcggcggcgtagcctggccctgcccgggctgcagggctgcgcggagctccgccagaagctgtccctgaacttccacagcctgtgtgagcagcagcccatcggt

SEQ ID NO: 402685 - DNA, 122 bp, Homo sapiens
atctgattccggaagcaaattcactttaacagtgaggtgccgtgatctttatgtcattagcgcatatgatatgggtatcatttgttgtgaaagacactaacccatgatgtttttgtttacgt

SEQ ID NO: 402686 - DNA, 122 bp, Homo sapiens
gcagaataacatggtgtttgcctggagcagtcagaggagagcccgggccaccgagcagcccgactccagggtaaaaccatctccgttctgattcgcccatgtgctgagggctacttctactc

SEQ ID NO: 402687 - DNA, 122 bp, Homo sapiens
taacgtaacttccattcaacacattttatcccaaattgaataaactagggaaaaggcagacggtgaatgccttgagaaattgttcagattcaaggacaagcatttgttgcctttactgcata

SEQ ID NO: 402688 - DNA, 122 bp, Homo sapiens
cggcgcgccggcgctgcaattggacctagggagccgggtgcaagagtggcctgttcaggtcgcagagcaagcgggtctggatacactccggtggcgcctccacggaggccctctttcaaccc

SEQ ID NO: 402689 - DNA, 122 bp, Homo sapiens
tacctttccagacggcgaagatgcggggtccgctccttaggtggccctgggcggaggcggcggccgcccagagcagcagcagcagccgcagccgcagcggaagccccaaccgagccggcggg

SEQ ID NO: 402690 - DNA, 122 bp, Homo sapiens
accacttgtacatattttaggaagcttgaactcaacagtgcttcctggatattcacaacccgattgagctaacctgattctattccatcctctcaaaaggcctcactcttttctttctcatt

SEQ ID NO: 402691 - DNA, 122 bp, Homo sapiens
tactgatattcccgcggctaatggtacttcacagagcgaagtgccggagcccgtcgccggcgattgcgcattccgtcgcggagagcattatgggattggtagtccagactgaggcgcagata

SEQ ID NO: 402692 - DNA, 122 bp, Homo sapiens
cacacacgctggtttgggttggagccagcccgtaaacccaaatttgggggcccgggctctcggctgctgcagcactgactaccgttaaggtacaataaaactgacacatgggcagtgagggg

SEQ ID NO: 402693 - DNA, 122 bp, Homo sapiens
ggcctgaaaatcaacaagacggagttcaatttggcagctggaaccaaagccaaacgcaagcgcagcaggggacagggcagttctcagacttggagcggctgtgctgtgccctgtcttggggg

SEQ ID NO: 402694 - DNA, 122 bp, Homo sapiens
taatattcctcaaaaaaagctgtttggaagagaaaaaatgtaagagctggccagtctttacggggaaaaagtagaaccaatgttagttgcgacaaatattagtaatgtgacaggttaataag

SEQ ID NO: 402695 - DNA, 122 bp, Homo sapiens
gggtgaaagaagaaaaaggacaaaacgaggtgccgaaggctctattgggtgctctctgtccgcagggatgtaaagcagaatccaggattctgccgcaaaatgcaggctcccaatcgctgcac

SEQ ID NO: 402696 - DNA, 122 bp, Homo sapiens
tcaagcaaggagatttaaatgacaggttctgagtcctacattgatagaaagaaaagtaaacgcctataggggaggactacgaaatagggaagtgaagagtcaatgtttattggtttcagtga

SEQ ID NO: 402697 - DNA, 122 bp, Homo sapiens
ccatctgtaaatatctccagaaaagatccttcatcctgtgtctgtaatagtaatcactgtcgttcatcttcatatgtttcctatttatgccccaggagtaagaaaataaatataggatgcca

SEQ ID NO: 402698 - DNA, 122 bp, Homo sapiens
aaggccttttcagctaaaagctccttacagccggaaggtgtgaagcggcaagtttccagccgggaagaagcctctcagccgtaggcgtctttgcccggagctgtgaggtgagtccagcagcc

SEQ ID NO: 402699 - DNA, 122 bp, Homo sapiens
tgaaaaccttcctgttgtatactatgctgggtggtgcaatcattgtaccccaatcctcagcgtcatgcaatttgcccatgtaacaaacctgcacatgtactccctcaatctaagctaaaagt

SEQ ID NO: 402700 - DNA, 122 bp, Homo sapiens
tctgaagcacatgcgcaggggagtatgctgcagggtgaggtggagagccagggaagggcccggtagtgcaaggccaagtggctagtttaaagattttatcctttggcctgagagcaattgag

SEQ ID NO: 402701 - DNA, 122 bp, Homo sapiens
actgtagcctcaacctcccggactccagtgatcctcctgcttcagccttccaagtagctgcgactacaggctcacatcaccacacttgggtacattaaatatttttttggagagacaggggt

SEQ ID NO: 402702 - DNA, 122 bp, Homo sapiens
gcgcagctgtcaccataacaaccggagcgagggaatcctggagactgccggggcggggggcgggggcggcggtcgcaggagggacccggcgcgggcgggaccgcggcggtcgggggacacca

SEQ ID NO: 402703 - DNA, 122 bp, Homo sapiens
cgcccgaccttgtgcgctcctccccgcataaaggtctccaccgctcacttccggtcccttcgcagagcctgtgaccacactaccaccgggcccgggggacgacgccctccaccagccgccgc

SEQ ID NO: 402704 - DNA, 122 bp, Homo sapiens
catgctggaagaagcaagcagccccagggtggaatcttaaaaattaatgaagagcatcggcggggtgccattcaggttggtttgtccctttgttttattttgattttgtctcccagttttta

SEQ ID NO: 402705 - DNA, 122 bp, Homo sapiens
ccgctacgctccctgcggtgagtgcgccctgagcgcgtcccggccagaaagagctgggtgcgtgcactctgcttgctagacacgctgtggacccaacgtcctctatgtgggctggagggggg

SEQ ID NO: 402706 - DNA, 122 bp, Homo sapiens
cttacctcccacgccccctactgccagcacgggtcggccccgccctgtcccgcccccgcacgtgacgccactggagagtacagcgtgcgcttgcgcagacacgccccctttcctacgcccca

SEQ ID NO: 402707 - DNA, 122 bp, Homo sapiens
ctgtaaaataatgagtggtctacaggtctgggctcaggacctgcagatccccaccactcccgcatgaggaagcactcattagtgagcaaactagaaggtggtcccaagaggcaaaatggcag

SEQ ID NO: 402708 - DNA, 122 bp, Homo sapiens
ccctgtctgtctgtgggaaccggaccagaagaatgtggggaggagtcaggagcacagaagcggcaggcccgctcctggccagggagagctgccattcttctgctgcaaatattctgacctca

SEQ ID NO: 402709 - DNA, 122 bp, Homo sapiens
gggagagggaagggggcggagctagccggagccgcgagtccattttggggctgtgcttggcgcgtaccgtgcggtccctgtagttggaggacgggcggtcgcgcggcctttcccactagccg

SEQ ID NO: 402710 - DNA, 122 bp, Homo sapiens
gcctgcgggtcacgaccagggattatcaaattgacagagctcagctggcctctcactccacgtccgggcacattgcattttgttaattatcgtcttttgcttttgacgtaaagggtcggggt

SEQ ID NO: 402711 - DNA, 122 bp, Homo sapiens
aggctccagaagtaacttcgtgcccgggagaggctggtccaactcttctgagatcagccccgacgctctctaggccccggcagacccacccaccctgcgcccagttcgcgccaggcgggtcc

SEQ ID NO: 402712 - DNA, 122 bp, Homo sapiens
atgattccccttgtactgggcggtaaagccccagattaacgtggtctcttgtgaaacagacggagggttttcattcaccacaagggcagcagcagccaacagggcgagtttgggcggcacca

SEQ ID NO: 402713 - DNA, 122 bp, Homo sapiens
gctggaagcctgctttccccctaaagtccctcctttttagtctggccagtcttttttcttcggaccaagaaaaagaacctctggcagttgttttcgacaccggatacaagagggtgcgggag

SEQ ID NO: 402714 - DNA, 122 bp, Homo sapiens
ccagctgactcgattctccccagacttcatcctacctacccaaaagcaatcccactctatcgccagtttcagcctcacaccgtatcttttgctctgaagatgagactgccaaactggtgaag

SEQ ID NO: 402715 - DNA, 122 bp, Homo sapiens
ttcccaacccctttggcttcggccagcggactgtgaaaatatcacactacgtgaggcaggcgccgcctccccataaaaaacccagaagggtgactggcaggagggaggggagaggaggagga

SEQ ID NO: 402716 - DNA, 122 bp, Homo sapiens
taacaaattgcacttttactatcaaagctgagagtggcccagcagtggccctggccctgccggcacgcttccgatgcgtcgccctggcctgaagatcgccacagtcgggttcgcgccccgtg

SEQ ID NO: 402717 - DNA, 122 bp, Homo sapiens
accgcctgagcgccgagacgctgcagcaggtcaacaggctcctggcctgctacaagggcacgcacaacttccacaatttcacctcgcagaaggggccgcaggatcccagtgcctgccgctac

SEQ ID NO: 402718 - DNA, 122 bp, Homo sapiens
agatcggaactgagtactaaacagcctccacagttctccctggtgccgtctccggcttggcgccgcatcctcctctgggctcgcgatggccgcgtcccctcccgctgcggacgggtcctttg

SEQ ID NO: 402719 - DNA, 122 bp, Homo sapiens
aagaaaaggcctgtctttaattttttcctgtctttctctggggatttggtggtggggggccgggggatagaggcctgatacccgccccccgccatccccagcaacccttgccctgttgtttt

SEQ ID NO: 402720 - DNA, 122 bp, Homo sapiens
gtgtagtcattattctaacatttgtgataatcatttccctgcttttctttgtcgctttgtcgcaagcatgcatccctaaacaatatattgtttagtctcactctttcttttgaactttatgt

SEQ ID NO: 402721 - DNA, 122 bp, Homo sapiens
ccagagcccagagagtcctcggggtcagagtggtcacgtcaccgtcattcttttcctgcccgactagtcgctctgggctccccggggccgggggccgggggccgagccgccgccccgattcc

SEQ ID NO: 402722 - DNA, 122 bp, Homo sapiens
gggaccccggggagaagaggaaccccttgcggagtggcaccccagcggcccgggccccgacgcccagagacgattctcagggagggcttctggttttgctttggggaatgtttttcccagtt

SEQ ID NO: 402723 - DNA, 122 bp, Homo sapiens
gggcggaccgcggggtgggccccgggcacacaggaggatcagcagcagccggtcggtaggcggagcgctgccagaggcttgggcctcacaacaaccctcacaggaccaaaacaaacggcgag

SEQ ID NO: 402724 - DNA, 122 bp, Homo sapiens
gtgagctagctattattagcatcatttaaagacaaagcaaaaccagtgaggctgaaagaacggctgccctggtgcacacagatggcacatggcagagcccaagccctctccatgagatctgc

SEQ ID NO: 402725 - DNA, 122 bp, Homo sapiens
catgggcctgtggagccttggagtttagctctaagcgcatcaaggaaactgcgccactttcgtacccatggcttttcttcttagtggacctttcctcctgtcatccagaccctgaggtgggt

SEQ ID NO: 402726 - DNA, 122 bp, Homo sapiens
ttggtcatgcaagtagtcctggatcagaataacctcaaaatcacaggaagtgactgaaaacgtccatgttgcgtaagggaagtgaggtcggccatctttgagaagggcgtgactggttgaaa

SEQ ID NO: 402727 - DNA, 122 bp, Homo sapiens
ccacctgttaatcgtgtcccggctcagtgcagcgatgactgtgttcatcttccccttgtccggaaggatgaagaagacagtcccattgcccacgtagttcatctgcaccagctggcagggga

SEQ ID NO: 402728 - DNA, 122 bp, Homo sapiens
gctcaagggcatttaactagttggaagccaaagcgaaagaccggagcgggggaccgacagcgcgggggtgctcggggccggccgggacactccacagcccctctgggctcaggccgcgggcg

SEQ ID NO: 402729 - DNA, 122 bp, Homo sapiens
gcgggtccacgctgctcgcgcttgcgtccgcgggtagcgcgctgtgcccgggtcagggggcgagctgcgagaagtaggaggggtcaagacccccagaaatccctccatgggcacacacacaa

SEQ ID NO: 402730 - DNA, 122 bp, Homo sapiens
ggtgcggtcccctgtgacggcctcagacctgcggggaacccaggactttgccgcctaccacggtctcagccttattctcgagcctctgggcgcctgcaaccggctgtctgtctgtgtgcctg

SEQ ID NO: 402731 - DNA, 122 bp, Homo sapiens
tctggccccattagccagcaaccagggaaatgtagctgcaggaaaatcacctcgtttcctcgggatgttttttcttaggctggtttcctttacaagctgcaattatgttccatcccacgcaa

SEQ ID NO: 402732 - DNA, 122 bp, Homo sapiens
tgtcgctccgtggccttaatatagggctccggggcgcggggccagcgaggctctaccaggcgcgccggggccgtgtgcggctccactgagtgcccgatcctgggctgggggcaccgtccccc

SEQ ID NO: 402733 - DNA, 122 bp, Homo sapiens
gggagttcgtgcaccgcggctacctggacctcatgggggccagtcagcactcgctgcgggcgctcagctggcgccgcctctacctcagccgggccaagctcaaagcttccagccgcacgtct

SEQ ID NO: 402734 - DNA, 122 bp, Homo sapiens
gtatgttgcaagaataaacacaataggggaaaattccaggcaaacgtggccattgccttgcgcgacaatagaggaaaattccaggcaagtgtggccattgccttgcatgacaatagaggaaa

SEQ ID NO: 402735 - DNA, 122 bp, Homo sapiens
gtgccgtccgggtcgcgagaccctccggggtcagccctgcctgtgccttccctgcctgtccgggtcgcgggaccctcgagtgtcagccctgcctgtgccttcactgcctgtccgggtcgggg

SEQ ID NO: 402736 - DNA, 122 bp, Homo sapiens
tgggtggatggtgcgtagaattccgggtgggtgctgtgtagaggccccgggtggatactgcgtagagttccgggtagatgctgcgtagagttacaggcagtgcctgggcccctctggagttc

SEQ ID NO: 402737 - DNA, 122 bp, Homo sapiens
tgaaacaggaggtaagatgcagagggtggtggtgaaggcaatgggaggttgccttgaaagcggagctcagtgtagtctccatttgagttaaagactggaaatgagcaaggaaacagtctaag

SEQ ID NO: 402738 - DNA, 122 bp, Homo sapiens
ctccaaggtctgcgccggagccgccttccagctcttgtatcactatgtgcctcccgaaggcgacactatttgcataagccccgccccatcccgggcaggttgcacggctattggctcctctg

SEQ ID NO: 402739 - DNA, 122 bp, Homo sapiens
tcaggccaagatgatttcaccaggaggatccaggcttcaggctacacggagagcaggagccggggtgacaggtgctgacaaggcttcagccctctctgtctttgacgtcagctcagcgtcac

SEQ ID NO: 402740 - DNA, 122 bp, Homo sapiens
ggtgatgatgggtgggccgccactgccacagcggacctctgtgccatccttctcgatgagcgcctgcacaaaggtcagcgactgctcgagggcatgggtgtccctggagcaggtgtccagaa

SEQ ID NO: 402741 - DNA, 122 bp, Homo sapiens
ggagtttagaggttattaaagaaatccccctaaagtcccatcccaaggtcacatagagaacgaatggctaagtagcgacaagaacccaagtcacagtctgttgatctcactaccatgctatc

SEQ ID NO: 402742 - DNA, 122 bp, Homo sapiens
gcttaattttgacatatcggtcagactggtgccggataaacttcttggttctctttttgacgatcttgggcttcccaagggttctgaggacggtttataaaagtgcactgaggggaggctga

SEQ ID NO: 402743 - DNA, 122 bp, Homo sapiens
tataaagttagctttagttaactaaagttagcttttccagaatattttcttgaacttttacgttggagtcaggttttagtttaagccactgtgtattatttcaaagtgtaactacagtggta

SEQ ID NO: 402744 - DNA, 122 bp, Homo sapiens
cccagatgtcaaccttggttaacagatcaaaccattcacaaatgtcaaatcccaaagaaacgcaatcagaatcttccagaacaggactctgaagtctgtattttttaaaactccccaggtaa

SEQ ID NO: 402745 - DNA, 122 bp, Homo sapiens
gccgggcgctccttccctcccaattcatccaggaccttgccctcgcggagccagtctccgcgctggcaccgccccactgtagctttccagctgagctttttagcctctggtccccgcgcagc

SEQ ID NO: 402746 - DNA, 122 bp, Homo sapiens
cgcacgtacgcacgcacttgccacaaggagacgctgttcagtttaccggatcctgtcccgcgccagccaaccaggacaaggccggggagctcgagacaggcagcctagaccaagaaccggaa

SEQ ID NO: 402747 - DNA, 122 bp, Homo sapiens
agaggtttcatcacttgtcccaggccacacaactcttctttggaccaaggtctgtattttcgagatgtacatgcttctaccacatcactcacttctgcagagtaccttatagtggttcatca

SEQ ID NO: 402748 - DNA, 122 bp, Homo sapiens
atagctgctcgcgcagtgggggcctccggaactgaccaatggggagaggccgtgcgggggcgtgcccagggggcgtggctccaggcttccctcgccctctccttgagctggcccagtgccct

SEQ ID NO: 402749 - DNA, 122 bp, Homo sapiens
tccttcttgccccgggacacccgagtccccatagctctagctgatggttaagaatttgaccgaggctatatacaagaaaacaatgcactgacaaggccctgttacttgttgtataacagatc

SEQ ID NO: 402750 - DNA, 122 bp, Homo sapiens
ctgtgccgtgcaggcaggaaacttgccctggtcctccgcagggaaaggatgtaatccactcgatgcttcagtaagcatgactcaggccaagcctctgaacgtgttacgttatccctggagaa

SEQ ID NO: 402751 - DNA, 122 bp, Homo sapiens
gctcctccccttcctgccggctcgctcccggccccgccggccgcccgcctcggccccgagcggagcccactgctcccctcggctgccccgccccgccgccgccccgcccctcccgcgcgggc

SEQ ID NO: 402752 - DNA, 122 bp, Homo sapiens
ccggggttctatctgcagatgtgctggcaatgcctgttacaggagtgcgccatctgacatcgtccctatcatgaagtgaatgctcaggagatagagaaatagaactagatccgtattttaca

SEQ ID NO: 402753 - DNA, 122 bp, Homo sapiens
ccccgacgccgaagctccgggctcggaaccccaagatcccgaccccatgtcttcgagtttcgacctcgatccagatgtgattggccccgtacccctgattctcgatcctaacagcgacaccc

SEQ ID NO: 402754 - DNA, 122 bp, Homo sapiens
ggagccccagggcagagcctcgggagcgcccacgatcacatgccctcctgaagtcaactccgggaacagaagccccctgagcccccaaggctcgccatgctcccccccagggacgccggatg

SEQ ID NO: 402755 - DNA, 122 bp, Homo sapiens
cccagccagagcgggcagccctgttgcttcttatttaaattcttgttttctatcctatttcgaggtcctctctgggatttgaggaatgtggagacgtgccagaagtgacaccgagcactgag

SEQ ID NO: 402756 - DNA, 122 bp, Homo sapiens
caacgacatcttcaaatgcctgatgaaacatggggaacacctggttgccagtacctggaacgttatagatgatcactccactggctcccttctcagttgccactttaattttctgtgtgaag

SEQ ID NO: 402757 - DNA, 122 bp, Homo sapiens
gtgttttaaaaaacctaaacagagcaacactgttctgtgcactcaaactctacagctaaccgccaagggccatcttataaatttggacattgaattgctaaaatttgaaaacacagccactc

SEQ ID NO: 402758 - DNA, 122 bp, Homo sapiens
actcacctgatcctcccgaaggtgggcgccgcaacaccaaaccggggacgccgcgggcggcggcgacacagatactggctcctccggcgactccgagcctcacagccccacttccggccaac

SEQ ID NO: 402759 - DNA, 122 bp, Homo sapiens
ggtttgttacatgtggcctaaaaccagggcaagagtaccccaggctaatcataggaatgacgttaaaattgtttattatccttttatgaattttcctgcttaaattaccgaatttcgcaact

SEQ ID NO: 402760 - DNA, 122 bp, Homo sapiens
cccgaccgacgcccccgacgcccggctgcccgctggtcccggtcgcctcagcctggcccccggctgccctggcgcccctcctggcccgcgccctgcatctccctagtgacccccctggtgcc

SEQ ID NO: 402761 - DNA, 122 bp, Homo sapiens
tccttggctgctgctcctggcgatgcatctccgggggaaacttcccaaagtctgagttgccggggttccaaaaggatccctttgggtttaggcctgggagaggtatagagccagcgagagag

SEQ ID NO: 402762 - DNA, 122 bp, Homo sapiens
gagcaaacaggggctaagtccactggctgggatctgagtcgcccgcctacgctgcccggacgctttgcctgggcagtgtacagcttccactgcacttaccgaaaggagtcattgtacctggc

SEQ ID NO: 402763 - DNA, 122 bp, Homo sapiens
ctcaccagcgaccaatggcagcggcgctggcttgtgcgcatggccacttgggctcacatccgggctctcagcgcggggactcctggaggtgagaacccggcccagaggaaataagttggtgg

SEQ ID NO: 402764 - DNA, 122 bp, Homo sapiens
gtgatgtatgtttttgtggttctgtttcaataaaccaggagggactctgacagcagggaacgggctgatgttctataatcaacctgagtgatgtcatctcctctcacagtccaagaagtcca

SEQ ID NO: 402765 - DNA, 122 bp, Homo sapiens
tccctcctccttctcagccccacccttctccacctcctcccactttgcactctcctctagcggccgcctgtcctttttaaggaactccaccctaggtggagtcctcacgatagtcacacctc

SEQ ID NO: 402766 - DNA, 122 bp, Homo sapiens
catgttgggggcgccgctccgggagtcatagctcagccagatgccgaagttcttgacccgcggtggggacttctcaaacacctgcccacagtagacaatctcccctgaagacttcttcatct

SEQ ID NO: 402767 - DNA, 122 bp, Homo sapiens
cagctgccccagggcgggatttcttttcttttttcctttaatctctttatctacaggcgccgaggcttaatgagctccagatgtctcaacataccaggagaggtttaggatcccctgccaaa

SEQ ID NO: 402768 - DNA, 122 bp, Homo sapiens
cactcatatacacgttcactcacattcacttagacacatgctctcagtcactcatatacacgttcactcacattctcacacacacacgctcacagtcactcatatacacgttcactcacatt

SEQ ID NO: 402769 - DNA, 122 bp, Homo sapiens
ccaaggaagggatgcctgaggaggtaacacttgagcatgacttaagtgaccacgaggcaccgggcacaaaacatcccaagcagaagaaacaacaaattctaaagtgggaatgagtctgggtg

SEQ ID NO: 402770 - DNA, 122 bp, Homo sapiens
ataattattgttgaccacctttgataaaacctggcctgttggacttcaatgcctgcctcccgtaggcaccatatcttattcaaatgaacaagaagagggatgtggccacaaggaaagacaaa

SEQ ID NO: 402771 - DNA, 122 bp, Homo sapiens
ggagaggcagtgagtccacctcgctgaagatacagcctgtgaggggggaccttaggtccccgatgaccccccgcgtacggggtagggttggaggaaagagctggggggacccgtgagaacca

SEQ ID NO: 402772 - DNA, 122 bp, Homo sapiens
caggattttgtgtctggtttgttcactgctgtatagttagtgcctacagcaacaataccccgaggcacctaggccagaggaggaatctcagctcaggggccccaggcctcaggatactccgc

SEQ ID NO: 402773 - DNA, 122 bp, Homo sapiens
ccagattaagcacatgtcctatcccaggcggtggagcggagcccccgtggctctggactgcgcggacgttggcgtcaggatgaccacacggcggcctttcccgaatggggacagaacccgct

SEQ ID NO: 402774 - DNA, 122 bp, Homo sapiens
cggccctacctctaccccgccgctacctctaccccgccgcggcgccgacagcgagggccccgcctcccccagctggctccagagccaagccacccacagcaggaaagccacgaagaaaacag

SEQ ID NO: 402775 - DNA, 122 bp, Homo sapiens
ctttttactgccctccaagcggcgaccaagccccgctccaccccaccccgcctcaaaatccgtatattacctgccctgttacagtgacacatgtttatgtttatagtcctggtttgtagtag

SEQ ID NO: 402776 - DNA, 122 bp, Homo sapiens
ggaatcaattaattagcgcctcccagtccccccaccgaccgctgctcggctgagcgggcgcggctgagatagaggtgcttggccagctctctggtcttgttaacaagcctcatcataaagat

SEQ ID NO: 402777 - DNA, 122 bp, Homo sapiens
cgatctgtcatccagcagaccgctgtcactcatgctgaattctgatgtgtccacaaataacggaagattgggcttttcccagctccatcattcgctaagcaatcttggggacaagccgcttc

SEQ ID NO: 402778 - DNA, 122 bp, Homo sapiens
attcacaaattatttcaaagcttatacacaaaaaaagtccaccccgacgaagagattaaacgtcctgcccggtgcctgcagtggaagcaggcggtggcgcggttgggggaactttctccctc

SEQ ID NO: 402779 - DNA, 122 bp, Homo sapiens
ggaggagacccaggtgcgccccaccggctagctgcgcctgcgggtgcccaaattggtgtccgggccatcctcaccgcagtgactcctccgcagcgccaacgcactccattttccttccaccc

SEQ ID NO: 402780 - DNA, 122 bp, Homo sapiens
cctgcacagtatttactgggaaaggattgcctgttcctgaggcactgcctccatgatagacgctccactgatgctgcagcccatgataggctaaagagattttgtgggtactaagttctatt

SEQ ID NO: 402781 - DNA, 122 bp, Homo sapiens
acaataaagcaacgaattggcagcgtttttctctggggttctgtctttaaaagggtacttcgagccattttaaacaggctttgagggttttgttgtttttgttttgtgttttgttttgtttt

SEQ ID NO: 402782 - DNA, 122 bp, Homo sapiens
tctctctccctgtggtttttgttcctgccctttctccttagctaccaggccttgttcaaccggggacaaaacaaacaggggctgtctgtggagaattggcctcttcaacaacacaatgggga

SEQ ID NO: 402783 - DNA, 122 bp, Homo sapiens
gaaggatttccccatcttggaactggaactagggaaagcaggggctagatctgttagcaacgtaaacaaactcagccgcctaaccggaactgcgtttccagcagcaagggggaacttccgag

SEQ ID NO: 402784 - DNA, 122 bp, Homo sapiens
ataaatgtccaggtagctacagaatctggccaccactgtcatcagggtgaggttctgccacgagtgactcatctcaaaccttttgtgccaaagcactcatttgatcattgaataaacccaca

SEQ ID NO: 402785 - DNA, 122 bp, Homo sapiens
tgggtgttttcttgggggcgggggttggccctttctggggttggccctttctggggtgggcgtggggtcgcccagggggggcgtgggctttcctcgggtgggtgtgggttttccctgggtgg

SEQ ID NO: 402786 - DNA, 122 bp, Homo sapiens
agatgcctgagggtggtaattagcacgtttccagagctctctctttttcaggttaagcaacgtcagttctcttaacctgccattaaagtgctcattttatatacatactctgtctattttta

SEQ ID NO: 402787 - DNA, 122 bp, Homo sapiens
gtgtgtccgttctcgtgctgtacaggcaatgagtgtagtctgtgcgaaccgggtgtgtgacgtttgcttttcgggtgtacgggtctccgaatgctgcttctgctgtgctcaccaagggagcg

SEQ ID NO: 402788 - DNA, 122 bp, Homo sapiens
cccaatccagagacttcagcagtcacagtgatcggcttggcggtagggggtctgtctctccggtgcacatcctatgcctaggcggaggcgcccagttacagcgctctcctccctacacccct

SEQ ID NO: 402789 - DNA, 122 bp, Homo sapiens
cgagaggccctccaaaaagacgctggcacggaactcgcggctctcctgcccgttggatcccgaagcaccagtcggggccccagacacgaggccccacttccgcttacgcgccccacttccgc

SEQ ID NO: 402790 - DNA, 122 bp, Homo sapiens
actcccctttctcacctggctgcaggtagtctcgccttggtgccaacttgtttgtctccacgaggatgcaacccaagcttccccggacagacagacagcccttgaccgcccctcccctggct

SEQ ID NO: 402791 - DNA, 122 bp, Homo sapiens
aggcttgagcagagcaggtttaaaaaggcgatgaggaagtcttgctgaatcgcaggcgcccggggcctgcctggcaggaatcagcagccgtgtcagaaatgtgcaagaaagtggttgggatc

SEQ ID NO: 402792 - DNA, 122 bp, Homo sapiens
aacaaggcattaatttttattatcctttcaagtatgagaaaaaagtgaatcagatagagacgtgcattaggacaaaatgcatggggtagacatgactggagttaaagccaacagctatgatg

SEQ ID NO: 402793 - DNA, 122 bp, Homo sapiens
cattagacttcaccaggatggtgctgacattgaaaagtcacggagataggccgggcgccacgagataggtggctcacgcctgtaatcccagcactttgggaggccgaggcgggcggatcaca

SEQ ID NO: 402794 - DNA, 122 bp, Homo sapiens
gcccaggtccttaaacagctttgagaacgactgtgtgagtgcgatccgaggcctctcttccgccacaaccacgcaggtcctcactcgggacaagtccagccctcgcgcctggagatgatgac

SEQ ID NO: 402795 - DNA, 122 bp, Homo sapiens
ggcgtttcctgcagctggcacccttctcccgccacctctatggctgcagggaggcctcggcgtgagcccttggggctcagtcagccgagcctaggctctggactcccccaacggcccaactc

SEQ ID NO: 402796 - DNA, 122 bp, Homo sapiens
tttgcttttgtctccgtaatctaccatccttccctatactcttggcttttaatactctgccgataggatttgcctcaacaaatggctgcatatgttaatcacactctttaactcactaataa

SEQ ID NO: 402797 - DNA, 122 bp, Homo sapiens
gtacaccgttggcgattaataagcgcttgcagctcccttccctggccagcctgaggggagcggcagtggcccgtatggggtgggggtggcggtggagtgcgtcctggcgcagagctggcaca

SEQ ID NO: 402798 - DNA, 122 bp, Homo sapiens
gagctgccctaccagccgcaggaactgcagtagggaccgagccccgtggcccgagaaggtcgcagaggagaccgaagccatgcggccaccgaccccggctgggcggagcaggccgcggcgaa

SEQ ID NO: 402799 - DNA, 122 bp, Homo sapiens
aagtccctggatttggataaatattgatgacattctgtgattcaggctgcatgaatgaaacggcacgtgtaaattctaagaaattttttttaacataaggagtttgaggtccctacaggaaa

SEQ ID NO: 402800 - DNA, 122 bp, Homo sapiens
agtagagagtgtgggcagtgagcgcttgtagccgctagagggagcgctgggcacagtgcacgagagacaataaaggctgattatcccctcaatgtctctgcagcctgagctttgtgacttct

SEQ ID NO: 402801 - DNA, 122 bp, Homo sapiens
ttgggaggcattcatttaagaaaacttgtattttctgtgtgccccaacttgcacggggggcgccaacaagctctgggaacagatgggatttcagaagccgggcctcagcgccaaccgcgggc

SEQ ID NO: 402802 - DNA, 122 bp, Homo sapiens
gtccacaatagtgttcttggctggtcctgccttgaggccttgagatactgtgtcagacttcgtactaacagccgtacaagttaagtgttatggccccattttacagacatgagaactgaggt

SEQ ID NO: 402803 - DNA, 122 bp, Homo sapiens
ttaattttagaaactgttgtgaatgactagcagaaatagcccggaaccaacaggcagagacgtgggttctaggcctggctttggcactgacggtgtctggcctgacggtgtttggcactgac

SEQ ID NO: 402804 - DNA, 122 bp, Homo sapiens
ctttcatagttgaaggttgcttatcactagatagggggtgccgctgggcgcggcggctctcgcctgtgatcctggcactttgagaagccctggcgggaggatcgcttgaccccaggagttcg

SEQ ID NO: 402805 - DNA, 122 bp, Homo sapiens
gcagcttgcagcttctccaactctggcagaagcagttgcgtcaccctgtggcccaagagccggctcagacccctgctcagaggttgggatcccaggcaagtgggcccttgtctgcagggccc

SEQ ID NO: 402806 - DNA, 122 bp, Homo sapiens
cactcccatgcatgcaagccccttcctgaaggcccgaggcggtcaccggagcttaagccccgccgccagcggcgccaacctcccagatccaccccgccccgcagcccgcgctccacggcaag

SEQ ID NO: 402807 - DNA, 122 bp, Homo sapiens
gcgctgcgggcgccccgactgatcctggcgcctcccacctcggggctccagcccgggcctcgccgtgcgccccagccaatctccggccgcctggccccagctccaaggcggggaggcagtgg

SEQ ID NO: 402808 - DNA, 122 bp, Homo sapiens
cccactttggaagtgaggaaacagttgttgcgggaagtcagggaccccgaacggagggaccggctgaagccaaggcagaagaacgtggattgtgaagatttcgtggacatttattagttccc

SEQ ID NO: 402809 - DNA, 122 bp, Homo sapiens
caagccctgagccggacagagcgcaagtcccacggagggcgagccctgagccggacagagcgcaagtcccacggagggcgagccctgagccggacagagcgcaaatcccacggagggcgagc

SEQ ID NO: 402810 - DNA, 122 bp, Homo sapiens
tcctttaaaattctttgtcttcctttatctccctgaaagtgcacatagttttccatagcacgcatctccccattgcaatgcctattcccaaatataattttcttttagaaagtctccctctc

SEQ ID NO: 402811 - DNA, 122 bp, Homo sapiens
gcgccagagcggccaggagttcgcagtcaagatcctcagtcgcaggtgggagggcccaggcgcgggcaggggtgggggtggcagagcgctgtcccgggggcggggccgaagcgcggcgaccg

SEQ ID NO: 402812 - DNA, 122 bp, Homo sapiens
aaggagactgaaagggaacggtgggctaggtcttgagggggtgactcggcggccccctcccgggagttcctgggggctcggcggccgtaggtttcggggtgggggagggtgacgtcgctgcc

SEQ ID NO: 402813 - DNA, 122 bp, Homo sapiens
cctccgggaccgccctttcccccgccccgctgccagtcacccccgcctgctctgcccctccgcgaaggatcccagagagcccggcgccaaccttagttgtttgtgaccaggggagcggctgg

SEQ ID NO: 402814 - DNA, 122 bp, Homo sapiens
aacccatccctctctgcttatacccagcacccctcatcccaggttcctttcttcaacctccgcctgcctctgggaacacagagcaccaagaactgacaaaccgggaccctccagggccacag

SEQ ID NO: 402815 - DNA, 122 bp, Homo sapiens
cgcggccgctgcgccccctaccccctccgcaccgccccttcgctccgcacggcccgcgggcgcgcaaagcaccctgggacttgtagtctcgcccccgcccgcccgccggccgttgccccctc

SEQ ID NO: 402816 - DNA, 122 bp, Homo sapiens
cgtcaccgctgttctccccctgaacacggagcagttattctagaactgttttcccctcctcgcccaggaaagccagatggaaaaaccctcttgccctgaaccagctcattttctggccagtc

SEQ ID NO: 402817 - DNA, 122 bp, Homo sapiens
agggtcaggtggggctctataatcctctatacagaggccttcagaattcccagaagggctcggggtctgctgggggctgaactgggggcacacgatcccatcccgctcccaccagcacagtc

SEQ ID NO: 402818 - DNA, 122 bp, Homo sapiens
agagtatgaggaggacgccggacccgactgctcgagggatgaaggggggtcccccgagggcgcaagccccagcactgcctccgagatggtgagagtgggtggcccagggtcccctcacatcc

SEQ ID NO: 402819 - DNA, 122 bp, Homo sapiens
acaaccgcggttccaaaaaaaaaaaaaagaaaaaaaaaggcaaaccgcaaaaaaaaataacgccgctcgacacctcctgcagccgcacaatagtaatgcaagacgccgtgaaaaggaggaag

SEQ ID NO: 402820 - DNA, 122 bp, Homo sapiens
ggtatgcggcagttgggggcgtggcccgtgcgggagctgcaccggccctggatgatgaggcgctcttgatgtgattcgtttcccagggaagttggaagctttagctatcttgcttcagaaat

SEQ ID NO: 402821 - DNA, 122 bp, Homo sapiens
tgcatattcatgacccgctggggcggggcccaacgcgcagggcggagccggaggggatttcgatccctgaaaagaagcctcagaatttcacaaggcgtggccccaggagtctcactcaccgg

SEQ ID NO: 402822 - DNA, 122 bp, Homo sapiens
caaactgttcgcgggccccgcccaggcctggcttctgtcctgcgcgcgcaaaccaggtggcgtatcgcttggagtgaaggtcctaccgcggcatgtgagtttcgctctgtgttgtgttaagt

SEQ ID NO: 402823 - DNA, 122 bp, Homo sapiens
ggagtatgagagacagaaagaaggagaaagtgagagtaagaaagaaggtattaaacaacacggaagcatctaaatataagtggtagggaaacaccaatgagaactctctgtgatatacagtg

SEQ ID NO: 402824 - DNA, 122 bp, Homo sapiens
cctccaattcttaggtgctgttactgatcgcccactctgtgtgaggctctgtgccaactccgtttcgttccctgctcatctaactctcatggcagccttgctagatagagagtattattatc

SEQ ID NO: 402825 - DNA, 122 bp, Homo sapiens
agcattgtggagacatgtctgtgcctccctccagaccatcaattctcaactcaggctgctcgttagacatacctgaggagctttcgaaagaaaccagtgcctagaccccatgcacagagatt

SEQ ID NO: 402826 - DNA, 122 bp, Homo sapiens
tgggcagtaaggcgctgttctgggagggttctggcagagagggtgtctttgggtcttgggcggtgggcacctgggtgccagtcccaggctgaacgccatggcccctaggtgtgcagaggcag

SEQ ID NO: 402827 - DNA, 122 bp, Homo sapiens
aacccccaccccagtccaatgcctcagcctccgcacctggttgcttccccccaggctgcccgaagcctgtggatggggctggactgcagggctgacaccacggcataaactgaagagaagtt

SEQ ID NO: 402828 - DNA, 122 bp, Homo sapiens
ccaagtcccaatttcttctgcttttacagttcagcctagttagttgtcctccacgccccccgccccacgcgcgtttgcgttttcttaataaacccacagcaagacctagggcgggggtgaac

SEQ ID NO: 402829 - DNA, 122 bp, Homo sapiens
tttgtgttaggaaattcttgatttgattttagactgaatttgagtgtcagaaagcaatgacgagatattgtaggttaaagctgataaaccaggtagtacataaaaaagaaaataatcttgaa

SEQ ID NO: 402830 - DNA, 122 bp, Homo sapiens
gctgcggatcacagaaggtgggtgtggggcctgactgcggctgcccggggcaggccgggacgggtcatggaccggctgggctcattcgccccctgtgcccacagccaacctgaccgggcacg

SEQ ID NO: 402831 - DNA, 122 bp, Homo sapiens
cactataatttcccaatcgaggttcagggagaaatccacaaaactaataaaacttcttcacggactgctaaatgtgaactcactggtcaaggctgcaagatttgctctttgggtcaaggcag

SEQ ID NO: 402832 - DNA, 122 bp, Homo sapiens
agtgggcccggagggtgcagagaagtctgcagctctagacgccacagcagagcctctgcccgccccccgctctccagaattatgttcatgagggcagatagacaagattagcctcagacaca

SEQ ID NO: 402833 - DNA, 122 bp, Homo sapiens
accattccgggcctggcagaggctcccagcccgagggtgagcctaaggatccctccccgccgtgcctcaggcgccccgcccactcctgctaaatggctggggccaagccctgaatctcctcc

SEQ ID NO: 402834 - DNA, 122 bp, Homo sapiens
gacaaacttactaccaagcatggctgcccttttggttgtgtttgcctcattgtcctatgtcgttaaaagtgttgccattgttaaaactgttgtttctggtgtccacctccacttccagctgg

SEQ ID NO: 402835 - DNA, 122 bp, Homo sapiens
ctaggaagaagtgatccttgagacaaaataactctaattagatatcctctttgccagattcgcaggattgccacaccactgagggctggggactgtgttacactggaaggaatgtccactgg

SEQ ID NO: 402836 - DNA, 122 bp, Homo sapiens
ggcccatggggacggacaggcagcactggctccagctgcctctgcggcaatgtggacaaacgttggggtctttgtccctttggggttggtctctttttttctctgtgtctctcctttgtcct

SEQ ID NO: 402837 - DNA, 122 bp, Homo sapiens
gctcacctgcaatggcctcggccggccgggatggcaacagatggtgcgtgccggggaccgcgttagcagcagcactcttgagaaaccaggaaaagaggaaacatgcgcgcgcagcgggcgcc

SEQ ID NO: 402838 - DNA, 122 bp, Homo sapiens
tgccccgcaggatggtgaaggggctgccgcagaagactctgctgggtcagggctatcaggcgcctctcagcgccaaggtcttctcctcatgggacttctgcatccgggtgcaggaagcagcc

SEQ ID NO: 402839 - DNA, 122 bp, Homo sapiens
cttaacctcattattccacttaaatgaactaaagatcaaagaaatatatgatcaaagaaacgtagttttgaaaatggtttggtcatttgggttattgaagtatttttggatgcttctcccat

SEQ ID NO: 402840 - DNA, 122 bp, Homo sapiens
acgcgccgcagaagcccccagggccccggccctcgcgcgtaggggactggagaccctgcgcgtctcctccgcgccttcctgcccggcgcctgcacctgctccccggctctcgggcccctggc

SEQ ID NO: 402841 - DNA, 122 bp, Homo sapiens
taatgacttgcgtggaaagccgacagcggcggcgacccagtggcagcagcctcagcagagcgcgaggccgcacgcgtgaacgtggacgtgggcggggggatggggctccgcccgggcgtgtt

SEQ ID NO: 402842 - DNA, 122 bp, Homo sapiens
attgttggaatgagaggaaaggaaagaatttagtcatcttattgaatcctatccaaccaacgtagacattattgcttgtgatttggattaagcccagctgtagtgcttctgatgctggcaga

SEQ ID NO: 402843 - DNA, 122 bp, Homo sapiens
ttccgccaggctggaggggccgggctagctatctgacagcccctccccaaagctcaggaccgcgagggcggggcctgtccagagctaggcctgagggcggcttcctctcacctccaggggca

SEQ ID NO: 402844 - DNA, 122 bp, Homo sapiens
gtgccaccgccgcgtggcagggaaacagcttgtgccagccccattccgcccggctccgttcgctacaagaaacacaatgcataacaatcaggcgcgcgcttggagccatgccacgcggcggg

SEQ ID NO: 402845 - DNA, 122 bp, Homo sapiens
tccagggctctttcctgtgctcccacataggataatactctggtcaggaagagaatttcccgcttataaaatgaatggaacatgatgtgctgtggcttttcaagaatctcagccctttgctt

SEQ ID NO: 402846 - DNA, 122 bp, Homo sapiens
ttatctaggaaggatcagaaacctacatatgattatctataaaacacttcaatgatcatacgatcattgaatgcctggggaaaaacataaatgctaaaagctcatgctaactgcatataata

SEQ ID NO: 402847 - DNA, 122 bp, Homo sapiens
aggctcagcacttgaaatagattgtcttagtggcccacagagaatcagccaggattaggacgttaatttcctgatacctgtcctagggccagttacccaccaggcccgtctgcaccccactc

SEQ ID NO: 402848 - DNA, 122 bp, Homo sapiens
gatgggcgcgtggcctgtgcacgcatgcaggcctgcacactcacatgcacgcacacacaccggacaggttaatccccgtatcattggctgccacgggttgcctaagaagcttaacagggcat

SEQ ID NO: 402849 - DNA, 122 bp, Homo sapiens
cacacgtttacctgctgctcctgaacaacaggcctcatgcctctctttccaaaccttccacgcctcagctttgaggaagacttccagaacccgagtgtgacagaggacttggtagatgcaca

SEQ ID NO: 402850 - DNA, 122 bp, Homo sapiens
tccagacaaactgaatcagaaactctgggttgggaagtcttaccccataaaatagtagtacgcaaaacacatggaaaagagtctcacgcgactggactgggacttacttaacaaatgctgat

SEQ ID NO: 402851 - DNA, 122 bp, Homo sapiens
aagaaaatatacctgccttgccagccatctgtttaaaagtcccctctcctgtggaacgcacgagcaacttttcggagacactgaacaactccaagtcgcgcgccgccctcgcaaatcgcaga

SEQ ID NO: 402852 - DNA, 122 bp, Homo sapiens
tgaggtggtcagagccacacccagggctgcattctcatcagagacacctctaagttactgcgaagtcggagacaccagaaaggaagactccaacgtattccgagaggagtggaggcaaatgg

SEQ ID NO: 402853 - DNA, 122 bp, Homo sapiens
tcactgccaactcccacccccgccaaaaaacaaacagataaatggtggcttggggaaacccggacgtggctgccaaggaaacgggcgactccgagggctgggaaagctcagcttggtgcaca

SEQ ID NO: 402854 - DNA, 122 bp, Homo sapiens
tgctttgctgcaagaacccagttagccattactggagaatgtttttctaagattgcttatcggtaattttaatagggctcagaggtttgtgtggtttgcacaaaatgttagttactttttaa

SEQ ID NO: 402855 - DNA, 122 bp, Homo sapiens
ccaactgagcacacatgggaattcctggccttgtgacactttgcattaaaaagaaccccacgattgaagataggagcagaagcactagatacagtatttggtctgagcaactgccctatctt

SEQ ID NO: 402856 - DNA, 122 bp, Homo sapiens
aatggagcagccatgtggcagcaacagtttgcaaatctccacgccttctgtgcagctccccggccgccgctccctgcacgtggccccttctccgcagcgaccgcagcggcgcccctcaaggc

SEQ ID NO: 402857 - DNA, 122 bp, Homo sapiens
taatctggttctgagtactttttacttttcagaaatttcctagacattttagttggccatcggcactcttgttttccaggtttcttttgatttagtgttttaaaaatgtttctaccattcca

SEQ ID NO: 402858 - DNA, 122 bp, Homo sapiens
cctggggcagagcggccaccttgaggtccatcagtcagtctgatcatctctgtagaacctcgaacctctcgcctcgcctcgcctgacgccgtttcctgccctttatctctcccttcagaatt

SEQ ID NO: 402859 - DNA, 122 bp, Homo sapiens
atgaaagagaatagtttccaggctggcagtatgaaactatagtcacactgcaggtattaacggatctgaagaaagaagggtcagcacagagctggtcacagtggaaacctggagtgaggaga

SEQ ID NO: 402860 - DNA, 122 bp, Homo sapiens
gctgtgctactgccagattggcagcagtacgtggcatccaggccagcctccttggttggccgtgagacggtaggtggccctggctgacacccaggggccagtacagccctggggtcatgtga

SEQ ID NO: 402861 - DNA, 122 bp, Homo sapiens
ccatgccatctgagtacagattagtcgggactgggactggcgaagattgccgaaaggcggcggggaggaggaggaggatgtcatcgctacagtgagcaagcagatctcgcaggagaaaatgt

SEQ ID NO: 402862 - DNA, 122 bp, Homo sapiens
aaaattggtttaatgatcaaatgtaagagtaaatgagttccggcacatgtggtccacatccgggtttttagcagaacataggtattatgatgtctgtcacagttcactctaaatctcagctg

SEQ ID NO: 402863 - DNA, 122 bp, Homo sapiens
caattagttcttaccctgtaacttgttcctgctcccaccacagggacacgaaactgcatgcgagtcttacaataaaattccctctctgttcatagctcctcccactgccccctgtccaccac

SEQ ID NO: 402864 - DNA, 122 bp, Homo sapiens
ttacagagcacaagcaggattgtgtgtgaatggacatgcttgtttgtactgtggagatgacgttatggataggtgacatggataattcagcctagtttatatactcagaggaatgagaattt

SEQ ID NO: 402865 - DNA, 122 bp, Homo sapiens
gcgtcgaggcggaagaggggttcctcggggaggcccaatccccggggacgataggggctgcgagagtgggcgctgtcagaagaggggcagctagtccaggccaggcgccccaggatggggta

SEQ ID NO: 402866 - DNA, 122 bp, Homo sapiens
gctgcaacattaaaactgccagggtggagtgaggaaacaggttacgattaaggaacaagacgcttactacagaaatcatgtaaatatgagaagagttggagataaaggggttcacaggaaga

SEQ ID NO: 402867 - DNA, 122 bp, Homo sapiens
tctgataaaagttattttattttctcattttccatcaatctatcctgttcagtgaaatatcggttcgtgcctttagcccattttctaattggcttgttttttcttgttgtcgttgttgactt

SEQ ID NO: 402868 - DNA, 122 bp, Homo sapiens
tatgctgtggaatggaaccaagacttttaagcctgcacctgtgttaaagaagttaccggccgggcatcgtggctcaagcctataatcccagcactttgggaggctgaggcaggcggatcatg

SEQ ID NO: 402869 - DNA, 122 bp, Homo sapiens
tgcacgtacgtggacgcctggatgtagtaggggtcggccaccaggtctgggagacctaaacgtcagcaggcgacgggcgcagcagtgaaacaacccggcgccccccgctccaactccctacc

SEQ ID NO: 402870 - DNA, 122 bp, Homo sapiens
tgtctccaggcattgccaaatatcctcttggggtggaggtgggtgggtaaaataacccgccggttgagagccactgtgttagaaagattgtacacatctttatttcgtgagtcagtcatgag

SEQ ID NO: 402871 - DNA, 122 bp, Homo sapiens
ctgggattacaagtgcacaccaccacatcctgctaatttttgtacttttagtagagatgacgtttcaatatattagccaggctggtcttgaactcctgacctcaagtgatctgtccacctca

SEQ ID NO: 402872 - DNA, 122 bp, Homo sapiens
cttgcaatttttggttaaggtgtccgtcagcttctgcagtttcttgcggttcatgtctggcgctcagagaatcgggccgcggcgggggtctctgggcgcgcggctaccgagaccctcgcggg

SEQ ID NO: 402873 - DNA, 122 bp, Homo sapiens
tctgtgggagatttgttctttcgctttttgggtccacgctgcgtttgtgagctgtaacaccgtgaaggtctgcagcttcactcctgaagtcaggcgagaagactacgaacccacctggagga

SEQ ID NO: 402874 - DNA, 122 bp, Homo sapiens
tggatggtcagcttcatcctctccacactgccctccattggctggcacaacaacggcgagcgctactatgcccgcggctgccagttcatagtctccaagatcggcctcggctttggcgtttg

SEQ ID NO: 402875 - DNA, 122 bp, Homo sapiens
gcgcgcaagcatcatagagcgggcgcgcacagagcggccctcctgcccggggcgtggccccggccaccgcctcttaggtcctccaagcgctatgggcggccatcttgtctccgccttctcgg

SEQ ID NO: 402876 - DNA, 122 bp, Homo sapiens
gccagtaccacaatctgccgccggccgctccgacacaggtataaaggcctctctacgccgcgaacttgcttctagagcgcactccagcctgcgaactgataaaaccttcctcgagctccgcc

SEQ ID NO: 402877 - DNA, 122 bp, Homo sapiens
aattttgccctgctcttaatagggaaaaaggacaaacctggaatgattgtgtgactcagacgagtgagtgttattaatgaatgacattaaaattgtgtttcttaaagaataaaaagcctatt

SEQ ID NO: 402878 - DNA, 122 bp, Homo sapiens
aggacagaggaggggaccccaggactcaccagttccttggcgtacaggactgggtgctcccgccgaatggagcgagagtggggggcacctgggctggaagagagagtccgtgctggtgcccg

SEQ ID NO: 402879 - DNA, 122 bp, Homo sapiens
tgggtggagctgagggaactgagatctttgagacagcgacacctggtgcagagaaaaatccgcaagctcgggggttgggagagcgctgaacaaggccgcagagctgctccgccatctccccc

SEQ ID NO: 402880 - DNA, 122 bp, Homo sapiens
tcaataagtatgaaaaggagggaatgaaatcaatgaatgaacaatgttggtaggcgtctacgtttttctaatgtgtaaactaaggctcaggtctgcctcttgggtgagcagcgactacgtga

SEQ ID NO: 402881 - DNA, 122 bp, Homo sapiens
tctgagcacccaggagaccccggacacgtggaagttgccgacgtgaaaggcatcttggcacgttcctatgttggcctcgcatccccacgggtgtggccgacacaggccctggagccgtcctg

SEQ ID NO: 402882 - DNA, 122 bp, Homo sapiens
ctcctgatctcttgaagcacctttataccttgtctgtaagataaagtctttttctagcaacgtgagtcattgaaactgagacacattagtcagagaatcggtggctgctgaccctctcccat

SEQ ID NO: 402883 - DNA, 122 bp, Homo sapiens
ggtgctttggctactgggagaggaaaatggaaaggaggaaaggaacttatatatataagtcgaaagggctcaagcaagaccatgtggtgtccctccaatctgccaggtagtattcattctga

SEQ ID NO: 402884 - DNA, 122 bp, Homo sapiens
gctagcaggccaaactgactaaaacactaggactagtgcttattcaccatggtaaaaactcgccaggaatttgttgtgacccttggtgagtctggggagggtgtgagtcaagcagttgaata

SEQ ID NO: 402885 - DNA, 122 bp, Homo sapiens
gagctgagcaggcgagcccgagcacggcctctcagggagcgagcccataggctggggagccgtccctggagatgcccctgggctccttgcggggcatggctgagttcctgcctgtccttggc

SEQ ID NO: 402886 - DNA, 122 bp, Homo sapiens
catccgcctggtccttgggacatcggtaggggggacgtcccattggaaaagcagccattccgtttgtgtgtcgagagggcatagtgcaggcacatggactgagtggaggggaggaaggctgt

SEQ ID NO: 402887 - DNA, 122 bp, Homo sapiens
atcctgggtgactgagcaagactctgtcttgaaaacaaaaacaaaccaaaaaacaccatgcgagcaaaacatttatctgtgagtgagactggaaccaaggtcactcagtctatccttgccat

SEQ ID NO: 402888 - DNA, 122 bp, Homo sapiens
agccctgtggagaaaaggagtggcccgtgggcctgtcactcacatcagagttgggaagcccgcctccaagcccggaagacccgcctcctctgtaaggttaaaggaggaagaggcagagattg

SEQ ID NO: 402889 - DNA, 122 bp, Homo sapiens
ccccctccgcaggcgacgaggcctgcagaccggactgggcagccactcgggcgcccgcggcggtgggcatcatcatgcttcccgggcaaacagcacttccagccagagggttcgcggggcct

SEQ ID NO: 402890 - DNA, 122 bp, Homo sapiens
ggtgggcgtccagaggcggtgccaaggtggcccgagtcctgattggtaggcgcaggcgggcgggcacgggcgaagcgcactgggctggccattggctgcgtgggtctcggctgaagtcaggt

SEQ ID NO: 402891 - DNA, 122 bp, Homo sapiens
tgggttgagagtgttggggtcctgggggctagtaccagaggggatcggagcgccaagccgcggctgagcggctaagggcgtcttggggctgcggcagacggccggagggtgagggtggtggg

SEQ ID NO: 402892 - DNA, 122 bp, Homo sapiens
ccacttgtcgccgggctggtcgtgcgcgcggatctgctcccagcagaaggtgggcagcggcgcccccggctgcgcgggtccctcccgcggtcccggctccccgacgccgcccatgctgcacg

SEQ ID NO: 402893 - DNA, 122 bp, Homo sapiens
tttccgcccacctttccgagcgggaaggagagccacaaagcgcgcatgcgcgcggatcaccgcaggctcctgtgccttgggcttgagctttgtggcagttaatggcttttctgcacgtatct

SEQ ID NO: 402894 - DNA, 122 bp, Homo sapiens
cagctcctgcgccgcatctcctggttccagtggcggcactgaactcgcggcaatttgtcccgcctctttcgcttcacggcagccaatcgcttccgccagagaaagaaaggcgccgaaatgaa

SEQ ID NO: 402895 - DNA, 122 bp, Homo sapiens
tacacagcggccaggacaagccagccagagccagtagggctggagccctgacaaaggcaacgacgctcctggagtcagataatgaaagccagagcaggaaggaccctgcgcttcatgtaaga

SEQ ID NO: 402896 - DNA, 122 bp, Homo sapiens
cgcccgcgctgcttttcccaatggacccgcgctgggaccgggaagagcgcgtgtcggaggcgcaccgcgcgttcccgccgccatccacgccgccgtgggagctgctgcaagcgcaggcgcgg

SEQ ID NO: 402897 - DNA, 122 bp, Homo sapiens
ccacttatccatgtatctttgctactcaagtagggcagagccacagagaacaaaagacaacgtcttactttagtgatggctgtgtaggacagagaaccttaaaggaccccaccactctctta

SEQ ID NO: 402898 - DNA, 122 bp, Homo sapiens
gtttcagggcggggaggggggcgctggggcgcagtgacgggaaccaatgagctgccaactcgcgcgtctccggcgtgactgccgagattgacgtggaggacacgtcaaattgattcccgcac

SEQ ID NO: 402899 - DNA, 122 bp, Homo sapiens
cgctaccgcgtgctggtgcaccctatggccagccggaggcagcagcggcggaggcaggcccgggtcacctgcgtgctcatctgggttgtggggggcctcttgagcatccccacattcctgct

SEQ ID NO: 402900 - DNA, 122 bp, Homo sapiens
ggggcaggacagagtgtaccggcgggggggtgggggcgaggttggagccctggtcaggggcgcacaagccgcagaactgaaggtggaggtgtggatggagacttgatttcaaggccgcccac

SEQ ID NO: 402901 - DNA, 122 bp, Homo sapiens
ggtgagccctgccaaatgaaccaggtacttctgcccagcaaggaacctgcctctgcaccccgatgagccacctgctgcaccgtgcatggatgtggcagctcagatgaaaggaggaaagcccc

SEQ ID NO: 402902 - DNA, 122 bp, Homo sapiens
ccaggatattgcagtcctcttcaacatcatcatcattttcctcatgttcttcaacaccttcgtcttccaggctggcctggtcaacctcctattccataagttcaaagggaccatcatcctga

SEQ ID NO: 402903 - DNA, 122 bp, Homo sapiens
tgccgctgctgtccctggcaggtgacagttcaggggcacctcgcgctgtgggtgagttctcgagtgctgcggggagtgtagggaaggccggtggtgcggtatcgaggaccaattctgtgtgt

SEQ ID NO: 402904 - DNA, 122 bp, Homo sapiens
aatttgacattttacaattttttgagatattctttgtgattcagtgtgtatatttttctccgtatgccaatggatacttaaaaatgtggataataaagttaaatttacagttaatagtatta

SEQ ID NO: 402905 - DNA, 122 bp, Homo sapiens
tccttcatgtcccgctgtgggaggggctctggagcgccgggactgtgagatggccaatgacggtctgacccgttgggccgggccaggtcgcggacaacgtcgaccgtttgtttaagaagcgt

SEQ ID NO: 402906 - DNA, 122 bp, Homo sapiens
taagtatctatatttcactcttagtttagaaagatctagtggccaactacaccagtttttcgcccttgccttgcagcagatcagattgtgaaatgtaaatcagaatacctttcacctgcaaa

SEQ ID NO: 402907 - DNA, 122 bp, Homo sapiens
gggccgtggattggggaggtgaggtgctttctcaggccatcctatttataaggtcacgcgcgttgaccatctcacccagtcctggggcctgtcacacggacagatgctccctgaagtgtggc

SEQ ID NO: 402908 - DNA, 122 bp, Homo sapiens
agtggcttctaattctggtccccgcgcccagaaagccgggaacgggcaagcctggaaaggcgttttgaaaggaaacaggatcccccgagtataggatgcgtttctgcctcacaaaagtccct

SEQ ID NO: 402909 - DNA, 122 bp, Homo sapiens
gaaagatcatctgatcaggcccatcagtctttttcctaatgctaaacattggtacaaagacgtgaagtttgatgtctcactaagattgcctagggctgctttattgctcacctacttcaaag

SEQ ID NO: 402910 - DNA, 122 bp, Homo sapiens
tccttctctgtcaaatagaggccttgtgcaaattgtttgaaagcctttgcagcaatgcttcgagtgtggtgttgtttgagtatcagtgtttgccattattcttataacaaggttctctttgg

SEQ ID NO: 402911 - DNA, 122 bp, Homo sapiens
aggaggtggttcttttcctcctcactacagggtgttcgtgcttgtgtgcgtgtgtgcgcgcgtgattgggatgactcctttcgttctcacctccgcatagggaggctgacacctcttatcct

SEQ ID NO: 402912 - DNA, 122 bp, Homo sapiens
ccccacaggagcggccagtgtgaccgccagccggcagacgaggtaagcacggaagggacgcgagaataagaacactgtccgtggcagtccgggcatggaggtcacagagccacacgtcccaa

SEQ ID NO: 402913 - DNA, 122 bp, Homo sapiens
gaccggccaggttcagagcccgcctcggttgctcccaatcagaatctgctttgtgctccacggcctccaagcactttcatgagcgttctgctcctacgtggccaggtcctaccttccctgac

SEQ ID NO: 402914 - DNA, 122 bp, Homo sapiens
gcgctgaggggaactaaaggcacgtagttctcccctcccctcatcaagtccctgtgcccgcgggagaccccaggggacttacacatcctcccaaattcggtccagctatgggaagacgcgcc

SEQ ID NO: 402915 - DNA, 122 bp, Homo sapiens
aagtggacagttgggtggtttctagtatattcatggagttgtgcatccacaatcacaatccgttttagagcatttcatcgccccccaaaagaaaccctgcacctctgagctgacccccacac

SEQ ID NO: 402916 - DNA, 122 bp, Homo sapiens
gcctgtgacagagatactttgtggttctgtagacatttcaaactaaccatcctgagcctccgaacctcctccacttgcagcctccccacctcagaagtgggcaaatccactttttgtgtggt

SEQ ID NO: 402917 - DNA, 122 bp, Homo sapiens
tgggattccagctgactgcctctgaagttgatctcagcctgcatggtgtccagtcaaaaccggatgtggggatgacaaaactgcctcccttccttccctccacggttctctcccgtaatcag

SEQ ID NO: 402918 - DNA, 122 bp, Homo sapiens
tccttccaaaatgctcctggtgaattgctagaacaaataacaacattgttcacaaggccgcggaggcccagtcccactggtgaatggccattgtgtttgtccagctactgatacctgcgctt

SEQ ID NO: 402919 - DNA, 122 bp, Homo sapiens
acaagccgtggtaattagaagggaaacaacgatagtgaagttacctttctccattcattccgcaagcatttttgagtgtttatttctggcgcagagctattttaggggcggggggagagcat

SEQ ID NO: 402920 - DNA, 122 bp, Homo sapiens
gatcatggagcagacagactaacagccttttgataaccctgtttccttgacaactgttctcgccaaaccacttaacccagggaaagaaacattagtctaaattaattcattcattccttcat

SEQ ID NO: 402921 - DNA, 122 bp, Homo sapiens
cctcctcagccggaggaggcgacaacaaagcggcggcggcggcggcggcaacggcagcggcggctcctcaacatggcagcgccgagcgcggccacttccggtaacctccgggacgcaccacc

SEQ ID NO: 402922 - DNA, 122 bp, Homo sapiens
gatccgtctttcgcgtttattttaagcccagtcttccctgggccacctttagcagatcctcgtgcgcccccgccccctggccgtgaaactcagcctctatccagcagcgacgacaagtaaag

SEQ ID NO: 402923 - DNA, 122 bp, Homo sapiens
gccgggcggccagcgtctgatgtcagcctggagctgggccagggagtgcagggcgggcggcgctgggagcgagggaggaagggtgcggggccgggccgggctgggtgggcgcccgcggcagg

SEQ ID NO: 402924 - DNA, 122 bp, Homo sapiens
gatcggagtagtggctatccgctcacaattgagggctttgcatacctgtggtcaggagcccgtgccagctatggggtcagaaggggccgtgtatgcttcgagatgaaggtgagtaggagcaa

SEQ ID NO: 402925 - DNA, 122 bp, Homo sapiens
ccagccatctcctccctcccccacttccctcctgggatgactgcaataaccaatgagacccggctgagtgcctgggaggcagggatgataaatatatgttggggttcacagttggtgcagtt

SEQ ID NO: 402926 - DNA, 122 bp, Homo sapiens
cgtgtgggttgggaggagctgcgcaacgccacctatggccactacgcgcccggtacgcggcgagcccccgaccctgctccccatacaccgtgaccctgaccttctggaccgcctcattctga

SEQ ID NO: 402927 - DNA, 122 bp, Homo sapiens
gtgaaccctcaggaatggaactatattagtattgctgcctggctcagtggttggctgagacgcacatatgggaagcaagggcaaatgcatgatggactcagatgcagaagttgatctctagt

SEQ ID NO: 402928 - DNA, 122 bp, Homo sapiens
ttttttagctattataattaccaggccacaacagcaatattttataatgttaaaggaacgcgggctctagagtcagtctacttgggtttgtatcctagattcactaaataccgttgacattg

SEQ ID NO: 402929 - DNA, 122 bp, Homo sapiens
tttatcaacggggattcgccttcagcccagcgagggaggtttactcagcaaatatgtcggcgagcacccacccaaatgcaatcatttgaccccctgcggacgatagctgccgtgccccttcc

SEQ ID NO: 402930 - DNA, 122 bp, Homo sapiens
tgcgaggctgccggcttcgctctccacctcttccacctcccccccacaatccgcccactgcgggagcgaggcccagacccaaagaacctgcccctggcgcgcagccccgcccagcgcagcca

SEQ ID NO: 402931 - DNA, 122 bp, Homo sapiens
gcagctctgatcgcctacgcaaccagagagagggcagtgatcaagctccagtctttggtccgtatgtggcgtgtccgctggcgatactgccaggtgctcaatgccatctacatcatccaggg

SEQ ID NO: 402932 - DNA, 122 bp, Homo sapiens
ttcggtatgagaacttttaaaatctactctttcagccattttgaaatacacaatataggccgggaacagtggctcacacctttaatcccagcactttgggagaacgaggtgggcggatcacc

SEQ ID NO: 402933 - DNA, 122 bp, Homo sapiens
tgttggggaggggaacacagcatggagagtcagttcatctcctcaaggagttcagagtgacggactgaataatactggagtttctgtggttggtttttattttttccaaatctatttccaca

SEQ ID NO: 402934 - DNA, 122 bp, Homo sapiens
cgtgtgaagggcaatctggactatgaggaaaacgggatgctggagattgacgtgcaggcccgagacctggggcctaaccctatcccagcccactgcaaagtcacggtcaagctcatcgaccg

SEQ ID NO: 402935 - DNA, 122 bp, Homo sapiens
gggcagtagttgcgcactgaagtgaggtggggaatccgaggtacttgaggtctgggggcgcggtgattccagaagcatctaccgaaagatcataccagctcttggagcaaacctgtccgcac

SEQ ID NO: 402936 - DNA, 122 bp, Homo sapiens
gaagatgttaggcaaaatattaagacagccaaagctgcttactgagatgtgcaagtgactcgcagggggacagacatgccacttcagcaccagaaggttttaatttaaacaatatgattcca

SEQ ID NO: 402937 - DNA, 122 bp, Homo sapiens
agctttagttttttaagaaaaactgatgtttgagaaacaggtcatggctgagaacatgaccggtaaagcatctcacctgcccccacgttagcaactgttgccagggaagtagttgtgagagc

SEQ ID NO: 402938 - DNA, 122 bp, Homo sapiens
tccctccccttgaggctggagcgtggacgcggtgggggagggtggggcgggggcagctttcgagaattacgaggacaggaggcagaggccctccccatccgcattattggaggagagagagc

SEQ ID NO: 402939 - DNA, 122 bp, Homo sapiens
attagacaggccaagccttcgcctttaagaagctgactcacgtggatgctgtgttgtgtgcgctcagctgaaagggggaggtgggtccccagactgactacattggccgcctcgagagaagg

SEQ ID NO: 402940 - DNA, 122 bp, Homo sapiens
cacccctctcgcccagagcggccgcgccagcgctggggacagcagaagtgagtacgtgagcggcgcagcaagatcccagctcggaccccggacggcgcgcgcccccgaagccccggatccca

SEQ ID NO: 402941 - DNA, 122 bp, Homo sapiens
gaactgcgtctatttatggagaagcgggactccaggccgcgtttccggttccctgcgccgcgccgtgattggtttagggccacagagtccattttcgtaatcggcgttgattacatttccca

SEQ ID NO: 402942 - DNA, 122 bp, Homo sapiens
attggacagtgtgaggttagagggcgtcactctgagcctcaaaacttaattggatcatagcgacgtccgttggacagggtaatcagaggaactacgtttaggaaaggggccgagttcctgtt

SEQ ID NO: 402943 - DNA, 122 bp, Homo sapiens
ggaataacggcgctgtgggctggggaggacggagttgccttcaggcttctggtctccagccgcggggcactcacagctgccgctatgaaaatgcagacctgtggggcaggaattccgagtcc

SEQ ID NO: 402944 - DNA, 122 bp, Homo sapiens
cccgcctagaccggctttccattggtggaagcgggaacacctccgctctccataggctcacggctgcgcccatcgcggctgctgctagagctccggtcacccacttccgtctgtgtctccgg

SEQ ID NO: 402945 - DNA, 122 bp, Homo sapiens
agggaccttctggacgcacggagcccggccctccagccggcgcccgccctgattggcgcccgaggccggcctcccgccggctcacctgccactcccagccaatcggggccaccagaattggg

SEQ ID NO: 402946 - DNA, 122 bp, Homo sapiens
ccggaagcaccccggcggccgcggtaatgctggtggtctgcatcaccaccggatcaacttcgacaaatagtaagtgtccttggactgcttttattgacacagcttgggaggtaggggcagag

SEQ ID NO: 402947 - DNA, 122 bp, Homo sapiens
atcgggctcagaatagagtgggaccccttcggtagtgaataatcccgcagctcattattgcgaacagcagcccttagagatcgtagctggctggtaaaggcggctttagagcggacgcccag

SEQ ID NO: 402948 - DNA, 122 bp, Homo sapiens
tccagctccttccacaggctggggtccatccccagcccgcaatactgcccatcactgaaacgtcccctccgaggcctgcagcagcctgagtggccctagggcatccgcccggtaaccaccaa

SEQ ID NO: 402949 - DNA, 122 bp, Homo sapiens
attgcgcggccgtgtcgttacctctgcgcggcgacattagcgtccaccactccgacattccggacccaggacctgaccgaatccatctccgcgcccagcgatttctctttcagagttggtcc

SEQ ID NO: 402950 - DNA, 122 bp, Homo sapiens
agagctagtagtaagaggggttagctcacattgctggaaatgcctatgataacagctctacgtagagactgagacactttgcttaaaaggtctggaaattcagcaagttgatctgcagaagg

SEQ ID NO: 402951 - DNA, 122 bp, Homo sapiens
agatccggccaaggatgtctgcagaaacgcctaacatagagactctccctctccaagccgcggctctcgccagacccgagaaggtcctcaagcgagggtgacctcagggccggattggaccc

SEQ ID NO: 402952 - DNA, 122 bp, Homo sapiens
ggaagtagatggagaaggggttcctcttgatggagaagccgaaaaaccagaggaccagcccgttgcccaccaggccacacaggcagaggagcaggaagatgtagttcatgacggccggaggc

SEQ ID NO: 402953 - DNA, 122 bp, Homo sapiens
cgagagtaggccatcggctttccgcgggcacacgcgggtggctgtggttgaactgactctcgggtttccgctcctggctgttcaagccgattaattgcagtggcctctacagttacctagtg

SEQ ID NO: 402954 - DNA, 122 bp, Homo sapiens
tggcctctcccttctttcatacacaaaaagtagcatactcttgtcaggcgcggtggctcacgcctgggcaacaagagtgaaactctgtctcaggaaaaaaaaaaaaagtagcatactctcta

SEQ ID NO: 402955 - DNA, 122 bp, Homo sapiens
ggctccaagatactcctcacctgctccttgaatgacagcgccacagaggtcacagggcaccgctggctgaaggggggcgtggtgctgaaggaggacgcgctgcccggccagaaaacggagtt

SEQ ID NO: 402956 - DNA, 122 bp, Homo sapiens
gctgatttttaagccaagaacactgctgcccattgaaattagctactaaggttcacagagcgaaaatgtagcaaagtctattcactacacccttgtgtccagatgtgttcagtagaccagca

SEQ ID NO: 402957 - DNA, 122 bp, Homo sapiens
atgcaaattatagaaactaaaactggacatggccctacacaggtaagcacatatcagcatcgctgtgagcggtcaggactaacaagccttcaacacacaaaagcaggagtaaggatcaaatt

SEQ ID NO: 402958 - DNA, 122 bp, Homo sapiens
ggacagcgaccctcctcggccgcgtcccctcgtgggtttcccccaaccaataattcgtcccgcctcccagctgagcccgaagccaatcgggtcgtagatctgcacctttctatcccgccctc

SEQ ID NO: 402959 - DNA, 122 bp, Homo sapiens
ggagaaaggtcagagtccggaggagtctgtggcagcacacattcttaccgcatcgaactccgcttgatcatcctcaggtaggtcgctagtttcataaacatctggctcattcctggcctgca

SEQ ID NO: 402960 - DNA, 122 bp, Homo sapiens
tggaatggccgtgaacttgttgtttttccacgtcatttgctctcaaatgtactatcaagccgggcgatgctaacccggtggctgcaggtccctcctcgtaacaagcgattgtgtgttcttta

SEQ ID NO: 402961 - DNA, 122 bp, Homo sapiens
gcgcccctcacccccaccccagacacacacaggcacacgcatccaacgctacttcacggccgggacagacccgggagctctaacccggacgcggcccccacctgcccccccccccccgccca

SEQ ID NO: 402962 - DNA, 122 bp, Homo sapiens
gggttggaggtgtgcgggtggaggggcgcgccctggagttgggggcgggcgaggcgtttgcgggcgcggggggcgggtttggaggtgtgcgggggaggggcgtgccctggagttgggggcgg

SEQ ID NO: 402963 - DNA, 122 bp, Homo sapiens
aaaaattaaaaaaaaaatgaatgctactgccactcggttgcaggataagaagccagccctcgggaaccaccacgacccggcagtgccccgggccccgcacgcccccaagtccagcctgcccc

SEQ ID NO: 402964 - DNA, 122 bp, Homo sapiens
tgagtgagacggatggatcttttagttttcaattagcaaacgcctcactctttaaacaagcggcacagcaaacagatgcactgtgtgattgatgacagggaacatctgcggccaagcagcgg

SEQ ID NO: 402965 - DNA, 122 bp, Homo sapiens
agaaaaaaaaaaacacacactagctgggcccggtggcatgcctctgtagttccagctcctcgggaggctgaggcagagtattgcttgatcccaggaatctgaggcttccatgagccatgatc

SEQ ID NO: 402966 - DNA, 122 bp, Homo sapiens
atggtggccaacctgaacgcggagaaggatgtcaggatagccagtccttgagacccctaccgaccccatcccactctctatcctattcctttcctcctccccgcatgtttcccctccaccca

SEQ ID NO: 402967 - DNA, 122 bp, Homo sapiens
cttttctatttcatccctgactgtctgtgtttcccaactcccacggtgccctctggccctcgaatgtgctgtacttggccgcatctccatgcctgggttcatacccttcttctatctgcaat

SEQ ID NO: 402968 - DNA, 122 bp, Homo sapiens
agcccgaccctcggggctttgccacacgaaagccccaggcctggcgaggctcagggaggccgtttcaaccgtgaaaacttgggtttctgccccaccccagccctggctgtttgagccgtcat

SEQ ID NO: 402969 - DNA, 122 bp, Homo sapiens
cttgttcaatgcactcagggggcagctcagctgtggaggtcactccaccctggcctgcctcgcataaagtgaagcccttggcttctatacagaaggccctggcttgggacactcccttgcct

SEQ ID NO: 402970 - DNA, 122 bp, Homo sapiens
cccgcctggcccgggcgcggtggctcacgcctgtaatcccagcactttgggtggcggaggcgggtggatcacatgaggtcggaagttcgaaccagcctgagaaaccccgtctctactataag

SEQ ID NO: 402971 - DNA, 122 bp, Homo sapiens
atgccgctgcttatccaccatggacctcattgccctgggcgttggaagcacccttggggccggggtttatgtcctcgctggggaggtggccaaggcagactcgggccccagcatcgtggtgt

SEQ ID NO: 402972 - DNA, 122 bp, Homo sapiens
gattctttgcaggaggcattggtgacacctcggctgagagcccatggacgaggccttgtccgttcctagagctctgctctcacttggtccttctctccacttctctctcgcttcttttttac

SEQ ID NO: 402973 - DNA, 122 bp, Homo sapiens
gatgatgtctagatgaaacaaagtttaaaacaaaatgatagcaagctaaatttatctcagcgatactgtcctgcatgtttgctgttttatacataaggaaacacaaagctaaatgctggttt

SEQ ID NO: 402974 - DNA, 122 bp, Homo sapiens
aaaggtgctacacaatttaacagaaggacagcgcaagggataccaggaatgcaaacaccacgagggcagtgagatgaagaacctgttgaagaaacagatgttcatctttaacagtgcaaaca

SEQ ID NO: 402975 - DNA, 122 bp, Homo sapiens
ctgcgagagcagagcacacaaacaccatgtaaaacgcctggataaggtatttcccccgttcggtcggcacagttaggactccctccctgggagagaatcacgaccctgacttagaggaagac

SEQ ID NO: 402976 - DNA, 122 bp, Homo sapiens
cggggcccagcgcaggcgcacgggcgtcaggatgcggcctgttcctcccggcgtgctccgcggctcttggctcacagccgtcccttcgctggtgggaagaagccgagatggcggcagccagc

SEQ ID NO: 402977 - DNA, 122 bp, Homo sapiens
aaggagcactgcaccctcccccagagtaaagacatcgcgaattaattcctgggtggtggacggcgacgtccttgtcctgcgggaagtgcaagggcacccgctcagggttgtgagaaactgcg

SEQ ID NO: 402978 - DNA, 122 bp, Homo sapiens
tccctggggcttcctgctgtcagccccagctgtggggaaggcggaatttgcctgatatcgcggagccgccgcctggcagcgccgagcctggcctgggccgcttcacgccaagattcatgccc

SEQ ID NO: 402979 - DNA, 122 bp, Homo sapiens
agacgcagtgtacgtctgtggtaatggctataaataagccccgacttgccgactaggcaccgctcctcttttgggtaggcagttcttgctaaaatagccctaagatacaatcgagtgaagac

SEQ ID NO: 402980 - DNA, 122 bp, Homo sapiens
cctttgttgggtttttcctggagaacatcaagaaagagtagctggtcaatagcctgtctgcgagcccttgggacagcctttttcaaagcatgttctcaggactataagcctcagagtagggt

SEQ ID NO: 402981 - DNA, 122 bp, Homo sapiens
aatgaaggacacagaggccactgcggggtctggcctctaagaggcttttacggcctcctccgtcactaccgggcgagtgattcagcctgccttttttttttttttttttttttgagatggag

SEQ ID NO: 402982 - DNA, 122 bp, Homo sapiens
aacatactgacactgtttggaaatggcaacaggaagatagcaaaatgaatactaacattacgaaaagatgaacaggtacatgttccaaggcaggtggctgtgaacttcctctgagtgaaggc

SEQ ID NO: 402983 - DNA, 122 bp, Homo sapiens
gcaggtggtaaaactgtacacgccttaacatgcacatgtgtgtgtgcatacgtgcatatacgagtgcaagtaaccaggggtatctgaataagataaatgggttgtatcaatgccaatatcct

SEQ ID NO: 402984 - DNA, 122 bp, Homo sapiens
gacgtggcctgcccacgtgcagtcagcggcatccgcaaccctgccaggggccccgtgacacgcccccgctgcacagagcatgtgaccccagaggccaccctggccacttccagaaagctgtg

SEQ ID NO: 402985 - DNA, 122 bp, Homo sapiens
gaggctcggttccatcagctcttcaggggcgaagagcaggaaccggagctacctgaagagcgcggctttccccggctcttcgggctgtggaggctgcgggctcgcgcttgttccgggacagg

SEQ ID NO: 402986 - DNA, 122 bp, Homo sapiens
aggaggctgagccgcgctccctctagcctccccagaggtgcattcgttaggttcccgccccggccccagccccagccccagcatcagctccggttcctctgcagacgttcagccccttcgga

SEQ ID NO: 402987 - DNA, 122 bp, Homo sapiens
ctcatctctcttccctgtggccacgaccctatgtcagcttccttcattcatttactcattcggcaactttttattaagcccttaccatgtgccaggcactgtgctagccactgaagatttgg

SEQ ID NO: 402988 - DNA, 122 bp, Homo sapiens
tgaacataatgtactttggtccttctccattgtatgcctcgtgtattatgtgtctcataacgtctgtcccgtcctatgctatgtgtgcatttgaatgttggggagggttcagtagatgtcca

SEQ ID NO: 402989 - DNA, 122 bp, Homo sapiens
tggttcccggacactcacagccttagtcggttcttgggatgggaccgggccggaggaggtcgagacttttctaaacgctagccccaaagtccggttggaaagcaagccaaccagagctccgc

SEQ ID NO: 402990 - DNA, 122 bp, Homo sapiens
atgggccccgtcccacaggcggggtggccaggataaggcccacagcccctctggtgtccacgtccttcctgtaaggtgaacctgccctccacacctccacactctaacgtgaacccgccctc

SEQ ID NO: 402991 - DNA, 122 bp, Homo sapiens
tacccttcaatattttattattctaaatggaaataactttgttgttttcacctttcccaacgtctttaatgttacaaggaaaactgtctccttttaacatttgcatatattcaaattaataa

SEQ ID NO: 402992 - DNA, 122 bp, Homo sapiens
aggcaaggagcccggcctgtttgatgtggtcatcattaacgacagcctggaccaggcctacgcagagctgaaggaggcgctctctgaggtgggcccatccttgtgcctacctgggcaaggcc

SEQ ID NO: 402993 - DNA, 122 bp, Homo sapiens
tccacccccagcccggggggaggggggctgggaagccagcagggcctgcctgggccgggccgccagaatgccaccttgttctgggtggaaactggacactaagtgcccagcctgcttcttcc

SEQ ID NO: 402994 - DNA, 122 bp, Homo sapiens
ttgcataaaattcatatatatatctatatagtctttctgctgaagctttgtaaaaatttgcgtatattttatgatagtaaatgataaaatagaccagtatctacatctgttttgtgcatttg

SEQ ID NO: 402995 - DNA, 122 bp, Homo sapiens
gatctggagctggtaatgaccgagatggagatatctcgagcagcagcggaaggcggcttgcgggaacacatgggcaacgtggtagaggcgcttgttgctctaaccaactgatgtgtgctttc

SEQ ID NO: 402996 - DNA, 122 bp, Homo sapiens
ctactcgtgctgctgacttaatcttttccttttttttctgattttcaaaaccagatgaaacgactacaaagtgccatgacagaaggtggtgtggttctacgggaacctcagagaatctatga

SEQ ID NO: 402997 - DNA, 122 bp, Homo sapiens
ctcgcctgcagcactcggccctacctctaccccgccgctacctctaccccgccgcggcgccgacagcgagggccccgcctcccccagctggctccagagccaagccacccacagcaggaaag

SEQ ID NO: 402998 - DNA, 122 bp, Homo sapiens
gcgctggggcagggggctgccagctgggggtccaaggcctgaaaggtgctgctggccctgcgggggcgggcgctgctgcaatgggggtccctggcgctgggggcctggacccggctgtggag

SEQ ID NO: 402999 - DNA, 122 bp, Homo sapiens
gaatggagccatcacattgtctatatcactttagaggtgtttccaaagttctcagcacctcgagtcccttgttagcgtttgtcgagagtcagcgggaaaactcgatacctaacagcgtttcc

SEQ ID NO: 403000 - DNA, 122 bp, Homo sapiens
acaggccgctgcaggttttccatgtggacgtggaggtgaaggacattaacgacaacccgccggtgttcagagaaagggaacaaaaggtacctgtttctgaatctgcgcctctggactctcat

SEQ ID NO: 403001 - DNA, 122 bp, Homo sapiens
ggaggggagaggccactggggccgtgttagtctgccggtggggactcttgcaggtacaggcgcggtcggggctcctcgtggagagccgggggctcctgccggcctctgactggggtgtcgtt

SEQ ID NO: 403002 - DNA, 122 bp, Homo sapiens
tataccctgatagtatttgaaacccagaaagacttggacttctttagagttcatctctttcgctccatcttttctcctcctcttctatgctccccttgtctcttgtggagcttggctcctgg

SEQ ID NO: 403003 - DNA, 122 bp, Homo sapiens
cagaaccccaaagtgaagttacagtggaaatgagtggagggggattgtctttcaacgcagcgtgagtctaatggttgaataaaacttactgatgatcatggggtttggaatagttttctttc

SEQ ID NO: 403004 - DNA, 122 bp, Homo sapiens
gctggaggcctggttgctgctattgctcccaagggctcagagaaggcggctaaggcatcccgcagtgtagccggttccaaaaaggagaaggagaacagctcatctaagagcaagaaggagag

SEQ ID NO: 403005 - DNA, 122 bp, Homo sapiens
acaagctccaccttttgcagaaaaacaaaacagagagtgtttttcttcccatttacgatgcggatgtctctgttcctgagtttaaaacaatcataaagacagaaaagcaaatccctgtagta

SEQ ID NO: 403006 - DNA, 122 bp, Homo sapiens
ctcattgtggctgcaggcaccctgctgtgagcacagccgtgctgggcccttccttgacaccgcccagcaatgtggccgggctcccggtccccctcccctgaggtggtggtgggctcctagac

SEQ ID NO: 403007 - DNA, 122 bp, Homo sapiens
tttgctaataggccggggagcagcagatgcaaagtgagggctcatgtttgcacaggccatcgccatggcaacaggaaagtcaacaggcaggacattccttaagctgtagaaaacccttccgc

SEQ ID NO: 403008 - DNA, 122 bp, Homo sapiens
cacgtttgccgctttttttcccggtgaaacttgagctgtgagcccagaaaccctagggaccggagcccgatggaatgaagcctccgggtccacttctcatggccttccaccctggagaaggc

SEQ ID NO: 403009 - DNA, 122 bp, Homo sapiens
aaaaatttccagcaggagtcatcaggcctgatgttggccaggcccgtggcagtgcccagccggctccccactgcctgtctctagtccccttgcttccccactggcctccccagcagcgtgtg

SEQ ID NO: 403010 - DNA, 122 bp, Homo sapiens
catctgtaaaatggggctaattatagtaatctacctcacagagtgattatgagacacagccgtcttggaaccttggctgctaagttctcaggaaatgttggctgttattatttttcatatat

SEQ ID NO: 403011 - DNA, 122 bp, Homo sapiens
ggcgcgtcagcctccgaaggcggaggcgggcaggaggctgggcaggggcgtgtgcgcgtgcgggtgcgcgccggccctgcgagcgccccctaggcgtgcgtcggcgtcctgggggcgtgtgc

SEQ ID NO: 403012 - DNA, 122 bp, Homo sapiens
tatttttcttcagcgaggcacagagtcgcccagtgcccgtacggctctcacttgccccggcgctgtctctatggagctcaatgtactgcagtggctaacagtacgatttataatagcactct

SEQ ID NO: 403013 - DNA, 122 bp, Homo sapiens
tcggctcaccccgggacccggccctagcccctacccacagcccaggaccatgcggagcaacgctcgcccagccactcgccgcctaggccccgccccgccccgctctccggccactcagcggt

SEQ ID NO: 403014 - DNA, 122 bp, Homo sapiens
gcgtggccaggatgagggaggaagacgctccttcccgtcccgtgtgcttgaggcgtgggccgagtgaacgctgtggtgagacctggtgctcctgcatgtcgccaccaccctgccctcagagc

SEQ ID NO: 403015 - DNA, 122 bp, Homo sapiens
gagactctgcttactcccatctacttaaaagcttctctgcagggatttagagctccatgccggcgtgggggagatagctctgtgatgtctcccttgagcccttccaccaacaccacccctca

SEQ ID NO: 403016 - DNA, 122 bp, Homo sapiens
cactccttcctgatcttggcctcgctgctgcccacgtgtagaatcaagtcactctctgaccgctacgtgttgttctgggcttaacccttgctgagtggtcggttctgagaaggcagaaattg

SEQ ID NO: 403017 - DNA, 122 bp, Homo sapiens
aaatgttcttgagcccttcagagaccattcttcaataataaagaccattcttcaaagcaccgtaagaacgaagggtgggactatgtctgtcttattcactggcatatcattacttcctgata

SEQ ID NO: 403018 - DNA, 122 bp, Homo sapiens
tccttttgcttctttttctcaccttgtccttccgggagcccctgcagctgacgctgatgtcggagtctcgggtgttccttctggtctcgctcccgacttgaggaggcagatttcaacatgga

SEQ ID NO: 403019 - DNA, 122 bp, Homo sapiens
ggaagctggaggagagcacgggttttcagaaaaagactacgattcccagaagctcccgcgcggctcccgcccaggctgtcaatcaaagtaacgtgggtacctctccggcccgcgctctcccg

SEQ ID NO: 403020 - DNA, 122 bp, Homo sapiens
ttgtggaatagttgcttgaattacagctgctgatttaatatatgtgtttggtgcaaaactcggcagagagtaatgatgagttatattatcccagctgcatgagagaatgcggagacgtttca

SEQ ID NO: 403021 - DNA, 122 bp, Homo sapiens
ggctgcttccctgttgctggcggggccaggcgtccaggctgccacccgttgtgctgtggccgagcaccgaggcctcttctgggacggccgtgcggggcctgcgctgtcctcgccttctgagc

SEQ ID NO: 403022 - DNA, 122 bp, Homo sapiens
tggcatggttcctttctgactagtgcttatttttaatgagatgagccccctctggacctgcggtttgtagaaagtattatgggtggatgagccagggccatatccaggctaacaggagttct

SEQ ID NO: 403023 - DNA, 122 bp, Homo sapiens
gcaggcggtggcacagggacttggggcggggtctggtgggcggggcatgaagtctggccccgcccccgcctccgaggccaaagggcgccctgggcggggatcggagcaggggcggggtcttt

SEQ ID NO: 403024 - DNA, 122 bp, Homo sapiens
ggcgagctgcgctgcctgacaggcgggagggctcccattatgcaaacggccctgcgcccgcgttcgccccctcgctagaggattttgcgatttccaggactgcggtcctgcaccgtctgcgg

SEQ ID NO: 403025 - DNA, 122 bp, Homo sapiens
tccagccgcaccgcactgcctttgttctggctatcagatgtaactcctccaactgctaaacgtccttcgtgtacctgtggtacccaaagcagacctgcacaattatttatttcatgacaact

SEQ ID NO: 403026 - DNA, 122 bp, Homo sapiens
gctgagaaagcagtgaagacagaatgagctggggaagaggcagatggtaggaaatggagacggagaaatggcactaatggcccagccacctgagatgggatacctgggagggacatcttttc

SEQ ID NO: 403027 - DNA, 122 bp, Homo sapiens
ctggaagagtaggcacaatttgggcaggccagagtatcgtacctttaaggcaggagcagacgaaataggagagccctaataaaggaagagaactgttagctttgctggtgtgttggtggcct

SEQ ID NO: 403028 - DNA, 122 bp, Homo sapiens
tatatttcttcaatgtggttcttgttcagggttgtctgtctaattactcccttttataaacgccttgcgtctggggaatttttgctggggtaattcccagggcccaaagtttgtgtctgtaa

SEQ ID NO: 403029 - DNA, 122 bp, Homo sapiens
cacagagaacaccattatcttcaccctcaatggcgaggtcctcatgtctgactcaggctccgaaacagccttccgggagattgagattggggacggtgagggctgagaccccttcacatgcc

SEQ ID NO: 403030 - DNA, 122 bp, Homo sapiens
cggtggccccaatggcgcgggtgaatgaggacgctggacttaggggcgcccgcgagagggcgcaggctgggagggcctgggaggagaggcgccgggctccgcgtggggctcgtgaccgaggg

SEQ ID NO: 403031 - DNA, 122 bp, Homo sapiens
gtaagtacaaggctcctagggtgcacggtccgcagccggaaaagaccccaagaggcgcaccggcttaaggagggaaaagccctgaggggctgcctcagccccaggcccagccaaacacgccg

SEQ ID NO: 403032 - DNA, 122 bp, Homo sapiens
aggtgtgccggccccgcacccggatgctgtgctcccagaacacgtacaccctccccggcccgggtagctctgccaccttgaggctcacggccactgagaagaaggtccctcagccctgcagc

SEQ ID NO: 403033 - DNA, 122 bp, Homo sapiens
gcgttgagtgtgagctacctcctttcttgttagaagtgcgtgaacgtcaggcaagcctcacgccgcctgactggggaatgcttgccctcactcggcttttacgggatgatttccatcacagt

SEQ ID NO: 403034 - DNA, 122 bp, Homo sapiens
ggaggtccctttaaaaggctgggcctggtggacggaacttcggtgcgacgctaaagtgtgcgcccgggaggatgagtacgctacacccggaagtgtcttcagggagaggaagccggcggcct

SEQ ID NO: 403035 - DNA, 122 bp, Homo sapiens
aactcctgggctcaattgaatctcctgccttaggctcccatagtgttgggattacagacgcgagccactgcgccgggccggtttttttccccctctcagcccccgcgctccgccccgggaac

SEQ ID NO: 403036 - DNA, 122 bp, Homo sapiens
cggctgtgcgaggaggagagctggcaaggagctgcctgtggcccgggctctgtggctctccgagaacggcgaaccccttttatgcatggttggggctggaaagcccggagtcccgggccagg

SEQ ID NO: 403037 - DNA, 122 bp, Homo sapiens
ccaggctacagagacaccctgaagccacagaaagacaaaggaaccggttgaaacacacaacgtgtccagtgaggactttgcagaattctgtaaccagactacaatggccgctcaaaggaatc

SEQ ID NO: 403038 - DNA, 122 bp, Homo sapiens
ttctgtctctgcttgttctgcagcccgctgaactacatttcccaggaggcgtcggggctgcgccgtacaacttccggctgtaaagatggcggcttcctagtgagtcggcggctgatttagaa

SEQ ID NO: 403039 - DNA, 122 bp, Homo sapiens
ctcatttgctgctgctccgggatctttggcagcagcaaaaccccattcttttaagggctgcgcagagttgtgccgcccatgcccggctggtttgaaggtgccccatgggcgggcgcggacgt

SEQ ID NO: 403040 - DNA, 122 bp, Homo sapiens
tttcatatactttaagtcatgtctatattaggtataacaccaaacgcaatgcctacccatcgctttattcacatggattcaatgtataggactcaatgtgagaaattcaagttttgctttgt

SEQ ID NO: 403041 - DNA, 122 bp, Homo sapiens
tcagccctcctagtctccctagccaatccagtacctgccagaggcgccggcacacagcaccgaacgctgtccgcgccgccatcttgccggtcccgacctctcaggattgcttccggggttac

SEQ ID NO: 403042 - DNA, 122 bp, Homo sapiens
ggcttgccattggctcttcagccagggctggcttttgtttctgtggcccagttgctgagtcggggctttgtctcccaggggcccctcttccctccctgcctataagagcccgacctcggctg

SEQ ID NO: 403043 - DNA, 122 bp, Homo sapiens
aggattaaatgatgatatactgatgcaagagtattctatgcagctgttaaaaataaatgccggagatgtaggtactaacatgacaaggtgttatctcttgtttgacatattatgctgtcatt

SEQ ID NO: 403044 - DNA, 122 bp, Homo sapiens
acgacttataaaagcccaggggcaagcggtccggataacggctagcctgaggagctgctgcgacagtccactacctttttcgagagtgactcccgttgtcccaaggcttcccagagcgaacc

SEQ ID NO: 403045 - DNA, 122 bp, Homo sapiens
ctgaggagtggagagggagatggaacaggaggggactgggtccctctgtgcaggggccatcgaagtccttgcgctgccaccctggggggagacacgtgccctccaagaccctgctcacaggc

SEQ ID NO: 403046 - DNA, 122 bp, Homo sapiens
ttctccccaaaactgtccgaagcaccattgttttgtgacttatagctatcattatcaactcgtactacttgtaaaaataccttactaaagttctgaagaaattctgctctgctatcttctga

SEQ ID NO: 403047 - DNA, 122 bp, Homo sapiens
gtgagtgctggccccctggcttctgcccatacttagcactccaccaacgcttgccacccccgatgtgcagagggcagtctggatgatcttggtgtaccaggacccatatggtcacctgcaag

SEQ ID NO: 403048 - DNA, 122 bp, Homo sapiens
caaagcaaaaatggccaaatgggatcacgtcaagttacaaagcttctgcacagctgggcacggtggctcacgcctgtaatcccagcactttgggagacagagctgggcagatcacctgaggt

SEQ ID NO: 403049 - DNA, 122 bp, Homo sapiens
gttaaaacaaacttggtttgtgcggcgacaccgctacccttaccggtccccagatagtcgcggatccccgaagctaagagccagggcaggacttcagtcagtgttccaggaacagctgagac

SEQ ID NO: 403050 - DNA, 122 bp, Homo sapiens
cagttcttaaggtccagcaacacaaagcgaaaagttagtggaggactacgagcgcgatctcgacagagggcgctgggtggtcagtggctccagcaaccacgcggctggggtgcgccgggaag

SEQ ID NO: 403051 - DNA, 122 bp, Homo sapiens
ttgcagtgagccgagatttcgccactgcactgcagcctgggcgacagagcaagattctgtcgaaaaataaaaaagaaaagaggcagaggctgggaactattccaggtctggcatccttccct

SEQ ID NO: 403052 - DNA, 122 bp, Homo sapiens
gaaagcaagatgtaacctgatgtacatatttcatgtaattggtgctgaacaaaatggctgcgatgagtttattttgaatgctgaacctgtacctagaaaggaaaggagggaagctgtggaag

SEQ ID NO: 403053 - DNA, 122 bp, Homo sapiens
caccaggtaggcaatgatgggctctatatgcagctggatcagagcacggactttgaagagcggaagctcatccgggctgcacttcgtgagctccgacaaaggaagagaggtagagagccagt

SEQ ID NO: 403054 - DNA, 122 bp, Homo sapiens
gggctgtgggggaggcggcggagcccggtctagccaccgcgctctggggttcccgattcgcgcatcttcccaggctgagccgggaggctgcgttgactgcagataaacggtctcagggcgcg

SEQ ID NO: 403055 - DNA, 122 bp, Homo sapiens
aaaagaggtattaggttggtttaagcaatctgtggcccaccagccagggactgcctgacccgttgaactagctcttctggaagcctctggggatgttcactggagataccatgttcgctgct

SEQ ID NO: 403056 - DNA, 122 bp, Homo sapiens
cgctgggccgctgcgaggggcccttcctccttttgcagagttccgggaagctggagaaggcggagatcctcgagatgaccgttcagtacctgagagcactgcactccgctgattttccccgg

SEQ ID NO: 403057 - DNA, 122 bp, Homo sapiens
gaaagtgatatggaattcgcatttcttggtccataaataatgcgtatgggcacatggccgcgcccatccattctcatgtggtcacagcagctcgctgccatccaggcagagctcagtcctgg

SEQ ID NO: 403058 - DNA, 122 bp, Homo sapiens
agttctcaaaagcacccccgcagtcggctgtgtcaggatcacctgggtccggtgtgaacacgattccagggccccaccccatcgcctgaagcggaatctctgggcggggcccaggaaaccga

SEQ ID NO: 403059 - DNA, 122 bp, Homo sapiens
aaatctaacggataattcagcattgccgcatagaaacctccgcaaaaccggccaaacaaacgcggacaggcggccctggcgtcagcgcacgacagtcacgtggggaggggcagtggccaggt

SEQ ID NO: 403060 - DNA, 122 bp, Homo sapiens
ggtaccccgggcagaagcagccgaccagcacctcagggaggcattgggcggcgggaaggtcgctctggcggttaggaagcctgggttccagtttgtgtccctctaccatttatttggtgtag

SEQ ID NO: 403061 - DNA, 122 bp, Homo sapiens
ctggatgaaggggttggggatggcctccatgccgtcctgcgggcagattagcaccacggacgtgccccggcacaccacgaggcccagctgccgggtgtcctccgtgagcttgtactggtcgt

SEQ ID NO: 403062 - DNA, 122 bp, Homo sapiens
caaacggacagcaaaaatgttcccatatgccctgactgaaactcagcacctgcgtgatcccgaagtggacactgaggaggctgtcagggaagaatctgatattgaaatgaaggtcattgctg

SEQ ID NO: 403063 - DNA, 122 bp, Homo sapiens
tatcaatattgccaatatttgtttaccatttctcttcccgccaaaaactataattaactccgtatggataaaactgtaactactttatttactttgtattcctagccccaagcccagtgctt

SEQ ID NO: 403064 - DNA, 122 bp, Homo sapiens
ccttgcgcttaatctggcattggcagaggaatgcaacactgtttcctccaactcgattgccgcgggggtttccccagttccctccatctctaagccaaggagggagtccccttccgcttcct

SEQ ID NO: 403065 - DNA, 122 bp, Homo sapiens
cccctaggcgcggtcacacgtccgagccggccgtggtcctcgcacccttgcctctggtgccgactagcacccaacaccccggtccacttgtgcgagtgagagcgctcggcgaagtcttatat

SEQ ID NO: 403066 - DNA, 122 bp, Homo sapiens
gccctgttcccttgtgcctcacttgggaaaagccaacccggctcacagcggcagagcccacgggcctttgataaacatctgggaagggagaggcccggtccccagcacaggcacctcactca

SEQ ID NO: 403067 - DNA, 122 bp, Homo sapiens
acggacacccgctccctctgtgtccctgctttgacagatctatccatctggccatccatccgtgggggtctgcaatggccacctttagccgccaggaatttttccagcagctactgcaaggc

SEQ ID NO: 403068 - DNA, 122 bp, Homo sapiens
gctctcagctgatcaacgccttgatagccaggaaaggcctgtcctaccccaaagggccctcgcagcactgtttgaaattgctcttgccatctttggaatggattcctcagtacatttcagac

SEQ ID NO: 403069 - DNA, 122 bp, Homo sapiens
gcaccggctacttcacatgcaaatggtctccggccccaacaagatcatcctgaccgtggacgacatcacctttctccacccacatgggggcacctctcgaaaggtgggggaggcagagaggc

SEQ ID NO: 403070 - DNA, 122 bp, Homo sapiens
cggcagcgggcggcggcgggggaagtgggccctcgaagcgagtctcctgcaggtaagggtcgggtggcatgcggggcaaggtagcgcagccgggtgggggtgccccggcagcagggccggga

SEQ ID NO: 403071 - DNA, 122 bp, Homo sapiens
cttcattcaatttctgaaagtcaattatatggcagggaagtgctcaaagagtccaaggaccgggtgtgaaaagcagtttggcagagaaaagggagacatatgcaggaaaacatggagcacaa

SEQ ID NO: 403072 - DNA, 122 bp, Homo sapiens
cttgaaggaaggatagaatttttatgaggatataaaagatagggtattccagtttgaaggcgagagaaagaagcagtacgaccaaatgcccatttgaataacagcaattaattccaactgtt

SEQ ID NO: 403073 - DNA, 122 bp, Homo sapiens
gcaccggtcagtgccattattcacattgtaaggataaaacatcacaggccaaaaaggcgccgtcaggaatgtgacacccgcgaggctgcgggatttgaaactccaatgctttatgacctatg

SEQ ID NO: 403074 - DNA, 122 bp, Homo sapiens
acaatggatgggtaggtattaatgtgaccaggcctgcttcagctgaaatgtggtggcatgcgcctataatcccagctacttaggaggctgagacaggagaaccgcttgaacctgggaggtgg

SEQ ID NO: 403075 - DNA, 122 bp, Homo sapiens
cagaggctcaacttcctgtaccaggtgagtctgcgacaagggccccacggggacggtgctcggcgtcccagagtgactgctcccctcccgcaggccgcccattgtgtccttgcccaggaccc

SEQ ID NO: 403076 - DNA, 122 bp, Homo sapiens
tattttcatccacagctccctaaacacaaagctgtggatttcataaatgtaaatatactgcgtaatctgcccactgggagttcatagtttagtaaggactcagagaagacaatttcactgtg

SEQ ID NO: 403077 - DNA, 122 bp, Homo sapiens
caatccccagctccggaggctgatgccttatccattaggccactgggtcaccacaggatccggcttctcacaccctctccttacgcgatgccatcatcacgctcccgcccccgcgcatcgcg

SEQ ID NO: 403078 - DNA, 122 bp, Homo sapiens
catgtgaccaacacgtttaggacaggtgacaagcgattcacaattggtgcatgaccaacacgtgactgacacatgatagacgtgatcgtcattttgggtcagcacgtgacatttcaccaatg

SEQ ID NO: 403079 - DNA, 122 bp, Homo sapiens
cgcggaggggggaggaggagtcacgaggagggcggcccggccgcgcctctagccccggctcgggccctcagccctccgccccggcccgcatacaacgctgtctgcaccgctcccctgccttc

SEQ ID NO: 403080 - DNA, 122 bp, Homo sapiens
accgcgtccccgccccagttccctgtccgtgagccgatttatctgcccagggtcggcgcgcgcggctgtctcagaactcatgcagctgttcccgcgaggcctgtttgaggacgcgctgccgc

SEQ ID NO: 403081 - DNA, 122 bp, Homo sapiens
gaaaggaaagaaaagcctaaagaggattatctggggagagagaggtacccatgtgcgcaacgcaggcagtcccttgcacaggctggatctagagtaagacccacttgggttcaaacctgctc

SEQ ID NO: 403082 - DNA, 122 bp, Homo sapiens
tttttttaacgtaaaataacactaagagttcatctaaacatttgtcttagaaattcaggtcgatggctatgaagggaaaagatgctgttagaacagagggaagtgggtgacctctccgaaga

SEQ ID NO: 403083 - DNA, 122 bp, Homo sapiens
gccaccatgcccggcctactgatttaaatactaatcacatctatgaaacaccttcatgcccgcccatattcattgcagcagcagttccaacagccaagaggtgggagcacctaagtgttcat

SEQ ID NO: 403084 - DNA, 122 bp, Homo sapiens
gtagaggcaaatttagagcaacataattgcggtaatgagcaacggctcaccctctgcagacgcgtcgcggctccagcgaggcggtagctgcaggcgaggcgggcgcgcctccccgccccctc

SEQ ID NO: 403085 - DNA, 122 bp, Homo sapiens
ggtctcaccgtaagtgcggccccggcgcccctggccctgcgtcgtgccctcgccatcccccgcgatgatgcggccgccggcccatcctctggtcactgccatcttctgcgctccgctccccg

SEQ ID NO: 403086 - DNA, 122 bp, Homo sapiens
tgtaaaacagggctccttgagtatgtggaggagacttggactttatttttgaagaggctgcggggccaacaaccctgctgtgagtactgccctgcacacaggtggccacggtttcctggaca

SEQ ID NO: 403087 - DNA, 122 bp, Homo sapiens
cccgccagcctgcacggggcgcagctgaagttcgtggccaacggcattgagagcagcatccggatggaggtccggggtaggtggagggccccagcttgggaccctgagcctcatttctccag

SEQ ID NO: 403088 - DNA, 122 bp, Homo sapiens
gctgagaagatgccagacatgttacatcaccacctttaaccgtgacaacaagctgggcagcgtttactccctcctgaatatgaggaagctgaggttccaggagaggaggtaagtttttcaag

SEQ ID NO: 403089 - DNA, 122 bp, Homo sapiens
gcagacacatgaggtgggctgtgcgtttgggggctgccacaagtacgctggggacgtgttcggagatacttttcctggagagtgggagagctcggcctcaaggaagaggactcagcgccagg

SEQ ID NO: 403090 - DNA, 122 bp, Homo sapiens
agaagttgaaccattccctcgcctttgggagcaacaagtttcactttcctgctctcagtgcgctgacagagggtccgtgagctgggacactgtgacctcggcaccgctgcgattccagcgca

SEQ ID NO: 403091 - DNA, 122 bp, Homo sapiens
aacaggaaggctttcaggagttaaaggaaaaacttctggcagccccagccctggggctaccggatctgacaaagccttttccattgtatgcgtcagagagggaaaagatggcagctggactt

SEQ ID NO: 403092 - DNA, 122 bp, Homo sapiens
acgccgagatagacttgctgagcagcacgctggccgagctgaatgggggtcggggtcatgcgtcacggcgaccagaccgacaggtgactctgcccctcctccccgtcagcaccctgccccct

SEQ ID NO: 403093 - DNA, 122 bp, Homo sapiens
tgaggttctctatgcaagatggagagaggatgcaccctgtggctgatcccatccgtccctcggagcaagggcctaagagaaaagccagccaagtgcttctgaataaagatccctctctgggt

SEQ ID NO: 403094 - DNA, 122 bp, Homo sapiens
gctcactcccagctcggcgctaacacggttaacctccagctcttacagctgccgtcgctccgcctctgccagttcaatgttttattggtgaacgtgatccggggccttccaagtcccgccaa

SEQ ID NO: 403095 - DNA, 122 bp, Homo sapiens
agcactgtactagattaattgaactagactaggttctgtaactgcagaatcccggatctccgagtcagctagctcactagggtcggtgcacacccgcgcccactcggggtggcttcattgcc

SEQ ID NO: 403096 - DNA, 122 bp, Homo sapiens
ttcggatggacagcgccccgcgtgcccgcacacacccggttcacttacctgaggcatctgcggatcgttgatgtcccagctgagctgcatcccgtaggagcacacgccgaccgcttcctgca

SEQ ID NO: 403097 - DNA, 122 bp, Homo sapiens
gctctgagccagacccgctcgtcagcagctcggcctcccccgctgctccccaccagcgcccgggcttgggtgtttggtgcttccaacttttcaagagaagcttgaaatctgtaattcttatg

SEQ ID NO: 403098 - DNA, 122 bp, Homo sapiens
cgtccttttgctcttttttattaattttttggtattgtgactcctccccaaaaccgcatccggtaaatcgcttctgtattttgttgacagcggacatcatttccaccgttgagtttaattac

SEQ ID NO: 403099 - DNA, 122 bp, Homo sapiens
actaagaggaaggctgggacctttagtgccatctccaccatcagtctccattccttcaaacggatagttgacattttctcaatgttttgtacatttccaggcaaaataaaccttcaggacca

SEQ ID NO: 403100 - DNA, 122 bp, Homo sapiens
cgcccgcgcggccccgcacctcgatgatctccagcatctccaggcgcgtgatgcgcccgtcgccgtccaggtcgtacatctcaaaggcccagttgagcttctgctcgaagctgccgcgggag

SEQ ID NO: 403101 - DNA, 122 bp, Homo sapiens
gcatccaggaaatccacacagcatttcagacactataggtagaatttaaaagcacgagttcgaatcccagctccactagtaattaactggtgggacttagagttattttcattccctaagcc

SEQ ID NO: 403102 - DNA, 122 bp, Homo sapiens
caaactcctgggctcaagtaattctcctgcctcagcctccaaaagtgctgggattacaggcgtgagccactacatctgctccccagagtttattcttgaaagatcatcgtgaattagcaagg

SEQ ID NO: 403103 - DNA, 122 bp, Homo sapiens
tgaaaacaaaacacagtgaggacaagccaggtagcccagaggcccccagctggagcaaaccgtttctgtggagactccgaacgtcgcctgcctcctgcaaggccgctagtgtctcccggcct

SEQ ID NO: 403104 - DNA, 122 bp, Homo sapiens
gcatgccgaatatgcgagagtactgcttatctgcataaccacttatttccaactgagaaacgagaaaggctggctctgaaagtaacttgtcccagttcacagaactcatgactgaggagtca

SEQ ID NO: 403105 - DNA, 122 bp, Homo sapiens
gtcctggggcgctgaggtcccaggtccgtgtggtgccgagcatctcgaagcatcatggctcggagcccccaggtggctgctccagcgtccggagagtctgggatgcggacatggtggtgtga

SEQ ID NO: 403106 - DNA, 122 bp, Homo sapiens
cccgcgcagaccctatgatcggctcggcccgccgggcttgggatgaggctccctgcttctcgctagagcagaactgggctccctggcgcttccttgcgaaagcccaggctctcccaaccacg

SEQ ID NO: 403107 - DNA, 122 bp, Homo sapiens
gtcatggccctaatctgtccttcccccatccttcactccccctcttatccctggtggccccggagtgagaacgtgactcatccagctccaggcacccagtttcagccttgccccacccctgc

SEQ ID NO: 403108 - DNA, 122 bp, Homo sapiens
agggcaccagggcagggccagtccacagatccatggtggagggctgggtaggaagctgctcggaatgcccgggttcaggtacacagcctcacggtccccggtgcctgccctgccgcccgccc

SEQ ID NO: 403109 - DNA, 122 bp, Homo sapiens
ggaaacgtctggcgtgtaggcctgaagccactgcagccccgtgaccttgctcagggaggccggaggcttaggatgaagccaatactgaggaaagcagaatcgcaacgttcaaagaaactgag

SEQ ID NO: 403110 - DNA, 122 bp, Homo sapiens
cctggctggatgatcagaaacttccatggtctgtatcatgctacaccctcgggtataaatcggaaaccccaatctagcgcatctcaacagacaccttttgatagatgcttactttgtcttga

SEQ ID NO: 403111 - DNA, 122 bp, Homo sapiens
gccaggcaaatgtagggcccttgcgtcccagcctcgaatatttctgtttcactgcagctgcgagctgcgagcccagaaggcggctctgatcaatgtgggctgaattcacgccccctacccac

SEQ ID NO: 403112 - DNA, 122 bp, Homo sapiens
caggcggttcgctctgcctggcggtgggctccgtggattctgatctgctcactgctctgtcgtctcctggggcttttaaagaactccttgtgctttcatttcttctcttctttatttttatt

SEQ ID NO: 403113 - DNA, 122 bp, Homo sapiens
ctcattcacacactgatggtcatacacacacatatatatgcacacttgcatttacatacacgcacacacactcacatacctacacatgaatacacagtctcccatgtgtacatacccactca

SEQ ID NO: 403114 - DNA, 122 bp, Homo sapiens
accaacaggtcctccaggagccggtctcccagccctgcccctcgcagccgtagctgcagccgcagcagatctgccagcccctccaccgctgtcaaggtcaggagaccgtccccaaaccgctc

SEQ ID NO: 403115 - DNA, 122 bp, Homo sapiens
tttaacatattgtgagtaatatcacctccccctctggagattttgaactgtttcacagaccgctgtacacccgtctgtattgggagtaatatcatcctcttcctctctgaatattaggaaca

SEQ ID NO: 403116 - DNA, 122 bp, Homo sapiens
aggagacctctgggaagcgtagtcagagacgtatcaaggccggacaagatggttcccgatcgtcagaattcctgtccgcgccttgcgtcagccccgccgaaaggatcgccccccctagtcaa

SEQ ID NO: 403117 - DNA, 122 bp, Homo sapiens
accggcagccaagcccggcctggcctgtcctgggtggcggcagggggagcgtgctcacaccgttcccggagctcactttcagacctgtgcacctgcgcctttagtgtggctgcggttttaca

SEQ ID NO: 403118 - DNA, 122 bp, Homo sapiens
cgaggttgcctgcatccccagcctttgtccttcctgcagaagagccggcatgtggctgcgcgtttcttatagcgccccctttgttccctggcggacgcccgtggggaggtgatgcagcttgt

SEQ ID NO: 403119 - DNA, 122 bp, Homo sapiens
atgtttagccttcagaggcagaggttcagataaattttcacctttctccaactctaacaacgtaatggattcaaacctggatacttactactaacaacatatttctttttcattctttgttg

SEQ ID NO: 403120 - DNA, 122 bp, Homo sapiens
gaaggggcggggcaggggtggggcctggcgagggtagggtccggccgccccacctgctgccgctcacctctaggctgtagttgcctcggatggcagtaaagtcgtccagggcttcggccgcg

SEQ ID NO: 403121 - DNA, 122 bp, Homo sapiens
ggcagggactacttcgggtgccgccatgacaggctgtggccggaagaagaggctgggcgtcgccatgacagagagggactggaagacctaacggtgcctgcctccgctgccacgccggactg

SEQ ID NO: 403122 - DNA, 122 bp, Homo sapiens
agaggagtgagttggaaggaagagccaagggtttccactggaaccttctgcctctatgagcgccatgaggttctttagaaacagaccctctaaaacaaggggccccaaactttttctgtaag

SEQ ID NO: 403123 - DNA, 122 bp, Homo sapiens
gtgcgggcggagaagcgaaagcggatcgtcctcggctgccgccgccttctccgggactcgcgcgcccctccccgcgcgcccacccacccagtccggctggactgcggcagccgcgcggctca

SEQ ID NO: 403124 - DNA, 122 bp, Homo sapiens
tacttgcaccggtcgagatggtagcatgagtctggaggtcattttctttgagaaaggctccgcttctccgggtttttgctgatgccgatcccgggggattgaggaaacattgagctctggag

SEQ ID NO: 403125 - DNA, 122 bp, Homo sapiens
cggtccagggacccaggagctgaaggcagggtgctccggccgagacttggagtgcgcaggcgcgtccccgcccagccgcgcgcgccggggctttccccgctgacgcagcggaagcgctgccc

SEQ ID NO: 403126 - DNA, 122 bp, Homo sapiens
tgtggcctggatggtgatctagccaagggtgcatgtggccacgtgaccatcaggcacatccggtgttcataagggtcccttgtgtgctggtgtttgtgttttgcagagggggtggtcatgct

SEQ ID NO: 403127 - DNA, 122 bp, Homo sapiens
cacgcaacacagtgaatctcagaaacactgttcagaaaccagagcgaacagggcgaaggtcgagaacgaccaaggcaatccccggggcctctgggccaggctggggaactggggcagggccg

SEQ ID NO: 403128 - DNA, 122 bp, Homo sapiens
cactctggcgggcggccgctgctcagctggaacctggcatccccgactccctgcaggcagcgatccgcccggcccggagctccccaaagccttccaggactctgggtccccgggaggaggcc

SEQ ID NO: 403129 - DNA, 122 bp, Homo sapiens
aaacatgatgagagtgggtttttttttgttgttttttttttttttttaatttcaggctcccggagactgtaagtggcagagttagaatttaagcccagatctatgtaactccaaaattctta

SEQ ID NO: 403130 - DNA, 122 bp, Homo sapiens
aactggaaagtcaacacgagtgtctggaaccaagtcaatgtgaacagggggtcagaggaacgtgcacaaggcttgaagctagactggctcacgcatgagaaaggagtgcctcctgacctggc

SEQ ID NO: 403131 - DNA, 122 bp, Homo sapiens
attaattagagaatcatgcatgaccctgggaacttgctttttgttttaaaacaggagccacgattatgaaatggttcaagctggcttattcaggtctgctgagatctctactggtttgcttt

SEQ ID NO: 403132 - DNA, 122 bp, Homo sapiens
aaaaggtgattttaaactttggtttgaaaattgcagttacaaaacccaaatgagaggacacggacaaaaaagtaacaaaaagacagatgccctgaatcagacacatcgctaacaagcaagag

SEQ ID NO: 403133 - DNA, 122 bp, Homo sapiens
acagtaaggaaggaggcggggtctccgcggctccgaggtgggaccagaggaatgcgaaggcggggcgaagagtgggcgggacctcagtaccggaacaggcgtggcccgaggggcggggcagg

SEQ ID NO: 403134 - DNA, 122 bp, Homo sapiens
ctgtgcctggcttactgcctcatcttgttccctgaggttctagacctctagggtgttgtccggaaagaacagggccatgtggaagtcagcaaagagagaggccgattgaacagcaggctctt

SEQ ID NO: 403135 - DNA, 122 bp, Homo sapiens
ctcactgctcagcctgccagcagcgggggcccccgagcccagcctgtgcacctgcctgcccgggacagtcgagtaccaggtgcccacctccctgcgggcccactatgacacaccacgcagcc

SEQ ID NO: 403136 - DNA, 122 bp, Homo sapiens
accgtgagcacccggcactgggagcgcgtgaacaataatgggggattcgccgtgctgcgccgtgcagggcgcggggcctgcgcgctgggaaacgcgcccgcactggaggcagggccgttgcg

SEQ ID NO: 403137 - DNA, 122 bp, Homo sapiens
gacagcagcgcccggcctcggcgcagccggcctgggccccgggccacagccgcgacagcgcgcacagcgccatccacagggtcctcatggccagggctccggcggcgcctgcgacgcgacag

SEQ ID NO: 403138 - DNA, 122 bp, Homo sapiens
accactctagattaattgctaaccaagatatgcacatgatggggctcacaaagtattaggcggtattttaacaacaaaagctgcgaagaaatccctagaaatgttggctcttctggctggga

SEQ ID NO: 403139 - DNA, 122 bp, Homo sapiens
aggtggaggaaaaggagtctgggagaaccactgtcagcgagagccagtcactgcccaaagcgaaggcagcagaaataacgcagacgtgcctcttagaggactgacattcacggaaatctttg

SEQ ID NO: 403140 - DNA, 122 bp, Homo sapiens
tatctcagagacactgggttcttttccccaaacttctttgacccttatgccaactacgtgcgtctgaaagcccgagaagggaaaatgggggagggggcgtgtcgccccgagtttacgtccct

SEQ ID NO: 403141 - DNA, 122 bp, Homo sapiens
acagctgggggacagatggaggcagtgcaggcaaaagctaactcctgtgcaaagtctccccggccccactgtgttaacagtaaagtgcttagcagaggctcccacacatagtagttactatg

SEQ ID NO: 403142 - DNA, 122 bp, Homo sapiens
gcaccccgcccgcggccccgccccgcgcacattcttctgccttgtaaggcccggccgccacgccccgcccccgcctggagtccagacccgacggccggcccagttccacgcacccagcgagc

SEQ ID NO: 403143 - DNA, 122 bp, Homo sapiens
tgcacaacagccccagtaaagttatggatagtctcattgtcacgggaggaaactgaagcgcggaagttaaataactggccccaaattgcaccgtaatagaagaggcagagctgggatttgaa

SEQ ID NO: 403144 - DNA, 122 bp, Homo sapiens
gtgagtcctgcaggcaggacgggttggaggtctgcaaacaggaccctctctgggaagccgcgacagcggctgagctcggggtttgggggcgcaggtcgggctagaaccaccccccttctctc

SEQ ID NO: 403145 - DNA, 122 bp, Homo sapiens
gtgatgacctattaaattcattttaaagacttgtgttagtcactgatctggctggagggccgaatcaagggtgtatagatcaccctgttgtaatcttcagatccagactaaaaggccccaac

SEQ ID NO: 403146 - DNA, 122 bp, Homo sapiens
aaaccatcataaaactccccactccagtctccaggatgtgtgggtgacattccacgcctgcgagagacacactcatcagctccaacttcggcgacggtggcggcggctccgttccacgtccg

SEQ ID NO: 403147 - DNA, 122 bp, Homo sapiens
acagtttgtaggttttctgagttgtctctcccttcccagggagcttagagaagcagcaagcgtggcacctccccctttcaaacagatgctcctcatcgctccaaaggctttcgtttgattgc

SEQ ID NO: 403148 - DNA, 122 bp, Homo sapiens
gacctcaggtgatctgcccctctcggcttcccaaagtgctgggattacaggcatgaaccacgatgcctggcccaaatttagattcaaagtcatgttgtgaataggaaatgtaccagataagc

SEQ ID NO: 403149 - DNA, 122 bp, Homo sapiens
catgcgtgcagccagtggagtgtgcctgggtcccagcgcagccccaggcctgggtcactccgagcctaaagtcctggaaagggaaccccagaacaaagcctatcccagtttggaatcatcac

SEQ ID NO: 403150 - DNA, 122 bp, Homo sapiens
ggacgaggaacaaggaagaaccaggctgagacccccgcctctttggagaaggctttactgcgcaggagcagtacctgctgggagaagggacttgctggaagacgtgggtagagccggtccat

SEQ ID NO: 403151 - DNA, 122 bp, Homo sapiens
gtggctgcatcttttccacgtggataatcttggttcacctctagcacaggaattcttttccggggctcctaggatgggctgggtgggtgggagtggaggatgtctgcctcccctgagtttgt

SEQ ID NO: 403152 - DNA, 122 bp, Homo sapiens
gatgatattggtggttccacccatagctgttaaaaagtgtaagcccgaagaggcctgggtcgactgctatttgtatttaaggatcagaaaagctttcaggccctgtggagtccccagattta

SEQ ID NO: 403153 - DNA, 122 bp, Homo sapiens
gtcaggggaggactccacggagcctcgctcctcagaccggggtccggggaccggcggcaccggaatcgcctgggcgcctgtgggactgtcaggccccccccggtctattaaaccggacagca

SEQ ID NO: 403154 - DNA, 122 bp, Homo sapiens
tggtttacccagcgatacagagaatatctccagaggcagaaactctttgatacacagcaccgtgtggaaaagatgccggatggctcggtggcgctaccggtgctgggagagacgcttccaga

SEQ ID NO: 403155 - DNA, 122 bp, Homo sapiens
gtccccagaggtctgaaatcgctgattgtgtttattcaaagccagtcaccattgctcacccgtctgacttactctgggtgtgtgtggacgggcgtgcatgtgaccgcgtctgtgcaccgggg

SEQ ID NO: 403156 - DNA, 122 bp, Homo sapiens
aataggcgcaacgagagtacccatgagttgtgggaattcaagggctagaactgtattcagcgcttggcatagagcctggcccctggcaaggattcaatcaatggtagtcagtattttcaaaa

SEQ ID NO: 403157 - DNA, 122 bp, Homo sapiens
ccgccccacgctaggcgcgcgtgagaggttttccggaagtgtagccaaagagcgagtacccggctttccccaagatcgttgattggccagggcagccttgagtaaatcaccgttccggaagt

SEQ ID NO: 403158 - DNA, 122 bp, Homo sapiens
gcgcctgcgcaacgacaagactgtcgggatttgtagtccaccgacaaagtgggcggactgcgtgcctttcccctttctgcctggcaaagcgcttgccgggacctgggaggagctgagagtgg

SEQ ID NO: 403159 - DNA, 122 bp, Homo sapiens
tgaggatggacaccctgatacacatcacccctttcctatgtttggattcttcctgcaattcgcagagaccagaaccctcacggaagcttgtgacacctccagaaatgtttgatggtctgggc

SEQ ID NO: 403160 - DNA, 122 bp, Homo sapiens
aaactgaaggtcccggtaagcatcgcgtcagtacttatggcgcctgccgggttgtggtgacgaaagcagttgccatggagttgctctgagtaaccctgaggcagtgggacgccaagactgga

SEQ ID NO: 403161 - DNA, 122 bp, Homo sapiens
gcaccgatttcaagccacgataacatcacggctaagtcttcagctgttttgcagatttcacgttaacttcccttgaccctttcaaccaactacttcaactcggcccacttctttccactccc

SEQ ID NO: 403162 - DNA, 122 bp, Homo sapiens
accggtggtagtgtttgggtttgaggagagcacgacccagccctctggggtggggtctagcggggtcagcgaccaatcgcgccgaggtctagtggggcggggccctcccgggggcggggcct

SEQ ID NO: 403163 - DNA, 122 bp, Homo sapiens
attcgggttcccctaggggtctctcccgggcaggctgcctgccccgggccccagccctgccgttgggtgggtatcctgagctcactggaaccccgggcgccttttcttcagcctttcccagt

SEQ ID NO: 403164 - DNA, 122 bp, Homo sapiens
ttttaaaactagctagtggtagtaactgcacgagtttatgtcccaccattggggcaatttcgtcattttcctatattcaagtctttaccagcaatagcaataacaaattcgagtgtgaaaaa

SEQ ID NO: 403165 - DNA, 122 bp, Homo sapiens
caggacccaccctccctagcgtttgcgcattttatggacagggaaacaggctcaagtaggcggggcacatgcccagggaattacagctaatcaagtgagctgagccttgaaatgcacttgct

SEQ ID NO: 403166 - DNA, 122 bp, Homo sapiens
tgtcagtcgggatgtgacatgaagcgtctggcctggtccctcttcctttcaagctttccccgtccctcgtggactcggtccccctgccccacatttcagaaggctccccttccccctccacg

SEQ ID NO: 403167 - DNA, 122 bp, Homo sapiens
gcagcatggcacctcttcccctgcctcccgccgccccctcctcatttcctgcctcgcgcccgtgtattaaagggcccgcgtgtggactcaagcagcgttcatacctaatttcaattaataaa

SEQ ID NO: 403168 - DNA, 122 bp, Homo sapiens
aagggcaggcgggctcggctcctggactcctcctgcggccacaaagctgccctgtttctccgcacctggacccccagtgtgtgactctgcatagagctcatcatgatttgtcgcccaaggtc

SEQ ID NO: 403169 - DNA, 122 bp, Homo sapiens
gaatatgcattccaatcccatgacacccccaacacatagctgccctcactcttgtgcaggcgatgtttcaatgtttcatggggcaagagtttatctctggagagtgattagtattaacctaa

SEQ ID NO: 403170 - DNA, 122 bp, Homo sapiens
ggcgcgcagggcgcagaccgccggccgcttccgcccccagctcctcccttgggccgagcccgtcccgcggccccgcccctccagggccctctggggcttaaccctctcatcgccgcccacgg

SEQ ID NO: 403171 - DNA, 122 bp, Homo sapiens
gcagtaggttggagcccctctgttcccaggacacctccagcttcttcctctggcagctcccgaagctcaagtccttgaaggatggggaaacaggcatagccctaggccctactgcatcacgg

SEQ ID NO: 403172 - DNA, 122 bp, Homo sapiens
aaaggggaaagacaaaatctcaacagatttgtctgcttccatcgctgcagtggtggtttgcgaaagctcaaacctacctctttggggttattgaagaagaggagggagcgtagagggaatcc

SEQ ID NO: 403173 - DNA, 122 bp, Homo sapiens
aatttcattttgcaatgatctcagcactgggtttatctttacaaatgaaatggtgagaaacgctttgctgaatcttcacaactggttcaatcacatgggacagtggaatcagagacatgagg

SEQ ID NO: 403174 - DNA, 122 bp, Homo sapiens
aaggcgccagggttggcggctgggtctgccctccctcccctgtggcttagcagaagtggccggctcacgggctccctttggaagcaaaaaagcccctagattagaaactcagcccagaaacc

SEQ ID NO: 403175 - DNA, 122 bp, Homo sapiens
cgcagtgggagggcggcgggcaggggccgggcgagttaggccgcaagcatctgctggggccgtcgcagcaccatcccacagaccgccactgaatcaacagcagccagttctccctgggctct

SEQ ID NO: 403176 - DNA, 122 bp, Homo sapiens
tcgtttctccaccctgcaagcccatgagttgtggggtagttactccaggtacaagccaggcgcccctcccttccgccactgctggggcggtgcagagggcgggcggtacaaaaagcgccccg

SEQ ID NO: 403177 - DNA, 122 bp, Homo sapiens
ttttccctccagtccagcccagccggggcgccgcgagggggcggagtggggtgtggtgggcgcgctcgggcggctcctgcgcgttcccgccgaggcagtggcggcgggagcggcagagacgg

SEQ ID NO: 403178 - DNA, 122 bp, Homo sapiens
cttctttccttctatcccccggcttcagttgagttcattctataccccacccgatgcctccgcgtacacactgtagctaattctgcaggagatggagggttccatggtatcttcacacgtgg

SEQ ID NO: 403179 - DNA, 122 bp, Homo sapiens
gcagatgggcgaggtggcctagggagcggcccgcatccgtggggagacgctgggcctcaacggctttggttgcacggggcaggcattgcagttcgagccaaagcctttggattcagcgtcat

SEQ ID NO: 403180 - DNA, 122 bp, Homo sapiens
aggcctgcctcaccatgccattcccccctcccctctgatctcttgggaaaataaatagagcgggaagagagggtttagctcaggaaggggtaggaacactgatcagctcatcaatcaggaga

SEQ ID NO: 403181 - DNA, 122 bp, Homo sapiens
aggcaggcgggcggccaatcgccactgggctcgtcacgacagcctccttcagctccaacccggctaattaatccccactcatggatataggcacacaaactaaaggtaggaggctgctgccg

SEQ ID NO: 403182 - DNA, 122 bp, Homo sapiens
ggcggcaggaaccgcagggcgctcggggaagcaaacggagtgtggaaatacgacctgacccgtgagtacccgccctgccccgccgcctaccccaggcctgtccggcagggtcgcagcgagcg

SEQ ID NO: 403183 - DNA, 122 bp, Homo sapiens
ccctgcccacccgcagccctgctcggccgcgttcccagcagccgggaaagcttcctccctcggtcaccgatccaggccgctggtccagctgtcaaaacagggggtgtctctttcattctggc

SEQ ID NO: 403184 - DNA, 122 bp, Homo sapiens
gtaaggaagtcagaatacattgatctagactgcaacaacatatatatatatatcagattccgcccccccgcaatacatgaatgtatagtaaattagtgtgaactcactgaacactcctcagt

SEQ ID NO: 403185 - DNA, 122 bp, Homo sapiens
gacatggtggagggtcatctctgcctcctttgaccccaaattcccgggaggcgaactacccgacacccccttggccttgggtgttgcgcagccgcttccttaagggagaaccagtcacagag

SEQ ID NO: 403186 - DNA, 122 bp, Homo sapiens
ctggtgagagacatttctaaccagactataaaagctacgcgctatcagcatagtttctttcgttttgtttttcacccagagatatccctccaaaacgcaagtctgatcatagctcttctgaa

SEQ ID NO: 403187 - DNA, 122 bp, Homo sapiens
atttaacaaatgaaagattaaaaataaaaaaacaaaaataaaaaaaattaaaaatacagacgtccagagatgctctaaaacagttaagttaaagatcaggaaaaataaggtcatagacttaa

SEQ ID NO: 403188 - DNA, 122 bp, Homo sapiens
ggaagggtggagagagcgtatcttggctgctgtggccccaaagagccctggcagagggggcggtggagggagccccaggtgtggggtcagaggacctgggccccagcctctcagggtgacct

SEQ ID NO: 403189 - DNA, 122 bp, Homo sapiens
gtcccacccccacttcccatcacggtctgaactagtctctaaggtttactttggaaagctcgtggctaacggggttggcgggggactagaattttatttttgttttacagtctcaaaggaat

SEQ ID NO: 403190 - DNA, 122 bp, Homo sapiens
ttggaagtcccgttaaactggcatctgttctgttttaggagaaacccgatgctagccccacgtcacttcagctgcggtcccagatcgaagtaagcacaatgactttaatcatctagttttgc

SEQ ID NO: 403191 - DNA, 122 bp, Homo sapiens
cctccctccctgctggacggcatccttggtgggcagaggtgggcttcgggcagaacaagccgtgctgagctaggaccaggagtgctagtgccactgtttgtctatggagagggaggcctcag

SEQ ID NO: 403192 - DNA, 122 bp, Homo sapiens
actttttatgtgttattacagtcgttaaaaaccttacctggatttgtgctttgcaatttacgctttcgaacatgcaggaatgtagtttgggcatttgtctggaacttcggattctcgggact

SEQ ID NO: 403193 - DNA, 122 bp, Homo sapiens
cgtagcctgggttgttgaggaaggctcctggagccctttgaggcgtggcagccttcgtgtcggccaggccctgggtcagggtttatttgttcaccacgcttgctgtgctcgtgctcctccgt

SEQ ID NO: 403194 - DNA, 122 bp, Homo sapiens
ggagcccagccctcctggtctctgaagagccagacctggacaccttcctcaggacccgcccgcctccgaacagcagactcctcccaagatcagaggtggggccacaggcagggcggctgtgc

SEQ ID NO: 403195 - DNA, 122 bp, Homo sapiens
tcgtgactcctctgcgcgtgccttcccacacctcctccgtccgggactgcgaggagtgggcggtcgactcgagttcgcagcccaggcctcccacacgcccctccctgccgtcagcacccacc

SEQ ID NO: 403196 - DNA, 122 bp, Homo sapiens
gccactcggtgctcacgaggtggtgctcgcccatgaggatcttgcgcacgttctccgcgccggtcacgcgtatcagcggccgccccaacaaatgcgtcttgaacacgttgccatacttctcc

SEQ ID NO: 403197 - DNA, 122 bp, Homo sapiens
taacagctgttaacactcaccgcgaaggtctgtagcttcatttctgagtcagcgagaccacgaacccaccagaaagaagaaactccgaacacacccgaacctcagaaggaacaaattccgga

SEQ ID NO: 403198 - DNA, 122 bp, Homo sapiens
cagggggaggagggcagcgcggggctcctggcacagcggccgccgggcgcctggtgctgccgagccgcggacccgcccagagatataaataacattatctgaggagggacattcctgccggg

SEQ ID NO: 403199 - DNA, 122 bp, Homo sapiens
gccagtgtgtgggagagaagggagaggctaatgtctgcagaatcctggcagtctctacaccgattgtgaaaatgtcaggcagttgtgccaagaagggtgagggtaatacaggatgggcctga

SEQ ID NO: 403200 - DNA, 122 bp, Homo sapiens
aactgagagcagacaaaagcacgcgctcttctccaccgccacgccggtcctacccaaacccgcgagttatccgtattctccttcaggagtcatagtcaggccagaagagtgcggagggacgg

SEQ ID NO: 403201 - DNA, 122 bp, Homo sapiens
cacttccggcaacaagatagagcacttccgtcaaccttcagacaaacgggccgatacgtacgaatgggctaccataagccccgccccttccgggaggtctccggaagttgggacccttttag

SEQ ID NO: 403202 - DNA, 122 bp, Homo sapiens
atcctccacagtatagttgtggtcacagaaaactgagagattaacaggggtctgaagaggcggcattagtaatccaatagcagcatcaacctgggaaacaggaggcggtaaaggaggtgggg

SEQ ID NO: 403203 - DNA, 122 bp, Homo sapiens
tttggataaactacttaatagcagggctagcccctcctcagacgggggtaggtgccgcatcgccagcctagcaccagacgcctgcgcgctttcatctttaatcgtctcttctccgtttcctt

SEQ ID NO: 403204 - DNA, 122 bp, Homo sapiens
agctgtatttgctttaattcaacagacattctgaacattaggtttaagacatggtccttccgcagacagtcacggtgcaggatgaatggcttgtggtacgaaccagagggccataccactgg

SEQ ID NO: 403205 - DNA, 122 bp, Homo sapiens
gacaggacaacaattcggagtcttacaccatcccaggttttttgacacgagggctgtccccgcgttgctctccctgggcctgtggcacccacttgctggctaaggttaggacccaccctggg

SEQ ID NO: 403206 - DNA, 122 bp, Homo sapiens
agcggattgcagctgtgccccagcaagaagctggcctctctggatcaatcactccagaagcgcagaggaaaggggagcttgcctcagtaagcaaaagtcaccattatctgattatctttagg

SEQ ID NO: 403207 - DNA, 122 bp, Homo sapiens
acactacctgcaggatcggacgacccccagaactgtttgccaacaaagacatgcagggggcggagcctgagcgtcagataccgtgagcggcgtgcagagggcggagcctaggagtcagatac

SEQ ID NO: 403208 - DNA, 122 bp, Homo sapiens
aggatctagaactgaagaagagaaaatgaattgtgggtagggctaagcagggatgagagtcgggataagtgataaaaatagccaataaaagccctaaaagtaaatctaatagggcatgaggg

SEQ ID NO: 403209 - DNA, 122 bp, Homo sapiens
cgtggccgctgtgtctgagatattcagaccctcgccgtcccgtgcagtagacacggtggccgctgtctgtaagatattcagaccctcgccgtcccgtgcagtagacacggtggccgctgtgt

SEQ ID NO: 403210 - DNA, 122 bp, Homo sapiens
agtgcggcacccgcagtcttgacttccccagtctctgactgaacagatgtttttgtccctcgcggagatttgtaaccgatgttgggaacagctagtggacggtgctagcaacctgtatctgt

SEQ ID NO: 403211 - DNA, 122 bp, Homo sapiens
tctaattttgtcctttctctttgttgcaatttacagatacttggctgaccaccaacttaccggcattgacagtaggtaaataatcctctcgcccctccctagggctcactctctacctctgg

SEQ ID NO: 403212 - DNA, 122 bp, Homo sapiens
actcatctgaacacagagctcccatcccctttgcaagtgacttgatgtttgagatcagcccgggatgtcaaggaaaaagtcttcacagtccttaccttttctccacacaaaggccaaaggcc

SEQ ID NO: 403213 - DNA, 122 bp, Homo sapiens
gggccctgcccctagaagaacgtgttgggcctcttggtggtgaagcgtggcttgggctgacgggcaggacccggtggggcagcgggaaacttgatcttggagtcgtggaactgcttgatggc

SEQ ID NO: 403214 - DNA, 122 bp, Homo sapiens
gtgctcccctaagtgggcgtcagaggtccttggaggctcccacgccactccctggtgctgcgctcccggggcactcacgccgtcgctggctactccgcggggccggctcagctgccgctgca

SEQ ID NO: 403215 - DNA, 122 bp, Homo sapiens
gagccctgcaggccggggggggcgacgcggtggtagcggagcccgggagcctggcagagccgcctccagcccccgagcatcacccgtcaagccggtgggagagagtgctgggctcccagagg

SEQ ID NO: 403216 - DNA, 122 bp, Homo sapiens
gcggagcgcgcgcctcggtccccgcggaaagctactccgcgcgtctggattggtcgcgaacgcggcttccccgcccatcccgccattaggagcgctcccattggctgatgttggcgcgaagg

SEQ ID NO: 403217 - DNA, 122 bp, Homo sapiens
gccgggcgcccggggctctgcaggcgcaggcggcgcggggacaggagcaggttaccgggccgcccgagcgctcgcaccccgctgaaagaaacgcaggcggcccgccggctctgcctggtccg

SEQ ID NO: 403218 - DNA, 122 bp, Homo sapiens
aaagctgcagtgagctgtgagtatgccactgcactccagcctgggcaacagagcgagacccgtctccaaaaaaaggaaaaagtgatggtgatgtatttaaaaataaactcgtatacatgatt

SEQ ID NO: 403219 - DNA, 122 bp, Homo sapiens
caccaatcagcaggagccctcggctcgcgctggggcggggggtcccccactcgccctccccgcggaactctggcacagtcagctgaccgcagacactcacgtgacagctcggggcccacgcc

SEQ ID NO: 403220 - DNA, 122 bp, Homo sapiens
tttggctttctgtttcttaacctaaagtctacgatccttatcccagctttccaggctctgcgtgatttcggccccgccggcctcctgagctcatttcattcttttcaccgtcatgcacgctg

SEQ ID NO: 403221 - DNA, 122 bp, Homo sapiens
gttctcagggcaccggcactacggtggctgggaaggctcatgagacctgccgtgtctgttcggctgtctgtccccagaaccctgcctgcagggggagctagggagccgtggggtgggagcag

SEQ ID NO: 403222 - DNA, 122 bp, Homo sapiens
agggaccactcccccgcccactcagcggcacccattctccctccctcgatgggaataaaacgtgggctgaagctgctttgggcgaaaaagttaatcctacaacttctctatatttcagctgc

SEQ ID NO: 403223 - DNA, 122 bp, Homo sapiens
tctgctctcactccccgtccccgtccctccgtgccacggtgggggcatgcgggtactatccgcctctgccgtttctcatttcagactccgagcccaagccggagcaggctccacgctctcct

SEQ ID NO: 403224 - DNA, 122 bp, Homo sapiens
tgggctgtagcgcggagcggggccgagctaggagtcctcaggccggcaatgaatgaaccccggccgccccagcccgggcagcggggaactgggacaaagggggcgggcctgccctggaggga

SEQ ID NO: 403225 - DNA, 122 bp, Homo sapiens
ttgcgggagaacctggcgggtccgtggtccagcgaggcctgggattcagaagggatgaaacgttcctcgacgcttgaacaccggcctcctgcccctgggtcttcctgctatttcttcctgcc

SEQ ID NO: 403226 - DNA, 122 bp, Homo sapiens
aagatagagaatgctagaggaagaagaagtttaggcaggaggtgtggctttgattttggccgtgtgaattagagatgctcattggacatctatgtggagattctcagcagatctggaaatag

SEQ ID NO: 403227 - DNA, 122 bp, Homo sapiens
gagtgatgagaactaccatttagtggggggtaaatacatgtgctttgttctatatcatcccgtctcattcttacagtagttctaaaagaatgacattatttaaccccatttcacaagaaagg

SEQ ID NO: 403228 - DNA, 122 bp, Homo sapiens
taactacagatgccaggcactggattaaactgtggccttgagtaagagttactgtcgatgcgcctcagttgcctcatctttacaatgggataacaactgttcctgtcccgtagatctgctat

SEQ ID NO: 403229 - DNA, 122 bp, Homo sapiens
cctgagaggagggaggcctcccagcagccgcccaggcgcccccgccctccatccccatcccgcactccagcctccctggtcagccccgcctgggcagcccctggacggggggaaggggacac

SEQ ID NO: 403230 - DNA, 122 bp, Homo sapiens
ccctgtggcaatgagtgctgagggaaagagagtgagtgttggcatgagtaaggactcggacgatgcggtggatattgcttctctgcgacttgctgcaccacttcactaggggaggccagttt

SEQ ID NO: 403231 - DNA, 122 bp, Homo sapiens
tgggtcctcccgcagctcccaaatgcatgggcctgtccccccaccctccctctgccccagcggagcagagcctgccgcctgcagtgacaaagtgtgctgcctgtctcccaggcccctgtgcc

SEQ ID NO: 403232 - DNA, 122 bp, Homo sapiens
tagaaaggaagtcctgtgtattgaccactagaattttatctcctatgatttatctattcacgtcttgttttccatgttcttttagttgtgggtcttttggttgtgagccttttgatttatag

SEQ ID NO: 403233 - DNA, 122 bp, Homo sapiens
atggcctgagagttgggtaccaattaatcagcccttaactctatcacacacaaaaggacacgtgtcctcattagcaagtcatgaggggaacttagctaactgactgtcactttgctatctgg

SEQ ID NO: 403234 - DNA, 122 bp, Homo sapiens
cgccgctccccctttgtcccccaggccgcggggaccccgggcaccaacccctccagcacccgctgccccccagcccggtggacggcccctcgtgcccctcacgcgtgctcctggggccccgg

SEQ ID NO: 403235 - DNA, 122 bp, Homo sapiens
cgcactcacggcccctgagcccgcgcggaggcccgacgccccgcggccgacgccggtccccgccccgggccgccattggctgttgccatggcaccagcccgtcttcccgcgccctcattggc

SEQ ID NO: 403236 - DNA, 122 bp, Homo sapiens
ggaggtcgaggctgcaatgacccaagatcatgccactgcactccaacctgggtgacagagcgaggcactcctctgctatccacgtttttagagaaatgagctgggctctctctcttagtggc

SEQ ID NO: 403237 - DNA, 122 bp, Homo sapiens
tcgcgcggggtcaaagtccatgcaagccgcacgcactgcacaggtgccccaggactggcacgggctcagagtccacgcataccgcacacactgcgcaggcgctccaggactggcgcgggctc

SEQ ID NO: 403238 - DNA, 122 bp, Homo sapiens
gccggcttagtggagttcaaaagatgtaggtgaactctagactcttcccataaattgatgcgggcgcagcattaccctttgagatctggacattgcgaaaatgcctttaaggctgctgtgct

SEQ ID NO: 403239 - DNA, 122 bp, Homo sapiens
gccggccacggtgaggcgcgcgaggcgtgtgctgccagcttctctcttccttccccggtccgccttcgcgcccttaaggagacagtccctgggagtttctgcctttggtctccagttattgt

SEQ ID NO: 403240 - DNA, 122 bp, Homo sapiens
aaaagaaagaaaaaacaacctggttctaggcggctctatctctcgtagtgttgattataccgcggaaggcgggaagagctgggaagtggcaacgaagcgaggcttgcaatgccagagccttc

SEQ ID NO: 403241 - DNA, 122 bp, Homo sapiens
gcctttgttctcgccacctagcggtccggcgtgcccctgcaaggacccggcaactgctcccgcgctaaccagaccagtgatggattcattgcaatgcggaactttccttgactgcaaaagtg

SEQ ID NO: 403242 - DNA, 122 bp, Homo sapiens
gtgctcctcctggctcaccatttccccctgctcccccacagccggttctgcacttatcaccgagtcgcccctggaagcagattcccattgagttttccccaccaaggggaccatgcacatgg

SEQ ID NO: 403243 - DNA, 122 bp, Homo sapiens
ggcgcccagtcctgctacagggagacgccggcgccagctctccccgcagagcccgcaaaacgctctgttcgcgcttcccagagtccagcgcatcgcaggaaccgcggcccctttgaaatgca

SEQ ID NO: 403244 - DNA, 122 bp, Homo sapiens
gctcagctgctcgtggacactcccacggggatgttcggccgacgccaccatagaggaagtcgtagaggtgttgtccttcaggatccccttgaggggccgttgcgaggccgtggaggccgcca

SEQ ID NO: 403245 - DNA, 122 bp, Homo sapiens
aggagggcggcgagcttcatggcgcgggggctcggggcgcgcggggaacctgcggctgcccgggcaaggccacgaggcttcttatacccggtcctcgcccctccagcgccggcctcgcccgc

SEQ ID NO: 403246 - DNA, 122 bp, Homo sapiens
ctcaaaaacgcggcataaatggaaactaggccctgaagccagagcctcaggactggctcccgggaatgtttgaagatcatcgcgtatcttggaattgccaggcttcctgctccacagattcc

SEQ ID NO: 403247 - DNA, 122 bp, Homo sapiens
attacaggcctgagccaccgcgcccagcctacaacaggaagactttgttaaatgaatgagcgcgcagggaagagcaggtgctttgtgaacttgagagcttcacttcctaatcctgtgactcc

SEQ ID NO: 403248 - DNA, 122 bp, Homo sapiens
catggacagcgccatcctccgcatggtccctttgtcgaagctgctggtgcacggtgagggcgaggccatcttcagcaagctgtgggactgggcgcttctctccagcatggcctgcgagagct

SEQ ID NO: 403249 - DNA, 122 bp, Homo sapiens
cccacttattagcagctggtctcattggcttggcttaactctccaacctcctcctagctccgccccccgcataggctcctccccagaggaggggcctggcgtcctgggctccggccccagtg

SEQ ID NO: 403250 - DNA, 122 bp, Homo sapiens
aaaccaccgctcccgcctgaccctggagcagcttagcgacctgttgacaatcgctgtaaacggaccgccaatcaccaactttgatgccaagcgagccctggacagctggtttgaggagaagt

SEQ ID NO: 403251 - DNA, 122 bp, Homo sapiens
atttccttctatatattctgctgctgaaacccaacacatttcactcatgtaagactcaaacgggctacttctgatttcttcttttaacgtttaaatttatatgcttaaaaccatgaactcac

SEQ ID NO: 403252 - DNA, 122 bp, Homo sapiens
ccgtccggttgtttgaccaggagagttgtataaggtcactggagggttctgggaaaccaccggtggccactccttctggaccccactctaacagaacccccagcctccaggaggtgaagatt

SEQ ID NO: 403253 - DNA, 122 bp, Homo sapiens
agaattcaaaatgagctttgcatccaagctgttgtgggttcgaatcctgggtctatctagcgtttctttctccatctgtaaaacagggttaaaaatacctattttgtaaagttgttctcaca

SEQ ID NO: 403254 - DNA, 122 bp, Homo sapiens
agaaggtgcacttagggggctctgatggtctctcctcaggccctggcctcgggcttataccgaacatggctacagggacaggccctctggaagcgtggtcgaaggtgatggaagtctcggga

SEQ ID NO: 403255 - DNA, 122 bp, Homo sapiens
taatatgggtaaaacaagaaatggcccgatagtttcacactattcctatacctccaggtccggaagacaggtaaaaaattctataatgtaagaatggaggtagttaccctgatttgaccctg

SEQ ID NO: 403256 - DNA, 122 bp, Homo sapiens
gaaactccaaggctcagaccaccaccggatgcccacacttcaggagcatttatataacttcgtggttatgtcagagacgagaaaacccattgacaaccaaacccctaaacccgaacatccgg

SEQ ID NO: 403257 - DNA, 122 bp, Homo sapiens
gaagcaatgcggtatgtggctgagtaaagacagattgacagggtcttggccactgcccttcgcgggccgggcttcctccttctgtaaccttctgtgccggggaggatatttgcatttaagca

SEQ ID NO: 403258 - DNA, 122 bp, Homo sapiens
ggaggctggcagccgggctgggggagggcggggaggggaaagccctggagccacagagcacgaggttgggctgaatctattcgtaccttttattggcttcactgcgcgaggaaattaaagat

SEQ ID NO: 403259 - DNA, 122 bp, Homo sapiens
agggtggagaagggctgactctgatctcccggctccggttgttccggggaccccagagagcgagtgatctgtgcctggcctgctggagcctccgtgcaggcttcccgctttctccgggcttt

SEQ ID NO: 403260 - DNA, 122 bp, Homo sapiens
gggtgcggggcctgcgggtagagcgcggggtcctgcggacgcattcagggtgctggggggcgctgctcagagctaggtgggacagggcgaagcgcctgggctcaggacaggggtgggggggc

SEQ ID NO: 403261 - DNA, 122 bp, Homo sapiens
aacggctggtctcctggctgatgattgaacccgacttagagtgttagagatgaaagtgaacgggtttgaacggctggtctcctggctgatgatggaacccgacttagagtgttatagatgaa

SEQ ID NO: 403262 - DNA, 122 bp, Homo sapiens
ttctctctagaaatggacgacagaaactcagccacgccacgcaccaccgcttcgccagcacgagggaacgtacaacatccctccccaggtactcgtgccgcgcgccactcacccctcctgga

SEQ ID NO: 403263 - DNA, 122 bp, Homo sapiens
ccccagggttctgcaggtcagatgaccccctgcctcctgcccagttgctctgtgcctagacgtggctcgccaatctgtctcactggtgagaccgacctgatgcgcacctgccgagttttatg

SEQ ID NO: 403264 - DNA, 122 bp, Homo sapiens
caagatggagtcgcagcaagtcccagcctcatttttcctagtcctaactcaagatggagtcgctctggttcgaatgcctcagacataatcatatgagcccttggctcactgcaacctctgtc

SEQ ID NO: 403265 - DNA, 122 bp, Homo sapiens
tgacagctcagaacttgtactacgttttaaagaaagttgctggctggtcgcggtggctcacgcctgtaatccccagccctttgggagcccaaggcaggtggatcaggagttcaagaccagcc

SEQ ID NO: 403266 - DNA, 122 bp, Homo sapiens
gcccttcggatggtctgctgaagagggccgccagctggtaagacactccgaggcaacgaccggtctccctctccctagcccggtgtgcagtctgacccagcccccacagcagaccaccccca

SEQ ID NO: 403267 - DNA, 122 bp, Homo sapiens
tctaagcaaaagaaagaaccagaacaaaaaccagtggctctcagacatccccaaggtccccgcttcttcgtttctctccatccctttgtgcacttcccctccccacccttttagctcctcac

SEQ ID NO: 403268 - DNA, 122 bp, Homo sapiens
cttccgccatgacccaattcggaagtgccaaatgcaacttccgggcaggagagggaatttcggagccctaaactgttgtccatctccgtaagtgaccagacgtctcagtaaaataagggcca

SEQ ID NO: 403269 - DNA, 122 bp, Homo sapiens
actggaggcctcctccgttctgtccttgcagtgacaggaataggagtcacgtgttccacccggcctcagtttcctcatctgtgaaatgggaacaaggtcaccccctatccgcccaagctgtt

SEQ ID NO: 403270 - DNA, 122 bp, Homo sapiens
cccctcttctggcgcgctgggtgcctttgcgtaagcccttccttctggaactcagtttcgcgtctgaaccttggggaggtggaacaagttgctgccgaaggcccttccctgctcccgcggcg

SEQ ID NO: 403271 - DNA, 122 bp, Homo sapiens
agccgaggccgtccagagagatccagggtacacacagtgacagtgccagctccacattcccgaccaccgggccagggctggttccacgctgtcatttctctccgctggccccagccgcgggg

SEQ ID NO: 403272 - DNA, 122 bp, Homo sapiens
cccctcaggtgtcctgcaggcacagctcctcggggggcccaggccgatggcaggtcttaacgtgtccctctccttcttctttgccaccttcgccctctgtgaggcggccaggcgggcctcca

SEQ ID NO: 403273 - DNA, 122 bp, Homo sapiens
cttgtggaatttcgaaaatgtgcgccagggcgacacctcttgatggtaagaagacgccggcggaggggagcgtgcagtgcggtcctcccgcgggcagggggcagtgcggcaaggcgccctcg

SEQ ID NO: 403274 - DNA, 122 bp, Homo sapiens
tttgtaattctctcctacctatccatacttgagtcagacctacatgttatacctgtttgccgagtgacacttaagcagaaattgtagtattgttttctcttttctcagaagtccttaagaaa

SEQ ID NO: 403275 - DNA, 122 bp, Homo sapiens
gcacactctaaaacattgtaccacgtccatttacataagtacatggtgaggtcaaggctacgttggatcggaggagaccccaactgccctgtctgtgatccaagagaaactcagtcatgata

SEQ ID NO: 403276 - DNA, 122 bp, Homo sapiens
tggaagaggcccaggcaggcagcagcctgagaggtgcagtgcagggctggaccttcgactcggggtctcccccattggcagcattgctgccggtcccctgatgcttctcttgtcggggaaga

SEQ ID NO: 403277 - DNA, 122 bp, Homo sapiens
tcctggggaccccctgggaagcctgggcaggacgtattctctactccgtgtcggaggagacggacaaagggtcctttgtgggagacatcgccaaggacctggggctggagccccgggagctg

SEQ ID NO: 403278 - DNA, 122 bp, Homo sapiens
ccgatcttgaagagcccgcgctgcgcggagcccgcccccgcctgcgcaccggcaccgacgcggagcgacccagcccagccagacccggcccggcgcggcctgatctaacccagccaggcagg

SEQ ID NO: 403279 - DNA, 122 bp, Homo sapiens
tgccctcaagaaattgtgtgtaactaggaagacaaacacatgaatgactataagacaatgcgatgaaagttgtgacacattcccaacaaaatgcattgtgggaatacagatgagggagcaag

SEQ ID NO: 403280 - DNA, 122 bp, Homo sapiens
ggctgggggtgggagcggcgtttcctgctgcgggtgagccttttgcctcggaactggacccgggagacatcacagcgctgggctaggggcgcggcttgaactcgcctaaagagctgcgccct

SEQ ID NO: 403281 - DNA, 122 bp, Homo sapiens
actttccctcacctcctctgctgtgacaggacaaaatgtacacagtctgacaagttcacccgggtcccccaatgccagggaaggggcgcataattcaaacccaacactgcctcttctgtgta

SEQ ID NO: 403282 - DNA, 122 bp, Homo sapiens
gaagaattatgatgagttcatgaagctccttggtgagtgagctcctgggtatcccttcctcggggttggtttgtcacagccagctctgggccaggaaccctaaagtagaatgggacaggatt

SEQ ID NO: 403283 - DNA, 122 bp, Homo sapiens
cttcagctcttgaatcaaacaaaaatgttctggagttttataaactaattagcaaggcagcggctgtttctattgaataattcactgctatttctgtgattctaataaatgattgcaaaaac

SEQ ID NO: 403284 - DNA, 122 bp, Homo sapiens
tccgggtttccgggacaggctctggagctccgcctgcgggggccgggcttggcggctggacggcgcgtgcgccgtgcctgcggatggaggagggccaccttctgcccggctgtagccaggtt

SEQ ID NO: 403285 - DNA, 122 bp, Homo sapiens
gcactttattctcctccgagacccccttttcttccccttcctctctcccccaccagggggcgcgcttaaatttccagacagagaccagaaggaaggtttagaaagaaaagaacacttgccca

SEQ ID NO: 403286 - DNA, 122 bp, Homo sapiens
aagaaaaataaaaccttttcttctaccctaaagctcatttttttctttaaaacatttttgcgggcctgaggtacagaatacaccatgcctgctgggcaagcgggctccggttccaggaaatc

SEQ ID NO: 403287 - DNA, 122 bp, Homo sapiens
gctgtgtgcatgtgcgcctaattatcaaagctggtggaaaagagcccatttatatctgtgcgcaaacttctccgagccaacactttgcaagttcagtattctagcgcaacgtagggacctgc

SEQ ID NO: 403288 - DNA, 122 bp, Homo sapiens
actgcttgttgcataatggtgctctagctctcattgccaagaaggaatcaaagaaatggacggtggttaatgtgggaaatcacaccagagagaaagaaacatgcagagagagacagagacag

SEQ ID NO: 403289 - DNA, 122 bp, Homo sapiens
aacaggctcggaaacatcgagtgatttgcccacgacacagtcattggcagagtctggattcgatcccaggtctgcagttccggagctcggagcccaggccctgcctccttgggcaggatgtg

SEQ ID NO: 403290 - DNA, 122 bp, Homo sapiens
acccagaggtcgatggatcgaaaccatcctctgctatcggagttttttcattgccctgtacggcatacgtaatctacgtttctttagtgaaggaaaatatcttgccaattttcctacctcaa

SEQ ID NO: 403291 - DNA, 122 bp, Homo sapiens
gcaccacagcatctggttaagagtggccccagccatgacctgctccaggcggacctggtccgcaatacgccgagggatggcgcgtttctccaccgctctccggagcagggtttctagccgta

SEQ ID NO: 403292 - DNA, 122 bp, Homo sapiens
tccgctccctcgggaggacgtccattcctctttgtttgggactgcctcagccgcagtcagcgaggctggtcacagacgcggcccaaaatgaatgcaaatagtttggataagaaaatcatttc

SEQ ID NO: 403293 - DNA, 122 bp, Homo sapiens
aaaaacaaaattattgtctttcttttccggccgatgggcttagctgtagcttactgaagtcgccaagcaggagagatttaaccagaggcgatgtgtccagtcaccagcatagagccatcctc

SEQ ID NO: 403294 - DNA, 122 bp, Homo sapiens
gagactactgtttttcccagctccgaattcccgaacaccttctcccactcactatcttagcgcttagaaagcccgaaataagccacattcagggaagtaccaaattaatcctcccaggcctg

SEQ ID NO: 403295 - DNA, 122 bp, Homo sapiens
ttattttaagctttattattactattttatttattttattttattttccttccacacacccgtttccaccctggagaggccagatgagccagactccagggaggcctagaagtgggcaaggg

SEQ ID NO: 403296 - DNA, 122 bp, Homo sapiens
agactctcactcctgtaagggtagcacccccctgctgctgagaggctctctctggagatgcggggagggaaggaagggaggagagagggggagaggagagaggaacccaagctctgggggat

SEQ ID NO: 403297 - DNA, 122 bp, Homo sapiens
atactatttaacctcttttcacccatggcaatctttaccgtagatgaagtcactgagccacgcacattctaacttgaaattaccatgagtgactctttaacttgaagttactcacctatgtt

SEQ ID NO: 403298 - DNA, 122 bp, Homo sapiens
tctgaattctgaccctctctgaaccttggtttcatcatctgtaaaatcattttgcccttacggattttgtgagaaaacaatgagacaaagtatataaagccctaatcaaagtaactgatgca

SEQ ID NO: 403299 - DNA, 122 bp, Homo sapiens
gacatgttggaggggagggagggagaggccaaggcctcagacaggtgagagagccccagccgcgaggcacctgtggtctcaccatgggacataagaacttgtttaagccatgacgttttggg

SEQ ID NO: 403300 - DNA, 122 bp, Homo sapiens
gtgcggtgaggtttgggtggcgtttgtgcaggcgttgggttttttgcccacttggcttcccgtaacccaggcagctggggagcctgggctgtggccctaggagggggcgcggcggcgggctc

SEQ ID NO: 403301 - DNA, 122 bp, Homo sapiens
gcaatatggggaccatgagaaagaacagtttgattttatgcatgatacacatgttccaaccgaatgcctctggtcccttttaatcgttaaatgcctctggggttttagcttattggaaggat

SEQ ID NO: 403302 - DNA, 122 bp, Homo sapiens
acagagccggggcggagcccaaggtgaaaccaatgagaagcctccgggtgggcggggcatcggcctaaggccaagggcggagccaatgagaagcagcgccgcgttcccgctgccccccgccc

SEQ ID NO: 403303 - DNA, 122 bp, Homo sapiens
acatctgggcaagtagacactgtggagactccagacacctcctcggggagccagggggttcggggggaagtcccaggccgtcgttgcagacgtttctcagcaggttcaggctcagcgccccc

SEQ ID NO: 403304 - DNA, 122 bp, Homo sapiens
tttggccagtattccactcccaactcctggactgcatgctgtaattctttgggacttgtacggggccctgactttgttctctgtttcctcagaattaggaatccgctgtgatgggcgggggg

SEQ ID NO: 403305 - DNA, 122 bp, Homo sapiens
tgccgattttgactaaagactgccaaataatctgctccacagaatgctttcagccacctacgcactcactagcagcaagaaggggttcccgtatctccattctttcctaacatgtaattttt

SEQ ID NO: 403306 - DNA, 122 bp, Homo sapiens
caggcatgattttccccttaaaattttcagtaagcctctctgaagagcatgggcgtttcccgcatgcctgcagcgcctgcacctgagtctgggctcagggaatgctcagggagcctgaggcc

SEQ ID NO: 403307 - DNA, 122 bp, Homo sapiens
aataggccaccatcttgatcttatacttcccagccaacaaaactgtgaaaaacaaatttacgttgtttttaagctacccaactatgatactttgtctacagtagtccaaactgactatttta

SEQ ID NO: 403308 - DNA, 122 bp, Homo sapiens
gctactgcgccccggacccccacacagtggcgagtccccgcagttcagaggaagccccgacggcctttggtagaacatgcaatattttccggaggggatgccctttacgctgggcctccagg

SEQ ID NO: 403309 - DNA, 122 bp, Homo sapiens
ccgccggaagcccgcaccgtgccccaccccatccggcaccagattaaggaaagaaggggccgtccggaaacaaggacatctcctttagatctgttaaggtgacaccagattttttttttttt

SEQ ID NO: 403310 - DNA, 122 bp, Homo sapiens
gcggggtctccaagccagtgccgcttgctcccggcccccacccactgacagcacggcgtccgagtgaccctgtctagcctcgttctgcgctcctgcaaaccacgttgctgcgctaactacaa

SEQ ID NO: 403311 - DNA, 122 bp, Homo sapiens
cttccagaacaaatctctaatccattcaggtgggttaatatctaacccaatcatgcccagcgaaaaggtgaatgaccctcctcgtttgttcaagagcagtgtccttggttttcatgtccctg

SEQ ID NO: 403312 - DNA, 122 bp, Homo sapiens
caagcatacaagtccagtctgttccaggcttaggaaggtggcaaccctcactctgcaaagcgtaatttacccactcagcttgaggattggagggagccaactgcataggcatagcgctgaac

SEQ ID NO: 403313 - DNA, 122 bp, Homo sapiens
cgccccacaaaagcaccgggaggcgactttggttctggtttattgcccctcagcaggcagcgggagtcaaggcctaggctggggctgcccggctcagccagcgggtctaaacagtgtgtgca

SEQ ID NO: 403314 - DNA, 122 bp, Homo sapiens
ccgagcccatcactgtgggctggggcctggatgtgcactccccagtgttgtgaacactctcggattccatgtgtccctgcacctcacagtttctggggccaagcgagtagtgggtttgaaag

SEQ ID NO: 403315 - DNA, 122 bp, Homo sapiens
ataaatagagcaaggctgggtgctcacctccacagcggcttccttgatccttgccacccgcgactgaacaccgacagcagcagcctcaccatgaagttgctgatggtcctcatgctggcggc

SEQ ID NO: 403316 - DNA, 122 bp, Homo sapiens
tttagagtccaggataaccatgaccctcctaatcagtccgggctacagcggtttgtgattcgtatccatcctgtggatcgcctccctccggagctgggcagtggctgtccccttcgtatggt

SEQ ID NO: 403317 - DNA, 122 bp, Homo sapiens
gagctgggaatctgcagagatgctctgttttctgctgtactaatctcaggcttcccaaagcgagtgcctcgcccagctcctaggggaatccacggagccccaggcgcagggcaaaggatggg

SEQ ID NO: 403318 - DNA, 122 bp, Homo sapiens
actgtatgcacacctgtgattctgcagttgacaaatattaaaagtcaatgtgatggatgtcgttgggccagtcgcctaccaacatcactctgctcaatttccttatctgccaaccatttctc

SEQ ID NO: 403319 - DNA, 122 bp, Homo sapiens
ctatatggatttacctattctggatatttcacataaatggagttaaacaatatgtgaatacgtatttcacataaatggaattaaacaaaataccaggtagggctgctattttctcaactaaa

SEQ ID NO: 403320 - DNA, 122 bp, Homo sapiens
ctggagcatcctgagccgggggctgagcataacgggctggaggggcctaatgatagtgggcgagagacccctcagcctgtgccagcccagtgaatgcgtgccccagcccagccagctaccca

SEQ ID NO: 403321 - DNA, 122 bp, Homo sapiens
cgctcccgcagggcaaggttttaggtacaaactcgtgagctggactcgcagtccggagttcgtaccccacagaactcttcgcagggagtgtcttactcgctacagccggaccctaagcgcat

SEQ ID NO: 403322 - DNA, 122 bp, Homo sapiens
cactttatagtctgattacaaaacgtgcaattcaggagcccagcagtgacacacttatcacgcctaggctccagtttgcaaaaattgcaccttataaactgtcagtattaggagcaatgaga

SEQ ID NO: 403323 - DNA, 122 bp, Homo sapiens
acatgaggcccgggatggccaggttgatggccgtctcgatgtgcgacgactcgaagagctcgtgcggccggcagtcgagcagcagcaaggacgcgccgccgcgcgcctccagctcctcctgc

SEQ ID NO: 403324 - DNA, 122 bp, Homo sapiens
ttgtcttcatcaggtctcgcatcatctggatttctttgtcagagagagatcaaggtaaaacgaaaaactcaagttcactgtttctgagcaatatgaacttgggtgtcagggaggcccttgta

SEQ ID NO: 403325 - DNA, 122 bp, Homo sapiens
ccgctctagcgttttacaggagagtgaagccaccgcgcggaagctccaggtccgcgccgtcgcagaagaatggcgtcacaacgactaagtagcgtaactctcgctcatagggctcagaggcg

SEQ ID NO: 403326 - DNA, 122 bp, Homo sapiens
cccagagcccaggccagcgctggagggaccctcctgccctctggccgggaccagggtgcccgccgcagccctgggaccctgcggccccggtccctattcgaggccccagccggagcgttccg

SEQ ID NO: 403327 - DNA, 122 bp, Homo sapiens
gcggtcgcatccacacactcgcacgacgatgacctgcttgcatcaaacctgcacacatcacgaacaggcgccctccatcacacccaattacgcgtgacctcaacagctctcacatcccgcag

SEQ ID NO: 403328 - DNA, 122 bp, Homo sapiens
gatgaacatctaggggatgggcccatcagacttggcccagcaattgtctcctccagaaagcgttcccttcctgggtgctctcccactagactgcaagttcctggggcaatgtatttaccttt

SEQ ID NO: 403329 - DNA, 122 bp, Homo sapiens
gggcgtggccctgatgagctggagggcccggactccaaacttcatcatggtcatgatccccggggtgggctacagccttcaggcccaccccagttccctccctaccgcggaatgatgccgcc

SEQ ID NO: 403330 - DNA, 122 bp, Homo sapiens
tgcaaaatattccattcattttccggtccaccaccaggcgtctgcttcttattctgcttccgtgtaagtttgtggtgcatggtccagtacttcattctatgactggttgacttgaaagccca

SEQ ID NO: 403331 - DNA, 122 bp, Homo sapiens
gcagactgcctgacttgccgcggccgggctggccccggggtccgcgcggctggaggcgcccgcctggtcggagattcccaatcctcggcgacccctgctccatgtgctggtggcggctagcg

SEQ ID NO: 403332 - DNA, 122 bp, Homo sapiens
tagtgcagccagcgagggaaggaggaggaggaggaggagggagggtgagatagaggcgctcggagataccctttctaggattcttgtgtttcacaatcatgtgattatttctgggctgcccc

SEQ ID NO: 403333 - DNA, 122 bp, Homo sapiens
cacggggctcgggccgcccgccgcccccgcgaagccagcccggctctgcgtgggtagcagcggctgggggcggcctcccagcctccaggccaaggcgcacccaccaggccacagcgcccgca

SEQ ID NO: 403334 - DNA, 122 bp, Homo sapiens
ccacgtcccctgtgcggccagcgtcagagccatggcgatggaggagaggaagcccgagaccgaggcaacgagagcacagccgaccccttcgtcatccaccactcagagcaagcctacgcccg

SEQ ID NO: 403335 - DNA, 122 bp, Homo sapiens
atggaaaatcagaagatacaaaagcatgtttggtaaaagactcttttttacctctatacccggttccccatttccacatgcctcaggcaatgttaatgttgattcatctaaactgttgaact

SEQ ID NO: 403336 - DNA, 122 bp, Homo sapiens
gatggctagggagaaggctgtgcctatcatgtccttccactgtgagaccacaggcgacaccggggtggggaacctgccgaggagccaggaaggaggcagaacccaagggtgtgagtggggag

SEQ ID NO: 403337 - DNA, 122 bp, Homo sapiens
gtaaagtaactctcccagtcacacggctagtgagcagcaggtctgggactccgcagcctccgctctttcctctcttggacacccatgctgattccctgcctctatgccacctcccaggcccc

SEQ ID NO: 403338 - DNA, 122 bp, Homo sapiens
cgggttctttccaagaaatcaggaaggtgactgtgcaggaggcaaaggacgcccagttaccgtttcctggagaaacacctttgctaatgcatttagggaggttgctaattgttagccatgtg

SEQ ID NO: 403339 - DNA, 122 bp, Homo sapiens
gggtttgtgtctattgctttttgcgcaggtgccgggagaggacttgttggcatatgctgacggtcgtctgcacacttgggctcttccatatctgctccagaagctggagcgtctccggcact

SEQ ID NO: 403340 - DNA, 122 bp, Homo sapiens
tcaccggtgtccgtcttcccagctccccgccatgtcgccaagtgaatccatcctgccgtccgtctccactttcaccagcccgtaccgcaagcgccgcctgcaggagcgctgaccctgcgccg

SEQ ID NO: 403341 - DNA, 122 bp, Homo sapiens
gactggctctagggaccgttcctcttcagggctgcccgcctcagaagggcctgtgcatgacgctgtgtgtgtgtttgggggtgggggcgggtagaggaggcgacgggtacgtgcagtataga

SEQ ID NO: 403342 - DNA, 122 bp, Homo sapiens
aggtcatcaggctaggtggtgacagagacaggattcaaacccaggactgcctgagtccaacgtggttgctgtctgttcttccaagtcgtctccttgtggctatcctggcagtgtctggctgg

SEQ ID NO: 403343 - DNA, 122 bp, Homo sapiens
agactcgtcgcctctggctgccagcagacaaggaacttcacactctacagctctccccaccgtcgccaacagcgccaaagtgccagctccgcacgccaaggtgcaagccaggagcgccgcgc

SEQ ID NO: 403344 - DNA, 122 bp, Homo sapiens
ggaacaacgcagcgtgtggacacagccccagggaagcttgactctgcctggtccccatggcgtgcggtggctcaccagccgcccccatcgctccatgaaatctgactacacctgtcccaaaa

SEQ ID NO: 403345 - DNA, 122 bp, Homo sapiens
ctgtgccatgttcgagacctgaggctggctcaagccggctgccttcaccgggagccacgccgtgcatggcagccttccctggacgagcgctcggtgttcacactgaactgtggggtcgacgg

SEQ ID NO: 403346 - DNA, 122 bp, Homo sapiens
cgtgttcaagtggtgccagaatgcaggagccggtgggcagccctgaggggttgccttggccgcagcctctgtgcacgctcttcctggtgtcctcttacccggtagctgtgcgcttgttcccg

SEQ ID NO: 403347 - DNA, 122 bp, Homo sapiens
ccgcggttccgggtaagggagccagcgtggggccgggcggcccggcaggcctggggtaggcgtggggcagcggaccctcccggggtgaggcgcagagcctggctggcccggccttttgttcc

SEQ ID NO: 403348 - DNA, 122 bp, Homo sapiens
agtgaatacattattcggctggagccaagcccccagggctagggcgggagcccgagagcgcgtggggtctgggctgcgggctggagctgggcccgcgtgtccccgggcaccgggaggggagg

SEQ ID NO: 403349 - DNA, 122 bp, Homo sapiens
ttgaatgaaaaatcaacctgggaatggttgatgagaaaatgatggaaaagaggaataaaacgaaacaaaaccacaggaacacgggtgcatgtgaatgtgcacagacaaagatacagggcgga

SEQ ID NO: 403350 - DNA, 122 bp, Homo sapiens
atttcagcaaacaaaagctgaggcttgtaaccaacagaagtaattgctatacagttatcacgagaagtacatgcccagcttccagggtaaccacattacttaataaacatatcaaatctctt

SEQ ID NO: 403351 - DNA, 122 bp, Homo sapiens
accatacatgctacgtgcacggaggccctggccagagatcacctgatgctgatagcaccacgattagctagaaacactctctctcttctcaaaaatcaagagaggtaaaaaatcaaaagatc

SEQ ID NO: 403352 - DNA, 122 bp, Homo sapiens
ccgctcctcccggccccgcccggcccagcccggcccggcccgcccgccgccacctcccggcgaccgggcagtagcagccgtaattggatcctcgctgcctcctcccagctccccgcccccaa

SEQ ID NO: 403353 - DNA, 122 bp, Homo sapiens
ctttccggcgcaaagtaaacgtaagcctaggccgccggaagcagcgggttgaagagagtgcgcatgggtgaggagggacgtagagcggaagagggggcggggcgggcaggagagaggcaggg

SEQ ID NO: 403354 - DNA, 122 bp, Homo sapiens
tgttttccaaggcagttgcacaaatacagtatacccataggggtggggcagttttcaccccgcaaatgtttggaaaatacatcctgtaggcttctgcttcctgctgcagatccatagggtat

SEQ ID NO: 403355 - DNA, 122 bp, Homo sapiens
gacagagctggagatggaaacccaaacctcagttgccagttttggggctttcagctctcccggggttggggatgggcagagtgggtggcctgcgccctgctttatgtgtaaccggtgtgact

SEQ ID NO: 403356 - DNA, 122 bp, Homo sapiens
ttcatgctgggtcagatcatatgaataagcaggactggctgtgcttctggaatctgatcacgccaactctggagggagatttttctggattccagcactgtggggccacctaccaagtggtc

SEQ ID NO: 403357 - DNA, 122 bp, Homo sapiens
tttcagttgaaaggttctgacacatgaaggctagctatttttcctgggtagcaggtggggcgaaagatgggaaaataagctgatggctaaagggtgaaatgaaaagagtttgcaaaataaag

SEQ ID NO: 403358 - DNA, 122 bp, Homo sapiens
cgtcccgcctcccagctgagcccgaagccaatcgggtcgtagatctgcacctttctatcccgccctcctgggtattgactaatcgtagaaacccccctgggatcccgccccctccacgggct

SEQ ID NO: 403359 - DNA, 122 bp, Homo sapiens
gggccggggcggggccgtgcggggctcaccggagatcagaggcccggacagcttcttgatcgccgcgccgttggcgctggcggccgcggtgccggccgcgggacgtcccgaaatccccgagt

SEQ ID NO: 403360 - DNA, 122 bp, Homo sapiens
gcacaaggcacaggcccttcacccctcagccagccaaagccttgagggctggtcaccccccgacgagctcagtcccctccaacggtgctgcccaatactgggcctcccacaccgcgtccctc

SEQ ID NO: 403361 - DNA, 122 bp, Homo sapiens
tcaccctatgccatatgacgtggccccagtctgtcccctccactgtgtgacaagggtgtgcgggggacgtgggtgagaggtttgctggggccggcccatctctgcccgcaccagaggagact

SEQ ID NO: 403362 - DNA, 122 bp, Homo sapiens
atgtcagtgttggtgcggctctcgtggggctcgctgtactctgtgtacttcagcagcacacggtccatgtccgtgctggcatactggaagaggcggttggcgctgttgaagatgatgagggc

SEQ ID NO: 403363 - DNA, 122 bp, Homo sapiens
agtccgcgggcggccagcggcccccgggccatgctctgaggaggttggagcaaagcccggcggcgcggctttatggggccccgcccaccacaggacacacccaccacatgacacgcccacag

SEQ ID NO: 403364 - DNA, 122 bp, Homo sapiens
gctggtcccccgaccgtgggacaggggctgggttgggacgcgggtccccactaggagccgcgggggaggggcagggccggagtccctaccctcgtaggggaggggctggttcgggacgcggc

SEQ ID NO: 403365 - DNA, 122 bp, Homo sapiens
ttccgtttttctccccgctcccctggctctcctatctcggccccgtaaccgctgtccgcacggtggcgccacatacgtactcgtcaccccttggccctccctgaagagctggtgaccttacc

SEQ ID NO: 403366 - DNA, 122 bp, Homo sapiens
aactgcctggcccgaaggaagggagcgagcggtccaggggaggcaccgtccaggagccagcgcccggggcccctccgcaggatcaaaggctgtccaagggcacggatgcctccccactccca

SEQ ID NO: 403367 - DNA, 122 bp, Homo sapiens
acgaaggaaggcagagggctgagccccagcgcggatcagccaaactcgacgggcccttgccggtcacccgtccctaaccctggttgggctgggaggggtcttctcgcaagtcttctcgcccg

SEQ ID NO: 403368 - DNA, 122 bp, Homo sapiens
actgtctccgaagcgcccacctgcgcgtgcgccccctcttcccggcacaggctagagatgcgcagaatcctaactacggccaccgtttcctgcctcaacgagccatgccctaaaagaaacaa

SEQ ID NO: 403369 - DNA, 122 bp, Homo sapiens
cggtttgctagttaccggaccagcttcagcgtggggagtgatgatgagctggggcccatccggaagaaagaggaggatcaggcatcccagggttataaaggggacaatgctgtcattccata

SEQ ID NO: 403370 - DNA, 122 bp, Homo sapiens
tgttcagagtgttagaagacaagaaaggaggtcaggctaactggagtagagcaatcaaaacggatggtgcctccaggtgtagtaagagacacaggctgaggctagctcatgcagggcctgat

SEQ ID NO: 403371 - DNA, 122 bp, Homo sapiens
cgtggattcatcgtaaggtttccaaccaagtggtttcttaaacgcacaaaccccacagaccgagatgggatctccccaggaccctcccgctgtcaccgaacaatccggggagacgcggggct

SEQ ID NO: 403372 - DNA, 122 bp, Homo sapiens
aactccgttgtttctgttttggttcattgttatattgccagcacctagcacagggcctgacgtatgaaggacaaataatttgttcaacgatccaatgaatggttttaggtggtaggactaga

SEQ ID NO: 403373 - DNA, 122 bp, Homo sapiens
ctcccttcccggcaccaggaggctgcactgcactttcaccagccctcagctgtctgctgccggcaactacccagctcctgccaaagtctaggagctgcgtgctgcctcccaccgtccctgct

SEQ ID NO: 403374 - DNA, 122 bp, Homo sapiens
tggtgaaaaatgtcaaggaggaaagaacaataatgattccatcatgataagaggaatgaacgtgtctgcaactaatgggagcaagatagtacactttaactctttcagacaacttgcattct

SEQ ID NO: 403375 - DNA, 122 bp, Homo sapiens
gccccgcctcgccctcattggccgcaggtgccaccgcccgccccgggaccgcccgccccgcggattggccgctggctccacctcggtccgccatgttcggacaccgccccccgcccccgccg

SEQ ID NO: 403376 - DNA, 122 bp, Homo sapiens
gcccagctgcccgagagccccggggaggcaaacagacgcggcccttgctcccggcgccctcggctctgagggacactccagaaatagaccgcacaaattattccggaaggcataaacaccag

SEQ ID NO: 403377 - DNA, 122 bp, Homo sapiens
agagctcagggcaagggacagcagtcccggccgcaccctcccagagtcccgggagcgcttcgctccctggcacggcccctccccagcgccttagcggctgagcccagcccgggagtgggacc

SEQ ID NO: 403378 - DNA, 122 bp, Homo sapiens
gagtgcttgctgtatgccaaacctgagttccagttccaaacaaggcaggctccatggccacgctctcagctcacacttcgggaaacagagtcaccagcgtctgaaaaaataggtccacccac

SEQ ID NO: 403379 - DNA, 122 bp, Homo sapiens
ttcccaggacttagactccaccaagtttttattgcctccgtagctgggtcctgtgctaggcgccctgggaaatcgaaatggaagacaagacttctcgatttcaggagggacactttcggccc

SEQ ID NO: 403380 - DNA, 122 bp, Homo sapiens
ggcagtacttccacaaaatgaagcactgtaattgcaacctgctttcaaaaacatttttaacgctggaagatagctaaaacaatgaaaatcattccattgggtcaattatctgggtcaagggt

SEQ ID NO: 403381 - DNA, 122 bp, Homo sapiens
ggttccttagacacccaccaggcacctgccacgtgccccactctgggccacgcagggcggcgcgtgggcacaaggaaggcctcgctgctcccctgctggaagttactggaaagcgcagcgct

SEQ ID NO: 403382 - DNA, 122 bp, Homo sapiens
tccgggctgtggctgactggagcctcggaggcacactcggtcgtcttggcctgcttctctcgcaaggatgtggaagcttccctgagtgtaggtctccccgtccacccagacgcctcctgcgc

SEQ ID NO: 403383 - DNA, 122 bp, Homo sapiens
atgtgctgagtcaaaccccgccgctgggctgggtctgcagccgggccgctgagcacaatccgctgtggttaatgattaatcgctgaccaccccgcctcccgcagctcgggagagggtgctct

SEQ ID NO: 403384 - DNA, 122 bp, Homo sapiens
tgagcagtttgtctagtaattcaacaaatatttattgagttcctactgtgtgttaccctgcggcaggtactgaaatatgcctcttttggaacttctgcattgttgcctttaggttcccagag

SEQ ID NO: 403385 - DNA, 122 bp, Homo sapiens
ctctggaacaggttgcctggttgccatgccaacccagggcctgtgtgaactcgggaaactcgcaggcaacacaaacgctgcgcgcgagtgcccgcccgctaggcgagcgcgcgccgccaggg

SEQ ID NO: 403386 - DNA, 122 bp, Homo sapiens
ggcaaagcatgcagaaacatctctagcagcagacagactctaagatggtcccagtgaccccgcctcctggtcttcttccctcatgtaataccttccccttgagtgtgggtggcccctataac

SEQ ID NO: 403387 - DNA, 122 bp, Homo sapiens
ccgcttcctgggttcacgcctttctcctgcctcagccttccaagtagctgggactataggcgccagccaccatgccgggctaatttgttgtatttttttagtagagactgggtttcaccatg

SEQ ID NO: 403388 - DNA, 122 bp, Homo sapiens
ttagtatttctagaaccactcctgttaaggttttgaatcgactgaaggaggaaaaccagccgctaaagagggactcaggagtctactttgtctaagtctggactggaacatgggataatttt

SEQ ID NO: 403389 - DNA, 122 bp, Homo sapiens
gccggccactctgagtgaggggcccgccgagcccacgcccaccgggaactcggctggccccgcaagcaccacgcagacctggttcccacccgcgcctctgcctccacacctccccgcaagct

SEQ ID NO: 403390 - DNA, 122 bp, Homo sapiens
cggctccaaaagtaggcttttgactccaggggaaatagcagactcgggtgatttgcccctcggaaaggtccagggaggctcctctgggtctcgggccgcttgcctaaaaccctaaaccccgc

SEQ ID NO: 403391 - DNA, 122 bp, Homo sapiens
agctcctgaagtaacaactagaagtttccaaaaggaagatgacagttttacctaagaaagcgttttctgactctttgagttttctgaacatgaagtggatgggggggtgccctgtccctgga

SEQ ID NO: 403392 - DNA, 122 bp, Homo sapiens
gaaggtgtgtacactggaggggctgggtgctggagaagctgcctgtgctgcaggagcctgcggagccagcatacaggctctaggaagcaaaatcccattttcttctgcagtgtctctctatc

SEQ ID NO: 403393 - DNA, 122 bp, Homo sapiens
tgccaagccaaacataaagccagcagtgcaaggtttgtatatatatcatgggatgctggccgtatgggtcacagcattctgacaggcaattcctgggcagttattttgacattagaaagtca

SEQ ID NO: 403394 - DNA, 122 bp, Homo sapiens
ccatatggagatttgtaaccccaagtgtttcccttctagaactgatgtgattgtgtgatccgcgcgaatcagagtctgcgggggcgagcttggttctggtcccgctacagcaggacggagct

SEQ ID NO: 403395 - DNA, 122 bp, Homo sapiens
agtgggcactcaataaatattctgagaataaatacatccacttatagtcaggttagcgcgcgcctgtattcccagctacttgggaggctgaggcaggaagataacttgggccccggagttcc

SEQ ID NO: 403396 - DNA, 122 bp, Homo sapiens
tattaatatttggtaaacaaatgttaaattagctactctgtgtggatcctgtagtgtggacgatggtggaaattgaattaaatttatgcagactcctgatgatgtcctaaacatactttaca

SEQ ID NO: 403397 - DNA, 122 bp, Homo sapiens
tggcctctgtgtgctgacaagaattcagtgtgctcctcagggcggggagtggggctagggcgctgagtcagccctgcaggagtccagctcccgcctgggcctagggccgccacctcccaggc

SEQ ID NO: 403398 - DNA, 122 bp, Homo sapiens
gaggcttgtccagagcatacaggggaaggatgtacggccaagggaggaatcccagacgaccgcgatacgtgacatatttatgtttgcacgaaaataaagtttggaagaaaagtgttggggga

SEQ ID NO: 403399 - DNA, 122 bp, Homo sapiens
cggcgggagcagcgcccttagcccaacttcccggctccagccccgctcgcgccgcgctgccggctcatgaatatttatacagcgcggactcggtctccgcccccagccccgcgagccaatcg

SEQ ID NO: 403400 - DNA, 122 bp, Homo sapiens
agctgaggggagttgagacaggtggttggtgtgtgcccacacacagtttcctcttctttccgggccccctccccaaactccctgaagctggatgtggccacatggcaggtccagagaatggg

SEQ ID NO: 403401 - DNA, 122 bp, Homo sapiens
tgagttgtgaagcttgaaacgatcattttacccctgaggcgcagtgtccttacctgcccacgggttcctgattcccacctgccaagtgggttgtgagggcagagaacatgtgccaaagagct

SEQ ID NO: 403402 - DNA, 122 bp, Homo sapiens
aaatgccattgcagcagcaaatcccagaacctgctcaatgtcattaagttcttcctacagcgatcgtctacacgcgtgggactaagtacttcgagggactggtttcttcatctgtctagtat

SEQ ID NO: 403403 - DNA, 122 bp, Homo sapiens
aacggagcctgtgagagtggaccgggatggccaaaacactcagtccacacaaacaatggccgcagcccggctggaccgaaacggaagtcccaggtcttggagtagacactcgcagtgtttcc

SEQ ID NO: 403404 - DNA, 122 bp, Homo sapiens
cctcacgaggtcaactgccgggctcaggttctcccccggagcctaggttccaccccgccccggccgtgcggcacagaactgcctctctgggcccctcaccgaacgctgcagctccccaagcc

SEQ ID NO: 403405 - DNA, 122 bp, Homo sapiens
tccttgcggcggcggtcacgggaccttgatcgggaacggggcccttctcgaactttgtcccgatcccattcacgctctgatcgagtccgctcccgccgctccatttcccgttcccgttctgc

SEQ ID NO: 403406 - DNA, 122 bp, Homo sapiens
tcaagtgatccacccacctcgaactcccaatgtgctagggatttcaggtgtgagccactgcgcctggcccttgtggatactttctaggtgatttgaggaggaaaggcacagccatgtctcct

SEQ ID NO: 403407 - DNA, 122 bp, Homo sapiens
gactaaacaactgtgggaaactggtcccagaaatctaacaaaatctggacggctgatcagcgcctagcgaatcactggagtggagtaaccagaacattcttttcaagcagtcactgggttcc

SEQ ID NO: 403408 - DNA, 122 bp, Homo sapiens
ggaggcccctgccctcgatacccctgcccactccggagagtaaggcacaacccgggaccccggggagaagctgagtcttccccagtggagccggacgaacccccagcccctggagagggcga

SEQ ID NO: 403409 - DNA, 122 bp, Homo sapiens
tgctgctgtagctgcttcgtccccaagatgtacccacactcttggggctgttgttcccatcgtcttagctatactagcttctctatttgattttcaagagaagtttgggacacttaaaacaa

SEQ ID NO: 403410 - DNA, 122 bp, Homo sapiens
cttcatggtctcaatgatcacatctgtcatttctcgacggccgagatgctgatggataatcgctactttctctcctggtgacttgccttctaaacaggctacagctgaggctagtgtcgtct

SEQ ID NO: 403411 - DNA, 122 bp, Homo sapiens
tatgcccagtgtggattcggatgtgccgtgtcagctcgtcagagcgggagaaccgccggtcgcagccttctgctgggcacgggtagggcctctcgtgcaccggcgtcttgctgggtctgttg

SEQ ID NO: 403412 - DNA, 122 bp, Homo sapiens
gttgaaaaaggagattacgcacatagaaaggcgttgaagtgcacggacaccacgctgagacgttcttgttggcctaatcaggaggaacgactagattattcaattcaaggttgtttaccagg

SEQ ID NO: 403413 - DNA, 122 bp, Homo sapiens
ctaccccgccgggctgtggcccatcgccccagtgcctggtagcctagttttctcgtttgtcgtttgttcacttatttattattattattattattttgactcgtaatgggtatgaggtgtaa

SEQ ID NO: 403414 - DNA, 122 bp, Homo sapiens
atgaatgaataagtaagtgaatgactaggttctcctcctgatgtgctggaatgcaatgcccgcagtcagggcaccctgggcaaggcggcataactggtggtgcacctccactcccttcccgc

SEQ ID NO: 403415 - DNA, 122 bp, Homo sapiens
tctacccttctgtgtccttcaaacacggtcatgtgtggggacgtgggccacaggactgaacggagagtctggtgtgtgcatctgcatgtgtatgtgaatgtgtgtgtgtgcacgtacatgtg

SEQ ID NO: 403416 - DNA, 122 bp, Homo sapiens
ggaagctgcctcccatctcaactccctgagagccacaggtgcctggaggagctgtgctgccggaaaaagccgggggcctgcatcaccacctcagagctgttcaggaagctggtcctgtccag

SEQ ID NO: 403417 - DNA, 122 bp, Homo sapiens
ttaataggttgtgccaaaaacagaagctctgagtatttaccagctaaaccccactaggtccgagagccactgagagtagcatctgtctcgggataaaatggggtgtttagttgaaatgcaga

SEQ ID NO: 403418 - DNA, 122 bp, Homo sapiens
ccaactgctggacgatcctaactgctccactgagtttatccacatcgaagtttccttctccgtggtccagaaggctgtatctcacctgaccagactgacctaaatcaggatcgtgggcttct

SEQ ID NO: 403419 - DNA, 122 bp, Homo sapiens
ccggcgccctctggcggtcagatggggaccgactgtcgagagagcagaagccgggaagcccgagaggcggcgctggccggggtccaggggaggggacggtggctggactagggtgatggtca

SEQ ID NO: 403420 - DNA, 122 bp, Homo sapiens
tctaggagggcctaacaaggcctcagcacacagcaaatccccacttatccttagtaaattcgggtgcctgagtttcaggaggctgcaggtaaattgagtctaaaaattcaaaggagcttaaa

SEQ ID NO: 403421 - DNA, 122 bp, Homo sapiens
gcgcagtggaaaattccccccacgctcatgagggcgagtgtgaagaaggcaggtgctgtccgcttcggattatggtcatagcttgcactcgcggctcccctgcctggtctctgggaccccca

SEQ ID NO: 403422 - DNA, 122 bp, Homo sapiens
tttagtatcttctacctacaacctacacaatcagtggaatcccatatcttgaagcctttccggctcaacccacacccctccgcccccagcatcacagtgctcagagcgccacacagcagtgc

SEQ ID NO: 403423 - DNA, 122 bp, Homo sapiens
actcggatctcagcctctcaggcgaacccgaacctggacgcgctacgatgagagcgagttcgagtccaggctccactggctgggtagaaaagcatccgaggctcgtctttctgaaaagggga

SEQ ID NO: 403424 - DNA, 122 bp, Homo sapiens
aaagaggagctgggagattcgccgttttcccccacaaccggcacctgccctggcccagagcgcagcgtccacctgtaccaccgctagatgaagagtacctcaccgcgcgctgcctgggcgca

SEQ ID NO: 403425 - DNA, 122 bp, Homo sapiens
ggagcgacggaaagcgggcgcctcaagctgcgtatgcagaaggtggggcgaaaccttctacgatcgcaggtgttttgtgaagccgcgccgctatagcggggctgaaacgctgctgaaagtag

SEQ ID NO: 403426 - DNA, 122 bp, Homo sapiens
taagatagcgagaaacagtacttttcaggtccttccatgatctacattcgtccttgttctcggaggacccagactctatggttaatgatgaagaggggcctctattcgttcagcgcttgcgc

SEQ ID NO: 403427 - DNA, 122 bp, Homo sapiens
cgacgaccccaccttcccctccctcggtgccgaggtgcaagaggcggttgaattcaggagcgcggcgcagggcgggcttttcccggctgtcccctaggggtccgccccctcctcccgcaccg

SEQ ID NO: 403428 - DNA, 122 bp, Homo sapiens
gcgcgtgcgcgcgctgtgacgttccctacgcggtcgggcgttgggtttcgcggcgctcgccgcactggttgttcagcaccttcggtccggttgaggttgtcaagtcggaccaaacaggttgt

SEQ ID NO: 403429 - DNA, 122 bp, Homo sapiens
aaactgaagaacttggagtccgatgtttgagggcaggaagcacccagcacgggagaacgacgtaggctgggaggctagacaagtctctccttttcacatttttctgcctgctttatattcac

SEQ ID NO: 403430 - DNA, 122 bp, Homo sapiens
acctattggctacgatcaagcgcgcagttaattttgataggtccaggagggtgtacgtcccggagaaatgattttgaatcccagtaccccccctacttttctttatgtagttggcgcgcttt

SEQ ID NO: 403431 - DNA, 122 bp, Homo sapiens
gctcggtgagggaggtctcgcttgggggcgtggtctcccccagtaggcggggcttggtgccgggggcggggtctggcgggcgcgggcgcgtgtgcgtgttgtgggcctcgcactggcacgca

SEQ ID NO: 403432 - DNA, 122 bp, Homo sapiens
ctggctcgggacgagcggcgtttccgggtggccgaccaggatggggactcgatggccactcgagaggagctgacagccttcctgcaccccgaggagttccctcacatgcgggacatcgtgat

SEQ ID NO: 403433 - DNA, 122 bp, Homo sapiens
gctcacacagctgctgagacttcagggacccatcagaacttggtgcagcacagccccgcccgtggagggtcccttttacgcaccccaaggcccacacctaagcttccatgtagccctcatcc

SEQ ID NO: 403434 - DNA, 122 bp, Homo sapiens
aggtgtttaggacagacctgatcactgccatgaagttgcatgactcctaccagctgaatccggatgagtactatgtgttggcagatccctggagacaggaatgggagaaaggggtccaggtg

SEQ ID NO: 403435 - DNA, 122 bp, Homo sapiens
gtaaataaaaagttactcagcatgcacttcaggcatgagtgaaggtctctaagttcacagcgtggaagggactgccgtctgggattccccagcatcaggagcagactgagacagtgatcagt

SEQ ID NO: 403436 - DNA, 122 bp, Homo sapiens
gcagcagggcctctgctcagcaagttccaaacaactgaccaccagtcaactgtttggggccgacgtcagaccccgcgggtccaaagcaggccccaggtcgctggggtgcagttctctgaggc

SEQ ID NO: 403437 - DNA, 122 bp, Homo sapiens
ggggcaaaatctgggggcgagggggacccgggcgctgaggccgctgcccgcctatggggacgcggctgggaccgtggcccggctgcgggtttcagtagcgacatttacgcagtgcatttggt

SEQ ID NO: 403438 - DNA, 122 bp, Homo sapiens
tggccaacatggcgaaaccccgcatctactaacgatacaaaagttagccaggcgtgggggcgtgtctgtagtcccagctactcaggaggtttagggagggagaattgcttgaacccaggaag

SEQ ID NO: 403439 - DNA, 122 bp, Homo sapiens
acgagccccttctcccggtactgcctcctgtacggccagggaagggagtcggcaaccgcacgcacagcctctgcctgagaccctgggagaggttctgggctagcagaggcgaactgggaggg

SEQ ID NO: 403440 - DNA, 122 bp, Homo sapiens
caatcacaataaatgtaccactctgaggtggaatattgatagtgaggaaagcggtgtatgcgtgaggtcgggtatgtgtgaggtatgagaactctctgtattttgcagtcagtcttgctgtg

SEQ ID NO: 403441 - DNA, 122 bp, Homo sapiens
tgggaagggagcaagacaggcacaatgacagacctggtgtctctctgcaatagtaaaccccgaggaacggaaaaataggagaaaataacccagcaccagacacagcagcccacgttaattgg

SEQ ID NO: 403442 - DNA, 122 bp, Homo sapiens
gaatgcgggtgcagctgtcccagcccctgctttccactcccttgggcctgtacccagaggcggaatttcaggatcacctggagattctgtttaacgttttggaagctgccatgctgttcccc

SEQ ID NO: 403443 - DNA, 122 bp, Homo sapiens
tgaactcctgggagaggtagggagccagcccgaggcgtgagtcaagagtgtaaagtacaccgagttccttggcaagcaggctcttcaaggggaaggtgtcactcggggaacaatgagaaatg

SEQ ID NO: 403444 - DNA, 122 bp, Homo sapiens
ggagcggtcagagtggactcattactcggaaagcccgagaaagttgtctgcagctgctctcggctgccagagcacatcagcatcagcctctgcccggggcccccggggccgggggccccgct

SEQ ID NO: 403445 - DNA, 122 bp, Homo sapiens
tggaactattttcccccaggctggtgttgaaggcaacctcctctgtctaaaaggccctgccgcggtttgatttttcttccagcacaatcccagcaggaaaagttctagtacttgcagcttgg

SEQ ID NO: 403446 - DNA, 122 bp, Homo sapiens
ttgttgttgttgttgggagacggagtctcactctgtcacccaggctgaagtgcagtggcgcgatctcggctcactgcagcctcctaggttcaagcgattcaagtagctggctacagatgtgc

SEQ ID NO: 403447 - DNA, 122 bp, Homo sapiens
gagggctggagctggtcctggcagccttgacccggagacaggcagtcaggcgtgaccgcacggacccgtttctcgtaggctaggttttcctacccaaataaagctttcacgtgaagacctca

SEQ ID NO: 403448 - DNA, 122 bp, Homo sapiens
gccacggccaccgtgctggtgtcgttggtggagagcggacaggcgccaaaggcctcttcccggactttggcgggcgccgcgagcccagaggctgcgctggtggatgtcaacgtgtacctgat

SEQ ID NO: 403449 - DNA, 122 bp, Homo sapiens
gaagaattaagtacaacagagatgaaccaaactggcaaatgaaccactgaccgcgcaccccgggaagacagcgtcggctacgcgtgaggcctgaacgtgacattgcccggccggcagcaccc

SEQ ID NO: 403450 - DNA, 122 bp, Homo sapiens
caccgggctataaaaaccggccgagcccctaaaggtgcggatgcttattatagatcgacgcgacaccagcgcccggtgccaggttctcccctgaggcttttcggagcgagctcctcaaatcg

SEQ ID NO: 403451 - DNA, 122 bp, Homo sapiens
ctttgtttggtgttcaaagtagagagcggtccattaactagctccctagagaagcagtggcggctcaggccagcccagcccctgggaaggctatctgcatggcggccgggagcccgggtcct

SEQ ID NO: 403452 - DNA, 122 bp, Homo sapiens
ttctgctctccttgcccctttgaagcttggtagcaggaagggtgagacttctgtaaactgcgctagactcattcatgcatccagggctggccggcgatccagctgcatgaaagagcttaata

SEQ ID NO: 403453 - DNA, 122 bp, Homo sapiens
ggtgccatacactttaaacaaccagatctggtaagaactcattcactataaagtaccaggcgggaatggggctaaacccattcatgagaactctacctccatgatccaatcacctcccacca

SEQ ID NO: 403454 - DNA, 122 bp, Homo sapiens
gctcccggactgtaccagacactgaatgtattcactgaatgcactatttcttgaaatgatcgtaaatcacctgattataacaactgttttaaaagtgttctctctctctctctcaggaatag

SEQ ID NO: 403455 - DNA, 122 bp, Homo sapiens
gttgttgtagtctagcgttggcgcagtgcctgatgggagttgtagtacgtcccgcgcacacgctccctcgaagagtttctgccccattcctggacgtcacagccggtccccagagcaggatt

SEQ ID NO: 403456 - DNA, 122 bp, Homo sapiens
acgcccaaccctccaccaccttctcaccggacaacattgggatgctcaaaagcctccagtcgcctcagtaaagccacctcacgaactgtgctgatgggaaggcctcctccacctcctcctcc

SEQ ID NO: 403457 - DNA, 122 bp, Homo sapiens
gccgcagctagccccgctggcggccgaggccggttgaagtgggcggagcggcgggcggggcgtcgccgtactaggcctgccccctgtccggccagcccctcgaagcacctactccacaggtc

SEQ ID NO: 403458 - DNA, 122 bp, Homo sapiens
gagaggcgtagggggttgtgatcaatgggtctgagtctctccaaaggcgcatttaataggcgaaggagaaaaacaccccacctggctggggccccgccattgctgacttcattggttgggga

SEQ ID NO: 403459 - DNA, 122 bp, Homo sapiens
tgaccagctgcagtcaataccagctatccgcgcttgcacacgccaactgttttgactacacgcacttgttaaacacggagtttcaggtcctaccagttggacaccagaagttcatagaactg

SEQ ID NO: 403460 - DNA, 122 bp, Homo sapiens
agcgctgtggtcgtggaaggagagagccacggcgaggagagggtggctccttccagggggcggtgcgctctgccgttccgcgtcatatcccttggcagtattgtaaacacaagtccactgta

SEQ ID NO: 403461 - DNA, 122 bp, Homo sapiens
agcctcaaaacttaattggatcatagcgacgtccgttggacagggtaatcagaggaactacgtttaggaaaggggccgagttcctgttgaaagtgcgtggcctgtctttgcctgtccttggg

SEQ ID NO: 403462 - DNA, 122 bp, Homo sapiens
gcagcaccaagcagcacgtggggggcagctacttctccagacagtggagagccaccagctcgtgcccgaggccttggctgacgtcacatcacttctgtctccagcactacagtcggagccca

SEQ ID NO: 403463 - DNA, 122 bp, Homo sapiens
gcctgggatgcctgagtcccagggggcaggcgcggtacgggagctgtttcttagggccagcgacagaaacggccctgggtcaacgggaaggcagactcgccccaccacagcgcccctctcag

SEQ ID NO: 403464 - DNA, 122 bp, Homo sapiens
ttttgctgtgacatactcatccattagacagcctgatacaggcctgtagcctcttccggccgtgtgtgctggggaagccccaggaaacgcacatgcccacacagggagccaagtcgtagcat

SEQ ID NO: 403465 - DNA, 122 bp, Homo sapiens
ccggaaatacgcagtccggagggcggggctggcctaggattgacgagctctgggcctgcgcgtcggagcccggggaggtcggctcgtctcatcggggttcgccgcaggcttccttccctgcg

SEQ ID NO: 403466 - DNA, 122 bp, Homo sapiens
agccagatggaagagatgcatagggcaaggtgtgggtggagggtcatggaacttctgtgccgtcttcagcatgctgccctcccagcaccaacctgggaactgcctgaaccccatcattcagg

SEQ ID NO: 403467 - DNA, 122 bp, Homo sapiens
gaagctactgttgagctgcttcggatcctttagaatcagttgttggcactgtcttccctccgacttcagctcctccagtattacccgaaatcctttcaggaattcgatgcctaagcaaagca

SEQ ID NO: 403468 - DNA, 122 bp, Homo sapiens
tttattaagagagtacagcggtgaaagaacagctactccgtagacgcagtaggatgttcccgacagcaagaggaggaacgcgtccaccctaggtacaatgcttgcttaagtataggataaaa

SEQ ID NO: 403469 - DNA, 122 bp, Homo sapiens
ttctttatgtgattggcaggctcccaggaaaaagtgtcctccccttttcagacatgtacacggtgggctccatgggaacttctgtagggagaaggagggattacctaaattaagcccgcagt

SEQ ID NO: 403470 - DNA, 122 bp, Homo sapiens
ggaaaaatgacgcagcaccgcagcccaaacgcccccccacggcggccacctctgctcctccgaggaaccccgtgtgctgctgggaaaacaaggagcaggagaaaaaggacagaaggaaaatg

SEQ ID NO: 403471 - DNA, 122 bp, Homo sapiens
cagtccgcctctgtgcgcaggtgtatgttagtgcactcgtccctagcttgccttcctcttcgaaaattgctccagaggatgagagaagccaggagctctagcaagagcttcatcccagtaca

SEQ ID NO: 403472 - DNA, 122 bp, Homo sapiens
tatatgaaaagacatttaggccatagggtgggcgcggcgggtacccgggaggtgaacccccgccgtggcgggtttgggagggacagattgttcccgggggctggtgcattagaaagcgcgct

SEQ ID NO: 403473 - DNA, 122 bp, Homo sapiens
cttcgacccggaagtttacctggacaagctgcctagagagtgccctctggcccagctgatcgacagtgagacggacatggtgcagcagatccgggctctagacagcgacatgcaaaccctgg

SEQ ID NO: 403474 - DNA, 122 bp, Homo sapiens
ggggaggccgcggtgcccagggtgggaagttcgatttcagacgctgcctttgtgctggctcgcggcagcagcggccgggtccctctccgctcctcacccttggctgcctggcggggcttgaa

SEQ ID NO: 403475 - DNA, 122 bp, Homo sapiens
tccctggccccacgggcctccacactcctcacatacagaatgggctgtgggtcctcagcccgtccggaccctccgctcctttcctgctacctccgtgcgcagcaggccttgtggggtgtggt

SEQ ID NO: 403476 - DNA, 122 bp, Homo sapiens
gtagcggtcagcccggctgcagggccctcagagcggggctgcgtgtgactgtgggcagcccgagtcctctccgcgcctcggatttcagggacatagaacggggtcccatccgtggacccacc

SEQ ID NO: 403477 - DNA, 122 bp, Homo sapiens
gcgtgtgtgtgagtgtgtgttgagaaggaattaatccaaaaatatagatgaagaaagctgcgactctgatgtgaagccgagttgcataatcagttctgaaggcagagaaaaggtaatagatg

SEQ ID NO: 403478 - DNA, 122 bp, Homo sapiens
agactcccctcatccccagttgtgtgcagatcttgaacctaccttcactttttttttaagcgggactttacagagcccatctacctaggacagaagccttgaaatcctgcctgacccaacct

SEQ ID NO: 403479 - DNA, 122 bp, Homo sapiens
cacctgcctcaagagatgtgataagtgtgatggaaaagccttctggcatggcacagtcctcgtacaactcactgactgaatgatagatgtagttggagatttcaatagaggaaataatgttt

SEQ ID NO: 403480 - DNA, 122 bp, Homo sapiens
tccgagggaggctgtgggaggaggccaagctggcaggctcgggttctttgcccttgctagcgcccaggtcagagggaaaaggaatgtactcgtacccttccctcaccaccttgtaggtcccc

SEQ ID NO: 403481 - DNA, 122 bp, Homo sapiens
tggatctggggcgcctgtggtttcggacccttaggagctctgagaactggtgtgtgtggtcggaagccatctgagtctccctgtgatttggactttttaagaaacttctaagttgtattact

SEQ ID NO: 403482 - DNA, 122 bp, Homo sapiens
acaaggaggagcagggagcagttcagagccagaagcggttctgcacagctctgcacagctcggcgggaagagctggctcgaacagggctctggctaggtagacagagggtctgagtctatgc

SEQ ID NO: 403483 - DNA, 122 bp, Homo sapiens
ttgttcatggtctcagttctgccgctgatacccttttaaaaatcagcaaccaaacgcgttcggcttgtgatcctgaaccctccttaggcaagctggaactaagcgtgatgcagccgtcctcc

SEQ ID NO: 403484 - DNA, 122 bp, Homo sapiens
ggggaggtgcggtgaccacgtgacctccgctgagctttcgccagtgcctgcggccctcggcggcctagtacacacgcacctgagtgagtggcaccagaggaccctctccatgtttagggacc

SEQ ID NO: 403485 - DNA, 122 bp, Homo sapiens
gggggatggtcaggcttctgcagagatggggaggatcctttcctggtaaggggagagggacgggctaggagccaagcggaaggaccccgtgttcaaggcccttcaagggacgggacaggcga

SEQ ID NO: 403486 - DNA, 122 bp, Homo sapiens
cctcctgagaggatcgcccagcacccgcggcgccttcggctttggccgcccggcagccgccgaacttgaacgcttttctgaagagagttttccccgctcatcttggggttaaaacctcgaaa

SEQ ID NO: 403487 - DNA, 122 bp, Homo sapiens
gaaaaactgaataagcagcattaaccgcgggcagaaacagaacagaaaccactaccttggcggccgcccgcccccgggcgtcgcctacgtcataacactgcgcggccgcccctcgcgcacca

SEQ ID NO: 403488 - DNA, 122 bp, Homo sapiens
ggaggagggatggtgttgcccttatagctagcaccttttactccgtggaacctgagtcaccggggctgatgagaatgggctctttccagaagcaagtgcatgatgaagaaagaacagaggga

SEQ ID NO: 403489 - DNA, 122 bp, Homo sapiens
caatttcctcatatctcttctggctgtagggtggctcagtggaatccattttgttaacaccgacaattagttgtttcacacccagtgtgtaagccaaaagggcatgctcctaggtttgtcca

SEQ ID NO: 403490 - DNA, 122 bp, Homo sapiens
cctgggcttccagaagtcggatggggctaaacgtggagagcaacaagcagggagacgcgacgaataccaggccgagggatctccaaacgcagccaactcctcccggggacacagaccccgcg

SEQ ID NO: 403491 - DNA, 122 bp, Homo sapiens
gaatctttgagtatcagttatttagatgacagaagtactttcagtccgtaaatcttggcccgttatgatagacactgattactgcaataagaattcattccctgacatatcctacttgcaca

SEQ ID NO: 403492 - DNA, 122 bp, Homo sapiens
atatatcaaagcctataccaaaaacttgtcttgagattatttctttgcatagaagtcagacgggaggagtctaattccctttgtaccatcccaggtccacttctcatctgtggccctcagcc

SEQ ID NO: 403493 - DNA, 122 bp, Homo sapiens
ttcggtctgcgcaggagcagggcccctccacaaagggagccttgtgtggccaggccggagcggccgcgcccaagaggtgaggaaatcctgttcccccaggcccagcttctctttccccacgg

SEQ ID NO: 403494 - DNA, 122 bp, Homo sapiens
tctcccagagggaggagccaagatggccgaacaggaatagctcccgtatacagctcccagcgtaagcgacgcagaagatgggtgatttctgcatttccatctgaggtaccgagttcatctca

SEQ ID NO: 403495 - DNA, 122 bp, Homo sapiens
tccctgcgcaagtgcgaggctgccggcagcgcggcgcacgctccggccgttcccggcttccgcgcaaaacttccatcctgtccacgtgaagttgtcgctgccttagagagggggaaagagct

SEQ ID NO: 403496 - DNA, 122 bp, Homo sapiens
ttgtaatacccatagtagcctctgaaacgctccagcagtgccggtcggggtaagatcccgcgtcggtacccagcttggcagctcctctggtttgacatctgtgtgttttctcccattccctg

SEQ ID NO: 403497 - DNA, 122 bp, Homo sapiens
tgcctccatgagaagcaggtttcgtgtgtaactatccagccagccacctacctgttacagcggtgaagccagctgggcatctgctctgcactctgctgggtgctgggtgcagagctgacgtg

SEQ ID NO: 403498 - DNA, 122 bp, Homo sapiens
gctgggaaacgttggccttctgtcccatatttgcaccttgcgtctttttgtgccttattccgctgtccgggatgccgttgagacgcctgccttgctctggagctggcctggtgtgcggcctc

SEQ ID NO: 403499 - DNA, 122 bp, Homo sapiens
ggggagcccgggggagggcgggataggttaagcggcagattaatgcatctctactcagaccgagggaagcagaagtggggagggggcgggaggagggtgcctggtctccgatgcatccaatg

SEQ ID NO: 403500 - DNA, 122 bp, Homo sapiens
taaatactcctgcatgttctcacaacacatcttaccgtggcaagtccacagcgactttcccggattgtggcacagcagccaattagcccaatgatgaaaagcagggctcctacagctatgat

SEQ ID NO: 403501 - DNA, 122 bp, Homo sapiens
cacgcccaattcgcaggggcgacgggagtgaatccagcctgggtcctgcccggccgatggcgctgttcctccgcccccttccctcagcccattttctcctcatcaggcaacagaaatgtctg

SEQ ID NO: 403502 - DNA, 122 bp, Homo sapiens
tattctgctccaaaagcacagcagaggacggctccttactcgaggaatgcgggcggcggtcgtccagagccgatgatgaaacgggctatttctgccccgggacatcagcagggctctgggct

SEQ ID NO: 403503 - DNA, 122 bp, Homo sapiens
gtccctacctgcccaatcagcgcggcccgggggtgggcccggggggatggtgcaaggggccgcgcacgcgactcttgggcctgcgccccggcgcaccgtccccgctgccagccacgctggag

SEQ ID NO: 403504 - DNA, 122 bp, Homo sapiens
gtctggtacagggcctcggcctcggccttgctcttccgggcgatctcctcatactgggcacggacctcagcaatgatgctgtccaggtccaggttccggttgttgtccatggacaggatgat

SEQ ID NO: 403505 - DNA, 122 bp, Homo sapiens
catccgtctccgtggttcttttttaaccacaaataatttttttctaactgaagttcacttcggttttataagtcttagaaaaaaaaaaaagatagctcacttttgtttttttactttaagag

SEQ ID NO: 403506 - DNA, 122 bp, Homo sapiens
tgcgtccagcccctttcttcaaattcttacgacaccttttccagtgtcctatagcacaggcgttgctgtgtttctctttggcgtgtttggaactgcgtatctgttctgcagtgtccctctcc

SEQ ID NO: 403507 - DNA, 122 bp, Homo sapiens
gatccaggcatgagtattttaaagcttctcaggtgattccaatgtgcagccagaccctgtcgcaagttcaccacagcactagaggcaggtaacgattactagcagattcctcagccccaaca

SEQ ID NO: 403508 - DNA, 122 bp, Homo sapiens
cacatcaggcacggcgcttgattgacatgagggcccgcccaatcccagtgcggcagagaccgttgtcgcgtcagggaccggggaagggggcgactgaacctatcagattgggtccagagtgg

SEQ ID NO: 403509 - DNA, 122 bp, Homo sapiens
gatgcagctgtatcagtgaggaacgttttctgccacaaataacagaaaatctatcagtagcgttaaataagtagggattgtttaaaaaaaaaagctgtaatatgttatctgggggtggatga

SEQ ID NO: 403510 - DNA, 122 bp, Homo sapiens
ctttaaacactcttacatctcagctgaaaaacgtcgagcacgccaggtaaacctgatggacgaattcccacaagttcgcggcttgttaaccacagccacctgagggcacgaaacccggctgc

SEQ ID NO: 403511 - DNA, 122 bp, Homo sapiens
ttgcactgggtcttgaagaacacaggcatgttagagacacatggagaaaagggacagcagcgagtagagagagaggaaaagaagtcacggaactgagacatgccacacatcagtggaagaca

SEQ ID NO: 403512 - DNA, 122 bp, Homo sapiens
gcattcatcttctcttcgtcagtttattctttgacaccctgaaatcgcatctccctgccccgtattgctattaatattataaccaccaaagacctcttatctgtactcttcatttgaacacc

SEQ ID NO: 403513 - DNA, 122 bp, Homo sapiens
attcccagtagctcctgcccctcccagagttgacaggtgggaagtagcttctctggactgcgggaatcaagttctgtcggagagttccatctccaggctcaaactcagtttggtctgcctat

SEQ ID NO: 403514 - DNA, 122 bp, Homo sapiens
ggctattaagcatctgggtggacctgcagcccctcctcaccctcggacagagtaaattcacgccatgcaggtttgccggacgagtccgagtggcccaggcattgtactaggacggacgtagc

SEQ ID NO: 403515 - DNA, 122 bp, Homo sapiens
cttactgaggactatagactgaggcccatagcccaggaggagtctttcagagaggtctgtcggactcctctaaagcagtgtttcagcccattggtaggtaggtggtggaggttaagtatatg

SEQ ID NO: 403516 - DNA, 122 bp, Homo sapiens
ccataagattggccagctcaaagttcactttcaatccctttctccctttcttggctctaacgtggaggaaataaaggaaaagacttcccggcttccttgcagctatgggtagttatgcaaca

SEQ ID NO: 403517 - DNA, 122 bp, Homo sapiens
gcctgccagtgggtccttgggcgtcactccagccccttgctgaattctgttgctgggatgcgcggcgttcctgtaaggaaacttttcaatctcctgtcgatcagcagcctgtggagtgagct

SEQ ID NO: 403518 - DNA, 122 bp, Homo sapiens
gagcagggaagcgggagcagggaggcgcagtgggcaggcgccgggctctcctatgccctgcggggaagtggaaggcgccgggaggagcgggggcggggtgcagggacggtggaactgaggaa

SEQ ID NO: 403519 - DNA, 122 bp, Homo sapiens
aggtagggaggcgccccgcccccctgtcaacagaagccccgccccagactgcggaagctccgccccctgtcaggagacgccccgccttcccagggctcgaaatggccccgccctttgcctgc

SEQ ID NO: 403520 - DNA, 122 bp, Homo sapiens
ggacttttaattgatgttttgctggcagactccacaggagctgagtttagtgtacttttccgactgtgcttgtctagtttcctaggattctgaagtagctcatggctgtttccctctgttcc

SEQ ID NO: 403521 - DNA, 122 bp, Homo sapiens
agcagcctgcccaaggttcctcagacagtaaatggcacagttgagactgcctgggtgcagcgtctgcgtcaccccgcaagggtgggcttgccaacagtgtgttcagttgaaggggtcttggt

SEQ ID NO: 403522 - DNA, 122 bp, Homo sapiens
ggagggcatgcacctgacatagagaaatttacacccttggcgtaatcctggaggtaacggcgcttccagagtcacatagtccctaaagtgacactagagggcgcagtatggacatagctgtg

SEQ ID NO: 403523 - DNA, 122 bp, Homo sapiens
gcaaccggggcgtggccaggtgggggcgtggccagtgggagcggcaggtggggcggggctcgtcggtcggggcggagccaggtgaaggcggggccagttaggggcgtggctagtgtgcgcgg

SEQ ID NO: 403524 - DNA, 122 bp, Homo sapiens
aacaatgcacgccttaaaggcgggaggctggcctggcgcaggctgaggaacactgatgaacgacctcctgcaaaggattgtccccagaggacagggctagggggaagcaggacggcgcagcg

SEQ ID NO: 403525 - DNA, 122 bp, Homo sapiens
gcgcatgcccagtgcccgcgcgcgccgccaggctcgcaagcaccgcgtaggccagctggccggatcccgccgtctgtcatggcggcccccatcctgaaaggtgaggtacttcctgctgcctg

SEQ ID NO: 403526 - DNA, 122 bp, Homo sapiens
gacggtcagggctttaagtacctttgcccacgtcagctcctggtcacgtgagggctgcatcgccagtaagcttgggtccccaatttccactcccaccaagagtacgagccccctcctttact

SEQ ID NO: 403527 - DNA, 122 bp, Homo sapiens
gacagcaggcatgagccttgaatccaccgctcagggtaagaagccagtcccaaagcaccacgtgtcatccaaggtcatttacaggaaacgctcagaacccacaaatccacagagccagaaga

SEQ ID NO: 403528 - DNA, 122 bp, Homo sapiens
cacactcacacgtggagggcaaggtccaccagcacatccactatcagtgctagacggcaccgtatctgcagtgggcacgggggggccggccagacaggcagactgggaggatggaggacgga

SEQ ID NO: 403529 - DNA, 122 bp, Homo sapiens
gccaaggcgcgccccgccgaggccccaccgccccggcccccgcccgcccgcgcgcgcgcgcgcctcgcgaccctcccggccctccccgcccgtgctcccggcactcactgaacatcccaggc

SEQ ID NO: 403530 - DNA, 122 bp, Homo sapiens
cttcagattaccatctgattaaaaatggctgctacagctcagatatcacattaaagttcccggtcaaaaaaaccagaaagggtgaaagtataaaattggtgcctctgcctgctgattcatgt

SEQ ID NO: 403531 - DNA, 122 bp, Homo sapiens
ttttgccaactggggcaactgaaaacatcctaccgactctctacagctagcaaaccatctcggctaaaatcctggcacatataaacagccactttggtgaagtctgcctttaaacagcaaca

SEQ ID NO: 403532 - DNA, 122 bp, Homo sapiens
ggggagactacagcaacggggcatctaggcctattgttcagagggaaccgcaggaccaggcgagcgccgcggggcgcgcgggagctgggggaggagaggcgcgaaccccgtacagttgtgtg

SEQ ID NO: 403533 - DNA, 122 bp, Homo sapiens
ccatgccgcttcgccagcacttgccaggcgttccgtggggcagcatctcctctgaagggccgccgacagtaccacgccaatggaacggcgtaccctcctccactgcagcctgcctaaccccg

SEQ ID NO: 403534 - DNA, 122 bp, Homo sapiens
tggagagggcgagggaagaggctactgggtcctgaatggtgaggacttgtaaaagggcagcggctaatagaataaatgcttcaaccagcattaggattaggggtgggtgcacacagtggatg

SEQ ID NO: 403535 - DNA, 122 bp, Homo sapiens
ggtctgcccccctcccccaagtggtgcgcgggaagaagaggggagaaacataaacgtgtgcgcctctgaatgggtgtgcgttagtgtcagcacgtgtgtgtctgtgtgcctgcgtgtgtcag

SEQ ID NO: 403536 - DNA, 122 bp, Homo sapiens
cgccccacgcggtcactgcgtctaatgtttgcttgtctattgtctgtaaccctcctttcccgacggacgggccaggctggagccaccggccgcgcctgcagctcagtgggcgccccaggtcc

SEQ ID NO: 403537 - DNA, 122 bp, Homo sapiens
agattgaacgaagactcaggaggccctgtgggctccattattctgcatgccctgcgagaacggcccacccctagggacggctgctgcaactcgagccccacttgctgccaggaaacctttcc

SEQ ID NO: 403538 - DNA, 122 bp, Homo sapiens
cagactactgaccgagacactactttcggcatgattcccaagagcaatctgaaaactctacgccaagaagagggtcgccccgaaatgacgtcacgagtgcgccttgcaccttttccttgtgg

SEQ ID NO: 403539 - DNA, 122 bp, Homo sapiens
ctggttccttactagtccctttttaaaaccaaagcattaattgttgtcaacggtagctaccgacttgccaacgtttacaaatacctgtagagagaggttttgtctagcaatctggatttctg

SEQ ID NO: 403540 - DNA, 122 bp, Homo sapiens
tcggtgggcgcatcagcttggtggccctggccccctgcgcctcaggggtccctcacaggccggccagcttccagcaccctccctaagtcctcggccccttggaggctgccatggcacctgaa

SEQ ID NO: 403541 - DNA, 122 bp, Homo sapiens
cagtcctgtcaccgcactgagagaggctgtaaacggcacatgctctacggggagaggccgcgggcgccccggcccggaccccgaaaacaagacacatcaccaccctcagagttccattccct

SEQ ID NO: 403542 - DNA, 122 bp, Homo sapiens
aagacacacgagtccgcgctcataccttgtgtgccaggcggtcctgcacctcacactccacgtccagcacctcactctccgctgacaggtccgtaaggacatcctgtaaaaagggcgttgca

SEQ ID NO: 403543 - DNA, 122 bp, Homo sapiens
gaggggaaggcgcgaggtttccgggaaagcagcaccgccccttggcccccaggtggctagcgctataaaggatcacgcgccccagtcgacgctgagctcctctgctactcagagttgcaacc

SEQ ID NO: 403544 - DNA, 122 bp, Homo sapiens
acaaagccttgccagtccataattaatagtggtagtgggtgatagcagagcaagcacatccgtatcacagaatccccacctgggggtggaagcttacacgtttgggtctcagctatgaaaca

SEQ ID NO: 403545 - DNA, 122 bp, Homo sapiens
aagcctgcttctgtaaaacctaaagctagaaatttgtgtgtccctgaaaaatggtgaaagcgaacagtgccgagggttgccctggatgcaacagtgtggaccctgtcctgaccctggggctg

SEQ ID NO: 403546 - DNA, 122 bp, Homo sapiens
cgccagcttggtggccaaggtctgtgttgggggccactctctatccccccgactacaggtcgggagctgctggtgatggaaccaggggctgagtatgcagtgctggccacatactaggagaa

SEQ ID NO: 403547 - DNA, 122 bp, Homo sapiens
cggtgcaagccctgaggtgggtggatgggagtccagggccacagctctgcagcggacaggcgagtcctgtggcggctctaggaaggtctgggcacactgggaccagctagctggacctgggt

SEQ ID NO: 403548 - DNA, 122 bp, Homo sapiens
gtttcaattcttaaaataagaagcatatatgtgaaggctggggaaatccatcagttattccgagggtggttgaattattgctgattttcttcagtagtttcaatgtatgtacatacaacttc

SEQ ID NO: 403549 - DNA, 122 bp, Homo sapiens
ttcccaagaagcggggacagggaaggaagtgtgtgatgactccccagcacagcccaagcacggccaaccctagatgacaggggcaacacagcagggcctttgtccgcttctctatcccaagt

SEQ ID NO: 403550 - DNA, 122 bp, Homo sapiens
agaagataatcccctcttccttcccataggtcccttaccttacctgcttcttccctctcgcgggtaggaactttgagccccgcctctcggctcgtccaagctccgccttccccgtccacctg

SEQ ID NO: 403551 - DNA, 122 bp, Homo sapiens
ttcagacggaatcggccaggggggctgccctgttgccgctggaggtgggtccagatgtgccggaaccccggctgctcacccttgcagttttacgcttttactgtttctttttatgctctcat

SEQ ID NO: 403552 - DNA, 122 bp, Homo sapiens
cgaaagggtggcttctcctcccggctgctgaaaaaccacacaggcaggcacaacaacagacgcttacgcccgcatctggaggccagaactccaaagccacagggcaggcagggctgcacccc

SEQ ID NO: 403553 - DNA, 122 bp, Homo sapiens
caggatcggggccaagactggaagagttcaggtttgggagtcgtgtgtataacagccccgcgcctccacgcccaggcctgtgtggctttggacaagttatataaccaccgccgccaccccag

SEQ ID NO: 403554 - DNA, 122 bp, Homo sapiens
cgtgagctgctgcatccggcctgcctgggcatctttgcatcctttggtccgcaggagctacggagggttccggaggaggagacggtttaggaggcggtggaacaggagtggtggggaggatg

SEQ ID NO: 403555 - DNA, 122 bp, Homo sapiens
tcagacagagcgagagggaccccaccacacagggtcaccatatccaagaaaatcatccctcgactcatgagggaaacaggcccagaaaaaggatggaacccagctgaaggcacacagcaggc

SEQ ID NO: 403556 - DNA, 122 bp, Homo sapiens
aagggcaggtgggcatttctggagcaatactgtcatcaagaggaactggcttggcaatcccgcgcacccttcgctgtgctcgcctggggaggagtggcttgggactgtcctgggggaccagg

SEQ ID NO: 403557 - DNA, 122 bp, Homo sapiens
gagcccagtgggagtccgagatacaagtgttgatgttttgcagggatctgaacacagaagcggactccgaggaatcgagagtgtcgttcaccctcagagacaggcagggttatttttctggg

SEQ ID NO: 403558 - DNA, 122 bp, Homo sapiens
agggggggcgggaggagagagcgaagtcaagtctccagggccgctggcgacttcggaagccgcgcgcccggcgctctcggccgcccccggccgctcgcccccgccgcgccgccgccctcgcc

SEQ ID NO: 403559 - DNA, 122 bp, Homo sapiens
tccccctggcttcacgttgtggagtcgaaaggaaccttgaagcggagaatgagctcgtgacgtggacccgaggaaaaaacctgccaaccaggatttaatagaattcagctctttcaggcttt

SEQ ID NO: 403560 - DNA, 122 bp, Homo sapiens
ccctctgagattgctgaaatctaaaggaataaaaatttcgtttcctctataaactattctcggggcctcttgtccacttcccagatgcagttacaagggaatcacttttctggatagccaat

SEQ ID NO: 403561 - DNA, 122 bp, Homo sapiens
atttctgctcttagaaaggatttaaaataagtggtcttcagtagttccacagcggatcttcgagactggtacagatggggtctcctggatgtaacgagttcttgctgctttaactggatccg

SEQ ID NO: 403562 - DNA, 122 bp, Homo sapiens
cgggagctgcccgcaggccctgggccggctgtctcgctgcgatgctctgctggtcgcggacggaccctgcctccccagcttatcccaggccagaggctgcatgccactgtccccggcagcgc

SEQ ID NO: 403563 - DNA, 122 bp, Homo sapiens
gctgctgaccccagggtactccagcttcagatgggacctctgggggtggcttaggggcctcgaggaggcccggcagctcagctgttggctggggtcaggatccgcacaggggcaggtcccag

SEQ ID NO: 403564 - DNA, 122 bp, Homo sapiens
acaatagtgttccatacttaaatacagcacagcaagcttttctccagcattgtgttggatcgctgtttctttggttgaacacagatgatgttgggttatatttaggggccacatagtttgaa

SEQ ID NO: 403565 - DNA, 122 bp, Homo sapiens
cactggaagagaaagtgactccaggtagaattcctcagggagacattcacttccatcattcgctgaaccaggagctttggacagcctcggattgcacccgcatatccaaggacaccacatca

SEQ ID NO: 403566 - DNA, 122 bp, Homo sapiens
tcactggttctgcagagatgggttatttctctatgaaccaattgcttctgtcccctaagccgagtttctggtcacctcccccactgacttgcagtttggtttaggtttgtagttttgcatta

SEQ ID NO: 403567 - DNA, 122 bp, Homo sapiens
tggtctatggggacctattctggtctcagggggtgagtttccaggagcccagggactcagcggggagggcggctctctagaaggtacactttggctgacttagggcagggtgctgagacatg

SEQ ID NO: 403568 - DNA, 122 bp, Homo sapiens
agcaggagccagcacttcacgtggcgagagcaggagaaagagagggatgaggagggtgtccggcacttttaaacatcagctctcttgtgaacagccacagcgagaatgcgctcattactgcg

SEQ ID NO: 403569 - DNA, 122 bp, Homo sapiens
cccaggaacgccttcatctccgtcagcgtcacctccacccaggctccgtcgctcccaaaccgctcctggaacttcttggcatacatgtttgtctgcaccaccatgttcttgaggacgttgtc

SEQ ID NO: 403570 - DNA, 122 bp, Homo sapiens
cacagcaacatccgtttttcagcaaatgcatttcaaaaacgacctacatgtaaaatattacgtatttttcctctgctgtgtcaatgctggatgtgactcctttggcactgttccttgacctc

SEQ ID NO: 403571 - DNA, 122 bp, Homo sapiens
gagggtggaggttggcgggcggcctgcgctctcaacctgggcgccttggaatcgcggtcccgtgctgtcctccaaacttcagactcacctcggacgcgtcaacctctttgaagacttttcag

SEQ ID NO: 403572 - DNA, 122 bp, Homo sapiens
ctaaaaagctccatcaaacgaacgaagtcacaacccaaacttgaccggaccagcagctttcgccagatcctgcctcgcttccgaagtgctgaccatgaccggtacaggggctggagcatgtg

SEQ ID NO: 403573 - DNA, 122 bp, Homo sapiens
ggcaaagaaaggggtgacagacagcacctggaaaatcgtgtcattcccacctgaatactgcgcttttccgacactcttaaaaaacagcgcactaggagactatatcccgcacgtggctagga

SEQ ID NO: 403574 - DNA, 122 bp, Homo sapiens
cttgcgactgtccacgtgtgggggaccctggggttcgctttgcggtagatgcaaacgccgcggcgcgtgtgcggggctctgcagtggagcctgagccgtgccggccgaggcgtggtgtgggg

SEQ ID NO: 403575 - DNA, 122 bp, Homo sapiens
gaggcagacactgtaagggtttgcaaagactttgccttttactcattaaaaattgggagccgttgcagatttctagctaaaggagtagcatgatctgattaattcaggtagcagcccagtgt

SEQ ID NO: 403576 - DNA, 122 bp, Homo sapiens
atacacattgagaggacaaagggctccggaatgacaagcctagagagttcatctcatgaccggcggtgttaacagttcccctccctcccttcatctcaccctccctccctttcttccttttc

SEQ ID NO: 403577 - DNA, 122 bp, Homo sapiens
cggtgcagtcccgggccgctccccgggagagccgagcccgcccgtgcgtcttcccccgcgcgcccgcccctgcgccctgcgcccgccccagcccagcccagcccagcccagcgcggtcgggc

SEQ ID NO: 403578 - DNA, 122 bp, Homo sapiens
ccggtgcggggtggggcgtggtgtctggcaggcacgtgggagtctcgggggctgcaggtgcgcctgctggaggtcccaggtgaccactgaccgactcttgctctgtgggggacaggagagcc

SEQ ID NO: 403579 - DNA, 122 bp, Homo sapiens
accaccacattaaacagagtgtgagcctgaaatacccaaatacttcaaataagactttcccggctcaagttctttcagtcttccttttaactgagaaaaaaagctaaggatactgtaaaaac

SEQ ID NO: 403580 - DNA, 122 bp, Homo sapiens
caagcctgtcaagtgctttctgttgtttcggaggcggggcctgctgccctgcctgcactccgattggccccgcgggccgtctacctctggccggacatacctacaccggctttttgtacgac

SEQ ID NO: 403581 - DNA, 122 bp, Homo sapiens
ccctgtagactgcggtttggggtgactgtgttgagctggacacaagcagaagaacaaagccggcagagaaagagcagaaatggaccaaggagaccaagagctagtggtaacctctgttcctg

SEQ ID NO: 403582 - DNA, 122 bp, Homo sapiens
ctccctggttgagcaaagcccgatggtccttcttactgttctcttccatctgaactcaaccggcgaggatctcttctggctaactccttggagaaatgtcaaaatcccttgggcttctgtga

SEQ ID NO: 403583 - DNA, 122 bp, Homo sapiens
tgggggtcgctggaaccctaggccggccgcgcaaggccccctgggaccggtagtgctgggcgtggcctcgggactacatatcccagtggcccccgtgcggcgactttagctgctgctgtctc

SEQ ID NO: 403584 - DNA, 122 bp, Homo sapiens
ccggggacgagcgcccaccgcacctaggccgcctcggaggcggcgcgcagtgggaggggccggaaatgtttacaacctgaccggctggatgcctggaggccaggcggctccttggctggggc

SEQ ID NO: 403585 - DNA, 122 bp, Homo sapiens
ttatgttgccagggctggccttgcactcctgggctcaagtgatgctcccacctcagcctccgcagtagctggggttacaggtgtgaacctctgtaccagctgtctcattaaagtttaaaaga

SEQ ID NO: 403586 - DNA, 122 bp, Homo sapiens
cagtgactagtcatcaagcatacttcagcatttagttgtctgagcagacaggtgactcagcgggaaatgggttacccagccagccacgctcatctgacccactgcctcaaagtaatttttcc

SEQ ID NO: 403587 - DNA, 122 bp, Homo sapiens
gggccgcagccgggaacccagggcccccgaggccagatgtttgggcagctgcggctgcggcggctgggcgagcagaggggcggctgcgggctgtgggcgctgggcggcggcagcgggaaggg

SEQ ID NO: 403588 - DNA, 122 bp, Homo sapiens
gaaccacggtcacaggaggcaacagggagactccgtgtctttgttaaaacacccacagcccgggacaggccaagctcggcactcgcagcgtgcacggaagcagcactcaggggcagaggatc

SEQ ID NO: 403589 - DNA, 122 bp, Homo sapiens
tccccggggccgccgggttgactgcgctgcctgggccggaggtcttctccggccagggagcgctgtgggaaggggctcgagcggccagggccaggcgaggccgggggggcggggggttaggg

SEQ ID NO: 403590 - DNA, 122 bp, Homo sapiens
ttcccaattgttccctaattctgaggcgggtagaaaatcaggcgaggtgagcggccaaatcggaatattctaagacgcccccacgggacgccggccacaccaggcacaggagtcgctcctca

SEQ ID NO: 403591 - DNA, 122 bp, Homo sapiens
tgcgtgataagtgaagagtctttcaactctctccaaaagccgaggcaccagagggcacagcgcagagcaggcaggaagcccctgaacagtgattggcgctggaggtccacgattcattcaca

SEQ ID NO: 403592 - DNA, 122 bp, Homo sapiens
gcagtgccgtgtgccagcctcccagttggcaccttcctttcaccttagtcgtcttcgaggcgatgtttcctcgggacaagtcattttcatgaatctgctgtaaaacgtctcccaaactccaa

SEQ ID NO: 403593 - DNA, 122 bp, Homo sapiens
aagtgaggagcgtctccgtccggccgccatcccatctaggaagtgaggagcgcctcttcccggccaccatcccatctaggaagtgaagagcgtctctgcccggccgcccatcgtctgagatg

SEQ ID NO: 403594 - DNA, 122 bp, Homo sapiens
atattgtacctatgcaagaactccctttacaaggcttgaagtaatgctggtgctgtgacacgtaatatagtgtattcataatttgtcacttaaatgttttcataatactgatggattcataa

SEQ ID NO: 403595 - DNA, 122 bp, Homo sapiens
ccagagtcagggaacacagccctcatctggtttctctctttggtgttgagggcggttttccgttgctggcgacctagacattgctcaatggtgtcatctctgacctggcaccttcttcatac

SEQ ID NO: 403596 - DNA, 122 bp, Homo sapiens
ctcgaatgccggccgagccctccacgcgctcggaacttgggcttcccggtgcagcctccccgcgatcgcaatgcccgctgcctttcccgagcccagtccggaacccgcctctctcggggacc

SEQ ID NO: 403597 - DNA, 122 bp, Homo sapiens
gcccgggtcctctaaggctccttccttctcccctggctgtcggtcacacctctgcagggccggctctctgatagaaagtggaaggcggttttagaaactcatcaccctgctctctcctggcc

SEQ ID NO: 403598 - DNA, 122 bp, Homo sapiens
cggtgtgtgacactgcggcactaagcactttctggactgtgttaggccccattttacagacggggaagctgaggcctccagaggcggagtaacctgctcatggttacaaagctggtcagcgg

SEQ ID NO: 403599 - DNA, 122 bp, Homo sapiens
ccacttctgcaacaggaagtggcctagttggagatttccagagaaagctcatcaggtgcccggtaatttcaatgtaagacacatacttagggatcctagccagttgattcaatgtcgtttca

SEQ ID NO: 403600 - DNA, 122 bp, Homo sapiens
tttggccagggccttctgtgccacctgccaagaccagcaggtaaagtgggaggatgagggcgtggagaaagggtggacatagaccaaagtgcaaaactccaccctagaattaaggagagaac

SEQ ID NO: 403601 - DNA, 122 bp, Homo sapiens
tccctcgcctagcggcgtcccatctttcccagccttctgctcacacccgctccgccctggcggctgtggcatctgcccctttggagccccaggggggcatttctaagggcccatctcggaaa

SEQ ID NO: 403602 - DNA, 122 bp, Homo sapiens
tgagtgccaaatcactctcctctctattggtgaagctctgaattatcttcctcctgcagacgtgatcttctgtattcattctcacagttggaagcattattattcaacctgttggctcagcc

SEQ ID NO: 403603 - DNA, 122 bp, Homo sapiens
cctggctttccctggaactaacagtcatctttgagaaggccaacagggcagcctattctacgctgacttcctaacaatgggactgaattctctgaacttccagtaagtggttttctcccctt

SEQ ID NO: 403604 - DNA, 122 bp, Homo sapiens
ttactgtggtgccaaatcatgtactgctttcctgccttttgacagttctctgtactgccccgtagaaaagtcgaacatcagttgtggaaatgagaaggaacccagcatgtgtggctcagccc

SEQ ID NO: 403605 - DNA, 122 bp, Homo sapiens
accgaagctatttcatcagggtcagaggcaaaattcagtgtactgaaattcccatcacaacgcaggcacctggccagatctgagcccggggtggtcaatgctgatgtgggccaagggccccc

SEQ ID NO: 403606 - DNA, 122 bp, Homo sapiens
cacacacatggcaccgcagccaagcagaggccggtgaaaggcatcagagtttcagactctcgggttgtccttgtaatccatattgcaatttcactatccacagaaacacgaccctcctctga

SEQ ID NO: 403607 - DNA, 122 bp, Homo sapiens
aggctgaggcaggagaattgcttgaacccgggaggcggaggttgcagtgagccgagatcccgccactgcactcccgcctgggcgatttcaaagcgagactctgtctcaaaaaaaaaaaaaaa

SEQ ID NO: 403608 - DNA, 122 bp, Homo sapiens
tctccgatcggtctgttctggctgggagaagcccagggcttccctgcttgtcagcccggccgcttgcccagcagtttgtgagatggaaggtggagagaaagaactgtgggggtgagaagtga

SEQ ID NO: 403609 - DNA, 122 bp, Homo sapiens
ggtgccaggcagcttgccacttgggagggcagaagccaggaattccacacccttgtgttgcgcccggagcccgcccttcgcctcccagcccctcaagacaccgctggctgctggacaccctc

SEQ ID NO: 403610 - DNA, 122 bp, Homo sapiens
tccccagagccgccataaggggtgaagccccacatcctcctaagcgcagtagggagggaccggggggaggacaaaagagacttgcctatagggacttacagatgccagacgctgaggggtct

SEQ ID NO: 403611 - DNA, 122 bp, Homo sapiens
atctgcccgccttggcctcccaaagtgctgagattacaggtttgagctgccgtgcctggccgggcctgtttataactattatgctcaaggtaaatgtagaatgtagaaattaaggtgaataa

SEQ ID NO: 403612 - DNA, 122 bp, Homo sapiens
cgctgcagccgggacctgatgagtaagagtaagagggctcaaccgcaggacatcacatgccgggtacctaacgtcggcatttaagcagacagggactaatatgctggaactatcctcccgac

SEQ ID NO: 403613 - DNA, 122 bp, Homo sapiens
aagggctagattaataaattaacaaagccttcttcggagcaactgtgctgaaattccgtacgcgtgacgttcccaccctctgccactcggtgacgtcacgatcaatcccaccactaagttcc

SEQ ID NO: 403614 - DNA, 122 bp, Homo sapiens
gtaggtcactggaggcttgacttggtattaacccctggtgtttcaaaatgtatatgtcatcgactgtgattttttaaagataaaagctttgaggcagctttatggtttcagtttcctttcag

SEQ ID NO: 403615 - DNA, 122 bp, Homo sapiens
ccaggacccaggggccaaaagcttaggatatatcaaaccctctaggtgggtgacaaaagacgctaaacgctgggggcgggtctgagctacgccacgcccatgcgcgaaggggtgcagctgcg

SEQ ID NO: 403616 - DNA, 122 bp, Homo sapiens
catcgacagagaggagcaggagtcctacaggctaacggtggtggccaccgaccggggcaccgttcctctctcgggcacagccattgtcaccattctgatcgatgacatcaatgactcccgcc

SEQ ID NO: 403617 - DNA, 122 bp, Homo sapiens
ccgcaagccctgcgcattgttcagaccccttccccctttgccacttcccgccccccaccccgacctccgaccgattcgcagcaccccacccccagtcggggccatccatccacctgattaac

SEQ ID NO: 403618 - DNA, 122 bp, Homo sapiens
aaaccgcttgctcgttttcaatcgacgatccgacctcttcgaatgtgccaggtcccatttcgtgttcattacgactgtagaacgccaagttacgcgtgctaaacagttaaaaaaattaagaa

SEQ ID NO: 403619 - DNA, 122 bp, Homo sapiens
atcatctatattccatataacattgatgatgtcatactagttggacatggtgaagaaggccgtgcatgtcagaggatgagcgagaagccctcagaagttctggagcctgccatatcagtgac

SEQ ID NO: 403620 - DNA, 122 bp, Homo sapiens
tcttctttcccttagtcgtataaatcccctattatttggtgatgcaaaagtgagctttcacgcaggtcagctgcacctttcacgtaggtgcgccaaggtggcagtgagcagtgtggccgggg

SEQ ID NO: 403621 - DNA, 122 bp, Homo sapiens
ccctttggagagccccctctctatagggtactagccgggggctcagactctggagtcagacggcttccgagggatgaggcctcagacaagtaactcagctttgaaatgttttcagtggggag

SEQ ID NO: 403622 - DNA, 122 bp, Homo sapiens
gaaggtgatctttccctgaagccacactgtctgaagttagctgtgtctatctgtagtctccgatgctcagttgcttgctcctctgcttgccactcagccacttacatccccaaggctcagca

SEQ ID NO: 403623 - DNA, 122 bp, Homo sapiens
agttttatgcaagaatagctcaaacaaaatgcagggatttttttgtattccttgtggcttcgttgacagtgatgcattgatagtttgggggcaaatcttcctaggttggagctgatcaacaa

SEQ ID NO: 403624 - DNA, 122 bp, Homo sapiens
attgtatctaattattacctgtttataaaccaatcctgttcatagggtcagagcaaactgcggctttcaaaaggatattaatggttagtgcatttgttaactgggaccctatttattgttcc

SEQ ID NO: 403625 - DNA, 122 bp, Homo sapiens
atggctaaaacactgaccttcccttgagagagaccatatggtgaagtggagagggcatggcgtttgtatcacacgaccttgtgttcaaatcctggctctgtcactggctgtgtgactttggg

SEQ ID NO: 403626 - DNA, 122 bp, Homo sapiens
agctgagagtaggctagtgttactgctcggtttctagccctggggacttgccagccttagcgtgactcagccgcccgctgcgtctgtctacgcgcctcttcccgtgacacttttactttaga

SEQ ID NO: 403627 - DNA, 122 bp, Homo sapiens
tgtcccctcgcaaggcattatccctccccgcttcaatcagggtccggcggatcgtcttcacgcctgatcttgaggatgggaaagggagacaggatcgtcttcacgcctgatcttgaggatgg

SEQ ID NO: 403628 - DNA, 122 bp, Homo sapiens
caattgctccgggagagacacaggactggagggcttgaggaatgtggtggtccctctcttcgttgtttctgccccctgaggttgtgctttctcagggatatgcactctgcacttccattcct

SEQ ID NO: 403629 - DNA, 122 bp, Homo sapiens
gccagggaagagggggtactgaaagggcatagcctgtcctgttggcggggccgtgggacccggccgccctttctcctccgtggctccccagccaggaggctgcgcttacctgctccgcacga

SEQ ID NO: 403630 - DNA, 122 bp, Homo sapiens
tggcgtggacgtcacgaaggagccgatccctgtcctccccaccgtgcattataacatgggcggcattcccaccaactacaaggggcaggtgatggtgctggctcctcccccacagctggaaa

SEQ ID NO: 403631 - DNA, 122 bp, Homo sapiens
aacctcaccctaaagaccctcagcgggctgaactgggctgagaaacactgccccatggcccgatacgtcctcaagacggacgatgatgtgtatgtcaacgtccctgaactggtatcagagct

SEQ ID NO: 403632 - DNA, 122 bp, Homo sapiens
tggccgaacagtttcctccttcgggcccttcgtggtcaccgggcccctgcctggagcctccgcctcaggaacccatgtggctgactccggccctgtggccttgccactctctctccatcccc

SEQ ID NO: 403633 - DNA, 122 bp, Homo sapiens
gccagaggcatcatttgaaatcataaacctgatcatatcattctgctacttaaaaccctgcgatatctccccattgcctgtggagtttaccaccactaccacctgacaatggggtgcctacc

SEQ ID NO: 403634 - DNA, 122 bp, Homo sapiens
atcaattcagctgtttgctgtctgcctactactggccaagcactgtgtggaggagaacaccgtccagcctctgctccctggcatcacactgtggcaagacaaaacagatgataaccagagaa

SEQ ID NO: 403635 - DNA, 122 bp, Homo sapiens
gtgaaccgcgaaggagccggctttcgcggcggggaccttgccaccagtaccctcgcgggccgaggtcgttctcccggtcggcttcccgcctcacccgaaaaggaattagagcatctacccaa

SEQ ID NO: 403636 - DNA, 122 bp, Homo sapiens
attcgaagggttttgtgttctgctttcacttcagaagttatcgggcagtgagttgcggcgcgaagccttaagctttcacttcacaacttaggcatggttgaaaagggctacccacccccacc

SEQ ID NO: 403637 - DNA, 122 bp, Homo sapiens
acgaagtgagtcggggagcccattcttgcggggtgtgacgtcccatgaagtttgttgtaacgagcgacagcccagacatcaatgctgggcgagcacagccgccgagagtgcgggaaagctgt

SEQ ID NO: 403638 - DNA, 122 bp, Homo sapiens
ttgctatgggaaggcaagagaaattaatgtctgcgttattccagcaaagcccctgcactgcgctggagggacttttgtttgcgtctttgggttgcagaaggggctatgattgtgcgtggctt

SEQ ID NO: 403639 - DNA, 122 bp, Homo sapiens
aaactatttaatctctccatgcttcagtttcctcatactaaaacaacaggtatacttaagcgtatccattcagttttgtgaggattatgtcagaaaatgtacttaaggtacttagcatggta

SEQ ID NO: 403640 - DNA, 122 bp, Homo sapiens
cttcacctcctagcaccacatctgcccttgttgaagaacctaccagctaccacagcagcccgggctcaattgcaacaacacactttcctgagagctccacaacctccggccgtagtgaggaa

SEQ ID NO: 403641 - DNA, 122 bp, Homo sapiens
caggctcgaggaggcgctgggagattcgctgtccatggctctaccgggccccactcccaccgcccgtggtccggtcccgcctgtgcacgctatgcctccattaatattttaaagctgccacc

SEQ ID NO: 403642 - DNA, 122 bp, Homo sapiens
gaggtgagatgggagggggttcgcccggtcgaccggcaaaagggaactgcgacttctgagcgaatcttactgctatccaaaaaaatgcaggccttctagcgactgcatgggagggagtgtgt

SEQ ID NO: 403643 - DNA, 122 bp, Homo sapiens
gagatattgtaaacaaaggattgtggacatgcaaagaaaattcagaaagatgagagaagacgtaattccttggcccaattcccaagagcttgattttgtaggtaggtctaaagtggggtgca

SEQ ID NO: 403644 - DNA, 122 bp, Homo sapiens
tttttctttaatgcagtaaaaccattcctttaaaacccaaaatctctcatggaacccctacgtatcaaatatataaagcaggagctgcccttgttcagggataatatgtggggcttatggct

SEQ ID NO: 403645 - DNA, 122 bp, Homo sapiens
accgatgagcctggaggaccacaaggtggccagggcccttggagagctgtgctgcggaatcgtaaagctaccatccggagctggccgtcccagagggaaggcttggtcatctcttcccctcc

SEQ ID NO: 403646 - DNA, 122 bp, Homo sapiens
gtctcaaaaaaaaaaaaaggttaaagaaaaaaagaaaagaaaacacaagataatcctgtccgcaaacgcttagcagtcttaaatcggcctggtggaaggatgcagggacactcccccaccct

SEQ ID NO: 403647 - DNA, 122 bp, Homo sapiens
ggctcagacgatactctcgcctcggcctcccgagcagctgggactacacgcgtgagccaccgcccccggcataaagtttgaattagtccttacgcaaaaagggaagagggcagtctgtaaac

SEQ ID NO: 403648 - DNA, 122 bp, Homo sapiens
ctcaaaagccgccattccccgccctgtcgcggtccccggagcaggccggctgactgagggcgaccatgggtcccgagagggctcccgccaccacgggctcccacctcggggggcggcgacgg

SEQ ID NO: 403649 - DNA, 122 bp, Homo sapiens
aattgttctcttataattagatcagggttatgcaatctggcaggaatgctacaaaactcacggggtgtccttctcagcgcatctcatcaggagatccatgatgccactgtgtcccgttactg

SEQ ID NO: 403650 - DNA, 122 bp, Homo sapiens
ctactgcaggaaagagtgggggggaggagagaggggagagaaagagagggtgagagtatacggcacatacccagctggcatttgaggagatcttaggttatccaagtagccctgttaagtgt

SEQ ID NO: 403651 - DNA, 122 bp, Homo sapiens
agaccctgtctcattaaaaaataaaaataaaatgtaaaaataaaaagcaaaaacaaccttcggatggagaaaatatttgcaaagcacatatctgataagggacttgtacccagaatatatag

SEQ ID NO: 403652 - DNA, 122 bp, Homo sapiens
ggtattaaccaccctttgttttacaggtgaggaaacagaggcacaagacggtcaggtaaccggcttggagtgatgaatgaaactaaaataagcgccgacctcgaagctcatttggtctttcc

SEQ ID NO: 403653 - DNA, 122 bp, Homo sapiens
cctgaaggaggtgaaggagtgagccccgggccactggagaggactgagcaggctgtgcaccgggctcggggctgcagcaagggggccagaggactgagcaggctgtgcaccgggctcggggc

SEQ ID NO: 403654 - DNA, 122 bp, Homo sapiens
gtcctccccggcagcgccgcccgctggcccagctacgcgtgttgtgcgctgcgaggccggcgggggtcccgctgggcccgggggtgtcctcgggggccgcttgcgcccagccatggtagggc

SEQ ID NO: 403655 - DNA, 122 bp, Homo sapiens
attcgttcaagaaagagtattgagtgtctattgcgtgccaggccactgtgagggtggttacgatatgtggatgaacaaaatgtggcctatgatttcaatgagcctgcagtctggtggggaat

SEQ ID NO: 403656 - DNA, 122 bp, Homo sapiens
cgctcaccgtctgccgcagcggctgcgtcttgcaccagtcactcttgaggtacttgcgctcggtgaccaccagggcctcctggctggaggccagcacctccttgatctggtgctgccatctc

SEQ ID NO: 403657 - DNA, 122 bp, Homo sapiens
ttcccgcattgcccatctccatctggttgagggtcacctggtgcctgagcagctctcctgcgaagtgcgcgtcgcgctggaaaacggagcgcagaatccgggaactagttctgaatttaact

SEQ ID NO: 403658 - DNA, 122 bp, Homo sapiens
cgcggggcggggccgggaggtcgccgcctcagtcttccgccctgggccacgccccggtcccgggtcacctctcggagccgcctccttggcccgtggaagcctcctgctctcccctagggcgc

SEQ ID NO: 403659 - DNA, 122 bp, Homo sapiens
cctgaggagctccagctttccctgccagcggtgctctgggagtggggacgtgatgcagggcgagcatgatgcaacggggcaccccagacccttccctcccgtggggggaggggtgtggcacg

SEQ ID NO: 403660 - DNA, 122 bp, Homo sapiens
ggtgctcgtgggacccgttgctgcccagactcccgtagccactggagccgctgtgggggacgggctggggagacagcagacagcgctacagacacagccagggctgctgagctatgcatgtg

SEQ ID NO: 403661 - DNA, 122 bp, Homo sapiens
agagcgagactccatctaaaaaaaaaaaaaaacaaaaggcttttttttccccctaaatgtcgtccacatttttggcaagtattgatctctagtagtcagtgtcaggatctgaagaaaacagt

SEQ ID NO: 403662 - DNA, 122 bp, Homo sapiens
cgccgcggagccgccaaagtgtctagactggcatatgatgggaggcagccaatgactccgcggcgctcctccgggggccctcagtgtgcgtttgaggagaacaaaaaagagagagagagccg

SEQ ID NO: 403663 - DNA, 122 bp, Homo sapiens
agtgcttcagtgacttgcaggcgctgacacagtaggtggtagaaccaggcgctgggctcacgcctgtacagctcctaaggctacacgtgttctttccaatgcactctttaaatcctagagat

SEQ ID NO: 403664 - DNA, 122 bp, Homo sapiens
agaattcttgcgctcccgtcttcaggacgcgggtgcgggccaagtgcagacggcagatagcgtgccatttgatttcctcgtggctgcagtagctttatttcagggttagggatgagccaact

SEQ ID NO: 403665 - DNA, 122 bp, Homo sapiens
gaggtatggaagtcaaccccttccttgcgcagcaggagtcggaggtagcgggagacgtcgcggccggcaatgtccacccgcatgatggagtgaggcatggcaaagccctcatagatgggcac

SEQ ID NO: 403666 - DNA, 122 bp, Homo sapiens
ttcagaaattacaaagcaataatgtgcttcccgatttatctactgaagtgatatgagttgcgcctgttatagtgggaaagcttccttggacatctatattttcccatatcaccaagagggag

SEQ ID NO: 403667 - DNA, 122 bp, Homo sapiens
aggaggaggagcgaccagcagcacggccctcccatcccccgtccgaccccgccttacacacgcccacctgaagaagcgcatgcgcaagggactgctccggcgaccctcccggacgccagttc

SEQ ID NO: 403668 - DNA, 122 bp, Homo sapiens
agccgtcttaacctgtttaggaacatctgcccagaaactacagcacacatcgaacccctccgcttgctgggacttgagaatcactcccacagaagccagcggacatgggagatgttggcgat

SEQ ID NO: 403669 - DNA, 122 bp, Homo sapiens
gcaatgccagcacggaaggtatagcgagagcgctgcagtgtgcctttctgcggacggccacggccacctggccaggaagcggctgctgcagcagtcattctgcggcatcttgcggccttggc

SEQ ID NO: 403670 - DNA, 122 bp, Homo sapiens
caatggttgagcgcctataaagtaccaggcacttagaattctgtgatcagaattctcctccgttcactggctcctcctttccatgagctcagtctagtggggaatacaaatatattcacgaa

SEQ ID NO: 403671 - DNA, 122 bp, Homo sapiens
gacagcatggtgggtggagcaggccgtccgggcgggaggggctgggcgcatccctgtagccggcgggcgcgcgatccgggacggacggggtcgcgggggacgcgggggacgcgggggacggc

SEQ ID NO: 403672 - DNA, 122 bp, Homo sapiens
tccttctccgcgggtgcctcccaaaccgttctatcattctcgggttcagggaggcggaatcgtgcctgctctccggttcctttaagaggcgtcggctccacccctctcagagtcgcggtctg

SEQ ID NO: 403673 - DNA, 122 bp, Homo sapiens
gagactgagagaggggcgtgtttgtggtggtggcggcccatcgggggtccttgtcctctccgaatacccggactgctgaggggaagggccgggggggccccggcggttgccatggtgacgca

SEQ ID NO: 403674 - DNA, 122 bp, Homo sapiens
ccttggcgaagaggcagccgcggcggtccacccagaagcggaccaagtccccagtgagcgcgcagccctcaggcagcacggccgcccacgtcgggctctgctcctccaggtcggggcacagg

SEQ ID NO: 403675 - DNA, 122 bp, Homo sapiens
agacgggctgcagatgctggcaggaacttaatgtcctatctggagaattgggacggggggcggtcattacagtacacattctgtcctgggcccatgccaaatgccagggggtcagttgttcc

SEQ ID NO: 403676 - DNA, 122 bp, Homo sapiens
ctccagggcaggggttcaccagagctgctctctcccttgcctgcagaagagcccacagaacgggagaaagtggagctggcagccgagtgctgccgggaaattctacaccacgtcaaccaagc

SEQ ID NO: 403677 - DNA, 122 bp, Homo sapiens
aaagtgcagaataacaagggctatgagaaacttgtgcatccagaggtaccgacacagaagcgatgtgtcataggaaagacttcctagatgcctgaatgcctgagatgatccgggatggctga

SEQ ID NO: 403678 - DNA, 122 bp, Homo sapiens
ttgccagagcagatgtggactcgtgaacttgggaaggtttcagaacccacagcctagagacgagggctccccacatggaggaaagagcaaaacgcatcaccaaaagtgccagggacagtgga

SEQ ID NO: 403679 - DNA, 122 bp, Homo sapiens
gacaactcgaaggtggggtggggcttccaggtcataggtggattcaaagattttctgggccgggggcagtgactcacacctgtaatcccgccactttgggaggctgaggtgggcggatccct

SEQ ID NO: 403680 - DNA, 122 bp, Homo sapiens
cctcgccttgccttcttggaatcccacccaactttaaaggcccaaagatcctgaaaattccgaaagcgaaactgcgagctggtctccagaagtttgagaacggtctcccaggctttccagcg

SEQ ID NO: 403681 - DNA, 122 bp, Homo sapiens
gggcttcctggggttgcggggcggcccagcgaggcttcaccctcctcgatgtctgggtcacgcttcttgcccaggtggtctctggctggcgcagatacaactgctctgtctaccatggtctc

SEQ ID NO: 403682 - DNA, 122 bp, Homo sapiens
gactttgagatccggccgtctgttagggcacagccactccaggttctctggcagagactgcggccactttgccaggtcaaggacatggggccagagggagcctggtggggtgtgtgggggcc

SEQ ID NO: 403683 - DNA, 122 bp, Homo sapiens
agtccagcgggctcactggcatcacacaggtaacagcttcagtggacatgtagaaagccacgatgacccacaccccgcccaggaaggaggaaggtgggaggaggagaagaaaagagaggagg

SEQ ID NO: 403684 - DNA, 122 bp, Homo sapiens
actggagacatgctgacatgtgaagggaagctcgtggatggggggcacaaggcaatatcccgaggagagagacaggctcaattccagtttgcgcgcactggacaaagtgaggatggggtcag

SEQ ID NO: 403685 - DNA, 122 bp, Homo sapiens
caccccaccgcccgcgctgaattccagctcacagccgccgtgctgcccgggaagaatatgcgcttgccatacagcgtactcgccgcttctgcgaccgcttccgcagcgtccccgggcaggaa

SEQ ID NO: 403686 - DNA, 122 bp, Homo sapiens
gtggggagaggatcatattacttcccatgtcgcagggtgtgtacaccccctctgtgatctcgttgctaacatccaggtttggggacgaagacccagacctccacccacccagagtaggtgcg

SEQ ID NO: 403687 - DNA, 122 bp, Homo sapiens
ccccacccgagtactctgcagggggctaggggattgccctgccccatccaccaccattggcgagagcccacaagcctgctgctaccaccacagctggcaacctcctgcacgcgccaactggt

SEQ ID NO: 403688 - DNA, 122 bp, Homo sapiens
aactcaccggggcttgacagctctggtctggggagccctcggagaggaaattggaggtctcggttcagacttggactctggctcagcttctggttctgtgatctgcacatcttcaaagaggt

SEQ ID NO: 403689 - DNA, 122 bp, Homo sapiens
ggcctggctgcagagaggccccaagagagcgcggggagggctcgggcggccgggagggggcggtgacagctgtgactcgactccacgctctcaccttgaacatgtcgctggcagcggaggct

SEQ ID NO: 403690 - DNA, 122 bp, Homo sapiens
tactatgaaggttagaacacatttccagaaatgatcaatttgagcaatctgagtaagagtcggaataagttggagtatttcatgtagtgaattttggtatttgctttgtctccagtttttcc

SEQ ID NO: 403691 - DNA, 122 bp, Homo sapiens
tacttgctaaaatccacttgtagcctccacatgaggtgcacttgcagccatctgtggacgcgaacagagcaggattaatacttgagtcgcccgaggcacagtttctgcgctcatccttactt

SEQ ID NO: 403692 - DNA, 122 bp, Homo sapiens
catccccaaggcttagtcaaggcagggcaagaagccccagttttttatccttagctcctgcgatatggtcagtggccagtggtagatatcagctctctcagagaaacccctctaggggaaca

SEQ ID NO: 403693 - DNA, 122 bp, Homo sapiens
tttcggcaacttctcggcttcccttgcatctctgaacgttagtgatccggacctcagatccggtttccgagggcgccagggtcctagggctgaggtccattcaaatgcttaggcgactctgc

SEQ ID NO: 403694 - DNA, 122 bp, Homo sapiens
gcactcatggggaatcttcttctcggtaaagaagcgtgtggggggcgtgctgggggagcccggggcccccacccctccgcgcagggaggctgcccgggtcagagtccggctgttggcgggcg

SEQ ID NO: 403695 - DNA, 122 bp, Homo sapiens
aggtaaagtcgtgaaggattctggactggagtccaccggtcccaggtcccagaccaggagcggtccccagaggcctgcagcctcttccagacatcacctccccgtcatcccacgagggcggg

SEQ ID NO: 403696 - DNA, 122 bp, Homo sapiens
tttcccccgctgcaaaggcacagaccacaacacacacacgtgtagcaccagaagtttcttcgaggtaaagcgccttccccactgatcctcaccatgatccactgaggacttccaggcccagg

SEQ ID NO: 403697 - DNA, 122 bp, Homo sapiens
ttcctggagggtctcgggcatcggggtgtccacactgcatcctggacaagagtgagcctccgtctctgggagacacgctgagtgggagccacacgtgtaccctggaggaaggccttctgtgt

SEQ ID NO: 403698 - DNA, 122 bp, Homo sapiens
cccccgggaccaaatggcccgcaaggtttggggcagcggcgttgcaggagatgagctcagcgcaaagggaaccccgcagcggcgagtgcggctgctggcctgcgcgctgtggccccaacagg

SEQ ID NO: 403699 - DNA, 122 bp, Homo sapiens
aggagcgctggctggaggctcctcgagagctccccagacacgcccccgtgcgtacgcccccgtgcgtacgcccccgctgccgccaccttcggttgaccacccccatctagactgtactctcg

SEQ ID NO: 403700 - DNA, 122 bp, Homo sapiens
agtatataactcatacaaaaaatatgtgttgactgtctgtttatgtcatctatatgcttccggtgaacagtaagctattagttttttgggagtcaaaaattctatgtggatttttgactgtg

SEQ ID NO: 403701 - DNA, 122 bp, Homo sapiens
gtggttgtctcaaatgtggtacagcatcccaagttaagcgggggcagtggccagagggatcgctggcttggggaatgtggaggtctattgggaagaggtggggagagaaagtggttgggtag

SEQ ID NO: 403702 - DNA, 122 bp, Homo sapiens
cgcggctgataaatttcgggctggtgtagagttagcccttcaatctggaaacaaggtgtgcgtttgttcccctaggacaacaatctctggggatgcagttgctcccagatcagtcttaccag

SEQ ID NO: 403703 - DNA, 122 bp, Homo sapiens
agtaccactccctgggaactggagagccagctcatggtgagagaagggacatactttctgcgatcctgacacagagaaggggaaagaagttcctgtctcgcctggcaactcgctcattagca

SEQ ID NO: 403704 - DNA, 122 bp, Homo sapiens
ctgacctgccgcagaaggtctctctgctggaccggagcacctggtgtggtcctgttggcccgttcacacccatctgagacccttctgagcaaaccggcccaacacacacaacagagggtagc

SEQ ID NO: 403705 - DNA, 122 bp, Homo sapiens
gttgggggaggggagggaccactagggtggcttctcaagaatacagtgggcccagcccagcgtggcccataccagtcacctcccagctcctggccctagctcagctggggaggtagggagat

SEQ ID NO: 403706 - DNA, 122 bp, Homo sapiens
ccgggcacccggccggagtgggggccgcccccctgctcccgggccgcctctccgctcgggcgctcctggactctcggagggagtgagcctcaccgcgtactgccacccccagccggcgccca

SEQ ID NO: 403707 - DNA, 122 bp, Homo sapiens
tgttccagcgcgggccggtccctaggcctcgcccccagatccgggccctgcccctccgtccgtaactgcgcaggcctgtcctctgggccacacccccaggttcccgtcccgcccttccgcct

SEQ ID NO: 403708 - DNA, 122 bp, Homo sapiens
agggtgatggctcttctgatttcatcaccaggcgtgagcgggccccttagtggagtcacacgtcttgttctccttggcatctggagccttttgctgcatggatgcctgtgagattcacccgt

SEQ ID NO: 403709 - DNA, 122 bp, Homo sapiens
tagagtggtcagagaaggcctcgctggcatttgagcacagactttaaagcacagtcatgtcgatatggtagaacagagattacccagggagagggaagaataaatgcaaatccctgaggcag

SEQ ID NO: 403710 - DNA, 122 bp, Homo sapiens
tcctttgcaagtggtcctgcgtgccgaggcaaagatccgcgtataaaatcccacgtcgcacgtatgtgctgggctcgtctgtgaacaggttacatggaccctctctagacccagcagatggg

SEQ ID NO: 403711 - DNA, 122 bp, Homo sapiens
gcgcacactggccaggtttccagtctgcgccaggcacggtgctcagagccttctgtgcatcgtctgggtcaaccctccccacagccctgagggtcatccccattttactgatgatgttaccg

SEQ ID NO: 403712 - DNA, 122 bp, Homo sapiens
ctcgaagcggcgcaggatgaccgggtacctgcgagggcgaggacgagggcaaagactcagcgtggcccgagccccggctcccacccggccgtgcccccagcctccgcgcacgccgctcaccg

SEQ ID NO: 403713 - DNA, 122 bp, Homo sapiens
ctccacccagagagcaggacggaggtgtgaacttgagccagaccagaaggagctcgagagcggccgcaggacaagcccgaggagcaggcgggcgctccaggggaaaaccacgcacaaaacct

SEQ ID NO: 403714 - DNA, 122 bp, Homo sapiens
aatgtttgatggtccttggttttgtgctctatttcctccttcaacgtcaaaaactgtagccggcacttggaacactgaaggaccctccttctgctgtgcctccaacaatgattcatgtatgg

SEQ ID NO: 403715 - DNA, 122 bp, Homo sapiens
ggcacagaggcgagtcggcccgggtggcgccgggaccaggcgggatttggggcgggtatccgggcccgggcgctggcagcctccctgcgacccccggccctgcgtccccgcccgcggtcccg

SEQ ID NO: 403716 - DNA, 122 bp, Homo sapiens
tttaacaagtgggatggaagagacgttatttccctgaaaaaatctgctgaattggccaggcgcggtggctcatgcctataatcccagcactctgggaggccgaggcgggtgaatcacaaagt

SEQ ID NO: 403717 - DNA, 122 bp, Homo sapiens
acaggctgcaacaggcgcaaggctgggtccatctccgctatccacagacctaggaggagacgccgcggttcctgagtctgaactggaggtaacaatattcctgctctgaggagctcccggag

SEQ ID NO: 403718 - DNA, 122 bp, Homo sapiens
aacaatccattagacctcagcatttatccggagcgggggaggacggagggacggggctggcgtgctccacctggccctgggaggcgcagagctgccccacaggtggcagggggattaatcag

SEQ ID NO: 403719 - DNA, 122 bp, Homo sapiens
ggggcacctaccctgtgcgaagccaggtggcggctccacttctgtccccggaacctcaaacgcaccacccagacacaccgctgtggccgtggctgctctgcctcccccaggctgtgcacgca

SEQ ID NO: 403720 - DNA, 122 bp, Homo sapiens
cgagggtttcaggctgcaaagcgggaaagtcttgggggccgctctgcgctccaagacagacgcccacaatctcttctacgtcgtgcaacattcaagcaggcggcctccttcccgcgctttcg

SEQ ID NO: 403721 - DNA, 122 bp, Homo sapiens
accaccttgtatgtccatcagcatttatcaataatccctagtcaccttgtttgcattcctcgatcagttgacctgcaaactagctgtcttgctagttaacctcacgaggactgggggtggct

SEQ ID NO: 403722 - DNA, 122 bp, Homo sapiens
aagctattccccagaagaaatctgtaatcaaagataagctctgccgggcacagtggctcacgccttttggaggccaaggcgggcggatcacctgaggtcaggagttctagacctgccaggcc

SEQ ID NO: 403723 - DNA, 122 bp, Homo sapiens
gtcaatcccatcattgtccgcccgcctgttcccacggtgccggccccgttgccatgctgccgggcctttgcttgctggctgtctgtaatccaagatattgtgtgactgagttatgccattaa

SEQ ID NO: 403724 - DNA, 122 bp, Homo sapiens
tgttaaaatgcaaccatgcagagctctccgttgaacaaaacccagtagcggctaatcaagcggtcacccgttcccggcagaaaatacccagcgacgcgcagctgagcaccgagaggagcaca

SEQ ID NO: 403725 - DNA, 122 bp, Homo sapiens
agctgggaatgtgcatcaggcaactcaagtttttcaccacggcatgtgtctgtgaatgtccgcaaaacattgtgagtattgatttggggggttacaaataattcctagcaagtaggtgaatt

SEQ ID NO: 403726 - DNA, 122 bp, Homo sapiens
actgccaggcaggtgctggaataagcagactgaccaatagggattgcgtgaaccggctcccggggaagctgggggaggggtgcagaactattcgacttgtgggcaaggtcaggtttctgcat

SEQ ID NO: 403727 - DNA, 122 bp, Homo sapiens
ccccctccggctcggcgccggatagtaggtccccctgcggggcgggcaccgacgcgggctcgtgggtggttgccacgttattgctccctcattgggctcccggccgccctctcccgcccaca

SEQ ID NO: 403728 - DNA, 122 bp, Homo sapiens
cacttgtcacaagacaaggatgtaacctacacaagaaactgaaagtctgaagcaacggagcgcagccggaccccaggctgaccattcacctggagaggaagcctcagggtttcagaatcggg

SEQ ID NO: 403729 - DNA, 122 bp, Homo sapiens
gaccctgtacttttactctctttgcacttggttaagactttatccctgattttatttgatcggtaaggcagggactgccatcattccccattttatagacagaggacagacggccccatggc

SEQ ID NO: 403730 - DNA, 122 bp, Homo sapiens
caaaatctaatcatgtgcgggcactctttcaagtgctttccatgtgtttaatccctgccacgatcctgtgaggtatgtacttctgttatcctcacgtcacagatggggaaactgaggctcag

SEQ ID NO: 403731 - DNA, 122 bp, Homo sapiens
aggtaacgtggcggtggcgtcgcgtctgcggacggtgccggggtctcagcgctcggcacgcgtcagcacctgccaggtgccaggcgctgttccaggatctggggctgcagttgagaaacagc

SEQ ID NO: 403732 - DNA, 122 bp, Homo sapiens
tggctggagaactaagtcagacattgtgagatgtgtccccatcctgcccagagccacgaccgggccagcctccgccctcccgaaagtgacccaaggactttgataagttagtgtcatgcata

SEQ ID NO: 403733 - DNA, 122 bp, Homo sapiens
agctgttcctattcagccatcttggctcctcccctcttgttttgtttttagacagagtttcgctctgtcgcccaggctggagtgcagtggcacgatctcggctcactgcaaccttcacctcc

SEQ ID NO: 403734 - DNA, 122 bp, Homo sapiens
gctccgactccctaggggcgctcccggagccgggaagccttggggcgagtgggcggggctcgggctccagccactcagactaccaggggcgggggcaggaggccgaccccagccacccttaa

SEQ ID NO: 403735 - DNA, 122 bp, Homo sapiens
ctgggctacagagtccttgctgggggttcggggagcgcttggaccccggcttctgggacgcgtcaggtacgtctccgagtccggcgtcgccggccagcgctgcctgggttcactcgggggcc

SEQ ID NO: 403736 - DNA, 122 bp, Homo sapiens
gaacagtgcatgccagggacaggacttccatcttctgtcctccctggagtgtccacagctcgctcagtcctctcccacctccagtccccaggcctttcaacccgcaagacccagaaagggcg

SEQ ID NO: 403737 - DNA, 122 bp, Homo sapiens
gcgcccgcggaaaaagcgcgggaagggattcgccaagtgtcgcgagaagagagcgagacgcggcaagcgcggagccgttccttagcaacgagttgttgacatttccgagagagcgggagcgt

SEQ ID NO: 403738 - DNA, 122 bp, Homo sapiens
aggaccctccgggcccggtggccgtcgtgacagcagcatccagcggcggctggagagcaacgagagggagcggcagcggatgcacaagctaaataacgccttccaggccctgcgtgaagtca

SEQ ID NO: 403739 - DNA, 122 bp, Homo sapiens
aatcactgtagttaaaaatgtatgggatttttgccgtcggagcacctcgtatccggcgcgcgggcccagtgtgggactgcggctgggagcccgggccctccgggagtgaagatacctttgga

SEQ ID NO: 403740 - DNA, 122 bp, Homo sapiens
tttagcagcatccctggcctgtctgccactagatgccagtagcaagtccttactctttcccgcttcaatcctctctcaagtgtcacaaccaggtctctccagacattgccaaattaccgcgc

SEQ ID NO: 403741 - DNA, 122 bp, Homo sapiens
agattgttgtatcaaaccgtctgtttagaaaattccattttatttgagaaacccaaaacacgtaaactgtttctagaagcatactttggaagcaggcattgcagtttgaattacagaagtga

SEQ ID NO: 403742 - DNA, 122 bp, Homo sapiens
tggaatgccttgttttcatgtgtgccctgaacaccagcctgctaaggcaacactgctcttcggcaggctgcatcttcatgaacatggcagccacgaggcaagacctggatcccagcctgctc

SEQ ID NO: 403743 - DNA, 122 bp, Homo sapiens
gcctctggggaggcagaaacaaaccctcagatcttgccactgggaacctttcagcgccagcgacatcaaagaggggcggcggcggcgggggcggccggcggatgcttctcttaaagggccac

SEQ ID NO: 403744 - DNA, 122 bp, Homo sapiens
gcgccccctggcggatgctagtcctcgacgggctccggacgctcagctgagtgaggcgggcgcgcgtgggagggtgtcccaaggggaggggtccgcggccagtgcaggcccggaggcggggg

SEQ ID NO: 403745 - DNA, 122 bp, Homo sapiens
atccccactaaaggtctgggtaaaagtcctgaaacctcctctcaatttcagatgccctcccgccaatcagctgactccaagtggagcaaagcccaggtcttgacatagatacagataacata

SEQ ID NO: 403746 - DNA, 122 bp, Homo sapiens
cttctcgttccgcccctgcccgggagccccgcgtcctcattggcgagctccagggtggcccggcccggacaccccagtgataaaatagatcatctacacggaaactggcgcgctccaggggt

SEQ ID NO: 403747 - DNA, 122 bp, Homo sapiens
tgattgaagccagaagatctgccttgcaaatggcttaattacatcacttacaagttgatgcgggctattggcagtatcctcagtccctttccataggactgtttgagtgtcttcataacatt

SEQ ID NO: 403748 - DNA, 122 bp, Homo sapiens
ggttgttatctgctgaatcttacagtcattgccatttctacactctgcaatgtctatgagcgtttattcaaaaggtgccaaacattagactggccagtgtgttgctgttgcacagtgtagtg

SEQ ID NO: 403749 - DNA, 122 bp, Homo sapiens
gccatggtctctgaaaactgggccctgtaaacaattttcaggcgccaggaacagaagaaccggcagaaacagccctagagcttgagccaaatggacggactgttggcgctgctgagggcgaa

SEQ ID NO: 403750 - DNA, 122 bp, Homo sapiens
agaggcaggtttgagttgagaactcagttttgccaagaaaacagagatcaacctggaatgcgcagagactttagcctccaggatgagactgcagccaccttgaatagccaaggcttgtttta

SEQ ID NO: 403751 - DNA, 122 bp, Homo sapiens
tgtttgctaaaccctcaatcctgcttttcagtcttggcaagattccccagcatctccagtcgtagttcctaactttgcctaactattaacactctccaatttgatttcactattactgatct

SEQ ID NO: 403752 - DNA, 122 bp, Homo sapiens
cggggggcaggggcaccatagtggggttgccttgcatctgaggggctcctggagaagctgcggcagccgcctgctgctgttgccatggcgggatggaccctgtgccagcgctcgtggtggta

SEQ ID NO: 403753 - DNA, 122 bp, Homo sapiens
gcctgccggcagcacagtgcaccatctaggagatgggtcctccagccctagccgagccttcggaccacttcaccccagacaacatctagcctcacgcagccggaaccacctgtggcgaaggc

SEQ ID NO: 403754 - DNA, 122 bp, Homo sapiens
aggcggccaggacacggggcgggtatgggacacagggcgggtatgggacacggggctctgcgccggacctcccaccccactcacatgtctggtgagtgcacggtctgcacgtgcccagccta

SEQ ID NO: 403755 - DNA, 122 bp, Homo sapiens
gcagataagggaacttgcacaagggacttgcctaagcatgcctgctgcggattaagagcgcgcatgcgcactgggggaatgggatggagccacccgggattctcgccttatacaaacaggga

SEQ ID NO: 403756 - DNA, 122 bp, Homo sapiens
gacatttgggccagttgtgttatctctacaaacctcagtttcctaatctctgaaattggacggtaagagaatgcctgcctcacaaggtcattttcagatggacacagatggttgcatagtgc

SEQ ID NO: 403757 - DNA, 122 bp, Homo sapiens
aataagccggggtttttaaacagtagttttgaggcggcgagactggggaatccccggttgcgtcattagtaggcgtggaggggcgggactcgtgaagctgcgctggggccgggctctgagag

SEQ ID NO: 403758 - DNA, 122 bp, Homo sapiens
tcgtgcccgcacttcttcgtgggcatctgggcccgagtcctccgcttgggggcggttgtgcggtcctggctactgcagcgtccgcaccccggccgggaaggctatgccaatgtccgacccgc

SEQ ID NO: 403759 - DNA, 122 bp, Homo sapiens
acatttgttagcacagtgcctaataaatgggcgatgtccaataaatttttggtgaattaacggatgagtgactggatggattctgatataattgagacttatttgtgactcggtggtgaact

SEQ ID NO: 403760 - DNA, 122 bp, Homo sapiens
agtggctcctaaagatactttccaaacctcccagttaactctgtttcatggggttaagggcgctgtcttttcttccacacaatcatttgttgcaatgctgtcttgcccaagttatgccatgc

SEQ ID NO: 403761 - DNA, 122 bp, Homo sapiens
cagcctcagctgccccagccagcacacgcacacgcacccgtcccccaccaaccctggctacgtggtgccctgtaactgtaccgcctggtctgcctccaccctgcagccccccgtcgcctaca

SEQ ID NO: 403762 - DNA, 122 bp, Homo sapiens
ggagctgcccagagagggctctggggcgacagtcactgcgcagggacaggacaggactcccggagtcccagctgccggcccagccccaccctgcggccgagaggaccgagggccgagctgct

SEQ ID NO: 403763 - DNA, 122 bp, Homo sapiens
gttcgtgtgtgtgtgtggacacattttccttttcggttgctctgtcctttggttcgtgctcgcctcgctttttccacactcctgctctctggctctctgtgtctctcgctctttcgaaaatt

SEQ ID NO: 403764 - DNA, 122 bp, Homo sapiens
aacatttcctctgtggaccaagaggaatgcaagaggaggctgcctgcggtgcatcttggacggctagagagatgtacccctacttgtgaaggtgcacgaggaagatgaagctgggatcgagc

SEQ ID NO: 403765 - DNA, 122 bp, Homo sapiens
aactgaaagaagaatacggaactgttattccgctcttcgcatatgaaatgctcgaattaacgttccagtcagtattctgtccattctcctccctcactttcaccccctccactttaaaaaaa

SEQ ID NO: 403766 - DNA, 122 bp, Homo sapiens
ccatggctcccgcagaggccgagttgcctcccgggagcgcgcttctgcgggatgctggggcgcgagcgggactgttgactaagcttcgttactgggccctggaagcgaggtcagagctggaa

SEQ ID NO: 403767 - DNA, 122 bp, Homo sapiens
gcgaaccccgggcccctcctgcttttccttggctgggggtgtccgatttctgtcaagtttcgttgagttcctgtccaagaagccctgtccagagagaaacgtctgagctcaagggcagcccc

SEQ ID NO: 403768 - DNA, 122 bp, Homo sapiens
ggccggtcgcccctcctttgttccattcccgggggattggagtagcgttggagtcaccgacgccatcccctcccgcctctggcgtgcatggagcatgcgcttccttcctcacttcctctgca

SEQ ID NO: 403769 - DNA, 122 bp, Homo sapiens
gatgacgacgagggaagcaatgggatactaagctacagcctaagccccagtcagcactttcgcctggacatgggatcgcgggttgacggcagcgaatacccggagttggtgttggagaaagc

SEQ ID NO: 403770 - DNA, 122 bp, Homo sapiens
aagtcatcttaattgctctcacagataagccggtgctgggctgccggcctgagtactgtgcgcccagagtgcgcaggcgcaaacatcctgggttgctgttttggcctctttgttcgggcgtg

SEQ ID NO: 403771 - DNA, 122 bp, Homo sapiens
acatacacatgtaaaaacacggaggctccgtttgccagctgtgtacaagtcagtatgtgccgtcaggatgcaaacaatagatacctgtctatctatgattgtaatgcgtttgaggagatgta

SEQ ID NO: 403772 - DNA, 122 bp, Homo sapiens
cgaactcttggctcaactctaaagcggtgattttaatgccagatgcaaatgaggactgtccgttgtccaaaaacatcagtggtaacttgagtaagtctcagtgcccacatggtccaatctgg

SEQ ID NO: 403773 - DNA, 122 bp, Homo sapiens
gaacagtgagaatcagccgaaaaaggctgtggtagcagataaaacgattgaggcctctatcgatgctgtgattgcacgagcctgtgctgagcgagagccagatcctttcgaattttcttctg

SEQ ID NO: 403774 - DNA, 122 bp, Homo sapiens
ccgtcgtacgtggggcgctcgcgctgcgtgcagacgcgcttgattggttagataagggggcgggggccgccgctgttaccaggcaactgcgccccggatccgccccctgacgtcacgcgttg

SEQ ID NO: 403775 - DNA, 122 bp, Homo sapiens
cgcagcgcagcgccgggtcccggtgcgtccccgaatccacccacccaggggtcccccatccgtgtccccgcaagctggcaatttacctgaagccgcagccccagccgcgcccgcacccgagc

SEQ ID NO: 403776 - DNA, 122 bp, Homo sapiens
aaaaccaggtacactcctcccccatatatacacctgtatatatgtacatgcatacacgctcggccaagccaggccctcagaggctttggacaattactaaattgcttcttttcgtttccctc

SEQ ID NO: 403777 - DNA, 122 bp, Homo sapiens
tttctccacaactcagggtccttccccatttcagagttctcttgtgttccttggggttcccgggcgtgcgctgtgcttggctgtggcgaccggagattctccggttattggggtgaacccct

SEQ ID NO: 403778 - DNA, 122 bp, Homo sapiens
ggaagggtctggcggagggttggccgctgtctcctcactcctcagcggggtcctgtcttccgacttttgtctcgcgccgccgcagcctgtggactcctgggccctcctctgagagcctgcgc

SEQ ID NO: 403779 - DNA, 122 bp, Homo sapiens
gtgttccatatcaaatccacacccacaccccccgccgggcccgcttctcctgagactcagcggttggtcggctaacgggcatcttcaatgacgcagtgaagaaaagcccctgtttccccaaa

SEQ ID NO: 403780 - DNA, 122 bp, Homo sapiens
tcccaacactttaggagtcccaggcaggagaattgcttcaagtccagcctggcaatatagcgagattttgtctctacaaaaaatttaaaaattagttggacatggtgttgtgcacctgtagt

SEQ ID NO: 403781 - DNA, 122 bp, Homo sapiens
aactgccatcagatcatgtcaagtatttgggaacaggagtaatatgggcatggccagacccgccaggagggatacaacttgtactcacaataccatcatctcagtcagacactactgctgcc

SEQ ID NO: 403782 - DNA, 122 bp, Homo sapiens
ctccaggcagcacgccaggcaaggagaaaacctcagcgtgtcggaccggtttcagaaccacggacagcaccacaccagggctgcttcctcacatttccggtcctgaaaattgctcattcact

SEQ ID NO: 403783 - DNA, 122 bp, Homo sapiens
gcagagcagcagataattctggattctcaccggcaggggtcagtgcagctaagcagacgccgcacagccggctaacttggaaagacattaggagcttggtcttgaattaataccattctaaa

SEQ ID NO: 403784 - DNA, 122 bp, Homo sapiens
cagcctctggctggtggtggtggtggtggtggtggggcaagtcctcgcgcctctctcctccgcctctctcggccccctgccacaggctgcggtccccgcccagcacccgcacccccttctcc

SEQ ID NO: 403785 - DNA, 122 bp, Homo sapiens
ctgtttatggagggctgggggcttgggtctagagaatttctctctgagaaactacgcccccgggggaatcggcccccccagccctgcgccagaatcccctgcagcaagtttcggagcaaggc

SEQ ID NO: 403786 - DNA, 122 bp, Homo sapiens
gatttggtcccaagcagcactgccattcctcacaacagatttatttcagcatgatttggtcgggcgggggggatttaggatgagttgagatcccagtgatcttctcgctaagagtttcctgc

SEQ ID NO: 403787 - DNA, 122 bp, Homo sapiens
ccgcatggccgcccgcctgccctgcggtgtccataacaaccgcgggcagccgggctggcacgccctcctgtggagggacttctggctcggccttggtggtttctggcacaaaccctctctcc

SEQ ID NO: 403788 - DNA, 122 bp, Homo sapiens
ttcccagttttgcagataaggagactgaagtgcagagaactggaataacttgcccaaggtcgcagctggcaggccgcacagctgggattcagacccaggactgcctaaggttggagccctgt

SEQ ID NO: 403789 - DNA, 122 bp, Homo sapiens
gagcttcgccctctggacatccggctcatcgcctgccaaaggtcctgtggctggaggctccggcctcctcaccctcccacagggtcccagggccgatccaggcctgcgggccaggaatgtgc

SEQ ID NO: 403790 - DNA, 122 bp, Homo sapiens
ggaggaggggcgctgcggggcccgcggggctcttggggtggggcgggggtgggcgcagggcgccgccgcaccctcgccggtctgtcccgccggggccccgggccgcgggcggcgctgcggtc

SEQ ID NO: 403791 - DNA, 122 bp, Homo sapiens
tgtattgcgctgctcagatgttgcatattttacaaattgaaagtctggggcagccctgagcgaccaagtccatcggcgccattttcccacagcacctgctcactcggtgtctctgtgtcaca

SEQ ID NO: 403792 - DNA, 122 bp, Homo sapiens
caagcatctctctccttcagtgagctcggcaagattgctcggtagagggcggtggagggacgttgcaggaggaaggggcgctcctgccatttccagtgagggccacgggagggcggtccggg

SEQ ID NO: 403793 - DNA, 122 bp, Homo sapiens
tgtccagccactgtcgtgagcaccacatgtccacagctggttcccagcacgctcctcttgcggccccagctcggtgccctggccaaaagccttggagtcatcctcagctgctctcttctcct

SEQ ID NO: 403794 - DNA, 122 bp, Homo sapiens
ctttgtccccactgtgcatgccggcttgagactggagccccgcggtgcagggcagttcaccgggtcctgcaggaccaggtgccagccactaagggggggcaccgccgatgccaggggttttg

SEQ ID NO: 403795 - DNA, 122 bp, Homo sapiens
aaaaattaagagcgtctttgcttgtgctctgctgcaaggatctgggctgaacaatagagccgggcctctgccagccctcccacaccagttagtcagagcaaaccagtcctcctcctctctgg

SEQ ID NO: 403796 - DNA, 122 bp, Homo sapiens
gccccgcggctggaggaaggacctatcttcctcttttccgccctccgactgagagagggtcggaggtgggcgacatccggagcgaaacggtctcgaaggaggccggagtcagaactcaccgc

SEQ ID NO: 403797 - DNA, 122 bp, Homo sapiens
tctctagtggttttgcctgctaatcttctttttccctgaaagaacaccctcacggcacggcgttttccttaacggtcaggcgttttcccgggcagcttacctgctcggcctgggtctttctg

SEQ ID NO: 403798 - DNA, 122 bp, Homo sapiens
ctttttacctttgaagtgtgtgattttgctgcttttagaatttaaatattcctacaatgtcgttcagccatggtgccctgtgtatttttacatagcctaaggagaatgtaacaggtggctga

SEQ ID NO: 403799 - DNA, 122 bp, Homo sapiens
gccaaccgttggaagcttcgtactcaacggccacaggtgcctaggagcgcagagaggcctcgggttcaaatcaccggcgcgcagggactggactcgcgggtagcgacccccccaaccccccc

SEQ ID NO: 403800 - DNA, 122 bp, Homo sapiens
tgtgtgtgtgtgtgtgtgtgtgtgtgtgtgtgtgtatttaagtgtttgttgaatgggtggcggaactcattggcaatatgctgtttatgttgctgggctccttctctaacactgagaagttt

SEQ ID NO: 403801 - DNA, 122 bp, Homo sapiens
atattttctgggtaaatggatgggtgagtgaactcatgaagggatgctccattagatgaacgcttggataaagggcgttagtggagggacagaattgcagctccgtcctcccagggggcgct

SEQ ID NO: 403802 - DNA, 122 bp, Homo sapiens
ccattggtcacgaggatgaccaatgagcgctcggatcgaggtcctaccccgggcctgactcgaaagctcctgccaaaactttgggagtttttagagacgagtttttttttttttctattact

SEQ ID NO: 403803 - DNA, 122 bp, Homo sapiens
tgagcttcgggaatggtggcctgcggggcctggagctggagcgaagcctctggagccctgcgcagcgtgggaggtgtcctccgcccggccatcttcctctctgcagacagctgggcacctgc

SEQ ID NO: 403804 - DNA, 122 bp, Homo sapiens
ctcaaaaagctccttgttccccagaaaaatgcaccaaacttaatattttgcatccacagacgccacagggacaagagcccgtgatgtagagtttcagacaatacatttccacatgggtcatt

SEQ ID NO: 403805 - DNA, 122 bp, Homo sapiens
gtttatgcatgaacagagaaagctgagatacggagactagtgatccgtcgaggtaataaacggcacaggtggggtttgaactccatcagtttgattgcagaggcctggaacaaccctacagc

SEQ ID NO: 403806 - DNA, 122 bp, Homo sapiens
ccacccgcattccagcctcaatcgcgctcccaatttagctgtcccgatcggccgggactgcgggactgcacttccaggcctccctgggggaaagaggccctagagaatgaggacccaggctg

SEQ ID NO: 403807 - DNA, 122 bp, Homo sapiens
agagagaaagacacttgaacatttcagaaagggcagcagttttgaatgtacctccttccccgagagctatcaaaaacctgcctatttttgcctagttcaaaagccacttcctccttgtaccc

SEQ ID NO: 403808 - DNA, 122 bp, Homo sapiens
ctggaataatgagaacaagtgtcccaagactggagcagctggctcgcctgttttgaggagcggggagaggactcagggagtcagtctctcaatagttaacccaggcgaattgttcgttgtac

SEQ ID NO: 403809 - DNA, 122 bp, Homo sapiens
gagaccaggatcacccggctcccggagctgaagaggccctctggggaccaggtgcaagtccggaggtgtttcgagtacaaaaagcaggagtacgtggtggtcgaggcggaggaagagcttac

SEQ ID NO: 403810 - DNA, 122 bp, Homo sapiens
tgttgcatgtgatatttcctgttttgaaggtttccttggtatcgtacattggctgtgaaacgccagctgctctaagtgactcaaatttatagatcctttgatcaattatcttgtcatgttac

SEQ ID NO: 403811 - DNA, 122 bp, Homo sapiens
tgtagtaaaagaattgagctactacttcttgaagccaggagaaatgcatgcatgaggaaccgtgggggcatctcagtaagaaggtgttagaatttactatgggcttgcgttatgtgattttg

SEQ ID NO: 403812 - DNA, 122 bp, Homo sapiens
gagcaccgccccaatgcccgccccacggaggggcccctgtggtccgctgggcatggggttcgctgtccggtgctcagagtttgctaaataccatcaggtccaaggcaagcgagcggaggagc

SEQ ID NO: 403813 - DNA, 122 bp, Homo sapiens
cagctctgggcccctcggccgctccctcccctcctcccttgctcaccccacggttggccgcggatctccagcacgccgccccagtcctcggcgtcccgcagcgcctgccagggtcgccgagc

SEQ ID NO: 403814 - DNA, 122 bp, Homo sapiens
catttccgcaggccagatcagaaaagggagctcaggtaccttccagagagtgagacccagcgcccttgtctcgcacccagtaggctttcatccccgccatggcggagctgatccagaagaag

SEQ ID NO: 403815 - DNA, 122 bp, Homo sapiens
tgcattctccttgccaatcctagcctggggaagatggcaccaatctctctctcccatgtgcgccagaacactgtaaaacaggactgactggtcttgctagtgaagtatgtcactcacctttg

SEQ ID NO: 403816 - DNA, 122 bp, Homo sapiens
tgagaggattgcttgagctgagatcatgccaatgcactccagccaagtgacagtgaaactcggtctaaaaaaccagttcaactatcattctcaaaaataaatgaagtgagaggttgtcactt

SEQ ID NO: 403817 - DNA, 122 bp, Homo sapiens
taagatgttaccagagagagttaggaagctgggaatggggtggaagtgttgctgtataatcgtcagacagagttgagatctgaaggaaaataagatggttaaagctcttgactctggaatca

SEQ ID NO: 403818 - DNA, 122 bp, Homo sapiens
tactaacagaatcctgatcttctttggggcagcaatgtgctcattaacatcctacatttccgggcttctcttttagattaggggtagccatgtgacttatggccattaagcttaacagaatg

SEQ ID NO: 403819 - DNA, 122 bp, Homo sapiens
ggtcgcccctgtccggcccttccaccctagttctcttcaccgtccgcccatcctatcgcgcgcggcctcaggtcccgattcggcatgtggcttgtcttccatcgtccccaccctcgcccctc

SEQ ID NO: 403820 - DNA, 122 bp, Homo sapiens
agctgccccacacgggagagggcgagggcgcggaagagggcgctcccccgccgctggagccgcagggcgctgcttttcgctgactctgccaaacacgccattagggcccgcctgggagggcg

SEQ ID NO: 403821 - DNA, 122 bp, Homo sapiens
cgcggaccgggcggggactggggcccaccgcggggcgggtctttcgggcgggaaagattgcggcgcaggctccctttcccgcccgctgtcccgcctcgtctccctcgggcgggaacgcgagc

SEQ ID NO: 403822 - DNA, 122 bp, Homo sapiens
tgggatttactttaatacaatttagcatgaaatgatatggcagaagcagttaagatgacacgtgtggaaagatcctgataattggtgaatatgagtaatgggtagaaaggtgaactcactat

SEQ ID NO: 403823 - DNA, 122 bp, Homo sapiens
ggttcccacggagccgggaaactgcgcgccccaggtccgcaggccgcctcccttccctcgcgccctcgcacccgccctctgctctgccgctcccggtcctgggtgtgcgggagtcccggggg

SEQ ID NO: 403824 - DNA, 122 bp, Homo sapiens
cgcgccgtggcttgagcacagcccggggcttgctgctttccctcgaggcctccagggtcacgtcccgcttggtgttccgatcgaacatgcggaagaagttgttgtaggccccggtcatgatg

SEQ ID NO: 403825 - DNA, 122 bp, Homo sapiens
cttccttataactgagtaattctgaattgcgcttcagccaatcacagatggtcaaccaaccgactggttatataactaggggatctcccattcgaccatacccaggtaaggcaaatgctgct

SEQ ID NO: 403826 - DNA, 122 bp, Homo sapiens
agcacctcaggaaggtggtctgctcctgcagcaagaggggctaacttccggccctggagacgctgtagccatcgtgatgttaaagcaaaatctctgacagatttagatcgtgtgtcagaggt

SEQ ID NO: 403827 - DNA, 122 bp, Homo sapiens
ccataatctctggagacaaagggccttttgactgcacctgggggtgaatggggaccagcccgggtcagacggagctggggatcagatgagcgggagagcagcaggtgggggtgtgtgcacgc

SEQ ID NO: 403828 - DNA, 122 bp, Homo sapiens
aatgtcacagggaccttaatgttacttgtttttccttatgtgatacttttgggaccttaacgttgcttttttttccttatatgatactttaagtgcatttattagacttgtttggcacacta

SEQ ID NO: 403829 - DNA, 122 bp, Homo sapiens
tgttcacgtggttgggaatctgaagggtataagagccggaactgtgtccttgcaccctcacgtccctcccccaggcaccacctcctgtgcagccttcatggccttcgagtggcccagagagc

SEQ ID NO: 403830 - DNA, 122 bp, Homo sapiens
aagttttccccaggaggtttttgttagagcatgtattactgtgacaataacaatgacatgcgctttggagcagggaccagactgacagtaaaaccaagtaagttgggggaatgggtcaatct

SEQ ID NO: 403831 - DNA, 122 bp, Homo sapiens
ccctgtacctgtgcgtgtggtatgcgcggagccagccagcactgcctggcgtggagctggcgggttctcagtctgacatcaactcccggagaatggcatctgctgaactcaacgtaggaagc

SEQ ID NO: 403832 - DNA, 122 bp, Homo sapiens
tgccccatctgaccctctgccagtggaactcagcctcacactgctgtggagtgggaatcccgtagaattgtgagcccctgaagctgctgcacgccactgccacccaacgtggattctggggt

SEQ ID NO: 403833 - DNA, 122 bp, Homo sapiens
cttcagtcagagctgggccgatctcagacccaaatgctaccaccaccaagccctgtgtcgcgacggcagcggctgcagtcaccagaaacaatccttcctgcctcgacacccgtgccagcccc

SEQ ID NO: 403834 - DNA, 122 bp, Homo sapiens
gggctgctggccggccacaggggccccaagctggtggggagggcccttggggcaggcagccgcaggtgggtggctgcagggaaaggctggccccgggctcctgcatggaaccctgtttatta

SEQ ID NO: 403835 - DNA, 122 bp, Homo sapiens
ggatggcaattcatgatttacaaagcacctaagcgaaataatatatcccatcttaatcctcgtaaacacctcataattattacatgattgcagaagaggaaacaaaagcccagagaactgaa

SEQ ID NO: 403836 - DNA, 122 bp, Homo sapiens
cctctctctgtgccggagccctggaccctggctggcatctcctgagagcaaagcgaagcccgcgagtgatctctggggaacttcctagaaaaaagaaagaatttcaggttcgaacggtgtag

SEQ ID NO: 403837 - DNA, 122 bp, Homo sapiens
agcgaggaggtgtggtttctaaagttcgcgtggcggtttccaagacattcctgcttcctgcgggcccctgcagagcccaccagcacccctctggagtcgttcccaaagcaggctctgcatcc

SEQ ID NO: 403838 - DNA, 122 bp, Homo sapiens
ccgtccccaggtcccctcggccgaagcagaccctgtggccccactgccacgcagccgccccggcctccaccgtcctcacgtgcaggggctttccttgtcttgcgtcctgttctttccttttt

SEQ ID NO: 403839 - DNA, 122 bp, Homo sapiens
cgcgagcgtggccggcacccacttgctgcagagccggcactgcactggggttcttgggggcggctcctccagacgtctctgcgggttgtcgggtgctgccgagttgggttgggggacgctac

SEQ ID NO: 403840 - DNA, 122 bp, Homo sapiens
cctggctgggtgggggcccctcttggctgagctcgggtgccccccctccccacccaaggccggccctttcctgtggagtcatctcaccgccgtgcgcacccactcgtaactcgcacccgggt

SEQ ID NO: 403841 - DNA, 122 bp, Homo sapiens
atattacctgacttcagggacaaagtaatgatagaaccaatccagaaaaagtgttcttgccgaggccttcttgtacaacaaaaaaactggcagtgggtattgatcttttccctttaaggctt

SEQ ID NO: 403842 - DNA, 122 bp, Homo sapiens
aagacctcactgaccccagagtggcagaaaggctgatgcagcaggtgagtgggcactttccgggccaggggagtagaggaaggggcgaggttcgcaggggctgcagggaagacccgcaggac

SEQ ID NO: 403843 - DNA, 122 bp, Homo sapiens
ctggactgccgcgatttgcagggtcgacgacctcacagggctcctgagcacagatgcgagcgcggtgccaattctgagagctcccgggaccatctggggaaggccgggcaacccacaggatg

SEQ ID NO: 403844 - DNA, 122 bp, Homo sapiens
ctctttctttgcccctgcagaccatggcagccgtgaccatgtcggtgcccgggcggaaggcgccccccaggccgggcccagtgcccgaggcggcccagccgttcctgttcacgccccgcggg

SEQ ID NO: 403845 - DNA, 122 bp, Homo sapiens
cctgaaacacctccctccgggtacttctgtttcctctctttcattggtcgccttggaggccgctcgcctccggcgcgggcacagagaggggcggggctgatagggcgttgctaagcgacgga

SEQ ID NO: 403846 - DNA, 122 bp, Homo sapiens
tgagacggggcggggcctgcatggggtcctgagaggagtgagtgccgtcaccgagggccgcgccagactgcgacggatacagggagggcaagggtttccttttggcgctcccctttggaccc

SEQ ID NO: 403847 - DNA, 122 bp, Homo sapiens
agccgccggacccacttccggtgcgttttacaatgaactccgggcactcgagtcgctccccggaaactatagttctgcttccaccgttgtcctactttggatgtgagttggagtaggtaggg

SEQ ID NO: 403848 - DNA, 122 bp, Homo sapiens
tccccaaggcccctcggcccccagaccctgcctcccaccagcaggtcccagggcccctgccggagcaggagtcatcagctccaagacctacaggaccgcagcgtgctggaagcccggcgtat

SEQ ID NO: 403849 - DNA, 122 bp, Homo sapiens
tgttgctttctctgcccccagcaccagcctcttcttgggctccctcctccccttcccactcgcgtctcttaggaaactgcgaccctagtgtttgctaaggagcaggggaggtccttcccgtc

SEQ ID NO: 403850 - DNA, 122 bp, Homo sapiens
gttttttttttttttggagacggagtttcgttctttcgcccaggctggcgtacagtggcgcgatctcggctcactgcaacctctgctccccgggttcaagcgattctcctgcctcagcctcc

SEQ ID NO: 403851 - DNA, 122 bp, Homo sapiens
cgtgggaaccctaccgtccacgtgagaaccctaccgtccatgtgggaaccctaccgtccacgtgggaaccctactgtccacgtgagaaccctaccatcgtgcaataattgtcccgcctctac

SEQ ID NO: 403852 - DNA, 122 bp, Homo sapiens
tccattctcatgcagatgctcccattatcaaaccaggactgagggtttatgcggatgtagcgggccaccatggggacgggtagctcattgagaacagggatctccttctcactgtttccctc

SEQ ID NO: 403853 - DNA, 122 bp, Homo sapiens
tccagaggaatcctttttcttccgtctgagttcagcaaacttcctgcttcctctacccagcgcagcgagcccctctctgtactgatcagcaagggtgacagggcttggcagccatggtggca

SEQ ID NO: 403854 - DNA, 122 bp, Homo sapiens
gttgccatggtgatgcgatattctcaggcatgtcatgttcacagatcagtagcagcagcacggttgcagacacacaactgctctcagcctttgaccatcaacaggaattcactctgcagttg

SEQ ID NO: 403855 - DNA, 122 bp, Homo sapiens
acccagcgggcagcgagctgggccgagcgaaggcctcggccacggagctgggcagggaagcgtgacgcgggcgcgagccccgggcccaggccgcgtgcagcagggcctcccgccgggccagc

SEQ ID NO: 403856 - DNA, 122 bp, Homo sapiens
cttcccaactggagagcccttgctgcttcaagaagaagctgagccatgaaaagcaagcagcgcctatgcgtgctgttgtgcctatacctaaagcaaagccaatagctggacatttgcattta

SEQ ID NO: 403857 - DNA, 122 bp, Homo sapiens
tcacaagctggatagcagcttcctccaatctggaattgaagtatgagtctcactttcacacgtatcctcaggcaacagcatcattcccacaacataaagacgaatgtaagactctactgtgt

SEQ ID NO: 403858 - DNA, 122 bp, Homo sapiens
gtggttgggctggcagctcctgctaagagtttatctttgcatccacagccggaaaggaatcggcattcctaggcttgtgacttaaagaaaattaatgactgagccagacacgtcctgaggac

SEQ ID NO: 403859 - DNA, 122 bp, Homo sapiens
tccccaatcaccgagggttcgaatgaaggggtgggatgctgaaggcaagcgctgggtgatcgatcagctgaacaatggtcagatcctggtggagatcccaggtcctcagccaggcggcagga

SEQ ID NO: 403860 - DNA, 122 bp, Homo sapiens
gtgacagggactgccactggggtcaaaggagcacagctccaggaagcagggcggccgaggcgccgctccgtgcgcgctccccggcgggaccccgcgcccctgcacgcccctcccgcagtccc

SEQ ID NO: 403861 - DNA, 122 bp, Homo sapiens
aaagttccccaccccacccccagtctctctgctctatgagaccctgtctttttgggctatcgcaagtcctccttggcatgcctccctcaccggtgaacttctcagtgtcagaaatagggagg

SEQ ID NO: 403862 - DNA, 122 bp, Homo sapiens
ccaagacagccacaccttagtatactgcccaaactaatgagtttaataaatacaaatactcgtttctttttgattagtgtgattagaactgaacaacggcacttaaggaatctggaagatag

SEQ ID NO: 403863 - DNA, 122 bp, Homo sapiens
cattgtccggagatacctactcaggcggcagctcgggcagggggtgagtgcctgggggtgcgtccgcgcgccgaggggcgcggcagatctgcggagagaggacctgcggggcgcggccggtc

SEQ ID NO: 403864 - DNA, 122 bp, Homo sapiens
gtggtgtgactaagaaaagtatctagaaataaagcacagtcagtacctgctctcaaaaaacggctgccaatctagtttggagacagaaaaatatacccgactgagaacacagaggagcctgt

SEQ ID NO: 403865 - DNA, 122 bp, Homo sapiens
agtgtgaatgagacacctcctataggctccaggttgctaacttcatgaggtgtgaagattcggtgctttataaaacagcccccacattcttcataggcctgtccttaattctcagcacccct

SEQ ID NO: 403866 - DNA, 122 bp, Homo sapiens
gggggtcctcggtcccggtccgcggagctgctaggggtgggatctggccgagagctggggcggtctgcggagcacccggctctgggctgcgcgtcgcctcctctgggctctcctgggcccgg

SEQ ID NO: 403867 - DNA, 122 bp, Homo sapiens
cagcacctctgcccaactgatggtgtgggccttcccttaaaagaacacccagtgcattaccgctagagttctacaaattaaagccagatgaacgaaatgctgctaaaagaaagttatgaagc

SEQ ID NO: 403868 - DNA, 122 bp, Homo sapiens
aatttcttatagacagtattaaaataattccgacatcataatttaatattcacatctattcgtgtaacacgcagtataatagagttatgacgatatggatcctcagctgcctgacaatgtat

SEQ ID NO: 403869 - DNA, 122 bp, Homo sapiens
agggaagtgcgcctttacagtgccagatgggaccatagtgacactttcgggtttccatctcggcccccagtcaaaaccagagtcacatagccctggatggggaataacagccggaagccgct

SEQ ID NO: 403870 - DNA, 122 bp, Homo sapiens
ttctttcttttttgttcagacagagtatcactctgtcgcccaggctggagtgcagtggcacgaccctggctcaccacaacttccgcctcccaggcgcaagtggttctcctgcctcagcctcc

SEQ ID NO: 403871 - DNA, 122 bp, Homo sapiens
gaaggggcgggcggcgggaactaaatggtccctgggctcccgggcctctaaagggcgctccgcaggcggcaggcggtggccccggggctgcgtctcccgccctcctcctgcgccccaaccca

SEQ ID NO: 403872 - DNA, 122 bp, Homo sapiens
tggtaaggctatgaggttggggagagctcgtggtatctgaggccggcgtagtggtttgtgcggggggaggggacagagtgacttttccaagatactctggtttctttaccctcatttccgtg

SEQ ID NO: 403873 - DNA, 122 bp, Homo sapiens
gggctgcctccttctcttccttcattgccacctttcctctgtgtggctcccgggagtgtgcggttaagtcatcagactcgaagtgcctagagatccggaggaagccgcgccggtcttcccct

SEQ ID NO: 403874 - DNA, 122 bp, Homo sapiens
ggcctgacccttttctgccgcggacaattgatccgaaggacgccggctgcccagccctggcgggccactactgacctagtccgaagttaggaacagccttgcaaaccgccccctccccctcc

SEQ ID NO: 403875 - DNA, 122 bp, Homo sapiens
tttaggacagcgcccggggcagagccagctcggagccagcgctgcacagctgtgaggggccggctttaggctcacaccgcctgtatctgaaacgctgggacgggtatttaaccccctgaacc

SEQ ID NO: 403876 - DNA, 122 bp, Homo sapiens
gctgtcggggcccgtgccggccccggggggccacctgctgggccagcggtgccctcgcgccgaaacacactgggagaggccagaatcttccggaacagccagcccttacccatctctccctc

SEQ ID NO: 403877 - DNA, 122 bp, Homo sapiens
ctcgtgtctcgggtgctgtggtcaggcgttgtctgtgtggtggccctgtgtttccgtccccgtcccactgcaccgatgacagggtttgcagctggcgcttctgctgcgagcagactgaggag

SEQ ID NO: 403878 - DNA, 122 bp, Homo sapiens
ctcctggccagcccatcctcactgatgccttgggaggctgcgtttgggcaccaggaacagcgtgggccacctggcctttggagcacagcactccgagtgtttgtggaactgcagtatctgta

SEQ ID NO: 403879 - DNA, 122 bp, Homo sapiens
caaaacagacaaattgagtagagcaagtgttttcccaaaggaaaactgagtcactattaccggaagaaagggacatgtatactgagcaagcaaaacctatggaggccctctctagtgcaggt

SEQ ID NO: 403880 - DNA, 122 bp, Homo sapiens
gggaagagcaggagttaggactgtggccaagaaagaatgcatgaaagagacagagaagaacggtcagggaagtaggagaaccaaggcggtattttagcctagaaactaagggaggagagaat

SEQ ID NO: 403881 - DNA, 122 bp, Homo sapiens
gggagggtcattgctacaagctggttagcatcatctccaagacggtggtgctggggctggcgctgcgccgcgagggcccggcgccgctgcacttcctgctgctcacggacacgccgcgcttc

SEQ ID NO: 403882 - DNA, 122 bp, Homo sapiens
cgagcgagcgccgagcacagccgagcgcagcctgcaggccggaagaagcggcgcggcggccgcttgaaaagctagctgacccaggggcggccacaggagctctggcccgctgaggctggcga

SEQ ID NO: 403883 - DNA, 122 bp, Homo sapiens
gagtttgagactagcctgggcaacatagtgggactgtgtccctgggcaacatagtgggaccgtgtctctgcaaaaaaaaaaaaaataaaaataaaaaattagccacagttggtggctgtgtt

SEQ ID NO: 403884 - DNA, 122 bp, Homo sapiens
tgccatcctgcctggggcgtgaatcatcccttcatccagcgtatctatgctgtatactagcggtccccaacttttttggcaccagagaccagatttgtggaagacaatttttccacggacgg

SEQ ID NO: 403885 - DNA, 122 bp, Homo sapiens
aggggcgcttacctggagccattgccactaggtgagctgtccacaggaccctgagtggttcggggagttgggccttgggatcctagagccggtctcttgtgggccctttttataccctggcc

SEQ ID NO: 403886 - DNA, 122 bp, Homo sapiens
gtatccagtgggaggaaggcacccattttccttaactttgctcatcaagcaccatgtcttcgtgttgcatctcccagtgtctctttctaattctaaggtgttttaagggctggaaacacagc

SEQ ID NO: 403887 - DNA, 122 bp, Homo sapiens
cagaaagaagccggacaacaggcccacaagccgccccgcagacgcgcacgggaacaaacacgaacacgttgtgagccaggccagagaattatctttgtgcacgtggagaagaccttcatctg

SEQ ID NO: 403888 - DNA, 122 bp, Homo sapiens
tgctaagacaacatgagactccggaacacagacagcacaagtcccaggccagaagacctccggaccttcatgttagcaacttatttatcagcatcctatcattttgaaatgggaaaaacatt

SEQ ID NO: 403889 - DNA, 122 bp, Homo sapiens
ttgcgaggctggcgcctcagggttttttgtttttgttttttaacattaccagcattgtggcgtcttcgtagctctggctgtgcctcactgagatccctggccaggagagttcccgtgtggca

SEQ ID NO: 403890 - DNA, 122 bp, Homo sapiens
ggccggacactcaccctcctgcggccccgcggcacggccccgacccggcgggacggcccccgccagcagcagcagtggcggcagcagcagcagcagcagcagcaccgcccaggccgccccgg

SEQ ID NO: 403891 - DNA, 122 bp, Homo sapiens
gaaggaaagagcagagagaaacaagaaaaagtggagagtgaaaattagagagagcccagacgaggtgaagtgtaggagagacagcagattcctggaaagtagagtggcccggctatttgtcc

SEQ ID NO: 403892 - DNA, 122 bp, Homo sapiens
cgtaggaacctctccctggacgtgccacgcccgccggcccctgcctcgaccccccgtcaccgtccatccctcccacggcccgagcgcccgacgtccagccaggacctggaaggtgcggggtc

SEQ ID NO: 403893 - DNA, 122 bp, Homo sapiens
ttgcaaaacaaataaacaaaataaaactcattgctatataagcaaatactggtgatttggcgactgtagcagacacttgtgtatactgaactcagcgctgaagtggagaagatgctgggatc

SEQ ID NO: 403894 - DNA, 122 bp, Homo sapiens
tgtgagccttttggttatgtggaatctgttccttagctctgattttttattcttatggagcgtcttaggttactacatgaaggtaagactgccacagtcccccagggaggcacactgtgttt

SEQ ID NO: 403895 - DNA, 122 bp, Homo sapiens
ccttttatttctttttcttgcctaatcatcctgatagaatctctagtacaagtaagtagacgtggcaagaactgatatatttgtcttatttgagagctgaggagtatttttatgcaatctga

SEQ ID NO: 403896 - DNA, 122 bp, Homo sapiens
atggccatcaaaaagttagagcaatattaagttacacaaataaaaataatgactatactgcgttattgggcattcactaaatgtcaggcactgttcttggttacacatattcttgatacata

SEQ ID NO: 403897 - DNA, 122 bp, Homo sapiens
gagcgtcgtgtaacccttggagggctgggtttggagcccgcgacccgaggtcgggcggggcggtggactttcccggggaacgccgcctgagggacacccagagcttcggcggagcggagcgc

SEQ ID NO: 403898 - DNA, 122 bp, Homo sapiens
ctgataaggcaaagcaaggcaaggcggcgggggggcactgtttctggggcacaaacttcacgttggcctgtctggggctggggttaaagactaaccctgtgtccaaagccaagtcaaatatc

SEQ ID NO: 403899 - DNA, 122 bp, Homo sapiens
tctgtagagcaatgaagttagaagggtccagacagatgctggcatcccgtccctccacgccgtccaggcttttggctagtaacactggttgtcccagagcacaactgtgaggctgctccagg

SEQ ID NO: 403900 - DNA, 122 bp, Homo sapiens
gggaagggctgtctacagaatattatggttttcaggtttcaaagacttcaacactatctccgatgaccagattattcaaaaagttagcaataaaaagggtgctaagcaaactcattcattca

SEQ ID NO: 403901 - DNA, 122 bp, Homo sapiens
tgaagcgtgtttttagttcttagaaactctattctctaatgagaattagcatcttctcatcggggaaccaaatagtaaaattgcacccaagtgcctgcctggtggggaaggaattttaaggt

SEQ ID NO: 403902 - DNA, 122 bp, Homo sapiens
acaggggaaaacatctccgggcatactgggagcagctgctgggggccactggtcaggctgcgggggtcactggttggactgggagaggccagtgcaggccactcggacggcacgcttggggc

SEQ ID NO: 403903 - DNA, 122 bp, Homo sapiens
gctgttccacagccaccaaccgcacagccggcacagtcccgcccgcgcagctggcccaatcgggcctgggctgcaaaagcccagggaatatgagggctccctacttccaagtttctttaata

SEQ ID NO: 403904 - DNA, 122 bp, Homo sapiens
ctaggttttatgtgaactccagtcatcacagtttaggtgcggctagcgattttacagatgcggggttagtaactggcccaaatccagggcttccgggatgctgttttccttttttgtttctt

SEQ ID NO: 403905 - DNA, 122 bp, Homo sapiens
agcccaggcctagacaccactttgagacgggagctccctgccgatggaagacccagtctccgcctctcttggcctctcctttgcccaccccgcccccggaatgctgccgaggacccagcccg

SEQ ID NO: 403906 - DNA, 122 bp, Homo sapiens
gggtataccctggcttcctcacttcagaaaattctagaatgacaatatttatttacattacgctttagactacattactctgcatcaaaacattttcattttattcacctgtattaaaaatg

SEQ ID NO: 403907 - DNA, 122 bp, Homo sapiens
tgcgctggttgccaccgcgcacctctcagggtggagcaaatcctccgagtgtggtttcctcgcgtcccagagcgctgatagccacaatccaggacgggaggctctcgcctgtggccttcctc

SEQ ID NO: 403908 - DNA, 122 bp, Homo sapiens
gttctgctggttttgtttagactcacctcctggcaccaggcacagagctaagcagaaagacgtctgttaacaaatatttgccggacatcaagcttgtctgttcagcaccagctgctcattaa

SEQ ID NO: 403909 - DNA, 122 bp, Homo sapiens
ctcaggtgatccacccaccttggcctcccaaaatgctgggattacaggcatgagccaccacgcccggctgcctttgccagttttctacatcctatgtggaacccagaaatccctgatgtcca

SEQ ID NO: 403910 - DNA, 122 bp, Homo sapiens
gctgcagctggcatcggatcctggccacccccgcagtgcatatcagagatcacacacacacgcgtgcacacacagaggtcacgccggatgtacacatgcacacatagcgcacaaggatgttt

SEQ ID NO: 403911 - DNA, 122 bp, Homo sapiens
ataattatgatgaagtcagattcaccaagggacacttaaaaacatatctccctccatggccgggtgtggtggctcacacctgtaatcccagctctttgggaggccgaggcgggtggatcatg

SEQ ID NO: 403912 - DNA, 122 bp, Homo sapiens
cctgcgctcagcgtctcccagggtccctgctcccaagtccccgctcccccgcagcctggacgcctccccaggctctgccatcgctcggcggcctcgctgccccaagtcttcgtggctcagca

SEQ ID NO: 403913 - DNA, 122 bp, Homo sapiens
ctaccccacagactccctctgtgtttacggctatctggttcagttggctgtggcgagttgcgggcctttcttgaggtctcaggtcccagcattgagcagagtgcccagcacatagtaggaac

SEQ ID NO: 403914 - DNA, 122 bp, Homo sapiens
gatcaacagacttgcagtgaattattctgtcaagttgttaagacattagatttccctttgcgttctctttccctctcccaacatggctgcctcagcgaaaaagaagaataagaaggggaaga

SEQ ID NO: 403915 - DNA, 122 bp, Homo sapiens
atttttttagctattataattaccaggccacaacagcaatattttataatgttaaaggaacgcgggctctagagtcagtctacttgggtttgtatcctagattcactaaataccgttgacat

SEQ ID NO: 403916 - DNA, 122 bp, Homo sapiens
ggccaactagtgcatgtgacccagtgtcagatatatccccaaaatatccctggcaagtggcgggatgatctcctaccccttcgcttgagcaggccggaggccaggagctgagactcctcatt

SEQ ID NO: 403917 - DNA, 122 bp, Homo sapiens
gcaatcgcggctccacggcggctggaatgcaattaactgagctggaaggcgtccagcatgcgctctcctctcgtgaagaaaagctctgtgcaaccttcatgaccacgtcagattggaccctt

SEQ ID NO: 403918 - DNA, 122 bp, Homo sapiens
tctatcacgtgctgtgtgtggcctctatcacactctgcgtgtggcctctatcacattctgcgtgtggcctctatcacgtgctgtgtgtggcctctatcacactctgcatgtggcctctatca

SEQ ID NO: 403919 - DNA, 122 bp, Homo sapiens
ctgaacttgagcaaagacagagctaggcctagcctggggacccgagggcctgccctcatccgcaattctgcctcttttctggccactgaggaccgggctagggaagctgtaggggcagtagg

SEQ ID NO: 403920 - DNA, 122 bp, Homo sapiens
tgggataacctcccaaaactgcaacgccatcagtttcttcagcggaattgttattatctacggctcgtccgaaaacaaggggatggagtgtggggtggaagcgccccagcagcttgccactg

SEQ ID NO: 403921 - DNA, 122 bp, Homo sapiens
tggcctgagcgcggctcgtcgtccgcgtccccggcggcggctgccatggcaacggctccgcgcgggcctggccgcctgagcctcgttcccgaccgaccaacggacctacttccctccgccct

SEQ ID NO: 403922 - DNA, 122 bp, Homo sapiens
ctctgctatcaggatgcacctggaccccgtgaagctcttacccagctgtgggagctctgccgtcagtggctgaggccagaatgccacaccaaggagcagattttagacctgctggtgctaga

SEQ ID NO: 403923 - DNA, 122 bp, Homo sapiens
agccctagctatcactcctcttccttgtctcccaccgttcctgtctcctggagtcatctccggccagttccgcgtgttcccctcaggaccccgaaacgttatcatttaacagccggaccccg

SEQ ID NO: 403924 - DNA, 122 bp, Homo sapiens
agaagggggctggtcaagggaagtgcgacgtgtctgcggagcctttttatacctccttcccgggagtccggcagccgctgctgctgctgctgctgctgctgccgccgccgccgccgccgtcc

SEQ ID NO: 403925 - DNA, 122 bp, Homo sapiens
cgacggcgcctcggatctgggcggtgaagcgggcatagagggcggcgatgatagacaggtcggccacgggaaagtaggtgaggccgccaggcgggtcgggggcggggctgggctggaaggtg

SEQ ID NO: 403926 - DNA, 122 bp, Homo sapiens
gggacagccagatcccagagcccaccgtgtgccaggaggctcctaaaggctttacaagtgcgattgggtttaatctttacaataacccctaaagcaaggctcatcattcccattttgcagat

SEQ ID NO: 403927 - DNA, 122 bp, Homo sapiens
cgcgcggacgagcaggttaggcgatagaggtcacgtgggccagctgtggccaatggggagcgcacatggcgacgcggccggcggcggcgcgcgcgtagctcgcctcgggctcctggcgggag

SEQ ID NO: 403928 - DNA, 122 bp, Homo sapiens
cttagtagctttaaccaactccctgctggggccggtgtaactaaatgcagctgctatgaccgtccttggattcaaacctagaagcacccttactcatctggtaagcactgatctctagaggt

SEQ ID NO: 403929 - DNA, 122 bp, Homo sapiens
tggaagggtgctttcaaaacaaacatcttcctcccagcaatgtaatcatcctggctcccccgcccgcgaaggtgcagcgggatgaggcggtgcagcactgcggcgggggagggcgggggcca

SEQ ID NO: 403930 - DNA, 122 bp, Homo sapiens
ggatcggcacctggtctgtgttgggctcactgctttactatagccggacaatggcgaagtcgtcaggtagggctcttcggcggggcctgccccggaacacacggccttcgatgagagttccc

SEQ ID NO: 403931 - DNA, 122 bp, Homo sapiens
tctaggtctggggccggggcgggcgacagcggggctcggagccaccgccacagccctgcccgacgtaggtaattcacccctttaataaccagaagacggaaagaaggaaaaggtgcaggcca

SEQ ID NO: 403932 - DNA, 122 bp, Homo sapiens
ccaaagcaaaaggagttcagacttctctaaccactgaagtgcaaaccaaaactatgagaccgtgaggcagttctgaccaaactgaagagaacaagaagaataaaaaagaaaaccttttttta

SEQ ID NO: 403933 - DNA, 122 bp, Homo sapiens
gtaggctatgggagcattttaatacatgtgataatgatgtgtttgcctaagcctaggaaacgtctagtctggcaaaaagtgaattaagcaaaaaacaaggcaggaagtcctaaggaagggtt

SEQ ID NO: 403934 - DNA, 122 bp, Homo sapiens
cgtggtgctgcgcggcgatgatgatgactacggtgaggatggtacagagcaccatggccgcgatgcccacggccagggagatgaaggagaagttccgggcctcgcgtgaagcgatctcggcc

SEQ ID NO: 403935 - DNA, 122 bp, Homo sapiens
ggaactccctgaccccttgcgcttcctgagtgaggcaatgcctcgccctgcttcggctcgcgcacagtgcactgcactgctgttctgtgcccactgtctggcactccctagtgagatgaacc

SEQ ID NO: 403936 - DNA, 122 bp, Homo sapiens
agataatgtttctcatttctgatattcttaattcccttgaaaagttctttctatatgctgcgcaaaaccaagaagactgatatgcatgatgtctttgtggttaattgctataaagccaatat

SEQ ID NO: 403937 - DNA, 122 bp, Homo sapiens
ggcacacagtgacacagtgtcacgtcagctagagtgcccgcagtgtacccgttgtatacacgggatctcattgatggatgcgtcgttacattgcacatgactgcagtttaaaaagacaccaa

SEQ ID NO: 403938 - DNA, 122 bp, Homo sapiens
acagtcattctgcatccaaaggcttaaattgtaagggactggctttactctggctgtttccggaaaggcaggcccagccagccctcccgtctctctctctgacagccaatctcacatgtgcc

SEQ ID NO: 403939 - DNA, 122 bp, Homo sapiens
tttgaacgcagaggctctggcgacggtggcaggagccacgcagagcggtggagcttccagcgtggagaggggcactacaaggacctgcctccatgcagctgctgaatccacgcccgttgctt

SEQ ID NO: 403940 - DNA, 122 bp, Homo sapiens
ttcttgtgagggttgaatgaggtcacatgggaagccgctaacacactgctgcacctgatgcgtagtgaacacttgattttttttttttttttgagacggagtctcgctctgtcatccgggct

SEQ ID NO: 403941 - DNA, 122 bp, Homo sapiens
agctgattgttgcacttaaaaggcacttttattcctaccattaaaatatttttactgttacgggtttacataaactacccttataaacatcataaaacttccttccccgtaagccatagatg

SEQ ID NO: 403942 - DNA, 122 bp, Homo sapiens
cttccaggacaacacatactcctggttttccttctacctcactggtcactcctgattctccgctgtcttcttccctacctcataacagggttcagtcgttggtccatttctctttaaatact

SEQ ID NO: 403943 - DNA, 122 bp, Homo sapiens
acgagaaccccctaccccgtgcccttcggcctctcttggtcttccaaggtgcccccgtggcgcgcgggctcagttctccatgatttcttggatccagtcaaggtagtggcatacgctggtgt

SEQ ID NO: 403944 - DNA, 122 bp, Homo sapiens
acttttggtttttatattccaaatattgttgatggcatgacaattctgggggttcctgtccgacttggtttcactgcctgagatcgcacggatgaataccgcaggcaggtgaagagggttgc

SEQ ID NO: 403945 - DNA, 122 bp, Homo sapiens
tacgaggccagggagaaggagaagccaccctgaggaaggtgcggaatgtcgcgtggagcccggctctctgcctttgaagcaggattttcatgcactcgccagcatggctggcttttcagact

SEQ ID NO: 403946 - DNA, 122 bp, Homo sapiens
cggcgcgggggttccgcagggtcacctggcccagtttcacgtccatggtcaggatctgctcgtgaccagcagcctcctccttcctgctgagggggcggcaccgggccaccaccttgagggcc

SEQ ID NO: 403947 - DNA, 122 bp, Homo sapiens
gggtgagcggggggtttatgattattaatcgagcgcccgagctcggcgggcggggcttggcgggccgcgggctagcggcgctcggagtgcggaggacgcgcggggccccggggcggctccaa

SEQ ID NO: 403948 - DNA, 122 bp, Homo sapiens
caaccccaatacaggccaactgctaggccgcggacaaaggggaaatggagctcgacgccccggacctgttggaagcatttgttccagtcaagattttgcatttgttcagtccggaataatgc

SEQ ID NO: 403949 - DNA, 122 bp, Homo sapiens
ggacctgaaatctggtgcgcactgaagttgatcagggcagtgtgtgcttaatctgaacatcgacaccatcaggaagcagcaactccctgcatgattgacatttctctttttttttgaggtgg

SEQ ID NO: 403950 - DNA, 122 bp, Homo sapiens
acaagaagtttttacataaacagacacagtaccagagggttattgctatgggcagtcacacgtacacgacacccagtcagtattgcttttctcagtgccagtgcctaagtaagtctgacctg

SEQ ID NO: 403951 - DNA, 122 bp, Homo sapiens
tcaagaccagcctggccaacatggtgaaaccctgtgtctagtaaaaatacaaaaattagccggtcatggtagcatgcacctgtagtcccaactactcaagaggatgaggcatgagaattgct

SEQ ID NO: 403952 - DNA, 122 bp, Homo sapiens
atgttcattgagcattttgcctaattgtgtctgtctctgaaagggcagcgcaccccctcccgaccgctagcagcacaagtggcgacattcccatggagcggccgcgccgcagcttgccgcat

SEQ ID NO: 403953 - DNA, 122 bp, Homo sapiens
ccacgctcacaagcagacagatcctagtacacctgaaatccaaccgggagtgggggacagcggcggggaagtgggggtgtggaaaagactggtggaagagcttttaggaaagctctcacccc

SEQ ID NO: 403954 - DNA, 122 bp, Homo sapiens
cgctcctgccgtgcatgttggggagccagtacatgcaggtgggctccacacggagaggggcgcagaccccgtgatagggctttacctggtacatcggcatggcgcaaccaaagcaagagagg

SEQ ID NO: 403955 - DNA, 122 bp, Homo sapiens
ccctggaaggagacaaagagcagacctgaaatttagtcagccgcttaaaacacttgttttcggggtgttctaatggctcggccaggctctgccgcgcatctgtggattccaggctgccctgg

SEQ ID NO: 403956 - DNA, 122 bp, Homo sapiens
tttgccctccttagcattctttgcaactcatgtatgtagtcacatctatgtatccatatacgtttgacctattattctcatatcccagctctgagtcctttattatgagtattaacaacaca

SEQ ID NO: 403957 - DNA, 122 bp, Homo sapiens
agcagtttcagggtcagcagtaatgagctgcactcggcctttgaacataaggaatgcgtgcgtagcactcccagcgctgctccgggtctcctggcccgatgactctcggctccttcatctcg

SEQ ID NO: 403958 - DNA, 122 bp, Homo sapiens
gatgaaaaacttttgcctataaacactgcttcaatgaatgattacaatcttaaaaatttacgtaataggtgacaaaaatatcttaagcatgtatcgtagacgaaggaaatggaattcattaa

SEQ ID NO: 403959 - DNA, 122 bp, Homo sapiens
tcttgggcttacgatcgggtgggattttgcagttcatgaccagagtaagtcccagccctccgtgtagaagaggaagtagaaatccagatcctgtttttaattttagcatttctcctaaaccc

SEQ ID NO: 403960 - DNA, 122 bp, Homo sapiens
gcagatgatggggaattaaacattaaagggtcctcagggggccgtgtgcgctgcccggcgcgagccggaagagggatgatatttctcggtaatgaactggcggcatgcggggacatgaatct

SEQ ID NO: 403961 - DNA, 122 bp, Homo sapiens
catatctcccgtagacactggcaggaccacggtgtctgacagggaagggaaaatcctaatcgttgtcatgactcgttttgagtattttggaaaagactgccatcgtgcacttgtaatggcag

SEQ ID NO: 403962 - DNA, 122 bp, Homo sapiens
aggaagcctcatctctaagggactcgcagaccaccccaggctacagcagggagggaccctcgccaggggtattaccagttcttgaggtctcagggtcttcatctgggacatgggtgcccacc

SEQ ID NO: 403963 - DNA, 122 bp, Homo sapiens
atcttctgatggtctggcaagcttccctgagtagtgttgccaggatgctagacttacctgcgagatttgccttatagatctaatctagacagaaatggctgacttcacagaactttggaaac

SEQ ID NO: 403964 - DNA, 122 bp, Homo sapiens
cggggttcgagttggctggggcccttcgagatgtgggatgagcttgttgggtcaggggtgcggttgtgacagcggcttgctgggccgtagctgaatgcctgccgctggcctgagaggtccag

SEQ ID NO: 403965 - DNA, 122 bp, Homo sapiens
aaaagaagtttagtcaaaatctggcgcgctgcagtttaacttctagctaagcaatgatggcggtgatgcagcaaagcctatttgtttgagatcctggctttttgatccgttggtgccaccca

SEQ ID NO: 403966 - DNA, 122 bp, Homo sapiens
caatggaagagtttggatgcagcatctgtcctgctccactgagccccagggaggaagcctcggccactggctgtgctgaagaaggtacaatccgagtgtgaggcagaagagcagaggcgtcc

SEQ ID NO: 403967 - DNA, 122 bp, Homo sapiens
gagagggggcagtgggggcggctgttgaggcagccgggcccgggcgggattgctggggcccggcccgcgacgacgccgctgccatagcgatccgggccgggagcagttctgcgcatgctcct

SEQ ID NO: 403968 - DNA, 122 bp, Homo sapiens
cttagaacgggcgggaggcttagcacccccgtgtggggcaggccgggcagcctctgaggtcgttgaggcgagggtgaagttacctgcgtgcgtgctggggctggcatctgcctggttcgcat

SEQ ID NO: 403969 - DNA, 122 bp, Homo sapiens
tttcattctcactgtaacctcagactatccttcatagagaaagtaggtacgatctgttgccggatcttcctacctccctccaaagccaccagaatgcctatagctctgcattctctccaccc

SEQ ID NO: 403970 - DNA, 122 bp, Homo sapiens
gcttcagtggagctgactttggccctggttacatggcgctggcagccagagccctgggcccgccagttggtgagcgccagaggcaggcgctggagggtgccctcctgtagggcattttcaca

SEQ ID NO: 403971 - DNA, 122 bp, Homo sapiens
aaaattactgcttggattagctggttaccagaatactctgaaaatacagaattttagccccgtatcttttctttcacatctgaagccacaatatccatcatgaactgattttaagagatagg

SEQ ID NO: 403972 - DNA, 122 bp, Homo sapiens
ttttaacgttttctgttcccttcggggtggttttaccacgcttgagagggacgcctaccgcggaaggccgcggaccgagggcggcatcgcgtccttgtctgctgtctgggcacagcctagag

SEQ ID NO: 403973 - DNA, 122 bp, Homo sapiens
gtttttcaactctctgaatagccctgagcctcagatgtggcatcttattcatccatcggccgaggacagagtgaggacagagtggtcggggaggtggaagtatttggacctttttattgctt

SEQ ID NO: 403974 - DNA, 122 bp, Homo sapiens
taacactcaccgcgaaggtccatggcttcgttcttgaagttgggaagaccaagaaccaaccggaaagaataaattccagacacaatactgttagacttcattgtcctcctgttaaacataaa

SEQ ID NO: 403975 - DNA, 122 bp, Homo sapiens
gaatgaggaaatggtaaacaaatgctccagagagtttccataagaagtgaatagtgcccacgggaaggtcattcttccacattttttttttttttttttagtaaatgctcattgagcatggg

SEQ ID NO: 403976 - DNA, 122 bp, Homo sapiens
gtggctcctgtcactccagttctgggcttcccggctgaggaaatgctgtcaccctggccccgggccagggcaaggggcagcgccggcctcgtgacggtggtgctcgggagctgaagggcagg

SEQ ID NO: 403977 - DNA, 122 bp, Homo sapiens
gttgatgtttataagaaggaaaggagaggccaggaggggaggtgacttccctgagtctcacgctgttcaaaggcaggtgaagtcacacatcacgccagcttccctccagccctgctgggctc

SEQ ID NO: 403978 - DNA, 122 bp, Homo sapiens
cggcccggagcgccgctgccatgcggctggcgctgctctgggccctggggctcctgggcgcgggcagccctctgccttcctggccgctcccaaatataggtgagtcctccgcctggagtggg

SEQ ID NO: 403979 - DNA, 122 bp, Homo sapiens
ggagcacggaggcacccagtactgtggcgtggtgctcgtctggtcgtcagcgagcctcagcgtacttaggacaccgcagtttatctttccttagcgctcctaacggttatggaaaatagcgc

SEQ ID NO: 403980 - DNA, 122 bp, Homo sapiens
gcgccggcgaggctggggccgggggcctagctggcaacgccgggagagggaagcgtagcgcggaaaatcccagtgctcggccttcgaaatgcaccggctcattcagccccgccagctccgcc

SEQ ID NO: 403981 - DNA, 122 bp, Homo sapiens
cctctgagcgctggccccgccccgcgccggcctggtcttccggcgggggcggggaaagggcgcatttccaagggcccttctaggagaacagcgtgcggtctccatggtgccgggtcatccga

SEQ ID NO: 403982 - DNA, 122 bp, Homo sapiens
ctgccgccgctgctccagcttcgcctggccccgggagctcttctcgaaccacagccgcagcgtcctggccagcaggcgctgacgccggtaccacagagccgtgagcatctgcggctgtccct

SEQ ID NO: 403983 - DNA, 122 bp, Homo sapiens
tccccccattacaatctttcttataaacaagagctgtcaactactcaccaagtaattcaccgctcaaatgtcttcagtttactgcctgcgcatgcagaccactggcatagctacctcagtgt

SEQ ID NO: 403984 - DNA, 122 bp, Homo sapiens
ggccggcccccacagctggtcctggacctaagccggcgggacacgggagatgcaggactgcgggcacgcctggccccgatggcggcgccagtggggggtgaagcaccggtacccgcggcggt

SEQ ID NO: 403985 - DNA, 122 bp, Homo sapiens
tttcagaatcaaatgtcctggattcttcgagacaatgttcctgttatctggagagaaaaacgtgattcaggacgacatggaaacggataaaaatacacagataattacttgccttatcttga

SEQ ID NO: 403986 - DNA, 122 bp, Homo sapiens
cctaaaagaaccaacgcggcgccacggaggagacgtggagcgctgcgaatgtctcggcagcggggatgagaatgcgtttaagaacagggcaacagtatgtaagctcattgaaatgagggtgg

SEQ ID NO: 403987 - DNA, 122 bp, Homo sapiens
caccttaggatggactaggagaaaaaaaggtagagagaatgaatcaggaagttagagtctcgttgttcagctgtttgtatgcttctctgtaaacccaggctctggcctcgaccaggcctcca

SEQ ID NO: 403988 - DNA, 122 bp, Homo sapiens
ctggttctctccgctgtcacttcagggacagctttaaagacaggttcctcctcaagccaccgtcacatgattcatgacctcgtctgcgctccaggaagcactttctaagccgccgtcgccct

SEQ ID NO: 403989 - DNA, 122 bp, Homo sapiens
ttacctaaggactcgataggaggtgggacgcgtgttgattgacaggcagatttcccctaccgggatttgagaatttggcgcagtgccccgccttagaggtggggccttatttgattgccaag

SEQ ID NO: 403990 - DNA, 122 bp, Homo sapiens
gccagcatcactactcttgcactttggggccattattaaataaaataagggttactcgaacgcaagcactgcaagactgcaacagtcaatctggtctgacaaccaagagagctactaagtag

SEQ ID NO: 403991 - DNA, 122 bp, Homo sapiens
atcgtgcccggcccacatcttgcagtctttattctcatctgtaaaatagggacaaccagccgggtgcagtggctcacgcctgtaatcccagcactctgggaggctgaggtgggtggatcatg

SEQ ID NO: 403992 - DNA, 122 bp, Homo sapiens
cctttgtgcctattcaaaatctgctcatcctccaaggcccagctcagattctgcctactccgctaagcctcctccaaggatttcagctaacattgacctgtccctcctcttgcccctggaga

SEQ ID NO: 403993 - DNA, 122 bp, Homo sapiens
ggcctgttctaataagttggaactaactttaacagcccttggtccttaaaatcactgaatcgccaggtccagaaatcacaaaccccacagaacacatccatccccaccaccatcatagcacc

SEQ ID NO: 403994 - DNA, 122 bp, Homo sapiens
gtgcagggaaagcacaccgtggctgcagcccagcaactggcagtaggtattttcaatggtcggcaggtactcatgacggaagttgccgctcgcccacttgtgcagcagcgtacttttcccca

SEQ ID NO: 403995 - DNA, 122 bp, Homo sapiens
catactcctttgtattttgggttatctatcatgggaggtttccactcaccacacccaatccgacatgctggattaagaatctgaggtgcctcccattctccatccgtgtcttcattccttag

SEQ ID NO: 403996 - DNA, 122 bp, Homo sapiens
catttctctatctctaatgcttaccccctatctcactggctctgtgtgtttgagtgcatgcgctgaatgtttatatcacttaatttctgttcggaacacgctgtctcttagcaccagtagat

SEQ ID NO: 403997 - DNA, 122 bp, Homo sapiens
cgtcccaaccccgcgccagcccggcggtcccgtcccgtcccgtcctgtgcggccccgtcccgccgcccgcccgccagccatgagctccacgcagttcaacaagggcccctcgtacgggctgt

SEQ ID NO: 403998 - DNA, 122 bp, Homo sapiens
ggggagtccctgatggcagtgctcccaggagggcgaggtgggcctagggatgatgggacgcgcccaccgtccacccagcacctgaagaagcccggcgcaaagaggacctgggcgtcggagtg

SEQ ID NO: 403999 - DNA, 122 bp, Homo sapiens
ggtcaggaaaaagcacaggttcaataatcattcccaggcctccctttctttcctgtgcctcgcatgcggggttagagcatatggacctgccttgggcccctccacagtgaataacaaggtga

SEQ ID NO: 404000 - DNA, 122 bp, Homo sapiens
tgtgctgctccttggcgccctgcttgatcttgaggatgttgtcgtcggaggggttgaggtcgaaggtgaagagcttggccaggtcgccgcgcgtgtccagggagcggatggcgatctcgggc

SEQ ID NO: 404001 - DNA, 122 bp, Homo sapiens
ggacgctcgggtcctctgatgcccacgggccttctgcgtgtggaaggcagaggtctgatgcgtccctgcctgagttcttcctcctggacaaggaagacaggaagaagatggacggtgcctgt

SEQ ID NO: 404002 - DNA, 122 bp, Homo sapiens
gcgctgggacctgggtctggcttttgggtctgtgtccttcctcgtttggccccaattgtccgcattcaagatcataataaaaaggcttaggaagtaaacttcttggacgcggaagggccggc

SEQ ID NO: 404003 - DNA, 122 bp, Homo sapiens
ggccacatgtcgttcacgtagttggacatcttcacctgcggctttagcctgcgctttctccggaaaggatcccgcaagcctcaactcaggacttcctaaaaaaccaagagagaaaaaacaag

SEQ ID NO: 404004 - DNA, 122 bp, Homo sapiens
ggggctctgctgcttacagcagtgcggccatctcggcttctctccacatcgtctgtcacgcgctggtccccaccatacctctcgccaccccgtgcctctgtccccgtgcggcctgaggagct

SEQ ID NO: 404005 - DNA, 122 bp, Homo sapiens
gagggattgggcctcaagaaacggggctgggactaagtcacgaggtgcgtgaatatcaggcgggactttaactcagccagtggagagctatggagggttttgctctttgtgtgggtgtgtga

SEQ ID NO: 404006 - DNA, 122 bp, Homo sapiens
tgccagggggagggccccagagaaaaccagaaagagggtgagagactgaggaagataaagcgtcccagggcctcctacaccagcgcctgagcaggaagcgggaggggccatgactacgaggc

SEQ ID NO: 404007 - DNA, 122 bp, Homo sapiens
catcgaccgcaacgttcgcgcgccaccttgtgtccattcccttagcctccagggacaacccggaaaccacatttcccagcgtgccgagcgcctctgcgcaggcgcaaagagtttccctcgtt

SEQ ID NO: 404008 - DNA, 122 bp, Homo sapiens
cgtgctaaatgaacatctgaggtaagacccactgtttcagatacttgcttttttcctaatcgattaattttcttaaatatatgtttcagcctcaaccacaaacagcatagtgggggcaaatc

SEQ ID NO: 404009 - DNA, 122 bp, Homo sapiens
attgttaggtagaactgcattttaatgactgtgtccctgctgttgcccgaagtgacggggcgacctcccggcacaatgaaatgcttgtgtgaaagagatttttaaaaggaagagagaaattg

SEQ ID NO: 404010 - DNA, 122 bp, Homo sapiens
taggaaattgaggctcagagaagttatgacttacaaaaagtcacacagctctaaggggcacggccaggatttgaatacaacactgagctaattccattacttgttctatgtaatggaaagac

SEQ ID NO: 404011 - DNA, 122 bp, Homo sapiens
tcttgggatccggagagtggccgggccggcagagcagggggccgaggacaccaggtgagccggggatctggccttatggcgtggaggaggacgctgcgggtcgtctgcctcgccgcgcagct

SEQ ID NO: 404012 - DNA, 122 bp, Homo sapiens
gccgccctccctcccgcgcctccttctgaccccgagcgagagacctggtcgggagtccggcggctagagttgattgcaaggggcctgttgctcgactgtgcgttaaagaggctagagggagc

SEQ ID NO: 404013 - DNA, 122 bp, Homo sapiens
gcgcgcgcgtgcgcggggacgcgcctggtagggtttccttattccaaggaaagtatcaagcgatcccaagttgttgttatacatttatgcattatattgcagaactgtgcatgaccaggcag

SEQ ID NO: 404014 - DNA, 122 bp, Homo sapiens
ctgcctcctgaaaccataaaggtgttttaggctattccaaatcctgcttgcttgggtgtacgacttactactcttctcactcttcaggtcatgcaagtctctcaatcatctccccttctcct

SEQ ID NO: 404015 - DNA, 122 bp, Homo sapiens
acctcgtgatccgcccgcctcagcctcccaaagtgctgggattacagacgtgagccaccgcgcccggccagtttgcgtttcttttaaagcagaccttgagatgaggatttggggtaggaagt

SEQ ID NO: 404016 - DNA, 122 bp, Homo sapiens
gagggaagcaaattctcatgtccaagttgttgcaattgatcagtgcggtagagaagaagccgtagtacactccttgggtaacccttaggtaacccatgctcttactttaagtgcacaacgtc

SEQ ID NO: 404017 - DNA, 122 bp, Homo sapiens
tccttgccactgtattggttcaaaaattcttcaagtttataggttatacataaatgagttcgtggccttataaatattcgagaacaactgccctatgtgtgattttagccttgaactatttt

SEQ ID NO: 404018 - DNA, 122 bp, Homo sapiens
ccggagctctgtgaaggccgtcacggctccttatgatggcgcccaaacagtgcaggtggccggaagctgttccctgatgaaagaaaggaagaggaaaggaggagggagggaagaaggccttt

SEQ ID NO: 404019 - DNA, 122 bp, Homo sapiens
gcctgcccccccacccccccaaacctccacccccccgtctcgacccccctttctctcggccgccttagcctgctccccgcaaagcccgggcgctcctcccaccgcgccccgcagcccgagtc

SEQ ID NO: 404020 - DNA, 122 bp, Homo sapiens
gaaatttgacaatcagttctcatgagcttgtccaagttggccccagcacactattccacccgtactgtacatctttgctactaaatgtgtgatctgttgaccagcaatgtcaataacatctg

SEQ ID NO: 404021 - DNA, 122 bp, Homo sapiens
gcccccgtgcccaccagggccgtggctctggaaggtgcagagcgctgagctgcctttctgcggctaccactttgaaaccggtttgctgtcgccccagccgacgtctggatggcactggctgg

SEQ ID NO: 404022 - DNA, 122 bp, Homo sapiens
cactgttacctccattttgaagactcctgtaactttgtcacccctccagagggggagctgcgcggggtgaggggctcggccacacccgtgctgtacctcctcggtccccgcggctcttcctg

SEQ ID NO: 404023 - DNA, 122 bp, Homo sapiens
aaactgtccaaaggttcagaaaagtagtgaaggggcctctggaacggccgggaccctcaacgtggttttccttaattccctgggcggtcctgaaggtggtgtggccagtcctccgcctcgct

SEQ ID NO: 404024 - DNA, 122 bp, Homo sapiens
cctcttctgctctgaagcctcccatagctctccattgccttcagcatccagcctgtcgtccggccttgtccttcacgttatgatgtaactcataactcctgggcttgatatggggtcctcag

SEQ ID NO: 404025 - DNA, 122 bp, Homo sapiens
caggacagcgtccaaatgtgcatggaggggctgggctggcaaaagagggcggaggcagcgcgctctagagtgcggcccaggagctgcagcaggagcctggagcgctattcctggaacaaagg

SEQ ID NO: 404026 - DNA, 122 bp, Homo sapiens
ggcgacaggcgtagagaaaatgcgaggagcacgcggggaggtctggcacccctgtcacggcgactccaggctgaggccgcccgcacgcccgctctcccacgccgggcactgtcgctcccggc

SEQ ID NO: 404027 - DNA, 122 bp, Homo sapiens
cgcgggggcggggccagggtctcacacccatctagaggatgtctgtctgcgacgtggggtcggacgggcgcctactccgcgggtatcaccagcttgcttacgatggcaaggattacatcgtc

SEQ ID NO: 404028 - DNA, 122 bp, Homo sapiens
tgcgtttacaacgttctgacttcctcttccaggagactttggcctagtctcaacacctgacgtggactacataacccagcattcatcacggcaagtggatttccgggtcaagaggtccgcgc

SEQ ID NO: 404029 - DNA, 122 bp, Homo sapiens
gaggtcagaaggagaaaacatggcaagtagagatgtccctggggagtggccgcaaagtcacggagttctggaaggtcagagttgacaggatcctttgagaacatgaagtctcctcccctctg

SEQ ID NO: 404030 - DNA, 122 bp, Homo sapiens
gtaacacaagcctggtgtccacaatccgccccgggtggggacagggaagcctgcccagtccgtgaactcagtccacctctcggctccctgagaagccagagcggtggccaagtgtgtgctgc

SEQ ID NO: 404031 - DNA, 122 bp, Homo sapiens
taatggatacaaatgtgctttgtaaaatgatgagaactaaatgattcgtatatcaacatacgttggctaaaacttaaattctgcagtggtttaattctacaagtgtcaggtcctgtggcctg

SEQ ID NO: 404032 - DNA, 122 bp, Homo sapiens
acagtgattcactggtagggggtgggctttgtacaggcaaaagactgagcagggcaagggcgtgccgtcaaaggagattgaaccgtgtaaacgcacagctccccatcaacgcttcctgcgtc

SEQ ID NO: 404033 - DNA, 122 bp, Homo sapiens
attatcccctagcaaagccattagaaatcaactaaagaagatcgtcattctttgagattccgtgatttgtaactaagcagataacaagtctgtagctctcttgcctcatgaacacatttatt

SEQ ID NO: 404034 - DNA, 122 bp, Homo sapiens
ggcacggtgaatggcggccactgagtattcttgccggagctccagctcctgtcagagccgcggccttagattctcacagtaatacaaaccctactgtgacctgcacacgcgagggatctaga

SEQ ID NO: 404035 - DNA, 122 bp, Homo sapiens
cgggctcgcgctctggatccctgaatccggcctttccggccggactgccgcgcctgtggccggaagagccagctagaccagagagtctgtacctgcaaccctggcggcgtccgagcccaagg

SEQ ID NO: 404036 - DNA, 122 bp, Homo sapiens
tgctgcagtcagccctgcaccgctccgccctccgtcctctcaaggtgcgtccctggcagccggagatgcacatgagatattggcctggccgggcaatttgcacggccttccagggagggcat

SEQ ID NO: 404037 - DNA, 122 bp, Homo sapiens
ccgcgctgagtaaccatgtggtggcaggcgaggccccgccgggactaaagagccggcaagcgcggggcccaggcagcagctggtgtcgccaaggaaaccgctcgcagcgcctcccggggccg

SEQ ID NO: 404038 - DNA, 122 bp, Homo sapiens
aagatcctgagtggccaagcgaacggagcagcctccacccgcgtcttctgccgctcagcccggctccctggtactcctggctcccaacgggcttcttcccaaggcccagcgcacccgggagt

SEQ ID NO: 404039 - DNA, 122 bp, Homo sapiens
caaatggcctgacagacacattctctccactgtgtcagtgtctctccagcaggattcctccgcccagtgtttttgccattggcctattatttattcctcacagccccttggagcagtgtgct

SEQ ID NO: 404040 - DNA, 122 bp, Homo sapiens
gaagctctgaggagtgaatccacaatacagttcaaagagagatttaaattgctaatttcccggcactggaatgtggggaaagattgtcacagatttagcatgaaagccatgtatttaacatt

SEQ ID NO: 404041 - DNA, 122 bp, Homo sapiens
gactgaccctctgaaattcttgtgagctttccaaggactcacacctccccctaagagctacgctgcatcagcctggggtgcgcagggaatggagtgggggcggggacgggcggcagctgcgg

SEQ ID NO: 404042 - DNA, 122 bp, Homo sapiens
ttattctttttcctatttggcctctaaggagtccgtatttttttcttccagctcaagtcccggaaagcagccgcgcgtgggacagtcgccctggccgctggccgccgggccccacggcgccg

SEQ ID NO: 404043 - DNA, 122 bp, Homo sapiens
aatttgcaaggaaatgttggtcagcaaagaggtggtggtggttaaaaataaaaaagcagacgtataaggaaagcccatcatgtcttaaagtggcttcccttctagggagcacagactctggc

SEQ ID NO: 404044 - DNA, 122 bp, Homo sapiens
agtgaactatttcttgagttaatcaatcaatggatgagtgaatcaatacagttctttgagcgggaaactttgtataaggctcagctaaaagggaaattgagtgggtcaggtaccacggatac

SEQ ID NO: 404045 - DNA, 122 bp, Homo sapiens
tctacccaaggttttgtgttgaaacccacctcccgcctccgatctcatgcttgagtaggccgaggtgggaagaagctccgatatgtggaagtgggaaagtttaaggagataggaaagaaaca

SEQ ID NO: 404046 - DNA, 122 bp, Homo sapiens
cagctgccttggctgcacacatccctctcgagggagctttccagtcatttagctccactgcggactcagagccaaaattaacagtctccggtgggccctcaaagctcaccacccacccaaac

SEQ ID NO: 404047 - DNA, 122 bp, Homo sapiens
gcgcatcacttgtccgcagaagtggaagacgtacctggctcgcagagttgggtcccgagccggctgtcgggaggtgctgcccaagggtcagaggtccaaactggacttggccaccctcacga

SEQ ID NO: 404048 - DNA, 122 bp, Homo sapiens
aagggaggtcatggtggggtgtgaacacagaggactgtgggttgggtccatttcacagagcgacaccaagcacaggctcagcagcatgagccggggcacagggtcctgtccacaccagcctc

SEQ ID NO: 404049 - DNA, 122 bp, Homo sapiens
cgcacccgagccagtccgacagctccagccactggcagagccgtgggaccaagggccggacgggtatggacttagatcttctggaatgcagatctctccagacagattcagagcccgggaag

SEQ ID NO: 404050 - DNA, 122 bp, Homo sapiens
ctctcgccctcctcacttttgtcttgcaacattgcatatttggagatgacctcatccagccgactcatggccaaactccggttttcccgaaggcgccgggccaacacaggatctgatagtgc

SEQ ID NO: 404051 - DNA, 122 bp, Homo sapiens
tttagagctgcaaagacctgcgtcaagcccccgcccccgcccccgcccccgggcactcatcgtccagcacaacaattgcaacaacacctgggcgttctctgcccatgtagcgaggtcaaggt

SEQ ID NO: 404052 - DNA, 122 bp, Homo sapiens
gtgtgtgtgtgtgtgtgtgtgtgtcgggggaggggcccgaggacccgcttcctagctgagcgtcaggacggggggcggactctcaggagccgcgcggcgcccgcagaggagaggaagcgccg

SEQ ID NO: 404053 - DNA, 122 bp, Homo sapiens
ggacagcagcgcttccccttggcccaggaatcccggccagggctgcggggaggtcagcggcgcccctaaatcctgcacgcacggcgggccccgcacgggcgccgggtgcagcccacacacca

SEQ ID NO: 404054 - DNA, 122 bp, Homo sapiens
cccagcaccccactagggactgaagggggaagtgcgtggatggcgtggaaagcgcgcctacggcccctagggaggggtgaggaacaagggctggatactccctgttcctccgtgggtttgga

SEQ ID NO: 404055 - DNA, 122 bp, Homo sapiens
ccaccacttaatgatggggaaacctcaggcaaatcactggagctctcagtgccctagcttcgtcatctataaaatggagataataatagtatttacctcatagagttgttatgagaatcaaa

SEQ ID NO: 404056 - DNA, 122 bp, Homo sapiens
actttgatggtatccaaagcttattacaaaaagatgactgcttgggcatatcaagtacttcggtgtcctcctattttgttcccacggaacacggagcctgacacctgaaactcttcagacac

SEQ ID NO: 404057 - DNA, 122 bp, Homo sapiens
catttgctcacccatcgctcttgggcaaacacatacccagcacccattccacagcaagcccggtgttaggcgcgcacttcctgggcaccaaccacgcctgcccagtaccaggcccaccacct

SEQ ID NO: 404058 - DNA, 122 bp, Homo sapiens
gagggatgcggctgggacgcttagcgagtctcaagatgggattccaaagtgcagaggcagcggttttaacagctgagtttcggtttctcagaatcagcagcagactgcgcccgccccagaga

SEQ ID NO: 404059 - DNA, 122 bp, Homo sapiens
gctatcaagaaaaattgcatgagggcataccaaggaatgccaagaattgctggcaactaccggaagctgggagagttcaggaatgattcttccctagagcctttggagagagtgtggccctg

SEQ ID NO: 404060 - DNA, 122 bp, Homo sapiens
ccgggccccggcagagcctgcggggtgaaagcccctagggctccgcctggcatgcgtggccggggctgtctgagatttccccaggtcggtggttatgaccgcaggatggaatcgtagaggtc

SEQ ID NO: 404061 - DNA, 122 bp, Homo sapiens
tgtgtctgtcgctgaggagcactggagtcctctcctaaatgctcaaacacaaacccacaacgagggcttaggggcaagttcgctgtctgtaattctctggtgttttagttttgaaggcctgg

SEQ ID NO: 404062 - DNA, 122 bp, Homo sapiens
ggaggcctttggcattcactctttctcaatagaggtaagattttcttactattttcccaacgcctctggataattatttgctactttcaaaggaatgaggctcatatttcagaggaaatcgc

SEQ ID NO: 404063 - DNA, 122 bp, Homo sapiens
ctccaggcccaagaacagaatgtaaatgaatgaagagaggtgtagagagtggtagagcttcggtcacacatgagaaggcacattctcccaagagggattcaaaagcacataaaaaatgaagc

SEQ ID NO: 404064 - DNA, 122 bp, Homo sapiens
cttcggctccaaggtgacgtgcggccgaggtggctgggtgtatgtgctgcaccccacgcccgagctctggacgctgaacctgccgcaccgcacgcagatcctctactccacagacatcgccc

SEQ ID NO: 404065 - DNA, 122 bp, Homo sapiens
cccacctgagcctcacgccgccaacgcctctgcttccgccctgcgccgggcacttccgcccgcacccaccaggcgccggccccaggccccgcacttccgccccacgccggcagcactgccgc

SEQ ID NO: 404066 - DNA, 122 bp, Homo sapiens
gcactctgtgtcctccctggggctcaggggcgtctctccatcagctgggagttcaaatctcggtgggctcacgttgcatttccctgatggcaaatgtggctggggccctgtcctttcatggc

SEQ ID NO: 404067 - DNA, 122 bp, Homo sapiens
acccctgcccatgaatcacaaatgttatttggtacagtgagaatacatacaacataatatcgattaggattgccatcctattatatgggtgtggtttgtggcaccccacaacaattataata

SEQ ID NO: 404068 - DNA, 122 bp, Homo sapiens
gttacttgtatttgatgggattgtttggatgtatttaatgggagtatttggagtatttaacgggatgtaaaccctggatgtacctgattttgttactgttttattttaataggtaatatata

SEQ ID NO: 404069 - DNA, 122 bp, Homo sapiens
ggcgcgagtggaggtcggggtggggagacgcgacgcctgcctgggatggctgacactctgcgagccccggcggcccgcggccgggccgggtgactaggcggagggcgcggagggtccgcggc

SEQ ID NO: 404070 - DNA, 122 bp, Homo sapiens
cctagcccagggcaagtacagtactctaggaagtagtactcgggtggggctgttggtagccgggggtggtcatctgattaccagggaaatgcagagtttattttatctaattaccagggaac

SEQ ID NO: 404071 - DNA, 122 bp, Homo sapiens
cggaaccctgcctagcaagattttaagaatggcccaccacactactcaaaacagggtcttcgtccccttccccgcagtccggggagtccggaaccgcaggaattccgcccccacccccgact

SEQ ID NO: 404072 - DNA, 122 bp, Homo sapiens
gtggccctggtggtggacaacacactgggcaagctgttctgggtggacgcggacctgaagcgcattgagagctgtgacctgtcaggtacgcgccccggggcctgccctaaccgcagacaccc

SEQ ID NO: 404073 - DNA, 122 bp, Homo sapiens
aaatttcccggacgaaaagctgcttggagcctccagggaccggcatccggtaagagaaggcgctgcaggagcctccagcttagcccccctacctgggtacttcgccccggccccactacctc

SEQ ID NO: 404074 - DNA, 122 bp, Homo sapiens
ttcagggcggggaggggggcgctggggcgcagtgacgggaaccaatgagctgccaactcgcgcgtctccggcgtgactgccgagattgacgtggaggacacgtcaaattgattcccgcacgc

SEQ ID NO: 404075 - DNA, 122 bp, Homo sapiens
aagtgctcagtctctcccgtgtttgactgactcccggccgcatacccagtccctgacacacgggggcgcacaacaaatatttcccgaaagatccaggagcagcatctccaccagcaagctgg

SEQ ID NO: 404076 - DNA, 122 bp, Homo sapiens
ttttctattgcaatgtgattcaaggatttaaaatagtcattatggggctcataaatgctgcgttcttttaagaagaagaatgtaaaggccaggatgtgggagttctatacttcctataactg

SEQ ID NO: 404077 - DNA, 122 bp, Homo sapiens
tgaaaaaataaaaaaatattttttttctctcccagcctgtgggtggcatttccactctgccggtattgtcctttgaggtatacatttttaacattttccctaagtccaatgtctttgtttat

SEQ ID NO: 404078 - DNA, 122 bp, Homo sapiens
ttccacccaagcatccaaggacacctgggcccattctggggccagtttgctgttagagcccgttgccaaccggaacccctccccagtccctcctctccagcaaggccctgatcctcccatgc

SEQ ID NO: 404079 - DNA, 122 bp, Homo sapiens
agcccagagcatcctcttgaagtatttctcctctgctggatccagttctttccggtcttccgcacaccaaatacccaacacttcacctggtactacacatagtgtattcacatagtgactag

SEQ ID NO: 404080 - DNA, 122 bp, Homo sapiens
tccaaccatctttctgcaaggtaccacgcagctccttgtagctccacactgtctgcagcacgtgtgacgccgccttcgcttcgcgtaccgattggctgtggggccgggggcggggtcagtgg

SEQ ID NO: 404081 - DNA, 122 bp, Homo sapiens
gtattactatcgtcataattagcatcattaacttcatttatttagtttattgagttgacacgtaagcaagttttgcttttccttgtcagtatctcaatctcccccagggcaataagattagt

SEQ ID NO: 404082 - DNA, 122 bp, Homo sapiens
ctttaatggaatgctttttaaaaaaatataaaaccaaggtaaattattgtttcatcttcacgtatggatgctagtgcctttaatggaaggtaaagaatgttttgctagttagaagtacatat

SEQ ID NO: 404083 - DNA, 122 bp, Homo sapiens
tgtcaagatgaaagaatctaccaaagaccaacccaagtttatacccttcactgtctgccacggtagccattagctacatatagctactcaacacttgaattgtggctagtctaattttaagc

SEQ ID NO: 404084 - DNA, 122 bp, Homo sapiens
cggcgcgccccgggggcctggagggctgcgcgtggtgcggggagggccacggcaggcacccgcggacccggaccgggaaccgccgctgccactgagccgggagcacgggagggccccgtcgg

SEQ ID NO: 404085 - DNA, 122 bp, Homo sapiens
cagggcttgtccctgcctgtgggagggtgggacagacgggcagaatgcctggcgctaagacgtggacggcagaaccgacagcagccctgcagcacgtggcctggtgcagaacctcggatgga

SEQ ID NO: 404086 - DNA, 122 bp, Homo sapiens
cgcctgtaatcctagcactttgggaggccgacatgggcagatcacctgaggtctgcacttcgagaccagcctaaccaacatggagaaaacctgtctctactaaaaatacaaaattagctggg

SEQ ID NO: 404087 - DNA, 122 bp, Homo sapiens
ccttcctggctacctttcgttttaactgtctttcgggtacaaagtccagtcattaattgacgtcaaaccacagaaaggcaattatagctagcatttggccaaataccatagatctcttccga

SEQ ID NO: 404088 - DNA, 122 bp, Homo sapiens
cgtgcgcgcctccgagtgcccagcgggctcgagccggcacaggtcgcggccccgcgcacgcgcgcgcactcacagctcatccactattgctcaggagcccgtccacgccctaaaagcaaaac

SEQ ID NO: 404089 - DNA, 122 bp, Homo sapiens
ggcctgtgggatggaatctttttgcttcagttcccctgcatcagcctgggcaccaccccccgcccgaggcctcaatgcctgggtgggcctgatcttcagtcacaatgactgaggccccaccc

SEQ ID NO: 404090 - DNA, 122 bp, Homo sapiens
tgaccgaccgccgggcaggcgggcaccgttggggcccagggccaggagggacgagtcctgcgggaaggagggaggcggcggggtacctgggacacccgcgcgcgcccagacggcccgggaga

SEQ ID NO: 404091 - DNA, 122 bp, Homo sapiens
gtggcgcgctgttggggcgctcccgctgttgcagaggcctggtttgcggtttcataggggcgtgggtccagggcttccagggagtaagtgagtttaggctccctagggggcggtagagggga

SEQ ID NO: 404092 - DNA, 122 bp, Homo sapiens
cactctggctgctctgtggagaacagactgtttggcggggagaatggaagcaggaacacccgtcaggaagtgactgcatgcatgccagtgagagatcaccatggtttggtctgaggtgaaga

SEQ ID NO: 404093 - DNA, 122 bp, Homo sapiens
caggctggagtgcagtgacgcgatcttggcttactgcagcctctgcctcctgagttcaagcgattctgcatcagcctcccgaatagctgcgattacaggtgcctgcccccgcacctggctaa

SEQ ID NO: 404094 - DNA, 122 bp, Homo sapiens
ccgacgtccacgcaggatgatgacatcactacagctctacggacaggcttccatcaccaacgcccatgcaggatgatgacatcactacagatctagggaccggcttccatcaccgacgccca

SEQ ID NO: 404095 - DNA, 122 bp, Homo sapiens
aggcattcctgccacccctgcaggatgatgcaatagttgccatggcaaatacttctcccacgctgctggaaggccttcccatagcagactaacttctgttctgttctgtttctattttcctt

SEQ ID NO: 404096 - DNA, 122 bp, Homo sapiens
cccaggggggcttatataaggcataagctgtttcccgggctaatgtttgactttcttttgcggattaacgtcactggcagggagagtgctgtggacccaccaagcccagctctcctcaaagg

SEQ ID NO: 404097 - DNA, 122 bp, Homo sapiens
attcataattcaaaatcctctgttgcccaggttggagtgcagtggagtgaacctaggaggcggaggttacagtgagccaagttgcaccactgcactccagcctgggtgacagagtgagactc

SEQ ID NO: 404098 - DNA, 122 bp, Homo sapiens
agagaaagagatgaacaatcctggatcgatgatgactgctggtggcgtatgagtcatatgcgatgaatacgtgtctagaactctgaggtccatcacagaagaaatctagctcattttctgtg

SEQ ID NO: 404099 - DNA, 122 bp, Homo sapiens
gggagaatggctgcccacatcctggtttcctctctccgagcagactcagccgaggacgtgcgcaaggtgtgccaagactgccccctgctggccccgctgaacgacaccagggtggtgcacgc

SEQ ID NO: 404100 - DNA, 122 bp, Homo sapiens
agaactattcttatgttgtcacactggaaattgctacttaatctatacctgactcctgtgcgtgtggtcaaagaaagagaaaaagacaaaatacatggtaaatcttacagtattcccaacag

SEQ ID NO: 404101 - DNA, 122 bp, Homo sapiens
tttctgaatttggactgacttaaagaagtggcatcacatttgaagggcacccaatcgctccgttgccctcgctgcatgaaattgtatctgcttgccacttcctatctcgccgggcgcagctg

SEQ ID NO: 404102 - DNA, 122 bp, Homo sapiens
atcggatgtcaggcagagaaaagtcgaggtcatcgtcttcctgaagggccttggagaaaccgctgcccccgtaacactgactcagtccactggagacactaattcctgagctttctggcttc

SEQ ID NO: 404103 - DNA, 122 bp, Homo sapiens
atcttttcccaccaagcgcaaactgctaacggaacagtgcgctcgtgtgaacaggcacgtcgctggagcagttattaattcaggaaagggtgatccactgagtgtccagggtcaccaaaatg

SEQ ID NO: 404104 - DNA, 122 bp, Homo sapiens
aggaagggagaagggcaggtgggcagggagcagacagggtctggctttgcccagagggcacgggctttcccacctctcaaagagacaaggaagccacctgtaagcagaagcagcatccaagt

SEQ ID NO: 404105 - DNA, 122 bp, Homo sapiens
tgcaagaggaatggaaggcgggtgttcagggcagcaggatccctggggaggagccgagtccgcagaactgcccatggtctgagggtggtcaagaggcctggatccctatctgggccctgcca

SEQ ID NO: 404106 - DNA, 122 bp, Homo sapiens
tcttccatcttttttgtttgcttggttttctcataggtcatttgattgcccgcctcagaacgatggatctgcatctcttcgactactcagagccagggaacttctcggacatcagctggcca

SEQ ID NO: 404107 - DNA, 122 bp, Homo sapiens
ttgcgagcgcttccgagggcaggaaagcctgtactgcagccccgccgccctctcctggcgcgtagccctctccccgagccctcgggccacgccgccaggcccgcgatcccagggcggcccgg

SEQ ID NO: 404108 - DNA, 122 bp, Homo sapiens
tgcagcacgttgctggggtgctggatgcggttcttccctgcccgctccagcgaggggaaccgattgttcgggattcactgaagtctctgtaactgcaagacgtgacttccaacccgcatgac

SEQ ID NO: 404109 - DNA, 122 bp, Homo sapiens
aacaggcctccagctgccagagatttgagatgttagtcagggctcaggggcggggggctccgggagcagggagcagggagctggagccctgaaaagacctcagcgtctccttgtcaggactg

SEQ ID NO: 404110 - DNA, 122 bp, Homo sapiens
cccaccacagttctgccctggagcctggcggcagctgggcctgggaaacaaattagagaccggcttgtgcaagccctctcttctcaggctctgcagacacaggcggaggtcccagggtgcaa

SEQ ID NO: 404111 - DNA, 122 bp, Homo sapiens
tgtctgcccacagctctggccaccttctcttgcatttctcttggaactggtcatgagcagcgatttcccactggaactgtgagcttccagaggtcagagactgtgctagactcctctctgca

SEQ ID NO: 404112 - DNA, 122 bp, Homo sapiens
gaatcttgtaacggttctaacagctgggtgcgggtggagctgcgggtgagtcctcggctccggatccatttctctttgttccctaggaccccctcccacagagtccgcctcctcttccccgc

SEQ ID NO: 404113 - DNA, 122 bp, Homo sapiens
aaataaaaatgttcaaactccttggatgttgggataaactcacctgaacccacttgggttcgggctgcctccttctcttccttcattgccacctttcctctgtgtggctcccgggagtgtgc

SEQ ID NO: 404114 - DNA, 122 bp, Homo sapiens
ggtgccgggctgtccctgagggccaccctgctggcctggccattctcgtcctgcccccggcgctccaggggcaacaggtgctcctctgcactgtgtgtgcacagtctccgcctgtaagacag

SEQ ID NO: 404115 - DNA, 122 bp, Homo sapiens
ttcctgtgtgcctgggccctgtgctggaggctggggatccagtcccatttcctgacctatcggagtcagggaagtaaagaaataagatcattttcagagtcgagaagacagtaaacctgctc

SEQ ID NO: 404116 - DNA, 122 bp, Homo sapiens
gtcaccagaggtccggacagacgttcctagcagggattcacccgctgggtccctctggggcggccccacagtcagaggtcagattggaggcatagcttcaatgatgaaaactcagtgtaaag

SEQ ID NO: 404117 - DNA, 122 bp, Homo sapiens
gcatttgtgtacattagaatgcaaactaagttcttttcaaagggcacaacagttcaacttcgtctcctcccagccctgctcttctggtttattttttgttgcttgaacaaaagacaaacttt

SEQ ID NO: 404118 - DNA, 122 bp, Homo sapiens
gcaccgtcctgtcggcactggcaggaaagaacttgagtgtggggaagctgtgcactttgacggcctccacctcgttggcagtcgagtccatcttggcgatgacgatgttctcatggtccttg

SEQ ID NO: 404119 - DNA, 122 bp, Homo sapiens
agcaactggaatttgcagagtgaagcagcggtgaggagagcaccacacacacagccccagcgccggcagaggaccccctgcacacacgcgaggaagccaggggaggcaggaaaaccacccgc

SEQ ID NO: 404120 - DNA, 122 bp, Homo sapiens
catattcataccaaacagcaaagatatttgcaaaaccagactgccttaagttaatttttgcgcaacttaaaatgaccttgtcattgaccaaaatgtataggatccactgtagcatgatgact

SEQ ID NO: 404121 - DNA, 122 bp, Homo sapiens
tgaggggcttagcacccgggccagcagctgcagagggtgtaccgggtcccctagtggtgccggcccgcgggtgctgtgctcgaattctcgccaggccttagctgtctccccgcggggcaggg

SEQ ID NO: 404122 - DNA, 122 bp, Homo sapiens
aaattggacaagggataaactgttttcaacctgttccttttcctctccttatatctacagcgtgtattgcctcatgtctgtccttttgcttttcctttggaaaaatgcaatcattgaataaa

SEQ ID NO: 404123 - DNA, 122 bp, Homo sapiens
gccagatcacatcatccctcaaaatgttgtatttgatctgctcatcaacttttgatttctcgccatttaatttatttggttcagccccaatggccattttcagagttccctcttgtccacac

SEQ ID NO: 404124 - DNA, 122 bp, Homo sapiens
ccattcctactctccagcaataagttaatagtgcatggaagtgaccacgaaccacatgaacgtctcccattaaatgcaaaccaaagtacccccagctgcatttctgtttagctggatcccaa

SEQ ID NO: 404125 - DNA, 122 bp, Homo sapiens
taggttggaagattactagggttatcttcaaatcagagagagattgaggcacaaagagcccgctgacttgctcctgatcatacagtggctaggcagagccagggtagtttggaggagtgctg

SEQ ID NO: 404126 - DNA, 122 bp, Homo sapiens
tggaggtctgggtggggtgctcctcccgagggcacaggctgccaaactcccacccactgccgccggcgaagcccccaggagaccacagagcagaaggaattcaaaggagccttctcaggtac

SEQ ID NO: 404127 - DNA, 122 bp, Homo sapiens
ttcatcaggtcctgctaggtctttgattttcttgaaagggccttctttatgccttccttccgtccccatttccaccaccctcgactaggccttcctcacctcatccggcatcagtgtgagcc

SEQ ID NO: 404128 - DNA, 122 bp, Homo sapiens
ggcatggggacccagcaggcacctttgctggctgaagttaatggaagggcagaattcggtcgagcttgattgtgatgtaaagttgtatccctgaagtatgaaatacctctcaaatatcccac

SEQ ID NO: 404129 - DNA, 122 bp, Homo sapiens
agggaggggaccgcggtcaagttcgggttatctggagaggcgaggattgacttcaggcagcgggctggagtgccacagttgaattcacccagcccgacaagtgttaactctgcagataggcc

SEQ ID NO: 404130 - DNA, 122 bp, Homo sapiens
ggggccgtgctggctctgggcctgctgggtccagtcactcgggcgctctcaggcacttaccgctgcaaggcggccaatgatcaaggcgaggcggtcaaggacgtaacgctaacggtggagtg

SEQ ID NO: 404131 - DNA, 122 bp, Homo sapiens
ggcgagccagcagctctcccgccgccagaggggcggggacggagggagggaggacggctgcgaggacgtcagaggaggctggacccgcagccacgtcaaccggcaaccccctccccgccaac

SEQ ID NO: 404132 - DNA, 122 bp, Homo sapiens
gcctgggcgctaggctcgaccagcgactaccgccggccacgatggggttcgtagactcgtcggtcctggcttgtgcacctgtagttactcctagtgaaagttgcaaagctcttaactttgga

SEQ ID NO: 404133 - DNA, 122 bp, Homo sapiens
catttgaggtgggcgtggctattaggacgctcagagagcccagcgcggtgaggaaagcgacgaacttaggagccctggtctgggtccagccaccccttactacctatttgaccttcatcaag

SEQ ID NO: 404134 - DNA, 122 bp, Homo sapiens
gaggaggcccgcagagaggcattaggacagcaacggggcagtgccacccccgcggccccccgagcggaaggaaaggagcctcccaggccaggcactgccctcctgggcaggagcgaagcagg

SEQ ID NO: 404135 - DNA, 122 bp, Homo sapiens
catcgcggctcaggctgcgggaaagcggtgcgcgtgcagcggggtgggtgccctggtccgcgggcgagctcgagcagccaaccccgggcgcgtcggggccatggacggcctgaggcagcgcg

SEQ ID NO: 404136 - DNA, 122 bp, Homo sapiens
ggggtgttacagtgtgctaaatagctcttttatctccaccatctgcagcctgatggacagcggcatgttggcagctcaggcggcccctttctccactctggcccgtggctcctggaccagct

SEQ ID NO: 404137 - DNA, 122 bp, Homo sapiens
tactttgaaatttcttcagtagctataatcaagttcctggggctttaacaacccccagtacgtaattctcagtctacttgctattcagtcaagttttaagtcaagtttcccagtcgctccat

SEQ ID NO: 404138 - DNA, 122 bp, Homo sapiens
ctgtgctagaagacttgcactaggggagattataaaaagagaaagatgtggtccctgccccgaagaaaatcagaagctagtagggaaatagaataagaaataatgaattccaatacaagtaa

SEQ ID NO: 404139 - DNA, 122 bp, Homo sapiens
tatttgcctcacataaagtatgcaggatgcccttacctcctccggcaaactgcaggaggacgtggcagccagctctgacacctgttaggtctttactgcaggaacacgttctttgtcccttt

SEQ ID NO: 404140 - DNA, 122 bp, Homo sapiens
ccccctcgccgccgcctcgcaggcctcggggtccgggaagcccaggaggagcccctggcccgcccgccgggtcccggctcctaccgcctcgccgcgctttccaccaccctcggcgccatcct

SEQ ID NO: 404141 - DNA, 122 bp, Homo sapiens
ggaggatggtgaaacccacccctcatgtgaccccagctgcagggaagggctgtattgggacgtgggccagtgccagggacgcgacgtggcgtgtgttcccctgtgtgtgtggcggctgcagg

SEQ ID NO: 404142 - DNA, 122 bp, Homo sapiens
tatttacagcctggccactctagacatatgaatccaggctgactgcttaagtgcccatctcgtttgatataaactgtagaaaaggcaagcactttgttctgagtcttttatctccaaataca

SEQ ID NO: 404143 - DNA, 122 bp, Homo sapiens
ttatttatttgttcatctgcagatgaacatttaggctgtttccacatcttcacaatataacgtcaaaagcataggcaacaaaactaaaaaataagtaagtgaaactacaatgaactaaaaag

SEQ ID NO: 404144 - DNA, 122 bp, Homo sapiens
cagaattgacccagcaatggtcagactgatgccatccatcatgtcctaagcttttagcgtcgatttgctgtgcactttagagttttattgcatattaagcattttattgcataagctctgta

SEQ ID NO: 404145 - DNA, 122 bp, Homo sapiens
cgtcgcagctgggcaaggcgtggttccactggtggttcctctcacagacgaggggctcgtcgtcacttagtgtgtaccccgggtcacagctgaaagtcactgtggacctgatgccaaagtct

SEQ ID NO: 404146 - DNA, 122 bp, Homo sapiens
agtgcgagtgctggtgcgggacctcaatgacaacgcccccgttttcccggacccctctatcgtggtcactttcaaggaagacagtagcagcggacgccaagtcatcttagacaccgccaccg

SEQ ID NO: 404147 - DNA, 122 bp, Homo sapiens
ccacttgtcaggatgaaggtttcctgacaagcaaatctgcattcctaagtctttcccttacgacatccagacccctctctttcttcttcacctcccatgtgctcatgaaacctctgctcttt

SEQ ID NO: 404148 - DNA, 122 bp, Homo sapiens
cgagccgcggtccctttaagagggggtggagcttcaacctggcactagggatgctgctagcgtgcgtgtccctacggagctgagactgcagttcctgcgacgcccctgcagcagcagcagcg

SEQ ID NO: 404149 - DNA, 122 bp, Homo sapiens
gggtgggaatctgggtgagtctgtctcccgctctggcctcagggacccaggagtgaatgtcgggtggtggacggtggatctcccagggctgacccagccctgacagtgtctgtgtgtgaagt

SEQ ID NO: 404150 - DNA, 122 bp, Homo sapiens
atatcgtatttcagagctctccacctcactagatggcaattcccgtggtataatttctctcggccaaatacactagagtctttatttatggttcttttctccctcagagcctgtaaacaata

SEQ ID NO: 404151 - DNA, 122 bp, Homo sapiens
ccttcattaaaaagaaatagagagagagagagaagacatgctgcttactgtgctagtaaccgggttgcgactagagccacagcacatgctggttggcctgaatctcaagcatttatgccata

SEQ ID NO: 404152 - DNA, 122 bp, Homo sapiens
gccagcccaaccagacggcacatggggggaagaaggcagacttaaagggccagacgctcgcggcctgccaggttttggctatgagacttggcttgggaggaacgaaatgggatgtggggaaa

SEQ ID NO: 404153 - DNA, 122 bp, Homo sapiens
ctaggcgacagagcgagactctgtctcaaaaaaaaaaaaaaaagaattggtgtccaaccgcgaatctgaaatgtgagacaaacgtgttctcaatttacagcagcctcccttcccaagcctct

SEQ ID NO: 404154 - DNA, 122 bp, Homo sapiens
aatggcttaaatactcggtataaaaaatcgaccaaggaatcaaatgggctcacggatttgcgtcagaaacgttgcttccccgataattggtcaacgtcggtgtaactatgattaaaatgtca

SEQ ID NO: 404155 - DNA, 122 bp, Homo sapiens
aaaaggaggggattggggggcatttgggtctcctcctacctttctgcaagctctgaaaatcgtccatctcctcaggagaagcccacagaacaaacgatttcccaagcatcagaggagggcag

SEQ ID NO: 404156 - DNA, 122 bp, Homo sapiens
gggtcttacttgcatggtttgcaaagacgtggacactacccatgacttttttcaaaaggacgtgcttgcagatagcacagttccacaaattgatgtacgcatattacctagacttggagcca

SEQ ID NO: 404157 - DNA, 122 bp, Homo sapiens
tgccgtgggtccgtataagagagtgctatcaattgataccgtaattatcaatgcatatagcgttgtggcattaaggtgtgtgtggattcaactttgcagtattttcacctgccgcagattct

SEQ ID NO: 404158 - DNA, 122 bp, Homo sapiens
ccacttccgtaacttctccatgttgactcctggctaacagcagcttcaaaggtggttttgcgcacgcgcggaacctccgcttccctcattcatgtgaagtcccaaaccccgaaaaagggcgg

SEQ ID NO: 404159 - DNA, 122 bp, Homo sapiens
gaaaagaaggggactccatggaatgattgcatagcagcccgcagcgtagacagcctgttccgtggtgtccttttccttccttgggtgcagactcaaagccctgccttcataggacagggaga

SEQ ID NO: 404160 - DNA, 122 bp, Homo sapiens
cagcttgaagtgtcaataaaggaaggcaataaaatgtagagatggagttaggtgatgccacgctgggattcactggtggcctatcttacatatgatttcgaaggcagacatgaggaaggcct

SEQ ID NO: 404161 - DNA, 122 bp, Homo sapiens
cggacgggagagcgccaaaacaaggaccctcggacgggagagcgccaaaacaaggaccctcggatgggagagcgccaaaataaggacccttggacgggagagcaccaaaataaggaccttcg

SEQ ID NO: 404162 - DNA, 122 bp, Homo sapiens
tgatgttcttggcagccagcagcttgttgcactccacggagtcaatgatgggcagtggcacgtagtccgtctcgttgctctcgttggtgaagacaaagtggtagatgacggggctgatcctc

SEQ ID NO: 404163 - DNA, 122 bp, Homo sapiens
taaatgagttctgtaattctgagggtggggcacaaaagagctgaggaaaaggcaggccgacgagctgccatgggcttgaattgatcacaccccatgacttcctctggccacaggcctgttct

SEQ ID NO: 404164 - DNA, 122 bp, Homo sapiens
ctctcaccgtctccgtccagaagaaccaatcgtagcttgccttttatatccacctatgaacggctgagttggccggggtttgtttgaataaaccaatcaggttagggaggcgggactagaga

SEQ ID NO: 404165 - DNA, 122 bp, Homo sapiens
ggagaacaagaacattagcacaaatacctaatctgcttttgagtaactgctatttataaccggccgcaaccactacatacctacaaatctgaaaaatctactacccaccaatgtaaacaacc

SEQ ID NO: 404166 - DNA, 122 bp, Homo sapiens
tgcaggtggagacgaggcgtgccggcgagcggctgggctgggccgtgcagtgccaggagccgctgaccatgatggcgctgcacatccccgaggagaaccggtcagggccagcccagctatgc

SEQ ID NO: 404167 - DNA, 122 bp, Homo sapiens
acaactcccagagtgctccgcgtccttgctttcgcctctacttgtgctccagggcgcacgcgcagccctgggagcgggttctcgcgcatagggaccacaactcccagggtgctccgcgtcct

SEQ ID NO: 404168 - DNA, 122 bp, Homo sapiens
tgttctttaaacaacaaccaaaaaaaaaaaaaaaaaaaaggaaagaaaaagagggagggccgtttatatttgggattgaggaaagaatcacagttctgcctatagcggggaagcagctctag

SEQ ID NO: 404169 - DNA, 122 bp, Homo sapiens
tgtaggtgggtggcccaggccaatttttggcaatatccttaacccacctgataggagaagcgccctcccctgcctgccttgcccattctacccaacaaggactccctggtgaggcccttcac

SEQ ID NO: 404170 - DNA, 122 bp, Homo sapiens
ggatgactacagagagtaaagaaagccagaacataaggaatctcagaccacttcccattgcggtgacaaaagttgtcttaagtctctgagcacgttggaatcgaaagtgccattttcggacc

SEQ ID NO: 404171 - DNA, 122 bp, Homo sapiens
tggtatctggtgctctgttctggtgttaattccctgaggagaacggcctccagctgcatccgtgttgctgcaaaggacgtgatttcattctgttacggttgcgtaacattccctgatgtata

SEQ ID NO: 404172 - DNA, 122 bp, Homo sapiens
gtggtggagtcttctgagcctaacagctactaggaatgacagagttgcagatggctttgtcgcccgcggggcggctcaagcgtcctgggtcccaggcctctgtcctacggccaggccgccgg

SEQ ID NO: 404173 - DNA, 122 bp, Homo sapiens
ttgtctcaactgcaagaggcatgccttcctcttatactaaacctcagcacagaccctttacgggtgtcgggctgggggacggtcaggtctttcccttcccacgaggccatatttcagactat

SEQ ID NO: 404174 - DNA, 122 bp, Homo sapiens
ctgcggatactcggctttggtgccaggaagaccgcggggcgtggcggggaccgggccctgcgaatggagcagctgagactcagctccgcggaatgacacaagcctggggctgccagctcttc

SEQ ID NO: 404175 - DNA, 122 bp, Homo sapiens
gagtgaaactctgtctaaaaatatatttttttaaatttgttttgtatcaagaaaaaaatacgaaaacataactttattgtagcaatctaatgcaggtgtcttttaaaactatcttttatttc

SEQ ID NO: 404176 - DNA, 122 bp, Homo sapiens
tgcccaaacacccctttcagaccctggggcgggagcaagccagtcaaaatgaccccagtccgcggaggctgtgaatcgttgcccccgccctcggggatgatctacgggcggggccgctcata

SEQ ID NO: 404177 - DNA, 122 bp, Homo sapiens
ccgagggcggtactggaactccgagatgaccatccagtgttggatggggcttcccgaggccggtgctgcagaatcgctgtgtgggagggcaacggtgagggggggtggggggctgggggtgg

SEQ ID NO: 404178 - DNA, 122 bp, Homo sapiens
ccgcccaggagagacagccgagcggcacagcggaggccggtgccaggacaagggggtgtgcgctcttcccgcaggcgcccaccctcacttttcccctctgcagtccccacccgggcgcaccg

SEQ ID NO: 404179 - DNA, 122 bp, Homo sapiens
ttgagcactttgtgcctcagtttccttttggtaaataataaaagtctgtacattataaggcggtcatgaagattaaatgaactggaatttttcagcacttagaactctgcctggcctatagc

SEQ ID NO: 404180 - DNA, 122 bp, Homo sapiens
ctccccgggcggagagtgtctgtgtctcccagagtgtgcgagtgcgtgcgtgagtgtgcgcgcgtgtgaaggcggaggtgggtgagaagcggagacacttacttctcccgggcctggctgtc

SEQ ID NO: 404181 - DNA, 122 bp, Homo sapiens
tttgaagggcagggtcccaacgacacctgctcccagctctgggacggcgcccggctggaccgcgtccacatccacgccacctaccaccagcacgcggccagcaccatctccatcgacacgct

SEQ ID NO: 404182 - DNA, 122 bp, Homo sapiens
ggacgcgggagccatgggagctgcggctgcagtgagtgtcaaggtccttctttcttcccccgccgcagcgcggggtcccgggaagatgggcagagaacgggcgagcccccaaggggccccaa

SEQ ID NO: 404183 - DNA, 122 bp, Homo sapiens
cccgggattggagcccgggacattgaaatgaaggcgtcttgcattgcagctccgttgcagcgcagaggcgcaggaaggcagactaccacgagcctcgggctgcggcctcgccctcctggtcg

SEQ ID NO: 404184 - DNA, 122 bp, Homo sapiens
tgcggctgcccgggcagcgctagcaccgaggacctgacagtcgggtaggacccggccgggcggccttggcggctccagctccccatgctcggggacccggtccagccccccatgctcccgga

SEQ ID NO: 404185 - DNA, 122 bp, Homo sapiens
ttgggggctgttggggagggggtggggagggggaaagggagggagagagagaaaaaaacgcggattcgccggctcctagtcaccctcgccaggaaaggagagggaaagagaggagggaaaaa

SEQ ID NO: 404186 - DNA, 122 bp, Homo sapiens
atcaagaggtcaggagattgggaccatcagttggtcccaattggtcagattgggctaacacggtgaaaccccgtttctactaaaaatgcaaaaagttagccgggcagggtggcacctgcctg

SEQ ID NO: 404187 - DNA, 122 bp, Homo sapiens
cttgtcagagaaataggcttaattactttcctggtaaatagcagtggcgttcactttgctcgccactaaaaaaaaatttaaagaattgtctagcttaaaaacggctttattcatacacaaat

SEQ ID NO: 404188 - DNA, 122 bp, Homo sapiens
gaactctgggcgagagggctggcgtgcttgcccactgcctgttcctaggtgccagcagaacgtccctgctgggtggctcttgtcctgcctggagaggttgcgtggccggggagagggcggcg

SEQ ID NO: 404189 - DNA, 122 bp, Homo sapiens
ccctgctcctgtcgtggtccttttcaggtgaaatgagttgttatttttacgcaaaaatcacgttatcatcctaaactgcaaactttactgaggatttacaatgagacaaaaggcaccttata

SEQ ID NO: 404190 - DNA, 122 bp, Homo sapiens
gagcgggggcgaggcggggtgttctgctgggccgggtctgggaggaattcgcgggaaatgcgggggcttaatgggggaaacagaggcagtatcaaatagacggcctgctgacatttttaaaa

SEQ ID NO: 404191 - DNA, 122 bp, Homo sapiens
cagcagttaccagggtgctgacgtcagctagaggcagggcaccgcggaaggttgaatccacgccctggctgtgcgcaggcgccgtagggggaaggcctggcacgctccagccaaccagggcg

SEQ ID NO: 404192 - DNA, 122 bp, Homo sapiens
aatcatttgaatacagcgcacgttgagcagtgggttcttgggtttggtatcacattgcaacgcagatacatgctcggggctgatactggatagctgtctgcacatatagctctgggtttaag

SEQ ID NO: 404193 - DNA, 122 bp, Homo sapiens
ctcctggactgccctggtgcatgtcaaggccgagtacttccgctccctggcccactaccacgtagccatggccctctgcgacggctcccgtgagtgcccaccacacttgcccatggtactgc

SEQ ID NO: 404194 - DNA, 122 bp, Homo sapiens
ccagagagtgtcttcattccctctgatttgggagagcattttggtctttattctttttatcgttgttttcttctttttgtttgctctgctctaaccgggggctttattttttctacccagag

SEQ ID NO: 404195 - DNA, 122 bp, Homo sapiens
accagttttagagtcactgcctgcccggtgacatatgttcaacggccatggtatcctgaccgtgcaaaggtagcataatcgcttgttccctaaatagggacttgtatgaatggacacacaag

SEQ ID NO: 404196 - DNA, 122 bp, Homo sapiens
ggtgtagtgtttttccagtagataaggtcgacgcaggtgaagggctggtacccaaaaacacgcctctccaccacgtgaccatcctcatctatcgcagtatacccctgctctctcaggggcat

SEQ ID NO: 404197 - DNA, 122 bp, Homo sapiens
ttatacttatgtaatcgccagcctcacaataaccaggggaggtaggtgttctgaccatggcggacacagtgcgtcccggctggagctactcggcgctgtggacgcgctggtgctgaatgagc

SEQ ID NO: 404198 - DNA, 122 bp, Homo sapiens
tctccgaaaggcgggaaaagcgaactacacctcccgactggccgcgcgcggctgcgcctgcgccctgttacctgtcgccatcttgccccttcagaggcaccgcaaacaaacccaattcctgg

SEQ ID NO: 404199 - DNA, 122 bp, Homo sapiens
accaaggctcagaggagatgagtgattttccagagctctttaattcaacccctttttccccgtactgagctgcctgtgacaagtcagaaagactggtctatggtcatcgcctggctacaggt

SEQ ID NO: 404200 - DNA, 122 bp, Homo sapiens
gagcttgctatagcaagaaagtctaacctattccggtgttctctctcccatgagacaagccgttatatagacttaaacagtgttccacctgttggctaaagctgggttgagttaatgacttt

SEQ ID NO: 404201 - DNA, 122 bp, Homo sapiens
tggggggagtcctttgcagtcaccccgtgtactcaatactcacatgcatcagaatcaccccgaatgcttgttaaaacacagattcctgggtcctccccgcagagttgctgatttagtaggtt

SEQ ID NO: 404202 - DNA, 122 bp, Homo sapiens
atcgtgtttaggcgaaaggggaaagttaggcaaccgtttggaattaaaaaaaataaaatccggagcccactaagcctgtgtcaacgggcgaaaatgaagtgaagggttgagaaaatgaactg

SEQ ID NO: 404203 - DNA, 122 bp, Homo sapiens
ccgccggctccgcgcccgctccttgcgcacacgccaggcagcgccgccgcagccccacggcgcgcaggccacgcccgtgccacgcccactctcacgcccctcctggcggccccgccccgcgc

SEQ ID NO: 404204 - DNA, 122 bp, Homo sapiens
gcctggcgagggcagggagcaggagcaggtcctgggaattttgctctggggaaaatctcccgaggagatcagggagccatcgaaatcccaagatcagactgattgagttagagacccagatt

SEQ ID NO: 404205 - DNA, 122 bp, Homo sapiens
gcctagtgggcaggcccagcagcctcacacccgggtgaggggtctgctggctgcacctgtcggtctcatggctcctgggagcgtcaccagcgacatctcaccctcctcgacttccacagcag

SEQ ID NO: 404206 - DNA, 122 bp, Homo sapiens
tggtacggaggcatttaggacccaggggaaagctaggctccgtatagaaggacagagaatcgggcgcacacgcctcctaccaaaatcacagccccttgtggagcccgagctctcattcacag

SEQ ID NO: 404207 - DNA, 122 bp, Homo sapiens
atagacatttacaagctctcttgtcctattgcttccagttgggtatagtaaaaaggaatacgccaccaaaagttaagagaaaggagaaaggaaaattggggtatttattcctttggctcccc

SEQ ID NO: 404208 - DNA, 122 bp, Homo sapiens
gagtttcattctgtctcactggagaggaggcagggacagacccagcagcacccacctgagcgagaagagcagacaccgtgctcctggaatcacccagcatgttgcaaggtctcctgccagtc

SEQ ID NO: 404209 - DNA, 122 bp, Homo sapiens
gcaaggagaagagaatgatcccattgtttagggagggtgctcaggtgggagtatttcctccgacagatcatggcgtctgcttcacattttagttgccaccaattctgaggctcatttgcata

SEQ ID NO: 404210 - DNA, 122 bp, Homo sapiens
ggtgctggaggcgtccaaggcgctgctggaagagcagctggaggctgcccgagagcgctgcgcccggctgcacgagacccagcgcgagaacctgctgctgcgaacccggctgggcgaggccc

SEQ ID NO: 404211 - DNA, 122 bp, Homo sapiens
aaacaccgctcgaattcatgaccccaatagaaaacttaaggccgcaactaagtaacggatcgctgcgaaggccaaactagccacgccaacgcccccactggagcctccccagcgctccgccc

SEQ ID NO: 404212 - DNA, 122 bp, Homo sapiens
cctacctggattcttcatctttcctgagtcatggaccactttgggctctgattagagctgcggtccctattccaggaaaaatgcaggactgcacagtcattttgggggttcaggggtcccag

SEQ ID NO: 404213 - DNA, 122 bp, Homo sapiens
actgtcacactattttccacagcagctacgtggttttacatacccaccagcaatgcacaacggttccagtttctccacatcctcaccaacacttgttattttctatgggtgtttataaaata

SEQ ID NO: 404214 - DNA, 122 bp, Homo sapiens
tccttccccagactcctttcctcccctatcctttaccctcccctcccctcccctccccaacgcagcaccttcacacctgggagctaccctcagagcctgaagggtctctctcaccctaccca

SEQ ID NO: 404215 - DNA, 122 bp, Homo sapiens
tgagttaaaaaaaatctcaaatgtatgatgatttcatttgtataacattatttaaagtgacgatattatagaaatggagaacagatcagtggttcccagagattaagaagagactaaaagta

SEQ ID NO: 404216 - DNA, 122 bp, Homo sapiens
tatcattaagcagtcatattatggtgtgagagtttataccctacaacacacaaactaaaacgggtaactctggggtaactgttccaggtaattcctttgtgacaggggattttcaaggcttg

SEQ ID NO: 404217 - DNA, 122 bp, Homo sapiens
tgaggggcttagcacccgggccagcagctgcggagggtgggccgggtcccccagcactgccggcccacccgtgctgcacttgaattttcaccaggcctcagccacctccccacggggcagag

SEQ ID NO: 404218 - DNA, 122 bp, Homo sapiens
actgagaaacacagggggaaatcagagggaggcagaagagtggaggccccactccctttacgatggtgttgctgctggctggctgcatgacccagccagggttcaaagtcctgtcaggtagc

SEQ ID NO: 404219 - DNA, 122 bp, Homo sapiens
tgggactacaggtgcgcaccaccatgcccagctaatttttttttgtatttttggtagagacgaggtttcaccatgtttgccacttttatataccgaacactttgctgggttctggagataga

SEQ ID NO: 404220 - DNA, 122 bp, Homo sapiens
gaagcgagggcgacggagaaaatggaaaacaataaatattaagcgcaagaaaaaagggagcgcagcgccgttcccacttgttagattgaaggcgcctctccagaggggggaaggctccaaat

SEQ ID NO: 404221 - DNA, 122 bp, Homo sapiens
tctctcttgctctcctcccatctcatctgcacctagcagccagagtgatcctgatactctcggcctttacttccgcctccctcagagcagcagcctgtcaaaacaccagattacaacaaatt

SEQ ID NO: 404222 - DNA, 122 bp, Homo sapiens
tgtcgggccgcttgtttggctgctgccgtcacctcatggcgacgcgggtagaggaggcagcgcggggaagaggcggcggcgccgaagaggcgactgaggccggacggggcggacggcgacgc

SEQ ID NO: 404223 - DNA, 122 bp, Homo sapiens
ggtcatggacgaggaggcctatgtgctctaccaccgagcgcagactggtagggctgagtccggactccagggtcctgaggtggctgatcccgagcctttaacctgagaggtgctcgggaaga

SEQ ID NO: 404224 - DNA, 122 bp, Homo sapiens
ccgcagagagggcgtggaggggcggagccggctcgaaacacgtgggtgggtaggccccgccgcgggccgggagggtgggcgtggctatgtaaacggagcgcgcgcgttggacgctgggttgg

SEQ ID NO: 404225 - DNA, 122 bp, Homo sapiens
aaaatgttcagctccttgatccagacccgagtggattctctccagggagcgggtgggtggcgaaggtcagagagaggggaaaaaagaccacgctttggaattagggaagcaacccagtgttg

SEQ ID NO: 404226 - DNA, 122 bp, Homo sapiens
aattgtgtggggcagaaggaaaatccaggagccttgttttccacatgtttccatcacacccgttaattgaacaatctaagcccggcctcagtgcaggtggcggtcgtgggcctttcccaggc

SEQ ID NO: 404227 - DNA, 122 bp, Homo sapiens
aaacccagcgtcctgaccacactgctgggtcagcgaggcgtccctcagagaccggaaacgcggacttcagctcgcttgggaaacggcttccattagcagaagggagactgcggtttagtccc

SEQ ID NO: 404228 - DNA, 122 bp, Homo sapiens
tttagcaaatactttaacactgtttgaagaggtgccaaatgattagcctctccagagaaccgaatgtcctggttcccttgcttgctagtaacagatagctcagaattcagcacctaaaacta

SEQ ID NO: 404229 - DNA, 122 bp, Homo sapiens
gagataaggagccttccttacacattcctccatgagcccaggaggggaccttagccacaccgtgtgacagcagcattcctgggaggtccgttgcaaggaaccagcactcactgcatgcctgc

SEQ ID NO: 404230 - DNA, 122 bp, Homo sapiens
aagtttgagaagctttggtactgaaggcatctagtgagtaccttgcaccttgtagatgctcggtaaatatttttttcctcacctctctgccccaaggcatttagtggctccctatacccatc

SEQ ID NO: 404231 - DNA, 122 bp, Homo sapiens
cccctccagcctcagcttgacaagtctctagagagcaccagctgtggatgaggttctgtgcgagatggtagggacacaggaagagacaaggtccctggccccaagagaggaggcaagtgtgc

SEQ ID NO: 404232 - DNA, 122 bp, Homo sapiens
ggtggatctcagacacaggcaggctgggaggtctgcacaggtgtggccatagaacatggacgcctccagtacgcaggcacaggcagctcagggccgggagcgaggcccgtctcagcaggcgg

SEQ ID NO: 404233 - DNA, 122 bp, Homo sapiens
tgaaagagccggggtgggtagtcgctggcgggtcgttgagtcggccatatgaaacaggttcgggggcagggcaagagttatgagagcctaaaggtcctgtcccccggggttcctgacctgca

SEQ ID NO: 404234 - DNA, 122 bp, Homo sapiens
tggccgaggcccgagagctgtccccgcgggacgggactagcgagggccggggagatggagcgcaggcggcgtctgggttcgaagcactttccggctgaaccacctgctgctgaggctgagcc

SEQ ID NO: 404235 - DNA, 122 bp, Homo sapiens
tacctcctgacaaggccaaggtcagggaggcgatcactagggccaggggccacatggctccgggatcgggaggggagggcagggcgggcggggcctgaggagaaggtgaagggggtgttgag

SEQ ID NO: 404236 - DNA, 122 bp, Homo sapiens
cagcggccgcttgaggaacaaggccgctcctcgagagggatgccccgccctttccgttagcgaaccctccccggaagtgacctctcgccctcattgggtgtcctcgggaaaaggggcggggc

SEQ ID NO: 404237 - DNA, 122 bp, Homo sapiens
cttaaactacacttcccagaagcctcctcagccagggacttccgttgtcgtcagcggaagcggtgacagatcatcccaggccacacagaggccggcttggtcactatggaggagataggcat

SEQ ID NO: 404238 - DNA, 122 bp, Homo sapiens
cttgcgccgttttgataggcttctcgggccgaagtaatcggagcgctgcctctctggaaccgcccccgccacctcttcgccccgcccacgtattaccgcccctccgaaatctcgcgagggta

SEQ ID NO: 404239 - DNA, 122 bp, Homo sapiens
tacatatgcacacacgtttaatccacgtgcacacgtgtgtgttatcctatgtggagggcacgtgtctgccgtgacccagcaaggccatctgtgtattatatacatatgcacacacgtttaat

SEQ ID NO: 404240 - DNA, 122 bp, Homo sapiens
ccggtaagggctgcccaagaaagcattacccgccctcggggggtcgggctgtgggggtcccggcacctggcgtgagtttcatgtatgaaaacataaaattgaaaaaaaaaaaaaaacctaca

SEQ ID NO: 404241 - DNA, 122 bp, Homo sapiens
gacttggcgctcagcatcctagccgattgctgtacggaaggggcgtgccggaccgaagtgcgcagactcggaggcatactccctttgggtaagtgctccgcccccgtttcctagaaagatta

SEQ ID NO: 404242 - DNA, 122 bp, Homo sapiens
gaaagttggacctggcacccactggcttcactttcttgagagtagagtggaaggcaatcccgcccaacctcccacacaccatgacaagtgcccgtgggtaataaatggaaaagtgctttgta

SEQ ID NO: 404243 - DNA, 122 bp, Homo sapiens
attgctttattattataaaataaaaatgaccacatacgaaataatgccctctgtgaaatgcggagagagttctgaaaaattatttacctatataaaatggaactgggggagctttgttacct

SEQ ID NO: 404244 - DNA, 122 bp, Homo sapiens
tggtgtcttaaaatacaagactagctgcccggtgatgacaccaaatcgagcagcggggctcgcagtggccaggatccccgacagtggaatgctgaggttagaactgaaaccgcgtttcgtga

SEQ ID NO: 404245 - DNA, 122 bp, Homo sapiens
cgcgcccgcccggacttcgggacattccctccagccgcgcagcccccgggacgtaaccggcgcagcagactcgaagcccggtcttaccccgcccacccgcctgccaggcagccacggggagg

SEQ ID NO: 404246 - DNA, 122 bp, Homo sapiens
tctcacgaaagggtctccagacagttccgctgctccgggagcagcccccggccccgcccccgcgtgcgcctggccccacccccaagcgctccatgaccagcctccacgtgcatccgccccag

SEQ ID NO: 404247 - DNA, 122 bp, Homo sapiens
gggtctcctctacctctgtcacctgggagtaaacctaatctttagggatctgagggtcaacgtgatcaacagatgaaaccgccagtttatacagcagccctgggccaaactagtcccttaga

SEQ ID NO: 404248 - DNA, 122 bp, Homo sapiens
acttattactttctgtctggttaggataatcaaacattcagcaaggaagaatcaaagcaccgtaggtggtataaataagcatgagaaagagcttccgaaaaatctcttccaaatagagaaca

SEQ ID NO: 404249 - DNA, 122 bp, Homo sapiens
ccgaatgttctccacgaacttctccaggtgctcctctaggtggtcaaacttctccgccatcgcctcggcccgtccccgacccacacagcctcaaccagcagcgccgcaggcgtggccctacg

SEQ ID NO: 404250 - DNA, 122 bp, Homo sapiens
aaataaaaatagtgaaattatgtgaagaattctgatgcactaacactgccctggtgatctcgcaatctcaaagaccaagagcgttctcaaagcaagctgcatccaataacctcactgatcca

SEQ ID NO: 404251 - DNA, 122 bp, Homo sapiens
ctgagctcccattcatccactcactccagagagatcaattgcgccctgccatatgccaggcgtccttctaggtgctggaggcacccctggtagtacaacacacaggtccctgtcctcctgga

SEQ ID NO: 404252 - DNA, 122 bp, Homo sapiens
tttatagctgccctcgcgttctgattggacagtagactgtgccatgccacgtctcacacacggaattggctcccagtttaatctgctagtgaaagggagacattccgcctctgttttgggtc

SEQ ID NO: 404253 - DNA, 122 bp, Homo sapiens
gtacagcaaatggccttagaagacagagatagtatctccctaagattgtggttccttagccgtcatgcaaacctgcagtgtgtaacactttcctgggcctgccagtattgccctgtgggact

SEQ ID NO: 404254 - DNA, 122 bp, Homo sapiens
acccaggaagtggaggttgcagggagctgagatgacgccactgcattccagcctggcaaccgagcaagactccatctcaaaaaaaaaaaagtgaaaatcttctagcttacacctacaagagg

SEQ ID NO: 404255 - DNA, 122 bp, Homo sapiens
ggcgagccgatcacctgaggtccggagttcgagaccagtccgaccaacatggtgaaatcccggtctctactaaaaatataaaaaattagccgggcgtggtggcgggtgcgtgtaatcccagc

SEQ ID NO: 404256 - DNA, 122 bp, Homo sapiens
cacacagtccctggcaagtcctcagagctcacgtggtgcccagagaagttgtgggtgacacgatgaggcacaagctccattccccgggggatgtaagctgagaccctacctctctgtgcaaa

SEQ ID NO: 404257 - DNA, 122 bp, Homo sapiens
cggctcccgcttgttctcgggaccaaatccaaagcccctggcgccaccttcgagagcctccggacctgctgaccccccacacctgggctctgagctccagatccaagatgctgctcgccctc

SEQ ID NO: 404258 - DNA, 122 bp, Homo sapiens
tttcccttctttctttttttcctccatggatttgcactttttagtctcaataaaaggactcgatgtctgccattggaaaaccttactttcatttcttcccccagaaaaatgaaacaggtttc

SEQ ID NO: 404259 - DNA, 122 bp, Homo sapiens
ccgaggcccagggcagcagccacccttattttcctcgccctggaacaagtgtgcatgcagcggcttctgacacacacacatgtaataaacagacaaggaaacacatttaatctgcttttctc

SEQ ID NO: 404260 - DNA, 122 bp, Homo sapiens
aaagccctccgaagagggtgaggcctaaggtcgcgacggcggagggcggggacctaagggcggggactgaggggcgggctctaagggaagggcgggaccatacggagtgaggcgtgccattg

SEQ ID NO: 404261 - DNA, 122 bp, Homo sapiens
gggatcatgctcagatatttgtctcaaagagtcccaggccaaacctcagggacctcagagcgtttagaaaaataacacctctgtgagcttggtccaggcagatcccatgcagagaggagttt

SEQ ID NO: 404262 - DNA, 122 bp, Homo sapiens
aaattgctagcttccgatgccatgcgctgcgactggaacgccaattcccaccatgccgcgcgctcacagctctcaggggctgtcctgtggcctttggggaagtgtagtcttgagcccccaag

SEQ ID NO: 404263 - DNA, 122 bp, Homo sapiens
ggtagacctcctaggagagcggtcacaagtcccctctcctccgcatggacaccaggaatgcggggtctggcggtgctgggcgcagggcgagaagatttgatgtgcagggtaagtaaaggaca

SEQ ID NO: 404264 - DNA, 122 bp, Homo sapiens
ctcagctctaagttaattgacttgtgatgagaccctgcatccatgcttttaaaagctttgcggatcattctaacgtgtagccagggttgagactgaggatgaccaccttgagaagaaagaca

SEQ ID NO: 404265 - DNA, 122 bp, Homo sapiens
gtgctaatacctaattcaggaaatctggattgaacatgggcacctgtgaagaagtggaaacggcagtggagctaagacatacagcaaagagagcctgttttgttataaacagctaaatctgg

SEQ ID NO: 404266 - DNA, 122 bp, Homo sapiens
gcaagtgatagaatggccttgggtacattttgtaatggaactatcaacagcagtctccttcgaatgcacatagctcctttcttcccctttacatactcaaggttaactttttggcatttttc

SEQ ID NO: 404267 - DNA, 122 bp, Homo sapiens
gcggccagcgacttgctctgcgcttgcttaaccgctgtcgtgcccagatcctcgggccttcgggtttctgattcttggttagtggggtccatttgcttgtgtatcctagttgttacgtcaca

SEQ ID NO: 404268 - DNA, 122 bp, Homo sapiens
cacagtctcccagggaaccgtgggtccgggggctcctagctcttcctcccatctctctggcgcccctgcgtgcctgtgtacggtggtggtcttggaggggtggtggtcttggggggcgcggc

SEQ ID NO: 404269 - DNA, 122 bp, Homo sapiens
cagccgtcagggaactgcccagccgcctgtcgtgcccagcccagggcaaagggcgccgaacgcaatgccaactcaatacaggggagaaaaggcaaacagccagaggtttctctggccccagg

SEQ ID NO: 404270 - DNA, 122 bp, Homo sapiens
tggcaaaacatctcaaatgtagggcttatgacaaaatgaccagagatttgccctgtgactcgctccttattaaaaccaggaaatctccatcctatctggtgagacagctgtgcaggcaactt

SEQ ID NO: 404271 - DNA, 122 bp, Homo sapiens
ccctggagctgcctcctcaggaagtgaagagttgggcttggctggctggtatagcagcagcgacagcagcagagacagcatggcctgctcagaaggggcgccctagttgccaaggatgaggg

SEQ ID NO: 404272 - DNA, 122 bp, Homo sapiens
acaggctcttcaggcttctcttcaaagaagctgggtgaatcactatcatcatctaactttcgttttttcagtaagggaaattccatttgctcgtaagtgcgcttcacaggtgccagacttgg

SEQ ID NO: 404273 - DNA, 122 bp, Homo sapiens
ccgggagcgcactgtgtacaaacagaggcggcgtgcgtgtgagtctgagcctggcaggcgcgctccccactcccccggcgcccgcccgccctccgcccgccctgttattcactccccgggtc

SEQ ID NO: 404274 - DNA, 122 bp, Homo sapiens
agtgcgggcttgccgtggagtaacacagatcccctctggcaactcgtctgggacgaagggcgtttttgcttagtgttgatcacgcaaatcacatctgaaaagaagctgcttaaaatgggtgt

SEQ ID NO: 404275 - DNA, 122 bp, Homo sapiens
cggggaaccgcgggaggaggcggggcctagtgttgacgaacagctcccggggcctatgggcgcgggggcagccgcccggcctctccggcgcgccccctccccggggctgttgacgcccccca

SEQ ID NO: 404276 - DNA, 122 bp, Homo sapiens
ccaagtacggctgggcgctgggatggggcctgctgtaacggcagggagacggtctctccgcggcccaggagagagagaccagaaggaacggcctcaggtagcctaacggccaccggcggcca

SEQ ID NO: 404277 - DNA, 122 bp, Homo sapiens
cgaagatccggccaatttgcccagcgcgctgtgctccgcgacggcgcatgcccgcttttgcgcaggcgcggggactacggcgcaggcgcggagactattgcgcaggcaagcgcgtacgcaga

SEQ ID NO: 404278 - DNA, 122 bp, Homo sapiens
taattacccatttccatgtatgagtcagtacaggattctctggtttatttttgcttaaatcggttaacttgggatttactgttagagtatgattaacataaatacacatttccatagatggt

SEQ ID NO: 404279 - DNA, 122 bp, Homo sapiens
ttggaatttgattctgatgtgcagccagggctaagacccacttctttaaatggtgcccaacggattcatcaaatgcttatttatatgcaacagaaacaaattatagatgatttaagcaataa

SEQ ID NO: 404280 - DNA, 122 bp, Homo sapiens
aataagggttactcagacacaagcactgctgtacgacgacagtggatctgatcaccgagacggctgctgagtaactaacgagtggggcgcgtctacactgtggaggtgctggacagagggag

SEQ ID NO: 404281 - DNA, 122 bp, Homo sapiens
tggaaaccacacagttcaggagaaaattcatctcacatgctgtagcctgctttcccggaacgtgtccagagactgctgtgtcaacactgccaaactcagcaagccactctcccaacggaatg

SEQ ID NO: 404282 - DNA, 122 bp, Homo sapiens
gccagcaggcggagagctcgcgccttccgcgctgacgtcagcgcatcccgggccgtatcccgggagaccctgttgcgtggtgatgggttgccagggagacatacaccttttctctgggcctg

SEQ ID NO: 404283 - DNA, 122 bp, Homo sapiens
gccctggctgtctccctcggcaggagctcggcaccccgcaggttttcttcccaggatgtgcgtctccgattggaaggtggaggagtcacagatgcccctttgtgtttccaggcctggactgg

SEQ ID NO: 404284 - DNA, 122 bp, Homo sapiens
cgtccccttcaaagggaaaccgttgtccccaccgccgcccgggccgccctgctccgcctgcggccgcacagctcctccatgctccgcgccccaaaggaatgaatccggccgcgctgttcgcc

SEQ ID NO: 404285 - DNA, 122 bp, Homo sapiens
attcgtgtgcattactatggtaaaacagtcaacatccggttttacacctcctcctggcttcggatggggaggagctccaaggagatccgttgctagggaggaagttaggttgctaagggttc

SEQ ID NO: 404286 - DNA, 122 bp, Homo sapiens
tcatgctgtagcacacttaccacccagatgttagagcgtgcttgtagctctgcatttacccggaagccaccaaaatctgagtctatttccaggccaccagtcttggccaactcaacattggg

SEQ ID NO: 404287 - DNA, 122 bp, Homo sapiens
aagaaactataaaaatgtgtgtgtgcaatggctgcacacagcagcttccttggtagtgtacgcagcctgttggttgtatgggttgctctaagggaccttggagacaggcctttccgatggat

SEQ ID NO: 404288 - DNA, 122 bp, Homo sapiens
cacggcaccaccactctggccttccgcttccgtcatggagtcattgctgcagctgacacgcgttcctcctgtggcagctatgtggcgtgtccagcctcatgcaaggtcatccctgtgcacca

SEQ ID NO: 404289 - DNA, 122 bp, Homo sapiens
ttcagcttcttccctacgcttctgcagctcccattgtaaaagcaaaaatcctaatctttccgcacactcttttcttttgtactgcagaggaaaggatttaaccctctcctccctgcaagggc

SEQ ID NO: 404290 - DNA, 122 bp, Homo sapiens
actactattccaataagaaaaagtcctgcatgtccacatacacatgtgcccaagcagacacgcatctaaaagaaagaaacccgaaactgaaaattccaaagtggtggccggcaggcatattt

SEQ ID NO: 404291 - DNA, 122 bp, Homo sapiens
cttgctatgtcgcccacaatgacttcaagtgatcctcctgccttggcccccaccaaagtgcgtggactacaggcataagccactgcacctggcctctctcgcaattctcatagccaatctca

SEQ ID NO: 404292 - DNA, 122 bp, Homo sapiens
attggctctcggcctgctcaatcagcgggctggacgcggaggcaacttccttactgtgtgcggacttctgcggagttctgcggccttctgcggagttctgcggccttctgcggagttctgcg

SEQ ID NO: 404293 - DNA, 122 bp, Homo sapiens
ttttcttaaaagaagattttagtaagaacaaaaggtagcatttgacttgcttctgataaccgcagtagcctttatccccaagtggcttgctgattttggagtctcagtgctgtccgatctgt

SEQ ID NO: 404294 - DNA, 122 bp, Homo sapiens
ggactctgggaggagcgttggcgtggaaagccaggtcactccgatcttggtcctcaggctcgggataacgtgtcagccccaagagagcgctgcccacagccccgggtgggttgggttcaact

SEQ ID NO: 404295 - DNA, 122 bp, Homo sapiens
ctctctcctggtgcagtcgtgccttgcctggtctgggctcccctcctgctctgaggcaagcgtatctctccattgaacactgagtctgaaatgccctgcacacacttgtgatcccgtgcaga

SEQ ID NO: 404296 - DNA, 122 bp, Homo sapiens
cacatgagaactgcattgcccagaaacctgtgcgccgcccggcggcggcactcttaggggcgtctccctgcggacggaagctctctgggcgggacttccggtatcttcctcgcggtggacat

SEQ ID NO: 404297 - DNA, 122 bp, Homo sapiens
tcgtgcccagctgcagcaggcagcctcggctctcctaaccacgtgccctgggggctggggcgcaccgagaccacgtctgcgatgcagcggttgaggttgcccttgtcgtccttgatggtgat

SEQ ID NO: 404298 - DNA, 122 bp, Homo sapiens
cgcgtgtgggtccgtgtgcgcgtcccggtcccgcggcggcgacggcggcggcggcggcggcggctgcaggacgagccgagaggctcagccatatttgatggttttgttgctttgctcgggag

SEQ ID NO: 404299 - DNA, 122 bp, Homo sapiens
ctgcacagacactactacctccagggcatgatcgactccaaagtgatgctgcaggccgtgcgctactccctatgctctgaggagtcccctgagatgaccagcttgccccccgccacgctgga

SEQ ID NO: 404300 - DNA, 122 bp, Homo sapiens
aattggttgaggaacggagtgggacgcccatgccgcttcgccagcacttgccaggcgttccgtggggcagcatctcctctgaagggccgccgacagtaccacgccaatggaacggcgtaccc

SEQ ID NO: 404301 - DNA, 122 bp, Homo sapiens
cccgttgtccagtgggaaagaaaaaagaaatgagcagcccctgatgttcagaagcctcaccggtaggccatgttctcctactaaacataagcggtctcacagaataccttcaacaaagtttc

SEQ ID NO: 404302 - DNA, 122 bp, Homo sapiens
atattagcataatttgacataaatggagtcaactacatgcaacctgattttttttttaaacgttgaaacagtacatttagttttgtaataatatagagggtttaatggctgcataggaatct

SEQ ID NO: 404303 - DNA, 122 bp, Homo sapiens
ctcacccggccgaggctcagcaaacaggcctgctgtggagcctgggcggcgggttcggggcggggttcgggtccgtccaggttccctgtcctggaactgaagatgggaatcctgctgcagag

SEQ ID NO: 404304 - DNA, 122 bp, Homo sapiens
ccgccagaagaatgcagttctgaacaaactgaaaactgcaattggagcagtggagaaagacgtgggcctgtcggatgaagagaaactgtttcaggtgcacacgtttgaaattttccagaaag

SEQ ID NO: 404305 - DNA, 122 bp, Homo sapiens
caggaccctgacctggaggccaagcgcaaggctgagctggccaagatcaagcagaagaaccggcgcttcaaggagaaggtggaggagacgctgaagcgacagaaggctggcagggctggcca

SEQ ID NO: 404306 - DNA, 122 bp, Homo sapiens
tcagtgttgatttcatctttcagccttcagaaaacagctgtcaatccaagtgcttgctgtcgatatggagcacaggttgtgaacacagtgcctttgtgccatgctttggtcacatgtacagg

SEQ ID NO: 404307 - DNA, 122 bp, Homo sapiens
tgctcgcagtcctcttcccccgaacctgcccctgcctcccccgcccgcccattggccccacgcccgacgcgtcagtggaggcccaggaccaatccacagcgacctgcacgttcagagcccgc

SEQ ID NO: 404308 - DNA, 122 bp, Homo sapiens
ctgcagagtattgatgagcacatgcacacgacgccctggagtactcgccctgcagcgtatcgatgagcacatgcacaggacaccctggagtactcgccctgcagtgtatcgatgagcacatg

SEQ ID NO: 404309 - DNA, 122 bp, Homo sapiens
cttgcagccagggacccatccctgacttaggcgcctggaggcttctggcccaagtatccgcgcggctggtggcgctggcagggtcagggttgcagcctctcctgccacgtgccatgttcagg

SEQ ID NO: 404310 - DNA, 122 bp, Homo sapiens
ttaactttcgacagctggcagtttccttatcaaaacagagaccgtagtctgtgcctcctccgcctcttgcttgacacacacacacacatacacacacacacgcagctctccagttcaaaacc

SEQ ID NO: 404311 - DNA, 122 bp, Homo sapiens
taaacaggaagtgttctagtctgacataactgctgcgttgtacctggatggcctctttctcgatcttcagggttacgtgtcttccggccagggtagctgtctttcggtcggctctcttcctg

SEQ ID NO: 404312 - DNA, 122 bp, Homo sapiens
ccgggtacaggggtggaggagggcatgtattaaacccaagctgccctcctggcacagtagcggggcccccttccctggcggccgcggaaagggactcgccctttgaataaaggctttggtga

SEQ ID NO: 404313 - DNA, 122 bp, Homo sapiens
ggccgcgccccccagcgtcagctgcatgggtcctcgcagcgccgccaggcccacggcgtacgaggcgctgccccacaccacgcacaggccgcccagcaggaagaagcctgcgggagaggcag

SEQ ID NO: 404314 - DNA, 122 bp, Homo sapiens
accagcactactggtggagtggctttcctggtgcagcaggtcccgagggctccgtggagacgtcttcttccggagtcccgttctcttggaagatagcagcagcagcaaaggtgcaatgtcct

SEQ ID NO: 404315 - DNA, 122 bp, Homo sapiens
cctcctgggaactcagcccaggcacgccgccctccgcctctaaattcagacaatgtaactcgctccaagacatccccgcttccccaaggaagagaccggtggtctgagtcccgaggcagcgc

SEQ ID NO: 404316 - DNA, 122 bp, Homo sapiens
agagggcagtgtcccggctagtctgccaggccacaatgacatcatcagggccactgcccccgaaggccgtggcctggttttcttggccccacgcccatggctgcccacccgggtgagctcat

SEQ ID NO: 404317 - DNA, 122 bp, Homo sapiens
actcacataggccagccttagaagacagccactgctcatgatttacttttaaacctttgtcgcaattgtgattaagaatttgtgcctgggtgcggtggttcatgcctataatcccagcactt

SEQ ID NO: 404318 - DNA, 122 bp, Homo sapiens
gtcaaggtggctgattggccggcgcgggatgcggggacgtttccttgggcccccggcgggcgcagccctcagcccacactgcggagccaggcggcagcatggaccgggctggggcagacatg

SEQ ID NO: 404319 - DNA, 122 bp, Homo sapiens
cccttcggctggatgtgtctctgcactttgttctaatttatcccatgcataatttattcacgtgtgtattgtttcctgatcagcaacttttaaaaacaaatgaaatatataagatgttttat

SEQ ID NO: 404320 - DNA, 122 bp, Homo sapiens
agtcccgctctgtagcccaggctggagtgtagtggcgcgatctcggctcactgcaagccccgcctcccgattcaagcgattctcatgcctcagtgtctggagtagctgggattacaggcacc

SEQ ID NO: 404321 - DNA, 122 bp, Homo sapiens
cctctgtttcaggatcgctggtgacacagccctcaacaaaaacatccacgagtccgtcagcgcccagatccggaaaaactttgccaagagcaaatggagagtaagtgtggagtatatgaaat

SEQ ID NO: 404322 - DNA, 122 bp, Homo sapiens
gagcccttcacccggggctgcactgtgggagcacctctctgtgctggccgaggccagagccggctccctctgcttgctgggaggtgtggagggagaggtgtgggcaggaaccggggctgcgc

SEQ ID NO: 404323 - DNA, 122 bp, Homo sapiens
caatctgcagctgcctaggaaatggccccaaagttcccagagttacagtctcaaaaaggacgcaaccccctagctgcatctacatgtgggtttcccgctttccagggcactgcagcttctca

SEQ ID NO: 404324 - DNA, 122 bp, Homo sapiens
gtcgctgcctgccggctggcacgaccaagcgggactgcccgggtcccgaaaatacggcttcgggggacacctcaccaagcggctagtggttcagaaccccagtccgacgcgctgctgggccc

SEQ ID NO: 404325 - DNA, 122 bp, Homo sapiens
cggcgggccccggctcggctgctcggtgcttctggcggagcggacggcagcccgagcacccgccgctccagagcgcccgccccgctcggctaccctcggctttccagttctcccccaaaacc

SEQ ID NO: 404326 - DNA, 122 bp, Homo sapiens
atttccagatacacgccaggtcagtgctgggcattcctgccactcgggtcctctccctaacgcctctactggtccaactgccttgtaatcaccgctctccactggttctttgacaaagggtt

SEQ ID NO: 404327 - DNA, 122 bp, Homo sapiens
tccatggttggtggtctgtgttcagtgctgatcaccaagtggaaactcctgggaatctcacggctggggctcctctcccagagctgcagggtcagggctgggctcattttcatcagcagagg

SEQ ID NO: 404328 - DNA, 122 bp, Homo sapiens
agtttcaccatctgtataatgagggagttggacttcagatctgcaatctggccttctcagcgctgcagttctgtggacgtcactgaggggaggatggggcacattctagtcccctaggctcc

SEQ ID NO: 404329 - DNA, 122 bp, Homo sapiens
gcggtgccgactaggttcctgggtggagtgtcccaggaccacgtgggctgaaagggaacccgaagtgactcccggcctccccacaggtctcgcgggacgcagcagcggcgagggcgcggggt

SEQ ID NO: 404330 - DNA, 122 bp, Homo sapiens
gtgctaagccgctccctagccccatctcactgcagtaataacaacagagctcaccataggcgctcatgcttactgcctgctggtgtgggcccagctctttctaccacctattttaaataatt

SEQ ID NO: 404331 - DNA, 122 bp, Homo sapiens
ggtagacaaaatggagccccgggcaaaaattagtgtttaacattctgcccacaccattcccgctatagcagtggagtggaggggcactgattggagtggaaatgggaatcttttggtgatgg

SEQ ID NO: 404332 - DNA, 122 bp, Homo sapiens
ctgacgccgaggaacaggaggcacagggcaccacgcacgggactccgcagcttccacgctcgcccctgacagtgcactctgtggtcaggtgctggtgctgggtcccacagactattcataga

SEQ ID NO: 404333 - DNA, 122 bp, Homo sapiens
cgtggcgttggagctggagctggctgggtggctgtgtctggtttctcggcgccaattcaccgtcttgggcctaggttccgtctctaaggaagagaaggagggaaaaagagaaagagctctcg

SEQ ID NO: 404334 - DNA, 122 bp, Homo sapiens
taagcccctcactgcccagggccggtggcgccggccagccactcagagggcaggacctgccgagcccacacccacccggaactcgcgctggcccaggagcgcttcatgcagccctgattccc

SEQ ID NO: 404335 - DNA, 122 bp, Homo sapiens
acgggggacccttggaaatgtggtggtgacgtgttccagctaaattttgtcaggggaattcggaaaactctaggctaggtaattaacaaagcagccttcatctcagctggtctggtctggaa

SEQ ID NO: 404336 - DNA, 122 bp, Homo sapiens
agaaagggaagtgcattctcgcttccgtagcggtctccgccggttggggggaagtaattccggttgttgcaccatggcgtccatggggaccctcgccttcgatgaatatgggcgccctttcc

SEQ ID NO: 404337 - DNA, 122 bp, Homo sapiens
gaggttggagggaataacagcaaaaataattgacattcttgggtccatcggtcggtgtgccgggcctgtgccaaggacttcacctgcccttcccattcaatattcaccaaaaaacctatgtg

SEQ ID NO: 404338 - DNA, 122 bp, Homo sapiens
ctgggtccccagcctgcctgcttagtgcactctctgttcctgctgccaggaggtcgatgccgcagctcccttgcatgtcactcaaggtcttcatgggcagctcccaccctcatactttggtt

SEQ ID NO: 404339 - DNA, 122 bp, Homo sapiens
tttatacactgttctccaaaggtaccttatccttccaaagatcccctctgtagagtcatgcgaactacagtttggaacttgggacttagcccgttggtgtaaaagtataaatcaggtatttg

SEQ ID NO: 404340 - DNA, 122 bp, Homo sapiens
cattgtatgtgattataaggcactgttctaagtatccatagttgtttaaatatgaacccccggacactaccatgatccacaagtggtccaggtcctacaaatggtgccgagtgttcagaggg

SEQ ID NO: 404341 - DNA, 122 bp, Homo sapiens
gtgcaaaaatggcatcggtacatatatgtacatttatgatctgaacatagtcttgatgtccgctgatgtatgtacctacgccatttttgtatgcaagcactaccattttctatgcctttaaa

SEQ ID NO: 404342 - DNA, 122 bp, Homo sapiens
tcctgcttccttgtcagtggatccagacgcatggagcttattgataagcacctgtggagacgtgtttgactcgcacccctgctgctgctgcgtgcttgcctgtttagctagaagccattctc

SEQ ID NO: 404343 - DNA, 122 bp, Homo sapiens
aaacacaggtttacggaataaatgtaaatatattcgttctaaggagtcttctcagacccacgttggctttttgcccaggtccacagcatgtctggacatagggggattcagatctctgtgtg

SEQ ID NO: 404344 - DNA, 122 bp, Homo sapiens
gaaagtcactgctgttgttgaccaatctttctgtgcaagaccctgcgtgagggtctttaccgatgatttcatttactaattttggcatcagcctgggagaggcatcattattcatgctgtgc

SEQ ID NO: 404345 - DNA, 122 bp, Homo sapiens
agccaggtgcttaccaatggtgcctgatgtgcttataaaatctaaaatcatggccaggcgcggtggctcacgcctgtaatcccgacactttgggaggctgaggtgggtggatcacctgaggt

SEQ ID NO: 404346 - DNA, 122 bp, Homo sapiens
gcggacgccaagcgcgtgagtcactctgctcccctgggttaggagcgggactttgcctcccgcctggggtctgcatttcagctccagcttcagtgactcatcccagcaggctgaccccctcc

SEQ ID NO: 404347 - DNA, 122 bp, Homo sapiens
ctgctgtgctcccaggactacgagaagcgggtagggggcgactcccggcctctttcacttcgtaaaggccttcaactgggtctctcggtcaacccctcagctaccgccatcttgaaacctcg

SEQ ID NO: 404348 - DNA, 122 bp, Homo sapiens
gtgcgctcgggcccagggttgcacggagcactgggcccggataccgggggcgcaaagcttcgggtgcggcccaggagaaccccgccgagggaccccagcctaccggttctcggaggggcgaa

SEQ ID NO: 404349 - DNA, 122 bp, Homo sapiens
ggagacagcgggacgtccagctcccctctcggtgagtgagtgacgctgtctcggctcactcggttatatctgctgaacacaagagcttgctgtttacgcaacaccaccttcgcgtgttttaa

SEQ ID NO: 404350 - DNA, 122 bp, Homo sapiens
ggcggaaacaatgaccccgcgcccggagtttttctgagctcctaaatagggagagagacccgacaaaacaaacaagcgaaggcgacacagccaggttagcaccgagcagcagcgcaggagcg

SEQ ID NO: 404351 - DNA, 122 bp, Homo sapiens
gatcagtataacttattcagaaaaaatgataacaactgtaatagaatttcaaagatggctcgcctttagaactcatgttttcttgtgatttcagggattctagagaaaagaccactcagatc

SEQ ID NO: 404352 - DNA, 122 bp, Homo sapiens
ggatgaactctctaacacctccccgccccttgcctcccagatcaggccaggtcctctccccgcatggccctacgtcccgagttccctcccgagtcagcaagtacaagctggatgggtcctga

SEQ ID NO: 404353 - DNA, 122 bp, Homo sapiens
agggtgagccacagctgcgcagccccgggtagggtctagcggggcgggatgtgggggctgcgtgcccccggatgaagtgcggggagaggtgctggtccccaggcatggcaggcagcgcggac

SEQ ID NO: 404354 - DNA, 122 bp, Homo sapiens
tacccatggatttagtttaatccatataatcctccccctgcaggcatggataatcaggatcgcatttcccttgagggcaaatcagcatttgcctggtggtctcctgaatgcctgaagcacca

SEQ ID NO: 404355 - DNA, 122 bp, Homo sapiens
aatccccactgcttcatccccgttctcaaatgccgggcgcaaactctctcaggacagaagcgttcagatttgcaaggctgtgcagacggaggtagctctattcacattcgggagcttcagga

SEQ ID NO: 404356 - DNA, 122 bp, Homo sapiens
ccagcacttatctcaggcctgctggagcccgtgcccgtcagtcctccccctggccagggccgaggggtggtcagaccagcccgcattgtgctgaaggcccacaatcagcccagctgtccggg

SEQ ID NO: 404357 - DNA, 122 bp, Homo sapiens
tgaaatctatctctaggctgctgaggcttgggttccacaacctgcctcctgcagcagcctcgacccagcctcctgcctctggccaggcttcctccaatccacatcactccagagacgtgacc

SEQ ID NO: 404358 - DNA, 122 bp, Homo sapiens
ttaactaacatctctctcaacattttcccctgctaattgcattttgattggttcaaattccgtgtggggattccttgattctgacagtacaagacattcagttctcttcaagtcatgtaatc

SEQ ID NO: 404359 - DNA, 122 bp, Homo sapiens
ttggaggctcgcgcagcatttcaggactgctgtaaatacccattgttcccgtacagtgagcggcggaggaaaacatgcgtgtgttgtcggggctttgttggcggtgctggttgcttagactc

SEQ ID NO: 404360 - DNA, 122 bp, Homo sapiens
agagagaggacccccttgtcctgggcagctgtcactggggtagcctgttttggaagtgtgcgggcaagcgttcgagctgccccattgggggcgctattagaacactgcagcgcgaacgtgaa

SEQ ID NO: 404361 - DNA, 122 bp, Homo sapiens
ctctcggcccctccctgcatcctggggactccggtgccccgtccggggtgccctcccctccgcccattcaaacttgaagcacatctcatctgggggccaccggggggcccgggttcctggcg

SEQ ID NO: 404362 - DNA, 122 bp, Homo sapiens
agacctccgagacctttccctatgctctcacaatccgccatcttatagtccttacagcaacgggatgctgattccccagtggcaattcattaaaagcctgggtatgaccaggaacttctgga

SEQ ID NO: 404363 - DNA, 122 bp, Homo sapiens
tcactccctcggggacgcttaaacagggagtgccgtgggcagccctcctgcacaggccaccgctgctcacacacttcatcttcacaacatttatctcagtggtcatttacattaatctctgt

SEQ ID NO: 404364 - DNA, 122 bp, Homo sapiens
atcacaccactgcaatccagtgttagcaccacaaagcatctaaaagagccagtttgtggtcgtgaaaatattgccttattattttaccctgtcccttaataaccatgcctcaggctcattcc

SEQ ID NO: 404365 - DNA, 122 bp, Homo sapiens
ttccagccctggcctgaggtcctgagggctccctggagggggcggcttcccagcacccagcgtttaacagggccctttcggcctccctgtcccccaagctcagagttggggtctgcagcagg

SEQ ID NO: 404366 - DNA, 122 bp, Homo sapiens
gaccatggccaaggagtggggctacgccagtcacaacggtgagtgcaggcagccgcgacccggccaggaagggatgccagtccaggagagccctgccattgcacagaaatgggcaactttag

SEQ ID NO: 404367 - DNA, 122 bp, Homo sapiens
tggcggactccagatgggccccgccctgtggtgcagaagtgagatttgctgctcctcctgcgtctgcccctctcctgccctcctctccctcccctatctggctgtcatggtagaagccactg

SEQ ID NO: 404368 - DNA, 122 bp, Homo sapiens
aagaaccttggagacctgaagcatctgtgtttcttccctgtaccaccaccgcctgagccccggcgacaataatcactcactaacatgtgggaagcagcctcccagtctcactggctctcctc

SEQ ID NO: 404369 - DNA, 122 bp, Homo sapiens
ctgtgtcgccctcgtccgtgtctgcctcccgcttccccgcctcgcgacttgagccccgcccgtacctgcttagggcgctgccctcgcccgcttgctccggatcccagcccaggtacccggcc

SEQ ID NO: 404370 - DNA, 122 bp, Homo sapiens
gaatattctcgaacacccgttctgaacaatggcctgcgcttcttggtgggcagttggggccgctgccattttagggacaaggtgcattacagagatcgcatggtcacagccccttctcgcag

SEQ ID NO: 404371 - DNA, 122 bp, Homo sapiens
gtggggaagggcgaaacgccgggatagaaccggaggtagaagctgggggcggagcttcagcgctcgcgccggcgcgggcgcgcacggcgctcctccttccagatcccgatgaaggggcgggg

SEQ ID NO: 404372 - DNA, 122 bp, Homo sapiens
gcctgctctattcctgctgttgtagcatacatctcactggttcatagtggccagtacggacgacatgcctgtgttccttgccagattgtaaacatgcttgaaggtagagactatgtcttgtc

SEQ ID NO: 404373 - DNA, 122 bp, Homo sapiens
gccccggcgcggctccgtcggggaattagctcccgagccgaataaaagcagccaaagactcgcacacccggtagaaggggggcggccccaagaaagcccgggctggggcggccccgcacccc

SEQ ID NO: 404374 - DNA, 122 bp, Homo sapiens
attcaaagagagaaaaggggaatcctgatcgtttctgcccgtgcttgttttcaacttgagcgtgctagcctttaacttgaagaagtctcattggagcatctagcattctccaggagttattc

SEQ ID NO: 404375 - DNA, 122 bp, Homo sapiens
gtgaatgttaacaggggaaagaactggtaaaatggtggcagataggccacaggtaggcagcggccagactgtgtaagacctcacaggccatgcattgccctagatgcaatgggatgccatcc

SEQ ID NO: 404376 - DNA, 122 bp, Homo sapiens
tacttgggaggctaaggcaggagaatcgcttgaaaccaggaggcagaggttgtagtgagccgagatcgtgccactgcactccaggactccagactaggtggcaaagcgagactgtttcaaaa

SEQ ID NO: 404377 - DNA, 122 bp, Homo sapiens
gggtggaagagggatttttcccttctgccatccatactgtgaatttccttggcagaaatacgtatttcttctctggcagtaaaatcaatgaattactaaaagttcactaatgtactctttgg

SEQ ID NO: 404378 - DNA, 122 bp, Homo sapiens
ttctagcttcactgccacttcctgcaggggaaagaggggatgatggcatcaacatccctacggattcaatgtcacttaggaaaggagggagacattagcaaaactccaagtcgcgactacaa

SEQ ID NO: 404379 - DNA, 122 bp, Homo sapiens
tcccaactcccttcaaagggttaacgcgagtgcgatccctcctcactgcagacctgctggcgagctgccggatcccgctccagtagagggccagggagggagagagggccttcccgaaggca

SEQ ID NO: 404380 - DNA, 122 bp, Homo sapiens
aggggctgcccaggcgggccagaggcgaggaggagagacgttccagggatgtcttcccaccgagttagtaccagtaccatgttcgctaatccaggttttcctgagaaaaccctgccccgctg

SEQ ID NO: 404381 - DNA, 122 bp, Homo sapiens
ggacgctgcctgaggacgtagccttccgcatctgcgccgtgcgggaggcctttgaggaggcgggcgtgctgctgctgcggcccaggacttccccaccaggcccagcacccgggcctggcctc

SEQ ID NO: 404382 - DNA, 122 bp, Homo sapiens
tggggtaaccctgggccccgacctccagctggtgggtaggaattgttgggaaaggattggcgccccagcaccgggagactggaagagttgaaatcaacgcaggagaacaattaggaaaaagt

SEQ ID NO: 404383 - DNA, 122 bp, Homo sapiens
gtgtcgcccaggaggccggcagtgagcagagggttgcagggccacggggcggaccagacccggctcaaatgtcacgtctgcttaaagccatcctggccacatggcagagaccactgatcgct

SEQ ID NO: 404384 - DNA, 122 bp, Homo sapiens
cattaaccagcaaaaaacaaggccgaaaccacagagggccagaaatcactcaaggatacccgacctcattcaggggatagaggcctccttccagagggtaccggcatcactgggggttacaa

SEQ ID NO: 404385 - DNA, 122 bp, Homo sapiens
cgcttgccagaaccaccgcacgatgttgctgtcggccacacagtgcttcagccgcgtgttcgacttccagtcgttcaagtctattttatccaggccgcctatgatcagctgaggaggtgcag

SEQ ID NO: 404386 - DNA, 122 bp, Homo sapiens
tgacttaaaccttgatagcagttttgtgagaccctgagcaaagaaaacagataaactgtgcgtagactcctggtctacagaaactgtgagataataaatgtgtcttaagatactatgtttat

SEQ ID NO: 404387 - DNA, 122 bp, Homo sapiens
tcatgttggccaggctggtctcaaactcatgagctcaaatgatccacctgcctcagcctccgaaagtgctgggattacaagctcttcaggtattgaaagtcagtatcttacttaagtccttg

SEQ ID NO: 404388 - DNA, 122 bp, Homo sapiens
ctcggtctctctctctttttcacttaagactttgtggagtcctcccaacaagccctgggtcggtagaatgatggtttccaatttcctgatggggacagtgaggcatgaagcagcagagtcat

SEQ ID NO: 404389 - DNA, 122 bp, Homo sapiens
ttatagtctgttaccccctttatagacagttaaaaaattttccatttttgttttttcatccgagtaaggaggtaatggcaatattcttttgttttgttttgttttgaaatggagtctcgctc

SEQ ID NO: 404390 - DNA, 122 bp, Homo sapiens
ccccagcactgccccccgcgccctcctcacgcccatccggcagcaggtagacgcgcaggccgtccagcacacactcctcacccggcagcaggcgcggccgcagcagcttgggctgctcgaaa

SEQ ID NO: 404391 - DNA, 122 bp, Homo sapiens
gcgggaaggacaacttggacccgcagttccgccggaagtggccccagcctcgaggccgggcgtcttcggtcatctccggcgcttctagggctggttcccgtcatcttcgggagccgtggagg

SEQ ID NO: 404392 - DNA, 122 bp, Homo sapiens
aggcagacgtggcgctggcagtggggcccggagcacgcctccccgtaggccttgcgcagccggtcacacttgtcattgagagtacacagcatggcaaacttgaggcagaggtctgagtctgg

SEQ ID NO: 404393 - DNA, 122 bp, Homo sapiens
tggctgctgcaccaccggaagtgacgcaaggcaagggcggggactgagccctgattggagcgcactctcgttttctggcttgatggagccgatccagtgacgtcaggaatgcgggtggacat

SEQ ID NO: 404394 - DNA, 122 bp, Homo sapiens
tggagcccggaaggaggcgaggtcatgcactttgcagccaatcatcttcggcagacagtccgggcggcggggctggagggctcagaacggtccaatcgctggccgcgaggctccggcgaacc

SEQ ID NO: 404395 - DNA, 122 bp, Homo sapiens
taggcacagggagaggttacgttaccggtccatggtcacgtggctggtgaatggcagagccgggggctgaacccagcaatctcagccagggatccgtggtcttaaccactttgttaccttta

SEQ ID NO: 404396 - DNA, 122 bp, Homo sapiens
tctcaacagtcaacttagaaacacactcttggaatagaaacacgttgggtaccatttgtacgtgtattatatatgtatttccttttcatcttttacctattctcttttaaacagagtggtgg

SEQ ID NO: 404397 - DNA, 122 bp, Homo sapiens
gggcttcctcccagagtgccccgtcccctgatgttgggtctggggtgcagacctgaggagcgctgcgaccctcctaggctattgactgttaagtcctcaggtttggcccagattccagttcg

SEQ ID NO: 404398 - DNA, 122 bp, Homo sapiens
aatacgggcgtagagcaggagcaagctgtgggccagttggtggagcccatcacgtaacttcgggaaccactgcagcaccttagctatacacacagggctaagtagctatgacctttatccac

SEQ ID NO: 404399 - DNA, 122 bp, Homo sapiens
cggaggcggaagaaggcgcctttccgtcgccctagcaaccgtcagcggatctccgtcgcccgggcaactgtcccaggcctcccgtcagcctttgcctgggcccctccggtcactcggacaac

SEQ ID NO: 404400 - DNA, 122 bp, Homo sapiens
tcagtgagcgaccggaacattctagaatccccaagtcatcaaaagtggcaatttacattgcgaagtccaaagcaatgattgccaagtccaagttttttcgtgggggaacgtccctcaccact

SEQ ID NO: 404401 - DNA, 122 bp, Homo sapiens
atgagctgttaacactcaccgcgaaggtctgcagcttcactcctgaagccagtgagaccacgagcccaccagaaggaacggacaattccagacgtgccgcctttaagagctgtaacactcac

SEQ ID NO: 404402 - DNA, 122 bp, Homo sapiens
gaggacaggggcggggcctagaaataaagggcgttctgggccaaccgggagagctgactgcgggggggcggagccacgccgggtgactgacgttgaggcccaaccagggagaggcggggcca

SEQ ID NO: 404403 - DNA, 122 bp, Homo sapiens
ctcgctcacagcccccagtccttagcctccaaacactggcatctcaaccgcctgctcccacgacatccattccattgcctgctcgttctgagcttgtaggcaaggatgggcaaataagggct

SEQ ID NO: 404404 - DNA, 122 bp, Homo sapiens
ggaactacagcagcggcgaagtcactgccgctcggtgcgcactccagcgagaagcgggcgcgtcctgtgacgtcacaggcaaccacccctagcagggcaccaatcccggagggcgggcccag

SEQ ID NO: 404405 - DNA, 122 bp, Homo sapiens
gtaggaccttgacaagtcacccccgtcccctggactctcctgtgcaaaagctatgcctcccgtccgccccctaggctgccgtgagaatcaaatgcccaagacgaatgtacccacttgtatgg

SEQ ID NO: 404406 - DNA, 122 bp, Homo sapiens
ctaagcagcacaggaggtgagctgtggggagactagagcagagtcagatcctgaaagctgcgcagaggctaagcaacccaacaaggcaggtgaactggccgctgagagaagaatcgggtgga

SEQ ID NO: 404407 - DNA, 122 bp, Homo sapiens
ttgccttgcaaacaggttctaaaaagtggccattcattataaatggactttctggcctttcgtgccaaacttgcccaagtactgaggcctctgggccagggcatatagaaaatcgctgtgaa

SEQ ID NO: 404408 - DNA, 122 bp, Homo sapiens
gtgctttctaagtggatttggaagtggcatgaaaaccgtacgaaggtgtgggaagggtatcgaacactgatttttgttccgcttgtctcctagggttgctaatctcagtatttttcattcag

SEQ ID NO: 404409 - DNA, 122 bp, Homo sapiens
tgacacacggctgacccccgcacagaccgccccgcttccgggtcccccgggaaggacgcgcgggctcctgcttgccaggttttaacccacaagggttgtagggatttacccaaaggagagca

SEQ ID NO: 404410 - DNA, 122 bp, Homo sapiens
ttatgtaagacctgagcgagcttgaagaaagactctacaattgataaaactaagtcagaccgaactggatcattttcaagtaaaataggtagcaaggcaaaaagaccgcctcaaagtcgctg

SEQ ID NO: 404411 - DNA, 122 bp, Homo sapiens
ggggaaagggtacgatatgaattttgaggtttttgctgcttcttatgcaaaacattatttcggtttcaagcagctgatcacaattgcaactgcttatacctggtgaattataatattctcta

SEQ ID NO: 404412 - DNA, 122 bp, Homo sapiens
tgcgccggctcagtctgcctataggtgcaggacttggaggggcgggcccctcccaaagggcgggagtttggggggcggggcctggccctctgcctcggggtgggctccgcccccgtcccccg

SEQ ID NO: 404413 - DNA, 122 bp, Homo sapiens
cccggaagtgacgtacatctctgcacgttctcttccggccggagtcagtggcggggttctcgccggtcctgcgggtcgctgcttggctgtgggttagcagcaccctgagcggagcggaagag

SEQ ID NO: 404414 - DNA, 122 bp, Homo sapiens
tggcgcccggcctggccaggctctggcaggcgaggctgggtgtggtcgtgaaggggcgggcggaccggccccacactgcctcggttcggcaagtgggtcagttggctggggctcacttggca

SEQ ID NO: 404415 - DNA, 122 bp, Homo sapiens
cttggatctcagcttaatcatctctttggcaagtatccatgatccaaactgggttagtgccgctcccaagaccccctttattaaccctgtactggcacttaaaacatactctattgtatttg

SEQ ID NO: 404416 - DNA, 122 bp, Homo sapiens
gggtttgccagtgaggaggcagccgagctgcggcgactctccgtttaccttgtgattaaacggttctgctgccggcgtttgcaattcagagctggcaacgtggacgtttttaggactgttag

SEQ ID NO: 404417 - DNA, 122 bp, Homo sapiens
aaccaaaaagtatatgcagttgtaattctgacagtattgccaaattgttcacagtaaagacgggcccatttccagtcttaccagccatgtgcaaaaaccttatctcaggcctctctgccgcc

SEQ ID NO: 404418 - DNA, 122 bp, Homo sapiens
tggttccccacgggggtcagaaaactgtactggaggccagaacgtcgccctgaggatggccgggtttccacggggccgaccctgataaggatcgcaggaggatggcagggcggtgagggtgg

SEQ ID NO: 404419 - DNA, 122 bp, Homo sapiens
agcctgtgcctagccccgaggaggcactggggaagccacagtgcaactgtgacgtgtgggcggcctgctgtgcgtgtgctccagcaagtccagtcgcgggtgcgaggtccattctccagcgt

SEQ ID NO: 404420 - DNA, 122 bp, Homo sapiens
cacagctggttgtttcaccttgaagaccaggaactgtgtggccaccatggagggagggtccgaagcatgtgtcctagtgagccaggtcatatctgatgcttattcaaccactggcagtgatg

SEQ ID NO: 404421 - DNA, 122 bp, Homo sapiens
ctgtagttggtaatctgagaaatcatggagcgtgagagttttcagaaccctggagaggggcgagcattccaattttcaaaaagaaaggataaaagaaacagctggctaataagcttgacctt

SEQ ID NO: 404422 - DNA, 122 bp, Homo sapiens
aggagagggggtcggggcggtggcagaggcaggctcttgcagagaggagaggggtcggggcggtggcaggggcaggctcttgcctcatcaggctggtcagcatgtggcctcctctggccttg

SEQ ID NO: 404423 - DNA, 122 bp, Homo sapiens
cccctgaaccaatcctgagccgcgaccctgggaggggcgggcggtgcgggagcctgggggcgtgagtcttgagccggggtggagggggggccgcacgtgctgcgcctgcgcgtggagcggac

SEQ ID NO: 404424 - DNA, 122 bp, Homo sapiens
tgatcaaggcatagaggtggctgcaaaggtacctgctgtgtcctggttcttaagcagggccgtggggctgtcggtatttgtagcactagtggtcttgacaccctacgcactgcttataaata

SEQ ID NO: 404425 - DNA, 122 bp, Homo sapiens
ggtaaggatacatacagcacataaacacagtccaattctaggagccaggagggcccccaccgctgtgttagggagatatggagtgtcccctattatgtcccaaagcttcagttgttgagatc

SEQ ID NO: 404426 - DNA, 122 bp, Homo sapiens
atggcagcggccggcgactcgcagtaagagacgcaagtctcagcattcatgcctggcttgcgcaggcggcgggcggggacgcgagcgagggcgcgaggacgccaccgcgcgccttggctggg

SEQ ID NO: 404427 - DNA, 122 bp, Homo sapiens
tccaggcgtggtggtgcattcctatagccctagctactcaggaggctgaaagaggagaatcgcttgaagcaggagttcaaggttatggtgagctatgatcacgctactgcactccagcctgg

SEQ ID NO: 404428 - DNA, 122 bp, Homo sapiens
ggtcagttctggaggctgggggctggggacaggcgggccctcaggattagagaccagccccggtgtgtggagagatgaggccacaggcaagacccaggttgtaggcatcagacacctggatt

SEQ ID NO: 404429 - DNA, 122 bp, Homo sapiens
ccggccgtgacacccgagctcagttttctcgggacctggtttacgctaggtgctgtgggtcggccctggggctgttcaggcactcagggcaggggagaggagagactaccgtcctggagata

SEQ ID NO: 404430 - DNA, 122 bp, Homo sapiens
ggaggatcccggcgccagcaagggcgtagtgcgcactgcctcctgggagatgtagctcctcgaggcgcgctctcgcccctcatcccggaaaggaagactctgaatgactacaactcccagta

SEQ ID NO: 404431 - DNA, 122 bp, Homo sapiens
gggcaggcggggagctgaactaatctttcggtgactccaaggataccaagcaagccagtgcgtggcatgcacgagctcctctaatcatcgcagtcccccttacacatgagtaaaccgaggct

SEQ ID NO: 404432 - DNA, 122 bp, Homo sapiens
aatgtgtcttttgttggacttcattacagtgatggcctccccctctgtttctgattaaaccgtgaaacctcacacactcactgatattttttactttgttttggttagtaagtaagttttgg

SEQ ID NO: 404433 - DNA, 122 bp, Homo sapiens
aacaaagtacaaaatgggaagtgcggctccagcatcgtttaaggcaatttgaaactgctgcgacctccacgctcagaatcattctactgcattttataaaagtgccactccgtagcgtatgg

SEQ ID NO: 404434 - DNA, 122 bp, Homo sapiens
ggcttccccagttccgcgtcacattgaagggtggcggtggcgctggcgatggggttcctacggcctcctgccttgcgcaagcagaactgggcgcaggcactacaggcacccgtgggggcgag

SEQ ID NO: 404435 - DNA, 122 bp, Homo sapiens
ctaattctgctttggcaacagaggaaacgattgggactccgagaagaggtgagtccacctcgtccacatagctggtgactgcagagctggacccagaaaggggcattcagctgctcagcctc

SEQ ID NO: 404436 - DNA, 122 bp, Homo sapiens
cagaaggggcccgaggccaactcctgggagctggtgagtgtggtgaaactgacgtgtcaccgcagagtcaagtccaatgctcacattttgcagatgagaacatccaaatagtatgcttctga

SEQ ID NO: 404437 - DNA, 122 bp, Homo sapiens
ggggcggcggcggcggcggggagtcgggcaagaagaagagcaagtccgactccagagcctcggtgttttccaacctgcggatcaggaagaatctgtccaaggggaaaggcgccggcggctcc

SEQ ID NO: 404438 - DNA, 122 bp, Homo sapiens
tcctgcacagacatgaagcgggggccgcgcacgcctaagaagcccaagccagccaatcaacgccgcgcgcctcccagcctccgcctcccattggctgcgtccgcaattcccgaaccgctgga

SEQ ID NO: 404439 - DNA, 122 bp, Homo sapiens
ctagtgtgtgacttggcttgtggtaatgtttgattacacttcaatgccatcacaaaaggacggaatacttcattaaaagttaaagtattcaaggctcacaacagcttccagggtaaataaat

SEQ ID NO: 404440 - DNA, 122 bp, Homo sapiens
aatgagtcaggttttgtataacaaatgatcactttttaagtaattagtgtagcatatgaccgtagagattaatattaactcttaaaatatggaaattgagactccgatggaaaatgtgaaag

SEQ ID NO: 404441 - DNA, 122 bp, Homo sapiens
gggttcaccccttttctattggcccgcggggctgagtgacagcggccctcaccgcccctccggttccaagctaaggaatgggggtatcagcaaaattgcaagggagctgttctttgaagcct

SEQ ID NO: 404442 - DNA, 122 bp, Homo sapiens
tgtagcgcgggtgtgccatgtccatcataaggaagcgccgtgtctgtagcgtgggtgtagcgtgtctgtggcgcaggtgtgccgtgtctgtggcatgggtgtggcttgtctgtggtgtgggt

SEQ ID NO: 404443 - DNA, 122 bp, Homo sapiens
tagcctctggccctcccactccagaagaaagcgactgtctccgtctctttacattctctgcgcccacaggctttgctccttaagccgagattttttgaagggacagaagtttctctccattt

SEQ ID NO: 404444 - DNA, 122 bp, Homo sapiens
tgcccacccgccgcaggggggcagcagggagcggaaaaaccccgggccccagaccccctgcgcctgcccactcgggtccacctaggcacagaatggaggcttggaatctcctttgctttagt

SEQ ID NO: 404445 - DNA, 122 bp, Homo sapiens
ggaggactggaagcatccaattcactcgtgaaaaaaacatcgagccagccaaaccgaacacgtgttgggcccctttgctactgatggattcaacagccccaaaatttaaaaacatacacaca

SEQ ID NO: 404446 - DNA, 122 bp, Homo sapiens
ctggagatggacgagcagacccaggccccaggccgagcctctgagccctgacaccccttacgattcatccaaaaaagcaaagaaaaggcgcttacgtgagggcagcggtggctaggtccaaa

SEQ ID NO: 404447 - DNA, 122 bp, Homo sapiens
gcccaactgggtcctgagctggggccaaccgggccaagggtcccagccacctgctctggccggtcatacccgtcccacgccgccggaccttcgcccaaccaccctatctggagctcctctcc

SEQ ID NO: 404448 - DNA, 122 bp, Homo sapiens
tacattccttccaaatgtttttgtcattaaaaggaattcagaaatgaacaagctgcatcacgtggacataaagcagaaattctagagggaggactgtattatgtattgaacctgcttccaaa

SEQ ID NO: 404449 - DNA, 122 bp, Homo sapiens
aaagcttggcccgggaccttggcctgggaccaatcaggacctgaagagatgattcatagacgtcaggcttacagtccaaaattgaaaggaaagtgcccatcagaacccatcaaagcccactg

SEQ ID NO: 404450 - DNA, 122 bp, Homo sapiens
tgattccttcggtgaggcccccgtgggaattggggttcctgaagtatggagtccactgggcgcctagagagcgtttctctctgaaggtcctaagcgcgcgcgtgcggcacccgctcagctca

SEQ ID NO: 404451 - DNA, 122 bp, Homo sapiens
aaaggctcgcctcaggagtcctactgaatcctgggtctccagtgcctcccaggcccctgtcggtgtgcaaagtcatgctccttcttgtaaagaacagtaggaatgagccccaaaaggagtgc

SEQ ID NO: 404452 - DNA, 122 bp, Homo sapiens
caggagcatttggtgaccaaaaaagcataggctctaaggtcaaacagatgaggactgtaacgtagctccttcttgactagctgtaagaactgctacctaattgctttgaactgtagtttttc

SEQ ID NO: 404453 - DNA, 122 bp, Homo sapiens
aaggaagttctatcttgataggtggattgtagtggaagagggaggagctagagaggtgggcggggcagaacaggttggttttgtttggatgcttgtttctagcttggactaggagtggccaa

SEQ ID NO: 404454 - DNA, 122 bp, Homo sapiens
caaagggtaagatttattctaagggttctgaattcgtcacatttataaaccccgtgggtccggcacagcaattaacattggtccaaacggtgtcagtgaactttagctgcaaagaaactacc

SEQ ID NO: 404455 - DNA, 122 bp, Homo sapiens
cagattcttgttgttttatgttttcaacatttttctggttcttggtagaaagtccagttccgttttcaaaatgaactaaccccgtaggtccagtgacttggcactttttttaagtgtttggt

SEQ ID NO: 404456 - DNA, 122 bp, Homo sapiens
tgccccgaggcgggagccatccctttccccagccccagctctgcggccactcacctgctccgagaccgaagatcaaacagaatgttctcagtaagacccgagactccatggtgcggatcagc

SEQ ID NO: 404457 - DNA, 122 bp, Homo sapiens
aaatatacaagcaatcacgagcacaggagcaggtggacaactacatcttaggaaagggtgcgtaactgtgaactctaaacgtgagctgggtgcctgatgcagtataggaaccacagtaagtc

SEQ ID NO: 404458 - DNA, 122 bp, Homo sapiens
aagcatcttgtggcgggcactgtcaataatgtttagacgacgactggtgtctctgagcctcgattccacgagacttcatcctcattgtctctcgagttacgggggaaaatgtgtaatgaaat

SEQ ID NO: 404459 - DNA, 122 bp, Homo sapiens
actctaggggcctgaccaggtctgaggaagcccctcccagctacttactgaagtagaagccgcggtccccacagacgaactggagggtgtccaccagctccccgccgcacagggtctcactg

SEQ ID NO: 404460 - DNA, 122 bp, Homo sapiens
gccctcctcctctctctcggactgcccctctttttacttcaggcgcaagttacactatcccggtctccacagcctgggcctttggggaaactaacgtctctctgggacgttgctttgcggga

SEQ ID NO: 404461 - DNA, 122 bp, Homo sapiens
taaaaaaaaaaaaaaagacctttggggtcctcgtagacaagacaaggatcaaatcccaaacgactctcttcacctgggtctttgaggtctgtccatcatgacagatcttcaggttttcatct

SEQ ID NO: 404462 - DNA, 122 bp, Homo sapiens
caactccgctcagaagcctggggcagactccccgccccacccagcgaacgagcatgtggccgggacctgggtgaggatttcctcgccagccctccttggcacagagctgtgcatctcacgac

SEQ ID NO: 404463 - DNA, 122 bp, Homo sapiens
tcatagcacactgcagctttgagcaccactgtttgaagacataccttcccctcatgccctcgactaaatgctcactaaccaggagggtcttttctttatctttggtgaccctgcagccttca

SEQ ID NO: 404464 - DNA, 122 bp, Homo sapiens
ttaactcagaataaatgccgagatgtaaaggacacccgcagccatggagcacagcggcggcgcaacagctgtgttgttcctgaacgctttttctctggtcttaaatttagacaccgaatcct

SEQ ID NO: 404465 - DNA, 122 bp, Homo sapiens
acaacagttgctaaggggcggagacttcggctcggttcccgagacggaatacccaggagtcgagtacttgggcgcatgcggcaaccgtatctcagttctcgcgaggtttcgtcttcccggaa

SEQ ID NO: 404466 - DNA, 122 bp, Homo sapiens
ctaactgaccaaatactatcagggtcggcctgtatgcatttggtgtgactaaatcgtgttcgctggccatctaccctactgaggagactgtgcgccagtcattactgttcatcgggggaaag

SEQ ID NO: 404467 - DNA, 122 bp, Homo sapiens
atctcccttctggagctgcccaactccgggggaaaaccatctcctttctgactctcctgtcggtggagagttacttccactcaatacgattttgcagtcattctccaagcccacgtgtgatc

SEQ ID NO: 404468 - DNA, 122 bp, Homo sapiens
agttccatccatgttgctgcaaaagtcatcatttcattctttttatggttgagtagtattcgtctgtgtgtgtgtgtatgtgtgcgtttgtgtgtgtgtttgtgtgtgtgtgcgtgtgtgtg

SEQ ID NO: 404469 - DNA, 122 bp, Homo sapiens
ttgttctatagataagatacaaataaatattatccacatactggctgccttggttctgcacggccttccatggccaggcagggccttccttactgccactgccaggcccttgtctctgaact

SEQ ID NO: 404470 - DNA, 122 bp, Homo sapiens
tctgcagcgtctgcagcgccatggggtcgaggctaacaggggacactcagcgcagcagggcgaggacaaccgggcggggaacagacaccgggtaggcggtttagggtgggaaatggaagtcg

SEQ ID NO: 404471 - DNA, 122 bp, Homo sapiens
gcaggtcagtgggtgcgggcaccgtgtgtgagcggaagcagggtgaggcattgcctcactcgggaagcgcaaggggtcagggagttccctttcctagtcaaagaaaggggtgacggacgcac

SEQ ID NO: 404472 - DNA, 122 bp, Homo sapiens
ccacacctccctccctccttcaccctggagtttgagcttctgaggcccaggccttgggaacgtcctctctgagctgcttctggagctcatgtccttcagttgccctcctgggaattcttcac

SEQ ID NO: 404473 - DNA, 122 bp, Homo sapiens
cagctcatttcaggacagttccagcctctttcggcgcatgccctgaggaggaccatgtaacgagaggaaggaatgctttccatggggtgatactgaccttgccttcgtagccatttaaacac

SEQ ID NO: 404474 - DNA, 122 bp, Homo sapiens
gctgcaggaagttctgggggaggggaagggggattatgaccagatggaaatgaaaggaaacgggagactgtattaataaactagcagctttattgcccttcaggggccatgtcttcacttga

SEQ ID NO: 404475 - DNA, 122 bp, Homo sapiens
actgtcctgagtgcatttttttcctcccttatagtctgttaaattgactaataaacccaacgcagcgttctctgtgcagcttcaaaaaactcagtaatttcgttagaaaacgttgaaatccg

SEQ ID NO: 404476 - DNA, 122 bp, Homo sapiens
ggtgggaaaggggcttctgagcctgaaggaagcttcagctcttgcagttctgagcccaggcggccgcgtcggaaaggtgcaggcgtctccccactgggctggggctcctgcatcctgggcag

SEQ ID NO: 404477 - DNA, 122 bp, Homo sapiens
atttatgaagtgtcattctcaaatttccctgaacaacttttgaagcttttcggatgtctccggtggtagatcttggggtcattccatcaattatgtactctatagatatttaaaatgttgcc

SEQ ID NO: 404478 - DNA, 122 bp, Homo sapiens
agactcctgtggctcattcgtcaccggccctgacaaatgcctgccgcccccttcccctcccgccccaccaagcaatcataccattagccacggctcagcggtggcgggaaggacccggcctg

SEQ ID NO: 404479 - DNA, 122 bp, Homo sapiens
cagggctgagagcagggggagccatctccctgtgtgtgggacactgcctgctgggtgttccgttccagcccctctagaatgcatgcttgaatggccagtgaggctgggggagggaccgagag

SEQ ID NO: 404480 - DNA, 122 bp, Homo sapiens
attatagcctcaaatccaatgcacgttatttgacaaaggatattgaaggatagtaggtagcgcagagggtcagtagtggaggctatccttgtagagtcagaagcaaggctcaaaccacatga

SEQ ID NO: 404481 - DNA, 122 bp, Homo sapiens
actgtggaggagctgaaccttggcggtggggccgcagggtctctctgctccctgtgggaccgcccttttctcactgttgtgagcagggctgttcctttccagcaagatgaacaccggtgtaa

SEQ ID NO: 404482 - DNA, 122 bp, Homo sapiens
aggcgagactaagagggcaaaaatcttctttcttgagctctcaggcgaggttcactggtccgcagggggagggccagggaagtcgcactgtgccaaaggtgcagcgcgcttttatggatgct

SEQ ID NO: 404483 - DNA, 122 bp, Homo sapiens
gtgacctggggacatgtacacaaagccagggtgagcccgggcacctaccagtgaagtcctcgaagcactcgcaggtgtagccgccctcgcggctgcggcagcggccgttggcgccgcacggg

SEQ ID NO: 404484 - DNA, 122 bp, Homo sapiens
aagagtccacgattgggggcagggcagccacccatgcaggctacccttgagagaacagggcgcagggatggggagcctggattcctagaggaagaggtatctggggacgcagcagggagctg

SEQ ID NO: 404485 - DNA, 122 bp, Homo sapiens
acttttggggtctgtgggttcagttctccaatggtgcctcgatcctggctgagcagacagcgtgtgcgcactcagtccttgttgagggagccaagtctgtggagatgcagggaagggaagag

SEQ ID NO: 404486 - DNA, 122 bp, Homo sapiens
gaagctcgtgaaggccgcgaaggacggcaccaaggacgggctggagaggaccagggcagccgtgaagaggggccgctccttcatcaggaccaagtctctcatcgcacagggtccgtgcctgc

SEQ ID NO: 404487 - DNA, 122 bp, Homo sapiens
ccaacgctgacgcagactggcagtaacacgtgctcagagggcggccactggggcgacaaccggttgaagtggctcctgggagagagggggaggtggtctagtggggtggagttaatccctcc

SEQ ID NO: 404488 - DNA, 122 bp, Homo sapiens
cacttagaaaacgccttcagataaggttcaattcttttgtatttcagcaaagtcagcccacgcatctctatttggtttgacaaataatgcaactcctactacatccccgatgacacgaagtg

SEQ ID NO: 404489 - DNA, 122 bp, Homo sapiens
ttccacagaaccagtttgggcagtaggaactcaggcttctggtctgcagtggagcctgttcgcctctaatagccagtttacagcacttgccttagcctgtttcacagacttgtccacttacc

SEQ ID NO: 404490 - DNA, 122 bp, Homo sapiens
gaaaatcagggtctttcaggactcggacggggagggcatccagcaaaagtagggctgcagcgcccccatgtgtccagggcggtggaagtcaccaggagtaggcggaggaagccggcttctga

SEQ ID NO: 404491 - DNA, 122 bp, Homo sapiens
cgctctagggctcgcaggatcgcggagctcaatttggaagtggcgcacgcgggctcacgccggtgtctcagggaaacgctagaaacgcggctacagagctcccaatcccagcctgcggtcgg

SEQ ID NO: 404492 - DNA, 122 bp, Homo sapiens
caagtccccacccgactcagtagcccaggtggcttcccctagtggatcctgcgccctggccggaattgcccaccagtcccgtgcggcgcgccgccactgctcagcccttgggcggtggatgg

SEQ ID NO: 404493 - DNA, 122 bp, Homo sapiens
caccagcggcgtcctgctcagcccctctgcagggagcgagcaggcaggcaagccgctgggcggtgggacgtcaccaccgcaggaaatcgcgaatgaacttccagagcttggtgacccacagg

SEQ ID NO: 404494 - DNA, 122 bp, Homo sapiens
tctattaaaaatacaaaaattagctggtcgtggtggtgtccacctgtagccccagttactcgggaggctgaggcaggagaatcgcttgaacttgggaggtggaggttgcagtgagccgagat

SEQ ID NO: 404495 - DNA, 122 bp, Homo sapiens
gaacttcctgggggtgggacttgtgaacacagagggtcttgcacactattttatatccagcgagtgttcagattacagggccaggcctcagatacaggtccagtttgtggaaggcggtccct

SEQ ID NO: 404496 - DNA, 122 bp, Homo sapiens
gaccacttagttgatgcctctgaaaggaagagagaatcagatcgctaaaatttgatgtgtcgtcagtgtggatcctactcagtagtgtcacaacgaggctgaaaatcatattaagtgctttt

SEQ ID NO: 404497 - DNA, 122 bp, Homo sapiens
tctacagctctcactacccagccttctctacttcacacccctcagccaacggctgttcaacgtatgaagcattttataagttcatttcagcttcacaggatttgtccgtttgttctggagta

SEQ ID NO: 404498 - DNA, 122 bp, Homo sapiens
cggtttatgtgcgaggagtgagtgattgactttatcagtccaaggacattactctggaggcgaagaggctgggactcgcgcggcgagcggcaagcggcgagtaacgagcctgcctactgccc

SEQ ID NO: 404499 - DNA, 122 bp, Homo sapiens
tctagggccccatggttacttctttggaccccccggaggcgctgtccagccacttccagtcgccctgatgactcgtcgtgggttcctttaggagacccgaaagttcagggcgggctgtgtgg

SEQ ID NO: 404500 - DNA, 122 bp, Homo sapiens
ccgccttggccgcgtccccggctcgcccgggagcccgagctcccgccgcccgcggcgcgccgagaactcccaactcgcggcacgccgccccgctttgcgagactttcgcccctcctcacacg

SEQ ID NO: 404501 - DNA, 122 bp, Homo sapiens
gcttacctggcgttagcttgggatcccgcgcggccgactcccttttccccttcactgcagcgtccttgtgctgcttctcagtgggttggccctagcccccacccttgaccctcgaccccggc

SEQ ID NO: 404502 - DNA, 122 bp, Homo sapiens
cgaggggcagacaagtgctccacagagcacttcttaggcagggaggaaccggcccctgcgcggtatttggtatgcggcgccctctgctggtgaatatctgaactgcatgcacctgtcagaac

SEQ ID NO: 404503 - DNA, 122 bp, Homo sapiens
aagccccgcccaccggcggcgggcggctgaggtcagggccagggtcgctgtgcttcgtggcggcgcgggtcctccgtttcccaggaggaagaaaaaaagaaaaatggagtcgcagccggctt

SEQ ID NO: 404504 - DNA, 122 bp, Homo sapiens
cctcctgagctaacagtggcaggcattcctggagcgtgatgtcatcagcttggcatggcccggtggcctgcactccagtgaggtggctgaactctgaccagccaagagaaaacccccctctc

SEQ ID NO: 404505 - DNA, 122 bp, Homo sapiens
gctcattgctgagcatggttatcaatataacatttaagatcttggatcaaatgttgtccccgagtcttctgcaatccagtcctcttagaaattggtttctctctttgggagattcagactca

SEQ ID NO: 404506 - DNA, 122 bp, Homo sapiens
cctccaccttccaggatccagaggcctgactgttcatcaccactttcagtgcattctcaacgctcactctctgcatgattcagaaggccacattcttcataatacagtcatgctagacttgg

SEQ ID NO: 404507 - DNA, 122 bp, Homo sapiens
gttttcagaccaaaaccctgaaaacaagcgcagccagtcaagcgaacggaagcgcaggcccggcccaggctttgtcccggcccgccctggtcccagccagtccggcctctaggatgcgcgcg

SEQ ID NO: 404508 - DNA, 122 bp, Homo sapiens
cgcccgctgacccagtcggggctggctggtggaagagggcggggagagccttctagttggcgagtgggctttaggacccaacgggaacccgtgcctcttgcagcagcctaacccagaagcag

SEQ ID NO: 404509 - DNA, 122 bp, Homo sapiens
ggcctcctaatccaaccaggaggaccaggagaggcccaaaaggggacacagggcagtgaccgccaggcttggagaggagccgctcctggcaaagccagcgccctatttctgaacgccgcctc

SEQ ID NO: 404510 - DNA, 122 bp, Homo sapiens
cgggctaggatacagtgggccccgcgggccggcgggccgggtcccggggagcggcgcctgcgtccggatgcccctcccggccgcctcttcctgccggctccaagtttcggtttcgccgccgg

SEQ ID NO: 404511 - DNA, 122 bp, Homo sapiens
ggaatcctgtagtaactaggcgacgtccctcggcttggggtgagactgtgttccaaactacggtttcccaaagcgttccgtggatcctagaatgctaactggcccaagaaagctgggatact

SEQ ID NO: 404512 - DNA, 122 bp, Homo sapiens
gctagctactcagctgctttccttcatcttaagcccccatagcttgaaattttgtgaagccgtaaagatgaactctactggaaaaagatattctggctgacagtggaacattggaatacatg

SEQ ID NO: 404513 - DNA, 122 bp, Homo sapiens
catatactaaagtttttagagtgacaagacatcatacctgtagcttgctctcaaaaggttcggaaaaaggaatattgctaatggggataaatacaaagcaacggaatacatgtagcaaaatg

SEQ ID NO: 404514 - DNA, 122 bp, Homo sapiens
gacgctcggctcatggtctttgacaagacggaagggacgtggcggctgctgtgctcctcgcgctccaacgccagggtagccggactcagctgcgaggagatgggcttcctcaggtactgggg

SEQ ID NO: 404515 - DNA, 122 bp, Homo sapiens
agcaggtccagggaggccagggaagccagcattccccttttcaccttttgcaccctgtatcgaaaacaaacacttaaaacacaatctttacaataatgttttcaagttccaaccaaaactta

SEQ ID NO: 404516 - DNA, 122 bp, Homo sapiens
tggttgggggtaggtgggaacagactgtgtttgcttatttacaagctctcagctcaggcacggctgccccacaaggctctgatcctgcccacaagcacatgttctggtcacgatctccactc

SEQ ID NO: 404517 - DNA, 122 bp, Homo sapiens
ccaggcgcccgggcaggaggcagctgcatatctgcggtcccgaccacaattgctgggagtcgcgtcccggagactggcggcgctgactctgcccgctgcggccgccgcgccgattagagccc

SEQ ID NO: 404518 - DNA, 122 bp, Homo sapiens
tgggccgcgaacccgccgcggggccgccggaacctccgcgaaggttctaggcctttgtggcgtcaccgtctccttgcggaagcttccgccggcgccgaataaaacccgccgcggaggagccg

SEQ ID NO: 404519 - DNA, 122 bp, Homo sapiens
ctcaaacttcctcccaaatacactttcttaaaatgctggcaaatggtcatttcaaatatacgtgttacattgtggtagctgtctgtctgttttccccttgctgtctcttgttttggtctttt

SEQ ID NO: 404520 - DNA, 122 bp, Homo sapiens
gacggccggcgtgtgtccttccgtcttcgctgccgacggtgggggttgggagcgatttttcgtctttaggttggattcggaacgcggacgtctggatgcttgtgtatctctgtccctcatat

SEQ ID NO: 404521 - DNA, 122 bp, Homo sapiens
cttccatttctcccctctaatatgactcttttaaatttagttacacagaaattggttttgcgctcacgacatgcctaacatcaggcctttatccttaaagaagtttcaacactcttgtgtca

SEQ ID NO: 404522 - DNA, 122 bp, Homo sapiens
ctgctcttgtcctctcctcccgagggccctgtgccctcccagcggacttgcaggggagaacgtccatgtttgtgcgagtcacaaaggcgcccgttccaggggtcccagaacgcccgggcgtg

SEQ ID NO: 404523 - DNA, 122 bp, Homo sapiens
gaggtggccctcagtgtcgtcctctacactcttggctttccggctgctgtgctgcgaagacgagcggctaaatgtccggctgcacctcctccggacatggtagctgtcctctcgccggcgcc

SEQ ID NO: 404524 - DNA, 122 bp, Homo sapiens
tgcactcttgggagtcggggaggcgggtggtgctcatgcgtgccagtgagggaggggcctcgccaccctcctgtactgtgagcctggccctgggcagccctctgccctggccagagcctgac

SEQ ID NO: 404525 - DNA, 122 bp, Homo sapiens
cggttcatgcaaatcgctgggggaacttcagccaatagtcactggctcttcaattaaggacgggaactcaaagagtggcagaaaggcaagagggcagaagggcacattcatggtttcctgcc

SEQ ID NO: 404526 - DNA, 122 bp, Homo sapiens
cgtctgcctcctgaccattcctcctgaccacggtgtgtttcccatgtggctcctgcagggcgtgcctcttgtctctaagacctgtacttacaatatatatttttttctttgagcctcttctg

SEQ ID NO: 404527 - DNA, 122 bp, Homo sapiens
cggcaatggctggagactagctctgcggtctgctcgtggataaccgcgctccctcgctgccgggccacccgcacagccgggcaaaccaaaaggcccactttttcatgctgtacccaccactt

SEQ ID NO: 404528 - DNA, 122 bp, Homo sapiens
cgctagttgacacaattgtggcttaaaaaacgtagcaagtggacgaacccaccgtgatgccgcctgatgaagcagctgggggaggcttcccttcctcgggagtctgaaaacccaggctcccc

SEQ ID NO: 404529 - DNA, 122 bp, Homo sapiens
ttaagctgctttgtcaatcactttcaatatttaatttctaagactgattttcggatcacacgaaaggaaaacatgtttctgacagagagaaatacgacatctgaggccacattcactctctt

SEQ ID NO: 404530 - DNA, 122 bp, Homo sapiens
tggacccgggttctcagctgggagggaaagcctgctagatctctgttgttggaacagtaacggctttaccgctgtctgtggctcagatccttatggaagaacccctgaccatctgcggccat

SEQ ID NO: 404531 - DNA, 122 bp, Homo sapiens
cagggaagaccaccttttccgcaagttccactatctccccttcctgccctcaactgaggacgtttacgactgcagggtggagcactggggcttggatgagcctcttctcaagcactggggta

SEQ ID NO: 404532 - DNA, 122 bp, Homo sapiens
cgctgctggccgccctcctaccgttccatcgccaccaccacctgcagccacccagtgccccggatggcggctgctagcagccccttctcgtagttctctaaggcagatactgagcactgaca

SEQ ID NO: 404533 - DNA, 122 bp, Homo sapiens
caatttttacctcttttccttgttgtaaagatagcagtgctgactgttaaattcattgcacgttacagcagaaagaggaaatctacagcccatatttaaaagctctcctggtgattctaata

SEQ ID NO: 404534 - DNA, 122 bp, Homo sapiens
cggcgcggaggccggggaggagccggggcctgcagcggagccgagccgagcccgagcccgcgccgagccctgacactgtctgcccgccttctggctccccgggagcccagactggtcggagc

SEQ ID NO: 404535 - DNA, 122 bp, Homo sapiens
agagtaggaatgaacgagggaaagtgggagaggagaaggatgcgaaagggcaggtgcttccgtgtgtgggtgtggcctcgcatcccacgagcagcccacaaggtgagcatctcgccctggga

SEQ ID NO: 404536 - DNA, 122 bp, Homo sapiens
catctctgagccagcagagcaatcccccaaagtgctgttagttccccaaacagctccagccgacccctctttaggtcagaacatagctaatcccttaatcccattttctgatgaaatggacc

SEQ ID NO: 404537 - DNA, 122 bp, Homo sapiens
ggcggcgggtggggccgcgggcgggagctgctgggcctcgcagcggcgagttcataggagcgcgggtcgagggaacggcgggaggcgcgttcgccgatgcccgggacccgggagggctcaga

SEQ ID NO: 404538 - DNA, 122 bp, Homo sapiens
ttacccagtatgcctctgttgtgaccaggatgtctatcccaaagtgctttcaaagtggtgcggcctactgattacttgaatttaaagtttgggggtctaaaacaagcagatattttttctcc

SEQ ID NO: 404539 - DNA, 122 bp, Homo sapiens
tggaaaagcgttcggtttcttgtttcctagccgcgaatggggtcgtggttccttcgacctcgcctggggagaaaggggacggagggcttcgggctatacttgggccacacagccgggaagct

SEQ ID NO: 404540 - DNA, 122 bp, Homo sapiens
cctcttgataaggttcagaatgaagcaagataaatcgcaatgacgttcattctccagcagcgatgaacaatttcatgaccaaaaagtagttttccaaagtccctttgtgacagagtccaatt

SEQ ID NO: 404541 - DNA, 122 bp, Homo sapiens
atcccgcctttcctctcgtgaagctctgccgggacaaggctgacgtgggacgacgtgggacgccgtgggccgcgagcacgccccggcactactgcggctaagtttggcctttcctggttgcc

SEQ ID NO: 404542 - DNA, 122 bp, Homo sapiens
attcctccccttctggtcaactgaactaccctcaaagtgctccccaaggaatgcctcaggcgtggcaggcctcagcaaaaccagcggaggggctcaagttatctgggtggactgtctacact

SEQ ID NO: 404543 - DNA, 122 bp, Homo sapiens
tggtgctgagcgctcttaccaatgagaactcctctgggctgtgtttcacaggcacttcagcgttgagaggacctgggagagaggagcagggtcaccaaatggtggatacacctttctctgtc

SEQ ID NO: 404544 - DNA, 122 bp, Homo sapiens
gtatccagaaccaagtgggcggcacacccttcaggtcggtgggagtgagggccttcgggtcgccggcacctgacccagcagccttgtcccaccgcctgcgaccaccagctcctccgctctct

SEQ ID NO: 404545 - DNA, 122 bp, Homo sapiens
tgtcccagttctcttctggcttcacttgctgggtgaacttaatagtccctgactgggcaccgagcagtcatatcccgctttctgcttctatacccccaagtcgcgatgtcaccgcacgttct

SEQ ID NO: 404546 - DNA, 122 bp, Homo sapiens
atcccaagttctgggaagtgctgaatttgactaagttttgtaagggaggagatgtaataacgaaagaaacacacagccttaggggtggttaaggaggaaatgaagcagtcaggagaaggcag

SEQ ID NO: 404547 - DNA, 122 bp, Homo sapiens
ctttttttttttttttttgagacagggtctcactctgctgcccaggctggagtacagagacgtgatcacagcacacggcgacctacctacacctcccgggctcaagctatgctcctgcctca

SEQ ID NO: 404548 - DNA, 122 bp, Homo sapiens
gcggcatcaggtcctcgggcgggaagccccggaagctgtacttctcgtactgcgccccggcgctgcccagcagcaaccacagcagcccccacgccacccgagccatgcccgccgcgccgccg

SEQ ID NO: 404549 - DNA, 122 bp, Homo sapiens
gaggggagggggcggggcttacccggggtcaccgccagggccctgctgggttccacgccacgttcctgtctccgcagggcgttcgatccctagagggaggagcctgtccaaacggacgctaa

SEQ ID NO: 404550 - DNA, 122 bp, Homo sapiens
ccttgacagggagctatctggggcgggggctggggtcgcgtggccagtacctgggagaaccgccattcaggagaaccccccgccaggctcttggttccgcccacgcagtcccgccccctccc

SEQ ID NO: 404551 - DNA, 122 bp, Homo sapiens
agagactttagacatttgcccacggttacctggttgagtggtgaagccagtatttaaacccggctctatttaatttcaaggcctctgtcttttctgcaatagcgcgctgtctccattaagac

SEQ ID NO: 404552 - DNA, 122 bp, Homo sapiens
tctccgcagagcccagggatgcgacaagtgcgaggggccaggccagcagcatcatggcagcggcaaccaggagccggaccgggaagagcgtcagtgtcatgagggccacctgcagacagagg

SEQ ID NO: 404553 - DNA, 122 bp, Homo sapiens
atataaccctgcgaatataaatttcttcatggaaacaagatcaacagcaaggctaaagtccgagttctagtttctccacgggtttctgcacgaccttgggcggtcccttctcttctcaaacc

SEQ ID NO: 404554 - DNA, 122 bp, Homo sapiens
caagtacccgctgccatggacctcgtaggcacctaataaatgagaagcttgttgagtcagcgagcaacttgaatcacatttctgttgatttttaagaacgatctagggcagcattttccaaa

SEQ ID NO: 404555 - DNA, 122 bp, Homo sapiens
aagtgactagtcaaggtcacagagaactccagtttcaactactggccctcttgcactctacgttaccaggtgcctccttgttattaaggaagtacagaacatgtgctaatgggggctttgct

SEQ ID NO: 404556 - DNA, 122 bp, Homo sapiens
cctgaagagacaagggctcaatgccaactctgcctgtttccaactgtgtaaccatgtgagcgtcaaaaatcatggacgtgctctggttaacactgagtgggagctcaacaaattattatttt

SEQ ID NO: 404557 - DNA, 122 bp, Homo sapiens
gaggcacgtctcatagacagggagggccgcgtctcaggactgaccttttgatccgcagtgcggttcctcagggcacacgatccggccagcaggatgctgaggctctggaaatcttcagttga

SEQ ID NO: 404558 - DNA, 122 bp, Homo sapiens
aggccgcaccggccgcgccctccccaccaccctccccgcccgcgcccacacccacgccctcgcccagcaccaaccccctggtggacctggagctggagagcttcaagaaggacccccgccag

SEQ ID NO: 404559 - DNA, 122 bp, Homo sapiens
cgtctcgtggtcactgccgccctccctcccgccacacctgtgatgatcgctatggagccgcgcctcaggtggcattactataaacctaagaggagaggcgcccgttcgaataagggcaaatt

SEQ ID NO: 404560 - DNA, 122 bp, Homo sapiens
cacaaacacaaaactcacacacacacacacacacacacacacaaatggttagaaggcatccgaatctgctctccctggctctggaactctttggagctgccaggtgtctaccacagggattg

SEQ ID NO: 404561 - DNA, 122 bp, Homo sapiens
gtgtccagttattgctcctgaatcctaactgcagtgaatggagggaggggcagtgtactacgcgagagggtgggtcctgaaaactagacatccctgggtgctagccctgtgttgaacctctt

SEQ ID NO: 404562 - DNA, 122 bp, Homo sapiens
ttagcttaataatttaaccttggtttattttactgggtagagaggggttagcatttttgtcgagctctgttacttgaatctggcaaggttcacatttcagttaagctggattttctaacctg

SEQ ID NO: 404563 - DNA, 122 bp, Homo sapiens
actcccaaatgccagcagtgcttcgaagaacaacctctctgcaactgattggcccaaacccggtctgaccttacaagagctagtgctttcttccttgagcagtctgctggtctaggaccaag

SEQ ID NO: 404564 - DNA, 122 bp, Homo sapiens
tccagaaactggagtcggtggcacgcactgggcatccgatgtaggctgagttgtggacgccggggggcctcctgtaggtgccatcgctgtctgtggtgatgagccggtccttctcagcgtcg

SEQ ID NO: 404565 - DNA, 122 bp, Homo sapiens
acagggcagtgtttgggttgaagtcctgtgttctgatcggtgattctcatggtgaccaagcgaggaagaaggcccgctcttccaacaccatggcttctcttctggggcacacgaggtgaaac

SEQ ID NO: 404566 - DNA, 122 bp, Homo sapiens
tactttctgttattttccatttcgatctcagatacccttcttaggaagctgcatccccgacgccgggctggtctgttctgctctgggggcggcgtgtgctctcatttcactcccataatcag

SEQ ID NO: 404567 - DNA, 122 bp, Homo sapiens
agtaaagaattcagatcctaaactaactaccccattacagacaaggagctcagagagagacgtgggctaagactgtcctgggggtgggagggagagggaagatggttaggtcagagctgggg

SEQ ID NO: 404568 - DNA, 122 bp, Homo sapiens
gcgcggtgcaccccgggagttgtagttcgggactgagaccctgtcggggttgggggatcccgcggcagggcgaggcagtcggataagcgctcctccagtccctgcctcgctctggaccctgg

SEQ ID NO: 404569 - DNA, 122 bp, Homo sapiens
gcgtgggccgcgccgggccgtgggcagccggcgggggctggggcggctgcggcgagacagcgcatcaaaggggcccaggaacaggcctccgaggggacccccagggaggagcagccgagggg

SEQ ID NO: 404570 - DNA, 122 bp, Homo sapiens
tgggcgtgtgcgggcttgcccactgcagcttgcgcctcctcggtggcgtgcgacatggcgcgcgtgcagcctcgggacccgctcccgccaccttctgccccatcgctcagcaactccggcgg

SEQ ID NO: 404571 - DNA, 122 bp, Homo sapiens
gctgcctgccccttgtcctgccctccttctttgttctggtagatcctggcctggggccttcggaacatgaagaaggcgagctccccccagctcctggtggaattcggggaagagtccctgag

SEQ ID NO: 404572 - DNA, 122 bp, Homo sapiens
aacaggagtggaatcccccctccccccagcatccgcagtgttgggccggcactgtcagaccgagacaagtgcaatgcccagggcagcgtccagcaattgcccaagtctccgcctctcaacac

SEQ ID NO: 404573 - DNA, 122 bp, Homo sapiens
ctgcccttcacagatcgttgtcattatcaagtcctacactttgagagcagaaaacgaccccgtacgtggtgggtctccgacatctgtttattacgttggaccgcatgctgcatatgatccag

SEQ ID NO: 404574 - DNA, 122 bp, Homo sapiens
tgcagggagcatagaactgtctggtttgcagacctatctcttgtgtctcctgatttatcccgccaggcctgtgcctacagcctttcttgattggtgacacgtccatttcattcgctcagaga

SEQ ID NO: 404575 - DNA, 122 bp, Homo sapiens
ggtgagtgttacagctcttaaggtggcgcgtctggagttgttccttcctcctggtgggctcgtggtctcactggcttcaggagtgaagctgcagaccttcgcggtgagtgttacagctcata

SEQ ID NO: 404576 - DNA, 122 bp, Homo sapiens
caagagctccatttaccctataagtgcaaaatattttcacataaaacccagtctgtggatcgttagttattattaatctaataatatcataaattggtactactattctattttccatttgg

SEQ ID NO: 404577 - DNA, 122 bp, Homo sapiens
cttctcccgaagccttggtgaaagatgccgcaaatgctcggtacgtggctgtgcgaggggcgcccagaaggcacgccagtctccgggcctcggtctcctcatctgtcggatgggacagcacg

SEQ ID NO: 404578 - DNA, 122 bp, Homo sapiens
atgagggttggttggagtcgtcctggttgtcaaccggatcaggagcttggctcagatgaacgtgcctttgcctttgatggcttcaaggtgagtggactttgtcctgtgccagtcatctgtac

SEQ ID NO: 404579 - DNA, 122 bp, Homo sapiens
caagcagaatcatctgggtctaaatcctggggtctgccgccctctttgaggctcatgttccgcacatgtagaggagtgatgatctccatctgtgtggttgccatggcaagtacatgagaagg

SEQ ID NO: 404580 - DNA, 122 bp, Homo sapiens
catgtaactggtctggatgtggtctttcaataagacaatagcagcagcataataagcctccgggtcagcatagtagcatagtatttggtgttacctattttagtaagtttatgtttggttaa

SEQ ID NO: 404581 - DNA, 122 bp, Homo sapiens
agaaagaaagagaaagaaaggaaggaaggaaggaaagaaagaaagagagaaatttcatctcgacacaggaaactctgacctaggctttaaggaaagaaaagaaagaaagaaagacagaaaga

SEQ ID NO: 404582 - DNA, 122 bp, Homo sapiens
ttccacccatctgagcaagaaggtgtgggaggattaactgggaggctctgacttcattggcgagtactgttattgcctttgataaatgcatgcagcagcacagacaccacttagccccaggc

SEQ ID NO: 404583 - DNA, 122 bp, Homo sapiens
gccatttcctctccgcaagcttttagcactgcaggtactaatttgaacatgaggcagcctcgctgtccctgaaggaacttgagaccctgcaaacgtacttgcaacacccacgctgcagccac

SEQ ID NO: 404584 - DNA, 122 bp, Homo sapiens
tcacaacgtcctctcctgactcacccaaaacagcaaggacaaggaagaagaaggcggcaacgaggagaggcaggtccggcctggagagcttcagcagcctccacatcaagactttgttgttc

SEQ ID NO: 404585 - DNA, 122 bp, Homo sapiens
cccctggttaaggtggaggaagcggacccagtggaagaggaaggggcatagcgggttccgcgaacatgagttgtaagcggcagagcccgggactccacagccagggttttctgactcggaga

SEQ ID NO: 404586 - DNA, 122 bp, Homo sapiens
ggcaggcagccaggcggccattacgggccgcgcctcccaccagccagtcgctggcaggagcgtccggggagggagcagaccccgttcaccctcaccccagaactgaagcagcgaggggaccc

SEQ ID NO: 404587 - DNA, 122 bp, Homo sapiens
actgactccagggaggtgagtgtgcgcccttcgctccctgccgtgtctgtgagggtccatcgttgccggagactggaggtcgggggccatgggagccccggggcgaacggtgcggacatggg

SEQ ID NO: 404588 - DNA, 122 bp, Homo sapiens
tgcagctttgcctcctgaactcagagctcaccaggtggggctgttgggacatcctcctgccgatgccatctgagccactttccctcctttgtaaaagagccctcctttaacccccacagatg

SEQ ID NO: 404589 - DNA, 122 bp, Homo sapiens
gagatgtctctgaagcctgaggaaccaggaaaacccgtagtcgccacattttctgagagccggatattggtatgtacctattgtgtctggaatctagtctatcggaatactgataataagac

SEQ ID NO: 404590 - DNA, 122 bp, Homo sapiens
tttgttactgaacctaaaatatcataaagcctctttaatagtttcacaacaggccaggtgcgctggctcacacctgtaaccccagcactttgggaggccaaggtgagcggatcagctgagct

SEQ ID NO: 404591 - DNA, 122 bp, Homo sapiens
agatactcacagaggacattcagggtgactgggtcactgcgcatgccaccatctcggtcccgtatttcacattcatagggtcctgtttcatttctcgtgacactgggtagaatgaggatcct

SEQ ID NO: 404592 - DNA, 122 bp, Homo sapiens
gctaccccgcgcaagcggaccctggtgggggcctggagggcagtccttgcccccgtgcggcggtgcctgaacgcagcaggccctggaacggctgcggaacaaaccatcgagcactagggcgt

SEQ ID NO: 404593 - DNA, 122 bp, Homo sapiens
aatcctgtggcccctgtcaaaaatttaggctttcatttatttaggcctgccttgcctcagcgattaaaacgatgtcagccaggtcggctgctttgccgcagcgtccccttgcggccctatca

SEQ ID NO: 404594 - DNA, 122 bp, Homo sapiens
gaggttgccgccatgcctggcagagacggagggaggcagttggctccggaatgcggccgccgcagatgttctccgcaaccttccggaagtggaatggcgggagcctcagcattgctgcccac

SEQ ID NO: 404595 - DNA, 122 bp, Homo sapiens
ctggtctgtcctaaggccagtggccctgtccctaggctgtggggcacaggtcccattccccgggggagtgaagggctcaggcagcaggcagccccgtcccctcccctagggtgtgcctgggt

SEQ ID NO: 404596 - DNA, 122 bp, Homo sapiens
gccaggaaatttgttttgggtggtgcccttccttgggaagattaggaatgtttcagctcccgcagtggctgctgctccaggaagctactagcattgttcctttgcattggcccctctctttg

SEQ ID NO: 404597 - DNA, 122 bp, Homo sapiens
ggacagcagtgtggtgctcagcttggcatgccactgggtttggggcaaatctgggaactacgaaccttcctcatttgcattaattgttaggttgaaggaagggaaaagagaaagaccaaaag

SEQ ID NO: 404598 - DNA, 122 bp, Homo sapiens
ggttggaacgctggatcaaggtattcaagttgttgttcaatatagcaatgttagccagcccgccctgagcctcaaaggaaaaggcttggccaaactcctccagatgccagacggtctccttc

SEQ ID NO: 404599 - DNA, 122 bp, Homo sapiens
aattcagtccacatcatctctgcagccaggaaaacacctgggcagttgtctataagtggacgtggagagatgtccaggacatctaggtaagtgcaaaaagcaaagtgccaaatagcagccat

SEQ ID NO: 404600 - DNA, 122 bp, Homo sapiens
cccatcctgcacctgaggacgcaggggctggggaatgagtgcagtcacgatgctaggaagcggctcagcccacgtggagacccacgcagcttggccctgacgcctatactcttaaccacgac

SEQ ID NO: 404601 - DNA, 122 bp, Homo sapiens
cacactccctctatgtctctcttcctcccattgttcctttcactcctgtctttgctgcctcgttcccacccagccagtgcgccttttctagtctcctgtggatctcactctcttccctcagt

SEQ ID NO: 404602 - DNA, 122 bp, Homo sapiens
aacgattaggaaatatttcgggaagatctgggcgcctcatcctcatccgccgtccacaagcggtccctgccacaaaggacacagggcgcgcttgttgctcagatccctggccccactggttg

SEQ ID NO: 404603 - DNA, 122 bp, Homo sapiens
tggctgctacagatggggctggatgcagaagagaactccagctggtccttagggacacggcggccttggcgctgaaggccactcgctcccaccttgtcctcacggtccagttttcccaggaa

SEQ ID NO: 404604 - DNA, 122 bp, Homo sapiens
gccttgtcactggagtgcaagaagaaattcccacctgtcaaagaggtaagcttcaggtgacgtcaggagaaggcactgtgagcatgcctggtcctgttagactcagtgcttcaccccagttt

SEQ ID NO: 404605 - DNA, 122 bp, Homo sapiens
tccttgcctctcccgggagccaggtctcagtgtccccaataggggacacgcactgaccggcgggtgaagggactgattttgattatcatcctaccagatagagattattccctctgcacccg

SEQ ID NO: 404606 - DNA, 122 bp, Homo sapiens
ccgcttccccctcaaaccctggttcgtgtctccctctgcatagcccagggcccaggcaagcggaacccctacatccacgacagcgccacgggcccgagggacgaggacctgcctctctggcc

SEQ ID NO: 404607 - DNA, 122 bp, Homo sapiens
taaaagaaagggacaggaagtgaatgagagtactggaagtgcccggacgaagccgacgctcgcaggaactgaggattctaactgcccacagagcctgatgttttgtcggaaacgtaaaagaa

SEQ ID NO: 404608 - DNA, 122 bp, Homo sapiens
gtactgctgccatctcggctcactgcaacctccctgcctgattctcctgcctcagcctgccgagtgcctgccattgcaggcacacgccgccacgcctgactggttttggtggagacggggtt

SEQ ID NO: 404609 - DNA, 122 bp, Homo sapiens
gataggagagcgtgggcctgcgtggcccacctcatccgtggcctgactgcgttaacctctcggttccctgctcttgccacgtgaggtgcccaaatatggtcggactcaggaggagccaggga

SEQ ID NO: 404610 - DNA, 122 bp, Homo sapiens
gatctttttactatctctacagctttgccttttccaaaatgtcatactgttggaaccatacggtatgtagccatggcagactgacctctttcacttagcaatatacatttaaggtttctcca

SEQ ID NO: 404611 - DNA, 122 bp, Homo sapiens
actctggcgtataaagatgcaccatgtggcaaaataacacattacagacttatgcagttacgatgaaactctgcatagtggttacctgtagagggcgggagttcagtttggaaggagttgac

SEQ ID NO: 404612 - DNA, 122 bp, Homo sapiens
ggtgaccctcccatggctcccaccctggggctcccatcatccactcacctgtcaccccgacgacagacacagggcccatgcgctggccaccgtggaagccgtacaggttcatcttgtattta

SEQ ID NO: 404613 - DNA, 122 bp, Homo sapiens
cgtctggaaagcgcctgcgtattcctttcactgggggtggtgtcaaagcgggaaggtgggcgtggcttcagggaacgcctgcgcgttgctcctccgaaggggtggggcgatccctgaactgg

SEQ ID NO: 404614 - DNA, 122 bp, Homo sapiens
ctgggccacatttcgttgcagggatgggccacgtttttaacctgtccatcagcggacggacgtttgggctgattttatcttttggctatgatgaataacgcggtgatcaacattgattcaca

SEQ ID NO: 404615 - DNA, 122 bp, Homo sapiens
aaagaagaaagaaagaaaaagggagataaagaagaatagtttctgcctcatgaggctcagcgcccagtaagtgagtaagtgaagagaaaactgagtaagcactcaatgcactgagataagtt

SEQ ID NO: 404616 - DNA, 122 bp, Homo sapiens
aggggatccgttgtcacgtggagcgacgccacagggacggggtaagagcggaggccaagccgccagcaagtcattaacccagaggtggcaactggaatctgagtggactttctgtcagaaca

SEQ ID NO: 404617 - DNA, 122 bp, Homo sapiens
ctcgcccgcaccgcctgcgcctgacggctctgtcccctttccttctgctcccctgcttcccggagtgagtcaatgcctccctttgtgcattcccattgcgcttttccaggcctctttccgcc

SEQ ID NO: 404618 - DNA, 122 bp, Homo sapiens
ctgcgcatgtgcaggagggcgtcctgggctcccgaggttcggcttcacccagcagtaaaacgcatgcgcaaagcttcggtcaatgcgggctgtccatttctcaccgccgactccctacatca

SEQ ID NO: 404619 - DNA, 122 bp, Homo sapiens
ctcactagctgggccctgggcctagacagcccttctgggttcagggtcatctgtgaacggcgtgtaatctacagggatgtgaggggctaaaaggagatccggtaggacccgcagaccttcag

SEQ ID NO: 404620 - DNA, 122 bp, Homo sapiens
agggagactggggcagccccagaggcctgggaggcgcatctgccaagcagatggtaactccgagggggcaaggtgcatgaggagcgctcattatcctcgccggagccaacagcacctgccct

SEQ ID NO: 404621 - DNA, 122 bp, Homo sapiens
gaagcccacgtccacgtgcactggtacaaggatggcatggagctgggccactccggtgagcgcttcttgcaggaggatgtggggacgcggcaccggctggtggcagccacagtcaccaggca

SEQ ID NO: 404622 - DNA, 122 bp, Homo sapiens
gtgtttgtgcattctgtaaaaagtgggaaacactgttctccggattgtgtgggtgatcgccggtcgcctagcttgccgttcttcaggtatctcctgctgctccagaatctacatctgaatgt

SEQ ID NO: 404623 - DNA, 122 bp, Homo sapiens
cctggccccgcgccaccccccgccgccggcggccaatccccacccgggctggggggagggcgatgcaaattaccccggatctgggtccgcccgcccgcctcccccacgcccgggcccggcct

SEQ ID NO: 404624 - DNA, 122 bp, Homo sapiens
gcaattccctgaaaagaatgcagctcaagtgactgctccactttttcaccttggcctttgcggaaggctgtggctgggctaccctatgcatcgatcaatgaggtcatatttacccagtgctt

SEQ ID NO: 404625 - DNA, 122 bp, Homo sapiens
tacaacaacaagtggatttccaagaaacccagctgcgaaagatcaatacggaaaatgagacgctgcagaaggagctccgagagcggaggcagcagctacaagccatgaccgacaaggtggcc

SEQ ID NO: 404626 - DNA, 122 bp, Homo sapiens
agttaaggaattcctcccactgcctccttttgcagaattcatgaatgaagatactcatgtcgcggagttttagggcttcttaatgagcaggttcccagagcacttactatgccatctcctag

SEQ ID NO: 404627 - DNA, 122 bp, Homo sapiens
atgtttttcaatcagttgcagtcactttcctggttgaagctgttgcaagttttacaggcacgggttgcttttccacggataagttaaaaaagagaatttttttttaaatgatgagaagccgc

SEQ ID NO: 404628 - DNA, 122 bp, Homo sapiens
aaaggagacaagggtgaaaggggagcccccggagtaacgggacccaagggcgacgtggtacgcaccgctggtgtattcccctggcctcatgagggtggcgggtatctcagccttggttaatt

SEQ ID NO: 404629 - DNA, 122 bp, Homo sapiens
acgtgcagggccggacgctctatgacgtcatcttgtacgggtgagcgcgtgctgggagggcgctcgggggcgggcacccaggggagtggccagggaccggcacccagggacagggcgggcgc

SEQ ID NO: 404630 - DNA, 122 bp, Homo sapiens
agcactgtcctcaagcctgagtgcgtccggagtgcaaactacaagccccagaaggcaatgcgccagcagtgatgggagtgggcgcggaggcgcgggctccccgactacgcctgcgcagcggg

SEQ ID NO: 404631 - DNA, 122 bp, Homo sapiens
tctctctcttaaaatatcttactgtatcgttcactcttcttgtgaagacgtggaatgacacggtgcctacgtgataagaggaagtgaggtgatggcgtaagaattgtgaagtagcgttaggc

SEQ ID NO: 404632 - DNA, 122 bp, Homo sapiens
acagttcagcgggtggggcaggccccgggaacaggcccccgggtggtcccgcggtgagctcgccaccgcctcccgccgtccccatgcccaacctgccgccacccacgctgtccgcgcgtccg

SEQ ID NO: 404633 - DNA, 122 bp, Homo sapiens
ccaggtgtgggcaggagggggtggaccgggagcttctgcagcgccagccctccgcggggacgtgtgttacactgcctgacatgggcaggaccctggagctgcatttgtaagataaataatgg

SEQ ID NO: 404634 - DNA, 122 bp, Homo sapiens
tcccgcgtggacatccccagcatgatttctgtctccacccacttcgcacacaccccgccccggccagacacccccaaacccacacagggtgcagggacaccgccctggccttggctgtggct

SEQ ID NO: 404635 - DNA, 122 bp, Homo sapiens
tgaggtcgaaacgacctgtccagcagaaaactatccccaagcatattccaaccacttctccgtagagctcattccttccgtgcatacgaagggcgccaatccttcctgtatccctcctacag

SEQ ID NO: 404636 - DNA, 122 bp, Homo sapiens
taagaccacttgctgctccctggaatgattctaatataggaggtacattagagagagtgccgtaagaatagcctatattaaaaagaactaggtatgtagcttttaaagtgtgcccatttaga

SEQ ID NO: 404637 - DNA, 122 bp, Homo sapiens
tgtctaccgcgggagaggccgcctctgtcagtgagttgagcggggcgagcctagaggggccgtagcagttgcagcgccccctggagtcgtggaggtgaccctaacgtcttggaaaacgcgct

SEQ ID NO: 404638 - DNA, 122 bp, Homo sapiens
ggctgcggggccaggagcgcagaaagcgctttgatttacaagctgaggctgagccgccgtcgccgtctgcgagggtgactcaccgggggtgcgggtgggaggtagatccggagaggggccta

SEQ ID NO: 404639 - DNA, 122 bp, Homo sapiens
aaggctccggcaactactccagtggaaaataacaaaaacaaaacgtggcctcgcgggggccgctcctcctcccgccgcagctgcagcccagctcgctgctcctcctcctgccgttcccgtcc

SEQ ID NO: 404640 - DNA, 122 bp, Homo sapiens
gcgcggtgcgaggtgtgggggcgctcgccctattgctgctgccgctgggtctagggtgggcggccggcctcgcggtccggcggtgagtgcggtgcccgggcctcgggcccagccgcagcccc

SEQ ID NO: 404641 - DNA, 122 bp, Homo sapiens
atcggaatcacactgtaagtgctcttgggtttagcttcctttgctcaagcttaccttgtgcgattcattcatgttgttgtgaggagctgtggatcatccattctccttgctgtctgtggtgg

SEQ ID NO: 404642 - DNA, 122 bp, Homo sapiens
ggtcccgccggtggctgccctctgcctcccccgcacactccgcgcattgtttgggactgtcgggaagacgcctcgcacctcacaaatcatttaagcacctcagtctgacgcctgcagtcatt

SEQ ID NO: 404643 - DNA, 122 bp, Homo sapiens
cttgccagtgttcagtggggacccccctctgagcctcaggcgccgtatggcgtccagcaccggggcctgggatctgtaggttttcagatagaattctgggaagacatcattgctgaactgca

SEQ ID NO: 404644 - DNA, 122 bp, Homo sapiens
gaagtatcccctctggccaatcaggtctgaggagaaccctctttgggctcacagaagcctcgcccctcatgaatatgtagatagcactgcccaccgcgcgtactgccccgccctccactctt

SEQ ID NO: 404645 - DNA, 122 bp, Homo sapiens
tcattgccttcctctggctctgactttcactccggggcaacagtagcaccaaaccacatacgcagtggagctccggggtgaggagggggtggtgctggggggggtgaaggaggggttggagt

SEQ ID NO: 404646 - DNA, 122 bp, Homo sapiens
gcaaacccacgaaatagcccttgtggttgtggcttttagtaccaggaagtcaggaggagacggttgctaaatgtagttctatctggggactcgagtggggcacaatttttaaaagccaaaag

SEQ ID NO: 404647 - DNA, 122 bp, Homo sapiens
tttggggtctgagcgccagtatgtgaagtgttgccttctattaatatagttacgcagagacggaggttaagggtagtgccgatgggacagcaaagggtggaaccagcctacacacacgcgcg

SEQ ID NO: 404648 - DNA, 122 bp, Homo sapiens
agggtgaggtctgggccaggggcagggggcagcctgcagttggcacggcgggctggctggcgggacctgctggggctggggctttatacggggccaggagagtggaggcctgggggatccag

SEQ ID NO: 404649 - DNA, 122 bp, Homo sapiens
ttccctccccgccggcctgcgccccgcccgccgctcggccggcccctcccgcgccgctcccgccgtccgctctccgcgcccgctcggcctccgccgcccaaacttttctccgggcgcgcgtc

SEQ ID NO: 404650 - DNA, 122 bp, Homo sapiens
aggacctacgcgcgagggggcggggccagacgggctcacatgatttgccggcgactgtagcgccggtcccggccacaagctgtcggctcggttcggtcgcgttacagggcaggcgccggggc

SEQ ID NO: 404651 - DNA, 122 bp, Homo sapiens
cctcctccggcccccaggctgccgaggggccaccgggcaggggtgggcagggcctggggccggagtcagcgcggactgctaggtgggggcgccggccgggcgggggagggagggaaggaggg

SEQ ID NO: 404652 - DNA, 122 bp, Homo sapiens
gggttcccggctctgtggctcacgtgccgcttgtgtgatgtagagactggcttcgggtgccgtgaataaaccatggctgctttctccaggtttgctttggttcctttctgttgtggtctgtg

SEQ ID NO: 404653 - DNA, 122 bp, Homo sapiens
tcccactgcttaagtagaggcacggtagcctccaggacgcggaagctggggacagccactcgctcgggagcagcctgagcgtttcctctccgcgtactcgagggaactctctccacgcgttc

SEQ ID NO: 404654 - DNA, 122 bp, Homo sapiens
cgagagcgcgagaagggcgggggcgcccagggcaggcctggagacccacggccccctccgcggccaggactcgggctctccgctcgccttcctcgcctagctctgcgccgcttttgccagcc

SEQ ID NO: 404655 - DNA, 122 bp, Homo sapiens
gtgtccgacttttcctgcctgcggcgcagtccctccccggcttcgttactcgagtgcacacgcggccgggctctcggccctcgattgcttcagcctatcaccctgggatgccgcctgccgct

SEQ ID NO: 404656 - DNA, 122 bp, Homo sapiens
tttgtgatttttttttttttttctaccttcagaactgcatgaacaagactgactgacctccgggctccaacttttctttgcaattgttccagctctctgtgaatttttaaggttgttttctt

SEQ ID NO: 404657 - DNA, 122 bp, Homo sapiens
gcctggctcccgggtgcgcagcgccgaggaaaagaatggggagggtcagcagtccacggccgacatcatcacatccgaaccaggtgagagtagccgcctggcccggcccactgtgctccgct

SEQ ID NO: 404658 - DNA, 122 bp, Homo sapiens
gagaaacacgaggtctagccggtccacccgggtctcaagccccgcccaactcaggcctcgcgttccttccaggctgggcaccgcctttggtcacccacgtggcccgcagtaaggccccgccc

SEQ ID NO: 404659 - DNA, 122 bp, Homo sapiens
ggtgtgagctactgtgcctaaccacattttagctttttattacaaaaattttcggccgggcgcagtgactcacacttgggaggatgaggcgggtggatcacgaggtcaggagttcaagacca

SEQ ID NO: 404660 - DNA, 122 bp, Homo sapiens
agcaggaaggaaaccgctcccgagcacggcggcggcgtcgtctcccggcagtgcagctgccgctaccgccgccctctgcccgccggcccgtctgtctacccccagcatgagcggcctgcgcg

SEQ ID NO: 404661 - DNA, 122 bp, Homo sapiens
agcgccaggggcatcctcagaatgctgatttctccgagaggggaggccagaaattgggcacgagttgatgcaggagattcccagaaaggaggactgtcggctttccagaagccgacggtgct

SEQ ID NO: 404662 - DNA, 122 bp, Homo sapiens
gtggtgccagaattcacttcaaaggatctgcatgtctctgactacatgacaaagatgtagcgtataaaaagggaactgtctatttctggcaccacaaaatgcaatctatttgcctcaccaag

SEQ ID NO: 404663 - DNA, 122 bp, Homo sapiens
gccaccctttttgaaatatcaattgatagctgggtacttccagctgccagacagtaatgccgctccatcggctgaccagcggaatcacatttccacacaacaaaaccagggctgccgacctt

SEQ ID NO: 404664 - DNA, 122 bp, Homo sapiens
agaggacctccatttaacctcatgtaatccggggagctcctgagcttctggtccaacctgcggcctaagcagtaacattcacagccaccccaccccgggaaaggaaccgatctcacgcacct

SEQ ID NO: 404665 - DNA, 122 bp, Homo sapiens
cgggcctctccttagtgccagagctcccagctgggattagccccacccttccctacttagcgggctcttcccaatgccccagagctgtcacacagctgggctccaccatgcactgggcttga

SEQ ID NO: 404666 - DNA, 122 bp, Homo sapiens
aaaacaacagaatgtattctctcatagtttggaaaccagaaatcaatatcaaagtgtcaacggggctgtactccctctggaagctctaggagagaatatttctgtgcctcttctagcttctg

SEQ ID NO: 404667 - DNA, 122 bp, Homo sapiens
ggccggggggccgctgggggtccgggcgcgctgcacactccttagaatgtcactgagtgccggccccggggtagcaggggagacgcggcaggcggccaggcggtgggccagcgggccgtcag

SEQ ID NO: 404668 - DNA, 122 bp, Homo sapiens
cagtttcccccctgtactgtggggggccggtgggctgccgggaccgctgggggctcgcagcgggtcgggggaggccacgtctccctcgcggcgcgctgggagcagggagggggcgcggcggc

SEQ ID NO: 404669 - DNA, 122 bp, Homo sapiens
cagagagacaagtctttctgaaagcagaaagggagtgctcatggggaattacatgactcccggaatcattaggaggcaggttcgcttcccaaagccacgccacagggctggatgcggaagga

SEQ ID NO: 404670 - DNA, 122 bp, Homo sapiens
tgccaagaagccacgttctgaggaggccccggagtggccccagctcagccctgcagtctccggcaaggtgacagagccaagtggcaacctgtctggacctgcggatctttgtgtgggatgtt

SEQ ID NO: 404671 - DNA, 122 bp, Homo sapiens
cagcagcccaccggggaagctgggccggctgcagcaccacagcctgtgcagagaggcatccgcaccccgcgaagtccctaggcgcagccccgggtcccccgctctgcgcctcatcactgtcc

SEQ ID NO: 404672 - DNA, 122 bp, Homo sapiens
ctcccactgcccccaggcctttcagctgcaagagtttgaccggctgaccattctccgcaacgccctgtgggtgcacagcaaccagctctccatgcagtgtgtcaaggatgatgaggtggggg

SEQ ID NO: 404673 - DNA, 122 bp, Homo sapiens
ggtgtgagcgattcagcatattatcattgggtgaatcagggggcgtggtggggaatttcccgcagggcggaagctccagaactcccggcaaagcccagctacaggcgggcgactgcgggggg

SEQ ID NO: 404674 - DNA, 122 bp, Homo sapiens
tagaatgacaaaagagcgtcggtaagtgcagtgatagatgcacatggaaatatgagagcacgtggaagggaaatctaatctacctgaggggttggggatgttggcctttaagagggcttcca

SEQ ID NO: 404675 - DNA, 122 bp, Homo sapiens
gagtcagaatgtcagcaccattaaaggaccagagcgccaagtttcttaatacgggtatctcgacaaacacttcaaagtcactgcagaggaagtgtgaatggcttattcctgaatggtttatt

SEQ ID NO: 404676 - DNA, 122 bp, Homo sapiens
tatcgccgcggcttggccaatgggctgcgcaggggctttggaacgcagtgttgccatcggcgtgcgcgcgtgtgtgcgagtgtgacagcggctgtggctgtggccgtggccgtgggaggcgg

SEQ ID NO: 404677 - DNA, 122 bp, Homo sapiens
taattgccctggccgggagccagactcctcaccgccgccccgttcccccctgctggggagcgcagaatgaccaccaggaggccaggaacaaaacgcttaaatgttgcatttattaaggaaat

SEQ ID NO: 404678 - DNA, 122 bp, Homo sapiens
ccacttgtccacgcagccaccaccggcccgggccagtccctgccagtccgtccgcctgtccgtccgtgtcctcagctctgtccacgcttcgataggcctgacgcagcccccagcccagggcc

SEQ ID NO: 404679 - DNA, 122 bp, Homo sapiens
tgtccccaggacctgacaatcttctcatagaaagtaggaggaccttcttggccctggccacgagggagctctggataaggggttcatatgaccctgaagagcatccaggtccttctgtccaa

SEQ ID NO: 404680 - DNA, 122 bp, Homo sapiens
gctctcatgaagcgagtctcagacctaaagtaaaaccccaagacttagctctcatgatgccggcagcagtcaccctcattgcaaaggcagtggtgccgagtgaggttcccgagtggatttta

SEQ ID NO: 404681 - DNA, 122 bp, Homo sapiens
catgtccttcctgaagcagtagagcagcccgtagttcttgagcagtgcgtcatcgttgtgcgattttgtgtcaaacttgctgtaggactgattgaagatctgcccagtccgggggctgccat

SEQ ID NO: 404682 - DNA, 122 bp, Homo sapiens
cgagctgccagggccgggacaggcagaagcctgccccgaggtctcacctctggagggttacgagctgtgccaggccggctacggtagagggtgtgcaaataccccgcggtcccaaggctcct

SEQ ID NO: 404683 - DNA, 122 bp, Homo sapiens
gaatttccaaattttgtagttattttaattcccagaaaatcggattctgtgggcccctctcgctgggggtggcaacagactcagggcgtgggcctgagccccagagtctgggagagtgagaa

SEQ ID NO: 404684 - DNA, 122 bp, Homo sapiens
cagagagataattttatcttgaagattgttaaattataatggtgattcactaccttgccacgtctctgagtcaaaaattaggtatttgtttaggaatcaatcataatctgcaatttggaaat

SEQ ID NO: 404685 - DNA, 122 bp, Homo sapiens
aaatgaacccagaattcagatctaaagcaacagacccttttcccgtcaggccccaggcctcggctggatctctctctcccctctgaaacatacacacactcatattgggtatttaatcatct

SEQ ID NO: 404686 - DNA, 122 bp, Homo sapiens
cgagggggcaggttagagccagcaggtccttggcactactgcatgccagaggccctctgccgggccccgggctagcctccaagtcctagactgcccatactttcttagagaagaaaccacat

SEQ ID NO: 404687 - DNA, 122 bp, Homo sapiens
acctcagggaacggagatttttgtggacccagctgcctggagctgctttcctgttccggccggaggaggtgaggcccaagacccctcctgggagcctgggggcagatagccagtgtttactg

SEQ ID NO: 404688 - DNA, 122 bp, Homo sapiens
aaacctttgattgcttttctagccgcagcctccggcccaaaggttttcggaagcaaacggcgtgggtgacatcaatagtaagggagcgttgaatccctagatgagattgcctggtttcatcc

SEQ ID NO: 404689 - DNA, 122 bp, Homo sapiens
ggggccccccgtgtccagggccttcatggggacgatgtccaccacttccacccatgcttccgccagggccttcgtgggggcgatgtccaccaccggcacccattcctccgccagggccttca

SEQ ID NO: 404690 - DNA, 122 bp, Homo sapiens
tgaagacttttaaagaagctattactttcctgggtagggtcagctttcctgccatggccccgttgaatgcagtcattgtcagcttcataactcagtgggctgatcatgtgtgtgctgatcta

SEQ ID NO: 404691 - DNA, 122 bp, Homo sapiens
ccgggtgaccgtagagggcagtttgacaagtctcagccccgggcgatggaagattttgcccgtgggaccgtcacgagccaccggtcatctccccgcgcccggctttcgggtcctcaggcctc

SEQ ID NO: 404692 - DNA, 122 bp, Homo sapiens
acctcccagggctccttgccttaggtggctgtagcatccctaccacccaggacactggtgcgaatgacacaactcaagttgggaggggaacagggaaggaagggatggatgggggtggtgta

SEQ ID NO: 404693 - DNA, 122 bp, Homo sapiens
agcaggacacaatgcatgagactgatcggcagtgaagccggactgcctgtgttcacatcccggctgcaccactcactaacagtgtgacttcaaacagattacttagcttctctgtgccctgg

SEQ ID NO: 404694 - DNA, 122 bp, Homo sapiens
cagggcacaaagaacagaggaactccaggaagccgactcaccaggttctccaaggcagatcggtgcttaggtaccaggagtttaggagtcgtgcagcagaaaacctctttatagggcctgct

SEQ ID NO: 404695 - DNA, 122 bp, Homo sapiens
ccctacccctgtccactaagtttcctttgctatacttgattaaagttcctcaaggattggcgctcaggcctcttttttcactgcatccacttaaggttcttttttttttttgagacagagtc

SEQ ID NO: 404696 - DNA, 122 bp, Homo sapiens
tagctatgacacatggcttggaaattaacctttaaccaaacatcttataagtaacgccagcgcagcttcccttgtgaatgtaaagagatccagggctcttggagagggacaagtgagagcca

SEQ ID NO: 404697 - DNA, 122 bp, Homo sapiens
gaccgaaccagggccagggatcccgggcaagaggagcgggcgctcaccttcccctagccccgccccacgacctacccaggtgagcagagacccgcatagctcagctttgtccacgctcatgg

SEQ ID NO: 404698 - DNA, 122 bp, Homo sapiens
tttaatgtcagctttctgaattatctttagtaatcaaatgaggaaattcacttcaccatccgtttatcatagataaatcacaacctactttttgatctttttcagtgagcatcaattattgt

SEQ ID NO: 404699 - DNA, 122 bp, Homo sapiens
gcaacaatcagacgtcagcgccctccagccaataacggttcacttacttacggagaccgccgagggacagaagcctctctcaggtgtttgcgcctcaaggaagaatcaagagggaaagggag

SEQ ID NO: 404700 - DNA, 122 bp, Homo sapiens
ccacatcacctgggttcaaagctacccccttgctaagatcttgggcaagacatttaacttcgcggtgcctcagtttcccatctgtaaaatggggatgatgatattaattctaatacccactt

SEQ ID NO: 404701 - DNA, 122 bp, Homo sapiens
cccaggaggccgaccgccggttcagactttttcttttctttaatccccgtccaagggatccgccctcaccccccaccccagccaccccaattccctattccctccccttggacggcgccggg

SEQ ID NO: 404702 - DNA, 122 bp, Homo sapiens
gtccatccgcggggtttccgacccccgcccgcggccggctcccggcggttcaagtttctgcgcccggaggacgcggccttagccaatcccagggctacagggcgcttttaaaatgcaggtac

SEQ ID NO: 404703 - DNA, 122 bp, Homo sapiens
gggggggaggagggccacgttggggcccttgtcaggggagagactggctgaggaagcgcccgccaggaagaagccagctgcagcgcctgtttcccaccgcaggtcatggttggcagctaggg

SEQ ID NO: 404704 - DNA, 122 bp, Homo sapiens
agtgtctctgcctggccactcatcgtctgggatgtgaggagcgcctatgcctggccaccccgtctgggaagaagtgaggagtgcctctgcccggctgccaccccgtctgggagatgaggagc

SEQ ID NO: 404705 - DNA, 122 bp, Homo sapiens
cctgacactgctggcctttgccgggtactcagggctgttggctggggtggcagtgagtgccggctcaccccccatccctacaagttccatgtggagccctatggtgaggctgggtggctttt

SEQ ID NO: 404706 - DNA, 122 bp, Homo sapiens
accgggtggccccggccgcgcgcggggggcgggggcggggtccccgcggacgccactgaccggcggcgcccgccgctccagagaacttagtactctgtcgagttacaaagggggactcgctc

SEQ ID NO: 404707 - DNA, 122 bp, Homo sapiens
cacagtaaacgttaacctaagccatcagaagccattaactccggtgacactacatttcagcgaaaccttcgcgacccaacccctcgctccctctcgcccaaacgctgggtcaaccccacgaa

SEQ ID NO: 404708 - DNA, 122 bp, Homo sapiens
cctctcggagggccggcggctgctggtgagcattccagcctcgttagggcaacctgttaccggagagggagccttgcccgaacggttctactgtgggcagggagcaggaccgcccctaaacc

SEQ ID NO: 404709 - DNA, 122 bp, Homo sapiens
ggcgccggggcgggccctgatatagagcaggcgccgcgggtcgcagcacagtgcggagaccgcagccccggagcccgggccagggtccacctgtccccgcagcgccggctcgcgccctcctg

SEQ ID NO: 404710 - DNA, 122 bp, Homo sapiens
taaaaaacccatgatattaaagacaaaaaactgagcatataggttttttgaacattacttcgataagcctctgtgactagactacacacatgaatgctaactggtaaggagtaatgggaaag

SEQ ID NO: 404711 - DNA, 122 bp, Homo sapiens
aggtaatctcacatctccatccttttgtagcccaggcctggagagaataattaggtgacccgctcagagtccgttgggataaagttgttctagtttttgttcactacgcctcctttcacgtg

SEQ ID NO: 404712 - DNA, 122 bp, Homo sapiens
gctgcgcgtggtgcttgcggtccagcgtgggttccgggtgggcgtgggctcggcggactccgcactcggagtggcggtgggccccaccggccccaggcagtgaggggcttagcacctgggcc

SEQ ID NO: 404713 - DNA, 122 bp, Homo sapiens
aaaggctagttctgcccaaaaagagatggctggactgtaaataatgattataaagaattacggtttatttttgcagggaaactagacttttgtccattcctcaaattgctgtccctaaccat

SEQ ID NO: 404714 - DNA, 122 bp, Homo sapiens
tgcagtccgagggtcttgagaagtgagctgtgtggcccagttgggggattttgtgaccaacgacatcctctaggagcagtagtagattgaaaaagtgcaacaagaaagccctgggattgctg

SEQ ID NO: 404715 - DNA, 122 bp, Homo sapiens
tctcgctgcggatgttcggcagccagaaggccgtggagcgcgagcaggagcgcgtcaagtcggcgggggcctggatcatccacccgtacagcgacttcaggtaccgcctccgggagggccgg

SEQ ID NO: 404716 - DNA, 122 bp, Homo sapiens
attagtgccgtctggagtatctggtgatcagcaccaacaactccagctctctgaggaagccggacacctgacgcatctccctggaaggacagagttaaaagacagtggaagatgacttggaa

SEQ ID NO: 404717 - DNA, 122 bp, Homo sapiens
tgtatttgtcgccaatgacactaaacattttcactgtcccaacccagacgcaccagctgacgaggagttcgtcctggagcccagagcaaatgcctgcagagggctggaccagggctgctggg

SEQ ID NO: 404718 - DNA, 122 bp, Homo sapiens
gccagagtctctctggcatatgcctagtagtggaaaagccggagctccccgctttcctagcggttgccaagtcatgcccccagtggctggaccactgtgctccccagcaggctccggggctc

SEQ ID NO: 404719 - DNA, 122 bp, Homo sapiens
cgcccggctacaccttaatccataggttcacttgttgcgcagccgctcttccacccgacgcgagggacgcctcagactgcgcaggcgcaagtattaactacttcacgatttgcgtgaacttt

SEQ ID NO: 404720 - DNA, 122 bp, Homo sapiens
aatagggaggaagtatttgcaattcatatctgacagaaggcttgcagccggaatctacaacgatcacctacgatccaatgaagacgaaaaacagcccaataacagagggcgacacacttgag

SEQ ID NO: 404721 - DNA, 122 bp, Homo sapiens
ccatcttctctttttaaaatatctcctccagccactaagttacctagtgaggaggaaagacgtttgcttgagttagtcgggattacattactctgtgcctcacatactatttctttcatctt

SEQ ID NO: 404722 - DNA, 122 bp, Homo sapiens
gtctgggagtgaaggggacagccaagaagagccaggccatgaccttgtcatcagctgatgcgtaacccagcaaggaactcatcttccgggagggtggaatttgggctaggggcctctgaaag

SEQ ID NO: 404723 - DNA, 122 bp, Homo sapiens
ggtttgaatgtaggtccattttcatcccacttccaaatgctagcaacgtagggaattatacgggggtttcctttcctgctgggacacaattctctgaagcacagttaggatgaaaacacgag

SEQ ID NO: 404724 - DNA, 122 bp, Homo sapiens
ggcacgctgctgcgggtccacgactcctcaagggaggggcacctgatccaactctccctgcggctatttaccagaagctaaaaataacccaagagtgacagggagatggggccgatttgtaa

SEQ ID NO: 404725 - DNA, 122 bp, Homo sapiens
gcagttacgcggatggttcctttttaaacgcaggagctgccgtcatcttctctcactcaacggtcatcatggaaagtgaaaacgacggtgcggctcctcccacggaggagagacaagctcac

SEQ ID NO: 404726 - DNA, 122 bp, Homo sapiens
caaagtcctaaataggtcatgaggaaagtgatggcccatgcgatagaaatggacaattgccggagcccctagaaggcctaaagtaactgtgtggcaggcaagtaaatttcctgccccagaaa

SEQ ID NO: 404727 - DNA, 122 bp, Homo sapiens
attaaaccctccagtgccagaggtggagaaagaaaaccctgtagcaggtgtggttgttgccgtctttgcagtgccaaacgtgaacccgcctgtaggggccccagtgcctccaaaattaaacc

SEQ ID NO: 404728 - DNA, 122 bp, Homo sapiens
gtttctgcagctgggcgggggaaagtcctttcctccctgcggtcccgggccaccagcccccggtgctgggtcggagaagcctaaccgcaccctcccaggcggccccttatctcattgtctcc

SEQ ID NO: 404729 - DNA, 122 bp, Homo sapiens
agagacttgacaactccctctacctaaccagctgcccaactgtagaaactaccaacccaccgaccaacagggagagggaacaagcaccctcaagggggtcaagttctagaccccatgtaata

SEQ ID NO: 404730 - DNA, 122 bp, Homo sapiens
tctacagcctgtattcttagtggtttatgctccaatttctatacacattgttagtagcagcggtgtcttcatgagactaattccgtggtgtgatattgtttgaggatgcttatgttcgtagt

SEQ ID NO: 404731 - DNA, 122 bp, Homo sapiens
gcccagcagcgagtaaagactcgaaactgagggagccagagccctagtcactctgctggtcgagggtcggaacccctgggggaaagaggaaatgtggacgaaggcagcccttcctggagaca

SEQ ID NO: 404732 - DNA, 122 bp, Homo sapiens
ggtaggggcgggagcggctcgtgcggtgtgttccaggcctcgcgcgcgcggcgacggcgtcggctaggactcaaaccctggagtttctgattcagtagctctgggatagagaaaacttccca

SEQ ID NO: 404733 - DNA, 122 bp, Homo sapiens
gaccgggagatcttacgccatgatcctcacaagctgctggaaggctgcctggtggggggccgggccatgggcgcccgcgctgcctatatctacatccgaggggaattctacaatgaggcctc

SEQ ID NO: 404734 - DNA, 122 bp, Homo sapiens
ggcgctatttgggttggctggaggagctgtggaaaacatggagagattggtgctggagatcgccgtggctattcctcattgttattacagagtgaggttctctgtgtgcccactggtttgaa

SEQ ID NO: 404735 - DNA, 122 bp, Homo sapiens
tgctcccgtagcataaatgggttcaaaatgggacagaaaatgcttatatagccttaggaacgagggaaagaagcttcttataggtcaattacagaggtgctaaaccttgtcctaagctgtta

SEQ ID NO: 404736 - DNA, 122 bp, Homo sapiens
tataaaatatgtatatgcctagatttatatatctgcctgcctattcaatgtctttcaattcgatttccgtatctaatagcattttgaatgtagcctgtcaaactgaatttctgatctcccct

SEQ ID NO: 404737 - DNA, 122 bp, Homo sapiens
ctgtctagatcaatttctgtcttgatgaggccgaggtctgtgacagctccgagcgtcctccgtggaaggaagcttcctcgcttggtggggcgcatgggcaaagatgttgaggggccacgtct

SEQ ID NO: 404738 - DNA, 122 bp, Homo sapiens
tcagctaaggcagcacccagtacacagaagacagaagacatactcagctaaggctgcacccgatacagagaagacagaagacatactcagctaaggcagcacccaatatacagtagacagaa

SEQ ID NO: 404739 - DNA, 122 bp, Homo sapiens
acgctacaactcacacgctcacgggcagaggcgaggggcgggggtgatagaccccggcggcgaacagacttggcgcaccgaagattcccaaaggcgcgtgctccgctccctctgggtcctgg

SEQ ID NO: 404740 - DNA, 122 bp, Homo sapiens
tgccccactatgcctggcccttcctgggagattaaacaagaggctgtaggtgaaggtgggcgacttgtccatctccaggaaatggccctggggtcagagagagagagagtagtggtcgccct

SEQ ID NO: 404741 - DNA, 122 bp, Homo sapiens
ctgtagcacgtctgggcagtccacgagggcaggcgggcgagtcccgtagtttgaatcccacgtcccgtaaggacctagttgccaagtggtgaaaggcaggggtgtggatggaccatgctgag

SEQ ID NO: 404742 - DNA, 122 bp, Homo sapiens
tagaaatgtatcaatcattttaatcgcccagagagctagctagctaaaagaaatttgcagcgattccttttctataagagttcttttatcaaaaacaaaacaaaacccacccaccgatgtct

SEQ ID NO: 404743 - DNA, 122 bp, Homo sapiens
attttacttttaaatttcaagacacagaaacaaagaacatactgatagcacagtggctcacgcatgtaatcccaacactgggaggtggaggcaagagaatcacttgagtccaggattttgag

SEQ ID NO: 404744 - DNA, 122 bp, Homo sapiens
ccaaattctcaggagaaatcccctaagagtcaggtacggaggtcactgcagcgacttcagcgtgcagagaacgcggggacctaggaagaggacgctccagcccaactgagcgtctctgattg

SEQ ID NO: 404745 - DNA, 122 bp, Homo sapiens
aaagggatcacacgtgggatgtcccagcagggcctaagccaagtccatcagatgtctcaacggcttatgaaacaaaaacagaggactgaagtctgttcacagtggcccatggttgggcagca

SEQ ID NO: 404746 - DNA, 122 bp, Homo sapiens
aggagtaagtcagtggataaataaaatatggatcatatacctgacgttagtagctatccacggtacagcactatgtgccaggcactgttctatgtgcattttgtgtgacaaaacaaccagag

SEQ ID NO: 404747 - DNA, 122 bp, Homo sapiens
gtgattcagcgcctttccgccgccgcggttaccacggcgacgcgcgcgcacgcgcacacacgccctcagggatgtggggcgcggcagccgcccctgcccagctcccctgctcagctcccctg

SEQ ID NO: 404748 - DNA, 122 bp, Homo sapiens
tagtgttggacaaagcactggatcgggaggagcagggagagctcagcttaaccctcacagcgctggatggtgggtctccatccaggtctgggacctctactgtacgcatcgttgtcttggac

SEQ ID NO: 404749 - DNA, 122 bp, Homo sapiens
ccattccctcaaatactgtcgcccttttcccccgtgagctgcatggccttttccttggtgcgggggcggtgggggggctgttttttttttttaattttttatcttttctgctgccggcacac

SEQ ID NO: 404750 - DNA, 122 bp, Homo sapiens
accccggctctagtcggcctctggagatctgcagctgggttattttacttctgaaacggacgacacctgccccgcgcaccccagcggctcctccacacggagagatggtgtcagtcaaaggc

SEQ ID NO: 404751 - DNA, 122 bp, Homo sapiens
actctgtctcaaaaaaaaaaaaaagattaaatatgtgtacagtacctgtaccatgttaggcggtcagtaaacatttgtttaactaacaactgataaggatagtaaagaagtatcagaacacc

SEQ ID NO: 404752 - DNA, 122 bp, Homo sapiens
caaattccccagcttgggaaatagcccttggtgtgggttttatctctggtttgtgttctccgtggtggaattgaccgaaagctctatgttttcgttaataaagggcaacttagccaagttta

SEQ ID NO: 404753 - DNA, 122 bp, Homo sapiens
cggcagcaggagccagaggctagaccgcaggcagcgcggtgccggggttcattcggtccgcgcatgtatccggggttcctcgaggggctcacagcctaagccacagacaggtagagcgcggt

SEQ ID NO: 404754 - DNA, 122 bp, Homo sapiens
gccggagctcgtgattgactgagtgattaataatggaaaacccttacttcagtgtttccacggccctcacccacttccccagccggggcggccgtctgctcagcctgccagagacctttcca

SEQ ID NO: 404755 - DNA, 122 bp, Homo sapiens
aaagtggaaatgactccctgggtggaggggtattgacggacccggagggcacgcagaggccggggagcatgaccaagaccatccacccattcccaacgcaagcattcctcgggaagaacgca

SEQ ID NO: 404756 - DNA, 122 bp, Homo sapiens
gccacgccgccgccgcgccgtcgcccatcatcaagttccccggcgatgtcgcccccaaaacggacaaagagttggcagtggtgagttgctgcgctggcctcaaggaaccacgtttagacaaa

SEQ ID NO: 404757 - DNA, 122 bp, Homo sapiens
cacagccacaggcaccaccaccactgcagccgccaccgcccctgcagctaccgccacggccgcaccgcccgcccgccagccccgccccctggagcccagcccattggcccgcgctcccgggg

SEQ ID NO: 404758 - DNA, 122 bp, Homo sapiens
atccatccacataacattctcgttctcaccttcccaaactgaaaccctgcccctggtgaacgcccactcctcactccccatctccatctcccctgtgtcaggcttcttacctgttccacggc

SEQ ID NO: 404759 - DNA, 122 bp, Homo sapiens
gtttgagtgcggtttccctgcagctgagggccaggtgccgccagaggtagctcttgaaggcgctttcccaggtggagcggccggcagagtagaaacacctgcgctcagagtccacgggcggc

SEQ ID NO: 404760 - DNA, 122 bp, Homo sapiens
ctggcctgaggggtccggagaggggcctgtgcggtgttcggcgccgcggaccgattctgacgccttagttgctgttgcaggcagagtacgtccccacgaattgcccttgaactttttgcgag

SEQ ID NO: 404761 - DNA, 122 bp, Homo sapiens
acaggcatgagccactgcacctggctgcaaattatttgtcttacatagagatctctaatccggttatggatatctaaaacttgcctcagtttttcctttgtcttttagtaaagcaactggga

SEQ ID NO: 404762 - DNA, 122 bp, Homo sapiens
cagggagggggttgggcatttgctgaaaatagtgcagtgacctctctctcccaccagcgccgcctactaaacctgacctgctgcctgccaccagcccgatcaattcaacacagatgtggccc

SEQ ID NO: 404763 - DNA, 122 bp, Homo sapiens
ggtggaggtctggacagcgctgaccctggagagcaatcaactcaggttgcagctcaggggcgacaccggacatggccttgctgctggcaggcagccatatgtacccatctcgtgggccgagg

SEQ ID NO: 404764 - DNA, 122 bp, Homo sapiens
cgggtgacaaaacgagactctgtctcaaaaaacaaaggaagcagtaatcacttttaattccgtttaaccagagttcacttgagcccctgtgttgggcccaatgtccagagtagctggcctat

SEQ ID NO: 404765 - DNA, 122 bp, Homo sapiens
cccaccagaaggaagaaactccggacacatctgaacatctgacggaacaaactccggacacgccatcttttaagaattgtaacactcaccgcagccgaaggtctgtggctccagcgagacca

SEQ ID NO: 404766 - DNA, 122 bp, Homo sapiens
ttgactcaggaggtaaaaatgtcaacaggccacaacctccagggctcctggaattggagacgaagccagttctgagcttatgcaaccataggacagtgagagagggccatggactcgattta

SEQ ID NO: 404767 - DNA, 122 bp, Homo sapiens
agctactggagaggctgaggtaggaggatcccttgggaccaggagtttgagcctatagtgcgttatgatcccacctgtgaatagcaactggagtctggcctggaaaacgtagtgggaccctg

SEQ ID NO: 404768 - DNA, 122 bp, Homo sapiens
ctctactgttcagatgaggaagtggggactccaagtggtcaaatgactagttcaaggtcacgtagccagggaggggcacagacaaaactggaatccaggtctgccagagtccagagcctatg

SEQ ID NO: 404769 - DNA, 122 bp, Homo sapiens
atgacagggaaggcagcctcacaggatcagggtccgcaggctaacacctgcctgtctccacgtggccttctccaaatgcaagggaaaatggacactccctgctttctttcacaggggctgga

SEQ ID NO: 404770 - DNA, 122 bp, Homo sapiens
gcactctttagcccttgggcggtcgatgagaccgggcaccggagagcagggggcggcgctcgttcgggaggctccggccgcacaggagcccacggcaaggggtgggctgggacgcaggcatg

SEQ ID NO: 404771 - DNA, 122 bp, Homo sapiens
atggcactcagcgctctcccctgagggagtccctgggcctagccatcccctcactattcccgacccaaagggtgacttttcatctgaacttaaggtgggagatatttttaacttttttccac

SEQ ID NO: 404772 - DNA, 122 bp, Homo sapiens
cgggatgagagacactctccagctcagggggataatgtggggtgtccgagacgctcatgccgaggtttgctggatagctgcaggtgagcagaggcaagacagcctggcgtcagagctgggcc

SEQ ID NO: 404773 - DNA, 122 bp, Homo sapiens
cactctccgcgccagcacaggccgccctgcatctggagcgagttagggttggcggcctggcgggcggcggcgtgagctcatcccggcccgccccgctgcggtttccacgcggctgtgaaggg

SEQ ID NO: 404774 - DNA, 122 bp, Homo sapiens
tgactgacagcccggagcatcccggacatgccaccgtgagccgggctttattccacagggcgactttgcttcccgtgaggagatgcagcacgtgagcacagatcaaagggtgtcagcaacta

SEQ ID NO: 404775 - DNA, 122 bp, Homo sapiens
ggacgggccaggtcgcccacagtctccgggtccgagatccaccccgaagccgcgggaccccgagacccttgccccgggagaggcccaggcgcctttacccggtttcattttcagtttaggcc

SEQ ID NO: 404776 - DNA, 122 bp, Homo sapiens
ggctcagtagcgcccaagccgaaggcgaaggggaagaggaacgaagtgtgggatggggggcggcccctcattgggggttcaggtagggattggattctgcagggaatgctccaagggttgct

SEQ ID NO: 404777 - DNA, 122 bp, Homo sapiens
cccacccaacccggcgggcccaccctctgcacccacggcgaaagcactctttctaaaccacgccccggatgtcccgcctccagcggctcggaggtcttcacttattggcctccccaaaccaa

SEQ ID NO: 404778 - DNA, 122 bp, Homo sapiens
ggctctgacatcaagaaaatctgagttttatatgactgttccttaattgagggcaaaggacgcaagggctaaatctctgcctggaagtgaagctcaaaaatgcctttgtttatcaggctgtg

SEQ ID NO: 404779 - DNA, 122 bp, Homo sapiens
taggggaggagtagcggtgcgcgcggcctgtgccgaggcaacgcgggcgcgtccacctggcgactgcgcgccccggctcctccagtacccgcggcccccagacccctcgccgcgcggcccgt

SEQ ID NO: 404780 - DNA, 122 bp, Homo sapiens
agtgttctgctaaaggtaagaagaaaacatcataaactgtacaattcagttttcatggaacgtccagaaaagggaaatctcaagagccataaagtggattagtgcttgcctggggctgatcc

SEQ ID NO: 404781 - DNA, 122 bp, Homo sapiens
gggtttcagttccggcctgctctgaggacactggggggccggccctgtgtttgcttggagcgcccttcagggagacccgtggctccaggggctggcgctgagtgaccacaggcaaggtctca

SEQ ID NO: 404782 - DNA, 122 bp, Homo sapiens
ccatctccctctctgtgcgtgtgccttttcaactaactttgggaactcgtatagacccagcgtcgctccccgcgccgcctcgcctccactttggtttcccgcgtcctgcccgccctcttcgg

SEQ ID NO: 404783 - DNA, 122 bp, Homo sapiens
ttcctgccatagcgcagtgaccaccatccaagctcagatctgtgtgtctacgctcagatgcgtcggtggctgggctgccctgctcctggtcaggccggagcccgtcctaagacacacgcttt

SEQ ID NO: 404784 - DNA, 122 bp, Homo sapiens
ccgtctcaaaaaaaaataaaaaagaagaagaataaagtaaacctacccacagctctcaggcgagaaacatccatctgttggcctgcaagaccctacagcaagcagccctcacccccacccta

SEQ ID NO: 404785 - DNA, 122 bp, Homo sapiens
attgggatctttcacatctgaagatatataaggcaaaacttacttagctccacgtcatgtcgtacagtatggatgaataactatggacaaaattctctctcactttaaactacagttattta

SEQ ID NO: 404786 - DNA, 122 bp, Homo sapiens
gaccgcctcggggtgtaggcagaatttcccggcccagctcccctctgaccagatagcggccgagaaacaatggttatctgctccactgacgccaggatgtcttctccgtgcccgatcccgga

SEQ ID NO: 404787 - DNA, 122 bp, Homo sapiens
tcaactctttcagcgcttcctggaactcaccaccgttttggggaccaagaggcggggctccgcgagcagggtgcctattggcctgagggccggcgggctctgggcgctaattgggcggaggg

SEQ ID NO: 404788 - DNA, 122 bp, Homo sapiens
aaacgcgggtcgccatgcgttgggcctcttgtcgctcatttctgcgctgggctttaggcgcgtgctcgccggagggatgcgggaggatggagcctggcgagggggaggcgaagaggcatccg

SEQ ID NO: 404789 - DNA, 122 bp, Homo sapiens
aggacggcgatccgcgccctggaggatccgccggccgcccggctccactacagctccagccgcctgcagcggggccctcctgaggccccagaggaagagaccatgaaaggtaagggcggcct

SEQ ID NO: 404790 - DNA, 122 bp, Homo sapiens
tcgcctccctccctcctagggatggctcccagtgtctctggccggggcctgcctctcgctcgccgctccttcccggcaacggctgccattttccgcccaggcaaggtcctgggcgcggctct

SEQ ID NO: 404791 - DNA, 122 bp, Homo sapiens
tcaactggccttttagtgctttgctgctcgcgggagggctcggcggggcggtgtccgcagcgactccgcccttggcccgggtctctttcccgccgggaagccccgcggcgcccagagcggcg

SEQ ID NO: 404792 - DNA, 122 bp, Homo sapiens
ctgaagagagacagacctcctgagcccaagtccattatgccggaagaatgactgtggccacgtgtggaacaattgtcacccatctcagaagctactgttatcctgggctaagccaccctggc

SEQ ID NO: 404793 - DNA, 122 bp, Homo sapiens
cctccgcagctgctgacccaggtgttaagcccctcactgccgggggccagcagggccggccggcaggccagccgctccaagtgcagggcccgccaagcccacacccacccggaactctagct

SEQ ID NO: 404794 - DNA, 122 bp, Homo sapiens
cgggagccttgccctttctcctgtagcctggggcttctctttagatctgcgcttttcgcccggttgaccaaaactgcaaggcaggtcagaaagacactggagtataatgaggatgtccgggt

SEQ ID NO: 404795 - DNA, 122 bp, Homo sapiens
gaggcgaggcacagtgtcttctgtgtccctggagccaagcgcatggctcagcccaggtcacgtgtccagtgaatgggtggcatctgagcctcctgcacctgtggtcagactttcccccatgc

SEQ ID NO: 404796 - DNA, 122 bp, Homo sapiens
ctgcacaccctgggggagggggctacccaccgggtgggaaaacgctttgtgagcgctcggcgcggctgaggcgcagggctcgcaggggctccggggccggacaaagctgacccggacaacgc

SEQ ID NO: 404797 - DNA, 122 bp, Homo sapiens
gtcgggtttctagagaagccaatcagcgtcgccacgactcccgactataaagtccccatccggactcaagaagttctcaggactcagaggctgggatcatggtagatggaaccctcctttta

SEQ ID NO: 404798 - DNA, 122 bp, Homo sapiens
tcagacgttttctccctaggcgcgatcacgtgagccagggacagggggcggagcacgctgcgcggtcacgtgacggccggcgtgggcggggctgcggactggcgcagcctggagggaggcat

SEQ ID NO: 404799 - DNA, 122 bp, Homo sapiens
tgccaggtcttacccttcgcatcccctggtcctcgggacagaagctcccttggcacctctcgcccagctcaggggctggttgtccgctagaacgaaatatcccccactgactacggagagct

SEQ ID NO: 404800 - DNA, 122 bp, Homo sapiens
agttactcagaatctctgtgcccacatgccctgagtcaaaaaataggaatagtggtagcacgtacctcataggtttgctggaaggattaaatctagtaaaatgccagctgttgtcaaaccta

SEQ ID NO: 404801 - DNA, 122 bp, Homo sapiens
atgggggttccgggaagattcccaggaacttccggcgacgagggaattcctggggacttccgtgggagagaggagacttccggttgattaagggggtttgtctgagggtgggggaatgaact

SEQ ID NO: 404802 - DNA, 122 bp, Homo sapiens
gaggaagaggaaaggcacgggcggcggcgctgacgctgcagcaaggatccgggatggaggcgccggcgaggcgcgcacgcggagactgcgcctgcgcgctccacctgagggggcgggagggc

SEQ ID NO: 404803 - DNA, 122 bp, Homo sapiens
ctcgatggcaggttttaaaccccagggctgcagggcaggggggtgttccgtagccacccacgggagaagctgctgccacaggcgaacagtgcagtgtgttaaaaggggaatttgccataggg

SEQ ID NO: 404804 - DNA, 122 bp, Homo sapiens
accatttccatgcgcgctctgtgcacaaggctggcctcacgttggccagcgactccctcccggcgagtcagttctcaacttgcttcagcagaggtgcatatggtagggagtggcccaacctt

SEQ ID NO: 404805 - DNA, 122 bp, Homo sapiens
ccactggctgacggcccccgccccccgcccacgcccgcgccggccgcgccagctgacccgcgcctactggcacaaccaccgcagccagctgttctgcctggccacctatgcaggcctccacg

SEQ ID NO: 404806 - DNA, 122 bp, Homo sapiens
gataacgggaacgtccccagtacactgagagcagcctacagaaatggctgagcctcagctcgcggggtgcgtttggaagcgcagagagcaacttagattcgggacaagaccgtagagacgaa

SEQ ID NO: 404807 - DNA, 122 bp, Homo sapiens
agaactaatgactcaaagaagtgggcaccatgaagtgttaagtctggatggtatggttggcggcagtggctggagtgatgaatttctgtagaccccaagacagtggtattagggtgcctagt

SEQ ID NO: 404808 - DNA, 122 bp, Homo sapiens
aactcttacccaggctggtctggtggtgtgaacccaggttaccttttacatcctgagtgacgcgtaacaagcctctacagtctaaatttcaaggtctagttcctcttgagagggcttgccat

SEQ ID NO: 404809 - DNA, 122 bp, Homo sapiens
ataccagattgcagtatgtttcaaaggtatgggagaagagaaagtgaagcttgtgaattacgattttgagacccaatgaggacaagaatacgaaacagtaatgggggagaggggtataaggg

SEQ ID NO: 404810 - DNA, 122 bp, Homo sapiens
gggaaagcccatggcattgggaatctcatgggggcgcaccccagttcctcagctcactcccgcgcccactgcaggcccttcccatgctcacaggggtctcacccagggtctctccctccgtg

SEQ ID NO: 404811 - DNA, 122 bp, Homo sapiens
tactcccatatttatggcttatagtgctcttggccaaagtgtttgctagtcctaatctcacgcattcctgctgtgccccaggaccctgtttgtaactcagtgttagttgtctccactgggaa

SEQ ID NO: 404812 - DNA, 122 bp, Homo sapiens
tgtgatgctgcccattttaacaccaaatacagtgttcttgtcacagtgtaggtgggtgtgcgatttgtttattaatgggtgaataatgaggtcctaggagaaacctaggtcaaatcctgctc

SEQ ID NO: 404813 - DNA, 122 bp, Homo sapiens
tcgagcccctggtccctaatgtgagctgtggctgcaggtgggaggtgcgggttggaggcacgtgcagggagagagacgcggtgcgcacgtgtgagctcagcccgtctgacccacgtgtgatg

SEQ ID NO: 404814 - DNA, 122 bp, Homo sapiens
aaactcttgtcaccgatgcattttcatctaattttttccataatgagagagaaggagacgcgttggtgactgcaatagggccacctccctcaaattacgttgctctctatgacccatcctca

SEQ ID NO: 404815 - DNA, 122 bp, Homo sapiens
ttctggtggtttctgttccctctatgaacttgaagatgagtcatccaggagaggggtttgcgtgaggtcggtgacttccatgtgaaaaatttaacattttccccatggggcctggggaagag

SEQ ID NO: 404816 - DNA, 122 bp, Homo sapiens
gagaggggttagacggagggccaggctgaggaggacaagggccctgggcatggctcctcacggcagcaggggctgctcaaaggcacggccccggaggacccctccaccctcccctccacacc

SEQ ID NO: 404817 - DNA, 122 bp, Homo sapiens
tctcctgccactcagcccccctaggtcgggatcgtttggtttcggtgtcaggaggctccccgggctcagagtcgttctttgtattccgcagtccaacctggaaagcatatgctgcacctctg

SEQ ID NO: 404818 - DNA, 122 bp, Homo sapiens
cacctgagccagtaaatttacattttaagatctcatttcaaaaatcaaacaggctgggggcggtggctcatgcctataatcccagtactttgggaggccaaggcaggcggtcaccagaggtc

SEQ ID NO: 404819 - DNA, 122 bp, Homo sapiens
caccctgccctggctcagagagaaacgggcacacggggccctggatccccgttcctggaacgcctctctggatgctcactgaggacatttccccgcggggccttcatgcaacgccaaagcca

SEQ ID NO: 404820 - DNA, 122 bp, Homo sapiens
atttcttccccaggtcctgaagtttgagccaggcaagtggcagtgcccctagtgggcagccgttgccaatggatgcctttaggagtggtgccgagagcagtgtggtccactctggcctgggt

SEQ ID NO: 404821 - DNA, 122 bp, Homo sapiens
gaccgacgcatcttctcacgtgggccaggctttcacgcagccaaagcagatccgcgggggcgaaaacgattgacaaccggcctcatgacccaggcagagacacagaaagaggttcaacaaag

SEQ ID NO: 404822 - DNA, 122 bp, Homo sapiens
acggaagagttgaaatcagctgactgggtctcgtgacagcctgggcggtggcgacgcaggcgtattagagcgcgctcgctcaaagcctgagcgaagatggcggcctccagagtgaaactctg

SEQ ID NO: 404823 - DNA, 122 bp, Homo sapiens
cctctcacgctccaggttgtgagcgagtatctccccactttaacaccctacaccacaccgcgcccggccacaagacagctttacaacatacacaaccctgacgaggaaacgtgttcaaaacc

SEQ ID NO: 404824 - DNA, 122 bp, Homo sapiens
aaatctagaatccaaacatttctcaccatctttccctagaaactctttggcgcaaaccaccgtcaactgttctcctccctcagattattgtggaaatctcctatgtggtcttcctggttcca

SEQ ID NO: 404825 - DNA, 122 bp, Homo sapiens
tccgcgggctgcaggtgtcccggcctctggcggcgccggtgcggcccggaggtgggagcccgcggagccactgcagtagctggagtcccgccgagtccccagccccaaggcagggcaggagc

SEQ ID NO: 404826 - DNA, 122 bp, Homo sapiens
catcactgttagatttggggttgatacccgtcatcactgttaagacttgggattgatacccgtcatcgctcttagactcggggtcgatacccatcatcactgttagactcagggtcgatacc

SEQ ID NO: 404827 - DNA, 122 bp, Homo sapiens
caggatggatttcctggggactcatggaggtgccctgccgagggagactgatgtttccgacgttgagtcctcatttgtttgttcactgaacgcaatgttcactttctccccgcatccctggg

SEQ ID NO: 404828 - DNA, 122 bp, Homo sapiens
atgggtctggttgacagaggaatcagaccatcacttcctccaccaggtcccacccaccagcgaggctgcagttcttgttggacagctacacttccctgttgctccatcctcttgtccttctc

SEQ ID NO: 404829 - DNA, 122 bp, Homo sapiens
atggctcaactcacatagcaccaacgggcgaagcgttcttctgagcgctttccgagtcatcggtcctcagagcagcccctgaggcccgcaaggaagcggggctccaagccctgccgtgctcc

SEQ ID NO: 404830 - DNA, 122 bp, Homo sapiens
acctatgggggacgagggcggggagcccgaagccgggaattccgcagttaccgagagtttcgaggagatgatgggcgtggaggtgggacagggggaccaaaccaccctcctgctccccgagg

SEQ ID NO: 404831 - DNA, 122 bp, Homo sapiens
gtttagattaattgaaaccaattataacatcccttaatttataaagtgaccattaagtcacgtttgcctccaacaatcctggtttatacctattgtccctgagtcattatttatagtactct

SEQ ID NO: 404832 - DNA, 122 bp, Homo sapiens
cttgcaaatgttccatgtatctggacttggcctaagccctttttatgttcagtgtcatctcgttctccctaatattaagaaaagggggttgcttgtaggactgcttggctatgaggaagcct

SEQ ID NO: 404833 - DNA, 122 bp, Homo sapiens
tcttcttttgtctccacagttctgtgagattgcctgatgctccgctgctatccttacatgcggtcttctctttggcttcctcaggaaacagcaatgcctggaattcttggctgccttgacag

SEQ ID NO: 404834 - DNA, 122 bp, Homo sapiens
tgtagccaggatgggatgtgaaaacagaaaacaacgtccaaaaatgctggcagcacagtacgctgtagagtattggttgtttggcctcgtgattgcatggctgaccggaaaccacgatttgc

SEQ ID NO: 404835 - DNA, 122 bp, Homo sapiens
ttaatcattcatctcatcagttcagcaaagcaaatgccctcaatggtttcttttgtgattcgattattatgggatcagaatgtatcttattcctctgggaaaaatgaaacataaaaatttca

SEQ ID NO: 404836 - DNA, 122 bp, Homo sapiens
actgttcccgctgctagggcacggctgagcgcgggcaccgcgtctctcctcgactcgcaccgcctatgcgccccagcctagccaggaatactgccctccccggactacagccctgctgcgtg

SEQ ID NO: 404837 - DNA, 122 bp, Homo sapiens
tcagcaggctggggtgggtagcgaagtctgtatttcaaatgagcccctcaacccaggtgacgcaggcggtgtggggaccgcatccggagggcgacctggagccgactgacttcacaaaggcc

SEQ ID NO: 404838 - DNA, 122 bp, Homo sapiens
cgcatccaccgtgagcgcgaggagctgaggcgccagcaggaactgcgctatgagcaggagcggcggcccgcggtgcggcggccctacgacctggaccggtaagcagatccatgctgccctta

SEQ ID NO: 404839 - DNA, 122 bp, Homo sapiens
aatgattctctagtaaaattctcctttttttcctattaaaatgaaataatatttttttctcgttttaaagggaaaatggattaagttaattgatagaatcatctcaattttctgtatttctc

SEQ ID NO: 404840 - DNA, 122 bp, Homo sapiens
gggtctctctcctctcctcccacacctgcgaaggtgaacaccctgggttaggatctgctgcgaggaagctggccccatacctgggtcatccatgttaaaagacacccaatacgcagacccag

SEQ ID NO: 404841 - DNA, 122 bp, Homo sapiens
caagctttaacaggggtcaactcatggatgatctttttttcagctgtacctctacatacacgcacacacacacaagtgtacccattattttggtttttgggtttttgtgggtttttttgaaa

SEQ ID NO: 404842 - DNA, 122 bp, Homo sapiens
ggatctgcctgtgagctccgttaacgtgagagtataagtgagcgcagctcttcccatggccgtgaagactgtggcagagcgtggcagggggtcccgtcatcccccagtcactgcaatccctg

SEQ ID NO: 404843 - DNA, 122 bp, Homo sapiens
ccgacagggaaccccagccacgggactgggtcctcaccagcctacaggggacctgggccacggattccgatcaggacgcatggaggacatgccctcactggccccagttcttggtgccaacc

SEQ ID NO: 404844 - DNA, 122 bp, Homo sapiens
cgcgtgtagggaggtgatcggctgcccccgtgtggtgcacggtagaactgcagctctcagcgccaatgcagggaacgggttgggggcgctcagcccctctagcctacccccaagacccccac

SEQ ID NO: 404845 - DNA, 122 bp, Homo sapiens
gaaccctggcctggcaacagctgcggacatcttcccgccagtcttcaaactcaaacctcccggcccgccccggaaccatagagttctccgtggcttaagtaacccgaaagccatagactcgt

SEQ ID NO: 404846 - DNA, 122 bp, Homo sapiens
ctgcgaaaattgccccttaaatgtaactaaccctaaaacctcaacagtatcgtggccaggcgtggtggctcactactgtaataccaacattaggcataggcgaggggattgaggccaggata

SEQ ID NO: 404847 - DNA, 122 bp, Homo sapiens
atattttcatgagccttgatgaaagcactgaaggaattcaacttggggaaacttcctttccggtccatcatctttttaaaacatattaacttttaattttgtttttaaaaataggagccttt

SEQ ID NO: 404848 - DNA, 122 bp, Homo sapiens
acattaaaggtacccagaaaatgctgatgaagaacagctggaggacattaaatgtctggccgaggttaaaaccttttgttttaccataggccccagttagaccagctacagactaactgatg

SEQ ID NO: 404849 - DNA, 122 bp, Homo sapiens
ccagccgaggggagcggctgccgggaggtgcgctgagcagggtccgcagctaaggtccagcgcgatccgagcgcccaggaccctgcggccgtggaggaggcgtgccctgggaaggagccgct

SEQ ID NO: 404850 - DNA, 122 bp, Homo sapiens
cggccagcgagggcagatggaagagtatgaggaagagccctctcgggggtggtggcggctcgggagcctccagtcaggccgcctgcctcaaacagatccttctgctgcaattggacctcatc

SEQ ID NO: 404851 - DNA, 122 bp, Homo sapiens
atactcttcaaagccggcagccgaagagctgagcagtagctgtctgtggagttcagcctccgctccctgcacgcctgccctctgcaggggatggagcaccgtttccccacttccccacctgc

SEQ ID NO: 404852 - DNA, 122 bp, Homo sapiens
tttcctatttcgcctggctagcgtggatttagggagcggcttctgaaagaagtatacacccggtggcacagaaggtgcaaccagcagccagaggtcatctcgccctcccggcaggcttctcc

SEQ ID NO: 404853 - DNA, 122 bp, Homo sapiens
tccctgagattcacccggaacaagggctaagcggcccgcggagggcgctaggaaaaggcgcgacaccaagagcgagacagggacttgctgctccttaaaggggccgctggccgatttccgca

SEQ ID NO: 404854 - DNA, 122 bp, Homo sapiens
gggtccctgtgccgctgacgtcccgagcagtgctgggaagtataggctgtgttgtcacgccggtgtcagtctgatgaagattggcatcaggtaagctgtcattcatttccatgtcagagacg

SEQ ID NO: 404855 - DNA, 122 bp, Homo sapiens
agagctatagcaacttgtaattaagcaaaaacaagctgctcaggaggcgtcactaggctacggtttgttgttctaacactcaccaccacatagcacatgcttttctattttgcagaatgcca

SEQ ID NO: 404856 - DNA, 122 bp, Homo sapiens
tcagttctgagtccggataccccggcggggttggacgggatagccgtgacagggagtccccgggcggggacaaggtccgcctctcacctgggtcctcagcaactgactcccggagcccactc

SEQ ID NO: 404857 - DNA, 122 bp, Homo sapiens
tgaaaaggagacatgcatttattcatttaacaaacagttactaagcatctattatgtgcacggtgctgagataggtgctaggaatagagcagtgaataattcatagacttgtaattaatcat

SEQ ID NO: 404858 - DNA, 122 bp, Homo sapiens
cagcgcgcccgccctggggctgaggctcaggggcaggggccgtgcgggggccggcaggcgcgggcggcggcgagcgcggctctccggacccctcccctgcacccgcggcggcggcggctgct

SEQ ID NO: 404859 - DNA, 122 bp, Homo sapiens
tgaaacgaacaccacagggacagacttccttttgtccttttttctcttcgtgcagagtaacgcggagtcttgccgtaacccaagatggcaaccatctctcaaatgtcacgccgtacaatgac

SEQ ID NO: 404860 - DNA, 122 bp, Homo sapiens
atccggcgatgctgggtctggacgagctcgggaggagtggttgtggccattgcacacaggcggatctgaggttcggcgacgccgctggtcgcgacccgggacaggacaacgacaggaacacc

SEQ ID NO: 404861 - DNA, 122 bp, Homo sapiens
tagggccgtggggcccggcgctcccttccatccttggacggaatgtatcttctcttcctacgccttcacctccgaggggtaaggtctcgtgagatacaatatgcagaggccagttttggggc

SEQ ID NO: 404862 - DNA, 122 bp, Homo sapiens
ggcccctgcgcaggcgctgggtggactgcttccaggtgtcatattggaagaacttgcccacggggtatctggggaagttgtcctgggaggggaaggggctggtcagcaggtgcctgctctcc

SEQ ID NO: 404863 - DNA, 122 bp, Homo sapiens
gtgctcccacttccttacctcccctctctcaaattatctgtttttatcttctctgctgttcgtcatgtacatttgtaactgtatttgtattgatgatatacatctaattgtaaactgtgctc

SEQ ID NO: 404864 - DNA, 122 bp, Homo sapiens
ctgacaggtactgtacccgccttgggcacgaccttgggggaaattcttctcttattaccacgtgcgaggccgtggttccggctggctgcaaccttggggagcccttggcgaggttggccggc

SEQ ID NO: 404865 - DNA, 122 bp, Homo sapiens
gcccaactagctggtggcattttagacattaaagagaaataaagatgggacagaattctacggtatccataagaatcgatccctagccaatcaataaataagaatgtaacaagagctgtgct

SEQ ID NO: 404866 - DNA, 122 bp, Homo sapiens
agttatgtgtggatatatatggaatggtctgaaagatacaatagggggaaaagcatggtgcgaaaaagtctgcctagcatgctaccatttgtgtaaaaacctgtggagtacacacacacaca

SEQ ID NO: 404867 - DNA, 122 bp, Homo sapiens
ctccctcccggatggggtgtcagccgggcagagacgctcctcacatcccagacagggcggcggggcagaggcgctccccacatctcagacgatgggcggccgggcagagacgctcctcactt

SEQ ID NO: 404868 - DNA, 122 bp, Homo sapiens
taaccaagatgtctcctcctcaagctgcctcttgcagggttctgcagacctcacccttctcgtggccagacaccctgtgatgaattttggcctgggatccgttattatgtgagagacttaca

SEQ ID NO: 404869 - DNA, 122 bp, Homo sapiens
atctgttggcgttgacgcttaaatgttggatattgcactgcggcagtgccttgaaatgtacgtgcaggatggaatgttaggtaactattaaagccactcttgtgaagatgtattttgcagcc

SEQ ID NO: 404870 - DNA, 122 bp, Homo sapiens
atccctcactgctccacgcctggctcacccatgtcaggtgtgacatccaggccagtagcgcgagccaagcgcagcctgccaggccaaaacaggcagaacgagcccagcaggcccgagcaaaa

SEQ ID NO: 404871 - DNA, 122 bp, Homo sapiens
tccctcctgctgtccacccagcctactttctttggaatcctatttactattaattggcaacgttaatgacattaattgcatatagcatattggtttgagcaaagtggatatctctttctgtc

SEQ ID NO: 404872 - DNA, 122 bp, Homo sapiens
ggcagggtcctgctgcctctgagggctccagggaggatccttcctgcctcttccagcttccggtggccgatgacaactcttggcgtttttcacttatggacgcgttactccagtctctgtcc

SEQ ID NO: 404873 - DNA, 122 bp, Homo sapiens
aacatcctggccggagcggggcgggcggctgggctcgcggacggccgagtccctgccggtcgctgtaaggcacggcgtcccttcctgcgtattgtccacatttcctgagccaacagcaatta

SEQ ID NO: 404874 - DNA, 122 bp, Homo sapiens
cctgttatgggttggtgttatggggaaagggtttggacgggttgagtggactgtcaggtgcggggcacatgtatgtgcgcacacgtgcactgggttaagcctgagcttaggtgctcgtctgc

SEQ ID NO: 404875 - DNA, 122 bp, Homo sapiens
gtgtccggggcgtgccggtgtgaaagtcaccttcggtgcccccagctgggcgggagggggcgcgcggggcgcggccgggattggagcgccgcggagccccgccccccgcccgcggagtcaga

SEQ ID NO: 404876 - DNA, 122 bp, Homo sapiens
ctcctgcttccctgccccacccctgctgccagtggtgcctctgtgcatggctcacgtggccgagggctagccactgcatgaggacaggcatcctcactgccctgcccagagtgcacataatc

SEQ ID NO: 404877 - DNA, 122 bp, Homo sapiens
ccggcccttcgggcgagaggaggaaccaccattggagaagttacaagttgatgattgacccggctctgaaaaaggggcatcataaactgtaccgctacgatgggcagcatttcagcctggcg

SEQ ID NO: 404878 - DNA, 122 bp, Homo sapiens
cttgcgcagattccggggtgcctggctgccaaggtctgaaggctagctccagcgcattcccggctccgccgtgctgcagggggtttgctttccagtgggaagttcctacttctccctcggca

SEQ ID NO: 404879 - DNA, 122 bp, Homo sapiens
cccgggcgcgggagtgggagggtgccgcgtgggcagccggagcaacaggcgtgggagcagcgctcctcgcacttcctggctccagaaggctcggtcgcgtccctcttaccttccgcgaagcc

SEQ ID NO: 404880 - DNA, 122 bp, Homo sapiens
ccatgagttctgtgagctgctctagcaaattaatcaaattcaaggagggggtcatgggaacgctgatctaaccagttggtgagaaacacagataaaacaacctggggcttaggactggcatc

SEQ ID NO: 404881 - DNA, 122 bp, Homo sapiens
ggccggcccagccttcccgctgtgccgatatttacaataataatgtcgcgattaacgtggcggggcgcttggggctcgccgaacgaccccggcggcttctcctgcctgaatctggactccga

SEQ ID NO: 404882 - DNA, 122 bp, Homo sapiens
tgggtgtgattagacgtagacattcttcctgccatataaagctgctgggcacaccagcgacgattataatattcctattagtaattcttgttccacttcttcttttgttcagatttctagtc

SEQ ID NO: 404883 - DNA, 122 bp, Homo sapiens
aagtgttaagattacagtcatgagccaccgcactcagcctaaaactcagacttgaccagacgacttcaacagtctagaacactgccatcctgggattctgtgaccttgacaagaaggagaaa

SEQ ID NO: 404884 - DNA, 122 bp, Homo sapiens
attgcccagctgggacatggcagagcctggactcactctcctcccatctgccccaacccacggtggaatcgtttgctgagccgctgcctctaccctgcccagtctggcccctggctcacctt

SEQ ID NO: 404885 - DNA, 122 bp, Homo sapiens
aggaaactaagacacactttctatttggaaagcacattccaaaaacactagctttgttttcgcaatcagaaagccaattcctgtcactagaaaaaacaaaagttgatgcagtttcaatttcg

SEQ ID NO: 404886 - DNA, 122 bp, Homo sapiens
ttgaactctgcacggcgccctgtggccaaatcccctttcttgccggcttcgccagagcgccggagagaaaaccttaacagtgcagccaggtggcgcccaacagccggcgcaagcagccgcgg

SEQ ID NO: 404887 - DNA, 122 bp, Homo sapiens
cagcagcttgctcagcggacaaggatgctgggcgtgagggaccaaggcctgccctgcactcgggcctcctccagccagtgctgaccagggacttctgacctgctggccagccaggacctgtg

SEQ ID NO: 404888 - DNA, 122 bp, Homo sapiens
tttctcatttctcatctaggtagctctaatacccttttaaccagtgtcctacctatcattcgtctttcaagcagctgatgaaattgttcctgatacatttaatagcataaagcttcccaagg

SEQ ID NO: 404889 - DNA, 122 bp, Homo sapiens
taggccggagaaggattcaggtctcctctggtggatgtgggaggtcttgggataactcttcgtgagaatgcagagctggcaggagcctccgtaaaaacactacaagaagcggtcttgagggc

SEQ ID NO: 404890 - DNA, 122 bp, Homo sapiens
agattctgagatgttgggggaacctccccctctcagccaaagctcctaagccttggctcccgcccgggtctggctgctgctcagaaactgtgattggcagatacatatgtctttgattaata

SEQ ID NO: 404891 - DNA, 122 bp, Homo sapiens
gagatcaagtgatttgtctgccttggccttccacagtgctgggcttacaggtgtgagccacggtgcctggtccacatccagcttcttataccaaaccctttcaaaggatttgaaggagctcc

SEQ ID NO: 404892 - DNA, 122 bp, Homo sapiens
aacaagtttgcctccttcatcgacaaggtgagcgggactggacctcgcctctcctcgagccgcgctccagaccacaccagccgccctaactagccctgcctgcgcgcgggccaggcgctggg

SEQ ID NO: 404893 - DNA, 122 bp, Homo sapiens
accttgggtgattagaagaatcaataagataaccgggcggtggcagctggccgcactcaccgccttcctggtggacgggctcctggtggctgtgctgctgctgtgagcgggcccctgctcct

SEQ ID NO: 404894 - DNA, 122 bp, Homo sapiens
gtctcactgacttcaagaacgaagccacagaccctcgcagtgagtgttacagttcttaaacggagggtgtccggagtttcttccttctggtgggttcgtggtctggatggcttcaggagtga

SEQ ID NO: 404895 - DNA, 122 bp, Homo sapiens
ctctgcgctcgccttgcgctccgccgaaaccattcgggtcccgtcctctccctccgcgctcgcgtccctccttgaagtcggagtttctctcgtgcacgtttgcactttgcaggctccagccg

SEQ ID NO: 404896 - DNA, 122 bp, Homo sapiens
gcggtctcgtggggcggggcggagtcttatggggcgagacctcagcgcctgcgcaagcgccgcagcagccgcccgtacttccgctttactcagattttggaccgcggggccgggtatcgagg

SEQ ID NO: 404897 - DNA, 122 bp, Homo sapiens
ccccttcaccggtacgagatctatggcggcctccagaaatggttgctaacttactattatcgttatttctgtcgtacaattcatttctacctttccaataaactttccccaaccagtgaacc

SEQ ID NO: 404898 - DNA, 122 bp, Homo sapiens
cacttaccggcgcctcatggtaccgcggcgcctcagcccagcctcggcgctgacgaccagcgcccggcagcctagagagtccctcggcttctgggccgagtcccactcagggccattcaaac

SEQ ID NO: 404899 - DNA, 122 bp, Homo sapiens
ggaggggcatgtctcatcaagttcaccagtgtatctatggcagcaagcactgtgcaggcacgcatattacaagcttgataaatttaaatagtatttgtgaacacaaagtcaccctgtatcaa

SEQ ID NO: 404900 - DNA, 122 bp, Homo sapiens
agcctccacccactgaaccatcaaggctacactgagatgcccggccacttccactgatgccggatcagggggatagttactaatggtgcttctactgaatgctcaaggccacagccatggta

SEQ ID NO: 404901 - DNA, 122 bp, Homo sapiens
gcagaatccagccgtgctggagaatgacggggtgacaaacgggaaggtgctcaaccttctcgttagacccagcaattacaccatctgcggcgggcagagctgtcaggaatgtcaaaacctaa

SEQ ID NO: 404902 - DNA, 122 bp, Homo sapiens
ctcaggccggggacggccgcacggcgtcaaggggtgtttacagtgttctagtgtgctcagcgctgctttgcttggccactgaacacatcagagaccgtggagacccctgggaggagaggcgt

SEQ ID NO: 404903 - DNA, 122 bp, Homo sapiens
ccccgacgactctcggcgaagaacgtctggccctgcgggtcgcttgtggtctcttatagccgcgtcggcgtcaggcccgccccggccaatcagcgccgcccgccccgagcccgctccttccg

SEQ ID NO: 404904 - DNA, 122 bp, Homo sapiens
ggtatcatagatccgatagtgacactcagtcagtcatgctccccctgcaggatggaaagccggatggcagggattgcctggtgaacaaccaggtcaaaaaatataaactgtgcctttcccaa

SEQ ID NO: 404905 - DNA, 122 bp, Homo sapiens
actttcccgattcggatggggaggggtagggcggagagtcccagagaccagctctggcttcgtttgcattggaaattagcacaaggtagtgttgtttcctaatcagaaaatcaccatctact

SEQ ID NO: 404906 - DNA, 122 bp, Homo sapiens
ctcctgactctctcgccaatgcccagaggcgccgcagcgattccagggaggccgcgctctcgccccaaggcaaccagaagcccacgtgccaggagaggcatcggaaccaacaactcgggtcc

SEQ ID NO: 404907 - DNA, 122 bp, Homo sapiens
tgcagcaggttgttgcgccgctccacgatggcgatgttctccttcaggtcgtcgttggcacggaccgcatcgtccagctggatctgggtgtcctgagcatcaggagagtgggtgtgagcaga

SEQ ID NO: 404908 - DNA, 122 bp, Homo sapiens
acagaggtggactggaatgtcacacgacggggcagctggaaggtattgggaaagaagaggcgtcatgggagaaggctcggaacttgagccctggggcgtatcaactttcagtttttagggaa

SEQ ID NO: 404909 - DNA, 122 bp, Homo sapiens
ctgcagatggtttaagcacaacttagcaactcctctgccgcctcgtttctgctgaaacttcgccgggttttaacacgcctgccaaaactgcccccttccgggcccaagagtccaggattctg

SEQ ID NO: 404910 - DNA, 122 bp, Homo sapiens
acaccccagtatgtgtgagtgtgtgtgtgtgcatatgtgtgcatgcatgtgtgtgtgtctcgtgcgctctgtctcagccaatgcactgagaagaagaaaagagggagggagggagggagaag

SEQ ID NO: 404911 - DNA, 122 bp, Homo sapiens
ccgcccccacctcacgtctcggggtggggaggtgttgctgagtcctgagcccccacgggccggggcccagtcccttaacgcacctgctcggccaaggtcaccggcgcaggaggaggcgcggc

SEQ ID NO: 404912 - DNA, 122 bp, Homo sapiens
agcctcaagcggctgggcctggccgttagagcgcctgggggcggagcctggttgttacaacgccttcagggcggggcctggccgttaaagcacctcaaggggtggggcccggctgttgtggc

SEQ ID NO: 404913 - DNA, 122 bp, Homo sapiens
tctggaagctttcgtattcggcttgtcgctgagggagagggtccgtggaggttttgcctccggagctgcaagctgaaccttagccctcagagaaggggaggagtctcactgatttctgtttc

SEQ ID NO: 404914 - DNA, 122 bp, Homo sapiens
gctggaagctggaggaagataggaaatgtgtacccagctttgacggttccccactctaatcgttatctgttactctaaaagtcacttagctggcaaagccactgtcctggcttcttctgtat

SEQ ID NO: 404915 - DNA, 122 bp, Homo sapiens
gggcaggagtagagaattggctgccaggaagcccaaagagtgggtttcctgtggctcttccgagttgaggactgagaattggagagtctgggtgccctccactggccctcatcacattatcc

SEQ ID NO: 404916 - DNA, 122 bp, Homo sapiens
ggtgcgagacgcgtgtgtccttcgaagagaggccggagctgaccggcggttgtgagcagccgggggccttcggtggcagcgtggctgcccttgggtgcctgcgactttgttggatgaggaca

SEQ ID NO: 404917 - DNA, 122 bp, Homo sapiens
gttctagacaatcagtgcaacatcaagcacctgacaggaaatggcagccctggaatgctacggcaggagccatggatgcaacagatacctgggaaggccctgcaaaccgcctgccttcatct

SEQ ID NO: 404918 - DNA, 122 bp, Homo sapiens
ccatgatccccactcctgtctctttggcagggaatgtctttcacatgtactctctctggtcgcttgggcagccgcttgtgttgtcgtggagccgctcgagtcgaggcttcgctttatctcat

SEQ ID NO: 404919 - DNA, 122 bp, Homo sapiens
gccctgacgtcgagcgccgcgggcctctgcactgcgatctgctgccccttggtgggcacgcgcggcactgtttcctgagggcctgatggtggacgtttgcaagacaaatccacatgcgcgtt

SEQ ID NO: 404920 - DNA, 122 bp, Homo sapiens
tgcgcggaggagcgtgcacgccgcgccccggcctccccggggacctggccggccgctgcccgcacttcctgccgctggtctcccaggcgcgagccgccgcttgcagcacagaacccgttgag

SEQ ID NO: 404921 - DNA, 122 bp, Homo sapiens
cctgagccacaccgccggggcttacggtgggtcagagccaggctccagagctcggccacccggggctgtggcttatcctggcttcaccacttcctagctgagtgtgatcctccagaagttac

SEQ ID NO: 404922 - DNA, 122 bp, Homo sapiens
tggccgttggaaggaggggcccggaacggcggcacggggttgttgtgggggtcagtcccccggggactggagggagacgcggcacgcggcctctgcgaccctatgaactctgaccccagctc

SEQ ID NO: 404923 - DNA, 122 bp, Homo sapiens
gtcccaatatgctggcatattatctacacaacatggctagattactttctgttttcctgccgtgagtaagccatgtatacaaggaaataaaggaatccagaaagatgtttgacattcccaga

SEQ ID NO: 404924 - DNA, 122 bp, Homo sapiens
accagcagagccgagagctgagcaccctccaccatcagtggctgctgagatcagcagagccgagagctgagcactgtccgccatcagtggccgtggcctgcaggcagttgggccaatacttt

SEQ ID NO: 404925 - DNA, 122 bp, Homo sapiens
ggcgactgcctcaggcaggctttcactcacccctccatccgggggtctctgactcccctccgcacctgcttagcagtgccagccagtgtgagctgttctacagcgtgtcccgcatgcacagt

SEQ ID NO: 404926 - DNA, 122 bp, Homo sapiens
taaaattccctggttcaggaaggtccgcccctttttggctccacccctaccgactgagcccggcctcctcctgatgacgccatgggccatgcgttctagccacggcccccgcatcggaacag

SEQ ID NO: 404927 - DNA, 122 bp, Homo sapiens
gcaggctgaggccggagaatcaggcagggaggttgcagtgagccgagacggcagcagcaccgtccagcttcggctcggcatgagagggagaccgtggaaagagagggagagggagagggggg

SEQ ID NO: 404928 - DNA, 122 bp, Homo sapiens
gcacctgccgcaggaggatgggggctccagacccgccgcgctggctcagctgccgccgggcgaccctcagtacagcctccgccatcgcgcccactgcggggtcaggaatgagcggaggccga

SEQ ID NO: 404929 - DNA, 122 bp, Homo sapiens
aactgagaaagttggagtttgttgattgcacactttttcactcctcctttactgtagtgacgagagactatagagtactcaattttatgtatactagaaaaaagttacagtacattctattg

SEQ ID NO: 404930 - DNA, 122 bp, Homo sapiens
cgattcctcccttcttctgaacaggctcttcctgcggcccgtgtcagccgaggcagagagcgacagagcttttcacaccaggagagcatgtcctctgtcctctgtgcctgtctgagaaaaga

SEQ ID NO: 404931 - DNA, 122 bp, Homo sapiens
agggatggagaatatttcgttatgcttcgtaataaacttccccaaaggagactccgggtccgccccgtcaagttcaggaaaggcggacccctttaaggaggcggaaaagttaaccgcgatgg

SEQ ID NO: 404932 - DNA, 122 bp, Homo sapiens
gggcttcgggagctgtagacaatcaaccgtagatgctgccttggggtcagagcccaaaaacgctcctcacgacctgccagtatgatgcatgttcctccgacgggtttgggcgagccacaccc

SEQ ID NO: 404933 - DNA, 122 bp, Homo sapiens
tgggcaaggggcgccggctgtggcgagggtgcaggtgggggtcggtgcatctgttctggccgcgcgcaggtgtgacctccctccttgaccttggcacgcggattgagagcgccagcggagtg

SEQ ID NO: 404934 - DNA, 122 bp, Homo sapiens
gcgcgttcgtcgcgcgtggactctccgagggggcggtgctgctggggcagaggctgggtgcgagaggagcaggcgggacagcccgaggcacgaggtccgccgggcgcgggggttagcctccg

SEQ ID NO: 404935 - DNA, 122 bp, Homo sapiens
aaccccctctgcctgaagcctagttggccctcaacaaagatgtattgtatgaatgaatgacggaagaatatagagttagaagagtatggatcagtgtttggttgtgcctctctggtatcttt

SEQ ID NO: 404936 - DNA, 122 bp, Homo sapiens
agaggattgctctcatcatctgtggattctctttcatcttcagcctgtatactaaactgccgtactgcctgatacacagtcatgttatacggcagcaaatgttctccaatataaaactgcag

SEQ ID NO: 404937 - DNA, 122 bp, Homo sapiens
ttatttgttatgccattatgactgttaggatttctcacctggagtggcttccgccataagcgccgggatctggaaggacggcacgtttgacttctgttgtcccaacctcacttgccagccct

SEQ ID NO: 404938 - DNA, 122 bp, Homo sapiens
aaaaagaccagaatgcattgcacgcaatgtgctgcctcatacccgatgtacaggagtctccgcagtgggaatcctgccatgggcactcgcaaaccacatcttcgaccacacaatgagcttca

SEQ ID NO: 404939 - DNA, 122 bp, Homo sapiens
gaagtaacagctgggaggagcagactgagagctttagcagcttttggaaagttgccattacgtctccttagctttcttaaaaagcattcatttggtgttgtcttttacttttattagcttaa

SEQ ID NO: 404940 - DNA, 122 bp, Homo sapiens
cagtagggcggtaggcaagggcagttctagccaacagtccctaaatcatcccagcgggggcgcgggaaattccaccgaggtgaaagcctagggggccgggtgaagaaatccccatacccggg

SEQ ID NO: 404941 - DNA, 122 bp, Homo sapiens
ccctatgagttaaaacctcatttctgcatataccgcaattggcagaacccctaccatagccgggttcaaaggcagggcagtgtcacctcctgtgacacaggcagcacgtccaggccaagacc

SEQ ID NO: 404942 - DNA, 122 bp, Homo sapiens
ttaatttgggcagttaacgttcctggtaattattggatacttttcacttattcactctcacgtgaaggtaaacagttcccaaactaagtaaaagtgtgatgaagtttgtcccctattcatgc

SEQ ID NO: 404943 - DNA, 122 bp, Homo sapiens
ccttagagcgaacgctcggcgttctggagagaatgtgggacccgaggcggagggaagagacggctgacatcactccagggtagggacgaccgagatgggagaaactaaggcgagaacccacc

SEQ ID NO: 404944 - DNA, 122 bp, Homo sapiens
ctggggtcctcgagcccctcacggggattgcggtcctgggctcaggccctcgttcctgcccgccccactcccgccagtctcacctcaggaagagcctgggcaaatggggcaggggcgagggg

SEQ ID NO: 404945 - DNA, 122 bp, Homo sapiens
gtgtagggtgagggatgtgggaaggggcacagagggttccgtgctctccccgggctgtgacgtctccaggaacctccacgcattcatctgtggggaagcttccatcccagtcctccgggttt

SEQ ID NO: 404946 - DNA, 122 bp, Homo sapiens
ccctctggcaacctctctggtcatgtcttcccggtgtccaaccctgacccctcttgctgccgcatcggctgttttctatttttgctgtgctgctgccccacagtcctctggtatgacggatc

SEQ ID NO: 404947 - DNA, 122 bp, Homo sapiens
cactgaggaatgagcattgctttttaattagcagctgccccgagtgctccagctgccctgcgtgtggctgtctacacagcacgcattccttaccccggtggttttcatctggaccctgagtc

SEQ ID NO: 404948 - DNA, 122 bp, Homo sapiens
accaacccagctatgcatctaacaacacagaccaaacaaccctaacttttaagtttcagacgctaaccctctaccctcgccggctggcataagaaacgtgtacatgaggtccagttttaatg

SEQ ID NO: 404949 - DNA, 122 bp, Homo sapiens
ggccgccttggggcgcggcagcgcaggcagagccgcctagagctgtgcagccggctcgaacgagaggccgcccgacttgcagacctaggttgagcagagctccaccgcagtcccgggtgtct

SEQ ID NO: 404950 - DNA, 122 bp, Homo sapiens
agaagcttctggttgacaaatactgtctggtatttccttgctgatttcttaccctcacaccgcaagccctgatctctgtggtccactgtgcaaatgcaaattacctgaatcaggctgctggt

SEQ ID NO: 404951 - DNA, 122 bp, Homo sapiens
tgacttgaactcgcacgtcccccacagggccaaacacccttactttcctctaaccacacccgtgcattcggcacaatgcctttcttagcacgttctgggtcccttgatccagagaacaatct

SEQ ID NO: 404952 - DNA, 122 bp, Homo sapiens
gacggaggaggatcacttgaggccaggagttccagaccagcctgggcaagactgcccccacgcccacacacaaaaatgaaaaaattagccaggtgtggtgggacaggcccgtagtccttcct

SEQ ID NO: 404953 - DNA, 122 bp, Homo sapiens
gaggggcggggggaggcggggatgggggggaagcagggcggccccgcagaggggaagctgcgcctccgcaaacgctcagaagcagcttcgccagacagccgcaacgtacatgttgactgccc

SEQ ID NO: 404954 - DNA, 122 bp, Homo sapiens
ctcccagactcatgtcctgccatacccggtaattagtgacgtttctccaaaggcaagtttcgtaagatggcccttggtccccggcctcccttcctcatggtgatgatgcgttcagagtcagg

SEQ ID NO: 404955 - DNA, 122 bp, Homo sapiens
gaaagcatttgaactctgccctctaccaaatgatttccagatgtgtaaaccccagcctcccgctgcactctgactgtagccctgccaacgtacatctgcagattcctagtgcacaggaaact

SEQ ID NO: 404956 - DNA, 122 bp, Homo sapiens
aatcaagaaaagcataattattactgattattacaggattattactgaaaaagaaatgtacggaatagaggaggaaggagttaacaaatgatccactctgggtgttgaaaacaccaataagc

SEQ ID NO: 404957 - DNA, 122 bp, Homo sapiens
aaatgtcagaaggttctggtgtgaagtttaagtaagaaaaggcctggaagctgagtccatcgacagctgagacaaaagtaggcccaaatccttccacagggacggaatgatgctgccagttc

SEQ ID NO: 404958 - DNA, 122 bp, Homo sapiens
gcggtggaacccgggggccaggtggaactcggtgtaacagagcccccagtggtcgcgccgcgtctcagaacccggtgcgggagacgctctccccgcccaaagagggaaggcgggcgggactc

SEQ ID NO: 404959 - DNA, 122 bp, Homo sapiens
agccgaaaatggtaatggagggtcgggccaataaattagctttaggaacagacggacggacgtccgaggctgctgcatgggtgggcgctgtccaccgaagctggcgggggccaccgtcgctg

SEQ ID NO: 404960 - DNA, 122 bp, Homo sapiens
aggccgtccttaccgcaaggaggttcttacggggccatccacactgcgaggaggttcttacggggccgtccacaccgtgggggacccgggccttacggggccgtccacacccgcaggggacc

SEQ ID NO: 404961 - DNA, 122 bp, Homo sapiens
gggagctccaggcttctggctccttggagggtgaccaaccatctgggtttgccagggacacgggacttgcagtgctaacaccggaaaagtccaggacaaaccaagatgactggtcaccatac

SEQ ID NO: 404962 - DNA, 122 bp, Homo sapiens
ggaaaaggctgagatagaagcccatggggtgaggagaggcccttgactgagatcgtgtggcgaggtgggccaagcctaaggaaaggggaagatgcacattctccagggctccctgccccctt

SEQ ID NO: 404963 - DNA, 122 bp, Homo sapiens
ctgaacactcaaggacctgtgctccttcctccagagtgaggcccgtcccccgccccgccccgcctcacagctgacagcgccagtcccaggtccccgggctgccagcccgtgaggtccgtgag

SEQ ID NO: 404964 - DNA, 122 bp, Homo sapiens
agggaggaagaaggcgagggaaaggtctatggtggcatctccttggtcccacccaagtgccggagatgcccccaagtgctgccccctgcaatgggcccggctagacctggggctagggcatg

SEQ ID NO: 404965 - DNA, 122 bp, Homo sapiens
agttcccaccgcgcagcctggcaggcgcccctgccaccgtgcactgctgcagcgttcactcggtgtgttgcagacggctccacctgcaccatgtccgagtggatcacctggtcgccctgcag

SEQ ID NO: 404966 - DNA, 122 bp, Homo sapiens
gggcccaggtcggccggcttggtctccaggtagcgccccacgtcgtgcagaaagcggcagcgatcaccgaagaaacacttagcagccgactcctgcgaggaaacagggaagcagtgagggag

SEQ ID NO: 404967 - DNA, 122 bp, Homo sapiens
gttcacgttccgtggacgccttggcacggcctcccaagggggcggggcctggggggtatccgccttctgacccctgggagatgcctcctttctccgagcagcagccgggggcctggccggcg

SEQ ID NO: 404968 - DNA, 122 bp, Homo sapiens
caggagctctctttctgcccaagaactccccgtgccctggacacctgcctgtctgtcacccgcttatcagggtgagggcagctggggctggcacttacagtatcagtcagggcagcctggtc

SEQ ID NO: 404969 - DNA, 122 bp, Homo sapiens
cgcagttcctaagcccacatgcgcagttctcaccttgcgcgcagcctcacgtacagcccccgacaggctcccagccccactggcgcagaacccatcaccgcttgcccttcacgcgcttcatt

SEQ ID NO: 404970 - DNA, 122 bp, Homo sapiens
caactaacccttctatgatataaagtagcacaaaaataaattttgtcccgtttccatacacgcatttcacactactcattcaaaattctcaattacccacttattacaagttctcaatcttc

SEQ ID NO: 404971 - DNA, 122 bp, Homo sapiens
ttttttttttttttcttaatttccagttccgccttgggacgagtccctggctgggggaaccgcatcaggcctgacacccatcccattcccccctaaacccagaacgagatccaacctcactc

SEQ ID NO: 404972 - DNA, 122 bp, Homo sapiens
tgatcacagacgactgaagtgagctaacatgattgtggatatacccatattaattcataccggaaacacagatgagaaggttgagaaggaatagtaaagaccatgagttcggtttagattca

SEQ ID NO: 404973 - DNA, 122 bp, Homo sapiens
gaggctccagacccggacagagtgaggctccagacctgggacagagtgaggctccagacccggacagagtgaggctccagacccggatagagggaggctccagacccaggtagagtgaggct

SEQ ID NO: 404974 - DNA, 122 bp, Homo sapiens
gcacatatgttttctgatttagtcttcatgccagccttgagaagtacttactcctgttctcgtggttgttagtgatgagcaacctaaggcttggagaggttcagtgatgtgcctgatagcat

SEQ ID NO: 404975 - DNA, 122 bp, Homo sapiens
cagccgcggcccggagataagcgctagtgcggcgccgggctctgcctgggctagtggcaccgacttgggtatgtttcttatgaatattacacgcggagcagcgtctggtccgggggtgcggt

SEQ ID NO: 404976 - DNA, 122 bp, Homo sapiens
tgctgtgctggctgggggagcggggcttcctgccctgaccagcttccagcctgccatgcacgcagggtcggcgaaggcccaagagggctgcatgggcaggaaaaggatcctcttctcatagt

SEQ ID NO: 404977 - DNA, 122 bp, Homo sapiens
gtcccatggccaccttgcatctttccccatctcatttgatgagagctgatatacaaactccggagtttttccatattttctaaaagttcagttttttaagtgtagtgtttggtattcctttg

SEQ ID NO: 404978 - DNA, 122 bp, Homo sapiens
cgcggcccatgctggccgctggggacccgcgcagcccagaccgttcccgggccgggcagccggccaccatggtggccctgaggcctgtgcagcaactccaggggggctaaagggctcagagt

SEQ ID NO: 404979 - DNA, 122 bp, Homo sapiens
tctgaagaaatcaccatagattatgaaagcttgggagaccgcatttcccagacacctccacggggcctacacttccacggggcctacaactcccaaacacccttgggccactgacgtcttcc

SEQ ID NO: 404980 - DNA, 122 bp, Homo sapiens
tgatcacgccactgctctcttgcctgggtgacagaaagagaccctgtctcaaagaaaaaacgtataagctaagtcataaaacctagcatcacaaacatgggtgccaacattaggtatttctt

SEQ ID NO: 404981 - DNA, 122 bp, Homo sapiens
catggtttctaagggctcctccattcaacaggagcactaacattaagattctatgactctcgatatttaaaacagggaggaagctgatcaacaaagtcacagtctacagattatactcatag

SEQ ID NO: 404982 - DNA, 122 bp, Homo sapiens
ccgagcaggggagcgacgggagggcggagacggcagatgcacgggtgggggctgcggccccgcccaggctgcgcggtttcccgaaaccagctgcggcccgggggcccggcaaagggggttcc

SEQ ID NO: 404983 - DNA, 122 bp, Homo sapiens
ctgggtcaatgaaattccttatttctttccttgggaatttggatttgggaaggaagaggtcgtcattcaggtcctcaagttgtctagaactataaaaccaaaagtaatagattccactagat

SEQ ID NO: 404984 - DNA, 122 bp, Homo sapiens
agttttaatttccactcctatgagtgatcactgggttaatgctttctcccgccacccacccgtctacaatctccatgaggttagaatctgtttctcatttgttcatccttgtgtccccagtg

SEQ ID NO: 404985 - DNA, 122 bp, Homo sapiens
caggagtgaggggctgagtcaacctgactcctggggccctgctgaggccagatccatgcccgcccgagcccagggcctgcccgtctcaggctgggtgttgccccaggcccggactccggcag

SEQ ID NO: 404986 - DNA, 122 bp, Homo sapiens
tggctactcagaccaagccggtttaccgtcaccatggcaacagcgcgtcctgggctggggcggggccagactgccagtgcctttgtggcgcattaggagctaagccagtgattggccatctg

SEQ ID NO: 404987 - DNA, 122 bp, Homo sapiens
ctgcctttcagagcccaccccacagcccagaggacctgagataccccaacatttcagatccgcaccttcaggaaatgccccacctgaagcttactgggggtcacgctcctccagaaagaggc

SEQ ID NO: 404988 - DNA, 122 bp, Homo sapiens
caactcttggttatctagggcaatttgaaatctcagctacctccactgtgtccagctcaccgcagttatgcatctatttacaacattatgtttgcaacattatgtttaagcaaaccacaatg

SEQ ID NO: 404989 - DNA, 122 bp, Homo sapiens
gaaagcaaaaaggctgctcctcaaggcagggggccatcgggcacgccgagatccgagaggcgacatgccacccctgccctgcacctaccagataatccatgtacagaaacgcctcagttatt

SEQ ID NO: 404990 - DNA, 122 bp, Homo sapiens
cagcctcacagaccctctcaggcctctgacgagtgagcgggtgaagtgccactgggtcaccgcagggcagctggaatggcagcatggtagcacctcctaacagattaaatagatcacatttg

SEQ ID NO: 404991 - DNA, 122 bp, Homo sapiens
agggaactccctgaccccttgcgcttcccaggtgaggcaatgcctcgccctgcttcggctcgcgcacggtgcgcgcacccactgacctgggcccactctctggcactccctagtgagatgaa

SEQ ID NO: 404992 - DNA, 122 bp, Homo sapiens
gacagtcactcccctcaaagaacttaaaatttggaccatacagtgtttcccaaattttcccgtagaaaatgagtagggtaaatgtaagaggccgtttagttgggaaggaggctgtggctgcc

SEQ ID NO: 404993 - DNA, 122 bp, Homo sapiens
cccttctggcctccagcggacggaggtcaggcgctgacttggccccgggctaagaggggacgccgcaagggggcaggggcggcctgctggcaaaatcaggcccgtgagccgcagaaagtcaa

SEQ ID NO: 404994 - DNA, 122 bp, Homo sapiens
gtagtgcgcactgcctcctgggagatgtagctcctcgaggcgcgctctcgcccctcatcccggaaaggaagactctgaatgactacaactcccagtactgaagaggctgctcttgcgaggag

SEQ ID NO: 404995 - DNA, 122 bp, Homo sapiens
aaaggccaaataaagccctttctttcctcaactcgatgtctgagggttttgtctgtggctcgtcctgctacaatttctaacgttaccagtaattttaaagctagcttattaaagattctact

SEQ ID NO: 404996 - DNA, 122 bp, Homo sapiens
agggcgcagcaagggcctgacgctgagcgagtaggcgctgcgcaccaagcggctgtggcccggagggcactgtcgggcagaagctcctcagtggccaccacaagcccgctagctccggctac

SEQ ID NO: 404997 - DNA, 122 bp, Homo sapiens
gtctctctcctttccaagacttatttaattagatcccttgcccaactaccttctcaaaggcggtgctcaatcctctctcatgtggatcttaaatttcttcctgtctgtttcttccagagtga

SEQ ID NO: 404998 - DNA, 122 bp, Homo sapiens
gacctggactcgggcggcggaggcgaaagtcgctccatccgcggggtgcaaccctgggcgcggaatccgggctgccgggtgacagtgaccagctgactctggagcctaccggaggcgcggca

SEQ ID NO: 404999 - DNA, 122 bp, Homo sapiens
atgcttggtaaaagtcatcgccattctcccgtctcgggtacccagggacacaatgcactgcggaaggccacagggacctctgcccgagaaagcctgggtattgtccaaggtttccccccact

SEQ ID NO: 405000 - DNA, 122 bp, Homo sapiens
tgcctctgatgtcggcgaatcctgaagcacctgcacccgaatctggggcccagggctgcccgacccccactcccatggatgatgaggagccccagacaccagctcctctggcctggactcaa

SEQ ID NO: 405001 - DNA, 122 bp, Homo sapiens
cctacccccgcaacctgttttcaaagaagcagagtccatgcctatatagtgcctattcgacggcctcagctgccctcagaataaacttcaacccaggctgaaagttctccatcccatcttct

SEQ ID NO: 405002 - DNA, 122 bp, Homo sapiens
aggaagagaggggaacccccaggacgtaagagaagggcattccaggcaaacggaatggtgcgagagaaggcatgaggcagctcatgtgtctggggaattctaagagcccattatgggagcct

SEQ ID NO: 405003 - DNA, 122 bp, Homo sapiens
cagctgagtccagccacaagcagaggggaccaggttgccatggagatagttggtctcagtcggtggctctgactcacccagcagctcaggctttttgttagacaggatttggtagaaaatgt

SEQ ID NO: 405004 - DNA, 122 bp, Homo sapiens
attttccttcttcccggctcgcatgagcatcaggtatagaagggaccttccttggacactcggctccctgggcctgacggtggactcatcctttacaaggcggctggagacgacctgattct

SEQ ID NO: 405005 - DNA, 122 bp, Homo sapiens
ccggactccgccgccggctccccaaggcggaagcccgagccgcgcgtcatctgcacgcgccggaagccacgagccgcatttcctgccgcgaggctgagtgtctccagttcctaccggcccgg

SEQ ID NO: 405006 - DNA, 122 bp, Homo sapiens
ccgccccacactggaacacctgggcgccagcgccgggccactcgggcacgcagggcgctacgcagggccgcgcacacgcttttcggccacacgcgcacagccctccacgtggacgcgcgggt

SEQ ID NO: 405007 - DNA, 122 bp, Homo sapiens
gaggcgcctgtggggttgagagtcttaagtgtcctcctgtatctctgggctgtgggtcagcgccaacttgcggaggggcgccgaggtctcgccttccagctccacttgctcctggtcttcct

SEQ ID NO: 405008 - DNA, 122 bp, Homo sapiens
aagcaaattgccagtaagacacgttggctgtggctggaaatacttctgaggctgcctgcgcgcaggctctggcttcctctccctctgcctggccggcccgagctgccacctgtctagtctgc

SEQ ID NO: 405009 - DNA, 122 bp, Homo sapiens
ttgttatgcaggactttccattaaaaaaaaaaaaaaaatcgaaatattttaactcaagtacgtttaattcaccacagaggagctaaaagaaaagagagggggttggtaaaatacagtatact

SEQ ID NO: 405010 - DNA, 122 bp, Homo sapiens
gttcattccagctacatgtatgcctccctccttccctatgctttgctatatttctgtcatcgatgtggcatttgtcgaaatttgaaatcctcctatctatgagtttattgtctgtttaattc

SEQ ID NO: 405011 - DNA, 122 bp, Homo sapiens
cttgatgatgcggttgcggtaggcgtcattcttgaggatcttgatggccaccatctcgcccgtgctccgccgccagcccttggctacctccccgaaggtccccttgcccaagacctcgatga

SEQ ID NO: 405012 - DNA, 122 bp, Homo sapiens
gtcggctgaggacggaggcggggctgggcctgggatggggcggggcctgcgctggtggggcgggcgggggaggagacacggccaagcgcccgagtgggggccgttggttggtgcgcggctga

SEQ ID NO: 405013 - DNA, 122 bp, Homo sapiens
acgggctttcctgccaccgcctgttggctcagtcactgctgcccatctgccactagggggcgccgagcagagaggatggagggagggggcacccgggacaacaggactgggggctccagcag

SEQ ID NO: 405014 - DNA, 122 bp, Homo sapiens
atctacctacaccagaaccccggagtccccccgaatgggctcagtcccacccaggccagacgccccagagccccgtagcccgggtcctccagccctcgctgccgctgcttctcgcggagccg

SEQ ID NO: 405015 - DNA, 122 bp, Homo sapiens
tggggatcagctgtgactcaccagggagttattcttatgaccaggatgtgcctgacatctcgccaagcaaaggagctgagctgttcctgcgagtgcctggtggccctcgtacaagtcatttc

SEQ ID NO: 405016 - DNA, 122 bp, Homo sapiens
atgagtgtggcaagaacttcaggcacaaattttctctaaccaatcatcagagaagtcacacggcggaaaaaccttacaaatgtaatgaatgtggcaaggtctttagtctgctttcatacctt

SEQ ID NO: 405017 - DNA, 122 bp, Homo sapiens
ctaccccactcatggtgcatgcacacccctcaaagatgggtggataaacttggagcattccgggaaaatcccccatgccaagtcttttttgtagcagggtgaggtagctctgttgactcacc

SEQ ID NO: 405018 - DNA, 122 bp, Homo sapiens
attcgatgagtaagaataaaattccctcttctgaggttcccggggccaggcccctccctgcggcaggcacttcccctttcccttgctcatggaggagccaggccgggctgactcagagcagg

SEQ ID NO: 405019 - DNA, 122 bp, Homo sapiens
ggcctctttgagctgcaatatgacttcccttagactcttagttgtgcccctcctgtaatccgtagaacttcagcatttgaggtgttgatcactctcaatttaaaacggtccctaaaggcaaa

SEQ ID NO: 405020 - DNA, 122 bp, Homo sapiens
aactataaagctgtaaaagagtacttgccttattgcccttgtgccttggatgtggtctgacgcagcacagatgtttaacaaatgtttgctgaacctaatggctaggtttatgtgcaaaataa

SEQ ID NO: 405021 - DNA, 122 bp, Homo sapiens
gaggaggctgctacgaggagtaccgaggccgctccctcgatgccaacagtggaggccgctcgcccaatgcctacagcgggggccacgacagttccagctggagccaccgctacggaggagga

SEQ ID NO: 405022 - DNA, 122 bp, Homo sapiens
gaggcagaggttgcagtgagccgagatcgtgccattgcactccagcctgggcaaaaacagcgaaattccatttcaaaaaaaagaaagaaaaggccgggcgtggtggctcacgcctgtaatcc

SEQ ID NO: 405023 - DNA, 122 bp, Homo sapiens
acagtgaagaagagggggttgggtgagagggtgtgccggcgtctaggctgggctgcggtccgtgggcgcctcaggcagcgagggtggctgcttgcctgcggctggctggggcctcggtgcgt

SEQ ID NO: 405024 - DNA, 122 bp, Homo sapiens
cagagggaggaggtgcccctcactagataaggggccgccggctggctgccggctccatgacgcccgtggggtcaccccccggccccgggactcagccagcctcgctcctcgctcctcgctcc

SEQ ID NO: 405025 - DNA, 122 bp, Homo sapiens
aatgtgctacccagccgggtgagacgagaagtcttcttccaatcgaaggtttttctcagtcggctcatggtctcacgggcttctaggaatgaagccttggaccacagcggtgagtgttacag

SEQ ID NO: 405026 - DNA, 122 bp, Homo sapiens
caaccatcgcgcggggatttttgcgatggatccgggtaccgtaattctgggcggataacgcgggtcctaagacaggagcagttctagacctctcagcagagggacgagggtcgggccatcac

SEQ ID NO: 405027 - DNA, 122 bp, Homo sapiens
gagctcaggcggtaatgcgagaggggagtggctgtaaaaacagatgaagctctgctcgctcgcccatcgcacgcctcctgctgtgcggccccgttcctaacaggccatggactggtaccggt

SEQ ID NO: 405028 - DNA, 122 bp, Homo sapiens
gcagtgctcatgaaggtggaggcacacccagagactgcatggaggtggaaccgggaagtccggggtctgaggtcctgcctgcagggttgaaaggcatgcctgccagcagacacatttgggag

SEQ ID NO: 405029 - DNA, 122 bp, Homo sapiens
gcccctgaggcgcacgacccgcccctactaccaccctgcaaaccaaggccccgcccactccgccattggggtgcaagccccgcccatcagccatcggagggcaagccacactccaccccgcc

SEQ ID NO: 405030 - DNA, 122 bp, Homo sapiens
gacgcaacccccgccctggacagttttggaaattgttcccagggttcaactagagagacacggtcagcccaatgtgggggaagcagaccctgagtccaggagacatggggtcaggggctgga

SEQ ID NO: 405031 - DNA, 122 bp, Homo sapiens
ccagtcgttgccctcattgggagagatgcttgctactctgctagtaccacgccttggttccggtctttactgttggctggtaggtcgggaggcacctctagcatgagacagtgtctggaagc

SEQ ID NO: 405032 - DNA, 122 bp, Homo sapiens
gggagtgcgcagcccggccggctggggcagcctcccgggccgcggcgggcgcgggggcttcgggttacagcgtccgtcgctctcttgaagtcacacctgtctccctgtttatcttctgcttg

SEQ ID NO: 405033 - DNA, 122 bp, Homo sapiens
acttctgtgagtgaattattgggtttaatagtgacatgagccacttccatctcttgattccgagacctatatgtcctggctgtggggtggatagtaccgtatatgtatgttctgtttcaaag

SEQ ID NO: 405034 - DNA, 122 bp, Homo sapiens
tgtcagaaactctgtgtgtggagctttgtccttccatgacttactcattctgactccttccgcctctccctgcccccagtcttaaaaatgaaatgatagggggttttgtttgcttttaaaac

SEQ ID NO: 405035 - DNA, 122 bp, Homo sapiens
gagacccggccgccgcccccgccctctggcggcagcgcggggtacggcgccgcctctgagcgccatcgtctcacaggtgcagtcggagatccgccgtggctggcaccactgccgcctgcgcc

SEQ ID NO: 405036 - DNA, 122 bp, Homo sapiens
cgtggcgggagagctgggcgagccagaggcgaccggaaggatctttctagtccagcccctcgctttacccggacgaaagacacgggcctgattcgtcgagtctcactgagccttagtcgtcg

SEQ ID NO: 405037 - DNA, 122 bp, Homo sapiens
tttttctgcctttaatgtcactaaaagagaggttaacttactggattgaggaaaagaagtcgttagcaagagttccatagtaaagcgctaactctagctcatgtgtctggcagagcaatggt

SEQ ID NO: 405038 - DNA, 122 bp, Homo sapiens
cctcattttaacccctctaagtaattgtctcttattctgaatctagagattcagaaacagcgccaatgtttacacacgacttttgaaattttcccaggagtctttcgttggagcaatacatc

SEQ ID NO: 405039 - DNA, 122 bp, Homo sapiens
ttctctctttggtcatgtcagccttcttatgactttgtccaagatagctttacatagaagcggtatccaagtgtgcatgatttaaatgccactcccaaaattcctccaaagagtcttccatg

SEQ ID NO: 405040 - DNA, 122 bp, Homo sapiens
tagatccagggtgtaaggccaaggctgggtgtctttgatcgtagtgggagttacctggggcggagctcgctggaccagcgctctgggtggagctaagctcgggggcggggtttgatcgtttc

SEQ ID NO: 405041 - DNA, 122 bp, Homo sapiens
attcgagtgaccacgtcactcttagccacaagacccggatctgccggctcccgcgggcggcggcgcaacagattgcagcgcctggagactccagctgccccgcctgccgagcatgcgcatgc

SEQ ID NO: 405042 - DNA, 122 bp, Homo sapiens
ggggtgcattgtgaggaaatgcgtgcgcaggtgaaaccttcgtcggtctcctgggctccacgctgtgggcaaagccagttaatgcctttcgtttgcagtagagagagagaaatcgaggcttc

SEQ ID NO: 405043 - DNA, 122 bp, Homo sapiens
cctagatgctggtcatcgtggtaaaaaaacagtgggcagagaagccagagttcagaagggcgtggctgcacaggccagcctgggcttccgtgactttaaagtgcagcaggaaggacaagtcg

SEQ ID NO: 405044 - DNA, 122 bp, Homo sapiens
ggcatcacttccctaactgtaggagctcaaactcctgtgttcttccagtagacctgggagcgaagagaagcaagacattgctgtggaggcgaagtctccgtattaagatcttgctggttttt

SEQ ID NO: 405045 - DNA, 122 bp, Homo sapiens
cagggacgcctcctgcagaagaacaacaaggaccgcttctgccagctgctgtggcggccccggcctcccacactcctgagccaggaacagatcaaggtcagcatgcccccacccccgggtgc

SEQ ID NO: 405046 - DNA, 122 bp, Homo sapiens
aaatagatttaggagttaatgccatattaatgatatttaaagcatagagcatgcatgagtcgccaagggaaagatggctatagaagagaaaaaggacatggactgaaccctggaccttcagt

SEQ ID NO: 405047 - DNA, 122 bp, Homo sapiens
ccggccactcggttctcctccagtccgcgcctcgtcgccttcccccagctacttccgggacgctctagacaggctggaggactcagcactcggtggtgtctgggagccagacgcaggctttc

SEQ ID NO: 405048 - DNA, 122 bp, Homo sapiens
gcggggcggtgggggggacaagtgagccagggcaagaagaatggatttggccctagagtacgggttctccaaatgtaacctcggccctacagatctctgagactatgtcagggggtttgtga

SEQ ID NO: 405049 - DNA, 122 bp, Homo sapiens
atgcaactgctttgagctaaacatcagtttcagaaggaataatatatgcgcacttcccagcgacccttcatttaaaaacctgaatctagattcacaatcatccacaaaaggaataatttcta

SEQ ID NO: 405050 - DNA, 122 bp, Homo sapiens
ccccgctcgctgtcaaagtccttgggccggtaggggatgtagaattcctggtcccgctgccgggcctcctccctccgcctcttggctcccctgttgggtcctgaccgctgccgcttccggcc

SEQ ID NO: 405051 - DNA, 122 bp, Homo sapiens
gatgtgaagcgcgcgggtggcaatcaagtcaccgtctccgtttactccccgcagtgtggtcgcgcaacttggagcgcagcccctcactcaccgacaagaagaacgggtgcgacccgatttaa

SEQ ID NO: 405052 - DNA, 122 bp, Homo sapiens
tcttcacgtgaacatgaacatatccagcccagggggtacgcaacgggaccttcaggaggccggcggccagccaggcgcgctccactcgcgcccgggccaagccgaggtgcccgggaaccgct

SEQ ID NO: 405053 - DNA, 122 bp, Homo sapiens
caggagtgaaggtcttgacctggctcccctattctgcagtgagcaaggcaatggttaagacgagagctgcctttctaagaaagctaagaggccagcacctgtttcctcagtcactggagaaa

SEQ ID NO: 405054 - DNA, 122 bp, Homo sapiens
aggaggtttgcggaagctcagggtggtcaaggagccgagcaaagagggaggtccacaggacgtacacagtcggtactagaagtgccatgctgctcccccatgtccaaaaggggatgccgtgt

SEQ ID NO: 405055 - DNA, 122 bp, Homo sapiens
cttctatgggctggaaagtccaagatcaaggtactggcagatttgatgtctggcaaaggccgtggacagcactttctgtgtgtccccacatgacagaaggggccagctggctctctccagtc

SEQ ID NO: 405056 - DNA, 122 bp, Homo sapiens
tttggcgagattcctggagctaactggagaccagaccggccagtgtgcagctctgacggccgctccaaccgcctccctgccctcatgcctgctccagaccttccgtggcaagggcaagagct

SEQ ID NO: 405057 - DNA, 122 bp, Homo sapiens
aggccgaactcagccatgcctccccagttcccagcccagcacagaggaagctgcggggtccggaagaaaaaaacgcacacaggcggcggccccaaaccgttgccgcccacttacctcagctc

SEQ ID NO: 405058 - DNA, 122 bp, Homo sapiens
tcccgagatgtttgtcctgtggtcgccgacagagaccacccagggttccacttgaagccacgcctcacaacacaggccttcggctaccctcagcatcctaggagggatgctggcatccccgt

SEQ ID NO: 405059 - DNA, 122 bp, Homo sapiens
gagccgcggtgtgggcgtgtgttccgcctggcctttgggggcgaccgagccgctgagtttcggaaacgtctctgtacccccagcagggttcagcacccccaaggcaatccattgcaactgcg

SEQ ID NO: 405060 - DNA, 122 bp, Homo sapiens
cagccttgcaggaacccgactggactcgccctcgagacttggggatcgggtaaggcaacacggcggccaggcttggggtgaggaggtcggggagggtcatggtgggtccccggaggaggtga

SEQ ID NO: 405061 - DNA, 122 bp, Homo sapiens
agcacacatccagggccaggctcctccccgccctcccccgccgcagcccccctctcccgacgaccactcagcggctgcaagccgcctacagtttcaaaggtggaacctccgaggcgccgtca

SEQ ID NO: 405062 - DNA, 122 bp, Homo sapiens
tcgctagaccatgaagacctgactgccctctaataaagtgcctagccagcactcttagaccgcccaaccttcccagctcttccttccgaggcggctactcgatgacatcacatccacttccg

SEQ ID NO: 405063 - DNA, 122 bp, Homo sapiens
gcgcagcgagtcaggcggggtaaacccggagcaacgcggaggcggtgatctgggcaagggcgaggtcagttaaggacgcagttctggccccgccctcaaggcacgcctggccaatcaggaat

SEQ ID NO: 405064 - DNA, 122 bp, Homo sapiens
ccatcttgttacgggaaaggggtcccgatccagaccccaagagagggttcttggatctgtcgcaaggaagaattcagggtgagtccgtaaagtgaaagcgagtttattaggaaagtgaggga

SEQ ID NO: 405065 - DNA, 122 bp, Homo sapiens
gctcgcaagcgcgtgtgggtttggggtggggggacatcctgacctttctacaccctagtgcgtcccaactccagactgggaggagacgtctgcggcctctggtcttttcccttcttggacga

SEQ ID NO: 405066 - DNA, 122 bp, Homo sapiens
ccgctcgaattcatgaccccaatagaaaacttaaggccgcaactaagtaacggatcgctgcgaaggccaaactagccacgccaacgcccccactggagcctccccagcgctccgcccccgct

SEQ ID NO: 405067 - DNA, 122 bp, Homo sapiens
agtctgtgtccgcgcggcgttggtctgggccacctcgcaatgaggctttagtgatcttaacgacaagcagcctcaaagctagggtggaggagtggtcatttagaaagagcttccctctttct

SEQ ID NO: 405068 - DNA, 122 bp, Homo sapiens
cgccccgctctcttggggcgtggctcccagtggggggcgtggctcccggtggcttggccgcgcccctcctacaacagcccggaagagcgtgtggccgcgggcgactttggcttggccaaaga

SEQ ID NO: 405069 - DNA, 122 bp, Homo sapiens
ctgttacagaagatgtttttggacccattcccgaatatctttggcatgaaagtgtacccacgccgctctgtgtttccactgggcacatttccagatatgtttcatcagcctggagccctcag

SEQ ID NO: 405070 - DNA, 122 bp, Homo sapiens
ggcctctgccagagccatgctctgcactctggggtcagcagagttcaaaacgacctgcaacgtctggcgcttagctcctaaagaggtctccagtccagcgccgacggccagcggctagaggc

SEQ ID NO: 405071 - DNA, 122 bp, Homo sapiens
acatcttggaagaatcttggacttcagaaaacaattctagaaaaggggaatttgggacttcgttctgagagatatgatacgagatgtatgtctttaatagcagggcagttaagccaggactg

SEQ ID NO: 405072 - DNA, 122 bp, Homo sapiens
ccgcagccacttgttttggatctttctggcaccttctctattattacgcctgcgtcacctcgcccctcctccttcccccaactcgcgcaggtgcgaccgccacgccccttcggcgcatgcgc

SEQ ID NO: 405073 - DNA, 122 bp, Homo sapiens
gcagcgtgcgtgcgtgcgagtgtgcgtgtgagcgaggtgcgcgcgcacgacgcccaaaggcgggaactcctgtcccgcccgctgcctcattggtccgacctttcttgggtctcctccctctt

SEQ ID NO: 405074 - DNA, 122 bp, Homo sapiens
cgggcgggcgcggctgtgctgggaccccacagggctgtaccgctgggtcctgccggagaacgcagaaaagttcccccttgcccccgccccgtcattgcaagttcttgcttcccttaactgtc

SEQ ID NO: 405075 - DNA, 122 bp, Homo sapiens
tttgcatgacaataattgagccaagaatagaaagccacagggatgcaagggtgaggctggcggctgagctgggctaaacctcacaaatcagactacccagctctgctccgcaggggaaggga

SEQ ID NO: 405076 - DNA, 122 bp, Homo sapiens
ttcgcgtgggagggacgcagggctggcgcgcagagggtggtgtgagtgcgcggaacgcggcgcgcctgagggctatagctagcgcaggccgacgcgcaggtgaatgggagccctgtgggtct

SEQ ID NO: 405077 - DNA, 122 bp, Homo sapiens
cctgaaccgcggcttcgcatatgcccgctgcagctcgcggcgcggcgcgcaggccgccatcgcccgctgcacaaccacccgctgcggccgtcctgcccgctgcttctgtgccgcagcaccgg

SEQ ID NO: 405078 - DNA, 122 bp, Homo sapiens
gctgattcgggagctttcaaaaactatttttggaaaacccagatcccggtcttcagccagcgtcgcctgcagtggctagcactacccacaagggagaagccgacgctgcagggctttgccaa

SEQ ID NO: 405079 - DNA, 122 bp, Homo sapiens
cccactggcagttctcacagctgcagcttctactagagtttaaggagatggaaaagctcccggggacggagatggaaaagcagccagcgcttccaacaagttcacctaatcctgaggctggg

SEQ ID NO: 405080 - DNA, 122 bp, Homo sapiens
aggttgcagtgagccgagatcacaccattgcattccagcctgggggacactttgtcctcccgcctcccccaaaaacagagatgcagatggctgacccagccacccataggcacttagcctgc

SEQ ID NO: 405081 - DNA, 122 bp, Homo sapiens
gctactgggtggctgttgatgccattttctgattttaagagaagggagctgtggcatcagcgagcccctcagcccgagtagcaaaccaagttttgtttcacacgcgcgcacacatgcaaaca

SEQ ID NO: 405082 - DNA, 122 bp, Homo sapiens
tgcacgcgcgccccatggcgcaggatggggaggaagacgccacagagacctgccgacactcgtcatccctaagctgcctgcacccctgctttgggccaggcatgcctgagcgactcactccc

SEQ ID NO: 405083 - DNA, 122 bp, Homo sapiens
cggcagccggagagaacgccccagcaatagtcgctaggaggaagccccaggagcccttgccgcccacggaacgcgcctgcgtaatccgggtccaggccgccgacattccaggaccgccttcc

SEQ ID NO: 405084 - DNA, 122 bp, Homo sapiens
ctagagtatgcaccttgatttctgctgctttaattttgggaaagtggttttagctgtgaacgtcaatcaaccggagaggcctgttcaatttgaataaaacctatgtgtagcttgtgaagtag

SEQ ID NO: 405085 - DNA, 122 bp, Homo sapiens
agtaggtccaagtctgtctgtctttctcttgccatggtttcagaagaagcagatcttggccggacgtggtagctcacacctgtaatcccagcactttgggaggctgagacgggaggattgct

SEQ ID NO: 405086 - DNA, 122 bp, Homo sapiens
agagggataaaagaaaagagaaactagttcaaaagagtaaggctttgcctttcaagtctccggaaggagtgggggaacaaatgtgtttggaactgatctaatatgacttgcattattatttc

SEQ ID NO: 405087 - DNA, 122 bp, Homo sapiens
ggaaggaaattctgagagggtcgaggagtgaaagagcttagtcaagggatttcgtacgtgcgttttggggggccgatgagagtgctttctcgggcctttgtactcagtatagagacggcaag

SEQ ID NO: 405088 - DNA, 122 bp, Homo sapiens
aaaaaagaatgtgtaactggctaagccaaggtgactccagattccagtatgaagccctctcgagaacgaggagggctgaaatcgctgacgttttgctgaatttcatgagcatgcacggcctc

SEQ ID NO: 405089 - DNA, 122 bp, Homo sapiens
aggctggccttggaggtgccaagtgaccctgcctgacagtgtcagctgtcctccgcagcgcgccccctccactgcaaccttctaagagccctggctcaagtctcctgctgggacacaccttc

SEQ ID NO: 405090 - DNA, 122 bp, Homo sapiens
atcaatagttgtctgacccaaacctcaacaagtagaaggaattttggactgaaatgtttccgttcactaagtctcaattgcgttcttggaaaggtgctggcacagctgagggacaccccagc

SEQ ID NO: 405091 - DNA, 122 bp, Homo sapiens
tgctgctgctgctgcggcggctgcaccggcggcgccgaggccgagatcgaggccggggtgcgcgcttcgcaaacgtgccctatccgtgcggcttggctgcgccagcccttgcggccacccgg

SEQ ID NO: 405092 - DNA, 122 bp, Homo sapiens
agacagggcttatcccagcctcaccacctgccattttcctttattagtttagtttaatttcgaggttggtgggggaagcctatggcgctcatcaccggaagcacttttattagaattgaaat

SEQ ID NO: 405093 - DNA, 122 bp, Homo sapiens
ctgcatgagccgtcacccccctttctccactgcaggcctccagccagctgtcccggggttcggccacgacgccccgaggtgtcctgcacacgttcagtccgtcacccaaactgcagaactca

SEQ ID NO: 405094 - DNA, 122 bp, Homo sapiens
aggagaagagatgaatttctccactgctttctacctcccattggtcatagttttgctccacggatgtcaattctcttgtatttccaggctacaaacttcatcactgacagaattcctggggc

SEQ ID NO: 405095 - DNA, 122 bp, Homo sapiens
ctaggagaccattgacctaggtttcacagcagatcctttaattggacagaaaaggggcttcgacacttctcagctatgctagagagcagtttgcccatacagggacctggagagagacatca

SEQ ID NO: 405096 - DNA, 122 bp, Homo sapiens
tgcgtcttttatctacgtaaacaaacttgtcattgaaaaagtccttggctttgaagtcgccggatggcgtaaataacactgacactcaaatcccccgtctgatttcagattgggtcgatttc

SEQ ID NO: 405097 - DNA, 122 bp, Homo sapiens
ccatccgcctcggtacctcctggtccggaaggtcagagccagcgggggagtgggtcaaggcgtaagcccaggggccggcaggagctcaggaaggccggttccccgttgggaaagagcgtgtt

SEQ ID NO: 405098 - DNA, 122 bp, Homo sapiens
agatgcacggggcaaggaggtgggaagggcatggaacttccatgcccttctgaggtgtgccgcccttcaggatgctccacgggttcagctctcaggaagctctctctaccccatcctcttgg

SEQ ID NO: 405099 - DNA, 122 bp, Homo sapiens
agctcagcaggtgacttattcccagtgctgctcttctcacagacacaaaaccaacagttccggtctcttccgatagttctggcagagacggctgcggggagacacgggcggaggcgggtccg

SEQ ID NO: 405100 - DNA, 122 bp, Homo sapiens
caggggcctggccaatagctggggttcaggacacagttcagattagcaggggagggatcccggggatggccagggtagatgacacttccaagcacttccgagtgagtgaggctccagccccg

SEQ ID NO: 405101 - DNA, 122 bp, Homo sapiens
caggcaagccaggcttccccaggctgaggtgaagaaggggcgggcggcgggcgggagcagcggctggagttacagggcctcctgcctgccccagccgaggactgaggccccggcctgaatcc

SEQ ID NO: 405102 - DNA, 122 bp, Homo sapiens
cgtttcaacgtcattgtccattctgaggctctctttctgtctctctcgctcttttccctgcgctccctccctccttggagcagatgctttctcccccagcgaggggccgggagacgacggcg

SEQ ID NO: 405103 - DNA, 122 bp, Homo sapiens
taaaaaaaaaaaaaaagtccaaaatcacaaagtggcttttgcagcggtccttgcctgtgacgccgggccatggctggagctccttgctccgtacctctcaggagcctccatcctgtaccaat

SEQ ID NO: 405104 - DNA, 122 bp, Homo sapiens
cctgtggctgctggtgaggaagccagaccccgcgccctttagaagcgagtcctgaccagccgtggtcaccagcttgggaaatggggtcaggcaatgaatgaatgagttggtgagggaaggag

SEQ ID NO: 405105 - DNA, 122 bp, Homo sapiens
tacacttcccattgtgccctctcgcgcttcctgccgcgctgcacgctgggagtgcaggaccgcgaggcctcaaggtattttggaactcatattctttagtcaactaggtcctaaatgttata

SEQ ID NO: 405106 - DNA, 122 bp, Homo sapiens
aaatcaaatcatgcctcaaagggcttcccagatacaagacctgcttcagggaggggccgccggtgtcaagctgctgcaagattgtcgggtgcaggtcaacggcacgcttattcattattgat

SEQ ID NO: 405107 - DNA, 122 bp, Homo sapiens
accaccacgtggaaaactcaaacataaagacctttgacaaatagcatctcttccctcctccgcagacggcggtggccacagagagtagggctgctggaagccatggtgtggctgttgcagcc

SEQ ID NO: 405108 - DNA, 122 bp, Homo sapiens
cggagtggggcttgacatctccagttctaacaggctcccaggtgatgctgattctggtcccgggactacactttgagaactgctgcttcaggttgcatcctgcccccagcacttatgctaat

SEQ ID NO: 405109 - DNA, 122 bp, Homo sapiens
caaagatgtctgaccccagcactgtttatctggctgcaaacccactaataacatagtcaacgacagtcagtacagagcaggggccccataccttatttctgccaaggctttatggatgactc

SEQ ID NO: 405110 - DNA, 122 bp, Homo sapiens
tctcagctatttcatgactctatccagataggagctaccttaggaaaagagcaacacctacgattcctatccatagaatggctttagtcgggtcccatggaatacaattgattacaccctga

SEQ ID NO: 405111 - DNA, 122 bp, Homo sapiens
agggggattccaagagagatttttgtaaatgtcaaatagtcgacctcatgctgggcagaacgctgtatttcagtatacagggaagataaagaaagaggtagagaagagattgtcctgttttc

SEQ ID NO: 405112 - DNA, 122 bp, Homo sapiens
ctgggtacagtgaaactgcttcccctagcttccatttatgatgatttccattatttggaacgtttgttactctttctctctctttctgtcacacacatgggtacagtgagagctagatgcag

SEQ ID NO: 405113 - DNA, 122 bp, Homo sapiens
tctgcactcccaaaggcagtttctggccctttactgtagtcaaaggagatcgcgtagcagcggtcgtttattggctaggctgtttgtcttttttctctactgcagcatgagtcagaacccac

SEQ ID NO: 405114 - DNA, 122 bp, Homo sapiens
gccgaggccccgagcccacccggtgctgacaataggccctggctgctggttttcagttgccggaggcgcagataacaattagccaggcagtgctaggcaccagctgacagtccccgtttgtc

SEQ ID NO: 405115 - DNA, 122 bp, Homo sapiens
gctgccgccaccgccgcctccgccgccgagcaggctggatgggaggaggaggcggagacccggcttcctgaggggaagtcgccgccactaccggcttatgactggacagcacagacgccatg

SEQ ID NO: 405116 - DNA, 122 bp, Homo sapiens
agaggaaaccgcccttctgtttgttcaactccttctcctaaggggagaaatcaatatttacgtccagactccaggtatccgtacaattgatttttcagatgtttatactcagccaaaggcgg

SEQ ID NO: 405117 - DNA, 122 bp, Homo sapiens
caggggaggaccgtggaccctgcccctcactgtggctggggcctcaggctgagtcctggccgtgttaggggcgggtccccgggtgttctccctgccgttgttggtttgggaaaaccctgtgc

SEQ ID NO: 405118 - DNA, 122 bp, Homo sapiens
cagagcaagtgcccatccagagggaaacagcagcagccttcctcatcactcagctgcatccggcagtcctagggaagaaggcacctagttcacctcagcctaggcaccttggacactgaggg

SEQ ID NO: 405119 - DNA, 122 bp, Homo sapiens
tgtcctcatctgtaatagtaattataaagaaccttgtaagctgaaagtcattcaaagaaacgtaaatgaatcttttcttgttagaattgtgaaccccatgattagctggaacagtttttccc

SEQ ID NO: 405120 - DNA, 122 bp, Homo sapiens
attgctctatattgataatgagaggtgacacagggagagtatggggaggggggtgttgcacggaagagtgtaaaaaatgtgaaactcatcttctgtaagggaaagccagtagataatggctg

SEQ ID NO: 405121 - DNA, 122 bp, Homo sapiens
acgagtggcgagttgtgtgatggctcatgacctccgggctgagtggcttggtctccccctcgccacactgtgccctgcccatacccagaaagaagacgcaaagtggggatcctgcccctatt

SEQ ID NO: 405122 - DNA, 122 bp, Homo sapiens
tggaatccagtccagctagtataggatgaaggagatgtataaagaggtatagatgtatcacggaccaactgggagggctgaagaaaaagagtctaggctaagcttccaggatgactcccaaa

SEQ ID NO: 405123 - DNA, 122 bp, Homo sapiens
gctcaggtgagtgtgcacctgcacgtggggtcctggccttgcaatgcccactcgctgtcgcggtggcgtggaccttaacaggaactccatagtactaccgactacatgctgtattttgaagg

SEQ ID NO: 405124 - DNA, 122 bp, Homo sapiens
aggcttggcggagctaggggaagtaatgcgaggctctggtcgccgagcgagggctcgcggcggcgaggcgaaagaagagagaagataggaagaagggaagtagggcgaggtggaggaagaag

SEQ ID NO: 405125 - DNA, 122 bp, Homo sapiens
atcaggatcttgaagagacacctgcattcccatgttcattgtagctatattgacaatagccgagatatgaaaacaacctgtttccactgatggatgagtagataaagaaaatgtgtatatat

SEQ ID NO: 405126 - DNA, 122 bp, Homo sapiens
agcctgtgaaatatagtgagacacatctctacaaaaaacttaaaaattagcccggcatggcgatgtatgcctgtgatctcagctacttgtaagggctgaagcgggagaatagcttgagccca

SEQ ID NO: 405127 - DNA, 122 bp, Homo sapiens
agtagcaggagtctttttaatctccatagatataaaggaatcagtgtgggagggtatccccgagcccattttaaactcagggacattgatatgaaatcccagtagagggcaataatccacat

SEQ ID NO: 405128 - DNA, 122 bp, Homo sapiens
agcgagagggaagaaacaagatggcggctgaaggcgatccggagtggggccccagcaattcggattgagccttctccctccacccgcttccgtcggccgggcccctcccgcccggccccgcg

SEQ ID NO: 405129 - DNA, 122 bp, Homo sapiens
gagcagcgtgtccggccggtccttggcacagaaggtgcatatgctcccgaggttattccacgtcccatgtcatcatcctgaccagacaacaatcctccctgtccctctgacgtacctcttat

SEQ ID NO: 405130 - DNA, 122 bp, Homo sapiens
ctgtgggccgaatgcgaaggtggggaggtgggcgggggatgactctgccattcctgggtccgctgtgttaggctgaaggcaaaaggaaaccaaggcctgggagttttccaggaaacgaaagc

SEQ ID NO: 405131 - DNA, 122 bp, Homo sapiens
gcggtcgatgggactgggcgccctggagcagggggcggcgcttgtcggggaggctgcggccgcacagagcccatggaaggggtgggaggctcaggcatggcgggctgcaggtcccgagccct

SEQ ID NO: 405132 - DNA, 122 bp, Homo sapiens
ttcacctgagggacccctgatgccgcttcctcacagaacctgcaggcactggcaccacgacgctctcttagaaaaatgggtcctcagttctcgcgagagcagctgccctggctatccacgct

SEQ ID NO: 405133 - DNA, 122 bp, Homo sapiens
cctgcccctctggggcaccagagcttcttaaggcagggacagtgtgggtggagctcaaagcggggtggcccctcccttcctccctccttccttcctttctctccctccgccctccttcctcc

SEQ ID NO: 405134 - DNA, 122 bp, Homo sapiens
cctcctcgagcaaggtggggggtcccagggtcaggtcaggtgcagatcctgtggcagccacgtctttccatgctgggcctgctgggccccccaggcttcctgatggggtccccagttaggag

SEQ ID NO: 405135 - DNA, 122 bp, Homo sapiens
gctagggacgcctgcgggagttcacggggaggcgccggtgtctgaggtctgagaagacagcggccaccggaaaaggtgctaatgtttgcagaccccgatccatcgacaccccaaggaaatgc

SEQ ID NO: 405136 - DNA, 122 bp, Homo sapiens
aggaggctcagccctggaacaggctcccggtctcacttctggcgatctgaggcccagcctcgctgcctgtggccgggagctgtgtcctgatccttgatcctggctgtgtgtgctgtcctggt

SEQ ID NO: 405137 - DNA, 122 bp, Homo sapiens
tcacatatcaccaccaacaccgcccagtgagccccaggcgctggatgtgagggctctgggcgaggccagcgcggaactacatttcccaggcggccgcggcgggtgcgcctgcgcaatgcgcg

SEQ ID NO: 405138 - DNA, 122 bp, Homo sapiens
tggtcatttctgagaggcggtagggtgggggggtccgatgagattgatgccgtagaggagcgattgggtccagcgccagagtaattttcattttcagcttcgctgttcctcctcggactccg

SEQ ID NO: 405139 - DNA, 122 bp, Homo sapiens
agccgcgaggtcctcgacccgccgggcaagcggggcgcttcgcccatcttccctcccagtcgtgccccagcctctggaaacacgggtttcaggttttggccttgttcctaaacttcacaagg

SEQ ID NO: 405140 - DNA, 122 bp, Homo sapiens
gtatccctgcgcgcggcgggccgggctgggcagctttataaacagccgtggtgtgagcctcgaagggaaccatcagcgcctcctgtccacggagctccaggtctacaatggcagcggccgcc

SEQ ID NO: 405141 - DNA, 122 bp, Homo sapiens
gtggccggaacaaaggcgcgaaaattcgtcccggagcacttcaccttcactcacgccggccgccccacccctggcgcccgcccgcctcacccctggcgcccccccgcctgcccgcccgccca

SEQ ID NO: 405142 - DNA, 122 bp, Homo sapiens
agcagagccaacagccagcctgggaaggcgccaactcagacagaaactgatccaagccctcgtctctgttctcgcagatggcctgggaaaggaaacctgtccgaaacctgcctgcgagtccc

SEQ ID NO: 405143 - DNA, 122 bp, Homo sapiens
gttcgcatcagggatgtgtttggctcacactggctggtaacgaggaccctttccccttcacgtgtgggtgggaggaaaccgcaggtcttcgtacgctgctcattgtaagggcctggaatttc

SEQ ID NO: 405144 - DNA, 122 bp, Homo sapiens
ccctctttttttggaatctgcaagtggatatttgtctagctttgaggatttcgttggaaacgggattacatataaaaagcagacagcagcattcccacaaacttctttgtgatgtttgcatt

SEQ ID NO: 405145 - DNA, 122 bp, Homo sapiens
gtagatagggcgctgctggacgccccaaccccactcactcttcgtgatggctgcagtcagcgtggtcttcccgtggtccacatggccgatggtacccacattcacatgtggcttgtcgcgca

SEQ ID NO: 405146 - DNA, 122 bp, Homo sapiens
gccccgtcccagtcccttaaagatcacaaacatcacagtcctctgatttgggttcccctacgttctaagcagggctcccccaacgccgtggtgatataacccagccacagttggggaagcat

SEQ ID NO: 405147 - DNA, 122 bp, Homo sapiens
gctccgggcagtcgggggcttgcgggcgctccggggaggatgcgggcaccaccggctggacggtcgcagcctgcagggggccctggggacagcctgcctcatccccccggcgggctcgggcc

SEQ ID NO: 405148 - DNA, 122 bp, Homo sapiens
ggttgggaagagctgctttcctgactctcgttccctgcctcaggcttcccttatcccaatcgcttcgaacccttggctcagcgtagaggagtcaagcctggattctagtcccaccttgccca

SEQ ID NO: 405149 - DNA, 122 bp, Homo sapiens
gcgtgcgcatgcgcatgcgcatgccctcaccctcatgcgcaggcctaggagtggggctggcgtcccgggcgaccagtgtgttgttgttgggtcttaattctaaatttgtcagtggctctcct

SEQ ID NO: 405150 - DNA, 122 bp, Homo sapiens
agagacaggggaaggtctggccgtggagcggactgcacacggcactgtgctggctggggtcggccggtgatgctgagtggtctgtctggaggccagctgtgaaatgcatagctaggtggcag

SEQ ID NO: 405151 - DNA, 122 bp, Homo sapiens
aaaataaaataaaataaaatgaaagtcagacaattagggagcctgtctggccatggtggccgcggctggtggttggcgcggctgcgctgcggcccggggcagtgcggagccaggacagtcgc

SEQ ID NO: 405152 - DNA, 122 bp, Homo sapiens
gacgacaaaatctacttcttctttcgtgagacggcggtagaggcggcgccggcactgggacgcctgtccgtgtcccgcgttggccagatctgccgggtgaggagtccctgggccacacccgg

SEQ ID NO: 405153 - DNA, 122 bp, Homo sapiens
tcaatgctaataccaggaggccccggaagatggatggaaccgacaggaaccttgaaatcccgacacgggggctggtgcctcaaccgataaaggatttcttcactgctactggggcagggaca

SEQ ID NO: 405154 - DNA, 122 bp, Homo sapiens
tgtgggggctcctgccctcggtcggctctgtgcgtttgagaaaacaaatattagaacagtcgtaaacactatcggtctcttccgacagagaaggcgatcccatgggtgctgcagaaggaggg

SEQ ID NO: 405155 - DNA, 122 bp, Homo sapiens
attctgcttttgcttggcatacatatgccaagtgcctcagaggcaggggagcatcttcgacgcctgttttgttgtgcacatgtgctggctctacctgctctgaagtgctctcttgtttagct

SEQ ID NO: 405156 - DNA, 122 bp, Homo sapiens
tcacactttgtttggatcactagaaatcttaaagcctatatttcagcccgtgttaagcaacggtatagtaccatgtggcatgcattttctatgggctaatttttattttcccttagccccta

SEQ ID NO: 405157 - DNA, 122 bp, Homo sapiens
aggggcccgagccgggaagccggtcccaaccttacactgggcggcccccaggaagcccagcgcctcggttcggcgactctgcccagtcgcagctccccagaagtcagccctcggggtcgcgg

SEQ ID NO: 405158 - DNA, 122 bp, Homo sapiens
tgtcaggaagataagggctaatggagtttctggccaggctgctccaggaggttgcttctccgggcatgcagcacgatgcagttccctttgtttgcccgtctagcacccaccccacttctgga

SEQ ID NO: 405159 - DNA, 122 bp, Homo sapiens
ttctttaacaatttgcgtaacaaaccgaggcgtcctacgccatctcgctgaaatgaaattcggatgtagacacccttgcgcttcaggactctacgctcttgcagcagctcctctgcccaatg

SEQ ID NO: 405160 - DNA, 122 bp, Homo sapiens
gtcaaatttttatccaacacaaaacaattacatacgcgttaatcaaaaagaaattagcaacggccaaccccaatcccattactttcaaaaaaagtcctctaactttcctttccagttgaatg

SEQ ID NO: 405161 - DNA, 122 bp, Homo sapiens
caccagtcagcctcaggcctccaggccaggcctctcccatctgctcaccagggttcgactcggacctcctgacactggtgcctgcacttggcaagaacaagtccctcaagcacctgtttttg

SEQ ID NO: 405162 - DNA, 122 bp, Homo sapiens
tcgggaagaaaacaccctatttctctccggattgctaagcgtcgttgactgtgcggttgccgtggaaaccgttactaggcaacgaggaagtggcaggcagcaccgcaaactaggtctcccct

SEQ ID NO: 405163 - DNA, 122 bp, Homo sapiens
atatatatatatatatatatatatgagtttgcccaaagctcatagttgtagcagtctgctcgttgtattctaccatgcagcaatgtagcagatatgacatgggtggcaccctcaagacatag

SEQ ID NO: 405164 - DNA, 122 bp, Homo sapiens
agtaggcggcaaagaggtcatcagcaaggagtgttcgaccctggggagaatagcgggcgacggggctccagggaggccctttggattgactgttgcccaccttatctcagcaactgacactc

SEQ ID NO: 405165 - DNA, 122 bp, Homo sapiens
tcaaaaccccgggtaggtgcagaatctcgagtaggtgcacgtggtacctacctcgagacccgccccctcatcacggaattgcctgagaaagccagtcctggcgcccagatcttcaccttatt

SEQ ID NO: 405166 - DNA, 122 bp, Homo sapiens
gctgccctctgcgctcccgtctagaggccgcaccgttcacgccccacgtctgcgcccaggcgaggggatttcctgccaggcgaagtacagagagcggactctggagaccccctgaccttgcc

SEQ ID NO: 405167 - DNA, 122 bp, Homo sapiens
tcgaacaaaatgaagacagggagttagcaaagctgagaaagtcgggaaaggaatcacgtccgtcgcgctcctgacgtggctacacacggtgcatccaattccgtcgagttgtcatttacaac

SEQ ID NO: 405168 - DNA, 122 bp, Homo sapiens
ttgtttgctagatcggagcggcacgctggtgtggggagaacacccagagccacagtcagccgggtccggccggaaatcgcggctgcgcttccggcactgcttctcgtccatcccagtccttc

SEQ ID NO: 405169 - DNA, 122 bp, Homo sapiens
acctaatcttaccctgatgtgagccattttaattcatcgaggttccgctaatgatcctggcgatttacattgttgtcattcttgagcattattatgctttcagagaaagggatcaggcttgt

SEQ ID NO: 405170 - DNA, 122 bp, Homo sapiens
ccggcccagcccgcccagcccggccccgccccggcccgaagccccgcccccgcccgctaccgtgctgacagatcccaggctgtcccaaccctgggtctccggtggcctgagtcttcctggag

SEQ ID NO: 405171 - DNA, 122 bp, Homo sapiens
aagaaaatctagctccttcttcggggccaagagcactttgagcgttagccgtctcttggccgctggctaaataaacggactcttaattcgtctccaagtgtggcgttttctctaactcgctc

SEQ ID NO: 405172 - DNA, 122 bp, Homo sapiens
tccttcgctttttctgaatctcggattctctgggaatagtaaagcctctcttgccgagctcgtgtgagaaattaacaataaattaacgagaaattaatggaaagtcctttgctttggtcaat

SEQ ID NO: 405173 - DNA, 122 bp, Homo sapiens
tgttagtaaaaaggtgctttgaaggctgcggctctgcagttcttattcactggctgggaccgtgtgcttccatgggttcattaaggggcgcattagcattacattaattggcataaacagct

SEQ ID NO: 405174 - DNA, 122 bp, Homo sapiens
ttgtcttgcatgcaataaatatcagcgggcgcagctgtttggggccactaccggtctccgcgtcttgatggtagtggtcccctgggcccagctgttttccctttatctctttgtcttgtgtc

SEQ ID NO: 405175 - DNA, 122 bp, Homo sapiens
gcttagtgtgtgggtggtttagggaaggcttgctttatgcttctgcattgctactgcattcggactgcagaaacttccaagtatactaggacattcaaccctattttcaaatggctttgttc

SEQ ID NO: 405176 - DNA, 122 bp, Homo sapiens
ggctcgccgctctcggcctctgctagtccgcacccctcccaaagcccacagcccgcggcccgccccaccctaccagctgcaaggccccgccccctagctgtcaagaccccgcccccagctgg

SEQ ID NO: 405177 - DNA, 122 bp, Homo sapiens
gcaaaggcctaacacagcaaaggcgactgtcaaatcgatcccttttgggtctgctgtacccgtcctctagggaatcaaaataaggcaaaataataaaaagagtacagagaagtttggcggcg

SEQ ID NO: 405178 - DNA, 122 bp, Homo sapiens
ttgctcgcagagttcttcaagaggctctacctggtgacgaggtagtgactcagggggcgccggggaatgacagtgctgtgggaagagacatcaaactgccttctattcccactcagcaaggc

SEQ ID NO: 405179 - DNA, 122 bp, Homo sapiens
gtcgctcggaagggtcatttcacggaccggtcgtctggggccagtgcgtcttgccccgcacggaagacccctcgcttcgaggacaggaaagcttttaaagtgaggattggctcgccgcgcct

SEQ ID NO: 405180 - DNA, 122 bp, Homo sapiens
agggggtatccggcctcaggcggatactgacgccctgagggcgcggaatagggcggcctgcgcagggcccgccgtctcggccttgcaaaaacagcggcctcttcaaagcccctaccggaacc

SEQ ID NO: 405181 - DNA, 122 bp, Homo sapiens
ggagtggggatcctggcgctaggctacccaggagaggaggggaagggcaacccgcggtcccgcctgtggtgcccggctgtgctcatccccacgccccagaccccaaaaggggctggggaggg

SEQ ID NO: 405182 - DNA, 122 bp, Homo sapiens
gagttctcttagcctcccctccagggctcgagtcgcctctctcaggagccccgcggccagcgtgctcagtcccagtcccagtcccactcccagctggttgtggtccctccgcccctttctct

SEQ ID NO: 405183 - DNA, 122 bp, Homo sapiens
acagtggagagttgcacttggtcataaatcacacgtgactgcagccacacgcaggtgagtcgcacacgcattccagcacatgtcaaatggtcaggaacagctccctgtcaccccatacaccg

SEQ ID NO: 405184 - DNA, 122 bp, Homo sapiens
ggggccactcagggggcgtggttttcgtcagcggcggtcacgatgacgtccatccaaatgcgcatggcttcggggctcggagccaccatgtagaaaaggcgttcgtaggttttgacgcagaa

SEQ ID NO: 405185 - DNA, 122 bp, Homo sapiens
cccagtggccgcctcccggcctcctctccgggcccagctccttgctcgtggctgcgcccgcgggcccagctcctgcctctgaacatcctcctgtgactcggctcctgcccagctcccagcgg

SEQ ID NO: 405186 - DNA, 122 bp, Homo sapiens
tcttaggaaatccaggtgtcctgaccacacgggtcctgaccatttccttgtcttagaacacgtactttagaaaacttgtaattgttaatactttctctgctcccttgaaatgtaaatcttct

SEQ ID NO: 405187 - DNA, 122 bp, Homo sapiens
ttctgcatcctcaccaacacagcgtatttcagagtgtttaattttagccatattccttggcggttttattttgcatttcctcggtggttttattttgcatttcctcaatgactaatgaagtt

SEQ ID NO: 405188 - DNA, 122 bp, Homo sapiens
taaaaagcgactcctttcccacaaaggaaatacgactggttcgcatctatcaagggttggcgttgggataagagggtgaagtatcagctggccctgattctctgaattcccggacccaataa

SEQ ID NO: 405189 - DNA, 122 bp, Homo sapiens
gcggctccactacccggaagttggatccgctcccgctcctcctcctcctggcgcggagcgcgcgagtgagatcatccccacgcacctactcggcggctgcggccgcttcacctgcaggcggg

SEQ ID NO: 405190 - DNA, 122 bp, Homo sapiens
taatcccgctaattcctgtgatttacacagcctcttggctctgtgtactatcttcttctccgggaagtggtgggaaggcgaggccacggatgcagtgggcactgcctggaatccccccgctg

SEQ ID NO: 405191 - DNA, 122 bp, Homo sapiens
ccatttacagatagggacacaggggctcttgtccaggatcacacctccagaaagtagtagcgcctgcatttttaaccactccacccctctgcctccttgtgtggttcagatccaggagaatg

SEQ ID NO: 405192 - DNA, 122 bp, Homo sapiens
ttgtttctgaggtcccgccctcgagacggagaccccgccctggactcgccatctggagagcgagggaggaaggaaggatacagacccaggcgttcaccccacctccacccccgcccccgaca

SEQ ID NO: 405193 - DNA, 122 bp, Homo sapiens
gccgccaaaaagactctcctcttaggtattcctgccaactccgttttataatctccgtgccggggagggaggacagttcaggcactttgtctgcaggaaggaagcaattaaattattagcac

SEQ ID NO: 405194 - DNA, 122 bp, Homo sapiens
agttttgccattgtgatgatctcactatactggaccctccaatgactcagggatgttacccgtgttttgctaaggctacagcttgtagccagagaaagccctaaacccatgtcccagggtct

SEQ ID NO: 405195 - DNA, 122 bp, Homo sapiens
ctgtgcgaagctggtgaaaaggttgcccggagagagcggaagctgtgaggatgggcaaagcgcccctgcccagccgccccgccgcagaaccggtacacgcgcctgcccgccccgggcgcccc

SEQ ID NO: 405196 - DNA, 122 bp, Homo sapiens
aggggctggtgattgacagaatggtgtagtagtagatggggtggagccgctgggtggggtcgagactggcagctgagagataccaaaaggaagaaaaaagaaaaccattgctcttgatattg

SEQ ID NO: 405197 - DNA, 122 bp, Homo sapiens
acaggaccaaatgctttgactctactttgcaaactctttccacataatcatggcaggatccgcatgatcctgaactggagaaacaatatagtcaactaatgctctgtatgtgtctcagaaat

SEQ ID NO: 405198 - DNA, 122 bp, Homo sapiens
tcctgacttacagagcatttgtccatgtcattccacacttccacgcctaccaacacgatccgaatgttcagtggtctgtaaaactgggcaaaacaggcaaaactggcattggagttgggatc

SEQ ID NO: 405199 - DNA, 122 bp, Homo sapiens
cccccaccccataaatcgaaccgctttggtgctgtccttccacatttagaaacaaagtaccgctcccttactttaagattcgaaagcgctacatggtttcggggcccaagcaagtagtcttt

SEQ ID NO: 405200 - DNA, 122 bp, Homo sapiens
ggactgaaagcgaacgtccctcagttgggtggccgggagttgcaccagttataagccgggcgtatttcgatcggctagtagttgtttacttggtgaggtttgcgccaggcggaaggcggttg

SEQ ID NO: 405201 - DNA, 122 bp, Homo sapiens
atcgacttctcgaacgtactgggggttgctcgctgatggttgcagagaatggccacgactcggttggctcggttgtaggataagatcttagctgctatgctgtcctcggctgagaggcacgg

SEQ ID NO: 405202 - DNA, 122 bp, Homo sapiens
tgcatggcacttcttgaagtgaagcactacacacagcacagcggaaaatgtccctcactccgccatttcagtcagaatcccaacactctcagtccactaggaataagcagaatatagtcaat

SEQ ID NO: 405203 - DNA, 122 bp, Homo sapiens
ttttcctgcctgtggaaggccctctctctgtttaggaacgtggatgtggcaggggctgggcgggcacttggcctttataacaacagaagaggattttcagtgacgaggaagcatcccgccct

SEQ ID NO: 405204 - DNA, 122 bp, Homo sapiens
agagacgcacgaagtgagaaagagcggccacaagagggcacccgcgagtcagcccagctgcgagcctggcgctaaaggccgcggagagcgggtctcctgcggagctgaaagccacagcaggg

SEQ ID NO: 405205 - DNA, 122 bp, Homo sapiens
gccttccatctctggcccaccgctaaatttccaccttgtacaaaagcgctagctgcagggcgagggctgggggcgcggcgcagagcgctctcccacgcgccggggatcaggtgcggaaggct

SEQ ID NO: 405206 - DNA, 122 bp, Homo sapiens
ccccacctgcgccacctgcgcccaccctgtgaccctggctcagcgaccttggcccttaatcgcccaacgccgattcctcaaaattccggctgcgctgaatcgggctgcttttgccgccgccc

SEQ ID NO: 405207 - DNA, 122 bp, Homo sapiens
tctcccacctccacctcttgtcccattggaaggtcttcagggacaatgacatgcatggagcggtcatctcctgtgacagctatgcattcttctggataccgcctggggctgctttatagtta

SEQ ID NO: 405208 - DNA, 122 bp, Homo sapiens
gggcctgggtggctcccctccagacagccatctgccgtccctttcccggggcgatggtgccgggtggggctccccagttcgccttgtcactgggacctggagagctcagtgcaagccctaga

SEQ ID NO: 405209 - DNA, 122 bp, Homo sapiens
agaaaagaaagatggtgggtgctaactacatcaagggctaagggtatcacagaggcgatgcgatgatggagagcgggtgggagttgaagtgcgctgccttcccacgcggtgtaagctctggc

SEQ ID NO: 405210 - DNA, 122 bp, Homo sapiens
cgctgtgtgaagcgaggttgggcgcaagagaagcaggcatgacctggccaacggggaggccggaagtcctcgcctttctggtctttcacgttggcagcgcctctgctgggcctcgggccgct

SEQ ID NO: 405211 - DNA, 122 bp, Homo sapiens
agagcaggtggctctttgtctgcagcctgatcccagcacccccactgcacccccaccccacggccctccccagcctgggaggcagcccctaggaggggattggtgcttgctcccagggcacg

SEQ ID NO: 405212 - DNA, 122 bp, Homo sapiens
gaaaaaaaagtgctagctgggcactactgttctgattagagagaggaggaaactaaggcacggagaggttaagtaatttgccccaggtttcgtagctaacaagtgaaggagccagaatttca

SEQ ID NO: 405213 - DNA, 122 bp, Homo sapiens
ttttgataagaaactttcagttgcctttgatggagatgaccactggcagcccaccacctccgccaagtcggagtagactggcggcggctcgcgcaggcagcataggaagaaggccgcgtcca

SEQ ID NO: 405214 - DNA, 122 bp, Homo sapiens
atgtccccgtccagttatgagcgagtctttgctctctgagcagcctctgggtgcactccccgtgtcagcctggtggagtgtgcacattgactgtttgccaggctggggtgctggtctcgttt

SEQ ID NO: 405215 - DNA, 122 bp, Homo sapiens
cctgcacagggacccccgaagggctggttcagtggcctccagagatccctgggaccctcacgccctgctcccttgcccattcttgctctggacggttcccccagcccatgcaataaatcacc

SEQ ID NO: 405216 - DNA, 122 bp, Homo sapiens
cctcagcacattacgttctttttgctagtactgaccaccctttggctcctgctgcaaccacgaattctgtgtgttaacatacttcacttgctaatgccttttgctagactccagcaactgtc

SEQ ID NO: 405217 - DNA, 122 bp, Homo sapiens
agccaggccaatcatagcctgtgtctgaggcgcgcggagctggagcgcccagggcatgtccgccgatcccaaggaggcaatctgtcaggcgccgcccgggcggcagtatgcctgagggggtc

SEQ ID NO: 405218 - DNA, 122 bp, Homo sapiens
ccacccctcccaccttaaaggcctccaggcctggtggggagggggtgcttagaatgcaaacgaaagctgggacaggacatctgtcaccaaagccaagcgagatattgacaaacacggatcct

SEQ ID NO: 405219 - DNA, 122 bp, Homo sapiens
gatgctgcctcctgggggctgtccctttctacagagaagcattttcttcatgactgagatcgggggtggccccagttccctggagacaccagtgttgcaggaggctactcttcttcctgatt

SEQ ID NO: 405220 - DNA, 122 bp, Homo sapiens
ccgcgggggccgtggcggaaaggtccctccggaggacgaagtccctgctgtggcctttgccgctgctgccgccgccgccactgttggtggtggtgtagcccgagagggcaggaggaggagga

SEQ ID NO: 405221 - DNA, 122 bp, Homo sapiens
tcagtcctgacacagactcggtgagggcgggaagtggtgccgtggggctgcagcctggcccgcccgctccatcggcctagggcggccccaccgccctccgggccttaccttgagttcgggct

SEQ ID NO: 405222 - DNA, 122 bp, Homo sapiens
agagaagtggggaacacagttttggcccttggaatacccggcggctgctgatgggggggccggtttttgctcggcgttcgcccacgccgggagccccctctggcggggagaaaagtggctgt

SEQ ID NO: 405223 - DNA, 122 bp, Homo sapiens
tgaagacagtgtttgacgaggcgatccgcgcggtgctctgcccgcccccagtgaagaagccggggaagaagtgcaccgtcttctagagccctggcccacccgagcctgagggctggcgggga

SEQ ID NO: 405224 - DNA, 122 bp, Homo sapiens
gaccagttggaaagtaattgtttctaatgtacttcacctggtccactagccgtccgtatccgctgcagcctgtggggcctgcgggccggggagccgatcgcgcttcagctcagcgcctttcc

SEQ ID NO: 405225 - DNA, 122 bp, Homo sapiens
ccctcccctgaagaaggcggaccagggcagggagcagcggccccgggagggcggggcggacggggtccgcggagggagaggggcagggggtgtggcggctgcaggcggagcaggggctgggc

SEQ ID NO: 405226 - DNA, 122 bp, Homo sapiens
ggccttcgtacccgggctacaggggtgcggctctgcctgttactgtcgagtgggtcgggccgtgggtatgagcgcttgtgtgcgctggggccaggtcgtgggtgcccccacccttcccccat

SEQ ID NO: 405227 - DNA, 122 bp, Homo sapiens
atgaaacagaaccagttccaaacacctgctctctgtttccaagatgacagcttgctgctgcgtcctcaatggtggaaagtggaagggcaaaaggggccaaatctcatgtgaagtctctcgta

SEQ ID NO: 405228 - DNA, 122 bp, Homo sapiens
tactgtattcactgtaccttctgcaactcgagccctggctgggtgtgtgttatgtgcaaccggactagtagccccattccagcacaacatgccccccggccctatgccagctctttggaaaa

SEQ ID NO: 405229 - DNA, 122 bp, Homo sapiens
cctccagccaggcatgccactcacctgtcatgttccttatccaccaggtggtacctggcccggaaggccaccaggtgagcgtagtatgctggcgctgggatggacacggagcgtgtgcagcg

SEQ ID NO: 405230 - DNA, 122 bp, Homo sapiens
ccaaataaaggcaactgctctctgaccatcttttgtcaatagcatttttgtgctatcatccgcagggtcactggttgtttgttcttggactgtattctgggaagcttttttactgccacact

SEQ ID NO: 405231 - DNA, 122 bp, Homo sapiens
ttggtccggcctgcccggcggggcgtttcaggaccgtggctatggagtccggcgtggcagcggcaatccctggccaaaggtacttggggtcattttccgcggggggttacgtgcgggagcgt

SEQ ID NO: 405232 - DNA, 122 bp, Homo sapiens
ctccctcgttcaaaactgtaagaagcattcgacggagactttgatttgacgtagaaagatcgtgcctgctatggtgaggctgcaggcacgagccattaagtaaccgagtattcctgctcagg

SEQ ID NO: 405233 - DNA, 122 bp, Homo sapiens
attgtgcttcctgcccggcgcgctctgttgcagaggagccccggccgggaagtgtggatgcgtcttacccgaggccgggccgcctcgcccgctctagtccagcggagcccgagcgcctcgga

SEQ ID NO: 405234 - DNA, 122 bp, Homo sapiens
cggcaggggaaagcccgagggacctcccagctccttcccggatcgcggcggaggtgtgagcgatgtgttgattattcatatttttaccgagcgcatactctgctgcggccggcgccgccaca

SEQ ID NO: 405235 - DNA, 122 bp, Homo sapiens
tgggttacgggttttctccgcgaaagctccgggaaaagtgacctgaaatcgggactttcccgctgtcagctccaagcaggacctgaggaccaaatgatcgcccgttttagggccaggtgttt

SEQ ID NO: 405236 - DNA, 122 bp, Homo sapiens
ggtggaaaacactccactggcattgcagccatgaaatacctgcctgcgccaccctggctccggatgcagcttcacaacatttgcagtgctgccctcaggagggcctttccctggtctccaag

SEQ ID NO: 405237 - DNA, 122 bp, Homo sapiens
gcatcaattctgtacgtcgtgggcactcaccccgcgccacgtgcaagccacccatatgatcggctgtttcccttaacaatccccagatatgcaagaattccgtagtgttcacttcacattcg

SEQ ID NO: 405238 - DNA, 122 bp, Homo sapiens
agaaccataaagttcttcccagttataaattttgcataatttaaatattttatattttcacgattgtcctaattctttgacagtaggggtcattgtcttaagttgttgacaagcgcctcata

SEQ ID NO: 405239 - DNA, 122 bp, Homo sapiens
tgggagcccggagagagaggacaggggagagagggaagggggaggatggatggctgtgtgcggctcggcgccgttctgccacccctatttatacgccgggaggctcctgacgcagcctgcga

SEQ ID NO: 405240 - DNA, 122 bp, Homo sapiens
tgccagttgacttcaatgtgggggcactcagctaaggccaccagggtatatccacaaagtcgtgatagcaggcgacatcaaggtcggtctagccattgtggtcagtctcctgcgccttctca

SEQ ID NO: 405241 - DNA, 122 bp, Homo sapiens
cccaggctgaagtgatcctctccccttagcctctccagtagctggtactacaggtgtgcacgccaccatgccaggctatttattattattattgtttttttgtagagacaggtctcactagg

SEQ ID NO: 405242 - DNA, 122 bp, Homo sapiens
gtgtttttcagtgttggagcagcccttcggaagcgaggcaggtgctggacccaccctgtccgtccctggtccccagccccatttcgccccctcatctattccagagcacccagcccttcagg

SEQ ID NO: 405243 - DNA, 122 bp, Homo sapiens
agctgcaagtcttctttaggatcagacttgaaagactcagacatcatttctgcctcatggcgttggtaaaagaaagtcacagaaccagctcagatttaagtttgggaaatggattttgcctc

SEQ ID NO: 405244 - DNA, 122 bp, Homo sapiens
agtaagagcagggtggcagctccgtacagcagattaaagcagcaccacttcctttatgaccgcttcttttcagattcaaataacatccttaggggtgccagtctcttctcataaaaagtgtc

SEQ ID NO: 405245 - DNA, 122 bp, Homo sapiens
cccccaccccagttttgatgaaccagccaccccagattgctcccaagagggagcgtaagacggtgagtagcagtgaggggctccgggacatctgggaaggggagaatcaaggtcaggtgctg

SEQ ID NO: 405246 - DNA, 122 bp, Homo sapiens
gctgccgcacgggccctacctggttctcgaatcctgcctgctcataaacgaatcctagcacggggtgcctgcgtagacctggagctcaccaccagatgttcccgacctcgggagaggaggct

SEQ ID NO: 405247 - DNA, 122 bp, Homo sapiens
ccccggccccgggcagcgccgcggatcctgagaccccgccgcgggctgtgtgctgctcagcgcccatcctctgcgcgcgcaacgctacttccgggcgagctctgcagactcgccacaggccg

SEQ ID NO: 405248 - DNA, 122 bp, Homo sapiens
agagtatttggcgctttaggcttgcatttccacatagcaacaatcagctggtacagatagcgactctgcccttataagggctgtgagtactccagcttgttgtagttctacctggcccactt

SEQ ID NO: 405249 - DNA, 122 bp, Homo sapiens
cgagactgggatcctgggcttctgctccagctgtgcccaagggagctgctgaggagggaccgggtggggcatccactctgggcaggttcagggtcattcttggtgaccccgggtccggttac

SEQ ID NO: 405250 - DNA, 122 bp, Homo sapiens
caaagaaaaaggaagtcgggcggggcagggggtggtgcaagtcggcgggggagggaagcacggggcgacctgagactctgtgaagtccgagcttcgtcgcaaaacacgcagttcagtcttta

SEQ ID NO: 405251 - DNA, 122 bp, Homo sapiens
ccaattgctgaccgccacagccacagccagggctagcctcgccggttcccgggtggcgcgcgttcgctgcctcctcagctccaggatgatcggccagaagacgctctactcctttttctccc

SEQ ID NO: 405252 - DNA, 122 bp, Homo sapiens
gggccaaaggcgatcagtctgacactgggttgggggatccgcctcagagtttctgggcagcgtacagtgacgcggtggaggtcggtaacggctggaaaattgagccttgagcagcgcgtgct

SEQ ID NO: 405253 - DNA, 122 bp, Homo sapiens
cgtgatccgcccacctcggcctcccaaagtgctgggattacaggcctgagccaccgcgcccggcccagcctttgctcttgcagagggtacagatctcggccacttcccccagccggcatagt

SEQ ID NO: 405254 - DNA, 122 bp, Homo sapiens
accaggccctcccttctccccatgggttcaagcccctctggcttcaacttaccttattgccggggcacatctggctctagtcctgcagctgtgagctcttgagagggagtaggctggtttgg

SEQ ID NO: 405255 - DNA, 122 bp, Homo sapiens
cgtgacgtcgccgcggcgagggccgcccccggcagggaatggcgttgagctccctctgtccgcagtctcggaaagacgggaggagctgtgaggaataaaaaagcaatatttggcagcgtcga

SEQ ID NO: 405256 - DNA, 122 bp, Homo sapiens
ccaccaggttgatggtgtagatgactgagggtgtcttggcccgggtgcggcagcagaagacgtacagcgccagcccgttgagcaccagccctgccaggaagatggctccgtgcaccgccatc

SEQ ID NO: 405257 - DNA, 122 bp, Homo sapiens
ctccactttggattttcctctgctctggggctctcttggcgggatttttggactggaaggcggggaacctgatcctgcctttgactcaattacgccctgacagggagggaacggaagggaaa

SEQ ID NO: 405258 - DNA, 122 bp, Homo sapiens
tatggggccagacaaagggcttgcctgtccctctggaggcagcttcccactgaaatctcgcgggctgcctgctgcagctgggagtatgggaccaggaggctttggtgttcaccctctttgcc

SEQ ID NO: 405259 - DNA, 122 bp, Homo sapiens
cgagctggtgccccgggcggctgagccgggctacctggtgaccaaggtggtggcggtggacggcgactcgggccagaacgcctggctgtcgtaccagctgctcaaggccacggagcccgggc

SEQ ID NO: 405260 - DNA, 122 bp, Homo sapiens
acaatgcaggggattatgctgaggggcggggccgcccgagtggccgtttggcccgctgcacgtataaaggtgctacagaaatgtgtagtcgttcaaagtcccagggcgggcagacaggcagg

SEQ ID NO: 405261 - DNA, 122 bp, Homo sapiens
aggcgaatgctaaaggagacgctccaggactcgacctctgaaggtccttggagccaattccgtaatatgatcatggaaactgatcattgcctgatccttctaccgccttggcgcgctttctt

SEQ ID NO: 405262 - DNA, 122 bp, Homo sapiens
cggggctatttttaagcagggctatggcctgccgtgggttaagctggtgtggacagaaagcgagatgatctagccatctactgcagggggcctgatcttgaacagaaacctgactgtaattg

SEQ ID NO: 405263 - DNA, 122 bp, Homo sapiens
ccctgggctcgcgctgcaaactcaggcagcctctgctcctgccctacggctttgagggcacgtgctcctccggggaggcacagcttcctctaatttcccacttcctcatccggcccttaatt

SEQ ID NO: 405264 - DNA, 122 bp, Homo sapiens
aacttccactttaactcatcccctgggatgcgcagctcgctggaccagtcggaccactctcggcctgcgggaggaaagcgcaccccggggttagcttcactccatcatccaatcaacacaaa

SEQ ID NO: 405265 - DNA, 122 bp, Homo sapiens
gctgtgggtgtgggtaggaagagcacagagggaaatgtccccctcgtcgccccgtgcccacggcccgtcctgtcagcacggctcatcgcgggaggtgctcccgatctcctggctgaggctgt

SEQ ID NO: 405266 - DNA, 122 bp, Homo sapiens
cgacctctgccagggagcttcatttattggttccccttggagctggacttggtcgtaggccgtccacgggcaggggctccggccgcaactgcagcgggggtttctgcatccaatccccctgc

SEQ ID NO: 405267 - DNA, 122 bp, Homo sapiens
cggtgctcacgaggtggtgctcgcccatgaggatcttgcgcacgttctccgcgccggtcacgcgtatcagcggccgccccaacaaatgcgtcttgaacacgttgccatacttctccctccgc

SEQ ID NO: 405268 - DNA, 122 bp, Homo sapiens
tttatatccctagatgtctatgtcccctgcctggaagtttccccagagaggggatgtagacgtctaggaacacagaggtctcagaaccttccccagggaggggatgtacacctctagagata

SEQ ID NO: 405269 - DNA, 122 bp, Homo sapiens
cgtggccagagcagatgctgaggccgaggaggtgctgagcgcgagcgagggccgccagcacgctgtcacctctcaataccaccttcctgaaattctttatcatcacatgctgtggagattcc

SEQ ID NO: 405270 - DNA, 122 bp, Homo sapiens
gctctgggtgcacagacgctgccttcagacaccgcatgctcgtgcgaggcctgcagtgagcgcaggtatgtgacgtgtgtgccacgttgctcacacctgtccacaatgacatgcagacctgc

SEQ ID NO: 405271 - DNA, 122 bp, Homo sapiens
gctgggccccagtgcactcgaggcggtccctgctcgggtgcccctcccacaggcaggcgccgttgccgaccaaacgcccaggttcacccaacgccagaggctcgtcctcaattcccgcgagg

SEQ ID NO: 405272 - DNA, 122 bp, Homo sapiens
aaaaatgacagtttaatccagaattcacttggttacctccttcttaaataattatattcccgtcccggccgtgcctgctggatcatggttaaagcaaaagtcctaagtacaaacctgtggac

SEQ ID NO: 405273 - DNA, 122 bp, Homo sapiens
tacaaattcttggtgtccggtttcagctaggcactcactgtaacttggccaaattttcctcgttgactttcccggcacattccatgcagctccaccctctgtgagccatgaagctgctccca

SEQ ID NO: 405274 - DNA, 122 bp, Homo sapiens
ggggaagtagaagctcaactttttaaaataatatccacagcaacagcagtcaccccgcatcgagggaggcctgtcgtgcgccaggcaggtgcttaaccacccaccttcccttcacaccagcc

SEQ ID NO: 405275 - DNA, 122 bp, Homo sapiens
ggcaggaagaggcccaccgtccccagcaggcagacgatgatgaacatccagaggaagatgcggtcgatgaccatggccacgtacttccagtcctccttcacctgcaagcacagacgccgtca

SEQ ID NO: 405276 - DNA, 122 bp, Homo sapiens
gcggagctgcaagggcagagtctaggagggcccgcaagccaggatcccaagtatcagacacgcggcatttcgctaccctcaggacaacagctaactacccttcttaaaatccctacttcaat

SEQ ID NO: 405277 - DNA, 122 bp, Homo sapiens
aggacctggacaacgacctgaagaagctcaacatgttgatgaataaaaaccggtgcagctcggaggagctggagcagaacaaccgggtgacagagaatgagttcgtgcgctcgctgaaggtc

SEQ ID NO: 405278 - DNA, 122 bp, Homo sapiens
ccactctccaattttctaacaaccttatccttgggtctctggtttaaagcagccccatgacgtggcaggaaagaaaggagggttatcaccagggaaaaatgacactgcccagaatcctgact

SEQ ID NO: 405279 - DNA, 122 bp, Homo sapiens
aggagttacgtctaatgagatgcgtgtgtttagcctctaggagggacgtctaatgagatgcgtatgtttagcctctaggagttacgtctaatgagatgcgtgtgtttagcctctaggaggga

SEQ ID NO: 405280 - DNA, 122 bp, Homo sapiens
ccacaagcggggcatacaaccagattgccttaaggacacatggaggcaggcagcatccaacgggctcatctctgcccatcagatggagctgtcagatgtgtgatggttagaatggttgcttt

SEQ ID NO: 405281 - DNA, 122 bp, Homo sapiens
cagcagccgcgagccgggctgcgggtgccagacggttcccggcggggggcaggggcggggcgccgcaggaggccgggactcctggcggaggaggtgcggccgggggcccgggtcaggctggg

SEQ ID NO: 405282 - DNA, 122 bp, Homo sapiens
gtagtaacacagtcagaattctcagtcagacatttccgttcccaccgcagttcacaagaacggaatgctgaggcttcctggtacagctgccaagaaactatgcccacagccttcccactgag

SEQ ID NO: 405283 - DNA, 122 bp, Homo sapiens
actgctcagggcccgcgtgacattgcacaggtttagaaacgcacagcgggaaggtggccccggcgggccgagggcgcaggatccctgctccgtccagggtccgtcctgcgaggaggcgccgg

SEQ ID NO: 405284 - DNA, 122 bp, Homo sapiens
aaggtgggactgctggtgagaaaaggggcaggaaacttgaggggacaagaagggttcaaacggaggagcaggtccaggggaactcagcagagagtgaattggctgatcaatcagtttgtttc

SEQ ID NO: 405285 - DNA, 122 bp, Homo sapiens
cagcctctgcatctggagggagggagggaggtggagctggaggaggactttccagctgcccgggcctcgcaagataggctgaatgagagccttaggagagagcaggctttggtttcacatgt

SEQ ID NO: 405286 - DNA, 122 bp, Homo sapiens
cttaaaatccaggctgtttgttacaagattagtcattatgttgtccacacctacttttctcgcttcatctattctccttgcttctcttttttcaaaaacccaagtcttatcatcatcataaa

SEQ ID NO: 405287 - DNA, 122 bp, Homo sapiens
ttacttcctcctcctcttcagagacaggagacagtagacaaatggcttctctcctcagggcggcaggatggtattactcccaatatcgcagggggtgtacacaaccctgtgatattgttcct

SEQ ID NO: 405288 - DNA, 122 bp, Homo sapiens
tttatagatatttactgagaaccaagtgttggctaagtgacatatgtttaacttagataacgttattggatcctttacataattctgtgagataggttattattttgctagatgtgaataag

SEQ ID NO: 405289 - DNA, 122 bp, Homo sapiens
aagaacaaagcatcaaaagaagcaacgaaagcgcagattcattgacgcgcaagtgcactccgcggctgggagcggctcgagcaagcggctcacgagcccaactgcagtgttctttagggttc

SEQ ID NO: 405290 - DNA, 122 bp, Homo sapiens
tgtgcagttgatcgttttcttaaaccaaattagccggggctttcgttactatggtgcagccggggcttgcagaatcccagtaatagcatttattaggtctatttgcctggaagcatgccttc

SEQ ID NO: 405291 - DNA, 122 bp, Homo sapiens
gatggggtaacgtgacacaggccccacacgtcagaggccgctgtccccacggccactgcccgtgacccctggcccaaggcagctggagttggttcagttcaagttcattcttcctctggccc

SEQ ID NO: 405292 - DNA, 122 bp, Homo sapiens
atagggagagaaggatggtcagaaggcccccagtcctctgccgactggtcccctattccacgagctcatgggcagagtttcactttgacaatgaggctctcgcttcaaaggataaaagcagt

SEQ ID NO: 405293 - DNA, 122 bp, Homo sapiens
atgtgcctgctgtgtgccagactgtaggacggcgtcacagtcatgaggtgcacagcgacacggccagtgcagccagacccagacgtctccctcctgcggcccttcgtggactcacccatgtc

SEQ ID NO: 405294 - DNA, 122 bp, Homo sapiens
ttccttcccgtgttggagcccattttctagatccttcacttctttgttcttggtttgcttcgtcatttggtggaatacattcccagcagctgcctgagtggggaagcaggggaaatatccct

SEQ ID NO: 405295 - DNA, 122 bp, Homo sapiens
gccgcgcgtgggccgacgttctcattgtctagctgagagacctggagctcaaagccacagcgagccaggaaggccctgggagcacagcacagcctcttgctttctcctgggcctcagttttc

SEQ ID NO: 405296 - DNA, 122 bp, Homo sapiens
ccttgtttatgaattaatgacggccagctaatccttcagaagactccaattttaggtttgcgcaaaagcccttcagcctttacaaacgaggacctgtctttctgggttgagctaactcctct

SEQ ID NO: 405297 - DNA, 122 bp, Homo sapiens
cctttcaacccagagggacagacagtaattttacccatccaccccataacgccaaacacacgtcatcatgcagaatttggtgtcagaactggaagggactctatgatcactcaggctaatac

SEQ ID NO: 405298 - DNA, 122 bp, Homo sapiens
ccaccaaacatatgcatatctgaaattcaaattgagtgcaccttacctcatgctctcctccgtacctctaatgaggtggaaaaatgtacattaatgacagaaagttatttagtgctgaacag

SEQ ID NO: 405299 - DNA, 122 bp, Homo sapiens
gatgcctagagtgtggcgaggtagcgcgcgggtgagcgcgtgtgtgcggggagtgggtggcgtgatgaattgcatcagagaaatcccattagatctggggagatgattaaagacgaggtctc

SEQ ID NO: 405300 - DNA, 122 bp, Homo sapiens
gcggtcaccccgtctgcgcccaggatgcgaggaaccggcactgggaaagtgggccggtgccgccaagcacaggtcacttctgagctcttacggtaattctgactggagcagattttggtggg

SEQ ID NO: 405301 - DNA, 122 bp, Homo sapiens
gtggcggctgagcccgggagaatgtgagttgttccctctctaattacctgtctgtccctccgagggtacgctctgtgtggcgctaggatgcctgtaacaccctgggaacaaatccgaacgtt

SEQ ID NO: 405302 - DNA, 122 bp, Homo sapiens
catacatcaccaaaaatgtcataacacatagaggcctcatgaatgcagcaaatgtggaagcgccttcaactcaagatctatcatcatttagctcctgaaagtccacacttaagtagagcctt

SEQ ID NO: 405303 - DNA, 122 bp, Homo sapiens
ctggttctatggaactccatagtccattcctacacaatgtgtgtaggggatggtaggttacgatcaaaaattagggtcagggagttatgctcactcttttggaagtgaaatagaacaggggc

SEQ ID NO: 405304 - DNA, 122 bp, Homo sapiens
actcaggccgggcccatgctgggagtggctggaggcagctttggaagcatgcgtgcttagcgagcctggagggtctgctgcaagcacttgccaggccatttcagtctcctttagaaggaaat

SEQ ID NO: 405305 - DNA, 122 bp, Homo sapiens
tcggacggagtaacgtgcccgttagcggagggggcgggcacagaaggccgccatgttgagcgagggcaccgatgccgcaacctgacaggcaatgacgccgttctttccgccatctttactaa

SEQ ID NO: 405306 - DNA, 122 bp, Homo sapiens
ctggccccggcccattcctggcagcatctcccctctgaatcatcataaatcagggcttggcggggagcggtgggattttcctgattttcctgatcgacacgctgctgccctggtaaaatggg

SEQ ID NO: 405307 - DNA, 122 bp, Homo sapiens
attttcaggttatgatttttttcccaatgataatgatgctcccatcttttctcccagccacgcatagcaaattagatgtagataccatttaatattcagtgtctggaagaagaagcccttgc

SEQ ID NO: 405308 - DNA, 122 bp, Homo sapiens
gcgccgcgagtcggcccgaggcctccggggactgccgtgccgggcgggagaccgccatggcgaccctggaaaagctgatgaaggccttcgagtccctcaagtccttccagcagcagcagcag

SEQ ID NO: 405309 - DNA, 122 bp, Homo sapiens
tcaacctgtaccggagaaaacgcaggctgcgcggcggcttagagcggtcaagtggaaccccgcctcgacctctctgattgggtaatgcgcacaagaaaatcaagaggattggtcggctgcag

SEQ ID NO: 405310 - DNA, 122 bp, Homo sapiens
tcagacgagattgaactgcacttgtttccccttcgaggggagccgcgttttcagggtagccgaaggcttggggctgagggggggccctcaccaaggcgcgggtgggggccggagcctcaact

SEQ ID NO: 405311 - DNA, 122 bp, Homo sapiens
ccactggagaacagtggctttgaacctggagccttcgatggcctgaagctcaactacctgcgcatctcagaggccaagctgactggcatccccaaaggtaggaagcccactcttcctgcacg

SEQ ID NO: 405312 - DNA, 122 bp, Homo sapiens
ggaacgccgcccggacccgcgctcctggggcgggggcctcgtatgctggcgttgccggagcgtctgcggcgctgaaggctgccgagacccagccacatcccccacaagccagcagcccggca

SEQ ID NO: 405313 - DNA, 122 bp, Homo sapiens
cctgtaacgctctgctccatcgggtggcgtggctggtgcctccggggacccggagcgatgcggttggagagcttagtttagaaagcaagtttctcttggtaccagcggagtctcgtcccagg

SEQ ID NO: 405314 - DNA, 122 bp, Homo sapiens
tgcccttgctagacattcccccagctgcctgcacttcccccatcaaagcacttgtgatgacgtgcttggtttctgcttctctggacagccaagcccaggagccccttggagcaggagccaag

SEQ ID NO: 405315 - DNA, 122 bp, Homo sapiens
taaattgaagaagctgttatttccgatgtatagctggatgtgaagtgactgcggcaaaatcggagagagaaggtgagaaccctcgtggcccgtacggggatcgaacccgcgaccttggcgtt

SEQ ID NO: 405316 - DNA, 122 bp, Homo sapiens
gcctggggcaccctctccttctctggcctcggggcgcctcctagaaggccctccttttctcgcaggcccctgactgtcggcggtcccacacttctgggacatctcccccattacctctccct

SEQ ID NO: 405317 - DNA, 122 bp, Homo sapiens
aatggaaaaaaatttaaaagattggggacaacaggaaacacattggatccccaggggaaacggcctggaagctacagtagagacatgggtgacccaagggctctgttcaagtcctggggctg

SEQ ID NO: 405318 - DNA, 122 bp, Homo sapiens
aatgagaacagatcagtagctctgcgcttcctcagtacacatgcaactgaggctattcctcgatctctggcctagggataaaaggagtggttctctaaataacaaaaaaaccactcttcacg

SEQ ID NO: 405319 - DNA, 122 bp, Homo sapiens
tatggttaacaaatttaacattacagatatcttcaactgatttttctccatagatcatgtcgacctaaaaggaagaagtgtaggcaaaatatggaaaggtcatttgggccatggttgagaac

SEQ ID NO: 405320 - DNA, 122 bp, Homo sapiens
accatggcctatgaccactttgtggcgatctgccaccctctgaattatacaattctcatgcggcccaggttcggcattttgctcacagtcatctcatggttcctcagtaatattattgctct

SEQ ID NO: 405321 - DNA, 122 bp, Homo sapiens
tgggggcaggggtcgcgctgccctcccgggtgggggtcctgagggctgacctggggctgtcgcagtgacggctagaagaggacacgccgccgccacaggtccggctgcagtcgccccatgga

SEQ ID NO: 405322 - DNA, 122 bp, Homo sapiens
gacgaggacaggacctcctggatgcactggaaagtcgaagagacatggtatcagggcaaacgcgttgcagagctgtatttgtgaaagccagaatggagtgccttcttgtctaaaaggtttgg

SEQ ID NO: 405323 - DNA, 122 bp, Homo sapiens
gagttggagccagtcccaggtgttgagagcgagaggatgattaatagagagggagcgcgtcgcctctcacccatgagggctcggccagaccccaggcgcagcggcagagctgcatgaaaagg

SEQ ID NO: 405324 - DNA, 122 bp, Homo sapiens
tttacctggatagtctcagatgctccagctgtggatataaaattccagcccaaccagagccgagtgctgaccagcagcaaaccccttccggaggcgcccggaatacaggcacctgctgggaa

SEQ ID NO: 405325 - DNA, 122 bp, Homo sapiens
tgaggaaccactgcgactggctgataacgtgattggctagcagtgtgacagacagaccagcgcacgggcagggcctctggcaactttagctaccgccgctgtcgctcccgctgccgccgccg

SEQ ID NO: 405326 - DNA, 122 bp, Homo sapiens
cccccgcgggcgtggcaggtcctgagtcagggcctgtccgtggccagcatccctgctgggcgattgagcagcgggaagctgcttggacccagtctcaaacttaaccctcatctagcacccgg

SEQ ID NO: 405327 - DNA, 122 bp, Homo sapiens
gaaatttagttctttaaattccagacccgagccggcgtctacaaagccttcccctctgcgcgcgtcgcttccagtaggaattcgactgttccttttataaaacagaagagggcgcccgccct

SEQ ID NO: 405328 - DNA, 122 bp, Homo sapiens
cattgctttcagttgcttctgttagatttttaattcaataaaatataatcacatccattacgactaaaaatatgggcaaatgcattacagagtccattttggaactaaagttataaataaat

SEQ ID NO: 405329 - DNA, 122 bp, Homo sapiens
gccggtttttaagcccgtaggaaaagcgcagtattcgggtgggagaggcctgattttccacgtgctgtctgtcacccctttccttgaccaggaaagggaactccctgaccccttgtgcttcc

SEQ ID NO: 405330 - DNA, 122 bp, Homo sapiens
ctctctgaccgctcttacggtgtttgggggcaaaaaactaaggatctagactctctaaaccgctcgctgggtccttctctccccacaatgcaccggggccagcaggaaggccgctccgaccc

SEQ ID NO: 405331 - DNA, 122 bp, Homo sapiens
agggctgtcgagtcgccattggatgcggccctgcttggaggcagtggggggcacccagtccgtgcccagctggggacaagtcagggcctcagtttccccatccataacccttaccagctcca

SEQ ID NO: 405332 - DNA, 122 bp, Homo sapiens
tgagctggggctccgtgagatgttttgatgctgggccgagctcagagccgagggctctgccgggaacagggtgctccagtctctctagggcctggaatgtcttgtgtagcctcaagagctcc

SEQ ID NO: 405333 - DNA, 122 bp, Homo sapiens
ccgtcccgcccctgctggacctcgccgtttcgcaagcatccgagttctccagccgaggctcgggactgctgcagggtggaaaatgaaagttctgagagcaccttccgcccctccgcttctgc

SEQ ID NO: 405334 - DNA, 122 bp, Homo sapiens
tcccagggtcttagaaaagccctcccttccctcgctccagctgttaccttccacttcctccgtgccctccatcagcatatcctttgtaaagtttgatatctggccagtgagggaagccaggc

SEQ ID NO: 405335 - DNA, 122 bp, Homo sapiens
acagactgtgagatgcagacaaagaactaatgtaaaccaaggcaacgctgtgcatagaaacgcaaaagcaagattcgctccaggagtttcatgccacaggatggtcgacggctggaaacagg

SEQ ID NO: 405336 - DNA, 122 bp, Homo sapiens
aaatgacttaaggtgtcacaatggccagtagcagacccaggagtagtctttaggtctggccgtgcacaaagccccatgctctcaagctgtaaccccgctatcaagaaagtggttatgcaagt

SEQ ID NO: 405337 - DNA, 122 bp, Homo sapiens
gggcggtaagtccgtgaggtgggggcttctaatccttgccatttagcagctcgtaatctccgtgccgctggtttattaggtgctgtgaatgttcacgactctgtggaaccctacttttaaga

SEQ ID NO: 405338 - DNA, 122 bp, Homo sapiens
gctcgggctggggcagcgggcggccaagcaagcatcccaccccatttatttgtcaaaaaccgaagaaagcaaagccttttagcactggcagctaattttggtgcctctgaacgtgtgaaacg

SEQ ID NO: 405339 - DNA, 122 bp, Homo sapiens
ccggggtggtgggggtggaacctcgccgccttccgaagcaggagtaagctgcagaggctgcgcgggggtttgagcggagcgagaacagctccttcccttgatcatgctgccctccggaggtc

SEQ ID NO: 405340 - DNA, 122 bp, Homo sapiens
ccaatggtgtcgtggggccaggccctggccacctgctctgaatcattgaggaatttcagccgtagcacgaggggctcctgcggggagtccggggctggcggtgttgctgtgaaccccgtgct

SEQ ID NO: 405341 - DNA, 122 bp, Homo sapiens
agtgatccacctgcctcagccttccaaagtgctgggattacaggagtgaaccactgtgcccggcccacacaagagactttctagaagggaagcagggagaccccaaccacagagggtaagac

SEQ ID NO: 405342 - DNA, 122 bp, Homo sapiens
agggtcccgcacgcagcagatacacagtaaatgcctgctgcttggtcaccaggctcctgccgtgtgccaggcactgctggggccctcactggcaccaagaccgctgagccgcgtccagcagc

SEQ ID NO: 405343 - DNA, 122 bp, Homo sapiens
ccctcccggcacagaaactcggggtctcggccaagggtgggcctcacggaggggcgacgacgctcacctctcctctgcaagatcccgcggaacgccacctcgtagttgtgtctgcacaccgt

SEQ ID NO: 405344 - DNA, 122 bp, Homo sapiens
cagacagcagaaagacggggctggtgtccaggagggcgcgggcatgggtagggcagcgcccgggctgtgctcagtccaaccggggctctgcggggcggttttggcccacagttgccagtcat

SEQ ID NO: 405345 - DNA, 122 bp, Homo sapiens
cgcggtgcccaaaggagggtgggcgaggctccctgggcctgcgctgcggcggcctgacagcgggagcgctgttccggcgcagagcgcgttcgcgttccgaaagcgcgtgtccctcgccgcgt

SEQ ID NO: 405346 - DNA, 122 bp, Homo sapiens
tattaagtatatttaatttacttttaattgacaaatagttcttatgcatactcacgggtccgtggcgtccttaggataggtttaatgcgtggtgattaggttagggtgattaacatgtccat

SEQ ID NO: 405347 - DNA, 122 bp, Homo sapiens
ctagtgagcgccggtttttgagccttgctcttccctcgctaccgacgtcgaatcattatgcggtcaacaaccgcaggtgggttatgtgtcatagcccgcctccgctggagggaaaaggcctg

SEQ ID NO: 405348 - DNA, 122 bp, Homo sapiens
agaaaaacggaggcgaaaggagcagagcgacctgaccttctgacatccgctgtgagccggcggagcccgattattcacgtggggactcgcttcctcctcggcatgcaggcagcgctggaggg

SEQ ID NO: 405349 - DNA, 122 bp, Homo sapiens
agctctctgctgtcttctcagctctgctgacaatacttgagattttcagatgtcaccaaccgccaagagagcttgatatgactgtatatagtatagtcataaagaacctgaacttgaccata

SEQ ID NO: 405350 - DNA, 122 bp, Homo sapiens
cgtggcgctggagagtggcgctgcgagtggcgcggagcatgtgtgcgggcgcacccttcacgcggccctgtcacccgccgcgccctgcccgccgaggccctggcagctggggggtgggcgct

SEQ ID NO: 405351 - DNA, 122 bp, Homo sapiens
taccccgcgtcggaggcttagatggctcaggcgaagatcaacgctaaagccaacgaggggcgcttctgccgctcctcctccatggctgaccgctccagccgcctgctggagagcctggacca

SEQ ID NO: 405352 - DNA, 122 bp, Homo sapiens
gggttaacatcacacacccaagtttgagcaaacatttagttgtaaaatggctgatgtgcacgttctaatgaataagccacagtttaagcacgtcaggcaagaaaacttggggtaaggcatct

SEQ ID NO: 405353 - DNA, 122 bp, Homo sapiens
aaaaatctggcagaaaacgcaggtggtgggttttcattttcttcccgggtgtagcgcaggcggcccaggaaaaggaaaactgcttttttatggtcagggtttctggagattggcgctggcgg

SEQ ID NO: 405354 - DNA, 122 bp, Homo sapiens
cgttccccgagatggtcactcccttgccactccccgcctctgcctcacactctctcgggccgccaacctctgtgaggatggcaagactgaccgccagaaacaagtcttgtccagtcacacac

SEQ ID NO: 405355 - DNA, 122 bp, Homo sapiens
caaactcctgacctcaggtgatctgcccgcctcaacctcccaaaatactgtgattacaatcgtcagccactgcgcccagccaagaatgacctttttaaatgttgaaatagtaataaaagaat

SEQ ID NO: 405356 - DNA, 122 bp, Homo sapiens
gaatgtcatcaatggtcactttgggttagtgtgtatcatggtgatacacaattaagcattcgagtacattctctgatttgattattcaatctggaaaaaggccacagaaggcttcagcaaaa

SEQ ID NO: 405357 - DNA, 122 bp, Homo sapiens
tgctactccttactacacagggcctcctggactgggcccccagcacagccacccagcccccgcctgatcagtcagtggcagctctgtgtttgcctggtggggaaatcccagagacaaccctc

SEQ ID NO: 405358 - DNA, 122 bp, Homo sapiens
aaatacaaatgtctgtaaccagtacaggtacataaaaactttgttaaaaattcatttgagcgtgagagtggggacaccagagtcactttgcagccccgtgacgtcaccgataacgggcatgg

SEQ ID NO: 405359 - DNA, 122 bp, Homo sapiens
cccaggccgctgccccgcaggtgcccctcaagtcacaccactgctctgcctcgggcgacacggtgcactggccgaattccctccaggtgcaggagtcgacgccccccactgccctcgaaacc

SEQ ID NO: 405360 - DNA, 122 bp, Homo sapiens
actgctggcattgctgcttacgtccaccccagaggctctgggtgccaaccccggcttggtcgccaggatcaccgacaagggactgcagtatggtaagaagccacatctgctggctggacttg

SEQ ID NO: 405361 - DNA, 122 bp, Homo sapiens
ctcggcctcttctgtgtcttcactttctgggagtgacgttgtaagtgccctcccctcctccgtgtgtctgttggacagtttgtgtctctggtaaatgtccatagccgcgagcttaaaatctc

SEQ ID NO: 405362 - DNA, 122 bp, Homo sapiens
atccccccaaggtgcacactgcaccccagtgaccagctggccttggagggcccactctcccgcgtcaagtccctcaagaagtccttgcgtcagtcattccgccggatgcgtcggagccgggt

SEQ ID NO: 405363 - DNA, 122 bp, Homo sapiens
gtaataagtctctgacccacggctcagatttgcagatggattttgcaaagctgtggttaacgattagaaatcctttatcacctcagcccgtggccccttgtacttcgctcccctccctcagg

SEQ ID NO: 405364 - DNA, 122 bp, Homo sapiens
ctgtttctatgtcactatatttctcagagtcatgagtaaacattaaaactatgatttttacgttggcatgttgtgatctgaataaaatgattaatgacatcttttgccaaatttgttgaaga

SEQ ID NO: 405365 - DNA, 122 bp, Homo sapiens
actggatgcctcaggagcctgttcctggggctgcgttgctcaaggctcccgcctcgagtgcggtctcccatttcatcagggccttctttgccaagtgatcttgaaacacggccatccatatc

SEQ ID NO: 405366 - DNA, 122 bp, Homo sapiens
cgtccccaggattggccagcttggcgccactagataggcttccgggcgtgattgggcgagcgggccagacttccggattcctgacaagccacgtgacccacccacctggaggagagagaagg

SEQ ID NO: 405367 - DNA, 122 bp, Homo sapiens
gaaaccaaattgtcccaacctgaaatgtaggatgtaatgtcttttcttaaacctgtaactcggtaccaaagaatgaaaatttaaggctcccactgcagaactgtggggtagaatctgtgtca

SEQ ID NO: 405368 - DNA, 122 bp, Homo sapiens
tcctgcctgccaatacacacacatgcatgcacgtggacacacacagacacgagtgtgcaccgatgcacacatacgcattcaattctgtcgacaggggccttatttcatttattaagtatcta

SEQ ID NO: 405369 - DNA, 122 bp, Homo sapiens
aatagagctctttcccttcggcgtgccactgaagatcctggtgtcaccatgggccgccgccgcgcccgttgttaccggtattgtgaaaacaagccgtatccaaagtcttgcttctgctgagg

SEQ ID NO: 405370 - DNA, 122 bp, Homo sapiens
cgccctccagcttccagagccggtggcttctgcgttcaccgccccgcgccgtttgcggggcggggctgattcataagaatcggttctcaccaatggagggcttagcttgtttaacctcagga

SEQ ID NO: 405371 - DNA, 122 bp, Homo sapiens
agccccactgagatcaggacgatttcttctgtttttgtaacatgatgaacaaatgttcagcgaaggctccttgtcctctccccatacagtctgcatgcacacacacacgcacacacaacatg

SEQ ID NO: 405372 - DNA, 122 bp, Homo sapiens
tggtggtctccctttcctggagtcatttgtgggagttagggtcttatcctgatctttcctcgtcccccgctcccccgtcctccgaggtggcagctgcgtaggtgaacgttccccctgtcccc

SEQ ID NO: 405373 - DNA, 122 bp, Homo sapiens
gaacagctcagaagtgtgagaggccagccagatgcctgcgaaaggcaggcagcaacttcccggggtgcacatgggtgcaactccagtgggtcccacgtgcccggagaatgagccgtccttgg

SEQ ID NO: 405374 - DNA, 122 bp, Homo sapiens
ttctgagtgcatttaaaactcaatgtagtacctaattcctaaaaagaatttggccgggcgcggtggctcatgcctgtaatcccaacactttgggaaaccgaggtgggtgcatcacctgagct

SEQ ID NO: 405375 - DNA, 122 bp, Homo sapiens
ctgcagccgcagccgccgccaccgcgccacccgggcggccccggctcgggttcgagctcccggcggtcggggctgcggcactgacaagaacaacaacatcaatgactaggaagaagggggcg

SEQ ID NO: 405376 - DNA, 122 bp, Homo sapiens
gaccccagagccaagaacactaagcactcgccggcccttcggcaccctcgccctccctcccgactcaacccggccgttgcttctgtatatagagaaataagttattggccgcgcgcctccct

SEQ ID NO: 405377 - DNA, 122 bp, Homo sapiens
tacctgggaagatcggcaggagttcccatgggggctcagaggggctgacatccatccccacgtccagggagctgccgtcaaactaaataagggaggatacaagagggcaggagtgtgagaaa

SEQ ID NO: 405378 - DNA, 122 bp, Homo sapiens
ggcggggcgggcggagagagaaggaaggaggtggttgtgcaggatggcgacggcggcctacgagcagctgaagctgtgagtcccacgggccagaggcctgaggcgcggcgggcggggcggca

SEQ ID NO: 405379 - DNA, 122 bp, Homo sapiens
tacatgaagataaaataaaatttaaaaatcagttatgagttccactatccacatttcaagcgctcaataactacatgaggtcagaggctagcatatgggcccacatagataaggaacatttc

SEQ ID NO: 405380 - DNA, 122 bp, Homo sapiens
actcaggagagggagaaacagagggacttccggtgaccagagcactagcgccgcaaacctcggcctatcccaacgcatcttgttgcccggagttgccggccccgccttttccagcgcggcgg

SEQ ID NO: 405381 - DNA, 122 bp, Homo sapiens
agggacagccgattacatctttccaataaacccgagtttcatcgccgaactgccacacaacgcgaaacacccgaccctctctaataactgggctaatgaagaggcgtccgggtggcaggagg

SEQ ID NO: 405382 - DNA, 122 bp, Homo sapiens
cctgtcatcctccctccattcggacagctcctacccaccggatgcgggcctgtctgacgacgaggagcctcccgatgccagcctgcctcctgacccgccaccccttactgtgccccagacgc

SEQ ID NO: 405383 - DNA, 122 bp, Homo sapiens
tgggtctgtcccaaggaaccctgtccttcccccagatctggaggccccgggggcaaggcacggggagcgcctagtcctccgggatgggagtgttgcagttcccgtggtagatcttgacgtgg

SEQ ID NO: 405384 - DNA, 122 bp, Homo sapiens
ggcccccttggccaacccagggggttcaggaagggcatcatttgacccatgaagcaaatacggaaaatactttgtggtgaactgataagctggtgttggtgacttggggggcacttcctgat

SEQ ID NO: 405385 - DNA, 122 bp, Homo sapiens
aaaattagtcaaagtggacaactgacccaaacacaaataataaaactatacagcagtacacgcaaggatacaaaaatactagaagaaaatctagggaaatctcttcaggacaaaactcttct

SEQ ID NO: 405386 - DNA, 122 bp, Homo sapiens
gacctgttactattatcggtcgtgccaagaagcatattttgtcgaacttaattttgaattcgctatactggatattgtttcctgactgcgctgagagaaggaaaactgaatgttatatcgaa

SEQ ID NO: 405387 - DNA, 122 bp, Homo sapiens
acttggatgcgtagtacatcatatgtatacaatcagataaaagcatagaagtaaatcattcggatgtgatttttatttggttttcatggaaagttaaagtgataaagtatattgaatagttc

SEQ ID NO: 405388 - DNA, 122 bp, Homo sapiens
tggaaaaaggtatgtgtgtgttgagggggagtccactgagtcttctatctgagctccaaacgctcagctcaccactccaggacctccttccctctcctgcatagacccctccagagtcacca

SEQ ID NO: 405389 - DNA, 122 bp, Homo sapiens
agctggggcccagctggaacgcttgtttacatggggaggccgggggaggctgaatcccggcgagttccaagtgtaattgcgtttggacacttaaaaggaattgtgtgaagtgggcagaggct

SEQ ID NO: 405390 - DNA, 122 bp, Homo sapiens
agttgctaatacatcagaaagctgtgttcttcacaatgtcctcatgttttttgtggttcacggcagcaagtaaagatgaactgtggaggttgcagttaatcaagttactttaaaatgaaaag

SEQ ID NO: 405391 - DNA, 122 bp, Homo sapiens
gagatttttgcctgtttggtttattttgttaccactgagtccccagctctgagaacagagcgaggcatgtgatcgatgcatcgtaactgttgagcaaatgaatgctgagctgtgatggcacc

SEQ ID NO: 405392 - DNA, 122 bp, Homo sapiens
acgccgccatccagccgcgctaggtaatgaggttttagtctcctgacccccgtcaagtggcgcagagccagatgtaggctgccgcgagaaatcacctgcccaatggcgacctgtcgctctcg

SEQ ID NO: 405393 - DNA, 122 bp, Homo sapiens
cagcggtcatgccctgggcctcaggaaagaccgcacccctccacgatgtgaaggaatgcacgggcgtcatgcctgtctgagcactgatgagaaaaaccttaacaagccttacaaattattgt

SEQ ID NO: 405394 - DNA, 122 bp, Homo sapiens
gtcttcacacaatcagtccataatatgcaaagttgtacatactatacatacagtacttaacggggtatcaagtttattctcttagcactgagcaggatgttctgagatgtgcaaaccttttg

SEQ ID NO: 405395 - DNA, 122 bp, Homo sapiens
cagtagaatttattatgagagcatgtagtatgtatctgtagccctaacacatgggatgaacgttttactgctacacccagatttgtgttgaacgaaaacattgtggtttggaaaggagaatt

SEQ ID NO: 405396 - DNA, 122 bp, Homo sapiens
taagtaaagcccaatttgaatctattaagttaggtaaaagtaaatttaatgatagatacacgatgttggcaaagatttgaataagtggtattctcacaaataaccaatagaatcgagcactg

SEQ ID NO: 405397 - DNA, 122 bp, Homo sapiens
aggcatattccctgccagctacgtgcaggtgtctcgtgaaccccggctccggctctgtgacgacggcccccagctccccacgtctccccgcctgaccgctgccgcccgctcagcccgtcacc

SEQ ID NO: 405398 - DNA, 122 bp, Homo sapiens
tgggaggtggtgctcgcaaacctggcagctgactgggtggggcgtgccttccctggcagtcgcggaggggaaggctgagggacccggtccccgccccgcgtgctcaggctgaacagcttttc

SEQ ID NO: 405399 - DNA, 122 bp, Homo sapiens
cgccccctctgccctagttccgcgcagactcactggagctcttgggcagcccatcgcccacgctgaccgtgagggtccgaccgccaaccttgagcactgccaagtcgccgaagccgcgggag

SEQ ID NO: 405400 - DNA, 122 bp, Homo sapiens
ggtgcatggccagcaggtaggcatctgcttctcaggtgaggaggggtattggggtctacccgacccctgcgcccagcgccccatccccctagggcgggtccaggagctctgtgctgcagata

SEQ ID NO: 405401 - DNA, 122 bp, Homo sapiens
tgaacaaaacccagtagcggctaatcaagcggtcacccgttcccggcagaaaatacccagcgacgcgcagctgagcaccgagaggagcacaatcgtgacagctgcttctgggccgccgtgct

SEQ ID NO: 405402 - DNA, 122 bp, Homo sapiens
cgcgtccctgccgcccggccccgctcggttcgccagcaccgggcccggctagctccgcggcgcgctctccccgccgacctcccgccagccccccaccggcgctccgctcgccccccgcctcc

SEQ ID NO: 405403 - DNA, 122 bp, Homo sapiens
tggatccttgctccttatgtgtggtcatcagcatcagctcacctaggagctgagcataaacgcagaatgacaggcctcctccaaacctactgaatcagtatctgcacttaagcaaaatcccc

SEQ ID NO: 405404 - DNA, 122 bp, Homo sapiens
cttctgaggtctgaatgtttgtgttcccccagaatgcataggttaaaacttaacctccaacgtgatggtattaagaggtggggcctttgggggctgattttatcatgaggactcagccctta

SEQ ID NO: 405405 - DNA, 122 bp, Homo sapiens
ctggtagcaggcaggtgctgctggttccttccatcaggagggagtgaccgctgaccattgcgttaccacatggagcagcgaaaggagacgtccccatcaggtcttccagcaacggcagctca

SEQ ID NO: 405406 - DNA, 122 bp, Homo sapiens
agccggcggcatggacttcgtcatgaagcaggcccttggaggtgaggtccagcgcccctccgcgtgtcctcagccggtcccacccttgtgggaggtggcctcggcccacccggcccctctct

SEQ ID NO: 405407 - DNA, 122 bp, Homo sapiens
ccgtctccgccgtctgtgggcctctctggcctgcctgtctctcctgttctccaagactctcggttctcgttctcttccctgcctctctcggtttctgcgtctctctcgcactgtgtctccct

SEQ ID NO: 405408 - DNA, 122 bp, Homo sapiens
gagctctgaacccagtgtgcagttggggaaactgaggctcgccaagtggaacccctggtccggggtttccagctgggaaggcctgagctgatgagtttggaggtctcagcggaggctggcat

SEQ ID NO: 405409 - DNA, 122 bp, Homo sapiens
ccccaggccagtgtccgtcagcctggtgctcacccccagtgtgctgaagctcagaccctccgtggcaccctggtctcctgcactgagctgtggtgagcacattcaggttccgctggatgcat

SEQ ID NO: 405410 - DNA, 122 bp, Homo sapiens
tcctggtctttctttcactttgttttatttctgtgtggacaaacaatggggaaaatgccgcgcgtctagccaggcagataagaaaacaactatacccgtcaggcccccaacccggcgccgcc

SEQ ID NO: 405411 - DNA, 122 bp, Homo sapiens
ttggaggctcagcctgtgtggagcgttgcgtcttaggagacagtcaccccgtgctgcaggcgggcatggcaccttctttgctctaaaaggggtggtgcgtcccctcttccatgtgcaggatg

SEQ ID NO: 405412 - DNA, 122 bp, Homo sapiens
atcttcctcctcgggcggggagcctgggtccggaggaaatcgcccacaggccgagtctggcggccggcgcgcgccgcgagcgagtgggcacctcctcccggcggcggggacgcggaacgggg

SEQ ID NO: 405413 - DNA, 122 bp, Homo sapiens
gattccggcccctggcccggactcggtctccctggcgggggccatggggtgcacaccggacgcaggagcacccccaaccccgcgcgcctcccactccgccatcccgcgtgcgtcccggtccc

SEQ ID NO: 405414 - DNA, 122 bp, Homo sapiens
agggggaacccagggcactcagatctgaggctttgtcaaggaacaagctcttctagcctccgggttgacagcaccctgggcagggactcaagctgagcccttcacgctctgagactttggtc

SEQ ID NO: 405415 - DNA, 122 bp, Homo sapiens
tctaggattaccaagtttagccccataaatcattcaccaaatcttttgacatcactgtgtcgaagttaaaagcttaatttttaactttactgttaccttttccttaaagcttcagggaaggt

SEQ ID NO: 405416 - DNA, 122 bp, Homo sapiens
tctatcatttaacagctgagtagtttttcatgaatcattaactatatagtttcctcaagacgtctatcctacaaagatgtcctcaggactgaaagatatgagaaatataaaaatactgtgca

SEQ ID NO: 405417 - DNA, 122 bp, Homo sapiens
ccccggcccggggcgcaggtcacgacccctccccatcccccacggagggccgggtcgcctcgagtctctgggtccgagatccaccccgaaaccgcgggaccccgagacccttgacctgggag

SEQ ID NO: 405418 - DNA, 122 bp, Homo sapiens
ctgaagggttgtgggagttggggaggagaggaaatgagctgaaaatcaggggtggtgggccgacaagcggatgctgacagtaaggtcaagtgtttgaccatgggagcaggcagctgatggga

SEQ ID NO: 405419 - DNA, 122 bp, Homo sapiens
gaaaaggccggcgtggtgcttcatgcctgtaattccagcactttgggcggcccagacgggcggatcacttgaggtcaggagttcgagaccagactggccaacatgacgaaaccccctctcta

SEQ ID NO: 405420 - DNA, 122 bp, Homo sapiens
tgctgtcacagtcggtaataatattgctcctgtcagaaaatgagcacagtccctgggacacggcagaccccctaagtttagtcccatccccatccccatcctgtcccttcctctccccccta

SEQ ID NO: 405421 - DNA, 122 bp, Homo sapiens
tcggccgagttgggactccgcgatgcagctcctgaaggcgctctgggcactggcaggggccgcgctctgctgcttcctcgtcctagtgatccacgcgcagttcctcaaagaaggtaattgtc

SEQ ID NO: 405422 - DNA, 122 bp, Homo sapiens
tccccgccgtgtgggcttctcgctgtcccctaagccttcgatgtcccctctgagccaccgcggccacggccaacagggatgcctccctcaccagcgcctcctgatagctctgggcctgagct

SEQ ID NO: 405423 - DNA, 122 bp, Homo sapiens
tggctccccacaccccacctagcctcccgctgtgcgccgggttcctaacaggccccagaccggtgccactccacagccaggggcctcgggatccctgctttagagggaaaacggcaacttca

SEQ ID NO: 405424 - DNA, 122 bp, Homo sapiens
ggtctgtactccttcagtgggccctcagattcccgccctccttgggattgggcagactctcggtctcccatagagagattttttttcagcttagggtgtgcaaggtttacagtcagctgggc

SEQ ID NO: 405425 - DNA, 122 bp, Homo sapiens
cctctgggcagctccacatggcacgtttggatttcaggttcgatccgaccgggacaagttcgtcatcttcctcgatgtgaagcacttctccccggaggacctcaccgtgaaggtgcaggacg

SEQ ID NO: 405426 - DNA, 122 bp, Homo sapiens
gacttgtgttccaaggactggaaaatgcgcttcctggacactatgtagatgattaccacacgagcttattttcagcaattcaagaaagaatccaattcgtggtttattgcttctgttagtct

SEQ ID NO: 405427 - DNA, 122 bp, Homo sapiens
cccaaaatagcaggaagtgtacacccccgagtgagatggtccctaaaaatattccaaggccgagggggtgatgtgacgacatatacggcagaaaggggacacccccaaggatattgttggca

SEQ ID NO: 405428 - DNA, 122 bp, Homo sapiens
caagtatcctttatgcatgagggcctgctggttttcctgggcgagaatatgacagaaagtcggggggctgatgctgggtttccaggaaatcagcttaatgatattaatggaaaaatatagtt

SEQ ID NO: 405429 - DNA, 122 bp, Homo sapiens
ctttttaatcccctgcatcggatcaccggcgtgccccaccatgtcagacgcagccgtagacgccagctccgaaatcaccatcaaggacttaaaggagaagaaggaagttgtggaagaggcag

SEQ ID NO: 405430 - DNA, 122 bp, Homo sapiens
gctccgggaaggggcgcctcgccccacacctcctcgttgcagggggacaaggggcgacggcggcccccaagcaggtttcctcctgtgcagaccctcacctgcactgaaatggtgcacgtgcc

SEQ ID NO: 405431 - DNA, 122 bp, Homo sapiens
atcccccgtgatattgttcgtcatatccaggcaggcgcaggatgacattccattgaatttcgcgacaggcgtacacgcacagtgtgatattgttcctaatatccaagaagggagaggatgat

SEQ ID NO: 405432 - DNA, 122 bp, Homo sapiens
ttgcgaattggggggaaagtgtatttttcttgcttatcatgcactctttccttttcttctcgcccgcttttcccctccttttctttttccttccttctttcctccctttaatataagggaga

SEQ ID NO: 405433 - DNA, 122 bp, Homo sapiens
gatttctgcatattccactcgcctgaaccgccgcgcgctgactggttccgcctcaccgcccgggtgggttttattgctcagccctggggacttttaaatgacccttcagtaattattactca

SEQ ID NO: 405434 - DNA, 122 bp, Homo sapiens
cctgtgtggggtgagacccccaccaaccacctgccactgtcgcaccccacctgcccgtatcggagaaggtacagccccaccccatcacgaacaggaagcccactggacagagctacatctga

SEQ ID NO: 405435 - DNA, 122 bp, Homo sapiens
cggccagccagacctgtggcagtcccagccccagggtgctctccgcggtcggccatttatcggtgaagcaacagccccttgacgtcaagcttgacgcattggagataaagtccaaggaggtg

SEQ ID NO: 405436 - DNA, 122 bp, Homo sapiens
caggctgtagtggggctaaaggagctgactgaccagcgctgcggccggtgcccgaagcagcgagcagcgcacctcagctccggttgccgcgcggcatggtatttatctgtgggttcagtgcg

SEQ ID NO: 405437 - DNA, 122 bp, Homo sapiens
ccgtccctcccccgcagctgtctaatcgtgtatgccttccaggatcccaattctgggtaacggtgcagaggactgaggccgccgagcgctgtggcctgcatggctcctacgtgctgagggtg

SEQ ID NO: 405438 - DNA, 122 bp, Homo sapiens
atctgctcacagggaggacgcaggcgggagccggccggctgggggactggggcgctgcctcgccatggtgcacaggctgagctcaaggcccccgggctgcacctgctgtgggcacctgctct

SEQ ID NO: 405439 - DNA, 122 bp, Homo sapiens
aggcatgagccaccatgcccaggccatttttacttaaaaaaaatgtgttttagacagtctcgctctgttgctcaggcttcagtgcagtggcatgatcatggctcactctaacctcaaactcc

SEQ ID NO: 405440 - DNA, 122 bp, Homo sapiens
gtacccgtgcaaatgtccacgctggcgtgttgtggagtgccgctgccgtccgagggggcgcgggcgtagcttggaggcggactctgcgttgtctccctcagcagtgcttcccgctgactctg

SEQ ID NO: 405441 - DNA, 122 bp, Homo sapiens
ccagcgctgcagtcgctgctcccgggaagcgaggcccagcagcagcgagaagccgcccagcgcgcacagcacagtggtcaggaagctcgggtctgaggtcagctcctgtgggcaggggtgtg

SEQ ID NO: 405442 - DNA, 122 bp, Homo sapiens
caaatagtttaatgaagaacagcaaatgttctgggtagcaggtattcctttacttaaaggcgaagatgagctatatttaaaattcaggaaatgcaaacttaggtccatttgaggctaataca

SEQ ID NO: 405443 - DNA, 122 bp, Homo sapiens
gtcccctcctggcaggtgctgaagtcacctggagcctccaagcccgtggggcctgaggggcggggtcaggtcgggcacgcgtgggtgggcggagttctgcgccccgggccaaggcgcccgag

SEQ ID NO: 405444 - DNA, 122 bp, Homo sapiens
ataaactgtaaaaaagttcacaataatatgtatgatgaactttccagtaaacttaaagcacgtcacacatgtttttttctctcattcacctctttcacttcttcccacaatttctacgtcaa

SEQ ID NO: 405445 - DNA, 122 bp, Homo sapiens
ttaacaaccccgctttggttggcgcgagcctgaccggcggtgcagttatcttcctgaaggcggcgctgtgccccagctgtgctgaaggaggccggcgtgaaggaaggggaggggcgttcccg

SEQ ID NO: 405446 - DNA, 122 bp, Homo sapiens
agtaagagcttattagactgtagcctagaggtaataaactagccttcacaccagaccaagcgttgtattttgtttggcctgtttaataagttaaagaactgagcttacatttaaaagtttgg

SEQ ID NO: 405447 - DNA, 122 bp, Homo sapiens
ggccctacacaacaattttcacttcaatttcactggccagccctagcagcaagggaggctcggaggtgagaaatagaaccttttagacaggtattttgcagccaaataaaatcagagtttat

SEQ ID NO: 405448 - DNA, 122 bp, Homo sapiens
ctatcacatatttcaaacatcacagtggctggaagcaacagggcaggaacagacaggtgtcgtcacttaacctggtctttggggaccttgacatcaagaccgacaggtcaaatctttggtct

SEQ ID NO: 405449 - DNA, 122 bp, Homo sapiens
gctcaagcgatcctcccacttcagcctcaggagtagctgggactacaggtgtgtgagcctcgctcattccatattatagatcctaacattacataactataaacccaattaaccttattctt

SEQ ID NO: 405450 - DNA, 122 bp, Homo sapiens
gctgggtccaccagaaaccttgaaccagggctgccttcgctagcatggcaggcctccaggcgggaaggaggaagccaagtgtctaaattcttcataatgctttacagtagctgggtttgagg

SEQ ID NO: 405451 - DNA, 122 bp, Homo sapiens
ctgctcactgcagcctccacctactgtgctcaagcagcgatcctccctcctcagccttcccggtagctgggaactacaggtgcccgccacagcgcccagctaatttatttatttatttattt

SEQ ID NO: 405452 - DNA, 122 bp, Homo sapiens
aaaaacccataccctgtaggccacgggcaccaagctgggctcttgaggccctgccgaagacgggagccccaccttgagctgtctgcgcactttttcgatgaagaacttccaacatgtttccc

SEQ ID NO: 405453 - DNA, 122 bp, Homo sapiens
agggtgggcgcgggcctgcgggttttttaagggtggggtgagcggtggcctagcagtgcccgtgggggaggggtgtttctcctctgggtgcccctcccccgggtccgggaggagggttgggg

SEQ ID NO: 405454 - DNA, 122 bp, Homo sapiens
aagaaactggaacttgctattggcagcaaaacagtcgtggtcctgagactcgccattcaccgtctgtccacacttcccttttgagtcatttccttattcagagacaataacgtggagaagaa

SEQ ID NO: 405455 - DNA, 122 bp, Homo sapiens
cggcaatgttgcggggaagccaagaccaacccctgcccgtgcccggtttccccgaggccccgtgtcctcagagcgcgtctcgtggttccgggctcactggcttctaagtcttctccttctgt

SEQ ID NO: 405456 - DNA, 122 bp, Homo sapiens
gtccaggacgttgctatagcagcgcccaggtccggacctggagcaaagggcgcgtctgcccgcgcagggtcagcgtgcacccagaaccctgcgggaccagagaagacctcttggacgagccc

SEQ ID NO: 405457 - DNA, 122 bp, Homo sapiens
gaggcccagcaggtaagcacttgtggaggccccggtggctgctggttagctcttgaagctcgtccccaccctgcgtgcgttctaaagagccgcgtttctattgcaactgcctgccctgcgct

SEQ ID NO: 405458 - DNA, 122 bp, Homo sapiens
ccagtgaacgcgcatgcccactaaagcacgtcactaaggcaagtcactcacccatataagcgcgctgcacttttggcacagcgcgacttccctggcccactccctgcgggccagtgaacctc

SEQ ID NO: 405459 - DNA, 122 bp, Homo sapiens
gcgacacgactacatgttctgctcagtggttccactctaagtgagactccgtcgcagctgcgcacacccgggtctagagcaggaaaagcaaaaggctcacggagtcgcgctgatgtgaaccc

SEQ ID NO: 405460 - DNA, 122 bp, Homo sapiens
agaggtggacaaagggcccagacgtgagcaaaggatggcagcaagcccggacccaagcgacgcggcgaaagcacagcgaccccaccctcgccaggtgcagagccatttccgcctccgagtcc

SEQ ID NO: 405461 - DNA, 122 bp, Homo sapiens
cactgaccaggccccgcccttcaaccagggcttctgcagcgtctacatcactctgctcaacgagctggacgaggccgtgcagttctccaatgcctcatacgaggctgccatcctggagaatc

SEQ ID NO: 405462 - DNA, 122 bp, Homo sapiens
agagggagaattataataaggttgttagtttccagagaacattacacctaagcttctccacgcttgtaatggagggatggatggatggatggatggatggatggatgaatggatggatgaaa

SEQ ID NO: 405463 - DNA, 122 bp, Homo sapiens
ctctttattagtatcctatttttttaattgtgatttgaaaattcataatggtgtctcactcgtgtaatccaagcactttggaaggccaagctgggaggtttgcatagaggctaggaattcga

SEQ ID NO: 405464 - DNA, 122 bp, Homo sapiens
gggagaaatgggtatgtttgggtggtaccttcctgcatgggcagaggcaggtgattgtatcgccagccctggagctcagcgtgcacagcttgggcttccatttggaggaacctgatccttgg

SEQ ID NO: 405465 - DNA, 122 bp, Homo sapiens
cgcaggggttgagccgcagcgctgctgtgcaggggcaggcccgggcagggggcagtgcggcgagtcagccccctccctggcctcctcgcaactttgagtaaccgcggactccggggtcggca

SEQ ID NO: 405466 - DNA, 122 bp, Homo sapiens
aaccctgcgcagcctgtgtgctacctattctgactctgcttcccaacacccgtgtagcctcgtctccatgtgcctggtgagacttctgatatggcaacgagttaagagaaagaaaatggctt

SEQ ID NO: 405467 - DNA, 122 bp, Homo sapiens
atgcgactgtgcgcagctgcagtgggtgcgagcgcgacaatcatcgccccgcctccgccacgctatataggtcccagatctgatttggttttccaatgaggcggggcgttgagcaaccctct

SEQ ID NO: 405468 - DNA, 122 bp, Homo sapiens
tctaccaccgttggccctaaaatcagcctaaggtatggatattgtccagcacccccaacccggagattgcctccccacttccaattccccttgaaatgaagtaaaaactgtagttccagcat

SEQ ID NO: 405469 - DNA, 122 bp, Homo sapiens
gtgctggcaggtggtggacggcagcagctccttgcccaacgtctccctggcctgggtgatcgaagccctgaggctccctggggacccagagcccaaggtctgcgtgcaccaccggaacccgc

SEQ ID NO: 405470 - DNA, 122 bp, Homo sapiens
gggtcacagcctgccgaaggcagccaggcctgcagctcttccccggcccctctcggacagcgaccagcctgagggagtccaggtggtgcccctgcggccggcacccactcctggcctaggcc

SEQ ID NO: 405471 - DNA, 122 bp, Homo sapiens
gccctcgaggcaggggtcgtggggatgcactgagggccgcctgcaaagttaccacaggggcgcccgagagtcactggttcacattctgaacaccgtcgcttggaagacactgcaaacccagc

SEQ ID NO: 405472 - DNA, 122 bp, Homo sapiens
ccgcctgaaccttcctactccagctcgcagctgtctggagcgcagagcgctgagcgggggcgttagcgccccagcctgtggctttggcgctcagctgtgcctcacccgtcgcctcaaggacc

SEQ ID NO: 405473 - DNA, 122 bp, Homo sapiens
aggtgtaaggccctttgctgggcttgatggaaaggaagggacattcctgctcttagagagcggtagccatccataataaccaacttggatatgacgtcaaaagtgatgggggcaccaccatt

SEQ ID NO: 405474 - DNA, 122 bp, Homo sapiens
tccaaccctctgagtgcactgcgtggaagccgaaaatctccctgttcctgtgcagaaccacgtcccgttggcagcccctggggttctgaaccggtgccacaataccaggggagtgaggagaa

SEQ ID NO: 405475 - DNA, 122 bp, Homo sapiens
catagatctcagattcagagggacacaccgacccctgttgctggtcaaactcgaggctgacgctagggtgcacacaacaggtcagtatgttccccatggggcgcctctactgtctgccacca

SEQ ID NO: 405476 - DNA, 122 bp, Homo sapiens
gggcggagaccagggcagaggaataacaacatgagcagaggtgtggtgggtgggagacaccgagtgtctgactcgccacccacctgggggcctggcacccagaaagcagatggatcacctgc

SEQ ID NO: 405477 - DNA, 122 bp, Homo sapiens
gccacctcaggtcagagtttgtgctcagaatcaacactccatcattcttgtgctaggcatcggaatactcagtccctgttttcaagagtcttagtgactggagccagaacagtctaggagac

SEQ ID NO: 405478 - DNA, 122 bp, Homo sapiens
gcgcatttcgcagccgctgccgcctcgccgctgctccttcgtaaggccacttccgcacaccgacaccaacatgaacggacagctcaacggcttccacgaggcgttcatcgaggagggcacat

SEQ ID NO: 405479 - DNA, 122 bp, Homo sapiens
gccccgagcaggctccggcgccctggagacgagcgcccctggcggcggctacgcgctctgcggctctcccggctgtgtccgtgggctttagctacacagctcccgcagatgttgaacccttc

SEQ ID NO: 405480 - DNA, 122 bp, Homo sapiens
tcctcttatcccaatggcagtaagcaagcagcaaggcagtgacctagattcagtaatccccgggttaccttcatctccacctccctcctaagaagtggggcacccacaaatcaatcgtgcat

SEQ ID NO: 405481 - DNA, 122 bp, Homo sapiens
tgcactggctctttcctctgtggaaatgctcttgccccaggtgtccacatggctttaggtcgtgactcaaagtcaccttcttaaggaaacttttcctgaccaccttgggccgtccccatttc

SEQ ID NO: 405482 - DNA, 122 bp, Homo sapiens
ccgcgcgctgcgggtgcggcgaggctggccctataaaaatgtttctgtttctgacatcctcgtgcagatacgcagacgtctctacctacaggatcatgggctagcgggtgctcaatcacagc

SEQ ID NO: 405483 - DNA, 122 bp, Homo sapiens
tgttcctggcgtctgagatttgtcagcagggccagattttcaggaaccatgcatggctatcgcctcctcccgcctggagggctgctcctgcgcctctgaccggcgctggttccagccgcggc

SEQ ID NO: 405484 - DNA, 122 bp, Homo sapiens
tcccgcctcactacattgtaaccccattcctgatcacccgttcggatccataatcagatccgaagaggagtccagagagcccagcggcaccctgaaactcctcctccaccaggaactgaagc

SEQ ID NO: 405485 - DNA, 122 bp, Homo sapiens
gcggcggcggcggcggcgtgatggctccggccgcggaccgagagggctactggggccccacgacctccacgctggactggtgcgaggagaactactccgtgacctggtacatcgccgagttc

SEQ ID NO: 405486 - DNA, 122 bp, Homo sapiens
aaatcgaggaagcaaggcgttcccggggcgagggatcgggtgacgcgctccagctggcctcgaccaccgaaccccagcgatttcagggcctagagtccgtcgtcgcctgacaggtgtagcca

SEQ ID NO: 405487 - DNA, 122 bp, Homo sapiens
agtctggaggcttgcagtgactcagacacagccaattcctcccctaatagcactgaatcacggttccagcggccagtggtcgcccctcgtcaaggtctaaggctgctgcagccccggctccc

SEQ ID NO: 405488 - DNA, 122 bp, Homo sapiens
gggactcaccgactttgtagggcagtttgtcagacatgctggcggcactcgtgatggaaacgggcgaagggggctgggcctcagtctgggaacaggaactgggcgggcagcgccgagcaggg

SEQ ID NO: 405489 - DNA, 122 bp, Homo sapiens
tgacctcgtgatccgcccgcctcggcctgccaaagtgctgcgattacaggcgtgagccaccgcgcgcagccttaaatgtttttttaagggtccgttttgttttattttgctccctggtctag

SEQ ID NO: 405490 - DNA, 122 bp, Homo sapiens
catctacggtagagtcttccgtagccctcacgtggctctccgaggtgtgggtttcttccccgtcgtccgcacacggggaagtggtgtggatgccgctttcagtgggttgcggtgggggccgg

SEQ ID NO: 405491 - DNA, 122 bp, Homo sapiens
atacatgcgaagcatgcgctctaccactgagctacatcccctggcacaagtcggttgtaacggagaattcctgtcatgttaaaaacgcgaagcattttatattacctcgtgctcgaccaggg

SEQ ID NO: 405492 - DNA, 122 bp, Homo sapiens
cccgcccctccccaacagccctgggtgtggcagggagcctgaccagttccctccagcctgcgtcatggagccctgggcgtggctgcagggtttaaagagccgacccacgtgcccagcagcct

SEQ ID NO: 405493 - DNA, 122 bp, Homo sapiens
agggtggcttggggcggcggctctgggagaagtgacctgaggagtctgcagatcccagcccgggacggaggcgccgcgagaggagctactaagccctccaagccgccctttccctcttgcct

SEQ ID NO: 405494 - DNA, 122 bp, Homo sapiens
ggttgttgtgcaagtagaggccgttcttgaggaaggccggcagcgcggccagctcaggtacggagatgtgtcccagccggttggaggagaggtccagagtaagcaggtgggtggcgctcaga

SEQ ID NO: 405495 - DNA, 122 bp, Homo sapiens
gagggggaggattcccaaggtctaggtaaagttaccggaatccagattccttctcgagctcgaacattacatttttcctggagtcaaaatgggagttaatacaagtgcatagatgacaatta

SEQ ID NO: 405496 - DNA, 122 bp, Homo sapiens
actcccggcctccagagatcttcccgcagggcctcccaaagcgcggggattgcaggtgcgcgcggggccagcggccccccgggcgggagaggagggcgtggccggggggcgtggccgcgggg

SEQ ID NO: 405497 - DNA, 122 bp, Homo sapiens
tgattgtgataatcccagcatttatggagagtctgttatatgccagggatgctaataacacgctttagttgcattatttcatttcttccttaccacaaacccgtgaggtactatttttatcc

SEQ ID NO: 405498 - DNA, 122 bp, Homo sapiens
tgcagcggccagtggatctcagaccctgagctgagcacgactggagaggatgggtgcatccgagcgtctgcagagcacagagcgcgtccgcagagcgggtccacaccttgggtgcagcgagc

SEQ ID NO: 405499 - DNA, 122 bp, Homo sapiens
cagacaaaaacgatagttagtgtgtactaagcacttccgatattccaggttggtctaagacgtttacaggcattaacacatttaatcttcacaacaatcctgcgaagtaggtattattagta

SEQ ID NO: 405500 - DNA, 122 bp, Homo sapiens
ggggacatcaacaaaagcagagaattccggagacgccccgagctcggtagaaggcagccacggctctgcatccgatcccaaggagccttcctggtgctgcctatcccttgttctgggcacag

SEQ ID NO: 405501 - DNA, 122 bp, Homo sapiens
cagtggccgtcactcagggcagactcggacgacccatctgctctcccctgaccgggtcctcggacagctgcccctgaccccacggagagcccggacttcccggggacagagcctgcgcccca

SEQ ID NO: 405502 - DNA, 122 bp, Homo sapiens
agcttaaaaaactttgatgataaggaactctctagggatagatagctagcaaaaaacattcgactgagcttcagaaacaagttctctggaaactgaaggacaaaacactggctggacattcc

SEQ ID NO: 405503 - DNA, 122 bp, Homo sapiens
tgggccacgaagagcagcggcgagaagacgcagcccagataggctcgggtgggcggcggtcgcacaggcagagcttccgtcccttgctacgccccacgcacgcacaggcgcttccaagacgc

SEQ ID NO: 405504 - DNA, 122 bp, Homo sapiens
catatctgacagaaggcttgcagccggaatctacaacgatcacctacgatccaatgaagacgaaaaacagcccaataacagagggcgacacacttgagaggcacttcacgaagcagacaagc

SEQ ID NO: 405505 - DNA, 122 bp, Homo sapiens
attttcagccttgacagatgaaaaggatctgtagaggctgctggtgatggctgcacagttcgtgaatgtgcttaacgtcactgaaatgtggttaagatggaaacaatttgtgaagttttacc

SEQ ID NO: 405506 - DNA, 122 bp, Homo sapiens
gttcccggcctaggggaagggctatgacaatggaatgacaaccgcgggaacgtgctgacacgtgtcctccgcggaggcctggggcgggaagcagcccccgggggacggcgggcagagcccac

SEQ ID NO: 405507 - DNA, 122 bp, Homo sapiens
atcctcacagtgatgaaccgtatttcataaacatcacacgccagagaagccacagttactcggaagcccccagctgactgcctggcttgtttcagatgcagccgcttgaaacgtgcgcagca

SEQ ID NO: 405508 - DNA, 122 bp, Homo sapiens
gtcctgctaaacaggaagttaagtccttctctgtcagactattattcaaggtatcaatcacgaacaagttattttcagctctcagagctacaaaaggaaagatttatggagaaaacatttat

SEQ ID NO: 405509 - DNA, 122 bp, Homo sapiens
aactgtcaccacccccctttgttttctcagtcagagcactcgatctgggccccttcaactcgccccgcacgctttccgtctgcagcaccccatccaactgcacccaagcgcccttaagtagt

SEQ ID NO: 405510 - DNA, 122 bp, Homo sapiens
cttaagagcccagtggtcccggaaagtaaagagatcggaagtcaggtggacggacagagtcggatggagcaaagaagcccggcacacaccaacagagagaacgacatagcgcgggaaggagg

SEQ ID NO: 405511 - DNA, 122 bp, Homo sapiens
agagaagtttatgcaatgccagacatggaaataccaaagccactggtgacaaagggtaaacgctactgatagaagaaagccttgtccatttttatagttttcttctctaccattatttattt

SEQ ID NO: 405512 - DNA, 122 bp, Homo sapiens
cctgggcacccgggctgcaggcggtgccgtccaggacgcggccgaagctgtggtagaaggcgtgcccctcagccaggcagttgaggtcgcactggttgggcgctgagggcaggaggagtcgg

SEQ ID NO: 405513 - DNA, 122 bp, Homo sapiens
cacttgtgtcatgtggttaagcccttttggcaacataagacctttcccaagaatgtgcctcggtgcagaggaagacggtgggggcaggccccctccccgggatgctccaccctccctgacct

SEQ ID NO: 405514 - DNA, 122 bp, Homo sapiens
ggcctgagagcctgagggtccccggactcgcccaggctctgagcgcgcgcccaccatgagcgcccggaccgcccccaggccgcaggtgctcctgctgccgctcctgctggtgctcctggcgg

SEQ ID NO: 405515 - DNA, 122 bp, Homo sapiens
tggctaattaagaatggtgcagcagatatgtagaaagagactagatgcctggtgacacttcgctcagctgaggtgaatgaacatcagcctacttttgggattccttgtcatgtaggacaaca

SEQ ID NO: 405516 - DNA, 122 bp, Homo sapiens
tgtcttcgtaactcacttgtgcctcatcactcacatgtcacaggctaaccacccccgctgcggaaatcacagcatctatcataggatctttctgcatctgtggaggacactcagagcaatga

SEQ ID NO: 405517 - DNA, 122 bp, Homo sapiens
tgccggagctgctcctggctgaggcagcccaggtccttgaagagcttgaagagatcgttgcggaacttgacgccgatgaaggcgtacaagaaagggttgacgcagcagcggacgcaggccag

SEQ ID NO: 405518 - DNA, 122 bp, Homo sapiens
tcgggtttccctcagctcagatcaaatttaacacagcaagaggacacccactgttcccaccgaagaggcagaaagctggagttcgcggtgcctttctcccccaggctgggatggaggaggca

SEQ ID NO: 405519 - DNA, 122 bp, Homo sapiens
aaccatcctttccccagggtcaggccgctggtccgggagcggagtcgggaggaagggagacgaaaaggacacggaggcacaggggccacagatcaacccacagaccccaggaggtctgctgc

SEQ ID NO: 405520 - DNA, 122 bp, Homo sapiens
atctgcccagcctgccaaatttcaccccatcttcaagagtagactgccagacaaggcctccgtgctatatccccccacccccccatccccccacccctccgtcttccagaatcagactccag

SEQ ID NO: 405521 - DNA, 122 bp, Homo sapiens
cggcccaatgggagcggcgcactggcctcccctttaaggaatgttgtgacctgacgtcaccgggcgagttacctcccgcagccgcagccgccgtgctcagcgcgagccccggagcccttgag

SEQ ID NO: 405522 - DNA, 122 bp, Homo sapiens
atagacttaaaacaaaacaatgaacaaaaacaaaaccctatttcttaccctctaaatggtcgcatttccctttcacttacctgaaaatatgagaataaaaatgaccatgtattgagttacac

SEQ ID NO: 405523 - DNA, 122 bp, Homo sapiens
cgggagccaacactggctttcagctctacacggactggtgtggagggaaggctgggggcgcggctctgacagcaaagggagaagcagacaggaaacgcacaggatggcagagacgttgagaa

SEQ ID NO: 405524 - DNA, 122 bp, Homo sapiens
ggccgtgacatggccaactggatttctagcattatctatctctacaagctgcacagtggacggcaggctggtttgacatctttattagggcccctggtggaagtggtgaggacagagaagcg

SEQ ID NO: 405525 - DNA, 122 bp, Homo sapiens
tggtatgtttcacttgctttttttttttttttctttttctccagcaaattgctcaaatgtcggtgtgctctcatgaacagaaacgatggcacggtgggtcctggtctcaagacttcctctca

SEQ ID NO: 405526 - DNA, 122 bp, Homo sapiens
cctgtattattcctgtctcagggcttgggggaaactatatggtattctggaaaaataccacgtggaggcagataattttggacaatgggaaattttgcattggaagatcattgacatagtct

SEQ ID NO: 405527 - DNA, 122 bp, Homo sapiens
cttgatccacccgccttggcctcccaaagtgttgggattacaggtgtgagacaccgcgcccggcccagacgtgggggaagttttaaagcttaccaaatttatctggtatgtattttttgttt

SEQ ID NO: 405528 - DNA, 122 bp, Homo sapiens
gcacactcccgcggtcgtctgggctgtcactaggagatccgtagcccagacggtgactttcgtatgagctatttaactttattttcttcagaatctgctgtagattgagctgtgcgtgaaat

SEQ ID NO: 405529 - DNA, 122 bp, Homo sapiens
atccaagttcttcttcctgtggacagggaacccaggctgcgaactgggaggatgtggcctcgtggggggcagggccagcgtgctgtgatggggatggggctgggcaggttggggctgcctgc

SEQ ID NO: 405530 - DNA, 122 bp, Homo sapiens
caattgtttatgtactctctcttacttactcaactataagatccttgaacttgtcacacacgttactttaggaactagcatggaaaaggtcttcacaaatactatctgaaaaatcaataagc

SEQ ID NO: 405531 - DNA, 122 bp, Homo sapiens
gaactgcagtgaatctgggaaaagacatccagtcagtagatatgtaaattagaaaggtgacggttttgttgtcatgcatgcctaatgaaaatgcaagttctttcctgtcaggaatatactgg

SEQ ID NO: 405532 - DNA, 122 bp, Homo sapiens
agcctctcggaagcaatctttcgggacggaagttaagtagccccgagcgggaggctgtggcggaagtggtcgcgttaccgcttgtttgtgcgcatgcgccactctcgtctggccgccgcgct

SEQ ID NO: 405533 - DNA, 122 bp, Homo sapiens
gatatgtatttttctctctaacttctaactcgctgaagtttccgcccatgtgacttccagcgtgagttaccagaaaccacaagagagagagagagcgtgcaagccccaaagcgagcgacatg

SEQ ID NO: 405534 - DNA, 122 bp, Homo sapiens
tcaggaagagtttcaattagagaacaggaatcattccccaaagtaaagggctttgaaagacggaagggtctcctttatgggatctgaaatacttcttgatgacaagagagaactgactcagg

SEQ ID NO: 405535 - DNA, 122 bp, Homo sapiens
ccagtaattccttaattactctttctacattaaaaagttgatgttctaaaattgctagtgcgtgtgtgttttcctcacatatcaatattcaaaaagataactctaaatgaatgttttttatt

SEQ ID NO: 405536 - DNA, 122 bp, Homo sapiens
gcccacggccgactgggaaacaggagaacgggtcaaacgtgggacgtccgtcagctataccgaaaggtctgtgatagagcttggagaaatgtgcatttggacacattatttttacattgtga

SEQ ID NO: 405537 - DNA, 122 bp, Homo sapiens
tctcgccccagcctccttggccgcggagtcctctgtgagatggaggagctcagttggctccgctcggctccactcggctgggctcggctgaaaaaagccggggggaggtggcgcgcgcgggt

SEQ ID NO: 405538 - DNA, 122 bp, Homo sapiens
ggactccggagaaccatttctgggaccgggagctgtccagcgcctcgggtcctgacggaccgctgattcgcctaggtgccatcggacaagcgggtgctcagagccagctctggtggctcggg

SEQ ID NO: 405539 - DNA, 122 bp, Homo sapiens
ctccaagtctgtgtcgcccgtctgtgtcgcccagtgcatcagggtctcattccttttgaccgtgggcgccgttctacggcctggattccagtgcctggactggccatgtttagtctatgcac

SEQ ID NO: 405540 - DNA, 122 bp, Homo sapiens
gcgtgtcattcatgaagggatgaaatggcagctattcagtcataatattccaagggtccccggctctaccctccagttgttgtaactcaactgtgagttctcagcagagtctgttttctctt

SEQ ID NO: 405541 - DNA, 122 bp, Homo sapiens
cacctcgctgaagaagcgcagcacgcgcgcgtaggtgttcaccggccgcacgcgcacgtccgacaggcgcaccgtcttgcagatgtggtagtggcagaagcacatgagcaggaagggcagca

SEQ ID NO: 405542 - DNA, 122 bp, Homo sapiens
tcacctacaggcacctactatgggccagccacttaatactgactactcccctcaagcccccgggacacatcctccgccccgcctgagctgcaagagatcctcctatacctttaaccaacctc

SEQ ID NO: 405543 - DNA, 122 bp, Homo sapiens
cccttcttcgctgtgcagttccacccagaggtcaccccggggccaatagacactgaggtacgtcaaaaagatgaggcctattatgtatgcaaaaaaaaaatgtatttgtgtggaaattcgag

SEQ ID NO: 405544 - DNA, 122 bp, Homo sapiens
ggggtggccatcactttctgcctcaaggaattccgggtgaggttcctcccaggcgctcgccgtcctgtcctccctgcccagctcagcccagcccggggcctcacctgctacctctttcctcc

SEQ ID NO: 405545 - DNA, 122 bp, Homo sapiens
actttagacaaattaagttatacagagtttatctgagcaaaggattcatgaatcaggcaacgttcagaaccagaaaaggttcagagagctctgcccagcagtggatgtaggcagcttttata

SEQ ID NO: 405546 - DNA, 122 bp, Homo sapiens
gcctagggaactgggagcttgggtggaagcgacacccgtggaagtgggaggaggtggcgccgggactttaaccccttgtgggctctgcggcaggggatttaaccctttgtggatctggcccc

SEQ ID NO: 405547 - DNA, 122 bp, Homo sapiens
gacaagcaggcaacatgtgcatgctgataggagagacagtcactttcagcaccagcaccccgagagccacacgagagatatgcagacacaggcatgcactatcagatcctgacacgcaagag

SEQ ID NO: 405548 - DNA, 122 bp, Homo sapiens
gccctctctcgaagaactggccagactttttgcaaacgccttgaagggtagaattagcagcgagctcttgaaactgcctctggagatggaactcagcggaattctcgaaaagaagagggaca

SEQ ID NO: 405549 - DNA, 122 bp, Homo sapiens
tattatgtggagacagttactgatttactacaaaagagcagaaagcctatttatgtctcccggtaccaagaaactttgaggttcccaggcagaagagcccattcttcaaatgtttaatttat

SEQ ID NO: 405550 - DNA, 122 bp, Homo sapiens
gccggcagggctgctgccccaaacccgcggttcacttgcctggctactgagggccaaggccgcggtcagccaactccccagggtgtttctatgcctgcctgcaggtgcctggtaactttttc

SEQ ID NO: 405551 - DNA, 122 bp, Homo sapiens
cgagcaagtgcgtgttctcgggtcctcgccccgagcagcctggccagcagcatcccgcctcgcccacttcccagtagacacagggacagcggcttccactcccgggacctctggacatcctc

SEQ ID NO: 405552 - DNA, 122 bp, Homo sapiens
cagggggtggagcagggcggggagttcgggaaacttgtaaatagccgaactcgggcctcccgccccaacccggggcggctccttccgaaggctccactccagcggctcgctgcgggagacca

SEQ ID NO: 405553 - DNA, 122 bp, Homo sapiens
gtcggcaggcaacacaggaggcgcggagtgcagcgtgaccgcccgccgcgcacggtaccacgccagcacccagcgccccgacatacccagggccaaagacaggaccacgacggccagagcca

SEQ ID NO: 405554 - DNA, 122 bp, Homo sapiens
aaaagaaattacaggaataaggattgaaagatataaagcaaaactctcattggtcacagacgacaggatggtctactgagaaaccacaaaagaatctgcacagaaattattggaaataagag

SEQ ID NO: 405555 - DNA, 122 bp, Homo sapiens
cggtgttggtggtgcccgtctcgtgggtctcgcagggcgggttcgaacagactcggaccacgctaccattctgctggcccacagtcgaggtcacaagagaagcagctgcctcctgtctgtca

SEQ ID NO: 405556 - DNA, 122 bp, Homo sapiens
gaggcgtcggctccacccctctcagagtcgcggtctgacgcgagatgacagcaacgagttcggtatgtctatgcaaataagcgccctcttgtgggccaatggggagcggaggtgccggaacc

SEQ ID NO: 405557 - DNA, 122 bp, Homo sapiens
caagatacaaaatggtaggcaggagccagttatgggttcttacaagccaggttaggattccggatttggcatatatacaatgaggatgcactgaagatgcctgagccagggtgcaactggat

SEQ ID NO: 405558 - DNA, 122 bp, Homo sapiens
aggctgtcctgaatggtgctctccaatgggagcaataattagctaagtctgtcacacctccgctccacaatgtgggctgcagcacatacacacaattatctccttgaccttgggttctgatt

SEQ ID NO: 405559 - DNA, 122 bp, Homo sapiens
gtgctccttcgctcctgctttcccggctcggtggggtcccttcgcggccacccggggagacgtcttagacagtcgtggttcctgtgatctgtgtcctctttgcagaaggtactattgggctg

SEQ ID NO: 405560 - DNA, 122 bp, Homo sapiens
agacttatttcttgtgatgaaatactagagatcataaggaagtagagaaagaaaatgacccgagtgctttataagggacagtttattggatcaatgcctctttgtcttattaatctgtgttt

SEQ ID NO: 405561 - DNA, 122 bp, Homo sapiens
taatgtcacccttccattataccctaaaaccagtcccaggtgatgtacatgtgaaatgtacgtgtgaaaggtgaaacatcaaagctgctagaagaaaactcaggggagagaatagatacatt

SEQ ID NO: 405562 - DNA, 122 bp, Homo sapiens
agacagaggccacagtggggaccaggaagggggctctgggcagcaggatgtgggggggcccggggcaaatgctgactccgggatccctgggcaccagcagccacgccagccaccccacccct

SEQ ID NO: 405563 - DNA, 122 bp, Homo sapiens
cgtcccccgcgtgccccactcctcaaagccagaattccggagacgctgtccctggagccacgctgcactctccaagacgcccagcacacaccgagacttgacgggctctgtcccgcctgatt

SEQ ID NO: 405564 - DNA, 122 bp, Homo sapiens
gcacatgcctttttcttgcggctacagctctcccgaggaattttcaaagcacacggggttcgcttggcaggagtctcccaggatataaatacgctttgggggcttttgttttaaggactgca

SEQ ID NO: 405565 - DNA, 122 bp, Homo sapiens
gctgctgcagcggcaggtgctgggtcgggggcgctgggggctgctggtagccggggcccccgcccgggccgccgtctgcgccgcccgagccgctgtgctgcgcgtactcctcgaagggaggg

SEQ ID NO: 405566 - DNA, 122 bp, Homo sapiens
tcgtttagcgttgcgcgaaccctcagctggtgcggccgctctcaatacccactgcgcttgcgctacagcttcgtctcgacgggtttgctcctctcaaacgctcactgcgcgtgcgctagcgc

SEQ ID NO: 405567 - DNA, 122 bp, Homo sapiens
aatatgatccgaatccctctttcctggctcctgggacagtctaggaataacgggcacctgcgacccgctgtaaggttgcgaggtcactccaggcttgcccgagcctctgctcaggtttcaac

SEQ ID NO: 405568 - DNA, 122 bp, Homo sapiens
ctggcacgggcctcaagccggcgcggggagtggctctggggccagcataccggcgcagagcgtgagtcccaggcagaccccgtacccagagtgccagcgggaaggggcagcggacaggcacg

SEQ ID NO: 405569 - DNA, 122 bp, Homo sapiens
ctttattttactagaaatgggaatcatggcctcttgaagagaaaaaaagtcaccattctgcgtttagctgtattcatatattgcatttctgtatgttttgtttgtattgtaaaaaattcaca

SEQ ID NO: 405570 - DNA, 122 bp, Homo sapiens
caggctgccccagacctgaagctcccggagagggcgcgctgccagtcccagcccttaggtcggcagcttcctccgttaggggaattccatctcttgctcttgggcaggaatctcctggtttt

SEQ ID NO: 405571 - DNA, 122 bp, Homo sapiens
ttgtatttactcagagcagtgtagaagaatctattgcgggcacaaaataaccctcaaaggcgtgccctgaaatgttttctaaagccagccttgaagtaatttgctaatggcctgcctgcttc

SEQ ID NO: 405572 - DNA, 122 bp, Homo sapiens
taaacgtcttagagacaaatctgtctatttcacataggaagccagttgagttgttcctcacgctttccccacgaagctgcatctgaaggacttcctcacccccccgctgtgatcacaagtta

SEQ ID NO: 405573 - DNA, 122 bp, Homo sapiens
gctattattagggatgtcaaaagggttgcccagcagagcagagttctcaaactcagatgacgcttgccaggcaggtaatgtaaatggatggtgtagatgcaataaaacagctatctctattt

SEQ ID NO: 405574 - DNA, 122 bp, Homo sapiens
acagaggcccagtgaggactgtgactaagcgggtgcagccctgctccctggacccagccacgcagaagctcatcactaacatcttcagcaaggagatgttcaagaacaccatggccctcatg

SEQ ID NO: 405575 - DNA, 122 bp, Homo sapiens
acggcttggcaccgtgcacagagggatcaacggccaggggacccgacacattggaggctgcgctcccatgacaaaggcagggcctgcacagcaaagaagggcagagctccgaggaaagagga

SEQ ID NO: 405576 - DNA, 122 bp, Homo sapiens
gaaggtgggggctccggggagggggagagaatttgaaaagtctgctcgaccccttggcagcgattccaaggctaagggaagctccctctcaggtgcctgacagcaggagcagccggattttg

SEQ ID NO: 405577 - DNA, 122 bp, Homo sapiens
ccaagaataatacttttctattattttactttttacaagtacatgcccagcaaacatgcgcgcacacacacaaacacacaaacgcatacatttatttgggatctaaatctttttctcttttc

SEQ ID NO: 405578 - DNA, 122 bp, Homo sapiens
ctttagctttggcctccaacgattctgtgctatagatacagcactgtttctggcacgcctcgtgggcattttgaaatatttaacgtttcctcatgatttgcctttgtgtgtgattttagttc

SEQ ID NO: 405579 - DNA, 122 bp, Homo sapiens
tgtatagtcttgaagccacatttgacagaaatctgaaagcagtcttaaaagtacaaataccgccctactccctcaaaaaattttcatgcaaaaatttaaaacatttagttccttttatactt

SEQ ID NO: 405580 - DNA, 122 bp, Homo sapiens
aggtgcatgactgaatgtttcctgttgaaccaggtatttggataacacagagacccccaacgtagactcagggagaagggaatgtagacaagacccaagaacctcccgtaggctgctagccc

SEQ ID NO: 405581 - DNA, 122 bp, Homo sapiens
aagcaaaacctattcactgggcaagcattggtagccaactttgtcctgaacagaacaaagcggggcagcgtttccaaaactagggtcccagggcttatcctcaaaggagttccaggagagtt

SEQ ID NO: 405582 - DNA, 122 bp, Homo sapiens
gcagatgctggggttcgggggtggcctcagctgagggcctgctgaccaaccaaagggtatcggcaggggcaggggctggccctcaccctgggctgggggttgggccagcagcttctcagcac

SEQ ID NO: 405583 - DNA, 122 bp, Homo sapiens
aatgaatgaatctcagagccaggcgtgtgcgcgggaggccggagcgtgaggactgagggccgcgtggccatcctccttctccggccaccccggagccccccgcccgtcacactcggggcgcg

SEQ ID NO: 405584 - DNA, 122 bp, Homo sapiens
ttggaacgggaacgagagcgagaacggctgcctcctcgacgtctatcccttgaacgatgccgctttctatctttagatggggaagacttccggtcccggtctctatcccgctctctgtcagg

SEQ ID NO: 405585 - DNA, 122 bp, Homo sapiens
tatgatccacccgcctcggcctcccaaagtgctgggattacaggcgtgagccacggcgcccggccgaggccattttgatttttactttaaaggctcgccacatggacaaaggccagggggct

SEQ ID NO: 405586 - DNA, 122 bp, Homo sapiens
gccctgcatcctgcctgggcatcctgcgcccggccatgacggcgcactcattcgccctcccggtcatcatcttcaccacgttctggggcctcgtcggcatcgccgggccctggttcgtgccg

SEQ ID NO: 405587 - DNA, 122 bp, Homo sapiens
cacgcgctgtggccccagtcctgttagcatgaggtgggggtcagaagttgaggaacaactcggacctaaagccttgacaattgccaacagtgtagacaagtcccagcatgcccaaaatttat

SEQ ID NO: 405588 - DNA, 122 bp, Homo sapiens
accctggagtccggagcttgcacgggatgttcggccgggtcagaagtcccttctgcctgccgagaacacctaccgagagccccatctatcccttcaggaaggggaagtggcatgtgatgttg

SEQ ID NO: 405589 - DNA, 122 bp, Homo sapiens
gttgtggaatttgcaagaaaactagtatttatagtgacagaattaatcacaaggaactgtcgtagaatgcatgatcacatatccctgcctgttaccatgtgaggggcactgtttctctggga

SEQ ID NO: 405590 - DNA, 122 bp, Homo sapiens
aaacttttttttttgaagtcttccttgtccctcaagccaagtgatttccttcaccctcggcgtccccatgaaaccatgttcacacaagtgtaatacaattatgtgtctacaattactttcct

SEQ ID NO: 405591 - DNA, 122 bp, Homo sapiens
ccgcgggctctttgaacctggcaccctactgccagccgtgcgcctgattgacagttctcacgaccccgccccatagctctgattggatagggctccaggtcccgccccctgggcactgagtg

SEQ ID NO: 405592 - DNA, 122 bp, Homo sapiens
ggcagagacagtcttgaaagcgggctctggagttctggggctgagcgctcttggcaaagtcgggtaccctctttgatcagctgtcacacctggcgataatggcatcagagagagataccctg

SEQ ID NO: 405593 - DNA, 122 bp, Homo sapiens
cgggcgctctgtaacaagctgcagctgtcccattgctcattagctttcctaacatcttctcggggctggtcctgggagagcagcccccaagctcctccctgtgggccggggccctgaaaagc

SEQ ID NO: 405594 - DNA, 122 bp, Homo sapiens
tttaacacaacatttgagaaattcatctgcattgcttttgtttatctggagacagagtctcgctctgtcacccagactggagtgcagtggtgctatcttggctcactgcaacctctgcctcc

SEQ ID NO: 405595 - DNA, 122 bp, Homo sapiens
gccaaggttctatggggatgtttttgcatggtttagaggctgctttctcagcacagtacacgtagttgtctttctcaatacatggtccttgcacatgccctggagtcaggatgagcctctga

SEQ ID NO: 405596 - DNA, 122 bp, Homo sapiens
ctgattgaggtcggcagctcccgagaagcaggagaagcagagtttttgcagtaagtacatcgttggttattatttaagacagagatggaaaatcttaggatagctggggaagaggtgcttct

SEQ ID NO: 405597 - DNA, 122 bp, Homo sapiens
aattgaatcttagggaatgtttggtattcacgtcagcagtggctgccttgggtggtcaagcggcacagataaggctggagggatgttgagattgtatgtatgtatgtgttattgattcaaat

SEQ ID NO: 405598 - DNA, 122 bp, Homo sapiens
gggggagttcgtgcgcaagaccctggcaacctggctgcggagacgcggcggatgggtgagcgcctgagtgcccgtgtgggtgggagagctggggtgcgagggtgcagaggtacaggagggag

SEQ ID NO: 405599 - DNA, 122 bp, Homo sapiens
ggggaccggcggggaggggacccggccaggagtcgagggccggcggaggcgggagtggaacggcagggccgggggagtggcccgcacctgacggacagcccttcggaccaccctaccgaggg

SEQ ID NO: 405600 - DNA, 122 bp, Homo sapiens
tgtgtaacatactgttagctgaaggctgtgatgtagaaatttattattaaaaataaaagacggagagaagaatttattccataaggatcaaaatgacttagtgtcaaagcagttaggatttt

SEQ ID NO: 405601 - DNA, 122 bp, Homo sapiens
tggagaagaagacaatgccggagctggtgactacagctcctgcagctaccacagggtccacgagctcagggtcgaaggtcacatcacggggccttagtgtatcacaggcatcatagctgcgg

SEQ ID NO: 405602 - DNA, 122 bp, Homo sapiens
tttgggatcctcagcaccgggcagctccgggacctgcttcaggatgagcccaagctggaccggatcgtgcggctcagcaggaaggtagcgcggggggctcgagcggggggcgcgggggacgg

SEQ ID NO: 405603 - DNA, 122 bp, Homo sapiens
tccaggcttcagaggattctttgctcatttcaatctgaccccatttgaatccccaagggtcgcagtaaaccccaggcacacaaagacagaggcttgtggctggcttgcggttgctgtgatca

SEQ ID NO: 405604 - DNA, 122 bp, Homo sapiens
aagatgggagcaataaacactgggaattccaaaagcagggagggttgaaaaactacctatcgggtactatgttcacttgggtggcaggttcattagaaacccaaatctcagtatcatgcaat

SEQ ID NO: 405605 - DNA, 122 bp, Homo sapiens
acttcctagcatgtgtgtgaaatacccttgaaggagtcatgtgccatctcagaatatgtccgataggtatattgttaattttgaggtgaaagcattggagaaattgtagtttcagaaaaggc

SEQ ID NO: 405606 - DNA, 122 bp, Homo sapiens
cccacccaggtcatcagtcatcatcagcagcagctgcggcatgagagagatggtgtggggcgaaaccaatggggaaactacaaaagaaaccacctgctactgcaaacggcctcgctgtactc

SEQ ID NO: 405607 - DNA, 122 bp, Homo sapiens
ccaccgggttgcatgtcatgaaacatccaagtttatttaactcacacacttcctaagggccgtgccatcagcattctcaccctgtgtgtgaacatgcccttcactttgtctcgctgtgagga

SEQ ID NO: 405608 - DNA, 122 bp, Homo sapiens
ggctgacctcagccgctcaggccctccttgctccaggcccacgtaaagggccagtttgcccgtatactgtttgcctgtatactgctgccagctcactctctgattcagtatctctcactcca

SEQ ID NO: 405609 - DNA, 122 bp, Homo sapiens
tggagggtctgggacagggtggcgtggtcagcaggcttggcgggaaagcaggcacgagcccgagagttgaccctccccggtgactttggccctgcctccacgccgccactgtgaccccagcc

SEQ ID NO: 405610 - DNA, 122 bp, Homo sapiens
tcactccggcttgtttcaggcacgctttcccgggagctaaatcttactcgggaactagatcgagagctgaggtccggactggtgtctgacaaacctggaatgtcatcgatctttgtcggtgt

SEQ ID NO: 405611 - DNA, 122 bp, Homo sapiens
cagagaccagcaagtcccagcctcaggaggacacaccaacaggcagctcagcttggtgtgcgtgcgtgtgtgcgcgtgcatgtgtgtgtgtgtatgtgtgtgtgtgtgtgtgtgtagggggc

SEQ ID NO: 405612 - DNA, 122 bp, Homo sapiens
aacagcttagcagacttctcaactcataattcattacttaaaagttaaaataattaaaagcgtttgttgtggagcatagtggagttaaactcagcttgatattcatgcaacattgcactgcc

SEQ ID NO: 405613 - DNA, 122 bp, Homo sapiens
gggaggcatggggcaggggaggggcctaagggcctggtgaatgaggcatggggccgggcccgtgctgacctgcagcagcacatggcagatctccacggagcccttctgggcggctgcatgca

SEQ ID NO: 405614 - DNA, 122 bp, Homo sapiens
gttttacagaggtcctcaaagagggcagcgggctgttcccagatctcctggtgagggagacggaggccgtcatccacaagcaccgctcggccacctactgcgagcagctcctgcagcatgtg

SEQ ID NO: 405615 - DNA, 122 bp, Homo sapiens
tgggggacccgtaccctgaggtgtgtgaatggccctctccccagggtatgtggacgagtgcgccaggagctcccctgtggactacttctggtaccgagagacgctcaacatctccacgtcca

SEQ ID NO: 405616 - DNA, 122 bp, Homo sapiens
tgattttgctgtttattttttttttctttttctttttcccaccacattgtattttatttccgtacttcagaaatgggcctacagaccacaaagtggcccagccatggggcttttttcctgaa

SEQ ID NO: 405617 - DNA, 122 bp, Homo sapiens
gagctgttgccgtggcaactgggaggcactctcaggctgttttcccgaggacctcaaatccggactttttttctgtttttctttcttttttggttttgttttggacgcgttgtggcccaggc

SEQ ID NO: 405618 - DNA, 122 bp, Homo sapiens
cgagtgtggcgtccatcgactggcgtctgccacggcaattagcgacgcgctcccccgcggcggtcgccccggcaacccagtgctgtaggttgccgtagaaaccgtggctctcctgcgctgag

SEQ ID NO: 405619 - DNA, 122 bp, Homo sapiens
catagcccaattcgttcaagttttggagcatggatcgtgcaacttggggtcgggcattgtcgaggagagaattgggccctttctgttgaccagcgccagctacaggcattgctgtgttcgat

SEQ ID NO: 405620 - DNA, 122 bp, Homo sapiens
caggaaaggagtgggaggggtctgaggtcccgcctttggaggccgcagggaccgccattccgcgaacccagccgcgcggtgtggtctcctccatccctgagtgccccgcgccctgcagagcc

SEQ ID NO: 405621 - DNA, 122 bp, Homo sapiens
cctggctgagtccagggaggaggagccagaggaggggccgattggaagcagccacctcagcgaagctgcaggatttccgcagggcgggagctgtttatctcccggaagaaaacggctcctgt

SEQ ID NO: 405622 - DNA, 122 bp, Homo sapiens
gggagactaaggaggcgagagggacaggcggcagaggcagaggccaaagatgaggcccatcggctcagttttttggaaggcaggcccagacatgaaaaaaggatgccagtgctctctcttct

SEQ ID NO: 405623 - DNA, 122 bp, Homo sapiens
cgggaaatgcataggtggacacgcgagcggccggcccgcgggggaggggaggggagggtccgccctggggacccctcagatcatcttcatgttgaacttgcgcgcgcctccctggcccgccg

SEQ ID NO: 405624 - DNA, 122 bp, Homo sapiens
gtccggattggtgggaggagcccgggcgactgaaagccggggccgggtggggatggcgggcgcggcgcgcagggaccggcgtcccggggcggggatggcggggagatcgggtccggtccgcg

SEQ ID NO: 405625 - DNA, 122 bp, Homo sapiens
gtgtacatgttggtcatttgtatgtctcctttggaaaaatatgtattcaggccctttatccgtgttaacgtcagattattactttttttttcctattgagatgtatgagctactgatatatt

SEQ ID NO: 405626 - DNA, 122 bp, Homo sapiens
attagccttcatttatactgcctaacaattatttgaaggaataaattgatgtcaatggctcgtacgcattcaattcttgggagctttcctgtttaatatgtggcaaatatgtgatcttaaat

SEQ ID NO: 405627 - DNA, 122 bp, Homo sapiens
ttttgttttggccacttgtacaacaaaatatgctgctgaggtcagataagttattaacagcgggtctggaccagagaaaggccaaaggattcagtcatcatttggaaagcaagaccttgggt

SEQ ID NO: 405628 - DNA, 122 bp, Homo sapiens
gccgaggcgagggggaggcggcgcctgggcccgagccgccccagccctggctcctctccccggaacaggcccccgacagctgctctcgggagccgcctcccgacacccgagccccgccggcg

SEQ ID NO: 405629 - DNA, 122 bp, Homo sapiens
actcactttcatggatggaatacagactggaagccagacaagagagaggagtatgggaaacgcatgcctcattccaagagaaacagctcaagcaggcagccctgcatgaggaacaccgcaaa

SEQ ID NO: 405630 - DNA, 122 bp, Homo sapiens
ggccccgccctccctgcctctgaggtgttgtgtgcccttgacgtcagcccgtaccggctccgcctccgggcgagttgcgacattttcagtgcttcctgagaagagtttcgcgcagttggagc

SEQ ID NO: 405631 - DNA, 122 bp, Homo sapiens
ccgccggccctcagccatgggcgaggcgcggggcgcagccgcgggatggccagcgagctgcggccccggcgccccagaacgcctgcacccggcgccccacgccaccgccctcgggccggggg

SEQ ID NO: 405632 - DNA, 122 bp, Homo sapiens
tactggtgaacagttgaaaggatggaaccaagtacagacacttggacatgtgtgctgggccgctggtgtctgtctactttaggttggcatcagttcattcactgtcaatcacaccatgcact

SEQ ID NO: 405633 - DNA, 122 bp, Homo sapiens
ccgggtggtgaggggcttagcacctgggccagcagctgtggagggtgcgtggtcccccaacgctgctggcctgcctgcagcacactggaattcttgccgggcctcagcagcctccccatgtg

SEQ ID NO: 405634 - DNA, 122 bp, Homo sapiens
tccagctcccggaagccctcggacaaggaactgtagcccatgtaccgcgtgacgtgagagcggagcccgggtctgcccgggcgcgggcccgcggccacggcgtttggatcccagatcccagc

SEQ ID NO: 405635 - DNA, 122 bp, Homo sapiens
aagtgccctgcgcgccgcggctgctgagggaaggacggagtcaccggcccacgtggtgcgcgccgtggcctttgaccccgccgccgtttccctgccccaccctcgcgcccggcccagcccac

SEQ ID NO: 405636 - DNA, 122 bp, Homo sapiens
cgatgcacgtcagcaccgtgaggctcaaggtctgcttgtagcaaagagtctcctcagttccgttgattggtgtcagttctgtgtccaaggttgagatggttggatccatgctcagaaaccct

SEQ ID NO: 405637 - DNA, 122 bp, Homo sapiens
cgaccttgaatcttggtccaattaaagagttgacaaatccctagccccgcagcctgagtccgcccaacctccaggtccccttcctggggagttcgcgctccaatgcaatccccactccccgc

SEQ ID NO: 405638 - DNA, 122 bp, Homo sapiens
tgaggatgtggctcgagccattaaccagaagctgggggacacgcctggtgtctcttactccgacattgctgcacgagcctatggttgtggccgcacggagctggccatcaaggtgtgggtgc

SEQ ID NO: 405639 - DNA, 122 bp, Homo sapiens
atgtctctgcagtatcctgtgtactgaaagagcaaacaggtgtgtgaccccagggcaggtcggggtccgtcctgtccccagcctgtctactgcgtgtgcctgtggcaggcagggtctccgga

SEQ ID NO: 405640 - DNA, 122 bp, Homo sapiens
ggcggccgggaggggctggggaaacccaggcgcaagcgcgctgggctgggaggacggggccggccacctcacccggctctccagcaccccattttaaggatgggaccaccctctgccagcct

SEQ ID NO: 405641 - DNA, 122 bp, Homo sapiens
tacgtggagggatgtgctttaagtatgaacaaagcaaggtctgaagctgaacttgagctgcgctcggctgggccgtgccctcgcagtgatgggagagcggggaacacatgcggtactcaggg

SEQ ID NO: 405642 - DNA, 122 bp, Homo sapiens
tgtaacacagatctgtacgtccgccaaatttagtatgatacttaatagctattcttgaggcgctcacatttcattggcctaacatgactttaaaattacaaattgtaagatacaagccaaca

SEQ ID NO: 405643 - DNA, 122 bp, Homo sapiens
tacgcaagcgtcacccgtgctgacccggaagttttcttcccagttaaaagtgttggcccgcggcgcgcggcctcttcctgtctgtaccagggcggcgcgtggtctacgccgagtgacagaga

SEQ ID NO: 405644 - DNA, 122 bp, Homo sapiens
ggagagagaaaatactgaggtaaacgaggcctgcttgggctgttgaggtccctgaaagtccgtggctgtaaactcgttcagcagttacaacacagagcttgtggaacatgagggaagcccct

SEQ ID NO: 405645 - DNA, 122 bp, Homo sapiens
tgggctgggggcctccaacccggaacagaagccggccacaaccctcgctccctgtcgtcgcggccgttataggccgaaagcaaaatccaatcccgggccattgtgggcggattgccaggacc

SEQ ID NO: 405646 - DNA, 122 bp, Homo sapiens
cagagccaattgatgtggtgtaacacagagccctgatgaaaacaccatcatgctgcttcccgcttctctctttccttcctcgaggttctatttctgccagcaatctcatttttgccaccagt

SEQ ID NO: 405647 - DNA, 122 bp, Homo sapiens
ctctgaacttgaagacatttggtgaaacagcctggagtctgcccatcatgcactgagtcacgggtggttggtgtgggtagacgctctaaacattttggctctaagcgcctctgtttatacaa

SEQ ID NO: 405648 - DNA, 122 bp, Homo sapiens
gggttgcctgtccctttaattggcatgtaccaagtccttccaggtcacatttcctccctacgtcccagccgtttggactcactggccaaaagtccaagaggacggaatgtggagacagtgtt

SEQ ID NO: 405649 - DNA, 122 bp, Homo sapiens
tgttgagtggctgcctgacagcacctgcctaccctcctccctgcaggaactcctgcgttgcgagctgtgcctgggcatcatgggtgggaaaccgcgacactcactgtacttcattggctacc

SEQ ID NO: 405650 - DNA, 122 bp, Homo sapiens
cctggaacttgtagcagaagcgcccccacccgcacaaagagtgccacccaggcagaatcgcggcttgtgggggcagagctactgcctaagtctgaagcagatgacacccaggagtggagcct

SEQ ID NO: 405651 - DNA, 122 bp, Homo sapiens
ggaatgtactatccaggagcacacatttcactaaacgtcatttaaagagctgtccagcagcggaatatcgtccccagaacccgtgagttcccgccctcctgtcctatcactgtaggaggggc

SEQ ID NO: 405652 - DNA, 122 bp, Homo sapiens
aggccggcggagggccgagtcccagcccgggagcgggagccggggacccggcgcgcagggcggaagctcccgcacaaaaggccggagtcccgcacatggatcgaattaaagctccggcggcg

SEQ ID NO: 405653 - DNA, 122 bp, Homo sapiens
cattaggacccagtggaagtgcctctgcctcattcagactctgttaacttctctcagtgacgtaaaggagcagcccgagctcattctctgcccgcagccccccttcatctctctcctcctgc

SEQ ID NO: 405654 - DNA, 122 bp, Homo sapiens
gtctgtgtatttatgtgtatcatgtgtgtggtgcttgtatataacagaggtttgattaatcggttaaaaataataagtgcttcagtcatatttttgtgagaaaaattaaacatataatgcct

SEQ ID NO: 405655 - DNA, 122 bp, Homo sapiens
cagaattcggaaacagggtatagatcaacaaaaatacacagtcataacaagaaaaactggcgcctggcacaatcaactctcagtttcctcttcactcagcagcatgttggggatcccgcggc

SEQ ID NO: 405656 - DNA, 122 bp, Homo sapiens
agcgctgtgcggtcagggcggggctcaggtgtgctgtctggagtgcagggagctggacgccgcctgttcccgccacacctcagccctgctttcccatctcccgtctcttttttttttttttt

SEQ ID NO: 405657 - DNA, 122 bp, Homo sapiens
ctgggaatgaatagatgaatggtaactccgtttcttaccagcccagcactgtccgaaactcgcctggacaagtccaacttcattcttttcagtacgactagctcctgtgcgctgcagaagac

SEQ ID NO: 405658 - DNA, 122 bp, Homo sapiens
gcgcccggggaggctgcaggccgggacgcgggggaccgctgcaagaaaaagttattcacgcgttattgtcgggcgcaccgggcccagggagccccgctagctctccgcgagccggcacttgt

SEQ ID NO: 405659 - DNA, 122 bp, Homo sapiens
ttttcttaattgtggagacagaaaatccctgaaaacggtttccccagggagactgggctgcgctcctcctcttcctccccggcgtcgggcccgagcggcttccccggccgcgccgccacctc

SEQ ID NO: 405660 - DNA, 122 bp, Homo sapiens
ccctcctcccggcaggaagtaggcgtaggcgactccccagcaggaagagcgacggccgttcggccaatagctacgaaggttggctggccgcctcaccaatcacagagcggcattggaagatg

SEQ ID NO: 405661 - DNA, 122 bp, Homo sapiens
cctgtagaagcgtcgggggttgccccgcttctgcgaaccgccctgggatgcgaggttcagcgtcactatctcatcctgggaaaggatgagatccgggtgggccgaggctgcgtccagtgtca

SEQ ID NO: 405662 - DNA, 122 bp, Homo sapiens
gcgccccaccaggtcacccgggagcagggaacaccaaggaacccagagtcgggcctctttcgagccctcgcttcctctcgcctggcttcttcggcgcgaaggatgaattggggttgttgaaa

SEQ ID NO: 405663 - DNA, 122 bp, Homo sapiens
gctgcggaaaggggcgactccgatgcagatggccctgtcccggcgccccaggtcgtcgcgcgcgcagctgcggtagtcactgcgcctccccgcccccactcctggatgccccccttccctct

SEQ ID NO: 405664 - DNA, 122 bp, Homo sapiens
gtggagcgaccctggataacagctccagggacactccttgctcaagacgctggggttagacgtgctccggctacacagcggagtgtcagggggccaagaatatccctctcctttttcttccc

SEQ ID NO: 405665 - DNA, 122 bp, Homo sapiens
agcgcgggctcggggcgcggggagggacaccggggtcctggggagaaggcgctcggggcgcgccttccacttcggctctggggagttagctcagccggcctgcccgggcctccgtctcgctc

SEQ ID NO: 405666 - DNA, 122 bp, Homo sapiens
cttcctgcccgacaaggacggggggccggacagagagccgtgtcggccgagacccgaatccgggatcaggtttgtgtttctgtggacacgtctgcccacaaagagggcagtgggcaattgtt

SEQ ID NO: 405667 - DNA, 122 bp, Homo sapiens
ctttacctccttgctatgtattctcagatattgcaaacggacgagagaaaagtggaggtacgtggtgcacattctgactatgggtgatccaacttaggcgggagtcagaaatcccagcactg

SEQ ID NO: 405668 - DNA, 122 bp, Homo sapiens
agtcaaagaaaggggtgacggacgcacctggaaaatcgggtcactcccacccgaatactgcgcttttccgacgggcttaagaaacggcgcaccacgagattatatccctcacctggctcgga

SEQ ID NO: 405669 - DNA, 122 bp, Homo sapiens
caggccttccccgccaggccttccccgcccactctctgctcacttcccattcaatcaacacgtcccagcagtgcccgattataacagtcatctgtggagctgattaaaagtatagattacca

SEQ ID NO: 405670 - DNA, 122 bp, Homo sapiens
agcgccctgcgcccagcagacgggcaggtgggcgggcgtccactacctgtgtgcgcggtgcgggcggtgactgccaagttggagatgcccttggagaactgcttcgaattcatgtatctact

SEQ ID NO: 405671 - DNA, 122 bp, Homo sapiens
agaagacatggaaaaggggcaagaaattaaatgtatgcagaggtaagaggagaaaaaactcgaatatgaactggggctgtttaaggagacagtttcatttttgggtcttcggtattttagct

SEQ ID NO: 405672 - DNA, 122 bp, Homo sapiens
ttccacaggcctttgctgcagagacggtcctcactcagctgcagacaggacggtggccaccgtgacatgtggggtcacgtccgtgacttggccacctggtgcgagggacccacagcaaagca

SEQ ID NO: 405673 - DNA, 122 bp, Homo sapiens
tattctttacaaccaaagcatcattaatcagaaaggtgctgtgcggtgcggggccggctccgatgacagtaataaaaaccggcacacctcctgttccaggacccagaccctggaagtctgtg

SEQ ID NO: 405674 - DNA, 122 bp, Homo sapiens
ctgctgctgtttcctttggtgtttctgtcccggtggcagggatcattcgttggcaggtcccggaaggaatgggctagagatctggagccctgcttggacttgatgaccaagtagatggtgtg

SEQ ID NO: 405675 - DNA, 122 bp, Homo sapiens
ccggaaagaaaaatcacaggattctagaaaccgcatctttatcggtgcaagatacagccacgagggtgcccaactctaaaatcgtggcagtgggctacatttaagtagctaacacttccagg

SEQ ID NO: 405676 - DNA, 122 bp, Homo sapiens
gaaactcctggccttaagaaaccctgccacctcagcctccaagtaaactgggattataggcgtgagccacctcacccaacttccacttcccagctgtatgatcttcagaaaatcagttaaat

SEQ ID NO: 405677 - DNA, 122 bp, Homo sapiens
agggcgctccccgcggggcgggaagcgaagccgggcttgcgggcgcgcacacgtggaacgcgttttctgagcaggtctgggctccggggtgttctggcttggtctttgttgcgtcccattcc

SEQ ID NO: 405678 - DNA, 122 bp, Homo sapiens
gaccctggaacattctcaagttgtgcgtctctcaaatcttcagtctagtgtggccagttccgatgatctgaaaggttttccaaagagatcttctgtggcctgagcaccgggaatgaggacaa

SEQ ID NO: 405679 - DNA, 122 bp, Homo sapiens
ggagacccgcacaaccagtcggagtctttccctgatgacctcacaacctggggaagatgacgggctgcgggcgcagagctgcgcaaagagggctacaggctggggctaaagccgctgtgctg

SEQ ID NO: 405680 - DNA, 122 bp, Homo sapiens
ttttgctgacctcttttccgtttgcattttgccccatattagaatgctaccatctaaaaccgctccatgaattagaaagtttaagttgtcagggactgaatgtgtctgttttccaacagttt

SEQ ID NO: 405681 - DNA, 122 bp, Homo sapiens
tctgaatgaccctggaacaggaatcaccccacgccaacagcgatgggggccccgcggcaccggcccgacccaaggaggcagcagcccgagaagcagagccctgtccccagtccccggaacct

SEQ ID NO: 405682 - DNA, 122 bp, Homo sapiens
ccgccccagtcccgggggccttcactaaaaccttaactggcctcccaggggagagggaagcggaggagaggggtctgaaaatcggagatgatcactcagctcaacagtaaagcactttatac

SEQ ID NO: 405683 - DNA, 122 bp, Homo sapiens
ctcttaagagttaataaataaggaatctgcactgagaaccattgcaaaggaagctggagacgggtggctttcatagagactgggaatgtgagtgctctctttaaaaaaaaaaataccctcct

SEQ ID NO: 405684 - DNA, 122 bp, Homo sapiens
tgagtcgcagacgccagctgatggtgtatttatagcaacggcaggagtccgcggggcatacgtcagtggtaaagagggacgggcaggtgggggtccagctcccacagcagacaagagcccac

SEQ ID NO: 405685 - DNA, 122 bp, Homo sapiens
gtcagccccttatgcctcagtatctctgtatttgctatttcttctgtcaaagttgccatccgctctccaatcactctggcaaatacctactcaacccttcaggcatcagtgcaagtgttagc

SEQ ID NO: 405686 - DNA, 122 bp, Homo sapiens
tcacacgatcacttaaatacaactgtggtgaaccgcacaagagggacgcgcggcggtctgcggggaatgacgaggccgacctcgtctgcgacccagggagggcaagggtggaccaggcaaag

SEQ ID NO: 405687 - DNA, 122 bp, Homo sapiens
gcagggccttgctcctcgctcggattggctgacagggaatcagtatcaatgtttaagcggcggcgtgaggtgaatagagtcagtcagcaagagacgctggggagagagcagggatcgcgagc

SEQ ID NO: 405688 - DNA, 122 bp, Homo sapiens
agagcacatccagcatcactaagcactttgtatgggtttcatggtgttattcaaggtttacgatattaccctacacatgattaaacaagtatatgtggaaaaaaacccaggagagaacactt

SEQ ID NO: 405689 - DNA, 122 bp, Homo sapiens
gctcaaagtggggatcagccagtgcttggaaatagctgcccagaactcagggccaacccacgcagcaggcaaagcaggaggccacccacgttgagtagtcagatggtttctggccagccttc

SEQ ID NO: 405690 - DNA, 122 bp, Homo sapiens
cctccgaccacctcctgaatagtgggagacaccacccagagccctgaagctttgttccttcggtcatttggaattcctgagggcagccagagctccttggtcctttcagtactaggcagaac

SEQ ID NO: 405691 - DNA, 122 bp, Homo sapiens
cagagcactttagcagatgtggtttcaaagtaaaggcctcctcccccaccccttaggccccgtggtgacatttcccaagtcagacagatgtcagcttcccagccatgcccaggacgtcctat

SEQ ID NO: 405692 - DNA, 122 bp, Homo sapiens
ctcgatctcctgacctcgtgatccatccgcttcggcctcccaaagtgctgggattacgggcgtgagccacatcacccggccggatgtcctcttataacatcttgcttctcagggtctcagag

SEQ ID NO: 405693 - DNA, 122 bp, Homo sapiens
gaggccggggaacctttcccgtttgcgccaacgcttggttaattcacgcagcactgtgaacgcatgcgtgtttccgtactttgttttccctgttggctaggtttttagctggtgctggtgct

SEQ ID NO: 405694 - DNA, 122 bp, Homo sapiens
atgcgtggcctggacaagcagttggagtccagacggaagctggagtcggcatactcaatgcgtacattggtggggccacgagtggttttcactgacagcgtgaacaggtagctggggtgcgt

SEQ ID NO: 405695 - DNA, 122 bp, Homo sapiens
gaagatttcgtcacatgtaggggttatagttatatctcatatctaggagatattctatatcgggagatgcattgttactggaaaagagagaaaagcagatccacccaaaaatgcaatcatag

SEQ ID NO: 405696 - DNA, 122 bp, Homo sapiens
aaaggaggaggggaggaccgggaggggaggaaaggggaggaggaaccagagcggggagcgcggggagagggaggagagctaactgcccagccagcttgcgtcaccgcttcagagcggagaag

SEQ ID NO: 405697 - DNA, 122 bp, Homo sapiens
gtcacttttgtctctgcacataggaaagggattttgagcttctggggaggttgcgacaagcggactaggaaatgtatagtatataagggttgtttagtaaagtttgttaagcaaattcaagt

SEQ ID NO: 405698 - DNA, 122 bp, Homo sapiens
agatctcccgctcaacctactatgcctggaagcatgagctgctgggctctggcacctgcccggccttgccccccagggaggtgctgggcatggaggagctagagaagctgccggaggagcag

SEQ ID NO: 405699 - DNA, 122 bp, Homo sapiens
catgtcgattctctcagtcaatcaaaacgctgccacagcaggctttgggatgcggcgtctcgatgtgtgtgggcgtgtgcagggcggttgctgatattagtcatgagcgctggcccaggaat

SEQ ID NO: 405700 - DNA, 122 bp, Homo sapiens
cccgtcttctccccactcctccggagaacccgaggacagagcaggtcttgggagcacgcccgggcgccccatgaataattgacccttcctggcggcactgcccggctctgtccgagggctcc

SEQ ID NO: 405701 - DNA, 122 bp, Homo sapiens
ctggctaaaggcaaagtaaatgtagatttcgtgtctcatcacagaggttcagcaatcactcgccctgtcctcagtagttccccaatagtcccctcccaggtccccactcactgcctctggga

SEQ ID NO: 405702 - DNA, 122 bp, Homo sapiens
agtgtctttaatctcggaaccctaaaagctgagtagtagaaaagctgcaccacacaacgccgtgtgaataatgtccctgctgttgatagtgtgaaccagaacaaccatgcacagcagccctg

SEQ ID NO: 405703 - DNA, 122 bp, Homo sapiens
gagtggcccggcccgcagcgctccccgggcacaggtcccaggtggacggctccgctcccgcgcccggctcctctgcccgccaagcgccccggggattccccggcctccaagcggccgcggcc

SEQ ID NO: 405704 - DNA, 122 bp, Homo sapiens
ttctcccgagaaggggtttcggaggtagacatgggatggatactggacatgttcctgtcgcggcccgggtttggtccccttcctgggattcagccgaaagggccgaggaagggaagcaaaca

SEQ ID NO: 405705 - DNA, 122 bp, Homo sapiens
gagaacaaagagatgttgggccagatcatcttccacgcttcttcagctccgagataggaacgcggtcccccaccactcacaggccggctgctcctcacccatccggtctcactgggacgcca

SEQ ID NO: 405706 - DNA, 122 bp, Homo sapiens
ggagccaccagcgcgcacgcgcactagggtccgaggcgcgcatttgacccgagacgaaagcgcgtgggtacttgggagctgtcctggttggttttgcgtctaatcccgtcagttctcgcgat

SEQ ID NO: 405707 - DNA, 122 bp, Homo sapiens
agtcagaagatttttggcagctgttagataacttcctgatctgcaataaagttcatgtgacggagaggatgtttccgctctccgttgcctggctcctttcctttctaagcctgcaagtttaa

SEQ ID NO: 405708 - DNA, 122 bp, Homo sapiens
ccccagctccttgaattcttagcattttcatctttcatttctccaggcctcggccgggcacggtggctcacgcctgtaatcccagcactttgggaggccaaggcggacggatcaccaggtca

SEQ ID NO: 405709 - DNA, 122 bp, Homo sapiens
gcgagccgtcaccttactctctagccttagccggcccccaaatttaatttctgccctggccgtcaagccataaaagtcgattataatcgccgcccccccccgaccaccccaaccccctgcct

SEQ ID NO: 405710 - DNA, 122 bp, Homo sapiens
gttccattccgtttaagtaagctctttccctgtgcaagggagcaaccgacctcaaaggcccggcccacaaaggggcccccgacatggctgggaacaatgcggcctgtttacctgacagattg

SEQ ID NO: 405711 - DNA, 122 bp, Homo sapiens
tgaagggcggggcctggagggggcgggtccggattcttttctcagctgggccgtggatgtcgcctgctctcatcctcttgccctccaggactgggtcctccgggttctgattggtggattgt

SEQ ID NO: 405712 - DNA, 122 bp, Homo sapiens
agagcagaaggcaccaccagaccatcaacaagctccccaagtttcccccgaactgcctggcgatttcgaagtcgaatgttcatggctcctgactgttcctgcagtgtccggatctcagagct

SEQ ID NO: 405713 - DNA, 122 bp, Homo sapiens
agtcgcccctacctctctgcccccagcccgagagccccaggcggggacccccggatcggacgtccccaagcctccgggcacctggctcagcaggaggcccccggctcggggcagggcagggc

SEQ ID NO: 405714 - DNA, 122 bp, Homo sapiens
tgaccgggagtggccgcttcttcccgggagtccagagctgcaaggaacaagtgataatcccgcctcttttaaaagaaagatcgtcatcctgggatagctgtgccaaattagcaggccgctct

SEQ ID NO: 405715 - DNA, 122 bp, Homo sapiens
tgcatgtgaaagtatacgtctgtaacctctgtgctctgggaaggctgaggaaggggacggcgagacctcagagggataggacagaatttatgtgaacatctctatcaagcccagcaccatgt

SEQ ID NO: 405716 - DNA, 122 bp, Homo sapiens
acctcttggtccgctcgccttggcctcccaaagtgctgggattacaggcatgagccaccgcgcctggccaactgtagctcagtttcaataggaaatctaaaatcttgcaaaataagcagcat

SEQ ID NO: 405717 - DNA, 122 bp, Homo sapiens
agggctgtgcgacactgcttcatcttgcctgtaagctgtgtcttagggagcagacagtttcggagagacgtcacccaggctggtggggaggggagaatgtctgacgcgggcatctgagtcat

SEQ ID NO: 405718 - DNA, 122 bp, Homo sapiens
atctggcccttccttcctagatgccttcttaggcatgggctaagatacctggtagggtcacgttacctcatgcttagagcagaggctgccacacaggtatttccagcatattctgctctgaa

SEQ ID NO: 405719 - DNA, 122 bp, Homo sapiens
agttaaggctgtggataaattggaacctttgtgcgctgctggtgggaatgtcgtcttggacggaggtatggcagtttctcaaaaaattaaaagcagaatgaccccagaatggatcccacaat

SEQ ID NO: 405720 - DNA, 122 bp, Homo sapiens
acctgcttttgaaaggtagtatgaaaaataaaaataaagcatattgatgtcatctggcatcgatattatgcccatttgacaaataagacagagtttggataatgtaggtgatctatccaact

SEQ ID NO: 405721 - DNA, 122 bp, Homo sapiens
gcccagactaacacctgctgcgtttcccatggagtgcagtgggcttgtgcttagacccagcgggggctccgtgtgcctctctccctccctccccagagggagccactgtccgaagctggagc

SEQ ID NO: 405722 - DNA, 122 bp, Homo sapiens
acctcaggtgatccgcccgccttggcctcccaaagcattgggattacaggcgtgagccaccgtgcccggcccctgttcactctttatagcaaaccttgtgggttagaaatgaccaccatccc

SEQ ID NO: 405723 - DNA, 122 bp, Homo sapiens
gagtgtccgtggggaaaggcaaacctgccgctgagttggaagacaacagctgctaacacacgaagcctcagaaagccctcgccaggactcagagattctctcgagtgactcgtgtggcaaac

SEQ ID NO: 405724 - DNA, 122 bp, Homo sapiens
caggataacagagtttactctacgccctctccccgccaatctccccagccaccaacctcccgcagcgtttcctagtgagggttccctgagctcattgctgggcgctcagcaactcggctttc

SEQ ID NO: 405725 - DNA, 122 bp, Homo sapiens
ggggcgccattcgacttcgctcctacggaaatggggcttcgatgtctttctgcgcttgcgcggcacggaaactcacttccggccctgcgcactcagggtctgaggcagctagtagccgggtg

SEQ ID NO: 405726 - DNA, 122 bp, Homo sapiens
agaaacccggcggcggggagataagcctgcccaggaggcagggggctgggctagctgccccgccccgcgcctgacttcgttggggagggagacgcccggctcccgcccctaactagcccagc

SEQ ID NO: 405727 - DNA, 122 bp, Homo sapiens
tcaggaaggtgttttgagatttgtagagtctgtgaacagataagaatcgaattctcacttcgtcactctagaaactgctgaccttagagagacttttctgtggccaggcttatgtctgagga

SEQ ID NO: 405728 - DNA, 122 bp, Homo sapiens
aagagatgactgtgctttgcattactgtgaaacactgaaaacactgctaaatgacctatgcgtaacacacacccatgctatcttcttactcttgccccagtacatccatatgcattgctcta

SEQ ID NO: 405729 - DNA, 122 bp, Homo sapiens
aaacccaggtagcgttgccagcttaaaagtcctaggcatggggatgggtggatgggacgccggcctaagattttagcagggaacagacccagtagttggcttggatctcttaactccagaaa

SEQ ID NO: 405730 - DNA, 122 bp, Homo sapiens
tcacacagccagttggtcccaggcagaactcaggtctcctaggctgggcatggtggctcacgcctgtaatcccagcactttgggaggctgaggaggttggatcacctgaggtcaggagttca

SEQ ID NO: 405731 - DNA, 122 bp, Homo sapiens
cgcgccggggctcctttgtttgagccggcgggggaggggggaggggcgaggggcgaggcgcgccctgggtctccccacagcccgcatgtgttggggggcaggcagaagaccccagccccaag

SEQ ID NO: 405732 - DNA, 122 bp, Homo sapiens
tgtcggacccgcggggacgccccgagggcgtcagggttgggggcgggggcgagcgggggtcgtgccgcccgccggggccggagcgctggggaccccagggacagcctgtgctcgggggtcgc

SEQ ID NO: 405733 - DNA, 122 bp, Homo sapiens
ggcacacgcgcgcacacactcggggcgcccggccccgctcaggcagccgccccacctcctcgcctacccggaatcattcagcaacgtggagcaaattaaatcaatgaattcatcctagcaga

SEQ ID NO: 405734 - DNA, 122 bp, Homo sapiens
ttatctctagaaaccggatttggcggtcgttaagaattcctcaccaggaagccgagtggccgggcctggaggaggtgggagggaggcagaggacccatgttcagagtcctgcgtcccagcgc

SEQ ID NO: 405735 - DNA, 122 bp, Homo sapiens
gtgagcaaatactgagagcctagggaaaccatctgattagaagagctcccctcaggagcgcgttagcttcacaccttcggcagcaggagggcggcagcttctcgcaggcggcagggcgggcg

SEQ ID NO: 405736 - DNA, 122 bp, Homo sapiens
agctgcgctgcagctccggctgcctacccccagggggcgcgctggtgatcgcaatgacaacggccattcgcaaaatggttaccagacctcaagcccgtagcacgagcttctaaatacatgat

SEQ ID NO: 405737 - DNA, 122 bp, Homo sapiens
caggccgcgagcagcggcggggccggctctgcggctgcagcagccccattgtgaggccggcgagacaatgggcggcccgaggaggcacctgctcgcctgaaaggcccataaatcgccgccgc

SEQ ID NO: 405738 - DNA, 122 bp, Homo sapiens
ttcgtcctggctgggggaagattcagcattctgcacatgattcggaattcaaaactccagcgccagtctctccctcaaaccaaaagatcagccgtcgacgctcaaaggcagggaccgatggt

SEQ ID NO: 405739 - DNA, 122 bp, Homo sapiens
agcgcagccagtctctgatttcatctggagtcggccctcgggcctggcttataggacggccgttttgtaactaaaggctaactgcaaccatacaatccctgttcctgtgttacttgctaact

SEQ ID NO: 405740 - DNA, 122 bp, Homo sapiens
ggaggctgcgggagtcgctgccgctcgagggaccgcggacccgggaggtccggctcccggcgccgggcctcagtttcccccacgggagccgcatcccacccccagagccccagcgcgtccgc

SEQ ID NO: 405741 - DNA, 122 bp, Homo sapiens
accctcttcttccgccccagacgttatttatgtgtgtggctttgtgttcgttgctaaatgcggcctgtgtgaaggctgttaattaaccctttgagaaatgcgcttcccatcggggcagggac

SEQ ID NO: 405742 - DNA, 122 bp, Homo sapiens
tggcttgacagcgacgaagagcctcccgggcacggcactgtagagcttccgcttgggccccgggtactcgaaggccgagagtgagtccttgttggcaccaagagcaaaaggcgacctggacc

SEQ ID NO: 405743 - DNA, 122 bp, Homo sapiens
ttaccccgggctcggcgcccatcactagttctggagctgaccgcgcggaagcccgcccgccggggtcgcagggcccaggcccccgcacagctctgcagcccccgcaagcacagcccgacccg

SEQ ID NO: 405744 - DNA, 122 bp, Homo sapiens
aaacaaagagttctgagactattcttgtaccacttattaagactgtgatggcaggtgttacggataatttcatttagccacacaatatggtttggatttgtgtccctgcccaaatctcctgt

SEQ ID NO: 405745 - DNA, 122 bp, Homo sapiens
aaaccccggcagggtctgctcctcccggagccggcttgcaggcgtgttgggggaagccagcgaggttgtttgccgggaaaggacagtttgggacccgggaggggagttccctgcgtctgggc

SEQ ID NO: 405746 - DNA, 122 bp, Homo sapiens
gaccccagtccctggactccttttaaagatgctccattctggctttccagggctaatccccgctgaggtgtgaatggctgataatggcataaggtaggagctgctaatgggagaaataattc

SEQ ID NO: 405747 - DNA, 122 bp, Homo sapiens
aataactttttaaaaagttttatttcaagaactttgttttttactggtatttcaaaaaaacgtgggtcaaagtacaaaaaaaagtcagttgaataacagcacaggtttagaaatcacagcag

SEQ ID NO: 405748 - DNA, 122 bp, Homo sapiens
gcagcgagcagtaaatctcctccagcctctctacgtgtccctcccggctcgggctggcctcgctggccatctgctccaaggcggccaccacggcgtggaaatagtgctccagggtgcggcga

SEQ ID NO: 405749 - DNA, 122 bp, Homo sapiens
tgggtgagacgggcccactgaggtttctggtagagtttcttttctaatccctgctcccttcgggggttccttttccaaaaattgaagcaccccgcgccccgcccttgcccaaacatagcctg

SEQ ID NO: 405750 - DNA, 122 bp, Homo sapiens
cctgccaagacgagcccagagtcctctcaacggctgctgcggtcacacgatctagaaacacgagtggatccaaagtgggctctcgggactctccttggtgtgaaaaacctacaccactcaag

SEQ ID NO: 405751 - DNA, 122 bp, Homo sapiens
ggggtccttgcgcggttgcgtagcagctgcgaggacgcggggcgagccggaagtggagtgcgctgcggtgcgagctgggccggcggggtggttcgagagcgcgcagagtccagactggcggc

SEQ ID NO: 405752 - DNA, 122 bp, Homo sapiens
cagcttttaggagaaatgcaccaacgtggtaaatccataacacactccaagcagcgccaccgccctgacattcctcaggtttcgagggggttttacctgaatccttctttacagacagtaca

SEQ ID NO: 405753 - DNA, 122 bp, Homo sapiens
gtggctacggggctggacctggttcaacaggcttgtgcagtgaaagagcctgaccctttccgttcatacaggaaatcttgagttctcgataggagtaaatctggtttcagaagctgttaagt

SEQ ID NO: 405754 - DNA, 122 bp, Homo sapiens
cgtctttcgcgtttattttaagcccagtcttccctgggccacctttagcagatcctcgtgcgcccccgccccctggccgtgaaactcagcctctatccagcagcgacgacaagtaaagtaaa

SEQ ID NO: 405755 - DNA, 122 bp, Homo sapiens
ttccctctcctccccctgacttcagcagaccccagcgttcgcccgtgtgtccccgacccgcgccgtgtggcgcagcccctgctcttgagaactgtgagtgacaaaccatcttttcaacggca

SEQ ID NO: 405756 - DNA, 122 bp, Homo sapiens
ccctggggtggctccctacctgtgttgcctccaaggaggagaaatgaaagaaggccggcccggcaatgtccatggagacatggctcttgcttggggcatcttgttctggttaactccggccc

SEQ ID NO: 405757 - DNA, 122 bp, Homo sapiens
cgtacgaggacagcccgcgccgccaccagcctgcggaatgttgggagtgataatttgcgccgagaggctgagttttacttagtgttaggattacacagttatggcagttctgataataaatt

SEQ ID NO: 405758 - DNA, 122 bp, Homo sapiens
gaggctgggaggaaggaacagccagtgaggaaccaggctcccaggtgcaggggccacccccggcaggggggcggggccaggcctcacctaccccgtaaggggaacgggcagaaatcgcccgt

SEQ ID NO: 405759 - DNA, 122 bp, Homo sapiens
cctttagtgaaacaggagggaggtcgctgggcacagggagccgggaacgcctgccctccccgccatcgacggctcccgaggcctgaaccttcgctccagccccagcacaagccggccagggc

SEQ ID NO: 405760 - DNA, 122 bp, Homo sapiens
cggccgagctgctaataaagttgcagcgaggagaagcgcagcgacggcgtcgggagagcgcgcctagccggctcgcgagtgagtgagggtccccggcgcgcgcgggcgaggggaactggggg

SEQ ID NO: 405761 - DNA, 122 bp, Homo sapiens
tggttctagaactttttcctggaacaggccggcactcccactggagagtcccagctgctgcgcctctggccgcccctcccctctcccgggcacctggcgccggctcccgcgtcctttcagga

SEQ ID NO: 405762 - DNA, 122 bp, Homo sapiens
gtgccgcctacgaggattttaacatccagctacgccgcagccaggagtcagcggcccccacgctgagcagggtcctcatgaaggtggatggcgtggtcatccagctgaccaagggctccgtc

SEQ ID NO: 405763 - DNA, 122 bp, Homo sapiens
gatggaaagatgcacacagccccatcctcctgctgccgtgggttaatgttagcgcagccccgtcctctgctgccgtgggttaatgttagcgcagccctgtcctcctactgccgtggactaat

SEQ ID NO: 405764 - DNA, 122 bp, Homo sapiens
gcatctccggctgtgggtttctcgggggcggggcgcaggggcggggcggggcgaggggctcgcagaggcctcgggttggccgagccgggagggaggagcattagtattagcatagcccccgc

SEQ ID NO: 405765 - DNA, 122 bp, Homo sapiens
aggagccaggatggggcggccaagccgacggcctgcggggccgcctccggactcctaacgcggcaggtgtttttactcctgctgtcacttatgtatcagtgtcactcttgcttcatcttatc

SEQ ID NO: 405766 - DNA, 122 bp, Homo sapiens
ccagtctcccctccccggggtctcgccagccccttcctgcagccgccgcctccgaaggagcgggtccgccgcgggtaaccatgcctagcaaaaccaagtacaaccttgtggacgatgggcac

SEQ ID NO: 405767 - DNA, 122 bp, Homo sapiens
tctcggctgcgggcgctgccacctgctcccaggggtggtgcgtctccggtccagctgtgccgagcgctgccctgggtgcatccgtggcacctctcagggccccatccgccccgtggctaaca

SEQ ID NO: 405768 - DNA, 122 bp, Homo sapiens
tgccctctccccggggaaatcaaaggtcaggaccctcagcacctcccccgcctgccctgccggagagctgggggccccatgggctgccacaaggacagaaatagccctgactttccagggag

SEQ ID NO: 405769 - DNA, 122 bp, Homo sapiens
ggaaaaaacagccccgacttcatctcctggctgtgaagcggaagccagccacagtgttcacgccgcgggtcctcagcccgggaggccactcccttccctcgtgacaggggggtcctggactg

SEQ ID NO: 405770 - DNA, 122 bp, Homo sapiens
agaaggggatgtatcggaaagctataaccgaggctgcaaatgccgcaagacacgtggccccggaaatcagggagctcttaacccagtttgaaacgtaactggttccctgaccaggtgagtgt

SEQ ID NO: 405771 - DNA, 122 bp, Homo sapiens
gggcggcacccacctgctggaggaggccatccagcgcgtccttgtccgcctgcgtcaggccgtccttctgcagtcgcagcagcagctcagccttgcggtagggccgtagtgccaggaggtgc

SEQ ID NO: 405772 - DNA, 122 bp, Homo sapiens
caattagcaacaaatatatttcctatggtgtgtcatcatgcctgaaataccacacacacacgcacacacgcacatacacactcccttcaatggctaaatccattcctcagctgcccaagaag

SEQ ID NO: 405773 - DNA, 122 bp, Homo sapiens
caagtttcggggatggcggccggcgagggccatactgcgtctttccggagacacggaatacggcaccagccgtccctttatgatgcaatatgtctgcgcccaggggacgcttgctgggagca

SEQ ID NO: 405774 - DNA, 122 bp, Homo sapiens
ggtcaactcccctatccttcccccacatcctggatgactgactgacactaaatgaaagggcggggcagggtgatgggctgtacctgtgccccaccccattcctctcgcctggactcatatgg

SEQ ID NO: 405775 - DNA, 122 bp, Homo sapiens
gaagttaacactttcgtccttttactgaatgaaaataatctaatagtagcttaaagaaaacggaagcatctttcacttcagtgttttgagcgtaatgaaatgaatgctattattataaatag

SEQ ID NO: 405776 - DNA, 122 bp, Homo sapiens
cacccagctccctattccctgccctttctagcacccaccatggtgtggctgcaagctgtccgcaaagctaagccaagagacccccccagccccagcaccagatgatcagcagggagaataac

SEQ ID NO: 405777 - DNA, 122 bp, Homo sapiens
acattattctgcagcccccgtattttcttccaggcaggcccttcctggtgtagacaagatcgggcttgagtgacactcctccctgatggcctgcatctggtttataccctgtaacttgttcc

SEQ ID NO: 405778 - DNA, 122 bp, Homo sapiens
gagggacaggggaaggtggagaggggagggcaggccccgccagggggaggagccgcctcccgcgtccagctgtcggggctccctcccgtcgcggctccgctataaaacccaggccggcagga

SEQ ID NO: 405779 - DNA, 122 bp, Homo sapiens
cacggcgctcggaccgctgtcctccaacagcgcagggcagagcggctggcgccgccggagcgcggagccacgaccctccctggccgcctttgtctactggccgtgcggcccggaaccgccac

SEQ ID NO: 405780 - DNA, 122 bp, Homo sapiens
ctttcttccctgggcctggaatttccaggagtccaattcctacctactcctcaaagggtgcgcctagaaatgcttctggatcccagctgtgaattctgttcccactcctaggtctgacttgg

SEQ ID NO: 405781 - DNA, 122 bp, Homo sapiens
cagttctccccagtccacccaaggtttaccaagactgttgtagttgcaagagtgggcttccggctccacgtaacgatgcgattgggctgtacctctgtctgtctcctgcgcgatgtcccgcc

SEQ ID NO: 405782 - DNA, 122 bp, Homo sapiens
tggtaaaatcgagtttagcgctccgaataaggacttctgggcagttgtttcttcataactcgatagccattgaagacttcctgctgcgaagagcgagtccgcctccccgcccccccctcgtc

SEQ ID NO: 405783 - DNA, 122 bp, Homo sapiens
agaaaccacgtgggaggagaggagggagactgacccaggctagggtcggggcagaggtggcgatttttgtttaagaagggaaagggcttgagcaaaggccgtggggcaactggaggactcta

SEQ ID NO: 405784 - DNA, 122 bp, Homo sapiens
ctgcacagtggcggccgcgcgtcagaacggcagctgtggggtggctgtggagcggggcgccggcggtgggttgtttaccacgagctctacaaccagtggctgtgtctgtgttttttctcttt

SEQ ID NO: 405785 - DNA, 122 bp, Homo sapiens
ggcgtagtaaggaagcccaacacaaccaattcccccactccccaaataaaccactacgaccggtcacattacgatgaccaaatcatcagcgatttgcacgaggcggtggggggtggggggtg

SEQ ID NO: 405786 - DNA, 122 bp, Homo sapiens
gtctgaaccagggaatgcaggaggaggacgggcttgacaggcaggtgtgtgtggtggtggcggggctggaagtgaagagtcccatctgcaatacgttacgggtgcctgtgctatggctggaa

SEQ ID NO: 405787 - DNA, 122 bp, Homo sapiens
gcccatcccaacaactccagccctccccaggctgctgaaggtgagccgggaggatgcaaccgggggccaggccaccgtaaccctcctgggtctcggtttacccagttacagaatggggtcac

SEQ ID NO: 405788 - DNA, 122 bp, Homo sapiens
tagccttctccaggaccgggatgcccttcagcgccctctcctggctgcagccaacaatgccgccccagcagcacctgaagaacgtaaagagcccccaagattacccaggggcagactgccct

SEQ ID NO: 405789 - DNA, 122 bp, Homo sapiens
gattctgagattatgaagtctctggcatttttatctcacttgtatgcaaattgtcaacttcgtaaaaagctctgtgccagtacccacctgttgctctggacttttctatatcagcagcttat

SEQ ID NO: 405790 - DNA, 122 bp, Homo sapiens
ccagcatggtcaggttcggggaaggctgtctacgtcaagggtccccacccgctggggctgcggaccagtaccagtccatggcctgtaaggacctgggctgtgcagcaggaggtgagaggcag

SEQ ID NO: 405791 - DNA, 122 bp, Homo sapiens
tggaaaatcccaacaggcttcaaacaaaactaactcaaccgaggtggaggtggaatcgttcgatgtccccccggaggtaggtctaggcactgcattatggtactttacctatgaggtgaacc

SEQ ID NO: 405792 - DNA, 122 bp, Homo sapiens
cttggatggaagactgggccagccagagtgggaggcaggaccagcgtgtctgcgagcacacgtgtgtgcctgcagacatgccccaagaccccagagacgccccggccccagtcacatggtgt

SEQ ID NO: 405793 - DNA, 122 bp, Homo sapiens
cctgagttctgctcagttacagaagctaagatcctccctgctcccctgtagcctaagccccgcccaggtccccatcccaaaatagataaaggcacgccaaggaaggaaggccggcaggccct

SEQ ID NO: 405794 - DNA, 122 bp, Homo sapiens
gtcttagtctcctggaagaaaccgaggtcctggcgcagcagggaggagaaaagctgctcccggatccgcaagttgattcgagacatggtgtaggtgaagcagcctcctcggcagcctgcaga

SEQ ID NO: 405795 - DNA, 122 bp, Homo sapiens
tgtccgtcatggacatggaatcatccgtcagcgcatcactggatatctcactgtcgttggcgctggtggctggtgcaaagacatagccagaacctatgtgataaggattaacaggatcgctc

SEQ ID NO: 405796 - DNA, 122 bp, Homo sapiens
tgtatatgctacccgcctgttattcacttagtagctgtctcggctatcagttgaaaacatcgtagtacatataggattcagtactatttccagtttcaggcctccacaggggggtctcagaa

SEQ ID NO: 405797 - DNA, 122 bp, Homo sapiens
ccgggtcccccttccctgccgtcatcaggttccccttctcccttcttggcactttcctttcgaaccatccttctggacaaactttgatggagaatttcacaccacgctggaaaaatgccggt

SEQ ID NO: 405798 - DNA, 122 bp, Homo sapiens
tctgtcctactcagacgcaatgtacagaccttctctgccctggcaatggtgagatggtggcgccccagcctgggggccagctctgttggggtggagagagtacctgtgccgcacagcggaga

SEQ ID NO: 405799 - DNA, 122 bp, Homo sapiens
ataactgcgataccgggaaggaggtgataagtcctgtgaaagaacgacggagtgctagaacggcacccggaaaaaccgaaccgatcacttctgcctcgcagaaacctggaaggcttcctggg

SEQ ID NO: 405800 - DNA, 122 bp, Homo sapiens
ccagtaccttcaatgcaaccaggcagaccgacgcaggcactcaccctctctttctgtgtgcgtgcagaccaaattgatggcaatggccagctttcagagccccataagctgtgcatatccca

SEQ ID NO: 405801 - DNA, 122 bp, Homo sapiens
aataagttatggtctcctggagggttcccaaatatcaaataactgaaagagtttttctttcgaccatctgagtcaagatgtggtttgtcaggaggaggggggatgggaagaaagaaaaccag

SEQ ID NO: 405802 - DNA, 122 bp, Homo sapiens
agcaccgccctcctcgtctgcagtagccaatcaacacgaggcttgtaggctgccgttcctcgattggctacggctctagctccgcccgccgcacttggcgacggtgtccggcggggaggcgg

SEQ ID NO: 405803 - DNA, 122 bp, Homo sapiens
ctacactcaggcagctcttccattccttgatccttggtggcttcacagaccccagagttgcgtgggatggcctcaccccaccagcagccctgtgcatgatcaaggtcatgatcaggcaaagt

SEQ ID NO: 405804 - DNA, 122 bp, Homo sapiens
tctatcccagtataccgctgctctctcaggggcatttgtgtccccgttttggttggtaaacgagctgccgagggaggagtggaatgacacaatgtgacttactgcaattaataatctccatt

SEQ ID NO: 405805 - DNA, 122 bp, Homo sapiens
gctgctgcaccagctcctccgagaagtcacggatggcaccctccacctggtccagcagctcggtcagctcagacccagacatgtgcctcagccctgcaggggaagaccgtctcccgcataac

SEQ ID NO: 405806 - DNA, 122 bp, Homo sapiens
gtattgtgctcagggtcagtgtgtacaaaaccaactcatttttcttctctcacaccacaacgataatcaacacagaaaactttgtgacttggccgggtgcggtggcccacacttgtaatccc

SEQ ID NO: 405807 - DNA, 122 bp, Homo sapiens
ccccaatgtgatctgcgatggctgcaatgggcctgtggtaggaacccgctacaagtgcagcgtctgcccagactacgacttgtgtagcgtctgcgagggaaagggcttgcaccgggggcaca

SEQ ID NO: 405808 - DNA, 122 bp, Homo sapiens
gggccgcctcctcggcgtcattggagcccaacagttagtgggcgctcacggtgtgctgagcggcgcgctaggcgtcgggagtggcatggcggactgcaggggccagctgcttggcggtcagg

SEQ ID NO: 405809 - DNA, 122 bp, Homo sapiens
tgctggggggcagtgcagagaaactggtgacacatggagggcaggaagatgggggcagcacgaggccggatgtcccagatgaagcaataagccagcaaagtgtcaaggaagaggaagaaaac

SEQ ID NO: 405810 - DNA, 122 bp, Homo sapiens
gactccatctgtgcagcaaaaccctttctccccggaggctggagggcggggccgacggggcgggcagaggtggcgcaaaccagcacccgcgttccccaggagaaacatttttatcgcttccg

SEQ ID NO: 405811 - DNA, 122 bp, Homo sapiens
gatgtgggctcagctcagtggcctgaaacctctcaggttttagagtctctcccaagaagccgcttttttctttttctttctttctttttttttttcttagcagatacaatgaatgaactgca

SEQ ID NO: 405812 - DNA, 122 bp, Homo sapiens
agatgctcgcggcttcccgggaaggtgtgtgccctttcgacccctatgggactgactgcgcgtttgattctagagttgactctccgggggggctgcctaacttcagtccctctgagcctcag

SEQ ID NO: 405813 - DNA, 122 bp, Homo sapiens
tgttgggaatggtgaaataatgtatgcagcggtgcagtcagtgtgggccaaaagctcaggcgtagtaggcttagagagcagcgctccaccctgcagcagtgtggggggcgcacacagcctgg

SEQ ID NO: 405814 - DNA, 122 bp, Homo sapiens
ctcaccttcctgtggaggttggcggagcctcgcgggccgcgcccggggtgggggagtgaccgctgggcgggtggcggcggttagggggctgcgcgccggccgcggatggcgtcgcaggcgcg

SEQ ID NO: 405815 - DNA, 122 bp, Homo sapiens
tgaggacaagagtggcaagcagcggtactcctaccagtacacggtggccaacaaggtgcgcgggcggtggctgggccgagctgtgtgcggcggcgccctctgctgacggagagcagagatga

SEQ ID NO: 405816 - DNA, 122 bp, Homo sapiens
acattgtagtgtccttcacaacaacggaatattccacccaaatgacaatactgatgaggtcgagaaaccctcttttaaagcatatctttagagtcagagatgggaatcgaactccagctctg

SEQ ID NO: 405817 - DNA, 122 bp, Homo sapiens
gtgacaaccaagaatgtctccagacattgtgaaatacctcttggagggcaaaattgctcccggttgaggagcactgctgtggtgtcttgagctgcttttggcctttggcattccacagagcc

SEQ ID NO: 405818 - DNA, 122 bp, Homo sapiens
gccgctatatggcaacagctgtcctggatggtataggaatgaacatgtggactgtgttcccgtcagaccttattgatggacacagcaataggaatttcctataattttcaggggtcacaaag

SEQ ID NO: 405819 - DNA, 122 bp, Homo sapiens
tgtagaagtggctgtgctcgtggcatcaggcacccccacagcagccttggtggaggctctcgccagcggcgtctgcaaatgatttgcattcttggctctttggaactgcctgttctttgtct

SEQ ID NO: 405820 - DNA, 122 bp, Homo sapiens
tcgtgtggatgctgctgtggacgtctgcgtcgtcctcgatgctgctgtggacgtctgcgtcgtcctcgtgtggatgctgctatggacgtctgcgtagtctcgtgtggatgctgctgtggacg

SEQ ID NO: 405821 - DNA, 122 bp, Homo sapiens
tccttgagtcgaggtcacccgtgcactgcactctggctgtgcttgttcaaagccatatcccgtgattttctagcacagactttaccactaggcaaaagctcataagtattttttaaatgtgt

SEQ ID NO: 405822 - DNA, 122 bp, Homo sapiens
gcgccattatttaaatggaacgtgcctgtctcgcagctgtacgtgcccggggcggggcttcgagcgccctgagcggggcggaggctagaggcgggctgggaaggtggaggggcgggccgggg

SEQ ID NO: 405823 - DNA, 122 bp, Homo sapiens
ccttgcagtcctcccagccgttcccaccgcctttgccactcatccggcggcagccgtcctcggaccactgcccctgcctctcactgggcttccagcagacacagcgggggatgggagggttt

SEQ ID NO: 405824 - DNA, 122 bp, Homo sapiens
tcttagggtccagtgaaaacagcagcgcttggagctgcagacccaggctgggagctgccgcgggggcgcacgtgtctgcctgtagccacagcctaggatcattgccctgcacagttggacgg

SEQ ID NO: 405825 - DNA, 122 bp, Homo sapiens
ttctctggatgtaccaacatttatgaaatgaaagcgtagaagagagcaagggtttgaacgcgtgtagacctgtagtatttgtttgtttttattggctaactagtaaatatagctctggggct

SEQ ID NO: 405826 - DNA, 122 bp, Homo sapiens
taaaatcgctctgagccagtctgctcccccagcctgtctgagggaggtccaggtagacaccgcctgccgcgtcgttttccttttgggtgactcccgtccccctctatcacctcacataactg

SEQ ID NO: 405827 - DNA, 122 bp, Homo sapiens
gttcaatgggaaaaagagaagtcttaaataaaggaacttaacaagacaggcacacaagagcgtaaccttgtgttacactcaggaaacggagagaagccaccacaggaaacggaagaagccac

SEQ ID NO: 405828 - DNA, 122 bp, Homo sapiens
gggacagcaggggaagacaggacttcaagccaatgcagggtggctctcccacaggccagccggacaccattgtgaagggttaggctgggaggctcccaggcagaaacatcaggtgactttgg

SEQ ID NO: 405829 - DNA, 122 bp, Homo sapiens
agccagcagggccttgccagcaaagcccagggccttcactttataccctcggtcgttctccgtggaaggccaagagattcctgtttccatctctgtgtactgggagccagaagggtcggggt

SEQ ID NO: 405830 - DNA, 122 bp, Homo sapiens
ttttcccacctcagccagacttactgtggcagctttgcttacgcttgcccagagatcttacgaggcttgccctacaaccctttcctgtctgacacctggagcatgggcgtcatcctttacac

SEQ ID NO: 405831 - DNA, 122 bp, Homo sapiens
cctgagtagctgagattacacgcatgcaccaccacacccagtgtgagaaacaaatgcacccgtccaaacccaaagaatggactcagacagagcacagagaaagtgagacttttaatgatggt

SEQ ID NO: 405832 - DNA, 122 bp, Homo sapiens
ccgcgccccggctgctgtgcaccctggagccgggtgaggaccccagggctgcagatggggcgctgtaaagtagcgccggggctgcccgcgcttctgccttagcctgactccgtctaggccgg

SEQ ID NO: 405833 - DNA, 122 bp, Homo sapiens
gcgcttgcgctctgctgctggcccacttcgaagtcggagcaagagccttctctgtgtttgcgccccttggccgctggggggcgccagagacgcggcgccctttcgcgttctggaacgtgact

SEQ ID NO: 405834 - DNA, 122 bp, Homo sapiens
ttcccacccttgtgcctaaacccagctcaggtctttctgaagctaggagcaccggaactacggaggagaaacagctccgcgctctcaccagcgggccctcttcctcctccatatctgaggtc

SEQ ID NO: 405835 - DNA, 122 bp, Homo sapiens
gggatgagggctgtgttgtctcaacaccaccctgccctgtggtgggtgggtgcaggtggtcgtgggtggctgtgatgctccggctcccacccacaggcaccatgactcctgtgaggatgcag

SEQ ID NO: 405836 - DNA, 122 bp, Homo sapiens
caaaccagactcagctgcgtgtatttcacttcttgagatgcacattctcccaacactccccgcctccagcctcctgctgagtaaggaagggctgagaggaaaagagccggagtgggccccgc

SEQ ID NO: 405837 - DNA, 122 bp, Homo sapiens
agcctagatctaaaaatgatgtgttctcaatgaatttgggaacatcagagaagtatttatcgatgaggctataaatatagccaaaaaatgaagcaaggacttaaatatcttaatcacttagt

SEQ ID NO: 405838 - DNA, 122 bp, Homo sapiens
gcgcagagggccgcgggggctgccgggaaaggcatacgtgcttaatcctggtgcagggggcgagcatggccgctccgcgaggtgagccattggctggggtgtcggcgagtgtgttcgtggag

SEQ ID NO: 405839 - DNA, 122 bp, Homo sapiens
tgtttttgtggctctcagagatgcggaagtctgcaggtgcaacatcatcttaccacgcctcgtaggagctggactgccgcaggactttcaacgggatccttagttctcccaggaattcatct

SEQ ID NO: 405840 - DNA, 122 bp, Homo sapiens
tggtgaagtcggataagatgatgggcatgactgttttgaaagttatgaagtgctatgcagcgtcaaagggaccatcagccccccaaggggaggcaccttgcttgctgtgttcatcattgtgt

SEQ ID NO: 405841 - DNA, 122 bp, Homo sapiens
catactcatggaagtacatacttgtatgcacacaggtacctgcagagaagtgtgcacatacggatatacacagaacacacacagacatacataaaagtatatacatacaggttcagacagag

SEQ ID NO: 405842 - DNA, 122 bp, Homo sapiens
ggggataatttgaaaatattccagaaggacttcattgtatgtggggttcatgatgtctcgcgactcctttccgtatatgacaaatacagcaaagttaggagggggaagaagtattttgcttt

SEQ ID NO: 405843 - DNA, 122 bp, Homo sapiens
ctatcctctcccgggctttcgtgcaggaagagcaacacggacatccctggaaaccgggaccgcttggaatgggacttttcacagtatttcacaggactggcccgttcagacacctgaaagag

SEQ ID NO: 405844 - DNA, 122 bp, Homo sapiens
agagcctcctagatattggagagagccatgagtgatgggcatgcctccagcctgtgagaccgggggagcataccccaggcagagggcacttaggaaaaatagcacggggtgctagcgctgcc

SEQ ID NO: 405845 - DNA, 122 bp, Homo sapiens
ataaaatactttttaaaaatgtcatcacacgcactatgagtgcactcagtcttgatgtctcgctaaagcattagctgtctagctccttctcctcccagagcctttatcctcatattgggtct

SEQ ID NO: 405846 - DNA, 122 bp, Homo sapiens
tcatggtctcacgggcttctaggaatgaagccttggaccacagcggtgagtgttacagctcgattggagaaacgcgcggacccaaagagtgtgtggcagcaagatttactaaagcgaaagca

SEQ ID NO: 405847 - DNA, 122 bp, Homo sapiens
ggcaagcgtgaagacaggctgtagggaagcatgtgactaagcaacacggcttcacacctacgttctcctccgggccagtaaagcaaagtgtgtgagtgtgcggtggtagcctgaccttaaac

SEQ ID NO: 405848 - DNA, 122 bp, Homo sapiens
cgctaggacgcaatttcttgagagcaggattcgatctgttgttcacggctagatcctaagcgcctagaatagtttctggcacacagtaggcactcaataaacatttgcagaatgaatcaatg

SEQ ID NO: 405849 - DNA, 122 bp, Homo sapiens
tgtctaggtctgggcaggatggctctctgcatctcagctactaacgcacctcgaggttcccgcccgtcgtggccccaggccacccatcctgactgggtttggcctgcctccagcaccccctt

SEQ ID NO: 405850 - DNA, 122 bp, Homo sapiens
cccagaattctcccaccatcaccaccagcagagcacagcccaccctccccggccacccaacgctccaggccagattccagggtggggacagtggttaccgtagtccttagggaggggggcag

SEQ ID NO: 405851 - DNA, 122 bp, Homo sapiens
aaaagagccattctgctaagttccagacaaaccacactgcttgccacactgacctaactccggtattccactgaggtccaggtggccctccctgtgagcagaatagcagattcggtgaggtc

SEQ ID NO: 405852 - DNA, 122 bp, Homo sapiens
gggaatgtccacgttcaaataaacaagcgcctgatcgcgagccgagcactttcttgctgccgataaagcgaacgtttacactgtgagaaaggcgagattgatttacgaatctgaacgcgcca

SEQ ID NO: 405853 - DNA, 122 bp, Homo sapiens
ctcaggcactggcttcctgggaggcggatctgtcctcccttggggacaagcccatgcccccgcagctgtcctaggaaagcagttggagttgcctgttccctggggagatggagtgggttgta

SEQ ID NO: 405854 - DNA, 122 bp, Homo sapiens
tagaatgagcttccccccattttctgcgatacacactgtcactttccctgggaacagattcgacctgggcagaatgctcttcagtttgttcctatctctgccgggatctatatgttctggac

SEQ ID NO: 405855 - DNA, 122 bp, Homo sapiens
ttttctaatacagttgatggcaatactgtcactggagtaaattgttaaacattgtcaaaacgtaactggactctttagagttgcctggtagtgtacatgacattgatggaatgactcatcct

SEQ ID NO: 405856 - DNA, 122 bp, Homo sapiens
gtgccgtccgtcacccctttctttgactcggaaagggaactccctgactccttgtgcttccggagtgaggcaatgcctcgccctgctttggctcgcacacggtgcatgcacccactgacctg

SEQ ID NO: 405857 - DNA, 122 bp, Homo sapiens
aactcatgacttaaggtgatccacccgcctctgcctcccaaagtgctgggattacaggcgcgagccacggcgcctggccctaaaattttcataataaaacaactttgtagcattactatgct

SEQ ID NO: 405858 - DNA, 122 bp, Homo sapiens
gccgctaagtcactccctcccctgtgcttctccagactttatacgcccgagagaacccaacgacagtagcttacttgtggtttatctgttaatttgaacactaggcagtgaacttggctcag

SEQ ID NO: 405859 - DNA, 122 bp, Homo sapiens
gagtacggaatcagctcctccagagtagtgggtttttccagttgtaggttgagatccattcgtgggtcatgaaatcaagttaagggatcatagtcatacacagaatttttttgtttgtttgt

SEQ ID NO: 405860 - DNA, 122 bp, Homo sapiens
agactggacacccctgggaaagatatcacaaattgttctagaaagcccactttgaaaatgcgccaatgcacatcaaacttagcataataaagttacactgccagacatatgaactcacaaaa

SEQ ID NO: 405861 - DNA, 122 bp, Homo sapiens
atatgtaatgagttaataatttttagtaactattatttaaaaattggctgagcatgtgggcggtggtggtgatgataagttcctcatttcacatgcaaccctacatgactcaacttcccttc

SEQ ID NO: 405862 - DNA, 122 bp, Homo sapiens
cctgtggggccaaaaggatggtttcagagaaatcccaggaagtgagagtgctgggatatgcgaggggcccacggagccctcccctgcgtgtctgagatcacaccctgcgggtaccctgccgt

SEQ ID NO: 405863 - DNA, 122 bp, Homo sapiens
gtgtgtgggcagggcaggcacagggtccttgggcgcgtcgggggagctgagcatgctggacggcaccgaggcgacgaagtggccgcagtcctgctggatgttaaagtgcacgggcacggacg

SEQ ID NO: 405864 - DNA, 122 bp, Homo sapiens
cccggagtcagcgccggctgttgtggcttttccccgggtgataactgagccgaatttccgcgcccgcttcagtggctgcttagacaggaagctccacccagccgggcgtcctcggccttctg

SEQ ID NO: 405865 - DNA, 122 bp, Homo sapiens
ggtgggcgcggggagggcggagtggggggcgcccggcccgccaggaggaagcggggtcgccgtgaagttggttattgaacccatgtggagtcaaactcccagggccgggagagccagtgttc

SEQ ID NO: 405866 - DNA, 122 bp, Homo sapiens
ttcgcttagtacctgctttctgccctccttggaaatctggcagctgttactgagtggttccggtgccacagggtgctccggaaagccagcttttctgtggctgcccagagcccgcttctctg

SEQ ID NO: 405867 - DNA, 122 bp, Homo sapiens
tagccggctgcggaggcgaagaggtggcagcgcgagctgggaccagcgtctcggaggcgccgcaggtgagggggcggggcgggcccgcggtccctgcatccggagcccctggggaccccgag

SEQ ID NO: 405868 - DNA, 122 bp, Homo sapiens
agcggcgagaagtagggaagactggatttcctaccttttgcccggaactttcagccgacgcggcttggatgctggccttagcccgtgcagatctggtaaccaccatctttccggctccctcg

SEQ ID NO: 405869 - DNA, 122 bp, Homo sapiens
ggtcacaaagctattaagtagcatggtcaggatttgaactcggcctgtttccaaagctcacgttctttccactaccccactcttcccagctctaagagtgggattcagtaagccacagcagc

SEQ ID NO: 405870 - DNA, 122 bp, Homo sapiens
cagcgggagagccggtccgaccccagcccagcctgctgggtcagcattcatcagagaggtcgtcgctgcccgggagctccgcggcttcgagctccacgctggacagaaacctcctcagcgtc

SEQ ID NO: 405871 - DNA, 122 bp, Homo sapiens
tgtagtcactctcttttcccagctcagaggcctgcgccttcgtccgagagctcggccgatcgcattagatgtgttctgattgcacaaggccaggagagaccacactgaaaacgatcgtctcc

SEQ ID NO: 405872 - DNA, 122 bp, Homo sapiens
ctatttagtgtattctatgtgtacaactcaaattctgagtgcactaggtgttcaaattggcgtgagtagtgaaggataattgtcagcacgaatgtttcataggtaaaaatgtaatttatttt

SEQ ID NO: 405873 - DNA, 122 bp, Homo sapiens
gtgcctcctgacagggagtctcaggtgatctcctttgttttgcagtaagggtatcttctccgaggacagcaggccttcctctcttcctgagaatagggcctgtggcacatggcatgaaaggc

SEQ ID NO: 405874 - DNA, 122 bp, Homo sapiens
agagggataagccaggatccctcctccagggattcacagtctagtgagttttgagggagacggtgggcagacagaaactgcagtctgcagtcagtgctgtgggattacgaggaggtgttggt

SEQ ID NO: 405875 - DNA, 122 bp, Homo sapiens
ctctcactttagcatcctctcaacaaaaacaggaagtggtaaccacaccccaaacaacagcgcattttcaaaatgggataatgcaaatttgggatggatttatctgtctcaccccttcattt

SEQ ID NO: 405876 - DNA, 122 bp, Homo sapiens
ccatgaaaccacagccctgccgtgaccacacagggcccacaaggttggactaccaaccaccgcggaccccgcttctgtcacccctaacctcactgttgggtccgggacctgcctgccccacc

SEQ ID NO: 405877 - DNA, 122 bp, Homo sapiens
cccgctgcaggtagttgtagggcactctgcgctggaagtcgctgcgcacatcctcgctgacgcggtggcgggatgcggggcccccgaggcgctgggtctcacagctgcgataacagcgcgcc

SEQ ID NO: 405878 - DNA, 122 bp, Homo sapiens
gggtttggggttgggacggtgatggagtcgtggctccgcccccagacctgggccaataggcggctgggctccgcccccggcacttgccgcgctgaggacccgaggcagggctgggcgcgcag

SEQ ID NO: 405879 - DNA, 122 bp, Homo sapiens
tactgagtaatggggcatcagaaaggaagtcacaagggtaatggccctcttttccccaaacgttaaggacctacctctctgggttttgcctttttaaggaagcaggcccacttggctaattc

SEQ ID NO: 405880 - DNA, 122 bp, Homo sapiens
tcccacgtccctcactcaggcttggtggccggttgctgaaccagccctgtttgtattcttcgttcctctcaaagccactctgtgtgctgaactaggttaccgctttgctctaggcagcctgc

SEQ ID NO: 405881 - DNA, 122 bp, Homo sapiens
taaagccctgtgagggccgcctgctcaggtccccgggtgcagaactgtggggcgttcgtgcgcggcgtcccgtttctgacacgcagtgtgatggggtggcaatggagggcaaggggcccggc

SEQ ID NO: 405882 - DNA, 122 bp, Homo sapiens
ccgcgcgctctccagccggcgttaggcgcggggcggggcggagtggtgcattggggtatccgtagccgaggctcgccagccggtgaccacgagcacccaccgctttggacaattgcatctcg

SEQ ID NO: 405883 - DNA, 122 bp, Homo sapiens
ttagctgtccggtgtggtgtggttagcaggtatctttgtttctgttttgaagaagaattgcgactttgcagggagagcacttaaccatgcttgtcaggttaatagtcttatttattcacagt

SEQ ID NO: 405884 - DNA, 122 bp, Homo sapiens
taccaggttctgaaagaaatgctgttgagcattaccgtattgttggcgtttttcctaagtcgccgattcttcctggccacttccaagccccaaatcgctgggacttgttgctaaatctttac

SEQ ID NO: 405885 - DNA, 122 bp, Homo sapiens
caatctggggtcgctttgtaaggagctccgacctccgggcagtgcagggatactcgacggcgcgcgatgtcccggcggctccgcgagcctggcgcgctgagagccccagcagtccgagtcct

SEQ ID NO: 405886 - DNA, 122 bp, Homo sapiens
gcctagcgccatcccaattgcctcctcctccatctctaccagcgtcccctccagtctgcacggggcagtcctcctgggcttgacctctctgtacccacagctgggggccaggcagcccccct

SEQ ID NO: 405887 - DNA, 122 bp, Homo sapiens
tatgaaaaactgcatttaattcatcttgcattgtgagagattggctgcgcagatgtaagtcgtaagggaagtggctgtcggtgggcaacctgaacatggcaccctgcccaaggggacccctg

SEQ ID NO: 405888 - DNA, 122 bp, Homo sapiens
tggatgaagctggaggccatttttctaagtgaagtaatacaggggtggaaaaccaaaagccgtatgttctcactgtgtaagtggaagctaagctatgagtatgcaaagacataggtatgaag

SEQ ID NO: 405889 - DNA, 122 bp, Homo sapiens
agaggcagtgctgggcgggctcccgggcgcaggcaggagctggacaggatatttggaaaccgagaaaggaggcactgggggtccggactcctgggaccctaaaacaggatgggactgggtac

SEQ ID NO: 405890 - DNA, 122 bp, Homo sapiens
tccattgtgcatgtatagaaatgaggctcagaaaactctaggcatttgttaaaattcacacgtggaagctgtcccattgtggacttactgtgtcagaatactgagacaatcatctggcctgc

SEQ ID NO: 405891 - DNA, 122 bp, Homo sapiens
ttccccatccccgccccgcagattcatgctgatcctggccagctgccaccccgagcagttcgactgggccatcaatgcctgcatcgacgtgatggtccacttcgacctgccagggcaggagg

SEQ ID NO: 405892 - DNA, 122 bp, Homo sapiens
cgccaggcctggaggagcctctggatggagctgatcctcatgtcccacacccagacctggcgcctattgccttcttctgcctgcgacagaccaccagcccccggaactggtgcatcaagatg

SEQ ID NO: 405893 - DNA, 122 bp, Homo sapiens
taatgaggctgcgccctgggtcctggaggctgatctttttcaagaaagcgcgtgcagctccggcagacggagggatgaataattaggaagggcttccatgaaatcactcacggagaaaatta

SEQ ID NO: 405894 - DNA, 122 bp, Homo sapiens
gggaggcgtggggggaggggcggagcgcgcgcctcggtccccgcggaaagctactccgcgcgtctggattggtcgcgaacgcggcttccccgcccatcccgccattaggagcgctcccattg

SEQ ID NO: 405895 - DNA, 122 bp, Homo sapiens
ttatagtcaatggcttgttcatcatccagatgtggctactgacatatctacacttcgcaccggagtgtctggaattgtggctatcctgattataggattttaacttaactgaaatgcctgct

SEQ ID NO: 405896 - DNA, 122 bp, Homo sapiens
tctggggtcacttgagagacaacctttaagatcttgccctaggccacctgtggcaggattcgtcaaggaggcatgatgtaaactaaggaactatagcaacagagagggaaaggagaagggaa

SEQ ID NO: 405897 - DNA, 122 bp, Homo sapiens
aaagccaactgttgtctacaagcattttctgagcagcacagccagagggctctcacattgcgaacctcaaaactttgaattactgatggggtactaacatcttcagggccttgcttgtattt

SEQ ID NO: 405898 - DNA, 122 bp, Homo sapiens
ccaatggctctttggtggccacggtgactgccgtggacctagacgagggcaccaacaaagcgataacttactctttagctcaaaacccagaagcaattctcaagacgtttcagattgaccct

SEQ ID NO: 405899 - DNA, 122 bp, Homo sapiens
tccctgtgtgacccgggagagaatggacacggagtttcaggtgagtttctgctaagttcccgtgagcagaaaaagagccaatgagaggaagggtcctctttattcagatcctttcctggtga

SEQ ID NO: 405900 - DNA, 122 bp, Homo sapiens
aacagcagctcgcgacctgcggggcattgaagtggcagcgtagccgaggggagcgataggcggagtgggccccccggcctcctggagagcctgagataaagaggacaaagggggacagagat

SEQ ID NO: 405901 - DNA, 122 bp, Homo sapiens
tcccaccaggccttccatccctgtttaattcagatgttacaagaattctagccaccagctcgctccattcccctccaaagattgcctaacctgacccagttgacctgaacctttgccatccc

SEQ ID NO: 405902 - DNA, 122 bp, Homo sapiens
agtcttctggggattgcagcgaatggcttcattgtgctggtgctgggcagggagtggctgcgatatggcaggttgctgcccttggatatgatcctcattagcttgggtgcctcccgcttctg

SEQ ID NO: 405903 - DNA, 122 bp, Homo sapiens
ttgggtacaaagctaattccagaaaagggggtcctttctggactacttctgtttttgcatcgtagtagccatctattgttactttgttgattattaattttctaaaaggaatagttttgtag

SEQ ID NO: 405904 - DNA, 122 bp, Homo sapiens
tctgcctactcctggcacgtgacggagacccctgggtgactctgggtctcagcacacatccggccagaaagaaggagcgatggctttaaaaggctgggccccaactgggaaatccggccacc

SEQ ID NO: 405905 - DNA, 122 bp, Homo sapiens
ccacgttgtgcacttgtaattgcctagacttccattgcttaaggaggcagctgctagccacgtgaggctaaagttaattaaaactaggctgggtgtggtggctcatgcctgtaatcccagca

SEQ ID NO: 405906 - DNA, 122 bp, Homo sapiens
acataaatttttcaatatacagattccaggaagcatgctgactggcttcaagttcttccccgtgttccagagcaaccatattaagcataaaatctattcaagtttgagtccaaagagtggat

SEQ ID NO: 405907 - DNA, 122 bp, Homo sapiens
gggaaaggatgttacagaaactccagatactactccccttcagtggtctgagttgcgcggcgctttcccgcctgtccggtagggggcgccgcgcagaaagccgcagtccctctgcggaaggc

SEQ ID NO: 405908 - DNA, 122 bp, Homo sapiens
cgcaaggcggcgaaggatgccgggagcagctggctggccggggctgggcttcccgaccaccgcgcataaaagctgtatctgcaggaggggcaccgggaggcgggaggaaggcagacgaggag

SEQ ID NO: 405909 - DNA, 122 bp, Homo sapiens
gccgcaccaacagggcggcggtggcggcggcggccagggccgtcaccgccactccagccgcgctccaggcacccgcacacccgctacccccgcgcggtccccgaggccacccctctgcgccc

SEQ ID NO: 405910 - DNA, 122 bp, Homo sapiens
ctcagagactcactccctgcttccagctctccatatctgtgaaataaccgtggaaggacacgcaccatctctctctttctctctctctctctctctctctctctcacacacacacacacaca

SEQ ID NO: 405911 - DNA, 122 bp, Homo sapiens
tatggattttttttggaggaataccacagaagtgatgtacccttttcaatacattcgtatcggggtacatgatatcagcatgtcctgttatttggtaacgttaacactgatcatgtggttaa

SEQ ID NO: 405912 - DNA, 122 bp, Homo sapiens
gctgagctctcctgctttccaagcctgcactccacccttcgtcttattagaacaaagccacgtcccacattaaagatacaatgtatgcttcattacaagaaagtaaactgcagttggctagt

SEQ ID NO: 405913 - DNA, 122 bp, Homo sapiens
gtgcgtcggagcggggaggctgaatctgatggagacggctgcaaggatacattttcttgccgagaacccaaagctcttccctgccccgtcccttcctcatcttttctgggggaagagtcctg

SEQ ID NO: 405914 - DNA, 122 bp, Homo sapiens
acgatcgaggtgcagcagtcaggccgggaagatcctgcatgttgcgctagggactgcgcgcggcgccaagcgacaaccccccagcggccactgccccggcagcagcagctgcagcagcggca

SEQ ID NO: 405915 - DNA, 122 bp, Homo sapiens
gggttcaggcaggcctgtggacaaggcggaggaactcccaggcagccaggctggcttcggcgtgtggaggcgggaggggcacagccaggtgcgagggaaggctggcatctggcgcccactgc

SEQ ID NO: 405916 - DNA, 122 bp, Homo sapiens
accatggggcccaccctgagcttcctgatttctgaagtctgagtgatttcctccgtgtgccgagaggaaacagccttctgcactcacagccgaagggaaagcagcaggttggggcttcttgt

SEQ ID NO: 405917 - DNA, 122 bp, Homo sapiens
tttaccaaggttccaagccaggatggtggagataggtggtaccactgacagaactaggaacgttaggagagggaactggttttggagaaaaatataacatgttctctgcaacacctgttgct

SEQ ID NO: 405918 - DNA, 122 bp, Homo sapiens
cggcctctggctttcgtggggagggcaccaaggcttcaggtttcccagctcgcgcgttaccgttcaaaagcccctcctggagctctgaattgaggggagcactccatgccccttcctccaaa

SEQ ID NO: 405919 - DNA, 122 bp, Homo sapiens
ggcggggcggggcgtcggcgggcagtcccctgtgccaggtgtggtttggtcctcccagggcgccgtaggcggtgcatcccgttcgcgcctggggctgtggtcttcccgcgcctgaggcggcg

SEQ ID NO: 405920 - DNA, 122 bp, Homo sapiens
cggccctccgctctagacctggtaccactgtagattcaatccaaactcccagaaatgtgccgcctttcataatccccagctgtccactacaggtggtaactcccctgctgctcaatgtggcg

SEQ ID NO: 405921 - DNA, 122 bp, Homo sapiens
ccaccacccccggccctttattcaatctttacaaagtctttatgccgagatgctgtaattcgccacattttatccaagagaaaattatggctaagagagtctctgattgtagctcgaaagtg

SEQ ID NO: 405922 - DNA, 122 bp, Homo sapiens
agcgtcccctaaccagccctttctatctcattgttctgacttggacacgccatggctcaccgctcccaaagtccccactatgtctccctagctgaggaaataaaagcagagaggggtgatga

SEQ ID NO: 405923 - DNA, 122 bp, Homo sapiens
cttaattaaaatggcttgagaactttgggtagccatgtgtaagaaatggatggtattcaccggggaaacaaggtatttgaatttctactttattgaaccagatttaccattattttaaaagg

SEQ ID NO: 405924 - DNA, 122 bp, Homo sapiens
gcggctgttcctggcgagtcacgctgactcagcacattgcctctgcctccccgccgcgcccgcactccctggcccgccagccaacagcgccccacgagagccgcagcccccagcctggccaa

SEQ ID NO: 405925 - DNA, 122 bp, Homo sapiens
ctagggcccagcggccgggcgccacggcgggggtggagtgtagggttctagtgacgagcccgggcgaccctccccggcccgcgcgcggggagcggggagcgcggacggcggcgggagcgcgc

SEQ ID NO: 405926 - DNA, 122 bp, Homo sapiens
gaaggcgggtccgcccggtatctagaaattgccgggctggtttgttttgggcggacgtgacgtaacgtcttggcttgtctgcgtcagcgaaaggcctcaatttcctgtcctctgcttactgc

SEQ ID NO: 405927 - DNA, 122 bp, Homo sapiens
gccctcctcactcacttccggtggcaggtatggaacctatagggggcctgtcacccagcacgtgcatcgggggctgtcccgggggtcaggggagggaggccagcgggccggcggggtccgcc

SEQ ID NO: 405928 - DNA, 122 bp, Homo sapiens
cataactttttggaaaaccttacttactccttccctatatactccttccctatatattttcgatatgatgaccactaaaaatatcagtaaataaatatattgctttgtaaatatattaacta

SEQ ID NO: 405929 - DNA, 122 bp, Homo sapiens
tggagaaccgaaacccacccgaacagctgcccatcgtcctgcaggtgagtttcttcagaccgggccagacagccgaggttcctcaggaaggaagccagatgcctgtacagccccgggagtgc

SEQ ID NO: 405930 - DNA, 122 bp, Homo sapiens
gtgcaaatcaagtccccaaggccacaaaccaggcggggcagaaacaatgggctaaagcatcgccttctctcctctttggctcacataggcccctgactttcctgggcttgcctgaaagtgag

SEQ ID NO: 405931 - DNA, 122 bp, Homo sapiens
ccaagtaccaacagtcaccatgactgcccagttctcttggcactaaaaggctgctgagttcgagccctgagttaaatgaatgcatcactggggcgttgccaactggtactatcagccagaac

SEQ ID NO: 405932 - DNA, 122 bp, Homo sapiens
gtctctgctcagaaaggtcgattttgtttcctaataccacaattgctacctgaaagaaaacggattgaaaagatcatactagtactttgccaacatcagttcctgggcaaaatggagacata

SEQ ID NO: 405933 - DNA, 122 bp, Homo sapiens
atgttcagctcctccctcctcattcagatgggaagtggctttagataaacaaagtggcaacgcagtgggctggagcagctctgtgaactgagaatccaagaaaaggggcgaagagcagctgg

SEQ ID NO: 405934 - DNA, 122 bp, Homo sapiens
ctatgggttggcaatttgagttgagctcaactgggcagtcgtcatcacctcagctgggctcgttcttcatgtgtgatcagctgccatgactctgcaactgtggttggatgactaggccaaca

SEQ ID NO: 405935 - DNA, 122 bp, Homo sapiens
aggacaggatgccaaccccaaaaccgcagcgacgtctctctgccttggggctcacagcagcgggccgcgacctcccactaacgcctgccgcaacccaaggaggagacaaaagtcatcttccg

SEQ ID NO: 405936 - DNA, 122 bp, Homo sapiens
tttagaaagcagcgctcagtggctgagaactcctgggttccctgctgggcaagggttaggcgtacatttgccagggtgttaaaggaggaacgcagggttcaaatcccagctccacttaacct

SEQ ID NO: 405937 - DNA, 122 bp, Homo sapiens
tcccagtcgacctccttgctcaactgtcttttatccactcattcattctccaaatatatacgagccacctgctatgtgccaggagcttttctaagttgggatgcagcaatggataagatgga

SEQ ID NO: 405938 - DNA, 122 bp, Homo sapiens
tcaagcctttagcccttggcatcctgggctactgtgtgggcagaacatgggtgccggtgacggcagtggtggcggtggagaggcggagaggagggaaagggtcccttcctgaccagctgctg

SEQ ID NO: 405939 - DNA, 122 bp, Homo sapiens
agagcgaacgggttcgaaccactgacctccaaacttggaagcaagcacaccacccgactgcgacacacgaatggacagtcaactgtcgctcccgcctcaccatgcagagcacgcgcccatcc

SEQ ID NO: 405940 - DNA, 122 bp, Homo sapiens
tcttgtagagaggtctgaagaatgtgtttgatgaggctatcctagctgccctcgagcctccggaaactcaacccaaaaggaagtgctgtatattctaaactgttttctccttcccttctttg

SEQ ID NO: 405941 - DNA, 122 bp, Homo sapiens
gtggccacacgggagcatctcaggcctcagagagatggcaacaaaggttaaaaccaattgcgatttcagagatatgtggttagaaaccaggcttcagagatgacatttacattgtaatgtaa

SEQ ID NO: 405942 - DNA, 122 bp, Homo sapiens
cgggcgtggcgggggatacaactggggacgcagcggggctgcgctcagacgctcagggcgcgccctcggggtcggggctccctggcgaagggagtctgtctgtcccaagccgctttcgttcc

SEQ ID NO: 405943 - DNA, 122 bp, Homo sapiens
tgaggggaccctgagcttcacctgggctagcgcggggagtgacaggtgcgcgaaggagcgcggcgctccgccctctcgccgacccgccccctccgggcctcgccctccggggctcgggatga

SEQ ID NO: 405944 - DNA, 122 bp, Homo sapiens
tcttttcctccctggaccccaaatcacgttcgaagcgacagtctggtgcagtgttagatccgctgctggggcgcaactccgcgcagcagcagcaacgcaagccctgctcctctggctacgca

SEQ ID NO: 405945 - DNA, 122 bp, Homo sapiens
ttgctccaggcgcgtcggaaccgcaggacttttcatccccgtggtcccacggtcctcccgcgccccggaggcctgccagccccgctcggacgctcgtttgcccctaacccgccgccatggct

SEQ ID NO: 405946 - DNA, 122 bp, Homo sapiens
agtgcaggatgcataactgtgcacttccctcttggacgttgccaaaggactgatctctcccggactctgtccatcagagcagagtcctcgccctgttgtcaggccagccagctcggctctgc

SEQ ID NO: 405947 - DNA, 122 bp, Homo sapiens
gggaaaagctttgaaactttggttcctaacaaagcagtatgtagatgctaagaggcagtccgcccatgtccatcattcctgtccccttccctcataccatgtcaccctgcctgggtttttcc

SEQ ID NO: 405948 - DNA, 122 bp, Homo sapiens
atttgcatgtagacagattttagtcccagcagataagcacacccaacatgtcattaaacccggccgaagccatcgccctggggatcccgtgtttgctgtgagtcactaagggctgtaaacac

SEQ ID NO: 405949 - DNA, 122 bp, Homo sapiens
agtgtagcgtcacgtgcagcttgggaagcacgtaggctttgaagatgcttgtttcagaaacgttactgactgctgtggcctctactgcttcaaatgatgaatttgttaacagccttgtcttt

SEQ ID NO: 405950 - DNA, 122 bp, Homo sapiens
tccccatttatctgagggaacaggcttggatggcaagagtcctctttgcctgatcaaatacgttctgtgacccaccccatgctaactccctattagagccagtgtccttcaaaacatgcttg

SEQ ID NO: 405951 - DNA, 122 bp, Homo sapiens
gtaataatcaaatattgacaagaaccttaggtctcgaaagacttttataagtctagatgacgtttgccttaggggtaaagtaaaagaacaattggcaccttaagtttctatacccaaggtta

SEQ ID NO: 405952 - DNA, 122 bp, Homo sapiens
gggtgatgaacaggtggagcacagagggtttttgggccagtgaaactattctgtatgatacgataatggtagatacttgtatttaaaaatctgcccgaacccatagaatgtacaacaccaag

SEQ ID NO: 405953 - DNA, 122 bp, Homo sapiens
gaatttagagtgggatttgggggtgtctccttttgatatttgcagtgtgcatgtttcaggcggtgttaaaggaaattcacttttcttaggggcatgagagcctaaagtaagggcagtgtgag

SEQ ID NO: 405954 - DNA, 122 bp, Homo sapiens
ttggttgattgtgataaaattatttctgaagctgtgtgctggaggaccaagtggctaaagcgcttgactgttaatggcagtaatgatgactacagggactgagggagaagtgagaagtgaga

SEQ ID NO: 405955 - DNA, 122 bp, Homo sapiens
gtgattttggggaatccacggaaagtgcagacagttaggtctcacttttcctatcctgcccgtttatctaatgctgagcagcagaggactcaggtcccaaacaaaagcaatgagtgtggagt

SEQ ID NO: 405956 - DNA, 122 bp, Homo sapiens
tttccgcaagttagggggcggggcatcgggtttctggctcgtgatttgccggagctcctgcgctccccttctccaccccctccggctgtgtgagaggtcagcagaggggcggtctgcgggga

SEQ ID NO: 405957 - DNA, 122 bp, Homo sapiens
taaaggaagttttcagggcgtccattaccccagccctcccctctccaggttccctgagctcggttcgggtaagaccgcgcccagccgccctgacataccaccaccgtccaggaggtggcagc

SEQ ID NO: 405958 - DNA, 122 bp, Homo sapiens
gaggactcccttggctggtcttctgactccacattcagagctatgcccgccttattcattcgtccatctatccgtccaaccagccagccagccatctacttgttcattcatttatccattcg

SEQ ID NO: 405959 - DNA, 122 bp, Homo sapiens
accgtcaatttactcatctacagaatggaagaaaatcaggtaactctctccttctagctccgcagggtttaacattagctcctgggtaatcatgtagaaaaatgctgcatttctctgggcta

SEQ ID NO: 405960 - DNA, 122 bp, Homo sapiens
gagctgggctgtaacacagcagggagcccagtgtgcattcctctttgtggtcaaagggaacgacctggagggggagactcagggtctggaaccgcctgggttccttgcccttctggaaggcc

SEQ ID NO: 405961 - DNA, 122 bp, Homo sapiens
ccagtgctttgtctttgcctctcttcgttttttgttttgtttttttccttgcgccttagccggtcatttgtgtgatgtttacattcagcagagaggtatttagagcatttttggtgagagaa

SEQ ID NO: 405962 - DNA, 122 bp, Homo sapiens
aatgacatggccgggcacggtggctcatgcctgtaatcccagaactttgggagaccgaggcgggtggatcaccacaggtcggcagttcgcgaccagcctgaccaacatggagaaaccccatc

SEQ ID NO: 405963 - DNA, 122 bp, Homo sapiens
tttgcggggacgggggagtggtagtgggggctgcagctgccggacccaggtgcggaagtgcgagggcccaggtggctgaaggggccgttaggaacatccaagcggtggggcacaggcagatc

SEQ ID NO: 405964 - DNA, 122 bp, Homo sapiens
actccaggaccatgccctgcagccctcaggaaggactgccctggcggtgagctgtgagctcggtcatggaagggactgcaggccaagtgggacaccctgaagagtatggccgcgctcgcccc

SEQ ID NO: 405965 - DNA, 122 bp, Homo sapiens
cgttggcgctaaggttgagctctcgcagctccttggccttggaaaagaagccgggggccacgaagctgatgctgttgcagctgacatccagcctccggagccgggtgccagcaggcaggctg

SEQ ID NO: 405966 - DNA, 122 bp, Homo sapiens
caggagtgctgggttgtggtgctgaaaagtaggctagcactgggcagccgaagacagcagcgaggcaaaggaagagttgttccctcccctccaggaccggtgatgggaagcggggtggaggt

SEQ ID NO: 405967 - DNA, 122 bp, Homo sapiens
aggggtccctacagatcttaaaatgaccacaccgcgccctccaccccaggtaaattctgacgttgctgtgagaatgcggagatcgctttccctttgggttaaagtcgctctaagcctacttc

SEQ ID NO: 405968 - DNA, 122 bp, Homo sapiens
cgctcccctcacctttcattcccttggagagacggctcttctggcaggtctccaaatggtcgactctgtcccccgaggccccgccctagcctcgttcgggccccgccctagcctcgttcggg

SEQ ID NO: 405969 - DNA, 122 bp, Homo sapiens
gccctggcggggggggggttccacagggacggtgcctccgcattgacacccttgacaggccgggcactcctgcgtgtcttgtcaggacttcccgaactcctgccatcctgaaatcctatcag

SEQ ID NO: 405970 - DNA, 122 bp, Homo sapiens
atcagaaaacgatgtaagaatttaaaacaacatgatcacaatctcattttgtgaggagctcgcactccctgtttctcaggcacagcctcatttggtcagtcccagttaggtcaggaattata

SEQ ID NO: 405971 - DNA, 122 bp, Homo sapiens
tcataaagaagaccacgatcccacagaatgggacttacccacttcaccagaggaagaagtcgacagtgcttgctgacaccacaggcaagtgtactgggtaactgggagctgggccttttata

SEQ ID NO: 405972 - DNA, 122 bp, Homo sapiens
tccgacacccagcttttgaatgccctgctcccagcccggtaaacaagcacccatgaggcccgccgcccgaccggaaaaaagtagtcccctgcaactctcaaagcttctcccactcccgcttc

SEQ ID NO: 405973 - DNA, 122 bp, Homo sapiens
caaagattctggggtcagagagatcacgtcagtgcacttgccagtttgccaagaacaggccgtattcactttcagaagtgttcaggtttggatagtaaattgcagggccatcctatctataa

SEQ ID NO: 405974 - DNA, 122 bp, Homo sapiens
cggctcctgaagaccggccctagtcctggccggtttccccaccgcactggtccgccggtccggattttagaagtttggggccgcacgtttttcagttacctttaagccaattcacaaacatt

SEQ ID NO: 405975 - DNA, 122 bp, Homo sapiens
ccacactcaaagccaatttctctcacagggcatcgaatgctagttaaagatataaaatcacgcttatcacaattaactcccttgcctttatgatgcagccaagtcaaagcccaaacaggaat

SEQ ID NO: 405976 - DNA, 122 bp, Homo sapiens
ggggccatggggtggccccgccggggcagcgggggagctgcctgcagaagagccagctggcgtgtcgggaaggatccaggatctgcaaacacaactgctcaggccttctcacgcgtttccac

SEQ ID NO: 405977 - DNA, 122 bp, Homo sapiens
tcataatccccaagcaattttttaaatgactgcatcaatgacaattgggcaaattcaagacgtatttaaagaaaacctgaggaatgattattaggaaatataggaaggtgtctattgtccaa

SEQ ID NO: 405978 - DNA, 122 bp, Homo sapiens
ctaaaggaaagccgggcctttctgttctgtaactccagggcattttgtgaaggactgagccggctggggagctggagcacagcacacgaagggccggctggtgctgaactatgagcagggcc

SEQ ID NO: 405979 - DNA, 122 bp, Homo sapiens
atcgcttcatggaactccaggacgccaagcctcttccactacgggtcgaaggatgggtcacgtcacattgcgcgaacaaggatggtcacgcgccacaaaaggacttgcagggcggggcgact

SEQ ID NO: 405980 - DNA, 122 bp, Homo sapiens
cttcaaggaagaacataggctctcttggctattcaataaaaagtgatggccaaagtggcccgggggaaagaacttaaaacaaaaaaaaagtccaggttttcttggacctctttagtttgtgg

SEQ ID NO: 405981 - DNA, 122 bp, Homo sapiens
cgtattacgacgcagaatggagcctggcagcccagaagctgcgggcagggcaaggcagggcgggtggggccggatgggagccggatctcccctggagcggcgcacagcctctcccacccgta

SEQ ID NO: 405982 - DNA, 122 bp, Homo sapiens
gagaaaagagcttccctgctgcggaggggaggcaggcagtgggcaagcccccctagcatccggtacaggcagcgtaggcacagatttcacatgtgcccgggtcctcagcgatttcctctgca

SEQ ID NO: 405983 - DNA, 122 bp, Homo sapiens
gacatgagcaaatcaccaccaacaccagagatataataggcatgcctttccaccttcctacgggtccagctccaaaccccctcctgcaaaaatctttccccaacctgcaccgcccccacccc

SEQ ID NO: 405984 - DNA, 122 bp, Homo sapiens
gagaatcacttgaacccgggaagcgaggttgcagcctcccacgtagctggaattaaggcgcggaccagcacacctgggtaatttttgtatttttagtagagaaggggttttgccatgttgac

SEQ ID NO: 405985 - DNA, 122 bp, Homo sapiens
attcgggccctcgcctttggcacaatgcctggcgtcatcacaacgcgggtgatcagtaaacggcagcgaaggaagcggggtcaggactggagaggagagggggaggaagacagacgaccgga

SEQ ID NO: 405986 - DNA, 122 bp, Homo sapiens
gcctgtctggagtggctcaggtgcctggggacagaggccagctgtaaccgctgctgcactcggttctggattcagtgccctccgcctctgcggcgtctccctcggcagctgtccaggactcc

SEQ ID NO: 405987 - DNA, 122 bp, Homo sapiens
tgccacgatctatgggctgaaacgtggctggaacgacgcagaagcagaaaccacagagagcgtgcgctccaataaaacggcactaaatggcacggctgtgatggaactcgtttcgattttgt

SEQ ID NO: 405988 - DNA, 122 bp, Homo sapiens
gttcctctctctcttcatccacccatcaggccccagctcctaaccaggtacagagtcctacgtaggttatcacttagggtggcacttatcccagcagcagtcccaggagcaggagacctgga

SEQ ID NO: 405989 - DNA, 122 bp, Homo sapiens
gggctgagcggcctgtcatccaaggcggcccgcgacgtgctgggcttcctgcgcgtggtgcgcttcgtgcgcatcctgcgtatcttcaagctcacacgccacttcgtggggctacgcgtgct

SEQ ID NO: 405990 - DNA, 122 bp, Homo sapiens
gtggggtctctggggtacaagagtcaagaccccagcagcacagctcccaaaggcaccagacgaccccgcagcctgtacccaccgctcgcaatcttggaccacctccccaagcttagactaag

SEQ ID NO: 405991 - DNA, 122 bp, Homo sapiens
cacccccggcggggtggccgcctgtcgttactgctggggagggctgcacgcacgtggttccggacgggacgtacttcctccggcccagccgcgtctgctgggcgaagtagtcgtagcgctcc

SEQ ID NO: 405992 - DNA, 122 bp, Homo sapiens
gccgtgcccgggtggcccacttggctcagcggcgccccgtagtccggcccgatgcgcatgcgcacagtcggagccccgctccggggccacccgaaagagccttgcctctactggccgcctcc

SEQ ID NO: 405993 - DNA, 122 bp, Homo sapiens
cggcccaccatccctctatgtttggatttgctcattccatctccatggcagcacgcagaacgctggaaaaacgcaaagcgctgattggttaagagtctcagttcctattggccagagtccga

SEQ ID NO: 405994 - DNA, 122 bp, Homo sapiens
ggaccttccaaccctgggattcaatgggtttagagctctgtaaattaggaacggcactagcgtgcaggatgatggccacggctgacagatcgccatgcaactgccacgccccgcacccagtg

SEQ ID NO: 405995 - DNA, 122 bp, Homo sapiens
tacgctccccggccagccgcgccgctcacgccccaacttgggcccgcgccccccagcccccgcccaggcccgcgccccccagcccccgcccaggcaggcgcctgcgcccaggtgagggcccc

SEQ ID NO: 405996 - DNA, 122 bp, Homo sapiens
ttttttcgcaacccactaagccaaactgtcgggtttgaatgtgtagcagcacctggccgccgtgcggcaaggcagcgggatgatggaaactcaccaccttcctcccgcacccatcccagagg

SEQ ID NO: 405997 - DNA, 122 bp, Homo sapiens
ctgctagaatccaggactttgcaaaaaaaaaaaaaaatctcaggattctttttgcagcaacgcccacatgcacacctcctgctcctaggcctagacccccaaagaagggcccctagactgag

SEQ ID NO: 405998 - DNA, 122 bp, Homo sapiens
ccaactgtggaagctgctgcacttgtgaagaatcctgagctttgattcctcttcagtctacgcatttctctcttcccctccctcaccccctttttcttataaaactaggttctttatacaga

SEQ ID NO: 405999 - DNA, 122 bp, Homo sapiens
ttatctctatttggttctagctaggtcatgattgcttatgtcaaagaaacaaagaaaatacgacaagaatctgtaactgtaacaatgttgtttaacacaactttgaatacatttttacagga

SEQ ID NO: 406000 - DNA, 122 bp, Homo sapiens
tccccagggccggaacccccacccccgcgtcccctggtgcccccggcgtccgagactccgcgtcctcgcggtccccactcagccacctacctgctcccgcggccggcccagggatcggccgg

SEQ ID NO: 406001 - DNA, 122 bp, Homo sapiens
tgaacgcggtgcagggagcatccgcaccaggggactcacctcggccccgggacttggccgcgggctttataatccagatgttccggagcccgtcaatgtccgtctgagggttcacagacgtg

SEQ ID NO: 406002 - DNA, 122 bp, Homo sapiens
tttgttagaaaacctagttgggagtgcaaggcagagagcgttcagcacccttgttcctcccgacccctcaggacagaagcagggctctggagggcagggattccccctcgtcttggccctac

SEQ ID NO: 406003 - DNA, 122 bp, Homo sapiens
ccccgctcccccctgcggggtcctccctatccgtaaaggtcctgagccttctgggtcctgcgaccaccccccacccccgcgaggtcccgcccaccaccgcgtcccggtccctggggagcgcg

SEQ ID NO: 406004 - DNA, 122 bp, Homo sapiens
cagcaattgcataatgcttaccatagactgggcattcttcacagattaattcattaaagccggatagcaacccaataaggtaggtgccattattacacccatttcccagatgcagaagcaga

SEQ ID NO: 406005 - DNA, 122 bp, Homo sapiens
catccaagagcctggccggaaacccacagggtattggcccaggtgtgccgagaggctggccggagggaccattgtgatactcagaggaaaacgcctgtggcccatgggggggccttcagaag

SEQ ID NO: 406006 - DNA, 122 bp, Homo sapiens
gactgggggagtagaaggaagtgggttatagaaacttctttaaaaagattgttaagcaaacggatacaatgcggtacatagtaaatgtctctttgtcattctgatgttgacttctttcaagc

SEQ ID NO: 406007 - DNA, 122 bp, Homo sapiens
ctgccccaggtgtctcggcttcctggaagttatttagggtctcttctgaggagctgcgttcgggctcccctaagtcagtagccctggaaagtgacacatcaaggatctccgaagaagagaga

SEQ ID NO: 406008 - DNA, 122 bp, Homo sapiens
acaggctcattaccgccaagtgttgccctagttaaatcgcgggcctgtttgatctggcggcgggtggcgagagggaaaaaagaaaaaagtaggggggcgagagtagagagagaagctcacac

SEQ ID NO: 406009 - DNA, 122 bp, Homo sapiens
cacactaacttagtgtactgtgacagctgccttgatttaccaccagtccgggaggccaaccgggagaaggaacgttcacatggacgcagggcctgagactggcctggagcctagtttataaa

SEQ ID NO: 406010 - DNA, 122 bp, Homo sapiens
tgcaggaggccgagctgggtggcgatcagcggcgggtccctgtccaaaacccagcagagccgccagggacgccccagacacagaaggcggggcgcggggagggtggggagaccacagcagtg

SEQ ID NO: 406011 - DNA, 122 bp, Homo sapiens
aactgcagagcccccttagaggaggtatatgcttatggtgggaatggagggtaggagagacggctgccttgttccttgggtcagattgtgctaaaagatatggggacccccaattccaggta

SEQ ID NO: 406012 - DNA, 122 bp, Homo sapiens
tagtcagagccatttccctcccagggagacagagtcagatctgacttaccttcccgggaccggagactgaggactcaggagttgaatttggttgggcacaccagcagttgatccgttcccct

SEQ ID NO: 406013 - DNA, 122 bp, Homo sapiens
acatttgcatgaggccagccgaagccagatggtcagggtggtggagtgaggctggcccaccgcagctggcgagcaaacgagcaaacgtgaaaagtggggattcagctggatctactctgtgg

SEQ ID NO: 406014 - DNA, 122 bp, Homo sapiens
tactatgcatctgtgctcaccaagcctatcaatccgatactctgtcattggccaaatccccgatatagtgaatcaaagtttctgctggaaatgcttaattcctcaggaatgttgggggtgga

SEQ ID NO: 406015 - DNA, 122 bp, Homo sapiens
aaggttcatatcattatccaagctattctggatttccggggggtgatttataagtatgtgcgagcaaaaagccacaaaacactgtctcttttaactaaaggggcctggggctatatgaccaa

SEQ ID NO: 406016 - DNA, 122 bp, Homo sapiens
tttaagggaagactaaattatgtattcattagaatcataattttgttcctaagacagattcgtgatggtataatagaaacagtgtcttagcctgaagtattgaggatagtcctaagattagg

SEQ ID NO: 406017 - DNA, 122 bp, Homo sapiens
ccggggagaggggcggggggcaccggggagcaggagtcgggggcgggagccgagggggcgcgccggccggcggtgtagggactggagacctggtggggacgcagggagcttggacaggggtg

SEQ ID NO: 406018 - DNA, 122 bp, Homo sapiens
tatttccatgacttgcagagagatgatgtggcaacacagtttggccagatgaccctgagccggcagtcctcgggggagactcctgaacccccatcaggtcctgtctacccatcctcccttat

SEQ ID NO: 406019 - DNA, 122 bp, Homo sapiens
ccgatgtggcacacgccagctgcggtttcccggagcgtggagaggcagtgctgctgctcccgcccgaggctcatgacaactcaataaagcactgcttttattttttgcagtcttcaatttga

SEQ ID NO: 406020 - DNA, 122 bp, Homo sapiens
aaatgtcccattagcattttcagatcttttgatgtgcactaatgccattattggtaatgccgttattggtgaatacagcatagttaaataaactgttacagtaaatctacacttggatttgc

SEQ ID NO: 406021 - DNA, 122 bp, Homo sapiens
aggcagcggctgcagcagcggcggcggcgctcatctggggtgggatgttgtggaggccggcgtaggcgccaggactggtgagggagccgttcatctcatggtggctcatcatggcgaagggc

SEQ ID NO: 406022 - DNA, 122 bp, Homo sapiens
agtagagacggggtttcactgcgttgatcaggctggtctcgaatgcctcacttcataatccgcctgcctcggcctaccaaagtgctgggattacaggcgtgagacaccgcggccggctgaaa

SEQ ID NO: 406023 - DNA, 122 bp, Homo sapiens
tgactgagagaggattgaggctttagtatgttcatttttaactgatgagagagacttagtcgagttcatgctaagaaggtgccagttaagagggtggagtcaacaatgtaagagagagggaa

SEQ ID NO: 406024 - DNA, 122 bp, Homo sapiens
aacctatcgtaagaaaacaaatacaatagtgttttagctggaaactgcccactgtctaagcggctttttaaattaagaactcaggttcactacgggatggcttaggccagggaacagcatgt

SEQ ID NO: 406025 - DNA, 122 bp, Homo sapiens
gaaactccgtgtctacaaaaaattagctaggcgtgatggcgtgcacctatacctcctactcgggaatcatctgagccggggaagtcaaagtcatgcctgggcgacagagtgagaccctgtct

SEQ ID NO: 406026 - DNA, 122 bp, Homo sapiens
gagacgaccggcgccctagtgccagagcgcccggcgtacccggtgggactccccctacagcgccatctgctgttcggagcctggccagctgccaaggcggcttgacctcccccaccccatcc

SEQ ID NO: 406027 - DNA, 122 bp, Homo sapiens
aaaagaaaggcaatgagaatttatattttattattatttgcattgtactgtatttatagtcgtaactaaaatactgatacaagtaagtgttttatcttgaccagacagattctggagatatt

SEQ ID NO: 406028 - DNA, 122 bp, Homo sapiens
ctggctgggacgcgcgctcttccccctagaagtattcgggatgccgcctgcatgctacctcgctcactcccaactctgctccccacacgaggttttggggtgcccccttggactgctgccac

SEQ ID NO: 406029 - DNA, 122 bp, Homo sapiens
ccggtgacagccacacaaaggcagggtcacaagcacaccgaccaccccacagcccagattcggccccagacacacactcacaagggcacgtgatcacgtgcgtggtcacatggaccggccca

SEQ ID NO: 406030 - DNA, 122 bp, Homo sapiens
tcagctcgctccatggactcaatacccgatccgcctcggggcctgggaaagttccctccacgactcccacaggcgccccgcctcctgggctcccattggctgcttttgacgttgtgctccac

SEQ ID NO: 406031 - DNA, 122 bp, Homo sapiens
ccagcttcttctccagaatgagcttcagggacctctttcgcttttcctgctctccttcctcgatggcatacaggccaggacttttcatgacctcgtcctcaacaacaaaaacaccaatttac

SEQ ID NO: 406032 - DNA, 122 bp, Homo sapiens
cagcaatggtgaagatgcctaccgtggtcccatccttcctgcagcctgctgcgggcaggacgctcagctggctgtgagctcgctccgtgcccagggtgttggacatctcacaggtatatcgg

SEQ ID NO: 406033 - DNA, 122 bp, Homo sapiens
cctcaggcaaacattcttccagcgattcgccctcaacagtgcagctctcagggttcaatccgtgggcacacggcgggtgacccaatccactgggatttatgcaaatctgcagcacgctacac

SEQ ID NO: 406034 - DNA, 122 bp, Homo sapiens
ctgatgagaggatctgcttccaccgtctccacaaagtaccacgggtccagaagcggtaagcgcacgttctcgaggacataggggagtaagcagagtcgttctgatggcttgtgccggaccca

SEQ ID NO: 406035 - DNA, 122 bp, Homo sapiens
ccaagggcgttcctctccactccactaaagcagcacacacccatgggcgcccactgccgtcgggaggagctccacctctgaactctcacaattcattcagcatttggccatccatattcttc

SEQ ID NO: 406036 - DNA, 122 bp, Homo sapiens
tgcggggtcaggagggaaacggcctctgccgtgaggagcgaaaggtccacctggctggggcgcaggacccggggagccgcgccgggaggagggtcgggcgggtctcagcccctcctcgcccc

SEQ ID NO: 406037 - DNA, 122 bp, Homo sapiens
actcaagccactcctgagaaagtcgggtttctttctgtttccatttatatatgtaattttcgcttcaaacaaacatgacctcgctattctatgcacagttttgaatcctgcttttaaaatgc

SEQ ID NO: 406038 - DNA, 122 bp, Homo sapiens
aatatgctcaattctaaatgatttatttcacccttttcactccagggtgcttccatggtacgctgcacttccccacatcactgccagctcctccaaagggccctctctttgtgagtcctaaa

SEQ ID NO: 406039 - DNA, 122 bp, Homo sapiens
aggctggagggaggaaaggaggtgcgacggatccccttttctgtggctgccttgaggccccgcgggtacctagctgtgtggtcgcgggtagtggctcttgcgccccctgctgcgcttgctcc

SEQ ID NO: 406040 - DNA, 122 bp, Homo sapiens
actgctctgggcgtctaatgcaataaaaagtctaccccaagtagattccttgttagtcttcgtgattgtttccatgttccagcctctcattctttctttttagatttaaaagtaaagcaccc

SEQ ID NO: 406041 - DNA, 122 bp, Homo sapiens
cgctccctcctccccaggagatggcgctgtctggtgcggagctcccgggcacagtggaatcggtggaggaggccttgaaacagcaccgtgactttctcaccaccatggagctgagccagcaa

SEQ ID NO: 406042 - DNA, 122 bp, Homo sapiens
atgtcagcaggaagtcctcaaaagcctcatctgcgatgccgcccagctggttgttgttcacgataaggtgctgcaggttgaccaggccccggagggtgtcctccccaaggcttggcagccga

SEQ ID NO: 406043 - DNA, 122 bp, Homo sapiens
aggccagtggagtaaactggagcgagtggacaggggcgcggggaggacgcccttaaaagtcgtcctaagccgcggagcggaaggggttaagtccttaccagtcggggagagttttctgcggc

SEQ ID NO: 406044 - DNA, 122 bp, Homo sapiens
gcgcccaggccccgccccgcgcccaggcagtagggacgaaggccgccacgctggtttagccgaagttggggagccgcgtttctgtcccgatgattaaggctcccttctgacccccactgcag

SEQ ID NO: 406045 - DNA, 122 bp, Homo sapiens
ccagagcaggaagcatagtcaagccctccactagattacagggaacaatattcacatagtcgcagaaatgctgcatattggttttctgcttttagattcaccttataggcaagtcaaagaat

SEQ ID NO: 406046 - DNA, 122 bp, Homo sapiens
tcagtcaagttgtaaacatgcaaaaatgctgggagtggcagtctctccaaacaaatgacccgttctcactgcggttttctcctggtgctagaacctgtaactcctgagttgattctctccaa

SEQ ID NO: 406047 - DNA, 122 bp, Homo sapiens
caaatacacctctttgcatccacaaatcctgctcaccgagtcgagattctcccgtgatgacgctccaatcatccccgcacacgctggggaagacgcgtggctgtgggagccgagtggcacag

SEQ ID NO: 406048 - DNA, 122 bp, Homo sapiens
ccttttctcggcttcaggaatgtcctggagtctatgaatcttccagcaccatcagttcaccgcgtgatggaggctgaggctgtggccgaatcaccgagacccttggaaagaagacacagggc

SEQ ID NO: 406049 - DNA, 122 bp, Homo sapiens
agttctcggagcggcagggaaacctctactcctttcactttgaaataaaaagtggcccaacgttccgtgagggcggcggcgggttcgcgcagagtttagggacagtggaatgggggtggggc

SEQ ID NO: 406050 - DNA, 122 bp, Homo sapiens
cctcactccatcttaaagccacagtgagctctgtgctgctgcccagcttccaattttcttcgtgctttgccacaatcctctgtgctttttactcgccaggttgtctcaccctagcttctgac

SEQ ID NO: 406051 - DNA, 122 bp, Homo sapiens
cccgggcgggcggcctcgtctctgcacccctaggcggcgctgcgctcctcaacacccggccggctccgctttcccagacggctgcccagcctccagcctagcaagcccggctcccagctggc

SEQ ID NO: 406052 - DNA, 122 bp, Homo sapiens
ctaacccatatttgtgcacaacctatgtttggtttatgcacaacccaggtaatagtcaaacgccatttagcaactactgtatctgacctccttgcttcctgggcctcccaatgaaattggaa

SEQ ID NO: 406053 - DNA, 122 bp, Homo sapiens
gtaagggttgcagtgcgtctgctgtgccccatgggctgggctggcctgggctgggctgggcgagcaggggcctggccaggtgttgctgggagcgtgctgtgcgcaagtggcctgtgtgcgga

SEQ ID NO: 406054 - DNA, 122 bp, Homo sapiens
cttggggaagcggtgcttgatcaccgccgcgcggccctggaagcggccacggaacacgcgcgcctcggcaccctgcttcaccagctccaggccgctcaagaagcggctgctccgctcccggg

SEQ ID NO: 406055 - DNA, 122 bp, Homo sapiens
agttaatcacaaacagaaagtaagcagagagtgggaccaagagtggggatgggagttcagcgagtcactcactagagtggccagctctccgccagctgatcacaccaagagagaagatgatg

SEQ ID NO: 406056 - DNA, 122 bp, Homo sapiens
gtgcctctgtctctgagatctttggactctgcccaggatagcctcacaccctatcctacacgactaggaacttgcacagtccgcctcgggcagcccaaagctcctctgcccaccctggctcc

SEQ ID NO: 406057 - DNA, 122 bp, Homo sapiens
ctaaataaaaggcgcttgtgggcaacagctctgccatcaatacacatgggcagatgtttccgaatccagccattcccagatttcactgacatgcccttttccacaggctccctgctgatgag

SEQ ID NO: 406058 - DNA, 122 bp, Homo sapiens
ctttccccctgcactccccatccgggtacctactagtttcctgactttacagcttggtgccgcttcctaagacctccaattctcctcccaggtactggtcccagacttgaagtagccatgat

SEQ ID NO: 406059 - DNA, 122 bp, Homo sapiens
ctattcagccatcttggctcctcccctcttgttttgtttttagacagagtttcgctctgtcgcccaggctggagtgcagtggcacgatctcggctcactgcaaccttcacctcctgggttca

SEQ ID NO: 406060 - DNA, 122 bp, Homo sapiens
gggctggaggcaggagggatgctccctggcaacctcacagggtgccgtcacatgacagggcggacacatgacagaattataataaaatgcttaagaagagtaagcaacagcatcttcagatt

SEQ ID NO: 406061 - DNA, 122 bp, Homo sapiens
gcggagagaaagaaccctcctgtgctgaaccacagggtgccgggtgaggggacctgcgcccgccgcagactaagccagtatttgaaaccgctatcatctgggtcctgtgcagcacttcctct

SEQ ID NO: 406062 - DNA, 122 bp, Homo sapiens
tgcttaaggttcgacctttgcccctgcatagcccctcaggctgagtgcagcgtagctttgcgtagcctgggatttgtcagcctgggatactcattcttctgctctccttctctaaatccagt

SEQ ID NO: 406063 - DNA, 122 bp, Homo sapiens
ctcccagccccggtgggagtcccgaggcagctgctgggggctgggctttgagctcggtcccgagagacccggcagggctggtcagaggggcacagccaccgcctgtgcctgcccctctctgg

SEQ ID NO: 406064 - DNA, 122 bp, Homo sapiens
gatccttccgctcccgcccaagcactgacaaggtttcgcggcaaaggagctttattgctgcggcggcagaacgagctctgcgaagggcgagggggcggcgaatggcgcgcggtcggagagta

SEQ ID NO: 406065 - DNA, 122 bp, Homo sapiens
atccccaaggccgccccttcctctctggctgcacgcctgattggacagttctcacgctagcgccgctgactggatggggctccaggccccaccccctcaggtcttgagtgacaggaggtgcg

SEQ ID NO: 406066 - DNA, 122 bp, Homo sapiens
acctcaggctgcggcggggacacggcaggccgcagcagggacaggcggtgggggaagcctcggtgccggtcgccggcggagtcccccagcggcgggccagacacgcgcggcagaagctgtgc

SEQ ID NO: 406067 - DNA, 122 bp, Homo sapiens
aggggagcggccgggctcttgttgaggttccccaggcggaggaagtactcctctcccatgcggagcaggaccggccgagcctgcggctgctggggctgctcggactgcggcggcggctggaa

SEQ ID NO: 406068 - DNA, 122 bp, Homo sapiens
gagagtcagagccctccggagcggctgcctggcccctacgcagagtagcaagaagcactgcgatgtgcgctactaagcccacgcggccgcagcaaaaactttggcgtggccggggcgtggct

SEQ ID NO: 406069 - DNA, 122 bp, Homo sapiens
accaagtttctttaactagagttttctagtgtaaagggatcttgcattttattttattaacgttctgttttcatgtgggtggtacgtgtctttgtttgcatgtgtgtcaggaatatgccacc

SEQ ID NO: 406070 - DNA, 122 bp, Homo sapiens
agaggcagccctggtgtcgcgggccctgcaactgctcgcggaacatcgattctgggccggcgtcgtcttcttgggacctgaggactcttcagaccccacagagcacccaaccccagacctgg

SEQ ID NO: 406071 - DNA, 122 bp, Homo sapiens
ccaacgcaagggtttttgtctttccttctacgaaaaacctttctcagtcagaacctataacgcgctgtgtatccgttttacgcctcaacgaagtatccgttttacgcttcaacgaaactgca

SEQ ID NO: 406072 - DNA, 122 bp, Homo sapiens
gttggtgcttttccctttggctttttcaccaccgtcttcaatgcccatgagcctttccgccggggtacaggtaagagtcacactcagctcccatcagggagccctgtgaatcccctcaggcc

SEQ ID NO: 406073 - DNA, 122 bp, Homo sapiens
cacgtagggggattacatctgggtttctgggaacgaagagctgagttaggggagagaacccgaaagatctcagtggggaaaggactaggggtgcagggtgtttcacagaaacaatcaagggg

SEQ ID NO: 406074 - DNA, 122 bp, Homo sapiens
ggaccggttgaagtacagccttgaatcacaaatttaggaatttgaattcgctctgtcactcggagaagaaactattgaaagttcttgacaaagggagataagcgatttaagtggtatcctga

SEQ ID NO: 406075 - DNA, 122 bp, Homo sapiens
tctatccggatttcttttcccctttttgtgacattaagtcagtgcttaactgttggccctcggggcttttcctgacaatccattctctgagtcactgaacctgtcttagttctttgcataac

SEQ ID NO: 406076 - DNA, 122 bp, Homo sapiens
gtgcattcacgtggacacggcctgtggggccttttgcccctgtagggtctttactgagcacgtgtctactccaggctggggtgcttacaagctgaaagcttgaggtctgcttaggaacagaa

SEQ ID NO: 406077 - DNA, 122 bp, Homo sapiens
ggcagggcaggtgtctgtgcccaagagctgagcagagaacaagcagccagtggaggctttcgcctgaactgtgcaatccttacctgattgggaagtgcaagtgacaattaataaattaatag

SEQ ID NO: 406078 - DNA, 122 bp, Homo sapiens
cacggtaaatgcctaccaaccgaatgtctgtatttatagaagcgtctgaaccggcaccctcgacatgcgaccctgaatgttctactccgtgttgccagaatcactttatacctttttaagag

SEQ ID NO: 406079 - DNA, 122 bp, Homo sapiens
gagaggggaagtggcgacagttcagtcaactccctcaaaaccagtctggccttcaccaggcggagatgggtggggccgggaagacgggcgttgacgacagaaggctacttccggctgtggtg

SEQ ID NO: 406080 - DNA, 122 bp, Homo sapiens
ctttacctaaaacatggcagtcgctggacacaggaaagcccaccttttgtttggccttttcgaaaggtgacccatattgcacagcagaacatcacagctgtggtcccagatgagacactgac

SEQ ID NO: 406081 - DNA, 122 bp, Homo sapiens
aagcagccgggcctggggagtgcagtgccggatgttctagcctctgcagcaaacctccagcgggccccaccctcaagtcctcttcccaccaaagtgctcacctggcccaccccaccttttgc

SEQ ID NO: 406082 - DNA, 122 bp, Homo sapiens
tctatgacgtcacacgaggagccctgaagtggcggtcaagcttgaggcgtcatctggctgcgcctagtgggccgttgccttacagttgctgagaggaggcgagaggcgggggcgctagggcc

SEQ ID NO: 406083 - DNA, 122 bp, Homo sapiens
ctgtgacctgtatgcacagggactttgttctgatcactgtggtagccacagtggtcaacacgtagccaggcttcataagtgtggttggaaagagtggatttcatgcttttctgaatttctgt

SEQ ID NO: 406084 - DNA, 122 bp, Homo sapiens
tatgggaaataagcagggagatgaggatagctaaaggaagttactttaaatagggcagtccgggaaaatgtctatgcaattttagctaagccctgaaaaataagaatgagtcatataaaggg

SEQ ID NO: 406085 - DNA, 122 bp, Homo sapiens
tccaagccatgctgtgttctggaccatctcaacagcaaccgttcaacgcctactgtgtgccgggccagatgcagggcacaggaggcaggctgctcccaggggtgccactgccaagcactgcc

SEQ ID NO: 406086 - DNA, 122 bp, Homo sapiens
gagagggttattagttatcgtttggagagtggagtgaaggctcctcccctgttgcctacccgcccctttcacatgatctctgactatagctgtggaagcggggagaagataaaggagggaaa

SEQ ID NO: 406087 - DNA, 122 bp, Homo sapiens
ggccacacactcccactgtcctaggccgaggctatgctgcacttgcagagatggtcttcccgctcctcgcctgcccacctcacagcgcggccccgggcaccatccctggccccggccccggc

SEQ ID NO: 406088 - DNA, 122 bp, Homo sapiens
ctccacagtaagttttactctgtggatgaggaagggtccataatgaacttaaatttaaggcgaacaacatggtcagatttatgagatgaactgtttgtgaattttataatggaatagactgt

SEQ ID NO: 406089 - DNA, 122 bp, Homo sapiens
ggttggaacccgggagtgggaagcccgtgcagaattcgtcccaccgtcggcaaacaggcgcggcccagcactcaattattcatgaggcttgcagatgaggggcccgccccagtctcagaccg

SEQ ID NO: 406090 - DNA, 122 bp, Homo sapiens
cagagtgtgtgatgtggaatctccacagcttgaaaaacaaatgaccagccctcccagtgccgtggggttgcattccagtggagtgctcaactacagtttttatcacaccacatgccatgctt

SEQ ID NO: 406091 - DNA, 122 bp, Homo sapiens
ccttcgctgggccccagggagtgtccacagcaccaaggctgctatggatgcatcgccaagcgcggtggggacctggcttgtgtctttgtgtattttgatcagaactttccctgtagcttcct

SEQ ID NO: 406092 - DNA, 122 bp, Homo sapiens
agacttttaaagctcatggtaagttttttgttttttttttgagacagagtctcactgtcacgtaggttggattgcagtggcacagccatagctctgaaacctcaaactcctgggcacacgcc

SEQ ID NO: 406093 - DNA, 122 bp, Homo sapiens
catggtctccgcttccgccgcaacctcggccttacagcagccccgtgcccggccaactggcgccgcctcagccagtcacctaatgctcgcgagacgcgcgaacgagataagacgccctaggc

SEQ ID NO: 406094 - DNA, 122 bp, Homo sapiens
ggccattataaaattttctggttcccctttccattcccagatcaacttctcctggatgcacggtcatgtcttttcatcctgcttgtacttgaacttgactgtagacccttggagcctctagc

SEQ ID NO: 406095 - DNA, 122 bp, Homo sapiens
gactgagctcagggccaagagcatgggcaccaggaggcctccaagtgtaacccctgtctacgcacatcctcctcgtggggcacaaaggtaggcagtcaaaaatcaaagaaggaattttgctc

SEQ ID NO: 406096 - DNA, 122 bp, Homo sapiens
gcccagctaatttttgtatttttagtacagacggtttcaccatactggccaggctggtctcgaagtcctgaccattataatgatccacctgccttggcctcccaaagtgctgggattccagg

SEQ ID NO: 406097 - DNA, 122 bp, Homo sapiens
ctcacccccaccccacttgcaaatcacagacccccgtctacccctcgcatcccccaagtgcgctggaccaactacagcaacctttgaggtgttagaaaaagtcgcctagaggggcgcggcag

SEQ ID NO: 406098 - DNA, 122 bp, Homo sapiens
ttgacttttcatgtatctctcctgccttccttccccagagtggaggagttagacttgcctcgtgggatgagaggagttgtggctttgtgtctgctggcaccaagagggctgagggtgaggtg

SEQ ID NO: 406099 - DNA, 122 bp, Homo sapiens
tgaacatcaatgtggaacaggaaaccaaggtgggaatgtcaaatctgactcctaggcttgcgaagccatgaggtatccaacaaagaaacacagctcactagtaaatgaaggtggttattcaa

SEQ ID NO: 406100 - DNA, 122 bp, Homo sapiens
agcagaaacattttaattatacccatactttgtagagattgggtgagaagtgggcaaatgcgtgctaaggaaaaacaaaaactatggttaagtggggagatttctagatggttctaacaggg

SEQ ID NO: 406101 - DNA, 122 bp, Homo sapiens
cttcagccgcagcgaccacctcaccacccacatccgcacccacacaggcgaaaagcccttcgcctgcgacatctgtggaagaaagtttgccaggagcgatgaacgcaagaggcataccaaga

SEQ ID NO: 406102 - DNA, 122 bp, Homo sapiens
gctgaagctcaggcccttccttgtgccctagtctcctgcactgagcttggtgagcccattcggatactgctggatgcatgggtcgggagggaggtgccctgggttgggtcgatgatgagaac

SEQ ID NO: 406103 - DNA, 122 bp, Homo sapiens
atctttcaaccttaggcatgtgcttgaaggagcctgctagtacatacatataaggaaacacgtttctacgtcatgcatagcacctagtacgttgggaacaacacaaatcaagtacagtagga

SEQ ID NO: 406104 - DNA, 122 bp, Homo sapiens
gtctgcaggcggtggggtttcagacgagctgaacccagaattagaaagcacacgctgcagcgctcagggccctggaagagggaaggagagggagaggatggcaattaccgctgctgctctcg

SEQ ID NO: 406105 - DNA, 122 bp, Homo sapiens
actaggagtcctttccgcccagcgcgcagctccgggtttccagcgtcccaggtcgtcgcacgcacctggaagattccgaaatcctcctgctgtgcatcctgccgtaggccgtgcttccaagg

SEQ ID NO: 406106 - DNA, 122 bp, Homo sapiens
agcaaaagcaggggaatggtcagcaggccgggttcaaagctgcaggtagtccgttgtacccggcttggtggtccgggaactttaggggaaatgggggaggggcccgtgtgaagggatgaaga

SEQ ID NO: 406107 - DNA, 122 bp, Homo sapiens
tctcatggaggacagagatggcttgagccttctggaactggtggccatcaaactcctcctcggggaatccgaaatcatgtctgtccttcaggcaggagaaatgagagattcttcccatttgt

SEQ ID NO: 406108 - DNA, 122 bp, Homo sapiens
ctggtcccgctgcccgggtggccgggatgggatgggccgggccaggcgttgcaccaccttcgcgggcggggcctgatcggttcgccggcgcccggttcccaacctccggcctcccggggaga

SEQ ID NO: 406109 - DNA, 122 bp, Homo sapiens
caggcggtcctgcgcctcctctccccaagacccttcggggacacagcactgcagacccgccggagacaacttgtgcgggagcccggagtcctcggaataacacttggtaagtgttaccgcgc

SEQ ID NO: 406110 - DNA, 122 bp, Homo sapiens
aaatctttgacctcatttcagatgaaaccctagagttagaattaacgtgtaaaattttaacgcctttcaaaggttctttaatacacatatccaaattgtgttttcaccaaattgctgccatg

SEQ ID NO: 406111 - DNA, 122 bp, Homo sapiens
acgaggtagccactttggtttcttataatttacattttgttgcaaactctaataacggctcgaaacatagacaaatctttttccactgcgaaggaggtaagcactggattgaatactaggtc

SEQ ID NO: 406112 - DNA, 122 bp, Homo sapiens
gccctaagcccgagcaggctgggctgtggggccgcacgtggggcgcctctgaggatgctgcggctgtggttctgctctggctgtggcgacatcgcgtggcctaatgcggaactgcaacttgg

SEQ ID NO: 406113 - DNA, 122 bp, Homo sapiens
gggctgagacttgggggccagaccattggtggctccacagacatcatactctgtccagaacggtgcagacctggcataacagggattctggattgcatctgtaaaaagggaggcctggactg

SEQ ID NO: 406114 - DNA, 122 bp, Homo sapiens
cgcagcgccgcgcctccgcctctcccgacgcggtgaagttctgctcagcaagaaaaggcgcgtcgggacccggtcctgcataggccctgggccccgctcccaaaaacaccctgcaaacccgg

SEQ ID NO: 406115 - DNA, 122 bp, Homo sapiens
cccacttccggccagggaacagccacttccacccggaaaaggggttgttccgccgtggggcgccagctgtggcccacccatcctgccccgtactttcgccatcatagtattctccaccactg

SEQ ID NO: 406116 - DNA, 122 bp, Homo sapiens
ccggggctgggccggagactggcgcccgccccgaagcgactttcggtccccgacccgctccgcctgacccctatgatgaagagggcgtccactggaggtgagtgtccacgcggcgccagagc

SEQ ID NO: 406117 - DNA, 122 bp, Homo sapiens
ctctgaccccagagcatgtttgctgtgggctggatggagctgaaggacgcagtgcgggcccggggcctcctggacaggagctttgccaacatggctgaacccttcaaggtcagcctggccac

SEQ ID NO: 406118 - DNA, 122 bp, Homo sapiens
atcagctcgtccgctgggatcagtcctgtggccttgactttacagcagtgccagcctgggcggcttatcctgcgcaccgtgccacaggaggctggtgaaggggcaggaggggaacatagcgt

SEQ ID NO: 406119 - DNA, 122 bp, Homo sapiens
agctcaggcagcgagcgatcgaacgctctgtggcaggcggtggacgctgctgaaggtgagcgagaccccggggccagtcctcagtgtccgggagcaacgcccagtccgttggaagacccggg

SEQ ID NO: 406120 - DNA, 122 bp, Homo sapiens
gcctaaagctacacaggtcagcggggcaggtaaatctaaattggcaaagtaagggctgagcgaacagactccgacactagaaggcagagctgaactaacttctgctaaggtcccgcctctgc

SEQ ID NO: 406121 - DNA, 122 bp, Homo sapiens
cgccccgggggaggcagttgggctcccgggtcctggcctgaggctggagctgcccaggctcgacaggcaggcgacccgggagagccaagagcaacgagagacgctattaaaatgcctcgccg

SEQ ID NO: 406122 - DNA, 122 bp, Homo sapiens
gggagtgcaggtagggggtgcggctccgtttcaccccgacacaatcacacccaccgatgccggctggaggcacatggtccttacaacgggcctgggccacgcccaccgtcccagaatgtgac

SEQ ID NO: 406123 - DNA, 122 bp, Homo sapiens
agtctcagaacaaacagaaaatgcctcaggaacaaagcagcagcagcagttacagtcatgcgtggatggttctgagtcaggagaagctcactgcacagtcaccagatgaggaaggcatttgg

SEQ ID NO: 406124 - DNA, 122 bp, Homo sapiens
agcgggagctggagagttctcggcgggcatgtggggatccagattccccgactccgtgtccgcgtggccgtggtgtggacacctgtctgtagaatgcctccacttggtattttaacgacttg

SEQ ID NO: 406125 - DNA, 122 bp, Homo sapiens
aatgataaccacccatacttctaccaggaatgagccactttctcccttatggacagtgatcgggccatgccagttcaccttcattttgacaggagttgactaagtgagaatatctttgtgag

SEQ ID NO: 406126 - DNA, 122 bp, Homo sapiens
acagacttctgctttaactgtagtttcggaaaatgtacaaaagagcaaaactgcccctctcggcgggacggccgcatgttacagaaaggcttcgtctctgctgctgatgccaccacgagccc

SEQ ID NO: 406127 - DNA, 122 bp, Homo sapiens
tctgcctaggcccaggccagagtgtcaggcaaaagcatagttcgggccgcggggcgcgtgcgcagtcgcccagcctcaccaagcgacttggtccaaaaaggattagataaagtattaccttt

SEQ ID NO: 406128 - DNA, 122 bp, Homo sapiens
taaaataggcttggagatacaacttaccagagggaaaccaatcagtagagctgcatttcccgtaagtccccattgcagcccagggaagccctctggctgcctgtttttatcagtcacgccaa

SEQ ID NO: 406129 - DNA, 122 bp, Homo sapiens
ccgccactgctgctccagccgctcccggacggacaacggctacagcccggccgatcgtgccgccgccaccgccgctgcacgggcagccaaaagcagctcccgccccctcttctctctctcaa

SEQ ID NO: 406130 - DNA, 122 bp, Homo sapiens
gggcagagaatataaccgcgcccttatggtgtttatttgtgtgggtcgccatctttgatgcgtatcgattccgtacagtggaggagtccgcctcctggagtgttgactagagtaaggcaagg

SEQ ID NO: 406131 - DNA, 122 bp, Homo sapiens
ggaggtgtggggaggttcgcggctctacagctgccaggcttgtgggcactaccagttaagcgtgaggcccccagtcagtccttcactggggaaagcttccaaggacttgggctttcactgca

SEQ ID NO: 406132 - DNA, 122 bp, Homo sapiens
agctaaaaacagatccaacctgccgccaaaagcaaatggaaacattaggaggcactcagccggctcccagaggacagtgatgggggacacagccaggacagcaggctgacagggacctcggg

SEQ ID NO: 406133 - DNA, 122 bp, Homo sapiens
ttggtacgattgtgagctcccactctcccggccaagatgccgaagatgaggaggccactccgcacgagcttcaagaacccatgaccctaaacggtgctaatagtgcagacagcgacagtgac

SEQ ID NO: 406134 - DNA, 122 bp, Homo sapiens
gaagccagcagaccccagatgggccatattaaaggacatgtgtgtgacacgtggatggggcgtgcgtgtcagtacatgtgtatgtgtgttcctctgggtgggatctgggctgctatgacaga

SEQ ID NO: 406135 - DNA, 122 bp, Homo sapiens
atctgcgagccattcccacaacactctggagagcctgtccctcagatcgctgcccttcctcgtgcccacttgccaggaccagccgctgaagggattctcagtcccatctgactccccatgag

SEQ ID NO: 406136 - DNA, 122 bp, Homo sapiens
aattttgctttttcatcaccactggaaaagcaagatgataaccaaatttgaaactcatcacggactaaacttcttattcccttcgaatggcagtaaatggcctttattagttcaacagtggc

SEQ ID NO: 406137 - DNA, 122 bp, Homo sapiens
aagtgatccacctaccttgacctcccaaagtgctgagattataagcatgagccaccgtgccgggccatcattactattttgcagatgaacaaactaaggcccaaagagtggaagtatttcag

SEQ ID NO: 406138 - DNA, 122 bp, Homo sapiens
gatagactcgggggccaggcgtggcactggctggaccatcatacatcagggcatggcccccgtgctctgaggcaattcacggaagccccaggcctctgtgcagcccccaagagaaatgtttc

SEQ ID NO: 406139 - DNA, 122 bp, Homo sapiens
ttgggggtagcatcaggcacttgggctcccagaggaagctttgaggagggaggagagtggcgggaatgtcccagggtgtgagcacttggggaataaagccaaccaagagcttttgcctcgct

SEQ ID NO: 406140 - DNA, 122 bp, Homo sapiens
ggtgggcgccatagctgctggcctgggtttgagcaggaggcttctgactccttgcattcccgctggccgccttttccagatggtatccagagcaatctttgcaaagcgtaaataagggcact

SEQ ID NO: 406141 - DNA, 122 bp, Homo sapiens
gaaggactgacgtgggggacgtcacgaaaggaccaccttgtaccaggcacccgctttgtacggcgggaaaaccagcgagtccagaagcctgagtctcttctgcaaatccactccccctgctg

SEQ ID NO: 406142 - DNA, 122 bp, Homo sapiens
cgctctgcggaagactggcaggatcccagagcaacagactggggctcgatgccccttccccgccaggtctctccgtccgcaactgtcctcctagtaccgggtatcccgcaggcggggctgcg

SEQ ID NO: 406143 - DNA, 122 bp, Homo sapiens
gtggccttgtcactgaggagctgccacttcacgtcccaccccacactccccgcaggacctcggccagttcaattaacaggcaagggtttacttctactgtcccgccgggctcctccccaaaa

SEQ ID NO: 406144 - DNA, 122 bp, Homo sapiens
ggatggggacagtccagccgggggacggggggaggggcaagcccagaaaccccagcccagcgttgggaggcgtttgtcccctgcccgccagcaggaagggagctgcccccaccaccccccac

SEQ ID NO: 406145 - DNA, 122 bp, Homo sapiens
gggccggaaggtgaggcggtagctcgagctttgcctttctcaggcattgtcctgcgtttgcggggccaggcgctggcacacggtcactaacccctggtcgttagcttcgattcccggcctgg

SEQ ID NO: 406146 - DNA, 122 bp, Homo sapiens
gtccctggggagccctgggcttcttttcctcctggtttccagcatgacccgcccttccctcgggggcatagcttctgtctccactacccagggccacttctcaggcactgatccatccagcc

SEQ ID NO: 406147 - DNA, 122 bp, Homo sapiens
gtggttctgctcccggtggaacgggaccagggctctaagacttgggccacttgcagccaacgtggagcgtgcgcggcgtgcgggttacagaaatttctgacaaatccgccagggctctgtga

SEQ ID NO: 406148 - DNA, 122 bp, Homo sapiens
atcattttggtggaacctggtctccagtagcactttttttttccttctcatgttaaagatcgtacaactgcaaagagaatggtgccagcaatcctcgacatgcctgcttcttgtcacactgc

SEQ ID NO: 406149 - DNA, 122 bp, Homo sapiens
ctgcgaggcaagtgcagttgagctgatgtggatcttacgtcgcttgagtgcccacctcctcgtcctctccccatttgtccgccgcacaaagacgctcgcacctacaaagcccgaggtgcacc

SEQ ID NO: 406150 - DNA, 122 bp, Homo sapiens
cacacaccggaacacaagacacaggaaccgaacaccaatcagccgactttaggggcgggccggacgcccagccggtcccacctcgcggggagctgggcccgccctgcgcccgagcgcgccgc

SEQ ID NO: 406151 - DNA, 122 bp, Homo sapiens
gaaaagggggctccatcatgaaccggggcttcgggtttttataaaccccgctcactggagcgcccattgtctgctaagcagctgccttgctgcaagaaggtgaatgcgaactgatgtgggcc

SEQ ID NO: 406152 - DNA, 122 bp, Homo sapiens
tgcccagctcccctctcgcgtggctggatcgtgtttccttgcatcacgatggggagggttcggaggttcacgcggcaaggctggggctgggatgagttatccctgctgttcttcagcatgtc

SEQ ID NO: 406153 - DNA, 122 bp, Homo sapiens
acattcctcagcccttgggtggtccatgggattgggtgccgtggagcaggggacggtgctcgtcggggaggctcgggttgcacaggaacccacggaggcaggggaaggctcagtcatggctg

SEQ ID NO: 406154 - DNA, 122 bp, Homo sapiens
catagaattaggggatcctcttctctagctctctcctcttacattcttctccttttgtctcgcaaggtcctctcaccagaaatatgaggttcctcttggagttttagcagcctggcatagca

SEQ ID NO: 406155 - DNA, 122 bp, Homo sapiens
gttttctgtgtcgggtcctggattctcctgcctttgaattgtgtgacaattctgcccatgcggttgagggtggagagacgcagtggagtttggaataaagggaagtattgagtctaagatag

SEQ ID NO: 406156 - DNA, 122 bp, Homo sapiens
cccatgcctgtaggtcccctccctcctcgccctggccacctggccccggaagtcggggggcgggctctcatagctactgcccgtcaccagctcgttattgtgctcatatagggtgacttgac

SEQ ID NO: 406157 - DNA, 122 bp, Homo sapiens
aggggtccacaacccctgggccgccaatggtaccggtctgaggccgtttagaaacccggccgcacagcaggatgtgggcagtggtgagccagcattagagcctgagctccgccctcccatca

SEQ ID NO: 406158 - DNA, 122 bp, Homo sapiens
gcacatctcggtgggctgactgcggtgcagaggccataagaggaagaggcgggggggccccgaggcaggggacacagcgtcttgaggacacagcatgaccctgacccccacgacccctggca

SEQ ID NO: 406159 - DNA, 122 bp, Homo sapiens
gcgttccaagtctcaccatgtgaattgctttcctctcaccatcagtcaagcaagagagggcgaccactcagggagctcgatctgtgtctcaggaacctgaatggatacaatagatagatgtc

SEQ ID NO: 406160 - DNA, 122 bp, Homo sapiens
tgggaattaacttttactcatggtgacaaggtaaacaagttttccgtgggtactctaaagcgttgcatttctgttttgtttatgtgccttgtttggctacagtagttactgtgcctctgtct

SEQ ID NO: 406161 - DNA, 122 bp, Homo sapiens
agtggactgagggagcttcccgactaccagttagtccaccgctgttgtaagaacatctggcgttgagttgtcgtttccctgtccctcgagttaagcgacccacaagcatatccttctttgtc

SEQ ID NO: 406162 - DNA, 122 bp, Homo sapiens
cttggcacctgggaagccagctcagagcatattcagtcaagttgatgaggaatggcggcccgacctcagcagcaggtcggcgtgcgggactctcagaatggcggcctgatctcagcagcggg

SEQ ID NO: 406163 - DNA, 122 bp, Homo sapiens
tggcccgctcgtggctgagctgggtcaccaggcaccagctgtcttccagcgggctgtaggcgtacagcgctctcatggccccacctgaggagagggaggaaacacggtgggcatcgctccat

SEQ ID NO: 406164 - DNA, 122 bp, Homo sapiens
gctttcttgaatggaaaaaacaaatagagccccacccatgggcctgtaataggtggttcacgcctgtaatcctagcactttgggaggccgaggcgggcggatcacctgagttcgaggccagc

SEQ ID NO: 406165 - DNA, 122 bp, Homo sapiens
ctgcagaaaaagcacccccgggagtagcggttgccaaagcgtccaggcccgggaggcgcgcgttccccctgtttatgaatggccccggagagggtcctgggattggaggagagctagggggc

SEQ ID NO: 406166 - DNA, 122 bp, Homo sapiens
gacaccctggaaccgttcgtggctctgtttaaagatgtttttcttagaagcaggaagttacgtcctgccaagaagaaatgaaaataaagccccgagggttcactcggggttcgctgggagcc

SEQ ID NO: 406167 - DNA, 122 bp, Homo sapiens
ccccggggcgtggcctagcgatctggtggccgccatttcgaagctgaagaggttaggcgacgctgacttgctttcaggagaggcactcggtaatcgagaagaaccggctttcggccagccag

SEQ ID NO: 406168 - DNA, 122 bp, Homo sapiens
agacgcaagagctgggaatctcagcaaatcaaattgcacaacatgaagcgctgtctctatcgcgcggttagcttactgctatcatttgtgggaaatacgaggcgctaaaattctgacaccac

SEQ ID NO: 406169 - DNA, 122 bp, Homo sapiens
ctatttcttcctcccactctaagcccactgtgatatcatccattggaggcaggagctctgcgctgtccctttgcagcccctggaactgcagtgagctgtgtgtattgagtcaatccataaat

SEQ ID NO: 406170 - DNA, 122 bp, Homo sapiens
ctcaaatgccaacgtgaagcagtgtctgtggtttgccatgcaagaatacaacaaagagagcgaggacaagtatgtcttcctggtggtcaagacactgcaagcccagcttcaggtaaaggtgt

SEQ ID NO: 406171 - DNA, 122 bp, Homo sapiens
agttcaaatggccacagcaagaccaaatgaggggaaatgttctacctgcttcactgccatcgagagttgaaacacgatgaagcctggaagaccactggaggacagcatagtgtattctacca

SEQ ID NO: 406172 - DNA, 122 bp, Homo sapiens
caggttgtcagggggctgagctgcagcctccaattggcgagcggggcaccgaggggaaggcgcccaggaggtgggttcatccgcgtggggaagcgcccggggtggccacgcggggcccggag

SEQ ID NO: 406173 - DNA, 122 bp, Homo sapiens
tgagccttctgggaggtccccgaggaggatgcgagcctgggaggttgttccatttccacgcgcccctcacgcccttggacgaggccctcacccctggttccactgcaggagacctgttaaag

SEQ ID NO: 406174 - DNA, 122 bp, Homo sapiens
tctcagcaccttaccggattaagcagcactgtcagaaagagctctccacctcggatgctccggtctagttcacgagagcctccaggatactcattatagaagattgtgtgagtgaagaggcc

SEQ ID NO: 406175 - DNA, 122 bp, Homo sapiens
gaaacgtcatggaaataaacaagggcggccacaagcacatggggtccgggaagcggcgggcgccaatcaggggcaggaggagtccaggacctgcctagcgccggccgcgcccgtctcccgag

SEQ ID NO: 406176 - DNA, 122 bp, Homo sapiens
ttttcatgctggcaactttatcttactctccagatcatccaggcagcaggtccaccccatcgttagtggtacactttctgagtgtcaattaacagtttttctgagcagacaggcgtgtccag

SEQ ID NO: 406177 - DNA, 122 bp, Homo sapiens
gatgctgcacgcttgcccagtaggtttggctgagaggcttgctctcccattccttctacacgctcaccccaaagcccctctcccaattcactcccttgcccactttcccacagccagcaggc

SEQ ID NO: 406178 - DNA, 122 bp, Homo sapiens
tttttggaagtagaataatcactgcagggttttacactagtatatattaacttgggattccgtgatccatggatctctccaaaggatgtgcatatgtgcaaatgtgttgatggagggggcaa

SEQ ID NO: 406179 - DNA, 122 bp, Homo sapiens
ggaaagctatgttatagagaaagggaaagctccaggtaggccctgtttggaggctgctgacgtggagagggtggaacatcctgtgttattgattagtggtacatattttgctttctccagca

SEQ ID NO: 406180 - DNA, 122 bp, Homo sapiens
gggctggccaccacgggacaggaaggtgagatccgggacctcagctttgcaagcaggctccgccggcgaccgctgacgggcgctgggctcgcggcgctgcaaggcggcgaggcccgggcctg

SEQ ID NO: 406181 - DNA, 122 bp, Homo sapiens
atttcagtcactccccagtctgaccaacaacgctcacaatgagggcgctgccagcacaggcgacggcctgcgctccagtcttacgaggaaccccaaattcaagacccctgtgacccaggcct

SEQ ID NO: 406182 - DNA, 122 bp, Homo sapiens
ggtgagcgtgcgccccggggtgtgcgtgtgagtgtgagtgttggtgtgtggtgatgctggcggtggggtctatgggccacaacttcaacccgcctgggctgtttccaccccgtgcacagtat

SEQ ID NO: 406183 - DNA, 122 bp, Homo sapiens
ggcgcggggaggaggcctcccggtgcgcacgccccttccctcctgggccgtggaaagcgccggggtcggccccagatgaccttggacgattccctgctcctcccttggcctcagccttttcc

SEQ ID NO: 406184 - DNA, 122 bp, Homo sapiens
gggctgtcaccatgttggaattgttggggtgatgatggaagatctttgtcacctcttgcccgagggccacatctgtctccccaatgccagggaagtggggcctctacccctgtctgccctgg

SEQ ID NO: 406185 - DNA, 122 bp, Homo sapiens
ccgactgcaagggcatttccactgcgtcggccctgccagcccccgccgcgcccagcctcgcgtccaagtgggacacagacagctccacacagccggtgcaccggtgccggagaaacccaaga

SEQ ID NO: 406186 - DNA, 122 bp, Homo sapiens
agtgaaaagcatgtggaaggatgcacgttcctgatgaagatcagaggaaactcccaaggccgcagagtgccttagctcttgggaaggaaatacccacaccaggtggtgcttgtcagcaaata

SEQ ID NO: 406187 - DNA, 122 bp, Homo sapiens
cttgcactctgccacctctttctccaagagcggcccgggactgagaatgaggggatggggcgagtgggtggggccctgcgcctgtgcctggcttccagagtgaccctattgttgatgaggac

SEQ ID NO: 406188 - DNA, 122 bp, Homo sapiens
agactggggtggagccgggaagggtcgtgcgtgagtgggggacagtgtgtctcgctcaaccgctgtccgcgcagctgggcccagatattgtgccccaccccggaattgcgtgaggggcccac

SEQ ID NO: 406189 - DNA, 122 bp, Homo sapiens
aggcacatcgcagggttggaagtgcgctgggggcctggcctgtggtcctggctgggatgccgccatcctagggtagcgggcctgggggggcctggagctgggggccatcctcccatggcctg

SEQ ID NO: 406190 - DNA, 122 bp, Homo sapiens
attaaatagcacaacctggcgggggcaggggggagcacaagggtctcccttccacctggccggaggtgggtgaaaatcccagcagatttcaacaacccgcctcccaccctacaccgcaagta

SEQ ID NO: 406191 - DNA, 122 bp, Homo sapiens
tctgcgcttcagtgattccactataccatctatttcacctattcccatctgctcaaaggccggtttctccactagtttgcatgccccttggcacagagaccatgtctgttaacttgtgtatg

SEQ ID NO: 406192 - DNA, 122 bp, Homo sapiens
catttcactttcttggcatcatcgccagcttccagaggaagatggtccattatttcatcacggtagttcacagcctctgtctctatccagcagttatctgtgtttctagaatcatccacgta

SEQ ID NO: 406193 - DNA, 122 bp, Homo sapiens
tgccccttccaagctcacacaagggtgccatctgcgtgccaaaccacagacctgggagagcggattgggcaaggtggggggtgcctttgtctcatctgcacagaggctgctgtatgggctgg

SEQ ID NO: 406194 - DNA, 122 bp, Homo sapiens
tcgctgcagtgttagtgctcgccgtggaggcgtgagcaggtgggcggggccccgggcctccgggacactcctgtattagtgctcctgtaatagtgcagtcctgggagcaccgagggagggct

SEQ ID NO: 406195 - DNA, 122 bp, Homo sapiens
ggccctgctgtctggcaagaccactggctgagctctgttatcacacagagctactgactgcgtactgcaatggcttctggtcagactagtcacagaatttattccctggctggaaaattatg

SEQ ID NO: 406196 - DNA, 122 bp, Homo sapiens
gcccgcggcaggtgctatttcctttgctgctgcctttgttctaccccaccctgagtgagccgatccgctactcgattccggaggagctggccaagggctcggtggtggggaacctcgctaag

SEQ ID NO: 406197 - DNA, 122 bp, Homo sapiens
tcaaagatgtacctgggtgggggccgcagggaagtggcaggaaagctgcggacacccctccgggcccagtgcgccccatgataatccctgtgccccccaccccaagccatccagaggggaac

SEQ ID NO: 406198 - DNA, 122 bp, Homo sapiens
gttaaaattcgggttttgctttccccggatcaaggaaaaagtgttctcccgggcgcctggcgtgcaaggactcgggctccagggggcgggtctagcttcttgtacacctttattaggaatgt

SEQ ID NO: 406199 - DNA, 122 bp, Homo sapiens
gagcttgtagtgaccttaccgctcgtgggctcagtgacaggcagagcttcgccctcaggccggcctccaaggagctccttgcaggcagatggcgcataaaagaccctcttcctcccgaccaa

SEQ ID NO: 406200 - DNA, 122 bp, Homo sapiens
caagctaaatcgcgaagcatctgaacgaacgaggaagcccaacgaccatcccacaggccgcggccagaggcagactccggaatgcaaatggccaaacaagcaggtccacctgcgttcctaac

SEQ ID NO: 406201 - DNA, 122 bp, Homo sapiens
agacatagtgagcatgaaagaaacactcataattgaagtgtatattcaatttcagcttatcgctttgtgccattgaatattcacttgatgactttttctagccagtagtacatggcagaaga

SEQ ID NO: 406202 - DNA, 122 bp, Homo sapiens
gccggggaaacgcagtaggaggagtgacgggaaccgggagccggctccatgcgcctggagcgcgcgggtcccagcgcccatcggcccggggtccgaggggcccgctgcccgggctcgctgcg

SEQ ID NO: 406203 - DNA, 122 bp, Homo sapiens
cttcccttggattcctcgccaggttagtgggctgtgaggtctcttttcctttccctgaggcgcctggttgcagggagcgaaagtggatagctgacggcctggaagaacgacattgccgtgac

SEQ ID NO: 406204 - DNA, 122 bp, Homo sapiens
tttgtgtttcagataggaatgcctgaggttgaatggcacacagagcgagaaagcttctgacgctatttaagtctcttggtgccgaatggctggtgggcttgtcaaggctgggaatgtcgagg

SEQ ID NO: 406205 - DNA, 122 bp, Homo sapiens
cctcactgcatgctgggaactgtagtcttcctgggtccccgttcctccaggacgcggaggcgccggagttgccgccattttaggtcccgaggtgcgccggccgagaaccagagcgcaggcgg

SEQ ID NO: 406206 - DNA, 122 bp, Homo sapiens
ctcccacttgcaggaggaggcttgcgggaaaagggagaaaccccgtaggtgcaatgaggccgctctccgagtgcgcctccctccgctgctcccgtgcacttgaacgtggacgccgccccaca

SEQ ID NO: 406207 - DNA, 122 bp, Homo sapiens
atctgaggagctctggcccagtttcacgccaaaggaaatgtaggcttcacaataaagggccggtcagaggaggcagtgactgaaaagagtgaagaataattagactgtaacgctgtaaatat

SEQ ID NO: 406208 - DNA, 122 bp, Homo sapiens
acaaactttgcctatcgagggaaattcacggagctagcaaatctcgaggagcgggggagacgagggttggagacacatcagtgagacgagctaaaaacatcgcctttgtgtaaacatgtttg

SEQ ID NO: 406209 - DNA, 122 bp, Homo sapiens
atacccccctcccctgattcccccatcactgagagaacatggggcagagcacatgaaaaccgtaatacctccctgtaagccaggggctgccctcaaagctccacaggcattatttccctcgc

SEQ ID NO: 406210 - DNA, 122 bp, Homo sapiens
catggaaaaatatattaaaataataataagctagcagcagtggctcatgcctgtaatccccgcaactcaggagcctgagatgggagtatcagttgaggccaggagtttaagaccaacctagg

SEQ ID NO: 406211 - DNA, 122 bp, Homo sapiens
tagttcacagtgacagtttttcctcacttttgtctgggcagtgggtgctgcacctgattccgtgggtcctggctgcatctgtaaacacattccaggccagagcagagatgagttcctgggga

SEQ ID NO: 406212 - DNA, 122 bp, Homo sapiens
tcagttctcaccatgtcatgggtccctccaatagcctatgcccatggatggggctgagaacgtgtcagatgagttgacttgggctctctgtaggggaggagtatgtcttgacgatgagattt

SEQ ID NO: 406213 - DNA, 122 bp, Homo sapiens
atccccattaaacagaagccctcagaaaagctaattttgattctgccatttgccctaatccgtgttcccttaggcaagtcctttcaaaagtctaaacttcagtttcctcctctataacatgt

SEQ ID NO: 406214 - DNA, 122 bp, Homo sapiens
ttgttctcacagggtaggggggtggcaggttgctggggaaagtgcaagacatgacacccccgcacccccatagagcagggcatggggactcaggccctgaaactgggggccttggggacaca

SEQ ID NO: 406215 - DNA, 122 bp, Homo sapiens
gcttccggctgctgggcgtcactgacttgctgtggcttcctggcctggctcagcattggccgtccggctcctgcagcagtgacatctccactctggacccatgagcccatcagctcttggtg

SEQ ID NO: 406216 - DNA, 122 bp, Homo sapiens
cgagctggcagggcactggggaccattgagacccaaccgtacgacataggagcttcaggacgtgaggtgggcactctttcatgtaaaaaatcccagaggaaagagatcgccgggactcgaga

SEQ ID NO: 406217 - DNA, 122 bp, Homo sapiens
ctgccaagggcagcgactgcaagacgggggtgcaggtttcgggcgtggcgcgggctgcgtcgggttctggcattcaaacatatcatgcgggaccaggcctggggttacaggtggggcgggcg

SEQ ID NO: 406218 - DNA, 122 bp, Homo sapiens
aacaggtgctaggagagaagctgagaggagcaccggtcacgccccggccccgccctctgccggctctaaagcgcaaggtctctccgcctcgcgccccgcccctgcctcgtccaggccccgcc

SEQ ID NO: 406219 - DNA, 122 bp, Homo sapiens
ctttgaaaatggtcgtccccagggagaaacagctaaatgggtgcagctacctggtttcaccgcatagacgcaattaattactcagcatctcacactataatggggcgccctgggcatttagc

SEQ ID NO: 406220 - DNA, 122 bp, Homo sapiens
acgacttctccacgtctcctctttctcttcttcctgcagagtgagcccaccggttcaccacgttgctcttgcccctagcccaccaggccctggccctcagcagcggacctgccgcggtttct

SEQ ID NO: 406221 - DNA, 122 bp, Homo sapiens
cgagggtctccgccctctgctccgggctgaagcgctctgagagaggcggcagcggcaactcgagccccaacagtaatttagtgttggtagttttggcagcagctgccgaggccggagcaatg

SEQ ID NO: 406222 - DNA, 122 bp, Homo sapiens
cttaatccagcattctcaccctgcttttcgcaggagcacagcggtcactcatcttggcaccggcacttctggggaaggtataaatgccacctcccgctggccgagcttcacggcactcgcag

SEQ ID NO: 406223 - DNA, 122 bp, Homo sapiens
gaatcgtaccctcctgccaggcatacagcaagtgctcagtaaatacaggaacactggcatcgcctggattcaaacccagctctgccccccacccatgtgcttgctctgactctctgctccac

SEQ ID NO: 406224 - DNA, 122 bp, Homo sapiens
gaccagtatcctcgatagccatggagatgagcgggaggaacagcgggccctgagcagccccggaagcaagtgccgcattcttcaggaaggaagagacctgggcacccaagacctggtttcct

SEQ ID NO: 406225 - DNA, 122 bp, Homo sapiens
agggctctgactacagaaatagtcaaccaccagctagaagccatgattgggggccgggtgcggtggctcgagcctgtaatcccagcacttttggaggccaaggcgggtaggtcatctgaggt

SEQ ID NO: 406226 - DNA, 122 bp, Homo sapiens
cagtgactcacagcgtgaacccgattacctggtctacacaggcggtaaccgtgtgactagcgactgagtgccttacaggggacgacctcctaagaggctgactggcaggagcccagctaact

SEQ ID NO: 406227 - DNA, 122 bp, Homo sapiens
ctctgtggggtttttagtgactgacagcctgctgtttgagacctggactgtccaagggcacgtggctctacaaaatcatccttccctgagttaacagttggagctgaaagtccctgatccca

SEQ ID NO: 406228 - DNA, 122 bp, Homo sapiens
agagccaatttatcaaaacaggagaattagaatagagaaagagtttaattcacacagaggcggctgtacaggagaccatagttttattactcaaatcagtctccccgaaaacttggagactg

SEQ ID NO: 406229 - DNA, 122 bp, Homo sapiens
cacgctgacgtcatttccggtgtccctgtgtctcggcgtgagcattcgataattaccatccgggcgacaatggaaatgatggcggggaaggggtcacggccctgatggcccacagatggcca

SEQ ID NO: 406230 - DNA, 122 bp, Homo sapiens
acacacagccacaggtctattcccacatatgtgtgtttgccaccggtttgccctctctaccgagtcacagaagaatattaaagtttgtgagccctttaaagccaaacaggcacatttttcct

SEQ ID NO: 406231 - DNA, 122 bp, Homo sapiens
tggcggggggccgtgaacgcagtgggatttgaccttcccccgtctctgggctgacgtctccgcaggtctgcaggggactggccctacgtgggtccctcggggtcacggcggaggcagtgggt

SEQ ID NO: 406232 - DNA, 122 bp, Homo sapiens
ctaatgctgtctggaatagcagatgagtgcctgtctgacccggaaaccttttgttcgccgcgccccccagctttgttactcgctgatggaggctggttttgtcatctgccgtagctgtctta

SEQ ID NO: 406233 - DNA, 122 bp, Homo sapiens
gcagcagtggcggccaaaggaggctgctcagggaacaagcggctgtagtagtctgtggggcgactggagtgaccgaagccaaggcagtttagtgcctctcgtgttcttattttttaacctct

SEQ ID NO: 406234 - DNA, 122 bp, Homo sapiens
gcctgttgggtgctgcggtgatcctgacctgcttgtgtagtgcggcctgcgtggcctgatcgggccgggtttttcttgcctctgcgcctttgtgcacgcttttcttttcttttcttttttcc

SEQ ID NO: 406235 - DNA, 122 bp, Homo sapiens
aagcaccaagtgattctggggaggagggatgaattctggattcctgagacccaggggctacgagtgacacgttttctccgattagatgctttgactctagtactaccttttttggtggaatt

SEQ ID NO: 406236 - DNA, 122 bp, Homo sapiens
gaacgggaaattaaagttccatttccggccatgaggaaggacgttgcccttccgcacgtccgggaaaggctttgcgtctttacttccgaccttctttaaaggtgaaactaacttgaggtatc

SEQ ID NO: 406237 - DNA, 122 bp, Homo sapiens
gtccgagtgcctggtaaactgtaaagcgcggtcctgcgtgagttgctatggctacagctgcgccaggcggacggcctgcaggaccgaggtgcagctgggacgagcggaaagctctgcgcgtg

SEQ ID NO: 406238 - DNA, 122 bp, Homo sapiens
tatgtatgtatatgcacacacgtatacatacacatacaggcatgcatctctgtattctttcggcataatctgtgtcctccagggtttgtttctttgtttcccctgtatgtttgttttggtcg

SEQ ID NO: 406239 - DNA, 122 bp, Homo sapiens
ggaatgtgccccccattccccatggaccccgtgacgaatgtccctcagcggagtcacctccgtggccattggagacttttatattatttattcctgctgtatgtgcacagctttggaagagt

SEQ ID NO: 406240 - DNA, 122 bp, Homo sapiens
attggaaaattactatgaaagcatccttagcccagcagatccaaggtgaaaaaagggctgcgtctgccaaccagcagccagacattccaggcagacttagccgtctcccattttgtggccag

SEQ ID NO: 406241 - DNA, 122 bp, Homo sapiens
cagctggcattacaatgtcctacacacagaggaatcacagtgttaaacggttcttgctcccgttatcctgtgacataggtgataaaccccgaaatgcttcttggaaccctatgcgtttgcac

SEQ ID NO: 406242 - DNA, 122 bp, Homo sapiens
acgccgccggtcgcatttgcccccggagttgccgacgagctcgggcttcctcccaccctccgtcaccgcacacttcggagggtccccgctgtcgccttgctgcagttttccggggcccctca

SEQ ID NO: 406243 - DNA, 122 bp, Homo sapiens
gagaagactgtggtgtcatcccgtcgggaatgaagggaaatgcagcggctgtttgcgccccgggactccaagaagtacagcaggtaaagagaatagccacggcccgccacttcgccttcagt

SEQ ID NO: 406244 - DNA, 122 bp, Homo sapiens
cctcagtggcttcctaagacaccctccttcaccccgtacagtctccggtgcagagatggacgagctgggggactcaggcaatttcccccacaaagtgttgcaatggattgagaacgcctccc

SEQ ID NO: 406245 - DNA, 122 bp, Homo sapiens
gcccaaggggcggctgttcaggcgcgggtgcgcgcgcagctgctgtggccctgcttggtgcgcccgctgtcaccgccatggctgccccgtgtttgctgcggcaaggacgagccggggcgctg

SEQ ID NO: 406246 - DNA, 122 bp, Homo sapiens
cccctccttagcacccgcggtgacatcacggaggcctgggcctgtctacggtctggggaccgccccctctggctcctgccgggccccttggcctcccccatcgttgctggcctgctggggag

SEQ ID NO: 406247 - DNA, 122 bp, Homo sapiens
tgtctgagaacccatttcgtggcattcattgtaaactataagctctgcaagtggtgtccccgacatgatcgccttaaagttacgtgtgaaggaggagagctcatcaattttcggtgaatctc

SEQ ID NO: 406248 - DNA, 122 bp, Homo sapiens
gggacacggcagcgggggcggctggggaccccggcgcgggcggaggcagcaggcggcccgcgggcccggctcccccagtcccggccccggcagccccgccagctccgctcgccgccgccgcc

SEQ ID NO: 406249 - DNA, 122 bp, Homo sapiens
caaaggcagggccagagcacacacagattgggctgtggagtgaggcaggcctcagagaagcgggggcggcccgcagcaggcagagctcggacctcagctgccaaggcacagtctggcggggg

SEQ ID NO: 406250 - DNA, 122 bp, Homo sapiens
ggggaagccaggagtccccgtctgtccctgggtcgcctgggcgctgctggcctgtagaggcgccgcttcgatgcccgggattccgcaagggtcaaccctgcgcgctcctgcctcctggtgtt

SEQ ID NO: 406251 - DNA, 122 bp, Homo sapiens
agacacagggacagcggcttccactcccgggacctctggacatcctccatcccggtttggcgggaaactgacccaggagaaagtgtttgcagaggttccaaaaaaccagcccggcgggaggg

SEQ ID NO: 406252 - DNA, 122 bp, Homo sapiens
ccgttcagggccaaatcacgcgcacgctcgcgcgctgagcctccagccgcgcacgcgcaccggcccgcgcccagcctccgctaggggaccccctccgtggcttcccaccgggttgttccagg

SEQ ID NO: 406253 - DNA, 122 bp, Homo sapiens
tatgagaagactgtaatgaagttaataaccctaccttgaaatgctcactcagagggaaatcgctctcagtctttgcccttttgcttatcttggtgcactacccctacaaaaccaagatccag

SEQ ID NO: 406254 - DNA, 122 bp, Homo sapiens
ctctctcaggagcgatcgggaattggcgcatgcgcactacggtggtggtggcgacgaaggcgggggttgcacgttgcctgcctcgagctctaggtggcgtcatccttcgggctgagccgaag

SEQ ID NO: 406255 - DNA, 122 bp, Homo sapiens
tatgggggaactgatggcgttcctgttacctctcatcattgtgttaatggtgaagcacagcgattcccgtgagtatcccacgtcctcttctctcctaactccaaagtcgaggcagcctagaa

SEQ ID NO: 406256 - DNA, 122 bp, Homo sapiens
aagcgcgcggcgaaggtgcagcagttaccagggtgctgacgtcagctagaggcagggcaccgcggaaggttgaatccacgccctggctgtgcgcaggcgccgtagggggaaggcctggcacg

SEQ ID NO: 406257 - DNA, 122 bp, Homo sapiens
ggtggcttcccgcttcctcacgctctcgtctctgaagtaaaagtttcccttgtacaacttcgcctcctcccaggagggtgaccgtggcctccatccttccctgatctgtccccgaagttcag

SEQ ID NO: 406258 - DNA, 122 bp, Homo sapiens
cggcggaactgcagcagccctgagacttgtgggaattcggcccaagggttcccagggcaacgcgcaagcgcagttcggctcccggctgcagactccagctcattgtgttctgactgcgatgt

SEQ ID NO: 406259 - DNA, 122 bp, Homo sapiens
aattcttaaacacataaaattggctctgtgtataaaaagagtagaaaagaagttgttaaccgcatgggtgagaggaaggtatcagtagtacacatctgaaggattaccatattatagattga

SEQ ID NO: 406260 - DNA, 122 bp, Homo sapiens
gcctgcagaactgtgagaaaataaatttctgttgtttaagccacccagtctgtgatacttcgttattgcagctctggcagactagatggtcgacatcctaaatcagtaaagaaagcagcagg

SEQ ID NO: 406261 - DNA, 122 bp, Homo sapiens
tgagcctgagtgccggcagcctggaggggcagggcggtggctctggtgtcctgcggtttgcgtgggctctctctgcacttacactcacaaaaagacagtatctcaggcaggaattctcgcag

SEQ ID NO: 406262 - DNA, 122 bp, Homo sapiens
cgccgccgccgcgctcctcacacctgcattgccagcagcagcaacagagccaggacaagccgtgcccgcccttcgcgcccctcccgcaccctcaccaccacccgcacctcgcgcaccagcag

SEQ ID NO: 406263 - DNA, 122 bp, Homo sapiens
tgcataacgtttaaccattattattaaatttgtccgttcagcaagattgaaactgccattcggaagctattgcaccttccacacaggcagtgaaaaaggactaacatctgaatttcgctaca

SEQ ID NO: 406264 - DNA, 122 bp, Homo sapiens
ttgcctcctctgcagctcctcttgccgcctcgcctgctgttcactcatgcaatccttgaacgcctgcacctgtggctggcattgccgccagtcctggtgctgggccatgcactcctgcactg

SEQ ID NO: 406265 - DNA, 122 bp, Homo sapiens
ggcggagggcggagggcgcattgcctcatcctgtacattttactggaaatcggacgcatccggaggaggggctgggaggcggcccgggcaccgccaatggccgggccgggcgccggggaggt

SEQ ID NO: 406266 - DNA, 122 bp, Homo sapiens
aagtaaagaaaaatgaagatgcaaatgactgccctcacgacaagtccagactttgtggctcgaagctggctcatatcttgagctccaggtgcattcttattaccataatttaagtatttttt

SEQ ID NO: 406267 - DNA, 122 bp, Homo sapiens
cataccctctattctgaccggacagtggatccatcataagacgtagatcccaaatgggtccggccttctcaaaaaggggcaccaactcatcctcatataaatcccttggtattttgcctaca

SEQ ID NO: 406268 - DNA, 122 bp, Homo sapiens
ggacgcgtcccctaccctggcagtctttcagcccgccatgtgtagggcttgcagggtggccggctcctgatgccacagtgaggcctgggaggtcctttggttttatcctggcccataacctg

SEQ ID NO: 406269 - DNA, 122 bp, Homo sapiens
ggctgctgacagtgggtaccaggtcggcctttggccccggggtggggttggacaggcgggcgtctggtaggccctacgcgtaggcgaagggagcaggaagccggggacccgcctcatctcct

SEQ ID NO: 406270 - DNA, 122 bp, Homo sapiens
tggggtgtgtactcagggaaactcactcataaaacccaggacactcaggcaagaatgctccggcaaacattgctccaaaaaacaaaatgtccggtgaaaacatacatcatatctgcccaaaa

SEQ ID NO: 406271 - DNA, 122 bp, Homo sapiens
atctcaagccgtgagctgctcaggctttcaggcggagcaaagcactggcaccctgggagccggcagcgggtggccagggcgaggccaagccacatacctctgactcacccggtgtgcgccgg

SEQ ID NO: 406272 - DNA, 122 bp, Homo sapiens
tggaccttttggtgctttcccccctagtgtttgcctccattagtgttcatcccccattagcgcaattaggacagtcttcctctcatgcatcttatttctccctccagcctgggacttcctcg

SEQ ID NO: 406273 - DNA, 122 bp, Homo sapiens
cgggttcgacgcggcaacagctgctgttttctctcctggattcgtgtgagccgccaccctcgctaccatccctgtcctcccagaccacaccctgctctgggccttgccgggagccacctctt

SEQ ID NO: 406274 - DNA, 122 bp, Homo sapiens
cattcaggccccagagcacagtggctccacctttttggccagattgcggctggggtcaaccggggtcactcacgagtttacgatcttgaccgccacatcgtagccccacttcctatgttgcg

SEQ ID NO: 406275 - DNA, 122 bp, Homo sapiens
caatcagagagaagctgcggaagtcaagcggctgggtgggggcagccctggggcaggaagcggggctcctgtccccagcaggagcaggcaggttctggggcagcctggccctgtgcttggct

SEQ ID NO: 406276 - DNA, 122 bp, Homo sapiens
ccttccctgatccattctacccacaccattgatccatgtcccactgccctgagtttttatcgtaggctcactcttcctctgcagcagccaggcttgcagaacaggatctggaagtcttgtgg

SEQ ID NO: 406277 - DNA, 122 bp, Homo sapiens
gaatctgggcatggcttagctgggtgcctctggcttaaggtactcacacaactaacatcacggtgtcagccagggctgcagtcatttcaaggacctcctggggaggatccacttccagtctc

SEQ ID NO: 406278 - DNA, 122 bp, Homo sapiens
cccaacagcttgcgctggaaaatgcgctttgccagcgggcgccccgccttcgtccgggtacggaggggacactcccatctagcgcccagtgaggctaaagccgctgacagccccactaggaa

SEQ ID NO: 406279 - DNA, 122 bp, Homo sapiens
tgctgggattacaggcgtgagccaccgcacccggctgcttgagctcctttaaaggtgccacgatttatgcttggtgttatggacaaagaaaggaagtgattcccatcccagagaatctacca

SEQ ID NO: 406280 - DNA, 122 bp, Homo sapiens
gccaggaacagtgcactcaggaagactcagcccgaagcagatttgctgggttacctggggcgtctcctcccctctggggtgcagcctccttccctgaagagcgaggctgcttctagctctgg

SEQ ID NO: 406281 - DNA, 122 bp, Homo sapiens
gagtcatgctgagtttggggacatgcagtgaaggggcagtcgtgagctgtccttggtggtcggggccccaggtccgccctggaccccctgggccttcaggttctccctcgagctgttggtct

SEQ ID NO: 406282 - DNA, 122 bp, Homo sapiens
agaggtcttgctatgttgcccaggctggtctcaaactcctggcctcatgccatcttcctgcgtaagcttcccaaagcactgagattatatgccttagccactgtgcctggccccattgtgct

SEQ ID NO: 406283 - DNA, 122 bp, Homo sapiens
ggtagccctgccaccatgaccatcaccatagcaaccgcgtaagagcatgataggacagcacgggagccccaccgctcaggactgcaaacggatggaaaactgctggttcattagaggccatt

SEQ ID NO: 406284 - DNA, 122 bp, Homo sapiens
tcgctcactttttgaaggatcctgcccctcccttcccttcctcatcatacctggggacagcgacccagtcaccagctggtagagggatcgcgctgcctgccccagcgggctccggcacctgc

SEQ ID NO: 406285 - DNA, 122 bp, Homo sapiens
cagtgctacagctgctggttgtgacaattcttgtccttatcctagcacccagacaggcaccgggtgcctcttccacagctggaggcagagaggtgccaccaactcccgtactcgccttgaga

SEQ ID NO: 406286 - DNA, 122 bp, Homo sapiens
agccttcccctgctggctgtgctttggtctgctgctggccaggttcccgcagtgaccacacgtctcatatttgccagggtgggttaggttctgttcacatgtaaaattctcctgggcctact

SEQ ID NO: 406287 - DNA, 122 bp, Homo sapiens
cgggtggtgcagcccccgcggcccgagacccggggagggccgggggtactttctgcgaggcgccttccccgcggcttctgcccgcgccaaagcctggtggaatccagcgcagacctaaagca

SEQ ID NO: 406288 - DNA, 122 bp, Homo sapiens
ctgacgctgtggtggttttcgttcgcagcccagaacattgcggaagtttctctacccatgcggtgtctctatggtcgggtgggtggggccaggaggaagatggcggcgtccgcagctgccgc

SEQ ID NO: 406289 - DNA, 122 bp, Homo sapiens
aagaatcaagatgtgaaccaatgctagtcgcattcggccgggagctcggttcttgagacgcgagtctaccgaagctcccgccagttgagaggcgagtctgccgaagctcccggccgaaaaag

SEQ ID NO: 406290 - DNA, 122 bp, Homo sapiens
tgagagtagggaagtccagtatagcatccctgaaagtaatgacacagacaatctgctaagcgctgcaaaaatcatttggagtgtgatgtaaattggaaacagctggggtgggggtggtgacc

SEQ ID NO: 406291 - DNA, 122 bp, Homo sapiens
cagcaagaggagcaggagtggggcgcagcacaggctcctcatggcgccctcgggactgggcggccgccggaggcagttgggggcgcggggcccgggtgcgctgggtggagcgcggagcggcg

SEQ ID NO: 406292 - DNA, 122 bp, Homo sapiens
tgattgcaaaaacagcagcagttcttcattcctccttgtatacatacatgtccttagccacgtagttttatagctccccccagtacagaatttgtttcccaaaacttcaatctcattggcct

SEQ ID NO: 406293 - DNA, 122 bp, Homo sapiens
ccctttcccttttctgcccacaacctctgctccctgggggcgaagttctgtggtgctaggcggagatagtggtcaaggctgggaggaagggaggggtctgacccgggcccaagggcgagggg

SEQ ID NO: 406294 - DNA, 122 bp, Homo sapiens
tctcctgccataaggggcgtcaagccagaattcgagattccttcctccaggaggaagcttcgtggtccgtatctggtgctgggaaagatgcattgctttcctcgggtactggctgctcaagg

SEQ ID NO: 406295 - DNA, 122 bp, Homo sapiens
aggcaaatcctagctgctgctgggaacaaaaccaaaacttggggctctgaaagcagcccgcgacgggtgcgaaatcacagggtgaaaaaaggacctagaaataaactgagctctgcacacgc

SEQ ID NO: 406296 - DNA, 122 bp, Homo sapiens
tgagccttcacgagtgaggcggggaaggaggaggcagcggaggttgtatggccccatcaccggggcaattcagaaaggctgtttctataaacaaatccttaaacgtctggtaagaaatgagt

SEQ ID NO: 406297 - DNA, 122 bp, Homo sapiens
tgactggcacccccaaggcagactggacctctccaacctctgctcccacaaccctttgtgcgtactctaggtaatgcctgctacgagcacttctcaatgacatttcagggctgtgtggccat

SEQ ID NO: 406298 - DNA, 122 bp, Homo sapiens
cgggttcggggccccagctgggcacgggtcatgcgcgccgccgccgctcctgcgggcccccggcctgccccgcccccgcccccgcgccccacgtgggccccccccagcgcaaatttgtccgc

SEQ ID NO: 406299 - DNA, 122 bp, Homo sapiens
atgcaacgttctgaagggttattgctcaaaaacaagattttccttgtggtcaagactctgcgagcctcgaacacgatgaatccgctcgaatgggcttgggctttgcccgggtggcgcacgct

SEQ ID NO: 406300 - DNA, 122 bp, Homo sapiens
tgaacgtgaacgtgggcgtgctgggccacatcgacagcggcaagacggcgctggcgcgggcgctaagcaccacagcctccaccgccgcctttgacaagcagccgcagagccgcgagcgcggc

SEQ ID NO: 406301 - DNA, 122 bp, Homo sapiens
catacacactaaacactgatcattcagtttgtgttaggtgatgctgttgttgctgttttacgaggctgatttcacttcagaggactaggggtggtggagcctacataaggaaatgcccccca

SEQ ID NO: 406302 - DNA, 122 bp, Homo sapiens
tcagctggcaggtcctgctctgcaggcctcaccgcccagctcccgggagggggccgagggcgccctgagtgctgcgcgccttcccatgacgcagttcctgtgcctttaaatcccactcccgg

SEQ ID NO: 406303 - DNA, 122 bp, Homo sapiens
cgggatttctgggaaagtgacactcccggaagctaccgcctcttataagccacacatgggcggagttagccttccggcccgcagtcccactggctgacttcgctgcccgtcacgggaatgcg

SEQ ID NO: 406304 - DNA, 122 bp, Homo sapiens
tcttccccagagaggggggtcagtggagttaactgacctatccaggcttccttagttccccggtgggacagccaggatgaaagatagagttttctttctccaggtctccaagcgtcctgtct

SEQ ID NO: 406305 - DNA, 122 bp, Homo sapiens
accaggaagcgcggtgacctccaaagaacaggactgtcccaaatcaagcgggattaccaccgcccctctcccatttaacagctgaggacactgaggtctaatggattccaagtacttaaata

SEQ ID NO: 406306 - DNA, 122 bp, Homo sapiens
gccaggaaaggttcactgactttaaggacccatgtcattatattagtccaacaagataatcgcccccatttcaaggttcttaactttatcccctttgcaaagtcctttttgccatataaagt

SEQ ID NO: 406307 - DNA, 122 bp, Homo sapiens
tgcattgttcttactttgtgtagacacaggatctaggttatgttaaaacgagtactggaacgcagaagtcactaattgcccaaccaaaggatcagaattctattttatttttcacagtaact

SEQ ID NO: 406308 - DNA, 122 bp, Homo sapiens
tgtgagaaccagactggcctcagtttccccctctgcttccaggtctgggctctgaccgtgcggtcatctctctgtatcgtaatggtgagtcaggggctctccagaatcaaagccactcacag

SEQ ID NO: 406309 - DNA, 122 bp, Homo sapiens
gattacaggcatgagccaccgtacctggtctcatttaattctcacaaacctatgagatagcgtcacaattcccatcgacagatgagaaaaatgaggctcagggagagccatgatttgtccag

SEQ ID NO: 406310 - DNA, 122 bp, Homo sapiens
gcttcaggctctgcggacgggcggcgcggtggttagacgggtccccggagtccccagccccgcccccagtccccggtacccaccttgcgcagctccgccgcgtcccctgcccggcgaggcag

SEQ ID NO: 406311 - DNA, 122 bp, Homo sapiens
gcgtgagccggtcctggggttggtgggtagagagcggttctaaaacaggactgagtgctccgccccacttccctttcaccacctgggagaaggtggacccctcgtttcttcatggagctccg

SEQ ID NO: 406312 - DNA, 122 bp, Homo sapiens
tccctagggcttttcctgtactagaaagggaaactttgctttttttttttttttttgagacggagtcatactctgtcgcccagcctggtgtgtgtgcagtggcgcaatcccggctcactgaa

SEQ ID NO: 406313 - DNA, 122 bp, Homo sapiens
ctcacccacaaacttgactttccagacacggtgaggaaggaggaggctgtcgggaccaaacgagctcatcttagcacacatctgcccaaagacagacttggtgccgtcggggccggccagcc

SEQ ID NO: 406314 - DNA, 122 bp, Homo sapiens
tggctggtggaaaccacagggtggcccagggaccctggtctcgtgggggctcaggtgggccggggtttgttcttgccttccatcagagtgtgttaaacaggcctcaggccttcctgccatca

SEQ ID NO: 406315 - DNA, 122 bp, Homo sapiens
aggaaccgaaaacccacatgcacccaagaacaggtgtggacggggcggcacagaagtccacgggagggggcgacacgggtgctctttcacgggaatcttgttgggacagcattccttgggga

SEQ ID NO: 406316 - DNA, 122 bp, Homo sapiens
gggaggagctacttcctagggtctcttcccagcatcacagccctacatcccagcgaccaacggtgttatactcctgggggccaaagaggacccggattgctttgttttgtgccatgtgagta

SEQ ID NO: 406317 - DNA, 122 bp, Homo sapiens
ccagcctgcaggaagcagttcacgcgaccgctcggaagaccgcggaggaagcgaggagcacgcacagccttctgggaaagcagcgtggggccgcctcacgctcttcctggctctccaattag

SEQ ID NO: 406318 - DNA, 122 bp, Homo sapiens
atttgaggaggcctccatgatgtctaggggccatgggctctgacggtataattgcctgcgcgtgggaaaggggcatcctgaacagcgtgtccaaagccattgcccccgagaacagggaagct

SEQ ID NO: 406319 - DNA, 122 bp, Homo sapiens
ggctgagaggagggagtgtggcatcagaacagagtccgccggggctctggcttcctcctccgggatcaagggaaatgtgcgaagcacagtgcagaatcccgggcggctcatgcccactcact

SEQ ID NO: 406320 - DNA, 122 bp, Homo sapiens
tgactttttctgtcttcactttagcgctggctccgcccctagccttggcccgcctcagcgcggactctcagtctctgcgcctgccacggcctcgtcccgctcagccctggccctgcccctgg

SEQ ID NO: 406321 - DNA, 122 bp, Homo sapiens
ctccggctggcgggtcccggggaattctgggaagtggagtccaaacattcggtggagtcgcggacacttccgctcggggactgaggttgctgcagtttttccgcgatagtttggggcagttc

SEQ ID NO: 406322 - DNA, 122 bp, Homo sapiens
cctggcggtgtgacggggatgctgcttggggagttgcagatgacggcctcgccctccacgcgggcggggtgtggcggcgactccccaaaaaggcacagcaactcgtcctcctcgctcagggc

SEQ ID NO: 406323 - DNA, 122 bp, Homo sapiens
tcctctgcaacttgttcttctatcccagcattctcgtattgtgcagtgtgtggtatatgacgacttcctgtctgaacagcagaattttcaacccttgggagagaaaaggagagacagggaac

SEQ ID NO: 406324 - DNA, 122 bp, Homo sapiens
agcttgtgcaaccgggaggtggaggcggagggagggcgcgagcggcccggccgggaggtgcggaagttcgccgcagcagctcattggcgggcagcgccgctttcatcatttctcggaaaagt

SEQ ID NO: 406325 - DNA, 122 bp, Homo sapiens
aggcaagtggcagaggttgaatttagacccattcctgtccaaatgctgagtttatgtcatcgtcccgagaccataactttaaagatgtaagatagtgggaaaagagttgatttcaaagcacc

SEQ ID NO: 406326 - DNA, 122 bp, Homo sapiens
ggagactctgacagagaatctgttccatgccttttgggttataatgcttctgttccaaggcgttccttggtttgcaaatctatctctccaatttctgccttcacggccttcttccctgtgtg

SEQ ID NO: 406327 - DNA, 122 bp, Homo sapiens
ctcgctctgggcgtggaaagggctctggcgctacccgaggtacagaagcaagtttgaggtcgggctgaagcagggtcgctggccagccgtgcgtcgcgctcgccagcggctcccccttctcc

SEQ ID NO: 406328 - DNA, 122 bp, Homo sapiens
gaactaagccagtttcaaaccttcatttgcctaaagaaacttatgtgggaacctggacagcgaacttttgctataaaacccaagtcttccctttgttttctggaatgcacctttgttttgca

SEQ ID NO: 406329 - DNA, 122 bp, Homo sapiens
gcccatggtactgccaaggcccccccgcgcagggctcacagcctctctgtcccccagcagcgaccgagggagagctccccacgcacgagcaggtcttcctgcagccccccacctcctctaag

SEQ ID NO: 406330 - DNA, 122 bp, Homo sapiens
tctccatttctagaaaaagctacgcatcttcttcttcctcgacttctcttttctccctcccggtgaggatttcaaagggtatgtgagaaaagaaccttaagccaggtctccccgcggcgtcc

SEQ ID NO: 406331 - DNA, 122 bp, Homo sapiens
ccaagggagccccttgtggccaactctagctccataaactggaagggtgtggcaggcagccggagtccagtggcccacagtgtctctcctgggctggcaggcctgtgccccggccacctgcc

SEQ ID NO: 406332 - DNA, 122 bp, Homo sapiens
cggactccatgtccctcatgagacgggacatcctgatccttgctccagggggctctacaccgccccggattcaggctcagtggcccatccgcggggttcgcttcttcgcgtgctgcaggatc

SEQ ID NO: 406333 - DNA, 122 bp, Homo sapiens
tatttcctgcagaagtctttttctttgtaatgcaacaagtgctacacagctcagatccaacgggacacggggaaagaggctgtagtgcacctagccctgctgagggagacccttgccttgcc

SEQ ID NO: 406334 - DNA, 122 bp, Homo sapiens
tgctggtgatgagagtgttgtggcttgggcaggtggaggcggtggaggcggagatgagggcggtgagtctacagttgttgattctgctatcactgctggtaatggtgctgcatgagtaggtg

SEQ ID NO: 406335 - DNA, 122 bp, Homo sapiens
atcattatggcattaatgctggcgggggcaggaacagacccaagacaagcacaggcctgtcgggtgttggctcctgtccctatcactcatctcatcatctcccgtcttcctgattctttctc

SEQ ID NO: 406336 - DNA, 122 bp, Homo sapiens
gaagagatggcagcgggggagacgcagctctacgccaaggtctccaacaagctcaagagccgcagcagcccctcgctcctggagcccctcctggccatgggcttcccggtgcacaccgcgtg

SEQ ID NO: 406337 - DNA, 122 bp, Homo sapiens
ctcacaatcattagaaggacacgtatgttttaaaaaaattgcagggttttaaagtagcttcgtagaaactaaaagtagaaatataatttattagctggaactgccacatggagatctcctgt

SEQ ID NO: 406338 - DNA, 122 bp, Homo sapiens
gaagcacgttctggtccagcaacaagtagatgtcagttggttagggtaggagttggcacccgttcggaaataggagaacctgagagtgcagtcctgcccagggcacaactggaaggctgtgg

SEQ ID NO: 406339 - DNA, 122 bp, Homo sapiens
aattctcattggttgggaggggatctcacggccccgctgccgtaattacctgctgtgatccgaattctcattggttgggaaggggatctctcgccccgctgccgtaattacctgctgtgatc

SEQ ID NO: 406340 - DNA, 122 bp, Homo sapiens
aaaacgctggggttcctccagttccttctgggagaagcagctacagccatgttgccaaggcgcctttataaaaagccatcacacaatgacaaccccacagactgattccctctccagtggca

SEQ ID NO: 406341 - DNA, 122 bp, Homo sapiens
ccgggccccttcggcattccgcgccgccgccaggccgcgtcctcaggccattgtctacaacgagttccaatctgcatgttgggagaggccgatcagaacgccccgaggctaaagaagcaggg

SEQ ID NO: 406342 - DNA, 122 bp, Homo sapiens
gtcagccttgcttggaattctggcaggttccccggggtgtttcagtggacaggaggcccccgtgccgtggctgagtcagcctgggtaccccagtcaccagcagggccacccttgatgacagg

SEQ ID NO: 406343 - DNA, 122 bp, Homo sapiens
aggccagtgcatccacacatgcgtgtgcgacacaccactaggccagtgcgtccacacacacgtgcaaaattgcaccattaggccagcatgtccacatgcatatgagacactgcaccattaag

SEQ ID NO: 406344 - DNA, 122 bp, Homo sapiens
agcagccctcagacctcagtggtgtagcagagaaattccagatccagcaaatagcacttgcgctaagaaatatcccattgcagaggtaaggtacaattcctctgtggtcagtcagtggagtt

SEQ ID NO: 406345 - DNA, 122 bp, Homo sapiens
ccagtgccagtactgccgcctcaaaaagtgcctcaaagtgggcatgagacgggaaggtatcggcctctcatttctccttccctcgtcctgggtcccggggtcctgggtacgtttggctagcc

SEQ ID NO: 406346 - DNA, 122 bp, Homo sapiens
gatgtgtagcaaaacggggtgcggagtggagcccgcagagagggaaccaggccaccaccacgtggtcactgtagggtccccctgcaggagcccctgcaccccagcctctcaaggtcatttgg

SEQ ID NO: 406347 - DNA, 122 bp, Homo sapiens
ttctccgcctcgggcctgttgggcggggccggctaaggtgcgcgtgctcgctggtcctaacggttctgttgggcgtttctgctgagaggcgggaggggctgagagtctgtgcgaaggtaggt

SEQ ID NO: 406348 - DNA, 122 bp, Homo sapiens
ccagccagttgtagcttttaaattgaggtataatatgtatatagtaaaactcgtccttttcgagtgtacagttttgtgagtttttacaatgtacaagttgtgtaaccactaccccagtctca

SEQ ID NO: 406349 - DNA, 122 bp, Homo sapiens
cttaattgtgaaagaattttgtcaagcagtaaaccgactgggagaaattgaaacagaaggcgaagtgaaggatcacagtgagggataaggtccaaattcatcccgcttgtggatatcctagt

SEQ ID NO: 406350 - DNA, 122 bp, Homo sapiens
tgagccggtgaaggttttattaacctcatctcgcaggcaaggaaactgagacccaggggacgtaaggggacttgcctgaggcttcccggccattagggagagagctggcccttgatcctgcc

SEQ ID NO: 406351 - DNA, 122 bp, Homo sapiens
cgtcagagcaggatttctggcttcgtgcatgagctccgtcactgggaggttttgggaggtcgtgggagcagtgactcacacagtgactcacaaaaacccgcctgccccagaaggtagctttc

SEQ ID NO: 406352 - DNA, 122 bp, Homo sapiens
tttagtctaagaaaggtgtgagctaaatctctcagattaaagaaggaagaaactagaaaacgagagtagttgaatcggaaatggatctgggaaatacaaacttaaataagcatttaaataat

SEQ ID NO: 406353 - DNA, 122 bp, Homo sapiens
atctcaccagtctgacagggcaacctccaagattcacaacccaggaaaagtactgctttgcgtaagtttaatcaagaccagagcagagacaggacacaaagtcaaaagaactcagtcagctc

SEQ ID NO: 406354 - DNA, 122 bp, Homo sapiens
cccagaaaacaggcatccgcacacagactcagtttccttgtaggcaactcccgggcgttgcgagtcacaaccggcattctcgcgccgtgagagagaactgcgcagctgctgactggcgggcc

SEQ ID NO: 406355 - DNA, 122 bp, Homo sapiens
gtggtgtgtgcctgtagtcccagctacccggtaggctgaggtgggaggatcaccagagcccggaaggttgagattgcagtgagccgtgatcatggcagtgcactccgacctggatggcagag

SEQ ID NO: 406356 - DNA, 122 bp, Homo sapiens
tgtgagccgcggtctcatctctgactagtccacgagagctgaggcttagggcagggcctgcgacacagctagatggtggtgtgttacagaaacgacaaggcaggggtttctgtcaccgggag

SEQ ID NO: 406357 - DNA, 122 bp, Homo sapiens
ccgccgatggtccccggagctcctgcccccaggtaggaggtctggcccttgaatagagggcgggggggttgtgtgtgcgggtgtccagttagggagtgcgtgttggaagtgggcgccgggac

SEQ ID NO: 406358 - DNA, 122 bp, Homo sapiens
ctcatgtgacctgcccacctcggcctcccaaattgcagggattacaggcatgagccaccacgcctagccaaggaagagtgtttctgacatagggaacagcatagagtgcagacccggagcca

SEQ ID NO: 406359 - DNA, 122 bp, Homo sapiens
ccggggcgagaagcccgagaagacaagcgagggagcagaagcccacggggcaacagcgtgcgccgccgacctcaggctctagctcccggagcgtgttttcaaatagcctcgtcctcacgcgg

SEQ ID NO: 406360 - DNA, 122 bp, Homo sapiens
ggcagagcatgcgagtggcgctgcccgggcagggtgatgccagagaaggccctgcgcccacgcagacgtgccggggacgagggagcaggtacctgtgctcacggaggtccccaggctctggc

SEQ ID NO: 406361 - DNA, 122 bp, Homo sapiens
ggtagcaagagtccagtgtgggccgagcggaaagcggggcattgaggtgaaaggaggagccgtgcctaccgggggaactggatatgcacagggcatgatctgaactgtcagcgaaaatgagg

SEQ ID NO: 406362 - DNA, 122 bp, Homo sapiens
ccccatgcccggcaggagccccgagtggtgcaggaagggctccccgatacgaggggaccccgatctggggccgacgccagggaagcaccggagcccaggcccgctgtgctcatagcccagac

SEQ ID NO: 406363 - DNA, 122 bp, Homo sapiens
cctggttaggttgacaacccaggtttaaacagatgagctgctcacaagcagaaacagaaccgaagccctcaacagtgaaccagtggacagtcgagggcttccaaccctgtgacctcaggctt

SEQ ID NO: 406364 - DNA, 122 bp, Homo sapiens
cttcccgcgtaaagtccccttctgaaccccgaggtggaaagccctgacctccctgagccccgggccctgggcttacccggtaggtgctctccgtgagccggttcacctcctcgggcccccgg

SEQ ID NO: 406365 - DNA, 122 bp, Homo sapiens
cctgaaaatcttcagttgaagtacaagttgtggcatgatgtcaaagaggcattcttttcacggagaaggcatattaaattatgctagtgctgactgcgcctccaaggactgttgatagatgc

SEQ ID NO: 406366 - DNA, 122 bp, Homo sapiens
caaccagaatggaagatgcactgacacttgctcaagtaccacactgccaacctgctgccccgacccaagctgcccaatgcctaacaaaacttctctactctctccgatagccccttagcgtg

SEQ ID NO: 406367 - DNA, 122 bp, Homo sapiens
ttgttaaaacacgaaccaacaagcctcacaccagtttctgattcaactggtctggaatggcgcttaagaatgcgcatgtccaacgagttccctggagatgctggtgtagttggcctggccac

SEQ ID NO: 406368 - DNA, 122 bp, Homo sapiens
ggaaactacatcagcgccagtgcgagcgcccacgagtccggtggacggatgagaaacggccggggggcagcctgagtcccagttcccgccgtggcaatggccaatttcccacccgtggacgc

SEQ ID NO: 406369 - DNA, 122 bp, Homo sapiens
gcatcttccaagagcgattttcccgcatccctccgggcttgggggctgcagggacccagccggcacactccgcacgccctgcggatgactcactgcgtttgcactgccgcaggcgggctcgg

SEQ ID NO: 406370 - DNA, 122 bp, Homo sapiens
tggggacgctggtgtaggggtctttccttcctcctgaggtctgcctcccatgcctggatccggtgccctctcccttctcaggaccctgttattcccaccctctccacacttcttcccattgg

SEQ ID NO: 406371 - DNA, 122 bp, Homo sapiens
ttgcgctcgggcgcgctctgaatggccatggcgatgagcgccgaatacgagtagggcggccgcaccatcttcatcaggtcctcgcggctggccatggacagccagcccagctccccgggccc

SEQ ID NO: 406372 - DNA, 122 bp, Homo sapiens
agagctcctatagggcaagacactgtttctcatatatttctggatccttggagcttagctcggagcttggcatacatgcccagcatgaacttttctgaataaaataatttcaaatgctgtat

SEQ ID NO: 406373 - DNA, 122 bp, Homo sapiens
atattgaagcacaaactcttgcagatcacctcattggttacacagaccaggccacatacacggtgcctcagaaatttgtaaacaggaaggcgtcgggtgacaagggatggggagcgttggaa

SEQ ID NO: 406374 - DNA, 122 bp, Homo sapiens
ggctgaggtgggaggatcacctgagccctgggaggtaaagactgcaatgagccacgataacgccactgcactccaccctgggcgacagaatgacacctgtcaaaaaaaaaaatccaattaac

SEQ ID NO: 406375 - DNA, 122 bp, Homo sapiens
taaaataatagaagaactatctgctgctccccctcactgtgctggtttgtggtggggagccgagacagctgcgtttgtgccttgatcagcaaccggcctccacaggtcacacgtggggctga

SEQ ID NO: 406376 - DNA, 122 bp, Homo sapiens
ttccagaaagcctctagactttggagaggacagcgcctttaggtctcctgccagaatttccggctcaaggcagggccgaacacaagatgtggtcattgtttacctgtctgcctttcccacag

SEQ ID NO: 406377 - DNA, 122 bp, Homo sapiens
ggagcctccctccttgtacctagggcagctgccttggggagttacacagatgtagacagacgtgagaatggagaatcagccccgcatacacccatccttactataacagtttctcagtaaca

SEQ ID NO: 406378 - DNA, 122 bp, Homo sapiens
ccgagaccttgagcatctgcgaggccatgaagttgacctgcgtgttgtacgtggcctgcacgctgcgccggatacgcagcatttccttgatggtgtcctcattgccatgccggacctcaaag

SEQ ID NO: 406379 - DNA, 122 bp, Homo sapiens
cggcgccgccggcagcccggcagtgctgcgagaggccgtggaggccgtggtgaggagcttcgccaagcacacgcagggctatggccgaggtgagtctgcgggtctggcctcctgcgcgacac

SEQ ID NO: 406380 - DNA, 122 bp, Homo sapiens
ctccggggggccgagaaggggctttcccggccctgagccctgctggcaggcgaggtgtcgcgaccggtcccaggtgggtcgggcgcggagagaagccgcaaccagagccgccgccacggtga

SEQ ID NO: 406381 - DNA, 122 bp, Homo sapiens
tgggacagggggggcggggcgatgcggaggcggagcggggcgatgcgatgcggggcggagcggggcggggcggcgacgcgcggcgcggtgcggcgcgcggccgacgtggcagccgcaggagc

SEQ ID NO: 406382 - DNA, 122 bp, Homo sapiens
aatcgtaggcggggcgcgggtccagagctccgattggccagagtcggagtaaacatccggcgggacggggcggggccggaagtggaagtggaagtagaaggcggtggctgaggcggttccgg

SEQ ID NO: 406383 - DNA, 122 bp, Homo sapiens
taaacagctccaccgagaacagtgatgaaggacttaaagtgagagatggaaaaggaataccgtttactgcaacacttgcgtcatctagtgtgaactctgcagaggagcacgtagccagcact

SEQ ID NO: 406384 - DNA, 122 bp, Homo sapiens
acagaacacacacatacaacatagatatatacacgtaatgacgagaggaaaaatgtgtttcgttgtaatttctggtagccattgaactgacatggaaaaatgagtccaatcatcattaaggg

SEQ ID NO: 406385 - DNA, 122 bp, Homo sapiens
atcactgagcagctctctccctccccactcctagctgctccaggggcagcaggggaggcgcgtgacagagcaaccctgagaggccaactcgtggaaccataactgggattcccgctcgcgcc

SEQ ID NO: 406386 - DNA, 122 bp, Homo sapiens
tcgtgatccgcccgcctcggcctcccaaagtgctgggattacaggcgtgaccaccgcgcccggcctgtttgatgggttttgtgaacaacgtcataatccaaatataaaacatttccgttgcc

SEQ ID NO: 406387 - DNA, 122 bp, Homo sapiens
cccggcatttgcagatgaggaggatggggccagagcgaagagggacaactgtcattttttcgagtaacggcacataccaggcgctttgcctaagatcgcatttaatcgtcacagcactgcta

SEQ ID NO: 406388 - DNA, 122 bp, Homo sapiens
atcgcaagctctggtttctcttcaaaacgaatacatcttttaccttttactgcagattttcgtggagaggaacagttgttagtaaccttttttgtctgtttgtttttaggtcctgcttgggc

SEQ ID NO: 406389 - DNA, 122 bp, Homo sapiens
atctctgaatcatttgattttggagccagacctggatgacctgctggcttcagcgtggatcgatgccgaggtaacagagtttcgaaccaaaaaagcccaggaggcgcttattcgtactgtct

SEQ ID NO: 406390 - DNA, 122 bp, Homo sapiens
ggccacgcttgtcttctccgagggatgggaatttccacccagctggaagtaataagcgcccgaggctcgggcctcactgtctccacccccgctttccctttcctctgaccaagtgacaactg

SEQ ID NO: 406391 - DNA, 122 bp, Homo sapiens
gcagccacctccccaccgcgcagccacctccccaccgcacacccccaaacgccccacctccgaccgcaccccacttccccgcctgggcccccggaccttgggagcatcacctccttaacccc

SEQ ID NO: 406392 - DNA, 122 bp, Homo sapiens
ccaaaccttgtagggacaggaaggtaacgtgaatgtatgaatcggactaaatgtggatagcggggaagagtgggttctgtggaaaactagaaagaatatgcttctaaggatgttcaaatttg

SEQ ID NO: 406393 - DNA, 122 bp, Homo sapiens
tgcgcgtcccacccccatctccgcccaccaggagccaggccagcagggaccgcgagggggcggccaggttattcacgggagtggggagaccccttaaagcgccctcagggaccggccacagt

SEQ ID NO: 406394 - DNA, 122 bp, Homo sapiens
cctccagggcgctttgggatcgggctgctccgggccagtgctcgcgctggggacctgcgacgcctcagcccctgcccagactgcgccgcccgccgcggccacacctcccagtccctgggaaa

SEQ ID NO: 406395 - DNA, 122 bp, Homo sapiens
gctgtagaatgcagtggctgtggcacaggatggggagggctaggttggctggggaacgatcgggcagggcttgaatgccaagttaagggaatctggtcagtagttcccaaatgaatttctga

SEQ ID NO: 406396 - DNA, 122 bp, Homo sapiens
gctcagctaaatcccaatatattagccttattacaacacattccaagagtctgaaaacaccggctggaaatcactgggctagtctaatctcaccgggcaaagttgcttgtccaagtgaagta

SEQ ID NO: 406397 - DNA, 122 bp, Homo sapiens
cgtggagatcaaccatgaacgggctctgctgggtggctgggtgcagcattcgggggctcccgccggcaggagccgaggctcggcgctcctctacggggaggtgtggaggtcgggacggcggc

SEQ ID NO: 406398 - DNA, 122 bp, Homo sapiens
gccgcgcagagcccggattccgcgactgccggggcaccgcaggttttggactcgctgaagcggtgagctctgcctttgccctatatgccgcgctctcgcccgtgctctggggcagttggcag

SEQ ID NO: 406399 - DNA, 122 bp, Homo sapiens
ctattggattagtggccttcagggatgagctcagccagatcggctttcagctgcagcctccgggccggccgggaaggcggggagcgggcggcggcggcggaggagggggaggcggcggcggc

SEQ ID NO: 406400 - DNA, 122 bp, Homo sapiens
aacttggtgaaatcccgtttctactaaaatttaaaacaattagccaggagtggtggcacacgcctgtagtcccagctactccggaggttgaggcacaagaattgcttgaacccggtagacag

SEQ ID NO: 406401 - DNA, 122 bp, Homo sapiens
cctccgggcgccgggctcagggcccagtggccagatggttttctttgctgcagggagtgccggctgcgggggtaggcctgggagggctcatgcagctgctcttgggtttctctgctgttgtt

SEQ ID NO: 406402 - DNA, 122 bp, Homo sapiens
cgatttgggtttcttcttgggcgcgaggttgtcgtagaaaatcttggcttcctcccagaccggggccgcagcggtctccgctcctggcccgggctcgcggggctcctggggctcccggggct

SEQ ID NO: 406403 - DNA, 122 bp, Homo sapiens
tgagctactgtgaacctacaccatgcagcagaacatgtctgaagaaaaatacaaagtcatcgggcttgcctcgccatgaacttacatggccctatactgtatacataatgtacttattatgt

SEQ ID NO: 406404 - DNA, 122 bp, Homo sapiens
gctttttctgtcaggaactgcttagggtgaccaaccatcccagtttgctcaggactttcccgatgttagcactgaaagtcctgaaaaacgactcagtccctggcaaactgggacagtgctca

SEQ ID NO: 406405 - DNA, 122 bp, Homo sapiens
tcctggggtaaaagtaccacctttggatcaaggcttgctggctgcggctcagaggatctgcgcagaggaagcagtgtgtcctcaggagatcctgaaggaggggaggggggactcttcctact

SEQ ID NO: 406406 - DNA, 122 bp, Homo sapiens
catccaacaaaactacccaggggagacagcccagtcgctcccctttggattcccgcggggcgctcactcgggcactttaacaaacttggcttgaagtccccatcctgaggcccgcaggactc

SEQ ID NO: 406407 - DNA, 122 bp, Homo sapiens
cttctttctgtgccatctcagatttattcccaggttcccaaatttcatcattagctggtacgtcccagaatctgcccagagaaaatctgaatagatttttctctgtcctggagatgcagcct

SEQ ID NO: 406408 - DNA, 122 bp, Homo sapiens
gtcctcggtatatttcaaaggtccagccagcaggattccatgtgatttcttcctttctaccgggctttggggaacatcagaagaggtcactgaggaagtgaggtcaccagaggctcatgggg

SEQ ID NO: 406409 - DNA, 122 bp, Homo sapiens
gcacctttcttaggaagcgacacctgtcccgcacacacaggaagcggaggacaaactccccggtgaaccagctaatgcacacatactccaggatttccagcagctgcaggtccagccagctt

SEQ ID NO: 406410 - DNA, 122 bp, Homo sapiens
aagtcacagaaagggcgacttggctactcagagagatttatcctctccctggctgtacaccgaggcctgccaacacgactttaaattacacctcctaaactctgcctcacttggcactttct

SEQ ID NO: 406411 - DNA, 122 bp, Homo sapiens
ggttgtactacctatgttgtctggatatagccattacatactatattcttttgcttgtagcgctcacttaggtttctgtgtgtgtgatctcacttagttttgattgtagcaatatgttgtta

SEQ ID NO: 406412 - DNA, 122 bp, Homo sapiens
aaaacaaaggcggtgccaaaaatcaagaggcttccttggggatgaagacccccgaggccccggcccattctgaaaagccccggcgaaggcagcacgctgcagacacctcggaggccaggccc

SEQ ID NO: 406413 - DNA, 122 bp, Homo sapiens
aagatgatgtcactgatgccgcataccaagtggtggccaactttacattacatcctctcacggtttgccccaactgactgtaacgcctaatctgacccattctgttaccttgctcctccttg

SEQ ID NO: 406414 - DNA, 122 bp, Homo sapiens
tgaatgggtgcgtggggtctggcctcttccaggagagacttcctctctctccctgtggggcggctcccctagagccgagagccgagcgcgttgggaggctggcctttgctagaggagtcggt

SEQ ID NO: 406415 - DNA, 122 bp, Homo sapiens
gggattcccctttggccatctctcattctttcaattctaaagatggagactggcgaacggcgatggggtctgcggtgggcggtgtttcgtcgcgacagactctaggaaatttcacgatagaa

SEQ ID NO: 406416 - DNA, 122 bp, Homo sapiens
agtaaaacgtgcagcctcacgggtggtgctgaggctgttccgagaggcaaagaggagttccgggatttgagggttccagcaggaaggggctcttaaggcctatgcattgaaataatcagaga

SEQ ID NO: 406417 - DNA, 122 bp, Homo sapiens
ctggccggtccccgccacgcaggccggtccccgccacgcaggccggtcggtgagccacttcgcaccgccacagccctagcatcgggccaccagccggggtgaagaaagtcacggcggagccc

SEQ ID NO: 406418 - DNA, 122 bp, Homo sapiens
tggccttgcgctatgccctgtgcttccgtgggacgtgtctaggaacgggtgggctttctgcgggaggcgggggtcgggcagggctgctggtctggagtgcttgtgctctcttggtagctttt

SEQ ID NO: 406419 - DNA, 122 bp, Homo sapiens
tctgcccgtccgtgagtgaccgccccgtctgcccgtccgtgggtgaccgccccgtctgcccgtccgtgggtgaccgccccgtctgcccatccaccccaaaacagaaattgcttgctaggctc

SEQ ID NO: 406420 - DNA, 122 bp, Homo sapiens
cagatctggttcagtcctcttgacttggggtgctttaatatagctcctttaagctgtggacgcttccttggtgacaagggtgtatgggggggtggacctgctgccacttttgagtccaaagg

SEQ ID NO: 406421 - DNA, 122 bp, Homo sapiens
tggccttttcttggagagctggagatggaggttggttctgtcctgatgggggcaggaggacgggtaatggaggctgccatgctcagtgaagccccatgggggcagccatgctttgtggtttg

SEQ ID NO: 406422 - DNA, 122 bp, Homo sapiens
cagaagactgtacccatctaacagaacgcaccggtcaaatgcttgagaatacccgggcagcgggcaggggagctctttgctcagagcaaagcctgttccggctgggaacttggcactatgga

SEQ ID NO: 406423 - DNA, 122 bp, Homo sapiens
ggtatattcctctggggagggagacctgggtgcagacatttattattaattttcttaaaacgggtgaaagggctcctgataataaagcatcatgtagaaggcctttgtctttcctactgaac

SEQ ID NO: 406424 - DNA, 122 bp, Homo sapiens
gcgtttgacggcggcgggggcgtggcggggttttatctgtgtattgacgagagccgggcgcggagggaaagagtggggcttggccaatgggagcgccgtgagcttcgtagcaacggaggagt

SEQ ID NO: 406425 - DNA, 122 bp, Homo sapiens
cccggccagccacaggcccctacccggtcccccgcggcgccgccaggagccgcctcccggcgccggaccagggtcccccagtgctcgatcctggggccccgaccttgatgccaggcccccag

SEQ ID NO: 406426 - DNA, 122 bp, Homo sapiens
ctagactgtaggaaaggactttttaaaattgcttctttcccagattagcagtagtttagccgttggtgattggcaactaaggataggcctcatgttctattcttaacattgaagatgaggtc

SEQ ID NO: 406427 - DNA, 122 bp, Homo sapiens
atgaagggaggtggtgggtatagactaacaagattatcagacactgtaaaacaaacagcccgagttgtgtagaaagaagtgcaaataaggaaacaattcataaaccacttagacaaggttgc

SEQ ID NO: 406428 - DNA, 122 bp, Homo sapiens
ccctcctcccggcgagtctccgcccgccccgtcctggaggtggggagaaggagggcggggcgggggggacggaaactctccccgccaaatcctggccccaggcctggggacactcgcggcgg

SEQ ID NO: 406429 - DNA, 122 bp, Homo sapiens
agtgtcacagctgggcaaggctgggcataaacgcagggaagctggggctacttaggtctgcgtcatctctccccttccatccctgctgcctcttctcccactatagttactcgaaaagaact

SEQ ID NO: 406430 - DNA, 122 bp, Homo sapiens
aggctgaggcaggagaatatcttgaacccgggaagcagaggttgcagtgagccgagatctcgccactgcactccagcgttggtgacagggcgagtctccatctcaaaaaaaaaaaaaaaaaa

SEQ ID NO: 406431 - DNA, 122 bp, Homo sapiens
ggaggggactcgtggtcccgggggtctcctggtatctgtcgtggtcctgagggccctgcacgaagcacagcggacagcagcggtgctgggggtgagccagcaaggccctccccgacccccgc

SEQ ID NO: 406432 - DNA, 122 bp, Homo sapiens
aggtgagtaagtgtttgtgctctggatccagtttggctgggtttgaatccagctacaccacgtgtgtgtgtgtgtgtgtgtgtgtgtgtgtgtgtgtgtgagggagatagagagagagagag

SEQ ID NO: 406433 - DNA, 122 bp, Homo sapiens
aaaacacacaaagccctgttcaacaacaaattgcaaaaaagccagtttgaaatcatcaggcgcgctggagggaaggcagggaaagcacatcattagaacatccttttgggaactgggtacca

SEQ ID NO: 406434 - DNA, 122 bp, Homo sapiens
tccgggcatctaattttgtattaataattctccttttttctttttctcaaagagtaccctcgaactgtatgacaatcaagccctacccaaatgccagtatcagtacttactaagcatactgc

SEQ ID NO: 406435 - DNA, 122 bp, Homo sapiens
tcctcttaactccccttcttcatgacaatctgaaggaagaagtcatagactccagcccagcgtcaccagctgatcctgagccagacccggggtgactagtcagctgctcacagagctcaagc

SEQ ID NO: 406436 - DNA, 122 bp, Homo sapiens
cgcgaccaccgtgcccaccacaagttttcagaaacacatgctgatcctcataattcctgacgtggctttttcttctctcacgtgggttggctgcttgtgcgcaaacacccaactgtcaaaga

SEQ ID NO: 406437 - DNA, 122 bp, Homo sapiens
agtgggtaggagatcctggtatgtattctaggtgagtgtgggccagacaatggtgcacaccgtggcgccctgggccatgcaatccagtgtgtttggaatagagaaatggaatatgagtaggt

SEQ ID NO: 406438 - DNA, 122 bp, Homo sapiens
ctggcggagggttgaggcaaaaacgcggcctggctcaggaggactttggaggtggaattgcgaatggcacatgaacagagccatggaggaggattcctaatcaaacttagccattgatcgat

SEQ ID NO: 406439 - DNA, 122 bp, Homo sapiens
agaaactgcagcactagtcacaagctgactgttcagagaaatgcacggggagacagtgcccgcatgacgggagcagcccatcagctgacccgttcattcaaaaaactccacgtgtagagaca

SEQ ID NO: 406440 - DNA, 122 bp, Homo sapiens
ggggtggggtgggggtccggggatgctccctctatgagagaattgggtaaacatggcgaccgcggcgcccatttgcacacgctacacaaatgcatcgcattcccggttgtttgcagaaaatt

SEQ ID NO: 406441 - DNA, 122 bp, Homo sapiens
aaataaattaatgaaatagtctggccatttgactaaccagttctacaaatttcacatatccgtcactcagatgagcatataccaagtcagaggaaacaaaacatgcacatatacaaaagtag

SEQ ID NO: 406442 - DNA, 122 bp, Homo sapiens
tgcaccttgaagaggagacaaggatcgaatcaggccgcccagctacttaaatgaccatgccgtgagtgaaggagggccctggctagctttcccccatcgcaccaggtttgccaggtggtcag

SEQ ID NO: 406443 - DNA, 122 bp, Homo sapiens
gtagtctgaacactgggttggcggggccggctatccatcctgcagaaccccccaggcagacgctggggccaccaggccaggccgtgcctcagcacctctgagcagccaaggaaaccaccact

SEQ ID NO: 406444 - DNA, 122 bp, Homo sapiens
ccttctcagcatcatgacttaatccactctaatgaggtgagctcaactgccaggagccagcggccacacagctccctccggccccaagtgggctttgtaagaagcctgaaaagaagggactt

SEQ ID NO: 406445 - DNA, 122 bp, Homo sapiens
tgggggcgcccaggccacgccaacgcgggcgcagggctgagtatgcgggaagccacgcagcgactgggcgtactcctaagcttctggaaaggcattctcacgccctgctcctcctaccctcc

SEQ ID NO: 406446 - DNA, 122 bp, Homo sapiens
cgacaagggacccccgctgcagcttggaaggcatacccctccagtcagcatcccccactccgcctgtcaggacctgctaggagaaggtccaccaggaggcagtttctcaaactacccacccg

SEQ ID NO: 406447 - DNA, 122 bp, Homo sapiens
ggaaagagagaacgggctggggtgggcggggaaagcctcaagcgagtggcgccgccgtgacgtcacatgggtgcgacgcggcgctctaccacgatccggacttctctgtggtgagttggacg

SEQ ID NO: 406448 - DNA, 122 bp, Homo sapiens
tgaattacgcctgcgcggaggctttccgagtccatctcctaggacgccagactgaggccgcgcgtgcgcaatgctgccattctgctgcgctagaaatgtggcacgcactgaggcggaggtaa

SEQ ID NO: 406449 - DNA, 122 bp, Homo sapiens
ggttaatctcagcaattcagaaatagctgaagaactatgctgtgggtttagacatcatgccgtgacaaaaagaagaggatcttagaagcgggggacattcactgaagctttatgagcctttc

SEQ ID NO: 406450 - DNA, 122 bp, Homo sapiens
ccgcagggttctggtacacctttgcccccagggctagcgccatttgggggaggaggttttcgttgtcgagaaagttggatgctcctggtaacccctctaacaagagagttctgtagcgaggt

SEQ ID NO: 406451 - DNA, 122 bp, Homo sapiens
tgggtgatcgtcaggtacctgtacgagaacacgcagtgagttgcagggtctggggcggggcgtgggaggtgggcggggctttgagggactgtggcgggttgtgatggacatgtgggcagggt

SEQ ID NO: 406452 - DNA, 122 bp, Homo sapiens
cataataagccttggtaaaggctgctgtaggcttcacagtacagatggcagggctgtgcccgggctgcaggctcccatttaccagatgtgtgcagtgtggattgcagggctgtgcccggctg

SEQ ID NO: 406453 - DNA, 122 bp, Homo sapiens
ggagttctactccgcggctccctcgcgccggcaagggggttctactccgcggctccctcgcgccggcaagggggttctactccgcggctccctcatggagctgcctccacccgcactgctcc

SEQ ID NO: 406454 - DNA, 122 bp, Homo sapiens
attatattttaaagttattttgaatactccctggaaaagttcttggttcatacttatacccgtaagtcaaaagatttgtcaaatattcaagaacaatcaaacaatcacttaaaaatactgta

SEQ ID NO: 406455 - DNA, 122 bp, Homo sapiens
acctgctgtatagttgactgaatttgtcacctcctgctcggtgccatttctgcttgtctccgtgagcctggggcaaggctgtattccttagctctgagaaatctgtgcagtgccttcagaga

SEQ ID NO: 406456 - DNA, 122 bp, Homo sapiens
ccatgaggcgtggggcgcgccgggcgagtccctgcttgcaggaggcgcccgagaggccgtcgcgtaccctggcaagaggagctggttagcacctcccgaccccgagaaggcccagggggcgc

SEQ ID NO: 406457 - DNA, 122 bp, Homo sapiens
gggctctcagcatctgcatccgccgaggcctggctgtgctgacgggaattgaaaggacctcgtggcttaggcaggcgggggagccccccggctggtcaggtgcacgaggagcaacccatggc

SEQ ID NO: 406458 - DNA, 122 bp, Homo sapiens
tcacacttactgccaggcaagcctactgtgccctttgtcgccctgtcctcccatcttccccggaaggttgggaactgcaggctcagcacacacaataaggcttcatttgcttagttgaggtc

SEQ ID NO: 406459 - DNA, 122 bp, Homo sapiens
tggactgccgagctgcccaggactgcaaaacaccggcgtcggcgcgtcgcagccaatcagcgcccgcctcgcgctgccctcagccaatcagcgtccacctcgcaccgtccgccaaccaatca

SEQ ID NO: 406460 - DNA, 122 bp, Homo sapiens
gctttgcgccgccacccacaggggcgggcatccgcctgccccctcccagcctttcccggtcgcctgctttctgcgggcagtgtgggctcaagacccctgacccccacccaagaggcaaagtc

SEQ ID NO: 406461 - DNA, 122 bp, Homo sapiens
ccctgcaccctctgcggattggtcctcggcctgctggggggcggggcccgagggccctgacgtcactggccgaggggggcgggcggctggaggagggggtgacggggccccggctcagcacc

SEQ ID NO: 406462 - DNA, 122 bp, Homo sapiens
gacgcgatccggagagcggtgggaagtattcgcctccgttcctcaaacacaggatgcgagcgccctttggagaagtcgcgctcggcggaaacgctaactccccggccaagtgcaaatgtaaa

SEQ ID NO: 406463 - DNA, 122 bp, Homo sapiens
acccctcagagatgtgttcagaatgccaggctccactcccatccctccaggagcacttggcgagactctgctccctccctgggggagcccagagcagtgggcccccgcacctggctgggagg

SEQ ID NO: 406464 - DNA, 122 bp, Homo sapiens
gccatgccctccaaatgagcttcagccactcctgggttttaaccaagtcctgcacctatacgcagacctattcctgaatcctgaccaacaagccaatagcctggaaacctatatgctgagca

SEQ ID NO: 406465 - DNA, 122 bp, Homo sapiens
gggggcgccacacctgtgcatgtgcaggtctagggggagcactaagaccagccgcggcgccgggaggccgaggccagtgcagcgacgcatggggagtcgctctggcgtgacgtcagaatcca

SEQ ID NO: 406466 - DNA, 122 bp, Homo sapiens
ctcagcattgtctccacaagctgcacccacacagtagcacgtggcactgcctccttcctgcgctgaaccccacccactgcgtccactgcgtggagactgcacctctgcatccgtcctcagtg

SEQ ID NO: 406467 - DNA, 122 bp, Homo sapiens
tgttaactcttagacgagtatgtgactgagcatcttccactttaattgatctaatttgcacgcataattttgatggaattattcaccataaagtgcacctttgggccttaaaatagcccccc

SEQ ID NO: 406468 - DNA, 122 bp, Homo sapiens
tgggacggttcctgcgcccaggtgcaaggccaggcgtgcttgcgtggactcgtcgggggtcgggggtcgggggtcgggggttgggggctcctgtcccggggaccgccgaggaaatggagagc

SEQ ID NO: 406469 - DNA, 122 bp, Homo sapiens
gccttagactgaaactgttgtgttgggtgttgggagaaacacctaagacattctctcctgcgcgaagactcaaggaagacactgggaaacccagaccttgacttcctaggagggtccccagc

SEQ ID NO: 406470 - DNA, 122 bp, Homo sapiens
tgaaaactcaaataatgcaatatttcccaccatcatttggttcagaatacttttatgaagcggcaaaagagggcaaaaagaggctggctgacttaactaataacatatgataaccatcaggt

SEQ ID NO: 406471 - DNA, 122 bp, Homo sapiens
gggagtcatctaatatgcagctgctgctgggggagaaaaggggaaaatgagcagccatggcgtggaaggacgggtctcgctaatgcattcgaggctgtgaccttctcacaaagtcgtccttc

SEQ ID NO: 406472 - DNA, 122 bp, Homo sapiens
ttaaagaaacactgtagatttttggatctgtctcattcttcaaggtgtcgagaacagtggcgcagcatctttttgtgtctatctgaacaaagtgtctctgactaggaggagatcatgaacag

SEQ ID NO: 406473 - DNA, 122 bp, Homo sapiens
ttcacagaaaaaaatatatttcaggcaaataaaaacaaattccagattagcatagttcagcgtttcatttatcttacctttatcaaggcaaacaaagtacagatgctgtacattaaaaacat

SEQ ID NO: 406474 - DNA, 122 bp, Homo sapiens
gggtgggagccaaggcctgggggccgcacgggggctggaggtgggggcgggcagggcagccgtgggaaacacgtggtggtgccaggacccagtccgtctgccccgagtcctccttccagaaa

SEQ ID NO: 406475 - DNA, 122 bp, Homo sapiens
ccagcacctgcctcggaaagccctctctcgcaggctggcccgaaggcgcggctccgccagcggagagcctttggatttaccgtggcattacttttaattaactctgcggcgcggcgcgggga

SEQ ID NO: 406476 - DNA, 122 bp, Homo sapiens
gcctggcacatagcactcaaaaaacagtttttgtcgaattatttttaaattgggtgatttcgctaagaatctggatgtatggttttccttaagaatttggcaacactgtttcatatatcact

SEQ ID NO: 406477 - DNA, 122 bp, Homo sapiens
tgcgaatactgggggtgggcagttgggactcagggccccaggccctcggggctgcggggccgcctcttccaaacgcgccttaagcggttttgcagtggctttccgccggagggctgggaggc

SEQ ID NO: 406478 - DNA, 122 bp, Homo sapiens
cattgttccatagaggctggcggtcactggtcaatcacaggttcgagaagtcgcatgcaccgggtttgatactagagagggcagtattatgggaactttgttctttcccggcataggaatta

SEQ ID NO: 406479 - DNA, 122 bp, Homo sapiens
agaaattctgatgtaattggtctacggtgggccggtagtttgttagtttgttagtgaggacgccaggtgattctgatagccaggggtaactgcttgcctagatccaggaactcactcttgtt

SEQ ID NO: 406480 - DNA, 122 bp, Homo sapiens
agtcgtccaggcggattcctttttcgccaggtaaggctggcccgggtgcatggggcccggcgtgccctgggtaaggctggcccaggcgcgtggggtccggggcgcgccgggtaaggctgggc

SEQ ID NO: 406481 - DNA, 122 bp, Homo sapiens
caaatccgagtgtgcacgctgcctctgccgcagtggagtgaagctcaacctcgaggacaccgaacaagatacggacacacacagaggagccaaaccaaaccccgaacaaagggaggaaaatc

SEQ ID NO: 406482 - DNA, 122 bp, Homo sapiens
cttatgtgtcgctggctcattacatttgcaccagagagcaaacacacactacagtacccacggagcacattttatcatgccacacaagtgttgaatacatctgctgctcatcttatcctgtg

SEQ ID NO: 406483 - DNA, 122 bp, Homo sapiens
ctgttggcatcacagccccaaggctgggggaacttcatgctgggacaagcagcccatcaacgccatgggttcaggctgatccaggagatgctcacaggccacaggacctggaaaacactctt

SEQ ID NO: 406484 - DNA, 122 bp, Homo sapiens
actggggcggagggccagctcctgaccgctgcgccctcagctccccaccccgagacaaagcgtaaagacggggattcctttgtttccggccacacccagggacgcagcccggctgttctgcc

SEQ ID NO: 406485 - DNA, 122 bp, Homo sapiens
tcatgtgattcttggctagcctcagtcctcatggacagttggccagaggaatcagctcctcgccgattgttggctgggggcctccctctgttctttgttttggaaccctctccctaaagtat

SEQ ID NO: 406486 - DNA, 122 bp, Homo sapiens
ggttcgcctgtgggccacctgaattgccctgtcatggtacgtgcctggagcgagcagacgcggcccgggtttagtctggggccgaagctgggctggagctgggaagggagaacggctgaagc

SEQ ID NO: 406487 - DNA, 122 bp, Homo sapiens
gatctgtttttctgtattgcatgacctgatctttttcgcttggggtaacagggatgacttcgccctgtgagaggatttgaccttggcatagataatggcagacaagagctacaaagttacgg

SEQ ID NO: 406488 - DNA, 122 bp, Homo sapiens
gcgggggacaggcgggccttatggaaaccagaggcagagcaaagctttaattttcatggccgggccaggaggcccagaggcccaacatgggcccgcgcagcctcagccaggtgccccgagca

SEQ ID NO: 406489 - DNA, 122 bp, Homo sapiens
cccatctgggatgtgaggagcgcctctgcctggccgagaccccgtctgggaggtgacgagcgtctctgcccggccgccccgtctgagaagtgaggagaccctctgcctggcaaccaccccgt

SEQ ID NO: 406490 - DNA, 122 bp, Homo sapiens
acacacgagggtgggggaggaaggtctgtaagtctcccatctgcagttacttgggtttagcgttacctcagaatgtagaactatagccaaggaaaactgctgattttcctttctctttactc

SEQ ID NO: 406491 - DNA, 122 bp, Homo sapiens
ctggcacccagcaccagggatttatgatcaaccaagaccaaggagcaaccccctggaggacggctcacaaggccttgtgaaacaaaggaagtttcttcaagcagcttatctgtattagcagc

SEQ ID NO: 406492 - DNA, 122 bp, Homo sapiens
gacccgcgccttcccgcacctgcgccgcggtccttcccttgccccggagctcgggaggggcgcacagtgaccctggcgggattcccaggctctgcgggagggttccacccgggagaagctga

SEQ ID NO: 406493 - DNA, 122 bp, Homo sapiens
gctggagccagacctcaaacaaaaccccaatcgatgcacacagaaaactcctctgggccacgcttcccgcctcgccgaggtctccccagtctgcccctcgctgacgctggcgcgcagcggct

SEQ ID NO: 406494 - DNA, 122 bp, Homo sapiens
ttgtttagctcataagaggctaaccacattagagcatggagatgtgattatgcatctttacgttttgctgtttgcttttgtgtgcatgaagtatctttagaaggaaatgagaaatagagatt

SEQ ID NO: 406495 - DNA, 122 bp, Homo sapiens
caaaaaggagaaactcctggatttgttgcagaaaagatcaacagccatctgcgtgggcaacggggaaaagaaggactagtttggtaggcagcttagctaggatttgcccgtgattaagcgta

SEQ ID NO: 406496 - DNA, 122 bp, Homo sapiens
ccccttcccagtcccactccactcctgtgattccatgatgcaccgggcacctgcagaggtcgatgatgattggtaaaaggtctgattgcactgaatgtcacggtccctttgttgccctcaac

SEQ ID NO: 406497 - DNA, 122 bp, Homo sapiens
gctggttcctccggaggctcctctcctgggcttctggatgctgccctctgcctgtgtcctcgcccggccgtccctgtgtgtgtctgtcctaacctcctcttcctataaggacactggtccta

SEQ ID NO: 406498 - DNA, 122 bp, Homo sapiens
actgggagaggggagaagggaagggaagggtgggggaagagagacgagagaacggaaggacgttagtgactaacatctgggtaagcccgggctcttggccccgccctcagccccgcccccag

SEQ ID NO: 406499 - DNA, 122 bp, Homo sapiens
gaggggaagggacggcacagtcagctatggccgcggaggcccggagatctgctctggccccggccccgcccccggcttgccctccgcgcggccccgcccccagtccccagcccggaagcggt

SEQ ID NO: 406500 - DNA, 122 bp, Homo sapiens
cgacaagctgagattcccctttcagctgtcactggcgatgacacccacatctatcactggcgatgttttgttaatttaacctcgagacttccctgattatccgcataatccgtcctcaaatc

SEQ ID NO: 406501 - DNA, 122 bp, Homo sapiens
catgtaatcttattctggcatcttcttggaggatcccaattaacaccttatatactgtttcggtgtgtgtgtgtgtgtgtgtgtgtgtgtgtgtgtgtgtgtgtgagagagagagagagaga

SEQ ID NO: 406502 - DNA, 122 bp, Homo sapiens
ccgaccccatccctaaatgtttgtatttgctcctagccttaacctcttccctgtgaatagcgtagtctagctgtggattgaatcataagacatgtatctactgtgcaagcaaatttcttcca

SEQ ID NO: 406503 - DNA, 122 bp, Homo sapiens
agagcagagccctcaacaggaagtgaaactacacagtcaatatccagcctctctaaggaccgatcctgcctgcagggatgggtgtctgggacgtagtgctcagggtggccctgggggccgct

SEQ ID NO: 406504 - DNA, 122 bp, Homo sapiens
ccagcagcgggacctactggagtgctttcggtaagagctgggatgacacaaatgcattcacgttcgattccctcgagatgccttgtgggtggggcagggaaacaaggagctaggtaaggaca

SEQ ID NO: 406505 - DNA, 122 bp, Homo sapiens
atgaaggaaggttttttttttttttttttttttttttcacttttcgctaaagtcacattccggcagcaattttatgctgtcaaaatgttctcaacaaggggagatttgactggcttctctga

SEQ ID NO: 406506 - DNA, 122 bp, Homo sapiens
gaaagcacgtctccttgctctctccggcccagtgccaagggcgaggcctagaacacaggacgctcagaaatgcttcctggcaggagggccaggtgaggtggagagggtgagagccccaacat

SEQ ID NO: 406507 - DNA, 122 bp, Homo sapiens
gacaaaacacgaaatggtaatgtgaagctaagagcagagagtgaccaacagtaaacaacacgcgcagactccgcggctggcggctgtgtctttaaggaaactgcccaccccacctcaggggg

SEQ ID NO: 406508 - DNA, 122 bp, Homo sapiens
ctgacaccttagagattttcacggcctatccggtctgagtcccacggagagcagaactcacgtgctgtccttgtgcaaaccccatccagaaatcaagcgttatgctttccgtcctggactgg

SEQ ID NO: 406509 - DNA, 122 bp, Homo sapiens
tgcccttcaggccgggctggaggtcgaggccctgcagccagggagatgcgccggtggctgcgtggggacagaggggggttgtctcccaccctcacagtctacaccccggcccttcccctttg

SEQ ID NO: 406510 - DNA, 122 bp, Homo sapiens
aaacgggcctgtgccttatcttttggtggagtgaaaaaatttgagctagtgaagccaaatcgtaacttacagcaagcagcatgcagcatacctggctctttgctgattgcaaataggcattt

SEQ ID NO: 406511 - DNA, 122 bp, Homo sapiens
ccattcatcattttcccacaccacaagcaagaacgatttgtgtgcacagttcccagttggcgaaattcataaatgtcacaccttggcacgtttctgttgaagtgtgaagaaaacatacacaa

SEQ ID NO: 406512 - DNA, 122 bp, Homo sapiens
tgtgggaagccagggcctgtcactcgggcgccacgcaggacgcccgcacccttccacccccggcctgctgctgcaaaatatcaagtgacctctgaatgaaaagacatgctccgctctcccat

SEQ ID NO: 406513 - DNA, 122 bp, Homo sapiens
ctcagcctggcagattcttatacatttaattgactgcatttagcagggtgcagtggctcacgcctgtaatcccagcactctgggaggctgaggcaggaggattgcttgagcccaggggtttg

SEQ ID NO: 406514 - DNA, 122 bp, Homo sapiens
agcagaggggccttcattaacaaatacactttaaaaccattctgtccagaggtgacagaccgtcatggtgggcaagggaggcacagtggaagagagacctgggatggtggaagcagaactgg

SEQ ID NO: 406515 - DNA, 122 bp, Homo sapiens
cgggcggggtggggcggggcggggcgctcccggagcatcccgggagttgtaggccaggggcggtccctgcatccctcctgtctctgtctcctcccacgccttctgggttttacccttcctgc

SEQ ID NO: 406516 - DNA, 122 bp, Homo sapiens
tctccagcggggccccagccccggccccctctctccctcccttctctctaattccccttccggacgctgccatcatgttgaagcctcagccgctacaacagccctcccagccccagcagccg

SEQ ID NO: 406517 - DNA, 122 bp, Homo sapiens
ctcctgggttcaagtaattctcatgcatcagcctctccagtagctgggataacaggcacacgccaccacacctggctaatttttgtattttgagtagagacggggtttcaccatgttgccca

SEQ ID NO: 406518 - DNA, 122 bp, Homo sapiens
gagctctggccgcgggcgcctcacccgtcgggggccgcccgcgaagcgcagattacagggcgccccacaatcagcaaggggaggctgctccgaagctgagagcacagctcaaccggccgccg

SEQ ID NO: 406519 - DNA, 122 bp, Homo sapiens
gcgaccggcctgggttaacgttatgaacgaacgaacgaacgaacgaacgaaagaggcaaccgctctgtggcttcctgaggttcactccggggtttccatcttgactccctccctccgctgat

SEQ ID NO: 406520 - DNA, 122 bp, Homo sapiens
tgtcaatgctgaatgttaggacttctgtctccgctggagacacggcctggtgcaagtcagcgtttagtgtttgacagctttctcagcactccctgactccgtttacctttactccgcatccc

SEQ ID NO: 406521 - DNA, 122 bp, Homo sapiens
ctgcctctcaaccaatccgcatatgcagctgctttgctcccgccccagggggggcggtgccggcaaggctgtcagtctcaagaaaatgattagctcgcaaaggcgccgtgggggcggggcag

SEQ ID NO: 406522 - DNA, 122 bp, Homo sapiens
ggacttaacgcccacccctgccccccaccataccgctctcgccgcccgggaaaatcccgccgcgggccccaccagccaagcgccgccttcgccccacgcggcctcttcctagcgcctgcgcg

SEQ ID NO: 406523 - DNA, 122 bp, Homo sapiens
aggtggcagaagcgagagagaagcaaaggagaagcgccacactttaaaaccgtcagatctcgtgagaactccttcactatcacgagaacagcatcagggaaactgcccccgtgatccaatca

SEQ ID NO: 406524 - DNA, 122 bp, Homo sapiens
tccactgtcactgtcttgtgctcaagtcaacgctgcagaacacaggaaacgggggctggccgggaaatccgcgcatccggccccagggcgccccagcctccccggctcgttgcagttaccgg

SEQ ID NO: 406525 - DNA, 122 bp, Homo sapiens
tttttcttcaattagctgattgctaccttttgaggtttcacagaggatcaacgtaatgaacgaagtccttacttttatgtctgaggcaggtgagtatttctgagtctggtggtcgtgtcaca

SEQ ID NO: 406526 - DNA, 122 bp, Homo sapiens
gagaaaaaaggcagtcagtgatagacaactttactcaagggtgtggatgaatcatctctgcgatttttttaaggctgacgctacatttattccaaggaactggcagcatactctatctgatg

SEQ ID NO: 406527 - DNA, 122 bp, Homo sapiens
aagtgctgggttagggggcacggagggccagaaagtcccctttggagcgctggactctctcgctgactcctaccccaccccggcctggggtttcagagaaggggtccaggcaggagtgtcat

SEQ ID NO: 406528 - DNA, 122 bp, Homo sapiens
ctaaggtgctaactttggacatctacttgagtaagactgagggggcacaagtggacgagccggtcgtgattactcccagagcggaagattgcggtgactgggacgacatggagaagaggtcc

SEQ ID NO: 406529 - DNA, 122 bp, Homo sapiens
agactcccctggggtaggccagcacactctcagaaaacgagttcttaacctcttctggtgcggacactctgcagagatgaattcaaaggtccttttggctcctcgggggtctcatacagcac

SEQ ID NO: 406530 - DNA, 122 bp, Homo sapiens
tgacattaatgttactgaaaagatgattagtacaaacatcagactgtcagagatcctcagcggttttgattatcagcaggggtggtatttcacagaatcagagccaaaggagagctgacaca

SEQ ID NO: 406531 - DNA, 122 bp, Homo sapiens
ccctagggccctgagctgggctctccaggccccagccccttggggcacaacacctggaatcgtcctttcgtcctcagcccggcctgctggtggggcagggcgggtccccagggctcctcagg

SEQ ID NO: 406532 - DNA, 122 bp, Homo sapiens
cgaagctctcgccctcgctgctcgcgttcatggccgcagactgggaggtccccggccggccgggatgccaaagtgggggacgctgatctacatggtgcaaggacttttccttttatttttcc

SEQ ID NO: 406533 - DNA, 122 bp, Homo sapiens
ggcagaagaaaaaaggaaaaactgcggccgcgatcagagcctgaaagtgtgagaaggcggcgccagcgacgccagtatttatattagggggcgtggcctggtgacatcacagctggccgggc

SEQ ID NO: 406534 - DNA, 122 bp, Homo sapiens
aatcattcccaacggaaactcagtagcggcattttcaactggataaactggccttagtcccgccttctcgttccagagttttgtgcgaaggaaaccgatggggatcggaaccgtagcggttg

SEQ ID NO: 406535 - DNA, 122 bp, Homo sapiens
atgcaggaggaacacagcaggacagggtaagcaccagcccttgggagacccctttattgccgggcgtgagggatgatgcttgcttcgcctctcccacacccatctttcttctggccacatgc

SEQ ID NO: 406536 - DNA, 122 bp, Homo sapiens
agctttttgtttgcatcatttaactgaactgtgaacccttgtgcctctcatctttatcatcggagttgacagtgaaacaaatttacatcagaagtttgcatctcgcgtatatgccgtataaa

SEQ ID NO: 406537 - DNA, 122 bp, Homo sapiens
gctgtaaaacattgacatgtgtagtttttacagattcagaatcttctgtgtgatttaaaacgggcaatggttcataatacaggaaacttaaataataagggatcacatatttgcaggcaaca

SEQ ID NO: 406538 - DNA, 122 bp, Homo sapiens
gtctcttcccttctggctgtaagagacttagcttgcctctgagctccttctctttggggtcgcccagggctctgccaaatgcacaaaaaaccccccccctttttttggtgggggaggtcatg

SEQ ID NO: 406539 - DNA, 122 bp, Homo sapiens
tgcaggaagggctccccgatacgaggggaccccgatctggggccgacgccagggaagcaccggagcccaggcccgctgtgctcatagcccagaccagagaccgtctggacaccccccgggag

SEQ ID NO: 406540 - DNA, 122 bp, Homo sapiens
aggtgctcatcagcccaggaaaaagaagccctgaaaagtcaatctagagctgctgactgccgaagtcagcaccacctcagaaatgacactccctgttgccaggcatcactctccctggacac

SEQ ID NO: 406541 - DNA, 122 bp, Homo sapiens
tactaattttcgtgcattcgttactattgagtttcataatatctgggtgccctctgcccacgagctccggagagcataaatacccaggctgatggtagtgctaaaggttctgcttcatctcg

SEQ ID NO: 406542 - DNA, 122 bp, Homo sapiens
taaatcctcaggagtcaggagtcatttgtgagcctcttcacagggtccttgtgcttggcccgagctaggtgttagcatggcccagtgcagagcagcaggtaacacacacacacacacacaca

SEQ ID NO: 406543 - DNA, 122 bp, Homo sapiens
cggacgaaacgctggggcggagctggggcggggtctgcgcttccctcagcctgcctagcccgcagtctcatttttcccggtttagaaacgctggagtgttcactatgtccccgggagcaccg

SEQ ID NO: 406544 - DNA, 122 bp, Homo sapiens
gagagatttgccagccaccttctggaagtgatagatggtgcagagtgggagagatgaggtcgtatgtggggatggacacagtagctggaggtgagcactcccgtacacagggtgactagaaa

SEQ ID NO: 406545 - DNA, 122 bp, Homo sapiens
aagcagtatattccattcacaactattagaaactccttaaaagcatgtataccttctccccgttggttttggattaagctatatttggttatatcataattgttctttaagcagaattgtgg

SEQ ID NO: 406546 - DNA, 122 bp, Homo sapiens
atcttaggtcacccactgaatttctaggcaaggacctgttttctttccagggaagccacgcgggcccacatttcactgcttccgaatcagctccagccacccccggcgtgacgcagccgagc

SEQ ID NO: 406547 - DNA, 122 bp, Homo sapiens
attggtaaagtctttcttggaagctgaccacatgacatgggaatgttcgtagaagatgcacgtagtcaccatgaggaggggaaagaacccagtcatcctattgttttagacagggcttaaca

SEQ ID NO: 406548 - DNA, 122 bp, Homo sapiens
acctcagaacctgaaattctaaccactttgctgaacagcctctgtatccaatagaatagccgatgctaagacacacagaatagcttagacaattatagcacatttcagttttcaaacatgac

SEQ ID NO: 406549 - DNA, 122 bp, Homo sapiens
cctcccccctccacgggaaagtgggctcaaccgggggcggaaagcgacacggctgggggacgactacgtgctcccttaacccccttcccgctgtcagtaaggaagtggagataaaccgaaga

SEQ ID NO: 406550 - DNA, 122 bp, Homo sapiens
tttagtgggaatctgcaacgtgacaccggatccgcgcggcccccgcctccctccctgcctcgctctgcctggctgaggggagcaggcgggcctcctcagcttatttctgaacaatgaagatt

SEQ ID NO: 406551 - DNA, 122 bp, Homo sapiens
ataaaaataaaaaaaggaaagttccagtcactgtgctgggggttgaggacgcactgcacacgacatatcccgggccagcctcaaccttcagggtggcgagggcagcaccgagggaaggagca

SEQ ID NO: 406552 - DNA, 122 bp, Homo sapiens
cctgtcgcacacagcccagcagacagacacagaaacaaaaatatgatgtcatgagttagacgcaaggagagagatctgacaagtgtactgttggaacagatgaggggcactgaaccccgtgg

SEQ ID NO: 406553 - DNA, 122 bp, Homo sapiens
agttgcccaaagatatcattaggaccaggagaccattataaagtatatccaggccgggcacggtggctcatgcctgtaatcccagcactttgggtggccgaagcagacggatcacaaggtca

SEQ ID NO: 406554 - DNA, 122 bp, Homo sapiens
cagatcacagcccggaacaatgtggtgtgggcgctgacagagcagagggccctcctgtaccgggagggcgtgagcagcttctgtccggaaggcgagcagtggaagtgtgacattgtcaggta

SEQ ID NO: 406555 - DNA, 122 bp, Homo sapiens
gaatgatacagatttaggcatgaaattctcaaaaatgctgctatccataacttaatgtaacgcaaaggaaaaccaagtagtagcagttacaaccaaacaaatatgaacattcgtaacattgg

SEQ ID NO: 406556 - DNA, 122 bp, Homo sapiens
gccgggggcgtatgcgtgggggccggcggggagcgtgcgcggggacaggcaggggcggggcgctgggggcggtcgcgcgcgcggcggccgcgaggtcgccccgcccacgcctccgggtgagg

SEQ ID NO: 406557 - DNA, 122 bp, Homo sapiens
gcccaggcactgtcaaagcgccctccctgcccgggccgggagaagtaaggggtgtgaaggcggagccactgggctggcaacaccctcccgaaggtccagcccttacccgccttcctaccacc

SEQ ID NO: 406558 - DNA, 122 bp, Homo sapiens
aatgatgctttcaaataccactagaaactaccatcactatagaaatccaaaatgagccaccgaaaaatttgttgctcttgagaaagtactttaatcagtgaaaatcctcaacaggtttatta

SEQ ID NO: 406559 - DNA, 122 bp, Homo sapiens
cgccccgccgtgcgccccgccccgccgtgcgccccgccccgccctgtgacggtcccagcccgcacatgcgcagtcgtgagtcctcttgtccttgagcgtcaaccttctttccctgaagtggc

SEQ ID NO: 406560 - DNA, 122 bp, Homo sapiens
ggagggtccccgctgtgtcgcggcgcctggctcaggggccctgtagctggggccgggggtcgcgggcccgcggcgctcccggggcggcgtgggcggcggctcgcgctccgggcggcgctcca

SEQ ID NO: 406561 - DNA, 122 bp, Homo sapiens
ccacgcagcagcaggacatagacggctcgtccctcctcatgctcccacacgcacagcagccggacacagatggctgatccctcctcgtgctcccacatgcaggggcctcagctctcaggagg

SEQ ID NO: 406562 - DNA, 122 bp, Homo sapiens
tgcccatgcggagtgcccgcctgctcacacgtgccgacgtggagtgcccgcctgctcacacgtgcccatgtggagtgcccgcctgctcacacgtgccaacgtggagtgcccgcctgatcaca

SEQ ID NO: 406563 - DNA, 122 bp, Homo sapiens
agtgggtggctgtttccttcttttaggtggccagagtgcagtcacacaggctaacttaggcgattctcagaagctctcaggagatggggaaggtcacctcacctcatcctctagacgaggaa

SEQ ID NO: 406564 - DNA, 122 bp, Homo sapiens
cgaccattctgcagctgcagcgccagcagaattccccgatccgcggccgcttccgagcgccgccaaccgcttccgggttcaaaagcctccaagccgaatttcagcgccgcccgggctcgcca

SEQ ID NO: 406565 - DNA, 122 bp, Homo sapiens
tgacaccctccagcacatctttggtgggggttgcacaggtaaatgcttctttcccggctacgctagtagattgggggctgagctctgacctgtttcccaggagcctaagttataaaatgtaa

SEQ ID NO: 406566 - DNA, 122 bp, Homo sapiens
cggaggccttggggagtcgctcaccacaatgggtcctgctcttgggccctttgaggggggcggggagctaatgacagaggaatctccccgagggccctaaaaaggggcttttgtagcgggct

SEQ ID NO: 406567 - DNA, 122 bp, Homo sapiens
aaatcatttgaaagactctcctcctgcagccccgcctctgccccagcgcccccagccctccgcccctccacgttctcacctgccgccgtggacccggcaggactgaggtcggaaggaggcgg

SEQ ID NO: 406568 - DNA, 122 bp, Homo sapiens
aagaaacccccttagtaagggggcggggggtgggccctccctccctcctcccgccacgcccgagttcctggagatcagagctgcctcgccgcggctctgacacctgtttgctttttccctcc

SEQ ID NO: 406569 - DNA, 122 bp, Homo sapiens
tgaccaccaagaggatcgaggagcagagcctgcacgacgtcctgttcgagctgagcaagacggtcctgcgccacagcgggagcctgaccagagacaacctgtccgggtaggcagcgcgtccc

SEQ ID NO: 406570 - DNA, 122 bp, Homo sapiens
gctggcgcggattccagctgctttccaagtcagcggcgcctagtgagagtcaggggggcccggcccgcgccctccccgcccagccgcctccccgtcgacgcccagggctggggcgagccagg

SEQ ID NO: 406571 - DNA, 122 bp, Homo sapiens
tgccaaggcgaccgccgccgaatgttcccgccgcgggctccgccccccggccaatcggaccggcgctcggtgaagcccagattctctttgttccgcagccatttcaggccccggacaggagg

SEQ ID NO: 406572 - DNA, 122 bp, Homo sapiens
aatgacatcagaggtgctttgctaaagatcacaggaactgcagctgtggccttcctatttcgcaggtagaaaatttatctagttctgttacttctgtgatagagtggactttgtaaggatga

SEQ ID NO: 406573 - DNA, 122 bp, Homo sapiens
ggtggctcgcagagggcgagaagacccttcccgctttcacactgcaggcagctaagtcgccgagaaaggcagcaacttgacgcccgaccccgccacccaaacccgctcgctctgcgacccca

SEQ ID NO: 406574 - DNA, 122 bp, Homo sapiens
ctaaattcccagaaccaatcccggttctacaaataagtgaaacaaaatcccctttaacaccgtagggtctcacgccctcagatgactcacggaaatgacgccatcagcgaaaagcggggcgg

SEQ ID NO: 406575 - DNA, 122 bp, Homo sapiens
ggactcgagcgcgacactagaaagagggacacaagcgaaaagacaggtggcccccaacagcgcgcagcgaactccactgccgctgcctccgccccagagacacgttgcaggccagagcggcc

SEQ ID NO: 406576 - DNA, 122 bp, Homo sapiens
aggatttgatgtcaggtcataaaaaaataaacaaacaaccaaaaaaatccggtagtaatacggagagaataacacagtgaaaaatggcaaaagggttgctttgaaatatcggatcggatgca

SEQ ID NO: 406577 - DNA, 122 bp, Homo sapiens
tcaacgctgaaaaaaatcacaagtctcagtatcaagttccagctcagtccataacaatagcggcaggagcagcgacaatcattgagtgcttactttgttctaagggctttatctgtaacaaa

SEQ ID NO: 406578 - DNA, 122 bp, Homo sapiens
ggtgtccacgtcgcagaaaggaaggatttccgccggtttgacttaacagttggcgggagccgttccaaaatcctcccagaaagttgctgcggtggcatctagggtcagggaggggagagcaa

SEQ ID NO: 406579 - DNA, 122 bp, Homo sapiens
agggccggactgccgactgtagggccgactcgcgcgggaccgcgcgccgcccccgcccgccgccaaccactcacttccggcgcaggccgccgcgcccgccgcccttccctagcccgcgcccc

SEQ ID NO: 406580 - DNA, 122 bp, Homo sapiens
tgccccaaaggaaactgggattctgttaataacaatggaaagaagagatactgagagggccgaaaggtttcacccacttgtaggcatagctgtggggcacatgaagactttccaagaaaatc

SEQ ID NO: 406581 - DNA, 122 bp, Homo sapiens
tttcctgagagcttgaccctcagatgccagggccttggctgcagattccttgggagctcccggggatcttccagcaaataggagcaaatcttttccccgtggatcaggaaggtgcacgctct

SEQ ID NO: 406582 - DNA, 122 bp, Homo sapiens
cgctgtgccaggggcgccgggaagcccgacgacgacggtgtcgtaaaagcgtcgcgaaggcgtccgcccttggcggcttcctgccacctgtataagtggagtgtgctggggtgtgtaaagta

SEQ ID NO: 406583 - DNA, 122 bp, Homo sapiens
cccaaccaccacctgcccccggcacagcccagagagggtctggccacagccccaccatgtcgcaatctcccggcccaggacagccatgcggaaggcaggctacaccaaggctctggtttcag

SEQ ID NO: 406584 - DNA, 122 bp, Homo sapiens
gctttgagagtaggggaggtgtcaaaatggataacgtaggcaataacagccaaatatgcccgtgttacaagtgtagaatcaattctgcatgatagtcttagcatacacacacacacacacac

SEQ ID NO: 406585 - DNA, 122 bp, Homo sapiens
cgtggactgcggccacagcttctgcctcaggtgcatctccgagttctgcgagaagtcggacggcgcgcagggcggcgtctacgcctgtccgcagtgccggggccccttccggccctcgggct

SEQ ID NO: 406586 - DNA, 122 bp, Homo sapiens
acgatgtgcgggcactgaatgacatagtgcgcgcgttactcaacacaaaccgagggggcgcgtgcgcgcgctgaacctctcaaggaaatactttatcagttctgctgaataatcgaaaaatt

SEQ ID NO: 406587 - DNA, 122 bp, Homo sapiens
cagcagtcttgtgcctcctgggtgtgaattgcgggccctgaggatcctggggtctctgagcgcccccagccaccccgggttggtagacgggagcccatccccccatccttgcagcccgcacc

SEQ ID NO: 406588 - DNA, 122 bp, Homo sapiens
cgaccctccgccgcctcccctcccctcagcctcagtgcatcctgaggacgcccgccgagccggaggtggggctgaggaacaataaagttgcgtttttttttaaggcagccacacaacagcgt

SEQ ID NO: 406589 - DNA, 122 bp, Homo sapiens
ataaataatttagaacactggcatatggcaggtgctagattagtgccagatatgagtgtacgaattattactattattgtgcatgcaaagggctcagccaaggcatggacataaatgaaggg

SEQ ID NO: 406590 - DNA, 122 bp, Homo sapiens
acgcatggaagactcaaagggacagggctccagttctgagatccttttctctgcgccacccgggacagttccttgttggcaacaacccccagctcttacctgctgtgctttttgtgtctgtc

SEQ ID NO: 406591 - DNA, 122 bp, Homo sapiens
ggcggcagcggagggtgggggaccttgagtcatgctcctataagccacgctagagttcctcgtctttgagtgcagaggtttagactgtgtctttgtgtgcagaaagtcctgcagttctcaca

SEQ ID NO: 406592 - DNA, 122 bp, Homo sapiens
tggcgcgtggccctgcgcagggcagtggaagcagcgggccccagggagcatgagacgccgcgctccgtggggcggtcccagcgctgtgcagcgaggggccagggctgtccccggtcctgcgc

SEQ ID NO: 406593 - DNA, 122 bp, Homo sapiens
tcttcatgaagacacagtcgctgctgctattgacaaccggaggccagcactgaggagtgacgtgggcagggggccaggggtgagggtgcctgtgtcggggaagatggtgaagaaaattcaga

SEQ ID NO: 406594 - DNA, 122 bp, Homo sapiens
ctgcctggttttattcttcacactccttccccagggcttccaggattctgaaaatttttccgtcttcagttccaagggcatatttatctctcaagacaagtaaccatttggctcatctgagt

SEQ ID NO: 406595 - DNA, 122 bp, Homo sapiens
caacctgcgggtcactccctcccaggcgtgcaacaaaacacctgcctagaaatcaaaaggcgttttacccgagtgggctgaaaaagccccgtttttacctttaatctggagacaatacgggt

SEQ ID NO: 406596 - DNA, 122 bp, Homo sapiens
ggcgaactcgctttcccgtggcctttggcatctgtagcgtggatgccatggagtgtggcgcgtgacacctcaatgtggcacactgagactgtaaagaacagaagacaccagtactttaaccc

SEQ ID NO: 406597 - DNA, 122 bp, Homo sapiens
cctccccggttttggcacctgacttaaggttcttgtatcggttcgaacccggagagcgcgcgttcgaaccaacagacaacacgaggcggtgtggagcaacatgctgttttaatgagttcctg

SEQ ID NO: 406598 - DNA, 122 bp, Homo sapiens
caggtccccttcggagctttctattggtcctgggtaccgagcatgggcgctgcgtcagtgcgcgctggcgcaaggttggtggaagtcgcgttgtgcaggttcgtgcccggctggcgcggcgt

SEQ ID NO: 406599 - DNA, 122 bp, Homo sapiens
tggcaggaagacctgatgtttggctaccagttcctgaatggctgcaaccctgtgttgatccggcgctgcacagagctgcccgagaagctcccggtgaccacggagatggtagagtgcagcct

SEQ ID NO: 406600 - DNA, 122 bp, Homo sapiens
cctgcaggtgatgggctcgtgcgccgccatcagctccatggacatggagcgcccgggcgacggcaaatgccagcccatcgagatcccgatgtgcaaggacatcggctacaacatgactcgta

SEQ ID NO: 406601 - DNA, 122 bp, Homo sapiens
tgtactttttaaaataaaacttatttttgtgtttccggaaagtttgctctttagtatttccgttgtaatttattacctcctgcttgaaattgagtaccaaaggagtttttaggagagagggt

SEQ ID NO: 406602 - DNA, 122 bp, Homo sapiens
atccaccagcctcggccacccaaagtgctgggattacaggcgtgagccaccgcgcctggccgcccctctggctttttaaggcggggcaaaaacttggaacagctaccacaaagcgaacgcct

SEQ ID NO: 406603 - DNA, 122 bp, Homo sapiens
ctccgcctcccaggttcccgccattctcctgccttagcctcttgagtagctgggactacacgtgcccgccaccacgcccagctaatttttatatttttagtagacatagggtttcaccgtgt

SEQ ID NO: 406604 - DNA, 122 bp, Homo sapiens
ggctcctgccgaacttcgccatccaatgggaaccttagtctcttttacgtcactgatcaccgggcaaatccccagacagccgcgggcggtggggcaccaggggcagcgaaatggaaactgaa

SEQ ID NO: 406605 - DNA, 122 bp, Homo sapiens
ttgcagtgatgtggctaagatacccttgtgctattaaaggcacatttacgtatctttcaacgcagtttgtacctttgtttagggttctattgaactttctctgtgctctttagaaaaccgtc

SEQ ID NO: 406606 - DNA, 122 bp, Homo sapiens
gtaatagtggccgagtcttgaccaatcccagcagccatacgtcaaccatgcgtagactgccgagtgttcaaactgttccaataaggcaaatgccaacctggaaccaatccagctgttctgta

SEQ ID NO: 406607 - DNA, 122 bp, Homo sapiens
ggcgagccgggggaggagtccagtgcccaggctgtaacggctctgttagttcggataaatcgcacagccctggtcccggatccccagtcttcaaagccagagtgtccggttacattttataa

SEQ ID NO: 406608 - DNA, 122 bp, Homo sapiens
acaaccgacacacagcacggcaaggtgagtccccggatttatctcagcctctcccctccccgcccctcagtgaaagctgacaccttctcaggcactgggaaagtctcgccatccttctagtc

SEQ ID NO: 406609 - DNA, 122 bp, Homo sapiens
gaacttcttcagtttaccaaactcaggcttcggaggttttttgggcaggtcgctgggctccggctgagaggcctggaactttgctttgatgctccggaagtcctgatggctctcctaggaga

SEQ ID NO: 406610 - DNA, 122 bp, Homo sapiens
ccgtccctacaggagaaggctggcccgggctgctccactccccggagctgcagactgagtcgccaggtttctgtgccttcaaagccctgcgcgacggccacaccaaacacccaaaccttggg

SEQ ID NO: 406611 - DNA, 122 bp, Homo sapiens
ccttgggaagaagatgatcctaaacaaagctctgctgctgggggccctcgccctgactgccgtgatgagcccctgtggaggtgaagacattgtgggtgagtacatgagtgaggaatgttctc

SEQ ID NO: 406612 - DNA, 122 bp, Homo sapiens
agcctcctggagggccggaaactttccaaggcgcccgccgactggctgtattggggagggcggggccggggccccgggagagggaatgagtgtgagctcgtgagtgggcgccgccgccaccg

SEQ ID NO: 406613 - DNA, 122 bp, Homo sapiens
tttcctctgttccctgcaggttgctttagggaccatgccaaaccgatcacttgagatatacgtttatagtgagataagactgtaggctagaagaaggaatacttagcgacttaaatgggggg

SEQ ID NO: 406614 - DNA, 122 bp, Homo sapiens
gttatttgtaatgctttcaggtggctgaagtttgaagaagatgttgaagatgggggagaacgctggagcaagccttatgtggcaaccctttcattgcacagcctgtttgagctaaggagctg

SEQ ID NO: 406615 - DNA, 122 bp, Homo sapiens
cggactgcagtctcctcagtgggtatgaacataccctatcacggcgccagttacctcgtccgaaaccaggaactgcgctcttggactgcagcggacaaggcggctcagatgccctggcggag

SEQ ID NO: 406616 - DNA, 122 bp, Homo sapiens
atgggcagagcctcctatggagggagccctgtgggtcaccaaagctccagtgaccacccccgggcaaagacctgcagatcccctgttagagacgggcccaggactttgtgcggggtgcccac

SEQ ID NO: 406617 - DNA, 122 bp, Homo sapiens
attttggaggcggcagcagcggtggcaggatgtgaggcgagcctggagctcatttccaggcgcccttccctcttcggaactaagggagacttgtgggcttttgcacactggctgtagggttc

SEQ ID NO: 406618 - DNA, 122 bp, Homo sapiens
ctgcattcattccacagccaaaagctcactgtgtaaattctattgggtgcaacccagggccgtatttacaaggtatgaaatcgcctgaattaactccagtttcaaaacttcaaggtatgaag

SEQ ID NO: 406619 - DNA, 122 bp, Homo sapiens
ttcggcgtcccctcgaggccctctgggaaagccaaacacctgtgcggagtggatacgccacgggtcgctattttcactgaagaaaagacaaaaaatagtactctgtagctaaagcgtccctg

SEQ ID NO: 406620 - DNA, 122 bp, Homo sapiens
tccgaatccccccagtgctgcacccgaacgcctccctcccacgcagcctcctgccgtctccgcaggttttaaatcagacgccgctcaggctgtgcccaggctgctgagccaaaagcgggatc

SEQ ID NO: 406621 - DNA, 122 bp, Homo sapiens
atttattgagtacctactatgtgccaggcgctgttctagatgctacagaacaggacaaaacgtcttcctcaagcttacgttcattccaatggggggagtcaattgagaaatcagcaaaacat

SEQ ID NO: 406622 - DNA, 122 bp, Homo sapiens
gaaagctctgtgggaccaggtgggaccttagggctggagatggactctgcgagctgggggcggagttctagactggcaggagcggagttctgggtggcgggggcggggtcgggaccagcagg

SEQ ID NO: 406623 - DNA, 122 bp, Homo sapiens
caacaccatcgcggcgacgctggctcgactccctccgcttaagcccctagcagtgagagccggaagttcggcctaggctgggcgggacttccgctactagacttccattgtcttccaccaat

SEQ ID NO: 406624 - DNA, 122 bp, Homo sapiens
tcccttcacaattacttcttatttctactctcctcaacttgtttcaggtctgtattacctcgtaactacatgattaagtagaattttcacctctgcagtgaggtagagagtcaggttatact

SEQ ID NO: 406625 - DNA, 122 bp, Homo sapiens
caacttatgaaatggagatgctccatctgtcatattttagtgatacactttagggaaaaacgacagcagtcagaaaaagaaacgtaagacatcgtgacatagtttccttccctcagttcaaa

SEQ ID NO: 406626 - DNA, 122 bp, Homo sapiens
ctcagattggcccaggagactgtcgcgtcaggagacgaattccgcaccttcagcaggtgacggccccctgattggttggtgttcccgaagtagcgacttcctgactggctgggttctcagtt

SEQ ID NO: 406627 - DNA, 122 bp, Homo sapiens
gacggagcaaatcctatgaacttctccagcccagtttagaacaagggaaaggggagcgcgcggtaccggctgtccactccgcggtcctcctggctcaagtcaccctgagtcttcccccagct

SEQ ID NO: 406628 - DNA, 122 bp, Homo sapiens
aaaacccccgggcggagaaagggcgtggcgagtggtgcctgggagccggcgttgaaccggcgggatgactagcaaccgagcctttttcgaggttcttagagatgattttaacagcactggct

SEQ ID NO: 406629 - DNA, 122 bp, Homo sapiens
agcgggtgcggacgcctacgacatccccgtcgcacccgtgcctcggggaggacttcgagccgctcagagctcgaagactcgcgcagtatgaccgaaagcccctccctgccttctctaagcag

SEQ ID NO: 406630 - DNA, 122 bp, Homo sapiens
acctgtttggtccaaaagttggtcaaaactgtagatttgcaaatcagcaggattcactcccggctctcattttgatgtttcaaatgagtgcatgttgtgcatttgaattagatcggaatgag

SEQ ID NO: 406631 - DNA, 122 bp, Homo sapiens
atcttattgagacctgtgccataattgtatgatttttggagtgcagtgattatttataggcgtaatcagggtggaccatggcctccaacttccaagctcaagtgatcctcccgcctcagcct

SEQ ID NO: 406632 - DNA, 122 bp, Homo sapiens
ctgggcgacagaacaagactccgtctcaaaaaaaaaaaaaaaaaaggcatttgaaagatacggggattaagttgctgatgtcaacatttcgctgtcaattccaaatgtactgatttaagtat

SEQ ID NO: 406633 - DNA, 122 bp, Homo sapiens
agttagctttgctacagggactgcagtgatgccgaagggcgggcaccgcagaggaggctgcgccgcagttggtggggagcgccagggtcggtactggcagttccttcttgccggctgccacc

SEQ ID NO: 406634 - DNA, 122 bp, Homo sapiens
aggaccaagtggagcagggacatggaaacatggggtccaggagctaagcggggccccaggcgggccgggaccctctcctgtggcatcaggcgccgcgcaagaacacggttatttctcagctg

SEQ ID NO: 406635 - DNA, 122 bp, Homo sapiens
tgtagaagcttctcgggaaactgtcgcttgacccacctgtatattcaaaagaaaaaggtgcgatttgaattttctatttattatgtcaggtggtgaaaacaggaatgagaacgaggagtcaa

SEQ ID NO: 406636 - DNA, 122 bp, Homo sapiens
gacctggcaggtggggcctgcggtgcctgaggtcacggccagcagccccgggaacggctccgtctcaaggacatcttaaggccagtaggggcatttgggacggcagaggcctcaccctgaaa

SEQ ID NO: 406637 - DNA, 122 bp, Homo sapiens
atatttgcctaccagggggttcctgaggactctgctgtacatcatcctcaatggggtacccggggttacagaagctttatttttctgcttttatgattgaaacattgtgaactgcgtacaag

SEQ ID NO: 406638 - DNA, 122 bp, Homo sapiens
ccatagctcattttaattactctgaaataattatctctggtacacagctgggtttgtctgcgtgcaacttgtgagtcattcttccccatgtgaataaatcaagcaggttaggaggaagggct

SEQ ID NO: 406639 - DNA, 122 bp, Homo sapiens
gtttgtgtctcttagctgctttctgaccggatggcaagcctctcctcaccccacactggccgccgttggcatacctatgtgcatgctctgtcctccgcggttcctgtggagaactctaaaag

SEQ ID NO: 406640 - DNA, 122 bp, Homo sapiens
aatagagcctttcttgaagctgcgaacatttccaggccccttgggcagggctggaggggccgaggagagctattcgagggaaaggtgccccgaggggcaggaaattaagttggggctgcccg

SEQ ID NO: 406641 - DNA, 122 bp, Homo sapiens
aacgaccttgacctcggaggaaacggctctacggagcgatggacggccccacagagagggcggccggctcctctggaaaacttgtccacacaaaaggcattcctcagcttccaccccgaaag

SEQ ID NO: 406642 - DNA, 122 bp, Homo sapiens
caagaagcccgagccacagacacaaaacaatatgctcttgcgtgccatttgttgcatgcccggtttttatttgacagtcagaaattcacatgccttccccatctgcccttctacccactgga

SEQ ID NO: 406643 - DNA, 122 bp, Homo sapiens
atggggtggttgatgtagggggtcccctcggggtccttccgccgctgctgccggtgcttgcgagccgcgaagtcggcagcctccagcagctgcgccgcctcagagcccatcgcgcggatggg

SEQ ID NO: 406644 - DNA, 122 bp, Homo sapiens
cgtgcactaaactgaactgctcaaacacctacaggcacagggcgaggggtagaaccacatcgcttgactcttaagtgtgtttccaactgctcccacttcccgttttctttagagaaacccag

SEQ ID NO: 406645 - DNA, 122 bp, Homo sapiens
aacaacaaaatagtctcacacagaaactccaggaccactcgcagctagcaccagtacatgcggttctcgtcctctaacagcaaaaggtttgttaaaaaaaaaagagtctgcactttccaaca

SEQ ID NO: 406646 - DNA, 122 bp, Homo sapiens
cgctctgtcgggcgggtggcagaggccagggcggctgtcaccggccggggaagccaagggcgagccctgccgacctgtgcgcagccgggattgtctcttttctttctttttggctaggtggt

SEQ ID NO: 406647 - DNA, 122 bp, Homo sapiens
cctgcaccgttgcctcctttcctgcagctgtaaatgggacgagtaattccatccccctcccgcttccacccttcagcacagacgcagtcttcagcaaggaagtgctgggaacgccctggagt

SEQ ID NO: 406648 - DNA, 122 bp, Homo sapiens
ttctctacctctcccccgactcctcctccacctcctcctctctgcatgcgcctcagagcccgtgccaagagccagcagtagtcctgaacccaaggtccgtaaaaatcagtcaactgaagaac

SEQ ID NO: 406649 - DNA, 122 bp, Homo sapiens
tgtgaatagtcaccgtaactatggtagagatggaactttcgaggcttatataagtagcagcgtgcctttgtgtttcggctggtccgagtgcagtggtgtttacaactaattgatcacaacca

SEQ ID NO: 406650 - DNA, 122 bp, Homo sapiens
gagggctgtgtctgcgttaacatcgccagcaaacagttgtataaaccaccgtgcaaatttcgttccaggacacattggcgtgagacctgggagtacgttgtgccaaatcattgccacttgcc

SEQ ID NO: 406651 - DNA, 122 bp, Homo sapiens
ataactgcagcttcagttgcccttatatcacagtgttcctttttaagagcaaactgataccgtaagtaattgctagcctctttctgaaaaattttattctttctgcaatttgaacttagagc

SEQ ID NO: 406652 - DNA, 122 bp, Homo sapiens
caccagcacacccaactaattgatttgtttcatttctaatgatgctcattttatcttcatcgagatggtgtcaggattctctgctgaaagttagtcttttccgtttgtaattaataagtgtt

SEQ ID NO: 406653 - DNA, 122 bp, Homo sapiens
agggcgccctgcctcgcccccggctgcccggcacctcctccgggcagcagccctccctcacgtggtaggctcctcgctaaacaccactgcaatcactacaataaaaagaaaaaaaggagtag

SEQ ID NO: 406654 - DNA, 122 bp, Homo sapiens
ggtgacaggtgagctggaggccctcactgctggggcagccgtgctttgtgtcaggcagggcgtggtgagcacacagcacaggccatcagccacctctgaggagggaagcagacagccggtca

SEQ ID NO: 406655 - DNA, 122 bp, Homo sapiens
cctgaacgccatgagcctgggtccccgccgcgcccgctccgctccgactgccgtcgccgccgaggcccccgttgatgccgctgagctcccccaacgccgccgccaccgcctccgacatggac

SEQ ID NO: 406656 - DNA, 122 bp, Homo sapiens
aaagtgctgggattataggcatgagctgcccacctggccatgttttccatttaaaatcctcgttttagtttgcaattctctcccacccattctttggttttatgttttcctttcttcacatt

SEQ ID NO: 406657 - DNA, 122 bp, Homo sapiens
tcaaggtgtagcaagtgtacccacacagatagcattcaacaaaagctgcctcaactttttcgagaaaaatactttattcataaatatcagttttattctcatgtacctaagttgtggagaaa

SEQ ID NO: 406658 - DNA, 122 bp, Homo sapiens
ctgccggcctgggggtcccgtcgcctcccggagccgcccgccgcgtcccccagcccgcgccgccctgcgcggcccgccggcctcctcacctatcagatttcctgtgcgcatcgccgcgcgct

SEQ ID NO: 406659 - DNA, 122 bp, Homo sapiens
ccatgtgttacatctatagagcatatgccaactgaacttgctacagcttcattgttgcatcgtacccatcaagacccaacagtggaactacaaagacaggtgacttgtttctagaaagcagg

SEQ ID NO: 406660 - DNA, 122 bp, Homo sapiens
ggagcgaggaatgaaatcgtggctatctggagacgcggccttgatgtctgggaatgggggcggggggcccagttcacacaggaggaacggggccccggaagcctggctccccacagggtcga

SEQ ID NO: 406661 - DNA, 122 bp, Homo sapiens
gggcggctgcagcgcgctctccgcggccgtcggccctgagctcatttcctggggcgcgcgcgccgggctatttcagcctggcgctgtgcaaacaggacaatttactgcggccaaaagggacc

SEQ ID NO: 406662 - DNA, 122 bp, Homo sapiens
ttgcgtacgaggacagcccgcgccgccaccagcctgcggaatgttgggagtgataatttgcgccgagaggctgagttttacttagtgttaggattacacagttatggcagttctgataataa

SEQ ID NO: 406663 - DNA, 122 bp, Homo sapiens
tccgcggagccaaagcggagccctggtctcccgcggccggggatgggggctggaagctcccggatcacctcgctgccggcaatgctccacctggcagtgctgcccgatgtccaactccgcca

SEQ ID NO: 406664 - DNA, 122 bp, Homo sapiens
tacatgctttgtaaatcgtaaagcatggactaaagcaaaatcagttgtcttcacaaaatacgctggtatctgtgtacgaattcatctaggcacaagcaacacagctattttccaaggcggat

SEQ ID NO: 406665 - DNA, 122 bp, Homo sapiens
aaataaggatacatcaaagttcttagaacagggcccaggacatagagagcactcaatcaacgttagctacttttatcatcaaaggtacagtgagtttacaatacttgcctcccaagctaagg

SEQ ID NO: 406666 - DNA, 122 bp, Homo sapiens
tatccccacaagtttcagagaaatgccagcagggactctgtagttatgattcctatcaaacggccccctaacccgtatttctcctggacatacacatgcagattcattaaccaaaacctacc

SEQ ID NO: 406667 - DNA, 122 bp, Homo sapiens
ctcagtttcctctttgtcccaggagagtaacgcgttctctgtcttcacagggatgtggtgcgggtgagactcaatgcactgtgcgaaagctctcccaagccagcaagcaccacgctctcccc

SEQ ID NO: 406668 - DNA, 122 bp, Homo sapiens
ggacagggagggagggcgggcgggcgccgcggagtggaggtgcacgggcgggggcggggacgagcggagagccgctcggctccgcggccggtggcggaggctggggccgcgttgttgccgcc

SEQ ID NO: 406669 - DNA, 122 bp, Homo sapiens
ttggagcagcccggagacagcctccctggctgggaatgaacgcagggcagagctcggctccgggcttcctccccagggactcacaggacgctgtgcagccccaccccccaacccaggcccgg

SEQ ID NO: 406670 - DNA, 122 bp, Homo sapiens
cacagacctgagcaggatcgggctgcaggggcgaggagaggccgccctctctgggttcagcgcttcacctgaccttggcctcccggagcagagggctgctggggacagtgtcatttgggtag

SEQ ID NO: 406671 - DNA, 122 bp, Homo sapiens
gcccgtgggaggccgcgggagcttggggggacttcccaaagcctgagccccctagcgatgcgcggggtgggcgggggaaagaccctgagggctgcgcgcgctgcgttcgcgaggtccggccg

SEQ ID NO: 406672 - DNA, 122 bp, Homo sapiens
attaggtctggaaagggcagctgcaacagctgaagcgtgttcactctgggggcttgagagcgcagaaggctcgggaaagaggtgacaatgacaacaaaattgacgcggacgctccagtcaaa

SEQ ID NO: 406673 - DNA, 122 bp, Homo sapiens
gggaagttttttgctccaggggagccccagagttggtggctggctaacccaaggccccagcggcagcctccgcccggccagctcgccatggcacggggtccacagaccctggtgcaggtgtg

SEQ ID NO: 406674 - DNA, 122 bp, Homo sapiens
ctttgttctggggaaaaaaagtgtaagctgcagttcttgtccccagagtgcttagaaaaacgactcccaaagtggatgaaaggtttaatagcagtacaaaaaatgccaaaaaaagtggtaga

SEQ ID NO: 406675 - DNA, 122 bp, Homo sapiens
agcatctcctcctgtgtttctgctgcagagctctccaaggacacgctggggacaaaggcacgggtcaggcctgtgcgagccatcctcattttctttcacactcctccacattctccaaattc

SEQ ID NO: 406676 - DNA, 122 bp, Homo sapiens
agccaggtttccaccgcacacccgaggccccgcccctcttccccagctggccccgcccctcgaagccctgccctcatctctgccggccccacctccgcgccccggccaggctcaccttggtc

SEQ ID NO: 406677 - DNA, 122 bp, Homo sapiens
aaccacaacctcaccaagatctcctctacacaaggcaggagccatagtttacccgggggccggtgtcgcctcagcctcctccgggaaagctccgagacagcgcatccagagctagagcgccg

SEQ ID NO: 406678 - DNA, 122 bp, Homo sapiens
cagccaggtccccgcccgggcttgggctaggctggggcaggttaagcgaagctccaattccgtgggatccggacctagagccaaacagcagctgcagtatccatgtcccctgcccggccggc

SEQ ID NO: 406679 - DNA, 122 bp, Homo sapiens
tgattggcacgtgaccaacacgtcactgacatgattggcacgtgtttaacatgtgactgacgtgatccacaaaggatcaacacgtaatcatcacgtgatcaacacgtgtgtaacacgtgacc

SEQ ID NO: 406680 - DNA, 122 bp, Homo sapiens
gcaacttctcagcacttccttttgccgggtcgctgagtaaactgtggtctgaagccaaaccgcctacaccctgaactgttagagctctgtagattacgttcttaaggaaaagagtaaccccc

SEQ ID NO: 406681 - DNA, 122 bp, Homo sapiens
aagctcactgtgtaaattctattgggtgcaacccagggccgtatttacaaggtatgaaatcgcctgaattaactccagtttcaaaacttcaaggtatgaagtgttctgaattgaacccaggg

SEQ ID NO: 406682 - DNA, 122 bp, Homo sapiens
tgagcgccgccgggcagctgtctcattggtagagtgcgcactccaaattatcgcagggggcggggcttcaggccaggggcgggaacgtccagagccaggcgctgtcagactttgcacgctct

SEQ ID NO: 406683 - DNA, 122 bp, Homo sapiens
gccccagctcagtgaagtgcttcccggagcagaagccctcctcgtcgggcgacaggatgtcgtcggagatggcggactcctctagcacgttggatgagatgttctggggtgggagaggtggc

SEQ ID NO: 406684 - DNA, 122 bp, Homo sapiens
agcggatcgggggggagtgactggatagaggccccagcaggcttgtcaccaacaccatggcgtacacccggctctgcacccccagccgccccctgtgaagctggaggtggggacatccccac

SEQ ID NO: 406685 - DNA, 122 bp, Homo sapiens
gggctcctgatggctggagtgaggcccttgggagggtgagggctgctcttcacagatgggcgtggcccagctcttcttggagacagcaggccatgggtggggctccccaggcaggtcctagc

SEQ ID NO: 406686 - DNA, 122 bp, Homo sapiens
ggctgtttattaatacatgaaaacaatattatatgagatcatcacagttagtgtccccttcgaatgaagacactgctcatctaaaaataactgcattggggcctggcataacatattttaat

SEQ ID NO: 406687 - DNA, 122 bp, Homo sapiens
ggccaatgatttcccattcatttgggcaaaaggccctcctactgggcgttcggacaagtacgatgtccttcttgatacatattgctgcggggagtatttatttgcaaacacttgtagtttca

SEQ ID NO: 406688 - DNA, 122 bp, Homo sapiens
tgcctgggagacagaccaaactgcagctccctgcagaactggctcctggagtcccgcccacgtggtgctccttgatagggctaaaggctttcaatttgtccaatcagcggccgcgccccaac

SEQ ID NO: 406689 - DNA, 122 bp, Homo sapiens
ctggagagccagttgttctgctctgacctgggtcaccaggtcctgtccctctacgaggtgcgtggggccaacatccatgctgggcctccagttcagaatgaaaatccactcttaaagaatct

SEQ ID NO: 406690 - DNA, 122 bp, Homo sapiens
tactcgggaggctgaggcaggagaagtgcttgaacccaggaggcagaggttacagagagccgagattgcaccactccactgcagcctgggcgacacagcaagactctatcaaaaaaaaaaaa

SEQ ID NO: 406691 - DNA, 122 bp, Homo sapiens
ccaggggtggctgcaaacaacctagtggggagaggacaggctgccgacagctgcaaggaacgaagttcagccaaagcccgcgcagagggctgccaagagttttttcttttcatttttccaag

SEQ ID NO: 406692 - DNA, 122 bp, Homo sapiens
ccattcccaggatgttagagggcaggcaatgtaggcaggacaggacagttagggctcctccggaaattagacctttggaaatcaatgcagagtttctattacatttctggacattcagagag

SEQ ID NO: 406693 - DNA, 122 bp, Homo sapiens
caatctcaccaggccaaaggggattttcacgtacagactttgaatttagtaggccctgagcgttcatcttcatccgtccttctcagccggagcaccttgagctggcgcgtgttcaggtgcct

SEQ ID NO: 406694 - DNA, 122 bp, Homo sapiens
gagagccataagctcctgtttctggaagtggctgtctctgccctggtgagctcagcaggccggccagggtgggtacttctttctgccacgctggaggccggcccacgggagaacaaagcatg

SEQ ID NO: 406695 - DNA, 122 bp, Homo sapiens
agcccagaaacccaccagtgtatgtactgtgataaggtgtttcaccgcaaggatcatctgcggaaccatctgcagacccatgaccctaacaaagaggccctccgctgctctgagtgcggtaa

SEQ ID NO: 406696 - DNA, 122 bp, Homo sapiens
tatcgctgctggttgttcaggtcccaagcgctcttcatttagcagatgctgaatgctggccggactgggtcctttccttcaaggtggcaggttcacttctgactcagggtgtgtctagaaat

SEQ ID NO: 406697 - DNA, 122 bp, Homo sapiens
gccctcaggaagcgagcagcagggccagaggctcatctgccgagtagagctgctggggctcggggactcagggcacacaggcggaggagggcggggcgctgaggactttgagactcggccct

SEQ ID NO: 406698 - DNA, 122 bp, Homo sapiens
tggatctggagcacagcctgcagcttcacaccgggaacatccactcgtgggctctgattccgtactgcggaacaacggaggcagtgcgtgaggtggaagctgcactacaactcccagtaggc

SEQ ID NO: 406699 - DNA, 122 bp, Homo sapiens
ttatgagaagcagtctggcgggagggtgcctgcaacagcagggcacagtgcagggtcccgcgtctccagctgccaccttcatctcacctgtggcatccaccatccatgcagttatttgggta

SEQ ID NO: 406700 - DNA, 122 bp, Homo sapiens
cctacagggagcggcagcccaggctcgggcaggcaagtgctgaagggtggctccgccttccgcagaaagtcagaggccgaggagatggaagaacaggtgttcaagggggacccggacacccc

SEQ ID NO: 406701 - DNA, 122 bp, Homo sapiens
ccaattacccacaggctgcccagtccacgcttctccccacccccttcagctaagggcacccgcagtcctaggaccacccccagctccacccaaggcaaatgtagggtggggggttctgtggg

SEQ ID NO: 406702 - DNA, 122 bp, Homo sapiens
gtgtgagtagctgagtcaggggtctggaatcagaagtgagggtgagtcaggagcagggcccgggctgactcaggcaggctgaggtggtgacctgtggaatcagctgccttactggtgctcca

SEQ ID NO: 406703 - DNA, 122 bp, Homo sapiens
atgatcgctatggagccgcgcctcaggtggcattactataaacctaagaggagaggcgcccgttcgaataagggcaaattatttagtattttgtaagttccaaagttccaacattcttgaaa

SEQ ID NO: 406704 - DNA, 122 bp, Homo sapiens
tctgtggtccgggacaatgagcagctggccctccgaggaggggcagagaccacagctgaccggggtgagttgctcatgggtccagtcaggacccaaaggcatgggctaaaaacagcaaaggt

SEQ ID NO: 406705 - DNA, 122 bp, Homo sapiens
ccttctgaatggtctgtgacacacgcatgctttcagctggagtttgctctgtctggttttcggtctgtgacacacgcatgcttttagctagtttgctctctatagcccttctgaatggtctg

SEQ ID NO: 406706 - DNA, 122 bp, Homo sapiens
atgtcactctggattttctgcctggttatgggactcccttccgccagcttgccccagctgcgttctcctccccagtgcccagacgccttccgcatttttgtgcaccggcctgggaagagggg

SEQ ID NO: 406707 - DNA, 122 bp, Homo sapiens
tgatggatttgtcaccaattttattaaatttattttcctttctccttacccccaaaccaccgtcctactgcagcaggagttttcggttttgtctgtatgtacaagccctggtcagagagaaa

SEQ ID NO: 406708 - DNA, 122 bp, Homo sapiens
ttttactcacagcacttaacagggtgcgttcggcagtccagatgctcacatttccttgctcgccaacttctagaacccggtctgtcccttctgcagcatcatcccctacgactcccctgcct

SEQ ID NO: 406709 - DNA, 122 bp, Homo sapiens
gaatgtgcccacaatagggttggatttaaaagtcttcaaagctttggtctctttttctttcgttttcctctgatacagaatgcgaatagtctcccggcctccaaccccctctacatccccac

SEQ ID NO: 406710 - DNA, 122 bp, Homo sapiens
tttagatatctcagaggtaagaaagttatatctcagcagccaacagtaatatctagcaatcgcaaggaaaaaagccagtggatattagggagaaaaatgccttgaccagcatcattacctag

SEQ ID NO: 406711 - DNA, 122 bp, Homo sapiens
cgccggagacaacttgtgcgggagcccggagtcctcggaataacacttggtaagtgttaccgcgcccttcttcccttacgccagtccgtagttcgtggtccttcgccggtgtccccggagcc

SEQ ID NO: 406712 - DNA, 122 bp, Homo sapiens
agcacaggctttatgactattactgagtgcagacagactcctccatggcttcctgttggccgggtggctctgcagcctttccctcacacacagcagtgcactggcagatgcttcaccgccag

SEQ ID NO: 406713 - DNA, 122 bp, Homo sapiens
ttgagcacaggacagaggaagttgccctgaagcaactgattgtcattgatattcagggctcgctgtcaaccaggaccttccaggaactggctctgggccaagagcagtagaaatcactgggt

SEQ ID NO: 406714 - DNA, 122 bp, Homo sapiens
tgggtggatcacttgggcccaaggagtttgagaccagcctgggcaacatggcaaagcccccgctatacaaaaaatacagaaattagctaggtgttgtggcgcatgcctgtagtcatagccac

SEQ ID NO: 406715 - DNA, 122 bp, Homo sapiens
accagaacctgactctgtgaagggaatggagagacagaaaggccatagcgagagtggccacgagagcactgctagggcaaagggccctgggtttttctagtcctcactgccacagagtccga

SEQ ID NO: 406716 - DNA, 122 bp, Homo sapiens
cctctcacgttgactgggctccccctgtcggtcggcactggctgaacagccatggagtggcgctttggggaaaccacgggcgaccaggaaagatctcaggcaagcctcgggtaagtgagctg

SEQ ID NO: 406717 - DNA, 122 bp, Homo sapiens
gtgtgtgtgtgtgtgtttgctgcactggaattttaaaagggcaagagcagagccaccttccgcgacttcactcatcagcctaatgtgtaaggcatggggttttgtggcttgcttttcgtccg

SEQ ID NO: 406718 - DNA, 122 bp, Homo sapiens
cttgcccacctgctctaggccccgggcccccaggcggcccttctcatgccacagtggccccggcccaggcagtgttctcgcccggcacacagcccgctcagagccctctgaagggtggcagg

SEQ ID NO: 406719 - DNA, 122 bp, Homo sapiens
agctcgctcctctccttctcccccagcttctcagcctgtcccccccggaccagctggagccgccgctgcacctcatcctccatgctgtccacctgccaggataaggagtgtgaggggtatga

SEQ ID NO: 406720 - DNA, 122 bp, Homo sapiens
tgagtcccaccggaagccgggttgccgggtccccgtccctgccctgcagacgacgcattccggagcccccttgggaagctgcctggctctcccaggcctggctgccttcgcacgagggctcc

SEQ ID NO: 406721 - DNA, 122 bp, Homo sapiens
aggccccggggacccagcggagagggctcgggtgaggcatctggaggcgctgaatggggccgggagccgcgggacccgcagagggcgcctgtccgtgtgggcgcagcagcgcctagagggag

SEQ ID NO: 406722 - DNA, 122 bp, Homo sapiens
cactccagaaagagaccgctcctcttgaacccgcccacttaactcctcccgcaggctctacgttcgaatgcctccaccctgattttagaaggttataggcgcacaatcaaggaaatgtcgac

SEQ ID NO: 406723 - DNA, 122 bp, Homo sapiens
gcccccagacctccggtactgggagactcgggccctcctgtaagagacctgagcgcggagcgttatgggcacccggtgaatgagcaaatggcagggaaaaccgtgcagccccatggactgcg

SEQ ID NO: 406724 - DNA, 122 bp, Homo sapiens
tgtcttaacacaggcagggtccacgggtggccggccctctgtgagtctcgcctcccagggcggccttggtcagtcgcccgccgcagacgctgcccactcacccagcacctaagtaccatcca

SEQ ID NO: 406725 - DNA, 122 bp, Homo sapiens
acctgagtctgcatttccagaaacatcgagttgcctgtggtaaagcagggagccctctgacgaaggtgggttctgtttttgattgtttaagaaacatcaaaggtttttcaggctgctaggaa

SEQ ID NO: 406726 - DNA, 122 bp, Homo sapiens
acaatgtcacaagtacacaggaagacccagtaacaagacatgcaaggtgagggcaaggggcgctgagctgctctagcatttcaaaaccaggactgtagctttccatacattcagcggggtag

SEQ ID NO: 406727 - DNA, 122 bp, Homo sapiens
ctgcccctccagctagagaggcagccgaaccctagcggcctggaaggggccgggaaaccgcggccagctggcaaggagtggcccccgggggcggggcgccggcgggtgtgtgagtagcccgc

SEQ ID NO: 406728 - DNA, 122 bp, Homo sapiens
gacagaaacaagcaatccgattccagaaaattcggaggcaaatggaggcgcctggtgccccgcccaggaccctgacgtgggaagccatggagcagatacggtgagactcaggataccttgtt

SEQ ID NO: 406729 - DNA, 122 bp, Homo sapiens
aacttaaaaagcctatgaagagtgctacaaacctaaaatttgtaattcattgtcctcactcgtcaaagcagtgattcttaaccttgtttgggtactaggatcagacatgccttggaaaatct

SEQ ID NO: 406730 - DNA, 122 bp, Homo sapiens
agtctctttaatattgtctttcagaagttcacacacactcacacacagatcagaacaaggcggggccgccgaggggagcggggagcggggacttgggaggtccatagcctggattcccttct

SEQ ID NO: 406731 - DNA, 122 bp, Homo sapiens
gatgccacctggccgatggaccccgggaagctgcatggatctcaaatgggccaagggccccgggcttggaagggcaggtggcgcctagacccagcgttcccgctccacaggtctccaggagt

SEQ ID NO: 406732 - DNA, 122 bp, Homo sapiens
ggggggctgcgggggccggaggtgctgcagagggggcctccggggcagcggtgctgggaacggggtcgcgggggcacgaggggactaagtgcccggggtgggtagggtgtggggggactcag

SEQ ID NO: 406733 - DNA, 122 bp, Homo sapiens
ggaagcggtctcgcccctgctgttctcgtgacagtgagttatcgcgagatctgatggtttcgtaagtgttcggtagttcctcctgcgttcattttccttcctcccatcttgtgaagaaggtg

SEQ ID NO: 406734 - DNA, 122 bp, Homo sapiens
tatttaccctgaaatcaaagaatgtcaatgtggcaaagaatgtgcagagcatgtcgacctcgtggctacaaagatacacactaaaactcaggaggtgaagtgataggaatagtttaatgcag

SEQ ID NO: 406735 - DNA, 122 bp, Homo sapiens
agagcggagtcaggcaattagtaggcaatggggtgtcggcgaccctgcagcccgggacaccgcgaagcagaggcagtgtttcagggagaggagctgggccgcggcggcccgggcgggcagga

SEQ ID NO: 406736 - DNA, 122 bp, Homo sapiens
agcttgtgaaatgaacaatggacaagcagtcagcatcacagaattttaatgtgacggaggcggagttgagggatggcagagagttatggtggaggtctgcagagaagccctagacctagacc

SEQ ID NO: 406737 - DNA, 122 bp, Homo sapiens
gacttcttatgacaaatcctgccgagagctaggcacattcagaacaaaataaaatctctccgcttcccagcgaagagatttgttagaccagacacctgctttgacccaaaaatcacttcccc

SEQ ID NO: 406738 - DNA, 122 bp, Homo sapiens
gtgggagtgagagggggagaaccagcgctaactcttgcattaccgacacgagaaactcagcgtcactgagcctgcaggagcgtggtagaggggatataggtagggttcgttgtgggtaaatt

SEQ ID NO: 406739 - DNA, 122 bp, Homo sapiens
agatctcaagctgtgggtctgcaaagggaagccctttctgttgtctaaaagaagagaaagcgcttccctttgctggattacggtttgagaaagcgacgttgaagttgatgcatttgcagagc

SEQ ID NO: 406740 - DNA, 122 bp, Homo sapiens
agtactggtggttgctaatgtgggtttagagacatagaggcacttcaatgtgtgccatttcgagagtcagctgtgtgaagtctggaatatgctaataagcatcagaaccttgtgaagattgt

SEQ ID NO: 406741 - DNA, 122 bp, Homo sapiens
gcgctcgccccaaccctccttcataaacgcagggcctggggctgcgcagaccccacagggcggcccaagggtgcacaggggccccaggtgtgtcttcacacagcccctcgctattgtcttca

SEQ ID NO: 406742 - DNA, 122 bp, Homo sapiens
gatcttactcttggttagggtcgaataccgaggtcagcaaactctttctgtaaagaggcacgtagtaaatattcggctttgcagggcgtaagttctctttggcaacgactcaactctgcatt

SEQ ID NO: 406743 - DNA, 122 bp, Homo sapiens
cggagcagtcgagtggaaaatagactttaacccgctttgtggcggccggggcgccctgagcgctctccaaaccacggctcccggcgctcaggcgggccgctgccaagacccggcctggagtc

SEQ ID NO: 406744 - DNA, 122 bp, Homo sapiens
gtggctgcagcgccctgttatggacatcatgtgcgtgcagaatggatgtctgtcaggttccggggcagcccgcagtctgaggcagccagcctggattggagggagtggcaatactacctgcc

SEQ ID NO: 406745 - DNA, 122 bp, Homo sapiens
atccaagcatctccccctgggtctctgactaagcctgactaaactaatttactctgagtgcgaggcacactattcacatcaaaagaatgtacttaagtagatatagtgcaaccttcccctgt

SEQ ID NO: 406746 - DNA, 122 bp, Homo sapiens
gcagccccggccaccgccaccgcgcctgggcccgcccccagcgccggcccggccccttcccgccctcggccccggctccctggtcccccgaccccacccgccggcgcctcctgcgcggggcc

SEQ ID NO: 406747 - DNA, 122 bp, Homo sapiens
ggatgagtgcaggctatatgtggagtacatgttgtttatgcttgtgtgaaggttataccccgagtgtgtgtgatggctgtattttgtgagtaatagtatccaaggcataaacagtgtctaca

SEQ ID NO: 406748 - DNA, 122 bp, Homo sapiens
acgcgcgggggatgcggggttgttcccagagtagccgctaaggggagccggacgctagaccgccctcccgcgttcccatgacaacgacaccggcgggcgcgtagcctggagagcgaagtgcc

SEQ ID NO: 406749 - DNA, 122 bp, Homo sapiens
gagggtctgagcgaaaggaccagggcgcggcgccgaaagacggcaacaagcccatttgcacgggtgtggagagaagctgaacactgtgccacgggcctgggtcactcaccaaactctgaggc

SEQ ID NO: 406750 - DNA, 122 bp, Homo sapiens
gggagggacaccgaaaggggcagcccggactctgacggtgtctctgcctctctgtgcctccgcagatccccgctcctggccctcgcctcgccacctcattgatgggcaaccaactggaccgc

SEQ ID NO: 406751 - DNA, 122 bp, Homo sapiens
catatcagggcagaggatatacaacaaaacagggttcctaagatctcagagactatctgacggttctaatgaaagaagacgggaggaaaacaagaggagactggcagcgctgacggtcatgt

SEQ ID NO: 406752 - DNA, 122 bp, Homo sapiens
cggacagagcctgggaagctgccagtgagatttcagagaccaagagcgcgaaggggcgggcgatgtggcaatccgtctgggatgtgaaaagcgtggagcgcatttagaggaattcgacgaaa

SEQ ID NO: 406753 - DNA, 122 bp, Homo sapiens
gacgctgtacctccacccccgcagtgaacggtgacgctgtacctccaccgctgcagtgaacggtgacgctgtacttccactgctacagtgaatagggacactgtgcgccatctcagggcaga

SEQ ID NO: 406754 - DNA, 122 bp, Homo sapiens
gggagagagccacgtccggggtctctgcaggcgtgcccgcttcctggctcctgcctccctcgccccaggatgaggctggcccgccaaaccaagatgggctttccactgctctatttggcacc

SEQ ID NO: 406755 - DNA, 122 bp, Homo sapiens
actggagagactctcctcggcgcggcctatcaggagatgggaaacgcgcctccccctgggcgaccaatagggagggaagaaacgagcctcccacccaacagccaaccaaggagtagggcgga

SEQ ID NO: 406756 - DNA, 122 bp, Homo sapiens
ccaccttcaactaattaaatcggaagctccagaggtgggcttctgtagtctaacaagcttcgaaggtgatttgaatgtgcagccaggactgagaaccactggggtcacagcaggctcactgc

SEQ ID NO: 406757 - DNA, 122 bp, Homo sapiens
gattgtatcattttggtctccccagagaaatgaaaaattagaaattggccatgtgacaatcgttgcatttacctctttaaggagcagtgattctttaagtggtgcttgatttatctaaaccc

SEQ ID NO: 406758 - DNA, 122 bp, Homo sapiens
tgcatgcgggtggttgcccctgagggcctttccgtgggacgcagaggcggcagagaggaacgtcgatgatcctgaccctgtgcgggcctaggctcatgtctgtgtcgttgtcttcattgtta

SEQ ID NO: 406759 - DNA, 122 bp, Homo sapiens
gtgggaatttcctcctgtcgcccttcttccaccagccgctgttatttcgtgaccggaaggcgcctccccaaacacagcgccacgtgcaagagggttttgaccctctgcaacaggctgccggc

SEQ ID NO: 406760 - DNA, 122 bp, Homo sapiens
attctcaggctttctctgatatttaactttcacctaaatgggtttctttctcattctctccgaatctctgtctccaattttctttcaatcttctggtattttttcgtatttagacgtttact

SEQ ID NO: 406761 - DNA, 122 bp, Homo sapiens
gctttggagccaaaccccttgaattccaattcttaccatgctacttactggctctataaccgtggacaaattacttaaccttatggggatcattattaagattaaatgaattaatacataca

SEQ ID NO: 406762 - DNA, 122 bp, Homo sapiens
taagtaagtgaccttaggaaactacagaagcttttagtttccatttccttattcacaccacggggcaaccccatcctacagggtaggtgtatacaaggcacttctggttagtactggtacag

SEQ ID NO: 406763 - DNA, 122 bp, Homo sapiens
tgttcattcagcgagactacagcagtggcacacgctgccagttccagaccaagttccctgcggagctggagaaccgggtacgcaacctggctccccacgcctgctctggcgagggagagaga

SEQ ID NO: 406764 - DNA, 122 bp, Homo sapiens
actcgaattctgtcactcaaagcttgagggcgtagagctagtagttgtatccaatgagggcgctggactgagaactgcccaatcaggcaaaggagggggcggcatccgggatctggcgccgc

SEQ ID NO: 406765 - DNA, 122 bp, Homo sapiens
gtggtccagatactgctggatactggcagctcctgtggttgggccagtttgtacacttggcgttaggcttgatcagtgatgttgctgaccctcgcccatgctgggtaagtgtccaggtggaa

SEQ ID NO: 406766 - DNA, 122 bp, Homo sapiens
gagggagggagggaaactccgaggggggaaggggaggggggaagatggagaaaccgtctccgccgcctctaccgccgcggccgcttctctgttacccgggaaatcccgcccactcccccgac

SEQ ID NO: 406767 - DNA, 122 bp, Homo sapiens
tgattttattttaaatagtagtattacattgccatcttattttaattttttttactgttccgggatcactcttgaaatgagcaaggttatcataataaatgataactcttaagaatgctaag

SEQ ID NO: 406768 - DNA, 122 bp, Homo sapiens
ctagcctctaggtcagagcttgacccgtaacaggtctttgttaaacatttgcaaagtgaacgttgcctcaatccctcggaacaataaccacaccagcaggtcaaatcactgcctggagtgga

SEQ ID NO: 406769 - DNA, 122 bp, Homo sapiens
atggagggaggagctgtggacgctctcagccagggcagagagcttgcgggacaggctgtgcgctaaagccagggggtctggggcagcagagaggatggcgaattggtgcagggcgaaggaat

SEQ ID NO: 406770 - DNA, 122 bp, Homo sapiens
caaggcaagagtaatgtcccacctctttgcaataaacaaatgaaaatgctataagaaatccgtcaggaaaataatctcagttattgtcactatgtgtttctcttttttgctttattaaaaaa

SEQ ID NO: 406771 - DNA, 122 bp, Homo sapiens
cccttgcatgcagaaagtccaacagccatggggctcgggagtcatccctggggtggaggccggtgggcggtgcctgccctaaggctcctggtcccctcgccccccagagtaaaggagggatc

SEQ ID NO: 406772 - DNA, 122 bp, Homo sapiens
gagggagaagtcccatcaggacgtagatgtgaccagaggagaaatgctggtggaggacaccggcccccgtggcacttggtttctgttgtgtcgctgggctgggctcaccctagagtctgaag

SEQ ID NO: 406773 - DNA, 122 bp, Homo sapiens
ggaagttgcaccacaagtacaattagtttcagttttgtttcttttccaggcacccagcaacggcggcctccaggcctcaggccccctcaccatcctagaggtcaagatcagctctggctagg

SEQ ID NO: 406774 - DNA, 122 bp, Homo sapiens
gagcagaccaagaagacgggagcagcacggggcactgggagctgcaaatgcccacgataccgtgagagacggagaaaggtatgacaggaggagcagaccaagaagacaggagcagcacgggg

SEQ ID NO: 406775 - DNA, 122 bp, Homo sapiens
aagagcggctcctgttcactttcgttccgcaggccggccatagttacactccctacaaggcgtcttgcgcccaactctcgcgacacctgctttctcccatcccgggtggcgtgaagctggca

SEQ ID NO: 406776 - DNA, 122 bp, Homo sapiens
gtgaagtctgcatacttcacaatgggaacaaaatacaatataggacatcaacatacgacacgtagggctttcaacccgaaccccgtatattttagtctgttaatctatacaatgggaagctt

SEQ ID NO: 406777 - DNA, 122 bp, Homo sapiens
cgctgaggcgggtaggaggagcccgagccgtaagggaagccgtgatgagggccgtgttgacgtggagagataaagccgagcactggtgaggagcggggcggttcgcgaagagcaggaggtcg

SEQ ID NO: 406778 - DNA, 122 bp, Homo sapiens
gcaattgacaaatcccaaatcctcccagcttccgtttctccctacttaagacctaggtcacggtatttatttacttaaatgatggagatgaaggcaggcttaaggctggccacctgtcagaa

SEQ ID NO: 406779 - DNA, 122 bp, Homo sapiens
tatcccagctgccctctcctcctccgaggccagcatgcactgtctgtcgcatgcttgtgacgcaccactggacgcatgacatagagcgcgccagcaaagggcacgaagaaaatgcgccaagg

SEQ ID NO: 406780 - DNA, 122 bp, Homo sapiens
cgctgctccgcgtcgccgtacgcctcccggtccccgtgacgcagcccgcggtccggccggcggtgttcagagcccgagcacaaactacttcccgggtgccagaccgccccgaggtcgccccg

SEQ ID NO: 406781 - DNA, 122 bp, Homo sapiens
attgtgagttgaattattaattcagtcacctctatccacccattcttctccccacaggatcgtctcaggagtcgactggaagctctgagcacggagagagatgagattgaggatgtaaagtg

SEQ ID NO: 406782 - DNA, 122 bp, Homo sapiens
ccgccggccctcggggaacagacggatgatgaacaagcttttcatcgggaacctgagccccgccgtcaccgccgaagacctccggcagctctttggggacaggaagctgcccctggcgggac

SEQ ID NO: 406783 - DNA, 122 bp, Homo sapiens
tcaagtcaggttgccattccccttgcttgagccctcgcattgactgtggcctccagggcccgggtgaccaggccctgctgatggctcttggcccccagcaccgtctcagtgctcagccatgc

SEQ ID NO: 406784 - DNA, 122 bp, Homo sapiens
actacaggcatgcaccactgcgcctggtcctttctcatctcacctcagagcagataaccgcgtctatttcatgttgttggaagaattaagtgagataatgcaagaagaattgagcgcaatgc

SEQ ID NO: 406785 - DNA, 122 bp, Homo sapiens
agtgcccaacccagttcgggccagcaggtggcgttcgcggagcaaacaccgagtggtgctcgcttactcgccccctctagaaagcaccttgttcaggcgggggcgtccagacccgcacagaa

SEQ ID NO: 406786 - DNA, 122 bp, Homo sapiens
ccccactggaaagcgcccgccgggtgctggtcgtcagtaggcacctctagtctggtgtgccgcggagaagagcccaagaatcggagctggagccgcgggcctgcgttcctggctgggcaggg

SEQ ID NO: 406787 - DNA, 122 bp, Homo sapiens
cgggcccccagcgaaaaggcctgagaattgcttctggggggtggcttgggccaacgggggcgagggagccgcgcagagggcaggccccgacccttccccgccgcaccttgtgggtcgggtgt

SEQ ID NO: 406788 - DNA, 122 bp, Homo sapiens
ggcggcggcggctgggaggccgcggcgccatgggggggccgtaggagcggaccgtggggccggaagggggcatcgcggcggcgccggcggctgcggggttatctccgcggccgcgaaggcag

SEQ ID NO: 406789 - DNA, 122 bp, Homo sapiens
cctgcccagggccaagggattagggtacttctgaggaaactgcccctgatggagaactcccgctttagggtcggcacttaggaggctggtgcgatgctgcccctgaccttgtaggcatggta

SEQ ID NO: 406790 - DNA, 122 bp, Homo sapiens
ctggaccgggcggtgaggggaaccgaggccacccggactttccgcggctgagggcagcgccggttccttgcggtcaagatgctgcaaaacgtgactccccacaataagtacgtttccgcgag

SEQ ID NO: 406791 - DNA, 122 bp, Homo sapiens
gggcagtgcgcctgaggccgcagagctgtccggagggccgagcggatgaatggtgtttgccgggggttcatccccagggcgggatgcacggcggcgggcgccctcgggccagcccgccgcac

SEQ ID NO: 406792 - DNA, 122 bp, Homo sapiens
tctattggtatccccagggcgcatttctttgccttgaaaattgagtacccaataaatgtgcgtcgagcagaactacacgagatggagaacaggggtttaggggtatgggggagagtcagcaa

SEQ ID NO: 406793 - DNA, 122 bp, Homo sapiens
attgggtgtcatctggtccaaatcttgaccccttttcattttccccgaaagaaagacttgcggctcggaaccgagggcggcatgcccaaggtcacagaaagggtggtctaatgttttggttc

SEQ ID NO: 406794 - DNA, 122 bp, Homo sapiens
cctaggctatggttccaatgatgccactcagtaccttgggccttcggggctcattaacaccgggctcgcctccactacctcctccgggcagtggttggaatcaaggtctgaaagcaccgagt

SEQ ID NO: 406795 - DNA, 122 bp, Homo sapiens
gggtcgcttgtgggtcgggtgaggggacgcggtgatagtggtggcacttgcaggctggggcggtcctggcacccttgtccttgcggttctgagggcctggccctcaagaggaggggcggaga

SEQ ID NO: 406796 - DNA, 122 bp, Homo sapiens
atttcctttctgtagaggaagccaaggctctaggagagtatgcagagcttggccagggcacgtattgtcaaggtttgtttcactcctgaggcctggctgcatcctgggcctcaggagtgaga

SEQ ID NO: 406797 - DNA, 122 bp, Homo sapiens
actcaataaatatttgtagaatgcatgaatgccagggtcgatgtgagttctctccttttccgcacactcacctgtgtagccctcgttcattgggcagttggtttggatgacttggctgccct

SEQ ID NO: 406798 - DNA, 122 bp, Homo sapiens
gtccttattattcatatggtatttgacctctttggagttgggtggggccatatcattatccgcccaaagcagaaacatgtcccatgatctgctctcacatcttgtgcttgccccagcaaatc

SEQ ID NO: 406799 - DNA, 122 bp, Homo sapiens
cctgcctgcatggaccaccaggctgagctgcccgctgtcctgcctgcagggcccgcctgccggggctgcccgctgtgcagcctgcaaggcccaccttccggggttgccctctaagctgccta

SEQ ID NO: 406800 - DNA, 122 bp, Homo sapiens
gagcaatcaccccgccctccgccactgaagctggagaaaccaggtgttcgtttcagaacccgttagcgctaaggggaggagccaaccccttaagcagcatgcctcacttcgccccacatgga

SEQ ID NO: 406801 - DNA, 122 bp, Homo sapiens
tcgtctcgtgcccagcacatcttggctggaactggtaggggcgtggcctggcctcaggaacgcactcttgctctgctcctcacgcctcgcgcaggatcctcgcgccgggaggattcgcaccc

SEQ ID NO: 406802 - DNA, 122 bp, Homo sapiens
gtgcccgagtaatacaacaatattaacatcaccttttggtagataaggaaagtctaagaccggacaacttgttcaaggacacaaagccaacatgtgttagaaccaggacctgccgggtatgg

SEQ ID NO: 406803 - DNA, 122 bp, Homo sapiens
ctgaccccacctcctccatggacagtgtgagccccgggccgtgcatcctgctcagtgtggcgtcagtgtcggggctgagccccttgagctgcttcagtgaatgtacagtgcccggcacgagc

SEQ ID NO: 406804 - DNA, 122 bp, Homo sapiens
ttgagatctatagatgctccttgacatatatatgatggtgttacctcccagtaaacccatcgtaaactgaaaatatcataagtccaaaatgcatctaatgcacctaacctaccaacatcata

SEQ ID NO: 406805 - DNA, 122 bp, Homo sapiens
caggccgccggccccccagacttgtctcctagggcaccgtcccgcgggtgcccccgtggccgcccagttccggcgtccccccagcccagctctcagtggccatgcagaaagcccggggcacg

SEQ ID NO: 406806 - DNA, 122 bp, Homo sapiens
ggatcaggaatcaggactggaaatgggggtcaggaagaaccagaaagggggaatggaggacgtgggataagaaagggactccagggggagggcaaaaatgttcatgacagaaggactcgggt

SEQ ID NO: 406807 - DNA, 122 bp, Homo sapiens
agctgggactaatggtgtgtgctaccatgcctggctaaattttgtatattttgtagagaccgggtttcgccacgttgcccaggctggtctcgaactcctgagctcaagcagcctgcctgcct

SEQ ID NO: 406808 - DNA, 122 bp, Homo sapiens
tcccggcatggtggtgtttctgttcaggcatcagcctgaggctgccctgtggcatggacccgggttctcagctgggagggaaagcctgctagatctctgttgttggaacagtaacggcttta

SEQ ID NO: 406809 - DNA, 122 bp, Homo sapiens
tgagaaaccaggactcttcccagccctcctgttctctgatccacttctctgcttcctccacgtcctaacgattctccagttcccgcacagcaggagcggagggaagaggggagagaaggcac

SEQ ID NO: 406810 - DNA, 122 bp, Homo sapiens
aataagaaatcacaatatttagtattaattaaaaaggaaaaaaaggtggtagttgtcattcgtgggatttagtccaaatgaaaatgtagaaaacatttattttggtggatctgtgttgatgc

SEQ ID NO: 406811 - DNA, 122 bp, Homo sapiens
ctgacggcctggaaagagaaatcaaattgcagcctccccaaagacgctgagttacgcgggcgagccggttcccggggatcgttcgcgagcgcgcagagagccgcgccgcgccgcagagccct

SEQ ID NO: 406812 - DNA, 122 bp, Homo sapiens
ggggagaggccgcgggtccagaaaccgttactggatgggccggtgggatgtggcgcgggccgggtggggcgcgacagtctgagccgagacccgcgtgggcttaagggtgcgcgaggcgggtg

SEQ ID NO: 406813 - DNA, 122 bp, Homo sapiens
gggttaccatctccttcagctcgcccagatacttcttcagttcgtgtttctgggagagcgcgcgcctgatggtggtacggtcgttccgcacggtatgcctgagcgcctccacctgctcctct

SEQ ID NO: 406814 - DNA, 122 bp, Homo sapiens
cccctggcgaccaccattctactttctgtctctgaatttgcccagtctagggacctcaggcgggtggaatgacacagcgtttgtagggacctcaggcgggtggaatgacacagtgtttgtag

SEQ ID NO: 406815 - DNA, 122 bp, Homo sapiens
acaacagcaggaatgcattagactaagtttgagacccttctgagtgtggggctctgtgtccgtgcagagcttgcacattcatgaaactggccctcaccaggggagaaggggaacaccctatt

SEQ ID NO: 406816 - DNA, 122 bp, Homo sapiens
catctggatgcacgccaagacaagacgtcagtcatttcctggtgaaatgaaagaaagccacgcttcctccacgcccattgggtcacgaaatccttgctaatcctggccggggcactggagga

SEQ ID NO: 406817 - DNA, 122 bp, Homo sapiens
cattagttacgctttggaaaagctgtttgggaagagtaatggctataaaatgtggccctccggctgccagtcacctctgtgaaccctgagaccaacaggagggaaaaaatgcccaggctagg

SEQ ID NO: 406818 - DNA, 122 bp, Homo sapiens
aatcacttttgaaattcaagaaaccatggctaagcagctcttgctaacagtaaatgacagcggctgagaaacacgcgtgaccgcacgacctctggttccttgggtcattccgaattattatt

SEQ ID NO: 406819 - DNA, 122 bp, Homo sapiens
ttccggcaaaaccccagaaggaatccacaggaggtggggaccgggaaggcagccgggttgcgccagtgcctgcaagggaacctctggccccatttcctgggagcctgaccccgccctaggat

SEQ ID NO: 406820 - DNA, 122 bp, Homo sapiens
ctgagattaaaggggcccaccgttcccttcacagaaccagcatcttcactcaccgtcggacgtcctaccgctcggcttaccttcccggctcatgcagcgatccacggaggccgggctaccga

SEQ ID NO: 406821 - DNA, 122 bp, Homo sapiens
tgtgagttctggcaaattgtgtcttttaaggaattggtccatttcacctaacaaatgtgtcgacatagagttgttaatagtattctcttatcagaatcaaattttgaatataagaagtctgc

SEQ ID NO: 406822 - DNA, 122 bp, Homo sapiens
ctgggaaaccagagagcgtgcaggaaggagccttagaaagcaggctgtcattaatgtccacgcggaggtgagcgaaaatatcgcgaacatgaggcaagaacaggaagctctaaaaaaaagcc

SEQ ID NO: 406823 - DNA, 122 bp, Homo sapiens
gaggtgggggtccgggttgcgggggtggtctggcagggtggaccagcaggcagcctgccccgcggaccctgacagcctggcaacgaggagacgatccggtcggagccaggcgcttgagagag

SEQ ID NO: 406824 - DNA, 122 bp, Homo sapiens
acgtcgaggccgccgccgcccccaccccacagagatgcagagctggatacttcagccaatcgtgaccttctcggaccaaccctgagtttcgccccctattgatagcctcccgctcaaccacc

SEQ ID NO: 406825 - DNA, 122 bp, Homo sapiens
ggtttcttttactgaaggtctcctaggtgctttacaaattcccttacatcagctctgtgacggtgctattatcccacttgccggagttatatctccatcaagttgtgaagctggggttctgg

SEQ ID NO: 406826 - DNA, 122 bp, Homo sapiens
aaacacttcctaagggggttccgtccccaagagagcaagcagcagaaatgccagaggaaccgtgcctatggggacaaagctgaactcctcatggaaggagattactgcagttccggtcttgt

SEQ ID NO: 406827 - DNA, 122 bp, Homo sapiens
gtgcgatttgtcacctggtggatccagaacccacagtcgaccttgagcttggggttggctcgccccctctcaagagacctcacctggcctgtggccagggtcccctgtagcaactggtgagc

SEQ ID NO: 406828 - DNA, 122 bp, Homo sapiens
taattttcaaagttgcatttagcacttaaagaaatctattaatgccacacatatctaaaccgctccaggtctgcaagcagcgacacagcacacgcagtgcgccctggctagaccaagcccta

SEQ ID NO: 406829 - DNA, 122 bp, Homo sapiens
gagatgtaaacaggtgtcgtgagtttaaatccagcacacaactctacttttgtaaaactccgtttccacttcaagtccccctccctgcttttgaggcctcacatggcgcaaggtctccctgc

SEQ ID NO: 406830 - DNA, 122 bp, Homo sapiens
ggatacattcattcatctgtccttttttcccctccctgttcttctttcctggaacatgggcgagatgtctggaggaggagcagccatcatgcaaccaagaggacagaagctgcacacaaagg

SEQ ID NO: 406831 - DNA, 122 bp, Homo sapiens
ccgaatggcttttgacaaaaaaacccttgaccaccaaggccagcctcttcctgaaagccccgctcgctccgatacaggaagtagaagggagcgagagccccagagcgcggcggcagcggcgg

SEQ ID NO: 406832 - DNA, 122 bp, Homo sapiens
gttggagagatgccgccgggtggccctgaccagtgttaagtggttaatacgacacagaagcgggaaagcgccatgtggtctggggtgatcaggcattgaaggagactcaacggagctccttg

SEQ ID NO: 406833 - DNA, 122 bp, Homo sapiens
agtgaccacaccgagttgtgcaaagcctgggaacagtgagggcattaggaccaggagtgacgcgcacgcttggctctgggttgtgtctggcagagggctctcggctgagtggagctatgtgt

SEQ ID NO: 406834 - DNA, 122 bp, Homo sapiens
tcccatccctggaatggtgtctgctagggctattggccgtcatccaccaacccctctagccggccggcagcccccgctagtccgccggctgcagagcgagccggggactttcgagcgggcag

SEQ ID NO: 406835 - DNA, 122 bp, Homo sapiens
agcattgattcaggagtcgaaaaacctggtttctgtgcctcctcctgggtgctgcagcctcggaccaggtgctcaaccctggagccaaatttccttcccttgactatgaggggaaccagctc

SEQ ID NO: 406836 - DNA, 122 bp, Homo sapiens
acctcactatgcaaatctgagctgctgatcgatgacgcgccatcaccccacgcaccgcttcgctcgcccattggctgagatgagcctggtcccattgacaacaaacaggggggcgcgcggcc

SEQ ID NO: 406837 - DNA, 122 bp, Homo sapiens
acagagcaagaccctatctaaaaaaaaaaaaaaaaaaagtaaataaataaaagacatggtcgcaggtggatttctccagtgatggtgcagatggaagaagtgctgaacacagggcacccctg

SEQ ID NO: 406838 - DNA, 122 bp, Homo sapiens
cagcaccacccagggacgggaggcatgagccggtcaaggcacctgggcaaaatccggaagcgtctggaagatgtcaagagccagtgggtccggccagccagggctgactttagtgacaacga

SEQ ID NO: 406839 - DNA, 122 bp, Homo sapiens
ctccagcccaaccacctccataatctcctccatgatagtcctgcagttcataatgagaggcggcagaggcacgctcctggcaagctcttcgatgtagcgggcgaactccatggttttgaact

SEQ ID NO: 406840 - DNA, 122 bp, Homo sapiens
gccgccacctagcggcgaaaatgacagcaacaacttggacctagagctggggccacggaacgaaaggcgtcatccctttaaattaggacaattgccctctctcagggcagcttctctgttct

SEQ ID NO: 406841 - DNA, 122 bp, Homo sapiens
ccaagattcttgatacaggtaaaatgaacctcttttgttcaagccactgaattttggtttcgtttattcctgagcatatctctaacaaattgtgcagctattattgttcataaagtaattta

SEQ ID NO: 406842 - DNA, 122 bp, Homo sapiens
caggctttaaacagagcttttttacactgaactgaaaaagcagaattatacctcgaccttcgtggtctctaagggtcagtgcagctactaaactagaccatggttctccccggttagggagg

SEQ ID NO: 406843 - DNA, 122 bp, Homo sapiens
caattggtgaggtcagcccgtgaggtcacaatgttgccagggcccagggggcagagcagacggagtgtgggccatcgtccccagtggtgaccagccctgccatgggaaactatagttcccac

SEQ ID NO: 406844 - DNA, 122 bp, Homo sapiens
gcggtagagtagggtgggtgttttgtcaggcctgagttagcttcgccatacggcgcttttcgctggtgtctctgcctcgttctgagtagaccccctagacctcaccgccgcccctgcgtttt

SEQ ID NO: 406845 - DNA, 122 bp, Homo sapiens
cctctcgcggcccgcttttttcccacaatactcctcgtcctgggggccggagccgcggaacgagccacagagaaaaaggttattggttggcagttcagccaatgagcgggcctgttactagt

SEQ ID NO: 406846 - DNA, 122 bp, Homo sapiens
caggaggagggctgatgcggcccggcggccgcttggcggtgccagccggctgagctaaaccgtgctccttgcccactccgagctggggaattagggctactccccgccccaccctgcgcgcc

SEQ ID NO: 406847 - DNA, 122 bp, Homo sapiens
tatccctttaagatattttatataatgaaaataaggaaaatgtcttctccctagcagcaacgagcacaggcagtgcaaaagcatctgctcaggggtggagcttcaagagggtggagagagga

SEQ ID NO: 406848 - DNA, 122 bp, Homo sapiens
tgtcagtctggtcatctttggatcctttttcgttctaaatctggttctcggtgtgttgagcgggtaagctgaccgtttctatgtcctctccacaacgcagccgagcaaggtctcaggttcca

SEQ ID NO: 406849 - DNA, 122 bp, Homo sapiens
ttgccccagacttaacaccggttgggcaggaggagggtaatttttatttagccgtttctccgatcatgtggggaataccattagctgttgatagcgggccatgtatccgaggaaagcctgag

SEQ ID NO: 406850 - DNA, 122 bp, Homo sapiens
aggtctcggactcgcgggcccgccgggctccaccttgtcggggcactacccgcggagccgcggtctcgggcatcatctggcggccacacagccttactgcaagccccgcccgagagagccgg

SEQ ID NO: 406851 - DNA, 122 bp, Homo sapiens
ccacataagcactcaacacatgcttgttgaaggaatggatgaacaccaactgcacacccccgagactcaatacgtctcatgtatgcgtcccaactttctggcacctttcttcatggcttaat

SEQ ID NO: 406852 - DNA, 122 bp, Homo sapiens
tttgcaaaagtgtcttcagcgagcccgagacagtatgttagtgaatgcatttggccgtcccgcacaacctagctcactgatctgggaactggggccctcccagagaagcgggcccttccccc

SEQ ID NO: 406853 - DNA, 122 bp, Homo sapiens
gtcaagttcatggcatttcatgacaaatcgaatgtgggtgtgagagaaaaatagagacaacgatgactgtaaggattttgtttgtttgtttatttgcttacttgggtaactgaaaaaacaaa

SEQ ID NO: 406854 - DNA, 122 bp, Homo sapiens
cctccgcgcagcgctcgcgacacgcgtgccaggagtgggagcgagcggcggggccagctgcgttctgagcctgggcgcagctgccatctgctctgggaagcaccagggtgtccccgccgccc

SEQ ID NO: 406855 - DNA, 122 bp, Homo sapiens
gccccacccgtctgcagccactcctggtctcagtcccagagctcgagagggccacgtgaccgtcccggggccagtcacgtgaggcgcagatcctggctgggagggggttggtagaggggtcc

SEQ ID NO: 406856 - DNA, 122 bp, Homo sapiens
cctccacccacctccggttccgcgtgcacgcgcgagatagtccagtgggcccacagataacgaccatcagagattaaagaaggaaagtcagcgagcttgaacacaggcgtcccgtgtggaaa

SEQ ID NO: 406857 - DNA, 122 bp, Homo sapiens
gatccagcgaaggaccactgtaatggttggttagctatgaggacagtttcagcgccacatcgggtcagttaccatgacagctggaaagctctcctggaatctatgagtttctagctgtcctg

SEQ ID NO: 406858 - DNA, 122 bp, Homo sapiens
ggccaaaccacggaacttagttttattcatttatataaagcagcactccgattctttttgcgcggcctgaaatgcatgtgaccagagaagtaattaacaaaacaatgtcaacttctaaaacc

SEQ ID NO: 406859 - DNA, 122 bp, Homo sapiens
tggcattgctgagcctctttaaacttgtttcctgtctgtaaataagtggtcccaccttcccggtgtttgagtaaggcgcctaacaccacttaacagctgctagattaccacctgcctccgga

SEQ ID NO: 406860 - DNA, 122 bp, Homo sapiens
gtgtgcgcgcgcgcgcacgcgtgcgtgccggcagcaccaggaaggcggccactgatttctcggcggaatcgcactgtaaacagttccagatgtggcattagctggaatggcctgtgactcag

SEQ ID NO: 406861 - DNA, 122 bp, Homo sapiens
gtcagctactctgctggggtctgcgacgaggcctgcagcatgcagcacgtgtgtgccatgcgccaggtggacattgacgcttacaccacctgtctgtatgcctctggcaccacgcccgtgcc

SEQ ID NO: 406862 - DNA, 122 bp, Homo sapiens
tcgcgtcgccgcgaggcgggacaccgtgtgatacctttgccgtgggctgggcgtcggccgcggggcggagagcgggtgtcccacctcgcctcatcatttgatttccgccagcgtctgaggac

SEQ ID NO: 406863 - DNA, 122 bp, Homo sapiens
gctggcagtggcaggggcagtaatctttatttcgtcatttttgaaacatagaagccgtaacggaagcaagtgaaatgctcagtcttagacgactgcgtcgtgctatgaccggactttttctt

SEQ ID NO: 406864 - DNA, 122 bp, Homo sapiens
agatgctgggggagcacagagggagaaacatcttactcaggcttggcagggattgggagacgaacatataaagacaagttttcataggaggtgatgccaaagtggcttctagaggcagaatg

SEQ ID NO: 406865 - DNA, 122 bp, Homo sapiens
ccgctgcgcccagtcacatctgtaagtcggttaattttggcgctcggtcgatggaggtggcggtactctggtttagtgcgaaaggtcgtcacgcttctttgtaaaacgtttctcagtttggg

SEQ ID NO: 406866 - DNA, 122 bp, Homo sapiens
ctccagaaaggctttctttgcttgtggcagaagacagactgcatgcaggccatctgcacacgtcccagcagaaaccgagcccatcagagcctgtgttgctcttgtctgaaggccgctcacct

SEQ ID NO: 406867 - DNA, 122 bp, Homo sapiens
taacttcaaacatctggcaaactccacaggtagtatttgcaaaagcaattttgcaatgaccgcttttgttatcgcttaagtctttttgagttttccttgggaaatctccaacgtttaacatt

SEQ ID NO: 406868 - DNA, 122 bp, Homo sapiens
tttcggaaagctgtacagtttataaaagtaataagacatagcattggtttttagtggatgcgctttgtgattctcactaaatgcatcctgggcacactggtgttctgtgaactagactgaca

SEQ ID NO: 406869 - DNA, 122 bp, Homo sapiens
aaagttaaaatatcagagctctgggagacgctggcttttcgttttccgaggttgccgcgacgccgctggacctcagggggcgcccccgagccactggtggggctcctgccacctccacactg

SEQ ID NO: 406870 - DNA, 122 bp, Homo sapiens
attataatgtcccagcaagcacagtatggcaggaaagcctgaagaacgccccagcatgcccggcatggtgagaacacggaaagaacctcccagcatgcaagacatgatgggaaaacgtgaag

SEQ ID NO: 406871 - DNA, 122 bp, Homo sapiens
ggctgctggtggagaattccctgcccaggggagccctgtgctgggaggcaccgtgtcctccgtccaggctcgctctcagatggcctagcccagcgaggggcaggagcgacagcaaatgggaa

SEQ ID NO: 406872 - DNA, 122 bp, Homo sapiens
ggccaggaagcaccatggcccactgcctgggcctcacctcacgaacgccaagcactgtggcgggcacaggcggagcctggcggcttcacgcccacaccggcagctcctccctcagcccctcg

SEQ ID NO: 406873 - DNA, 122 bp, Homo sapiens
tagggacctgagatctaaatcgatctcaggctatctcgtgttttattgagaatcacagaacgttagtgcttgtagaggttattggagatactttagtcttaccaggttcagagaagtgaagt

SEQ ID NO: 406874 - DNA, 122 bp, Homo sapiens
cagtaaatggaattgctttttggagcccatactctgttcacctgcgtgtgtggaggaggacgtcttaccgttgacaaaattggaccgtgctagttggaagttgcacttgaaatgcaggtcag

SEQ ID NO: 406875 - DNA, 122 bp, Homo sapiens
gagttttcgggtctggtcgggtcgggtggagtagggtatgcttgacttccaccccccggacggagggcttttgtttttgtttttttttgtttgttttttcgtaacatatcaataggaaacaa

SEQ ID NO: 406876 - DNA, 122 bp, Homo sapiens
caggtcagtcagcatggccacaccgagcatgagccctggaagacctctcccgtgcacacccgtgttcacacacattcacacagggattcctgatgagctcgtcaaccacactttcttcagag

SEQ ID NO: 406877 - DNA, 122 bp, Homo sapiens
cgctatcctgtgagtggaagctcatcttgtatgagtggagcagtgaaggacgtttaaaaccgtgttttttgagctgtcgagaaggtaggcaggaattaaggcctcgccaacggcttgacatt

SEQ ID NO: 406878 - DNA, 122 bp, Homo sapiens
ttgcctttgagttaagagttaagaagatgacaagctaaaggttcagtatcccagtcattacggtagcatgtgtgtgacctcctcaacaggtccaaattctgtagttaaaccgcgtgaacaga

SEQ ID NO: 406879 - DNA, 122 bp, Homo sapiens
cgcaaatcccggcctgcgtcattggagtctctttcactagagtcgttcattcattccgcacgcattcattgaaccggcgacctgggccaggctccttcccaggctccggcatggagcagtga

SEQ ID NO: 406880 - DNA, 122 bp, Homo sapiens
ccaggctgcaggcgtgggaaggggcgtctccgggggagccccggggctgtgcagggaggccgagggcgaccccgctgatggagagtctgctcttgttacctagattcgggcgcatttcggat

SEQ ID NO: 406881 - DNA, 122 bp, Homo sapiens
gagaggctggtttggagtggaggtcacctgggacgttaccagcactggacttgacttaagcgggtgcagccaggcccgcaccgagacgacagcatctctttcatcttccaaggcccatcttc

SEQ ID NO: 406882 - DNA, 122 bp, Homo sapiens
cccgcccccttcctggagcgttgactcccttctcgtctcgaggcctgtggcgtctgggtccgttggggcagaaccatggaggaaaagccttcgaaagtaagacgtctccctaggccccttac

SEQ ID NO: 406883 - DNA, 122 bp, Homo sapiens
aagaaaaaaatcagtttgagcaaagaccccaggcggccgggaaaggtgttcgcttaagggcgaaagctaagaacctgcaaccttcccgtctctttcctaccacccgccgccgttaggaatct

SEQ ID NO: 406884 - DNA, 122 bp, Homo sapiens
gtcctccccgatcctgctccacaggtccaggcccaggcccagaggtagcccctgcgttcccgtggcttcaggcacacgtgtgcagacatgacgccgagaacaccggctttgccaccaaggac

SEQ ID NO: 406885 - DNA, 122 bp, Homo sapiens
ggcccagcttataaccgagttcgctcagaagtttgtctcccgacatggtggcgcctagggcgcacggggggcaggaggcggctgctgtcggggggcggccggactccaatctcgggtctaag

SEQ ID NO: 406886 - DNA, 122 bp, Homo sapiens
gaggaggaagaggaggaggcgaaggcaggccaggggtcagtggcagagttaatgctccgtcgcgttcttttgaagtggacgttcgtgggaaagggttctccgagagcgttcactcggatggg

SEQ ID NO: 406887 - DNA, 122 bp, Homo sapiens
tcgacctggccgggcggcggcggaggcggcggcctcgacctggccgggcggcggcggcggcggcggcctggcctaaggtacttctgttggggaatattgtgcagtataataatatatggaca

SEQ ID NO: 406888 - DNA, 122 bp, Homo sapiens
ccgggggagggcagaaggacacttggcttcctctccaggaatctgagcggccctgaggtccgggggcgcagggaatcccctctcccgccgccgccgccgtgtctggtctgtacgtctttaga

SEQ ID NO: 406889 - DNA, 122 bp, Homo sapiens
aaaagttaaccagggagttgaaaggtgtctgtaaaacagactaatgtccctaatgtagaacggtgcctgacatgcaacttactcttgtattttaagaagctcaagcgtctaggttgccatta

SEQ ID NO: 406890 - DNA, 122 bp, Homo sapiens
ctgtcctgtgtgcagctgcgtgtgctcccccactggcccggcctgcgcgcttttctgccccggcactcgccagctgcccagtccagctcaagccgggattttccacggctgcctctgaacgg

SEQ ID NO: 406891 - DNA, 122 bp, Homo sapiens
gagccagacgggacctgcagcacctcctcagcttggcctcgtctcccctgaccccgcctccgtgcatgctgcctcagtttgccttctcagcagagaagcccccaccaccaggggctgggcat

SEQ ID NO: 406892 - DNA, 122 bp, Homo sapiens
tcagtaccaaaatgacagcgccaatgtggcagccatctttgtacagacgggaagtctcggcgcgagttcccgccccctcgtctagttggaaaccgaggaggcggtctcctccggcctgttag

SEQ ID NO: 406893 - DNA, 122 bp, Homo sapiens
caagcactccaggggctttggatttttcacatatgccactgtggaggaggtggatgcagccgtgaatgcaaggccacacaaggtggatggaagagctgtggaaccaaagagagctgtctcaa

SEQ ID NO: 406894 - DNA, 122 bp, Homo sapiens
gcgtgggcaggaacaagggctgcccggggtgcttgcgtgccagtgcgagttccaggtgggcgtgggctcgacgggccctgtgctcagagctgcctgccggtgccgccggaccgggcagtgag

SEQ ID NO: 406895 - DNA, 122 bp, Homo sapiens
agaagcagtggtcccctgggaggtgcagttctgggctctggtgtctccaccccttcctcacgctcccccggcatccccaggcagcttacagtgtttctcttctcttcagcaccctgagggag

SEQ ID NO: 406896 - DNA, 122 bp, Homo sapiens
gcggccccaccctggcagctgatttccgagatctggcagtaagacgccgcgcgcaccgggcgggctgcactcgacgtctaagttcagctaccaagcccaggagcggtttccctaaggcgtgt

SEQ ID NO: 406897 - DNA, 122 bp, Homo sapiens
acacagtgacccacaatgacacaggggagcccccctcacctccacctgctctcagccccccggtcccactcacaggcaggcgggtgaccatctctcctagacgccagtgcagctgcaggagg

SEQ ID NO: 406898 - DNA, 122 bp, Homo sapiens
agcatgaggccaccttggagagttgctgatccagccaaggcatctggcaggaggcatgtccgttccacctgctgcagcagctctggccttggtggtgggggtggactctggcacagacaggt

SEQ ID NO: 406899 - DNA, 122 bp, Homo sapiens
tgcttttcagatccctagatttgtttccatcagtatcactaatggaccagtattctgtggcgtggttggagcagtagcaagacacgaatatacaggtagaataggacattggactgttatct

SEQ ID NO: 406900 - DNA, 122 bp, Homo sapiens
ccggccgcggtgtcttcttcgtgccggcgtcgcagtggccgggcctcttgcgtctggtaacgccgctgtctctaacgccagcccttggcgcccgcgccccgccaccgcagcgcccggcagtc

SEQ ID NO: 406901 - DNA, 122 bp, Homo sapiens
caggtgatcagagtatgggttgtgggacagagaaggtagctattgtgccggggttgtcagcgtgggccttgttgggaaggtgacctttgatgaaatatttgaaggacataaaggaatttgtc

SEQ ID NO: 406902 - DNA, 122 bp, Homo sapiens
gtttccgcccctgaggcctcgggctgtgcgctcagttaagcccgaagctgctgtttcctccggtgtccgggccccgcgcccctgtcatcctcactctgtcgtcctcaccctgtcgccctcac

SEQ ID NO: 406903 - DNA, 122 bp, Homo sapiens
gacgctgcctacgggtggccgggcgggatgtaaccggctgctgagctggcagttctgtgtcgctaggcttctgcccggccgccgccgcacataagctgcgaggaggagctttacgacttccc

SEQ ID NO: 406904 - DNA, 122 bp, Homo sapiens
tgcagaagcagggatcgtgggaggctgcgagcccccagacgcacgggccatggcatgtggcgagagcgccacacatatcacctccgtgggtggcacccacggaaacaaagcccccgagtcca

SEQ ID NO: 406905 - DNA, 122 bp, Homo sapiens
cgatcggccggtgggggccggtggggccgcagactcggggggcggggggcgccaggcttccgggtcctgcccccgccccgtggggaacagcaggacggcgccgaggccgtttcgctttcctc

SEQ ID NO: 406906 - DNA, 122 bp, Homo sapiens
tatccaaaggccccaggaggacctggggtggctggaacaggacctggtgccgggagcaggcggggccggggattcccgacaaaggcttgatgtgtacttgaagtgagcaaagggttttgaat

SEQ ID NO: 406907 - DNA, 122 bp, Homo sapiens
cgaggactggcagcggcggggctgattgatgggcgcccggcgcaatgaggggggcccgggcgggggcggggcggggccggctctgggctgagccagtcgcgggggcggcggggggggggcgg

SEQ ID NO: 406908 - DNA, 122 bp, Homo sapiens
cccggtccccgcccccagacacgccgggctctcggggcaccacagccatgtgctcgttagcgtcaggcgctaccggtgggtaccctggcccctcagcacccggctcgtccagccccaggccg

SEQ ID NO: 406909 - DNA, 122 bp, Homo sapiens
ttcctctcactaggtaaaagacaattgtattgaactcttaagaaaattggactccagtcccggctccacctttacttccctgggccttggttttcccaccacacaggagtttgaacactttg

SEQ ID NO: 406910 - DNA, 122 bp, Homo sapiens
ctgccgggctccctggggagggtcctctcacctcttactgtcttttctgttcatgcttcccgcgtggggtgaggaggccgggggtcttgcaagagtagggctcagctcctccccttgcccag

SEQ ID NO: 406911 - DNA, 122 bp, Homo sapiens
gaattacaggcgtgagccaccgcgcccgtctactgcgcgttttctaaaccttggctcctacgcatttatcagaagagagagcgcaatctgtctatgacttccagccaatagctacacttctt

SEQ ID NO: 406912 - DNA, 122 bp, Homo sapiens
ccttgcatggtgagaatgttgagagctttcagaatttgagaacaaaggaaattcccagaacgctagtcttaggcaaggctttctagaaggggcaggacttgaactggctttgaagatcagtc

SEQ ID NO: 406913 - DNA, 122 bp, Homo sapiens
agatgcttcctgcaaaacccacacccacaagacaggaagggtctcctgaaggtggggtaacgtgttcagtgacaccgtgtcatgtgctaacagctgagcaccaactcagggccatgctggaa

SEQ ID NO: 406914 - DNA, 122 bp, Homo sapiens
gaggctgcgagccagtgggtagtgcggatggccagtggggccagaagcacaacgtggcagcgagctgtggggtgtgtgggccggtgctagccaggctaagagccttggaccatcccctgaga

SEQ ID NO: 406915 - DNA, 122 bp, Homo sapiens
tggatgcgggcggagcctccgggcagggcggggcctcagcctgggtccgcactggggaggcggccacccggtagcttgggcgggttccgcccacctcccgcctgtatttacagcccccttcc

SEQ ID NO: 406916 - DNA, 122 bp, Homo sapiens
ggggcacagggtggaccccaggaagttctgctatgagtcagcttcgagtgctcaggggaccggacagaggctgctggccggggaaggatgccggccggcggtacctacttccgcagctgtgg

SEQ ID NO: 406917 - DNA, 122 bp, Homo sapiens
gccagagggttccctgcagctacccccggaacttaaaggatgttctgaaagggcatcacacgtgagctctgttcagtggttataagagtcaggtactggaatcaagacaggaaggaagaaag

SEQ ID NO: 406918 - DNA, 122 bp, Homo sapiens
catggcctccagcgctgacctcacgggccggcctcttcctctgtgatgacctcatgggaacgaggctttgtccctgtgatgacatcacagaacacagacatttttgctagtgatgacctcat

SEQ ID NO: 406919 - DNA, 122 bp, Homo sapiens
aaagtcacagtgatggcagatcctcgcgaggagctcatactgggatactcaaaatgggggcgctttcctttttgtctgtactgggaagtgcttcgattttggggtgtccctgtttgagtagg

SEQ ID NO: 406920 - DNA, 122 bp, Homo sapiens
gggtacgagaagtagtgcacaggagaggaatctttcctttttccttgtaagcactgcagacgtggctcacaggagaacattacttggcccaaaggcaagagcatatcagaagcctctgtctc

SEQ ID NO: 406921 - DNA, 122 bp, Homo sapiens
cgccagctggttcaggttttctaatccaaatcttggaaggtatgccaaaagaaaaagaaacggggggaaaaatcattgcctttcataggtgcccccattaaaagctgtttgctgttcctgtc

SEQ ID NO: 406922 - DNA, 122 bp, Homo sapiens
tggagaggagacctgtgggcagctctcccaggcagggaggtgtgtgccgggtagggccaccggcctggctattttggtcactgttgggcctctgccagatcccggcatccccaggaccagcc

SEQ ID NO: 406923 - DNA, 122 bp, Homo sapiens
tattcattcatacgatggtttttcctctaattctctcaggtaggcacggcccccaccaggcgccatggactggaagacactccaggccctactgagcggtgtgaacaagtactccacagcgt

SEQ ID NO: 406924 - DNA, 122 bp, Homo sapiens
cttgagtggagccaaagccctcagaaaactacaatcacagaggcagaaactcatccttaccgatgaagctgatctgcagagaagagagtggagagacaggcagaggtaaggagaggcctggg

SEQ ID NO: 406925 - DNA, 122 bp, Homo sapiens
gcctgtgaacttcacttaggccccaagctgacagactgtgctgaggccaccttgtcacgccgtagcctgttagtcctcctaacctcttaagagcagtctcttctgagccagcctctgcgggt

SEQ ID NO: 406926 - DNA, 122 bp, Homo sapiens
ccccacacccagcttggccccgagccacgcctcccaccccgcccccacactcccgagccccgcctcgtctccacactccggcggcgcctccctacccggccccgcctccgcgctcgggctgc

SEQ ID NO: 406927 - DNA, 122 bp, Homo sapiens
ataacacccctgcggcccggccaccccgcgccccaggctgccctgccaggcgtcccggggcgccaatcgcaagttggcgttgccagcgtctgcccaagtcatctgcagggcgcccggagcgc

SEQ ID NO: 406928 - DNA, 122 bp, Homo sapiens
ccgggccacggttgggacccagtcgagggtcggactggtcagggttcaggcgggatccggcgtccgagtcctggtgggccggcctggggcaggatctggctctggctgcgggtcctgactcg

SEQ ID NO: 406929 - DNA, 122 bp, Homo sapiens
ggcactgaccggctcctccaggctgacggtgcgccagggttgtccatccaggacccagtgcggggtgactggctgcccagggatatgtcctggagtaaagacagagcacagggtgaggggga

SEQ ID NO: 406930 - DNA, 122 bp, Homo sapiens
cgcaccctccgcgcccgagtgagcctacctcgcttacagctggttgccggccattgcctccgccaccaatgacgtccccaggggcgggtacgcctccgcttccacctccgccacttctccgc

SEQ ID NO: 406931 - DNA, 122 bp, Homo sapiens
aaggagaaagcagcactcttctgccccacccccaactgtcccttcatgatcatcctttctcgctgcacatcgaggtccctacctggcgatctccttggcgaccttctcgttggggcaagtaa

SEQ ID NO: 406932 - DNA, 122 bp, Homo sapiens
catctttatgttttcgtccattttaacttgatctaggaaaattccaaaaaaaaaaacccacggtgctggagcaagaagatctcaggttgtgaccttctcgaggaaagaagcactttctgttg

SEQ ID NO: 406933 - DNA, 122 bp, Homo sapiens
aaatatgcacacgcttgagagtcagcctcaagcacatacttagagccacttactgcttctcgggcaccctagcccaatgcctcagcctccctggcttcagtcctgcggctgagtgaatgttc

SEQ ID NO: 406934 - DNA, 122 bp, Homo sapiens
aagaaacctgtagagaagagaaagccagtttagatgccatttgtctctaacttgtaagcccggcatgcctgaatttttgcaattgcaaataaagtgcagaggaagaacaaactcaagaaacc

SEQ ID NO: 406935 - DNA, 122 bp, Homo sapiens
cggaagtggtggtggcccgcgcggccggaagtccagatcagctgatgggggaggcggctccgcagccgcctagaggccccagccgccgagcgcttcgtcccggccctaagtctcggagactg

SEQ ID NO: 406936 - DNA, 122 bp, Homo sapiens
gttcagaccaagaccccattgggtgtcgggtcgcatagggggtctgattatggagtctttcggtgggatcaagcaggaggccctgcttgcagctcccagccagctgccccgtaaagccttaa

SEQ ID NO: 406937 - DNA, 122 bp, Homo sapiens
attttgtttgcagttaaccgtttagggatgtcccttgagcttttggggtcacgaatgcaccggctcttgcctttaggagtgatttggtgtaaagatttattacttggtaaccaagatttaca

SEQ ID NO: 406938 - DNA, 122 bp, Homo sapiens
gcgcatgcgcctctgtgcgtttgtcccatgctggttccgtgagtctggccttaggtgtctcgtgtctggggttgatccgagctgtcgccgccgccgccgcaatgggcaaaacggccaactct

SEQ ID NO: 406939 - DNA, 122 bp, Homo sapiens
gggtgctggatcacagtccctgcacctgcagaatgcggatacctctcgctccagatagggcgactgcccccgacctgtgctgtaccctaagttggcccgtctggcctctgtgctccagccct

SEQ ID NO: 406940 - DNA, 122 bp, Homo sapiens
gggtcccgactgggcaccacttccggtccgacacggccacgtgttacatctaaatggcaccgtcccccgagtgcgccgaccttgtgctacagccagaacagctccgggaaacaagggcagcg

SEQ ID NO: 406941 - DNA, 122 bp, Homo sapiens
ccttaggttgatgtacttcgccacagcctcgggacgtccatgcagtgctctcagcccctccgctgcagtccctgctgttaaacagtgattcacgcaccgccatcgcgtgcaccatgcagggc

SEQ ID NO: 406942 - DNA, 122 bp, Homo sapiens
atgcaggcaaactggggaagtaactgagccacgggggaggctggaccacacggctttttccgaaaatactttaatgcgaggtcctcgtgtgggtcgtgttttggagagataactggccttgg

SEQ ID NO: 406943 - DNA, 122 bp, Homo sapiens
gtttccttcggagggggggcttggcctttcctggggtgggcctggggtccccctggtgggcgtgggctttccccgggtgggtgtgggttttccctgggtggggtgggctgggctcccttgct

SEQ ID NO: 406944 - DNA, 122 bp, Homo sapiens
tcacttttggtcaccggtcctttcccgagggcagtctggcggggcacggctccagggccccgagtccagcacctccctgaaatcttcacgccacaggcaaagcagtagggcaacttacccag

SEQ ID NO: 406945 - DNA, 122 bp, Homo sapiens
aaccgggcagcagggacggctgacacaccaagcgtcatcttttacgtgggcggaacttgtcgctgtttgacgcacctctctttcctagcgggacaccgtaggttacgtctgtctgttttcta

SEQ ID NO: 406946 - DNA, 122 bp, Homo sapiens
ggaacaaaagtacatatacaaaaataaaataacgtacaactccacccccaaagtattcaccgtggttatttttggatgggaaaaccagaaaggatttaatagtctttttttttgttttctga

SEQ ID NO: 406947 - DNA, 122 bp, Homo sapiens
ctcctcccacctccgtcccctacttccctccccaagaagtgctatttttagcaaattctccgcgcgccgccgcccgctcagctcgcagctcgcagccgcccgctgccgccctcccgagcccc

SEQ ID NO: 406948 - DNA, 122 bp, Homo sapiens
cagcaattatggcgttcatttgccctgcttttatattcctggtcatttatgaaatgaagacgctgatctgcaaaaatcactatgcattcatgaaaggagctctgggagctccccctgaggat

SEQ ID NO: 406949 - DNA, 122 bp, Homo sapiens
gtaggcaacatcgccaaggacttgggtttggagcccctggcactggcagagcagggagtccgcatcgtctccagaggtaggtcccagctctttgctctgaacccgcgaagcggcagcttggt

SEQ ID NO: 406950 - DNA, 122 bp, Homo sapiens
agccccatcatcagggagtctctgtccgcatggcctggagtatttcagggcacacatggccggggctcgagacaggctggtgaagggaagaacaggtgagtggtgggctggcggttgtgggg

SEQ ID NO: 406951 - DNA, 122 bp, Homo sapiens
acagcgaagaccaaattcagccgctctttaaaattcgccaccaagagttgcagtctgaagcggtgcttctagctgctcccagcgtgggtgtcggtagtttttgtgcttttaaaaaattagtt

SEQ ID NO: 406952 - DNA, 122 bp, Homo sapiens
tgttgttgttgttagaaattagttatgataagaagttgtattcctacatctgcatagagacggtgtttatcactagcacctgtctctggttggcatcagtaaggcagaaagtgagaagtggt

SEQ ID NO: 406953 - DNA, 122 bp, Homo sapiens
ggcctcctgccccacctgctgcccgcgctggggttcaaaaacaagactgtccttaagaagcgctgcaaggactgttacctggtgaagaggcggggtcagtggtacgtctactgtaaaaccca

SEQ ID NO: 406954 - DNA, 122 bp, Homo sapiens
gccgcaatgctcccaaaatagggactcgcagggcacaggggcggggccgcgagagccagccgctggccgagtgggcgggacctaggggtggggctggaggctgaaacttgccaaagtcccgg

SEQ ID NO: 406955 - DNA, 122 bp, Homo sapiens
gtggatacagcagacatatagcccttaaaacctttccctctatttcccttgctttggggtcgggtgagacaactacagcaacagttgggacaatctccacttagatcctgaaagaccaaaga

SEQ ID NO: 406956 - DNA, 122 bp, Homo sapiens
agataaggaatatagtttttctggaacagaggacccttcttagaaaattccttggccgggcgcggcggctcacgcctgtaatcccagcactttgggaggctgaggcgggtggatcacctgag

SEQ ID NO: 406957 - DNA, 122 bp, Homo sapiens
gcgcgggtgggtgggcgtggggcagggcaagcctctcctgccgcagggagctcatggctgcgggcccatccacacccagggaccgcgcagccctctgccagctgtggcgggccatcatcctg

SEQ ID NO: 406958 - DNA, 122 bp, Homo sapiens
gatccttatgcgattggccggggagccggaggggcgggcaatttgggatcgacagtgactcgcgactggtcggcgcggcgaaagcagagcggcgcgccggttccttggttcctgagggcgat

SEQ ID NO: 406959 - DNA, 122 bp, Homo sapiens
cagaaggagggggaagggcagggtctaccaggggaaaccaaggcacagcagcatttcccgcgatgaagtgtgtgttttgacctcacagaccagcgtttgaaagcccctggagtggatgactg

SEQ ID NO: 406960 - DNA, 122 bp, Homo sapiens
tcactgtttagaggacagtcctgacacgtcccgctgtgacacgcgtgctacctcgccggccggccctggactttgctctggcgtgtggccgagcacacttgtcgtcagaaccctctcgttgg

SEQ ID NO: 406961 - DNA, 122 bp, Homo sapiens
gcctgtcctgtggacactctgggagagtcttctgttcagagtgactcctagtagggtaggcgaccaaaggaggccacctggcaggggtccaggccagctggcagaactatgtggcccagact

SEQ ID NO: 406962 - DNA, 122 bp, Homo sapiens
cctcttcctggtggggctgctgctcggcctgctgctcgcagctgctgccctgctgggctccgcaccctactaccagccaggctccgtgtggggtccactggggctgttgctggggggcggcc

SEQ ID NO: 406963 - DNA, 122 bp, Homo sapiens
ttttccaagtttgccctgccctcgcgggttggtggctgttgtttaaacttctgatgagcgcgctgcgtttctgctacgggatgaaaacctaattacctcctctgcaaagagctttccctagt

SEQ ID NO: 406964 - DNA, 122 bp, Homo sapiens
gagaaagggatccgcttccttcctttagagctgtgaaatgtccccggttggaattaaaggcggctgctggggagaggtgaaattcagccaaaaccacccagtcaggcagcccttctcagaga

SEQ ID NO: 406965 - DNA, 122 bp, Homo sapiens
tggaaaccgccactgggaccccaacctatgaggcaggtattgttagtgtctctgctttgccgatgaggatgccaggggagaagaagttgatgaactcactccgtcacacagctgagaggcga

SEQ ID NO: 406966 - DNA, 122 bp, Homo sapiens
gaattaagctaattaagtggaagccgtcctcctggggctgtgtgttcctgcggctctgaacgcatcgtcttacacacaaaagcagctctagaaaatgtggagaaggcacggagtgatgccaa

SEQ ID NO: 406967 - DNA, 122 bp, Homo sapiens
cacagagaattccgtctaccaggaacggcaggaatgctatgcgttcaatgggactcagcgcgttgtggacgggctcatctacaaccgggaggaatacgtgcattttgacagcgcagtggggg

SEQ ID NO: 406968 - DNA, 122 bp, Homo sapiens
tcagagtcctcactaattcctaagagcatgcagagatctgaaaccaaaacgtttgagaaacgatgacgtaactcctagctctggattaagggagaatgtgtgacaaagagcatttggtatag

SEQ ID NO: 406969 - DNA, 122 bp, Homo sapiens
cgcgtcggcctcttaaggctgtttgagccctggatgtgacgatcccggccgggtacagtgcgcgcgccgagcccggccagggaagcgctcctttccccgagcagttacagcggttaccgagg

SEQ ID NO: 406970 - DNA, 122 bp, Homo sapiens
aaggaaatttgcaactttcaagtcgtttgaagaccaagttgggcccatgaagtctaaggtcgtgggtgacagagaacagcaaggacaatctcccttcctcagcagggaggggcgacgagccc

SEQ ID NO: 406971 - DNA, 122 bp, Homo sapiens
tgcaagtcctggcggaagccacgtggacaccagagggcgccacagcaccagctcattccccggaggctccatcaccaagggttccggcttcacagaacaagcctgagttgagctcctgcaat

SEQ ID NO: 406972 - DNA, 122 bp, Homo sapiens
aagcaatgacctgtggttgattgtggcaaagtgccaactgaaacacgtgccttgggagcccgagtgactgctgcactgaatgttatggcagtcaagataactgtaaggactgtggggtggaa

SEQ ID NO: 406973 - DNA, 122 bp, Homo sapiens
ccgcctgccttatattctagccgtgctggcagtcgattagatggttcccatccagattaacggtgggtctgcctttcctagcccactgactcaaatgttaatctcctttggcaacaccctca

SEQ ID NO: 406974 - DNA, 122 bp, Homo sapiens
gcaaatataacattaatgagagcatgagaagtagttttccatcagaatagcagaagaaaacgctttccagtacagacgggcattttgatcaggcaatcctcagctcttcccagaactaagtt

SEQ ID NO: 406975 - DNA, 122 bp, Homo sapiens
agaatttgcctccggacatctggaaacagaacccaaaagggtaaacatggacctagagtccggggtggccacgggcctagatccaaggtagttgggtagaggggggctctgcagtccctgac

SEQ ID NO: 406976 - DNA, 122 bp, Homo sapiens
ttccaacctcaggacacctctgctgccttgcaggcttccagagagttctgaaggagagtccggggcaggcatggggctgcagcaggggctcgctggtgtgggagagaggaacgctggccaga

SEQ ID NO: 406977 - DNA, 122 bp, Homo sapiens
ccacctatcgtcaccgagattgtaaaacttctaaccgggaagaatcaaatacatgcacaacgggttacaggttaacagacagatgggagcggaaagggacattccagcgcttccctgggcgt

SEQ ID NO: 406978 - DNA, 122 bp, Homo sapiens
cgacgcaacgcaggggcacctgggagtcgtaggcggatgggcccaaagccttccgggagtcgtagtccttccgcccgctcctcgtttctttggaggttggcccttccagctccagttctgcc

SEQ ID NO: 406979 - DNA, 122 bp, Homo sapiens
gcagtaggtggggccgccgagtgggttgagcgttactgtggcagcgggcatcccagggtgcgtgcggtgcagggtgtgcaagaaaatgcgaggttggaggaggaggtctgtgtgtttttaag

SEQ ID NO: 406980 - DNA, 122 bp, Homo sapiens
caacagcacaaaatcaaccatgtacatgtaacatagtgaaatgagtccacgttttctacacgctacaggataggaagagctggctcttaaggcccagggctcacatgattatgcacttgtca

SEQ ID NO: 406981 - DNA, 122 bp, Homo sapiens
cccccgcccgcggctgggagcctgtcgctccgctctgcgccgctaattggtctcgtcaggcggccggcaggagcagatccgagccgtgtcatcctcttagcgccctcacgccacccgccgct

SEQ ID NO: 406982 - DNA, 122 bp, Homo sapiens
ttgtggctctggcagtttggtcctggattttaccagttaccactgacagagcctcagccccggcctttctgaagcaaataatccagcaacagccagcagtttcgcttccgggatttcctctt

SEQ ID NO: 406983 - DNA, 122 bp, Homo sapiens
ggaagccccgccctccctgcacctgctcctgacccggcctcatgctctgggggccccgcgcgccacctgctggtcctgagcagcacctgcgccggtcccctccgcgtccatgcagggaggtt

SEQ ID NO: 406984 - DNA, 122 bp, Homo sapiens
gggaaagaggacaagttctgttttgcagatggcgtattctggacatccgggagatacattcgggggaaacaggacgagttcagttttgccgatggcgtattctggacatccgggagatacat

SEQ ID NO: 406985 - DNA, 122 bp, Homo sapiens
aaataaccagcctcaaagcttggcaaagagggcatcagtatcagctctagaggtttgctccgatttatatctcctcctccagtaaagtcttctgctcccactcccagccaaccccgctcaac

SEQ ID NO: 406986 - DNA, 122 bp, Homo sapiens
cagaggcacagacaccttaccgcctgtgtgtgatccaggactaatgaaaaaagtcctctccggccacaccccgttccctgcctggtccccgtggagtctccggcatttgagagagcttttgt

SEQ ID NO: 406987 - DNA, 122 bp, Homo sapiens
gaggtccctagcaggcaagtcttctggaggggagaggctcctggcagccgtgaagcccagcgtgtgaggtcccaggtaagagagagggttggccacaaaggactccagcaggtgaggcccca

SEQ ID NO: 406988 - DNA, 122 bp, Homo sapiens
ggacctgagggaggggggcgtacgcgggtcggggggccacgccgggcgagcaggctaaggcgttcccgctgcgctctcagagcccggaatggggggaggggggcgcgggggcagctctgggg

SEQ ID NO: 406989 - DNA, 122 bp, Homo sapiens
actcctaataaacgtgattcttaaaggactctccctgtgtacatcctttccaaggagccccgatgtaccctgcttccctcacagccaagctcctctaggacagtcctccctagggggttacg

SEQ ID NO: 406990 - DNA, 122 bp, Homo sapiens
cgcccttacggatcggctcagacaacgggcctgcgtttttggctgccttggtacagaagacggcaaagatattggggatcacacggaaactgcatgccgcctcccggcctcagagttctgga

SEQ ID NO: 406991 - DNA, 122 bp, Homo sapiens
ggagtgcagagccaatgcctccgaggcaagcggtcgcagagcatgcgtgtgtcccctttgcgtgtacatgtaaccggacacacgggcgtggcacctgcagcgttcagggaaccagagctcgg

SEQ ID NO: 406992 - DNA, 122 bp, Homo sapiens
ggggagtttggcgcaaagcctgctggggcatggagtcccggcgagctttgtgcgcatgtgcggggaggtgagggggcttggggggcctcgcctgagagagtgaggtgagcgaggggggaagg

SEQ ID NO: 406993 - DNA, 122 bp, Homo sapiens
gtgatgtccacggctgtgtctatgactcaggacgggcaggcgtccccattcttcctgcaccggccatgttcagtcctacctctgggcctttgcccacgctggtttcctctcccggcacaccc

SEQ ID NO: 406994 - DNA, 122 bp, Homo sapiens
caaaaccaacgggcagggccctcgttctaaaagcagaaaacggcgtgatcacaggaactgcgttccttccttccttttttttttctctttttgtgacagggtctccctctgtcacccaggct

SEQ ID NO: 406995 - DNA, 122 bp, Homo sapiens
agaaccacttacatctggcggagaggttgtagcccccaagaggggtggggtggccctccacggcatcgaagcctgatgacaccagcaccacatccggggcaaactcgctggcgatcggcatg

SEQ ID NO: 406996 - DNA, 122 bp, Homo sapiens
gaagtcctgtactgtggacacagacagctgaagtggccagacctgctgtctacatgccaccgccccccaacccgccccagaagccaagggcctgggcatgaggcaaccctcttgcagtgtgg

SEQ ID NO: 406997 - DNA, 122 bp, Homo sapiens
aaaacctcatcagtcttcctctcttgactcttgggcgtcccaggaattttaacttttcctcggcgtaagtgtttctcgcgcggaccccttgcaggcgcaaagcctggctcgctctggcctcc

SEQ ID NO: 406998 - DNA, 122 bp, Homo sapiens
gttccagcttttaaaggctgtctggcttccttggaccatgacccatttcagcaacggcatcgctcctacctctgcttctgccatcacatcttctctgacatgcctgcctccttccccagtgg

SEQ ID NO: 406999 - DNA, 122 bp, Homo sapiens
caggctgaaactggagatcatattatatcaatggtctcgttctctcaggatctcacagatcgatttctaaattttgttttccaaattggtggtccattagaagcacccaggattccatcatt

SEQ ID NO: 407000 - DNA, 122 bp, Homo sapiens
cggtcagaatcccaacccctcgactccggaaatgatctgagagacggaacttccgaacgtcgcaatcagatttgggcgggctaggagggtttgggtcttcaggtcacatctggacggagaga

SEQ ID NO: 407001 - DNA, 122 bp, Homo sapiens
gtaaaaacaaaggttaacccccttaaggcaagtttagaccctttctggcttggagaacagcggaaaaactccacactaacaaagttccctaactagcccgcaactgccagttacctgccttc

SEQ ID NO: 407002 - DNA, 122 bp, Homo sapiens
ttctgtggttggttttgatgaggactcgtatttcagctcctgtctctccttgtcagaggccgtgtgaggtgcgtattgcggaccgccggccgcgctgtgaggggtgtacatgtggagccgtg

SEQ ID NO: 407003 - DNA, 122 bp, Homo sapiens
agaagacactgcgggcgacacaggcagcaacgtgagaactacattacccagaagacactgcgggggcagggcagcgagtgtagccattggtctagcagagagacgactaatgaggtctcaat

SEQ ID NO: 407004 - DNA, 122 bp, Homo sapiens
aactttacgatgatgatgtgcacatgctggcgtggttatatgcttcacagtgtatgaccacgctttatcaaatacatccgagagcctgctgtccaccaggttctatgctaagcgctttacgc

SEQ ID NO: 407005 - DNA, 122 bp, Homo sapiens
gctgagacagggataccgctctgagatccatctgtaaaacttggggactcccatttcgatcgtcaacactaatcccagtcagggccaaaccgaaaccaaacgccccgccggggctccgccgc

SEQ ID NO: 407006 - DNA, 122 bp, Homo sapiens
gcaaccaacgagcaggatgcgcagtttaggctgggattcctgcaatagaaaagcggagctcgacggtcaaggcgtcagattgcaagtgtccatcaccctgcctgtcccaagggcttgggaca

SEQ ID NO: 407007 - DNA, 122 bp, Homo sapiens
cccatcccaccaggtagatttctctggagtatcccatgatgaggctggggatttggttaacgaggagtgggaacttaagattcccattccctgagtggagacatgtttttaaaaatgacatt

SEQ ID NO: 407008 - DNA, 122 bp, Homo sapiens
cggccacactcctattcacgtgatcgatttctgcatattccactcgcctgaaccgccgcgcgctgactggttccgcctcaccgcccgggtgggttttattgctcagccctggggacttttaa

SEQ ID NO: 407009 - DNA, 122 bp, Homo sapiens
gtagagaggctgttgttagacctacttaatagatgaaacagactctgatgaggaaagggacgtccccagaacctgagttagtggctggttgggtcctgaactcacacattcggagtctccag

SEQ ID NO: 407010 - DNA, 122 bp, Homo sapiens
aaatgccttggccacaaggagaaaacattcgctggctgtggcttgagccaactgggtcagcgccagcctgtgcagatgtctttgtggacagagaagaagtccctctgggagaaggcagccca

SEQ ID NO: 407011 - DNA, 122 bp, Homo sapiens
accttgtgatccgcccgtctcggcctcccaaagtgttgggattacaggcgtgagccaccgcgcccggccgagttagtaattcttgaaggtgtgtcaggtacattggatgcactgtactattc

SEQ ID NO: 407012 - DNA, 122 bp, Homo sapiens
tctaaaaagctctttgtggctgctaaaagtgctgggaccatggtcttcaaacacagcagacgacagccttctctctttgactgctacatcactgccagagcaatcttttgaaagcaaatctt

SEQ ID NO: 407013 - DNA, 122 bp, Homo sapiens
aaaatgtgattaacatgtaaccataaaatgttgcagccataaaaaaagagagaagttatgcgtaagttatggctgcgtgaatggccacatcaagccatttccaaaagcccatctcactaaac

SEQ ID NO: 407014 - DNA, 122 bp, Homo sapiens
aaccgagcttctattgtaaagcaccctatgccgcgcaaagcgtcatgggagctgtagttccgccgcgcccccgccgcgtccccggctctgagtggaggagtggaaagggagcgtgcgcgaag

SEQ ID NO: 407015 - DNA, 122 bp, Homo sapiens
aggaaaatctgcagaccactggaatacatttgttaaactctcatctgcagggacactgggcgatacttggcagtgactgttctaccttgaggctttgtttggtttatttattaaagtgtaca

SEQ ID NO: 407016 - DNA, 122 bp, Homo sapiens
tccaccgcccctccccacggggtatgcgggcgcgctcgcgacccgagcccgggagaccagcggcggggccctcccccaccgcctccgcaccgttgccccctggactagctcggagctgacta

SEQ ID NO: 407017 - DNA, 122 bp, Homo sapiens
ctcagcgaggagcgagggagtcggaacaagtcggggcatctcccttgcacctcccgggagcgccagcccagccaagtctagcgattgcccggcccgccagcgaagacgcttcctctgaagca

SEQ ID NO: 407018 - DNA, 122 bp, Homo sapiens
cacccctttctcaagttaattcccacttgatcaaaggtggagctgcgggctccgaggaggcgcggtcagggtggcaggcctgggctgcgcggaccgcgagcgagcctcctgggtctccctcc

SEQ ID NO: 407019 - DNA, 122 bp, Homo sapiens
atgaccagctcctccatgtcggccctgtccagggtgggcacctctttgagctgcagctgccgcagcaggctgcccaggagctgctccccggtcagggcggccccggggctggccaggggcaa

SEQ ID NO: 407020 - DNA, 122 bp, Homo sapiens
cgccaggctaggagggtgagggcgtcagcggagagaacggcctgcgtgggggctggtgggcggagcgggtggatcttggcaaacggcaggaatggaaacggctggagcatatgtctcagtga

SEQ ID NO: 407021 - DNA, 122 bp, Homo sapiens
ggtgatccgcctgcctcagcctctcaaagtgctgggattacaggcatgagccaccgcacccggcctggtataatacatttaaaagaaaaatgtcttctataggaattaggaatcctgactac

SEQ ID NO: 407022 - DNA, 122 bp, Homo sapiens
agtacattttacactctgaacatgtccttgttaatctgctaacactgcactgttttgcagcgtggtggtgtaattcatttgtctgccattccaggaatttgaggatagaatcaggaaggtgg

SEQ ID NO: 407023 - DNA, 122 bp, Homo sapiens
tgcaatggaaactcccagtgcactctccacggcctggcagccgccgctgatgggtggagtcgcgctcccggccccacctatgggacggagctgcttctcccgcatctcggctccaccgcacc

SEQ ID NO: 407024 - DNA, 122 bp, Homo sapiens
gcgcagagaggcctgacagcctctgcatcagtgaccgggcgaagagtggggcagctcggacggtggttggggaacgttagggagattggcgcgcggaccactgggtgagcgcccaggaacgc

SEQ ID NO: 407025 - DNA, 122 bp, Homo sapiens
ctctgcgcaatggacccgggaaagctgcctcccgttaagggcgcccaggcactgtcaaagcgccctccctgcccgggccgggagaagtaaggggtgtgaaggcggagccactgggctggcaa

SEQ ID NO: 407026 - DNA, 122 bp, Homo sapiens
aggaggaaggtggaaaggtacccaagacacattctgctgttactccgtagtgaccctttccgaagcctgtatttcctgagccaagaccttccattgtctttcaaatatcaggcctggttttg

SEQ ID NO: 407027 - DNA, 122 bp, Homo sapiens
tgcaggtggatgggaaggcagggctggggcacccctgcggccgtggtggctgttccccagcggggacctcgccatggtctcgagagccatatttcattaaacaaataaatacaaagacagtc

SEQ ID NO: 407028 - DNA, 122 bp, Homo sapiens
gcagacagggatgcaaaaataaatgatgtcagcctgcagccaaactccagcatcccacaccgcagctgacccactgctcatcgcgagggcctgccaggagctggcctcccgcactacttgtg

SEQ ID NO: 407029 - DNA, 122 bp, Homo sapiens
gggagcgccgcccctcaatcaccagctgcggtcgccaggggacggtcgcagggagggtcgcggccctggctgcccgcagtttggtcctaaagccgctggtccctggggcaccgccccgtccc

SEQ ID NO: 407030 - DNA, 122 bp, Homo sapiens
cagataaactcaacttcctctttcaacaacaaatgtgtcagttatcagcaggatccatgccgccagagtaaagctttctaccctttactccctgcaaagaaacaagagtgcttatcccagct

SEQ ID NO: 407031 - DNA, 122 bp, Homo sapiens
ttctgcggccttgcagtccccgcgccctgccctctccatgactgcccgtcctgggcccctcgctttccagatcccgcacccagctgtcccttgcgctctctggaactccctctgctctccct

SEQ ID NO: 407032 - DNA, 122 bp, Homo sapiens
gaacacgtgagctgattccatcacagactcctcagtaggcagcagtaggtgtttagtgaacgggctatggatgctgccccactcactacttcctttctaggggaggccgacttcaaatgcgt

SEQ ID NO: 407033 - DNA, 122 bp, Homo sapiens
aggggctccgtgtggtagcagtggggcctagggctgggccgccggaccggaaggtcgtgacgaggcgtgtctctctctaggctcctctgcacccgagcactctccccgcacttccgggctgg

SEQ ID NO: 407034 - DNA, 122 bp, Homo sapiens
tgggctccctgcttgcgcggggcgctgtggagagcaccatgcatcaccagccggcccgggcgcttcccttaaatagtaatatgtaaggtagagcatgttacatttcatccatcacccatggg

SEQ ID NO: 407035 - DNA, 122 bp, Homo sapiens
gggcccggcgagctgggcaggtgccccctccggggccgtgggatctggtgagcttcccggcgcgcggggggcggtgcggcttccggtcccggctcagcctccgacccaggtggtctggagcc

SEQ ID NO: 407036 - DNA, 122 bp, Homo sapiens
aggggcgggacaggggggcgtggcctggtggcgctgacgtcacctcgcctataaaatgtccggggcgccgctagctgggctttgtggagcgctgcggagggtgcgtgcgggccgcggcagcc

SEQ ID NO: 407037 - DNA, 122 bp, Homo sapiens
cgactgaggaggaagagctgggacgggagccagctccgtccacctccaggtcctgcctggcgagctgccctcgtgtacggggcaccactgcacgcccacaccacaaactcgcctcagctggg

SEQ ID NO: 407038 - DNA, 122 bp, Homo sapiens
cgcccgactccaagatggcgcccgccacagctgccaggtgttaagatggcggcgcggggccgcgcccgcgctcccaggctctcctcccccagccttcctccggctggcagcacgactcgcgt

SEQ ID NO: 407039 - DNA, 122 bp, Homo sapiens
atcactttcaataccaaaagaaatccaaggcaactagagtgtagagagccaagggaaaagcggcaagagatctagacctatgttaaggaagtggagacaagagcacagcttgctcatattcg

SEQ ID NO: 407040 - DNA, 122 bp, Homo sapiens
gcgcgcgcgcctggatctcgttgggcctcggcaaagttgtgcctcggcacgatgctaattcggcagtgcccggatggagcgggccggggcggcggggggcggtgccgggaccctcagcccgc

SEQ ID NO: 407041 - DNA, 122 bp, Homo sapiens
aaaaagctgattacagccacttggggagagagaaataacagtgaccttctgcagaaccagcgataacttattccttgtaaggagtggataaacaaaatgccccacactcatcactcaggaat

SEQ ID NO: 407042 - DNA, 122 bp, Homo sapiens
gaggcttctgtctctgaatctcctaagtctgcaccaagatgtagtgcctgacatcctccccgcccatgtttggagaggagcccagatgatctgggacaagggttggcctggcccagctcagc

SEQ ID NO: 407043 - DNA, 122 bp, Homo sapiens
ccctagcacgtttccgacagttactgaaacactgacacaggagctctgggggccgagctgcggctcccgcctgtgctcaccttgtgggggaaggtcgaagcggacatgcccatcataatgca

SEQ ID NO: 407044 - DNA, 122 bp, Homo sapiens
tttccctcttttctccagagctcgtgagcctgcaggtcctggatcaacacccagttgggacgagtgaccacagggatgccacacagctcggatttcagcctctgatgtcagctcttgggtcc

SEQ ID NO: 407045 - DNA, 122 bp, Homo sapiens
gggggcccccggaggaaagcggagttgccaagacccggcagctcccggaagcggcggccccgggatcctgggaccagcagggcagatgcgaagggacccagacctgttcccggaaaggggct

SEQ ID NO: 407046 - DNA, 122 bp, Homo sapiens
tcccaggacagagctatgaatcaaacgaccaagacaatcacccagtcagtatttattaggcgcctactgcggacggttggtcttcacgcagatcaggcgagaagggatagtgatgcgcgggc

SEQ ID NO: 407047 - DNA, 122 bp, Homo sapiens
gtgcggaccctctccgctccctccgcaggggtcccggagccgaccgccctctccgcgcgtcggccacccagttcctgccgcagccaccaggatcctggcttcctggggctctcctggctgtc

SEQ ID NO: 407048 - DNA, 122 bp, Homo sapiens
ttcaccgaaggttcacatcttacgctgctgtgtacattggttgtagctaaggaaccagcacgggtacatcactattagctaaacgccactgttcctttggctttgccagttttcctctaatg

SEQ ID NO: 407049 - DNA, 122 bp, Homo sapiens
tgagaaaagttatacaatttttccaacatgactctgataatagctggtgaacgcaatactcgaacccaggacttgtgattcccaagatcagactcctcccatatacctgtcttttatttccc

SEQ ID NO: 407050 - DNA, 122 bp, Homo sapiens
cctcacttcccactgcatgctgggggaggtgaatacctggccgacagcgcagctggtacacgcagggccggccctaggagcgtcaggttcatttgtgccgggttggcccgagtgctgcgcca

SEQ ID NO: 407051 - DNA, 122 bp, Homo sapiens
cccaaattagtcatgtaaatttactgaaggccaacagtagcagaaacttgtcaacaagaccgaggaagcaaaggaaggcagcatctttacatttttagtgtttataacacttcaaaagccta

SEQ ID NO: 407052 - DNA, 122 bp, Homo sapiens
aggtcgtcgagcgcatggatggggcggggccaagcttggggcggggtccgtggagtcaagcgccgggatgggttggggccatgctgtgggggggacggggaagtcgaggtttagagagggca

SEQ ID NO: 407053 - DNA, 122 bp, Homo sapiens
cccctctcatcccactcacagagccttgggggccctgctcttttcatctggggccagccacgttctccctttcccatggccactgtcctgctccggcgtccaggctcctcctggagcccatg

SEQ ID NO: 407054 - DNA, 122 bp, Homo sapiens
ctgggaagggaccctttggaactgcagtccggagggcctgctttcagcagcttgataacgcgcctcggggattggacatgaatcatggtctccctgttccctggctgccttgagagagcaga

SEQ ID NO: 407055 - DNA, 122 bp, Homo sapiens
tcaaatatggatattctagcaccaaccattttcattcctgacacatattcaatacactttcgcacaggtgctttaggagaaaggtacaagaattttattgtagcattctttgtattatattg

SEQ ID NO: 407056 - DNA, 122 bp, Homo sapiens
acttgtctttgtgctgttccgactcgcacccggcgtccccgtatggcgggagctgctggccgcctctagctgactccatgcacagccggcacaacagctttgacactgtcaacactgccctg

SEQ ID NO: 407057 - DNA, 122 bp, Homo sapiens
ccctaagattttctgaatgataaatgagaactggcttcaactcagtcaacttaaagtgaccgacattagcccctaacaagagtcgccctgtcctttgaagccagtcattgacttctctctag

SEQ ID NO: 407058 - DNA, 122 bp, Homo sapiens
gggcggggagtcggggggagtgagtgatggggaaacagtttcagtttgggaagatgaggacgttgcggagatgatgttggtgacagttgcacggcactgagtgtgttcaatgccacgaaatt

SEQ ID NO: 407059 - DNA, 122 bp, Homo sapiens
tcttctggcctcagctgccccggctccggctcccctgggacccccataccctgcgcagtgcgtgctccagcccgggctccatgtggccagccccagaccaactgagagcaagtgtgcgacac

SEQ ID NO: 407060 - DNA, 122 bp, Homo sapiens
agagcagggaggccaaaagtactctaagtcccggtgtggttagggaagggtaagttccaccgaccctcaggaactgaactggaagacagatccagtgtgtcccacaagcccagtcgctgtag

SEQ ID NO: 407061 - DNA, 122 bp, Homo sapiens
ttccagaaacaatccagccaaagcaccccaggggccagaggagctctgtgctctttccaccgagggattccgctgcaacgatgcaaacagagaatgtgcacacacaaaggcgtttacacaac

SEQ ID NO: 407062 - DNA, 122 bp, Homo sapiens
actacttcacgatttgcgtgaacttttttgtcttctggctgcggattcgagtgtttcgaccgcgaattatgagggagtggaaaccttcagggacagtaaaaagcctaaatctttcctctttt

SEQ ID NO: 407063 - DNA, 122 bp, Homo sapiens
acgccttaggctgttttgtaaaatgtgtcggtgtgacccttccggcgatggctcctgactcgacgtggtattgagcctgagctatatgctagtttctgctggaaacgctgactctgcctctt

SEQ ID NO: 407064 - DNA, 122 bp, Homo sapiens
cccacggatctctccctgtggctgccaggcaggacacccaagacttccagtctctgtcttcgtcttaccctgcttctctgcagcatgtgacacagttgactacaccttccctgttagagcat

SEQ ID NO: 407065 - DNA, 122 bp, Homo sapiens
cgcggcgcctctttggtcgtgcagccagcccctggcttgcttttgaaggctctgctaagtcgatggtcaggttgccaaagggccggtcatctcgcatcctccctcccttcggtgcctctggt

SEQ ID NO: 407066 - DNA, 122 bp, Homo sapiens
tatcccagactcacaacccaaccaaacccaacactgacctaggaaactcacaaaatgatacgaccaaacctatctcaacactaccccaaaaggctccatgagctttgcacaactcagagtaa

SEQ ID NO: 407067 - DNA, 122 bp, Homo sapiens
ggtgcgggatataatctcgtggtgcgccgttttttaagcaggtccaaaaagcgcaatattcgggtgggagtgacctgattttccaggtgcgtccgtcacccctttctttgactcagaaaggg

SEQ ID NO: 407068 - DNA, 122 bp, Homo sapiens
ggggctgggactggggagaggcacacgaggcccctggggtgcaggattcaaggaggtgctcgccctgggggggtgtctggggaagggtctgtcctgctggccagaggagggctgtttgagag

SEQ ID NO: 407069 - DNA, 122 bp, Homo sapiens
aaccccatcttctcctcctcccttgtcgttgtcagcttcctccacgccctgcgcgagctccggctctaccagaccgacctgaaggaaattcccgtcgtcatctttaaaaacctccaccatct

SEQ ID NO: 407070 - DNA, 122 bp, Homo sapiens
aggcccaacagtaccaagtacattcacagcccaggggagacatcagtgggcttcatatgccgccaaagaataagcccaaaagtacctgcaaaatggccagtgcacttggcactgttagttgc

SEQ ID NO: 407071 - DNA, 122 bp, Homo sapiens
cccggctcccttcacacacccccgccccctccgagctccccgactcctccccgcgctccacggctcttcccgactccagtcagcgttcctcgggccctcggcgccacgagctgtccgggcac

SEQ ID NO: 407072 - DNA, 122 bp, Homo sapiens
gtggttttgaaactggaaggagataaagctgaaaaccagagttgtgctgggaaacctggacgtagagcgctgagccccccaggtatttagtgaccagcacagcgcgccgccgtgggtttcag

SEQ ID NO: 407073 - DNA, 122 bp, Homo sapiens
ggacctgaggtggtggggcggggccggaacgtggagtgggcggggcctgaggctgtggggcgggaccggagcgcgggatgactggggccacgggtgtgggcgaggcctgacgcggtgggcgt

SEQ ID NO: 407074 - DNA, 122 bp, Homo sapiens
ctacgctcagcgagcgacagagcaacgtcgcactgcattcttaccaaacacccaggtgaacgacgcatccaacgatttgggagctcaggacccatggtccctaaaaggcaacaattaagact

SEQ ID NO: 407075 - DNA, 122 bp, Homo sapiens
gcaccaccactagagctatttcatctggtgcaatacttggctatgtggaggtctggaatccggctgcctgggtttgcatcgtgactcaccaatcactgtcttcctcacctgtgtgtacctct

SEQ ID NO: 407076 - DNA, 122 bp, Homo sapiens
cggctctcgagctgtagtctgcaggagacacacctccctccctcacgcccctcggggctgcggaagtgctctacagactggagctgcacgaaggcgaccagcggactaccgttcctaggagg

SEQ ID NO: 407077 - DNA, 122 bp, Homo sapiens
tgttgactatctggattttgtcattgccaaagcacctgttcagtaattttatccatttttcgattgggttgtctgtttagatcctatatattctggataattgcctttgtcaatcatatgtg

SEQ ID NO: 407078 - DNA, 122 bp, Homo sapiens
ttttgcagttagagtgaaactttccattggtggagtcaccccaaaggaggcgggacggagcgggaaagtcctgcctaccttggccttcccagccaatcgcagcatctatgcgtcagcctccg

SEQ ID NO: 407079 - DNA, 122 bp, Homo sapiens
tgaactgccccaggaggtatttgtctataaaagaggagatgaagccgttgaataggaggccgtcttggattgaagtgggctataaatttctttgtaaggacaaaattttccaaacgaccttg

SEQ ID NO: 407080 - DNA, 122 bp, Homo sapiens
tacggtagatttccatccccttttgaagaacagtaggtggagctatttaagatataaaaacgaaatatcctttctgggagttcaagattgtgcagtaattggttaggactctgagcgccgct

SEQ ID NO: 407081 - DNA, 122 bp, Homo sapiens
gtttcaggactcactggttaccacaaactgcagaagtcaaattgctgccctggagcacagcgttggttcagcaccaaggacagcagcccatcgctcccttcccggccctgtgctcttccttc

SEQ ID NO: 407082 - DNA, 122 bp, Homo sapiens
taggatttgctcattctagtaaaacacccatatgctgcactagttttttaactttcactgcgcgaaggaaggcacatctgcttccaatcacatctatctaagataccactgcagtcccagat

SEQ ID NO: 407083 - DNA, 122 bp, Homo sapiens
cggttggccgcgtggcctaatggataaggcgtctgattccggatcagaagattgagggttcgagtcccttcgtggtcgtcgttttgcgttctctggttcgaaagatatttgttgattcagag

SEQ ID NO: 407084 - DNA, 122 bp, Homo sapiens
gtgcgcgcgggccaggagcccggggtccaggggccagagaagggcggcctgcgggagatgcgggaattttaccaggtcggcctggagggaccgaccctgtgccgctaaagacttcgggagcc

SEQ ID NO: 407085 - DNA, 122 bp, Homo sapiens
tgactggtttttgtatttctggaggagacagggttttgccctgttgaccgggctggtctccggctcctgacctcgagtggtctgcccacctcagcctcccggggtgctgggattatagaagg

SEQ ID NO: 407086 - DNA, 122 bp, Homo sapiens
gccagacaccaacggtcggaaaccgccagacaccaacggtcggaaaccgccagacaccaacgctcggaaaccgccagacaccaacgctcggaatacacgccagaccacgacggagggcgacc

SEQ ID NO: 407087 - DNA, 122 bp, Homo sapiens
gagcaggggcagagacagtcaggggtggctggaagggctcacctagaggggcgtggtccgcgctgtggagggggttaaaacccagctctttcggagcacgcccatcctatcccagtctcttg

SEQ ID NO: 407088 - DNA, 122 bp, Homo sapiens
tgcagtgccaggaaaaacaagtccgagcaagaaaacaacccaccctgaaatgcggtgggccgactgcttagggctgggtggtcccccagctgccacacacgagtttgatgcgtggcgttcac

SEQ ID NO: 407089 - DNA, 122 bp, Homo sapiens
caagcaatgatgagactccaaaccagctggacacagtccaggggcaggaaggcagccaagcgtcctgacccacaaggccctatacagcaatggagccatcgcggaagtccgtcctcccaatg

SEQ ID NO: 407090 - DNA, 122 bp, Homo sapiens
tggcaaagttcttcaaagccacatcatcacggtcaaagcagtaagacatggacaggtaaacgtaggaggcacagagctctaggttgatctggcggttgatggcggcctctgagtcctggtgg

SEQ ID NO: 407091 - DNA, 122 bp, Homo sapiens
agggtccacggcgcggaagtgtgtcttgctctcctccatggcctcctggaagtgctcggccgtcttctccatgatccagcgctgcatctccttggcactgatcttccggtcagtgttcacat

SEQ ID NO: 407092 - DNA, 122 bp, Homo sapiens
tggcttcccagccaaggcagggctcccccaaagttcattcccactcttgcagtttcacctcgggatgcttccgcagaatttcagcgcctaagcagacaaggtcaaagtaaaccgcttcaccg

SEQ ID NO: 407093 - DNA, 122 bp, Homo sapiens
acgtcagccggaagcaagacacgggcacgctaggaaatgtagtttactttttccgagcggcggcgaagtaagccaatgggaagctccacaataatatgcaagggggcggaaggcgtaagtgc

SEQ ID NO: 407094 - DNA, 122 bp, Homo sapiens
gtgcaggggcaggagtcctgcagagatggcactcacttgacagaggctgcgctgggccagcgccgccccagcttcgccagctgcttcctgggggaattgatccacaggcccacggggagatg

SEQ ID NO: 407095 - DNA, 122 bp, Homo sapiens
ggaagggctgggagcaagacactctcagctcaggcagaaaaggcctgttgttgagagaaccgatgcaggctgccgctgggagcagagggctgggcgtggcgtacctttctttcctgtgaggg

SEQ ID NO: 407096 - DNA, 122 bp, Homo sapiens
agatgaaatgtgacccagatatatagctagtttataaaaaacaaacaaacaggtcggcatcgcttaggtaaacgagatgttacgaactggctccatgtccttttccatctgcaatgtaacta

SEQ ID NO: 407097 - DNA, 122 bp, Homo sapiens
ttcactcctgaagccagcgagaccaccagcccaccagaaggaagaaactctgaacatgtccgaacatcagaaggaacaaactccggaaacaccacctttaagaactgtaacactcaccgtga

SEQ ID NO: 407098 - DNA, 122 bp, Homo sapiens
agggccctgtggatccctggcaaggcaggcctaggttgcaggctagcccccctctcttttcgttggccccaggagcccggcgggcctgaatggcaggtgagcccggggggtggggacaggac

SEQ ID NO: 407099 - DNA, 122 bp, Homo sapiens
cctcgagtagacaggtggatgtgagaaggattctcctttctggtgatttgcacctgttgacgcccccaaatctgagctctaaggaattttacagatggttaagacaggttctgaaaggtaga

SEQ ID NO: 407100 - DNA, 122 bp, Homo sapiens
gaggtggaaatctgtctgaagtttgcaggagacccgcgctgcctaggcaaagggacccggcgaccaagacacccccgcgagggcccagggcgcgtccctcccgccaggccccagactccggc

SEQ ID NO: 407101 - DNA, 122 bp, Homo sapiens
accacaggcaggcaacttggccctgggatcattacagtccagcacacatgtcccgtcaatcgcagatgtgctcaaaatagatgccgcttgtactcccctccctcccccttctgtgttactcc

SEQ ID NO: 407102 - DNA, 122 bp, Homo sapiens
tttttttttaatagaaatataactcttgaggcacagctcagttttctccttttgggaaaacgattaagtcatttgtctttacagattatatttctttttttttaaattttctctttttatta

SEQ ID NO: 407103 - DNA, 122 bp, Homo sapiens
tctgtcggaaggaggaggcgttcccccttgaaaaagagtgcgagactcggccaatggccgcgaagaggggcgggtcttggcgggaggcgcgcgcggctcagagggttggcgaaccggtcgcg

SEQ ID NO: 407104 - DNA, 122 bp, Homo sapiens
ctgcgtggtgaggccggctctgatgtctctttggtggacctcggctttcagacggatttccgggtgtacctgcacttacggcagacctggttggcctttagtgagtcacagtctcccattcc

SEQ ID NO: 407105 - DNA, 122 bp, Homo sapiens
gtatcaccgaaatttgccccatgcctgaaatacatggtagtagatggtgactctgacaagcgtgaagtgacctgaatctgggggaagtttctgggtgaacagagagcgcggaggatgcgcgg

SEQ ID NO: 407106 - DNA, 122 bp, Homo sapiens
gcagggcaccagcctcaccattagcagaggtgaactcagaccctgaggcttcggagcccacgcggcacctgcacccaaccccaccccctccggcctccccgccccctccaggcccccagccc

SEQ ID NO: 407107 - DNA, 122 bp, Homo sapiens
tcactgtcggcttcaaggatgttccgcaagtcgattcacttacagactcttcttcaaatgcggcggtcacctgtgacccacattcataactccctcagccactagacgacaaaagaagccct

SEQ ID NO: 407108 - DNA, 122 bp, Homo sapiens
aacagatcagaaacaaaaactggcctcccagggatttggactcaggaggtgaattaggcgcggagagggcggagcctttggggtttatgggcggaattgcacagggtttggcggggatctct

SEQ ID NO: 407109 - DNA, 122 bp, Homo sapiens
tcgtgactacctatcggacagtgagctcaaccagctgcggctccagggctgcaccactcccgctggccagtttgtggacttccctgccactgccgctgctcctgccaccccctctggtccca

SEQ ID NO: 407110 - DNA, 122 bp, Homo sapiens
tctctgaaagatgttggtttacagcagacattttggagtatggttgcatattgtaatcaccgggagagctttaaatcacactgctgcctgggtctcactctagagattctggcttaattatt

SEQ ID NO: 407111 - DNA, 122 bp, Homo sapiens
gcagctctggctggctgtggccgtggaaatgcggccttcggcgggccctgggttccaacgcgaagttgaagcaggccacctttgtcaggggcttccgtcgttgttctctggaatcccaacac

SEQ ID NO: 407112 - DNA, 122 bp, Homo sapiens
tgaatgagtcagtctgggctcgcagagggagctgggaccagagtagagtggacactgaagcgtatgtagcagtttgccaggcgatagggaaagagaccttcttgtaaagcaagcagagatga

SEQ ID NO: 407113 - DNA, 122 bp, Homo sapiens
ggaacccagatgagaactcacgaggcatgctgccagtggctgtgcttgtggccctgctggcggtcatagtcctcgtggctctgctcctgctgtggcgccggcggcagaagcggcggactggg

SEQ ID NO: 407114 - DNA, 122 bp, Homo sapiens
caggacctctttctggggcaccctctggcactgggccatcttcaggccctacagggctctcggggcctgcgtaggcctctcatctcccagaaataagttcttttccccacccagactgacac

SEQ ID NO: 407115 - DNA, 122 bp, Homo sapiens
aggtgaaggcataggtgtctgtgctgcctccacgagccagtgggggtggacggagatccacggggtgcgtgagtcacaggatattgctcaagatgacaacagacaaaaaacagactaaagcc

SEQ ID NO: 407116 - DNA, 122 bp, Homo sapiens
tgccgggctgcggccggagggacgaagcccgcagccaatgggaggccgggaccggaggggcgggaggagggagggagggaggcgcgaggcgagcctggcggaggggagcgcgaggtgtgcgc

SEQ ID NO: 407117 - DNA, 122 bp, Homo sapiens
ggtgcccacgctgcagccccgtccactcacgtgggtctgggggtgcccacgctgcagccccgtccactcacgcgggtctggggggtgcacccagcacatttcacaggtgtttagtctttgta

SEQ ID NO: 407118 - DNA, 122 bp, Homo sapiens
tctcgaaatgtcattaatatatggctagcggggagagctcccaggcttctccaaacccaccgtgtgagtggagccccctccagccaccaccacttagtcatttagcagatgtttacttagta

SEQ ID NO: 407119 - DNA, 122 bp, Homo sapiens
gacctccattcactctgtttctcttctgctggattatataatttaaaaataatgtgttcccgtattttgtagtggagttcatatcacattatgttttgcaaaataaaacttgttttgtcaca

SEQ ID NO: 407120 - DNA, 122 bp, Homo sapiens
ccctgttttccccttggatcctgcccacttccacatttttttgtttttcttttgagaccacgtctccctctgtcgcccaggctggagtgcagtggtgtgatgtcacctcactgcaacctctg

SEQ ID NO: 407121 - DNA, 122 bp, Homo sapiens
tccaggctgaagtgcaatggaatggtcatacctcactgcagcttagaactcctcggcaaacgtgatcttcccaccttgctaggaccccaggcatcgctgccacatctggcaatttttttttt

SEQ ID NO: 407122 - DNA, 122 bp, Homo sapiens
aggtggttttgattaccggggctagcaggtgaggctcctttgtgttggcagaggcggcagcggatcaggggtccgagagagcaggggtctgcgaccctccacgaacggaccccggaagcgcc

SEQ ID NO: 407123 - DNA, 122 bp, Homo sapiens
atcgctggcagactatggtgttgggcagcttcggtctggtctcgtctgggtggtacctaccgttttgccccagttaggaggactggggagggaggacaggagaggtgagagtaattgttact

SEQ ID NO: 407124 - DNA, 122 bp, Homo sapiens
cagctgcccgccggggcggggtgagccggggctggagggcgggctggggtcgggcccagtcggggctgcccgcggggccgggagcggggagcgtgctggtcgggagcggctcctccgccggc

SEQ ID NO: 407125 - DNA, 122 bp, Homo sapiens
tattgcaaaccccggggccaaaaatcccagtcccactgggtgcgaggcggagaaatccggcgaggcatttctatggggagcggcccccagcatttaggagttagatggtcatcgagacccaa

SEQ ID NO: 407126 - DNA, 122 bp, Homo sapiens
gcactctagcctgggcgacagagtgagactccatctcaaaaataagtaaataaataaaaacgagactagagagactagagttggctggagcaactggaactccagcctcagtgccctgggtt

SEQ ID NO: 407127 - DNA, 122 bp, Homo sapiens
ccacaagctcatccctctgctgctcagtagcctcaacgacgaggtgcctgaggtcaggtacgtgggcaggcggccgcgggccttgtcttcctaaacggtcatgtgtagcagtggtggtttct

SEQ ID NO: 407128 - DNA, 122 bp, Homo sapiens
acaaacagagagacactgccgaaaagctggacacagaactagagactagggcagacagaccgagagacagagaacagagacagcgagaaagataaaagagaagagagagggacagatagatg

SEQ ID NO: 407129 - DNA, 122 bp, Homo sapiens
acccccgatcctccatcgggcgcgcgcctaactctccagcgtccctgaccctccatcgggcgcacccctgatcctccatgggtgtgccgctgacccctgatcctctcttgcgcccttccccc

SEQ ID NO: 407130 - DNA, 122 bp, Homo sapiens
aaaagagaaagctgaggcttggagaggttcttcattttgttcaaagtcatacaacttttacgtggtgtagccaggatgggaaccagagcctggctctctgcacttccaacaccactgctgaa

SEQ ID NO: 407131 - DNA, 122 bp, Homo sapiens
cccaggaaggctgcatcacaaaggtaggagagctcgccctgcgccgtctcagctccccagcgtcctcggagctcctggcggggcgaccgccatcccagctgtccctgagctaacaagcgtgt

SEQ ID NO: 407132 - DNA, 122 bp, Homo sapiens
agccaagcacacagaggagttaaagaaatgttaattggaggactgaccaggttggctggtcggttctcagtgaatgagtaaacaaacaataaaactcccaaatgaaaggttaaatgaataaa

SEQ ID NO: 407133 - DNA, 122 bp, Homo sapiens
cgtccccgaacacgtgacacacacttccggcctcctctcccgccggcccgccgctcatcgcggggctccgccccgtcttaaagggatagtgcccttgagactcggatctcagcctctcaggc

SEQ ID NO: 407134 - DNA, 122 bp, Homo sapiens
cccctcgcagtggggctggcggaggcggctcgagcggcggggtccctttcctcgtagggacgcacgccgggtccggggacggcgcgcctggcgcagcgggtcctggacgcgcccggggaagc

SEQ ID NO: 407135 - DNA, 122 bp, Homo sapiens
cacacacaccctccacacacacgcttcatgaatacactgtccctccactaacgcacgactcgctcctcacagcacaacttggatcagtctcagacccctaaaggtctctcgcatggggtcgc

SEQ ID NO: 407136 - DNA, 122 bp, Homo sapiens
agtttcaatgagtgaatgaatacacaaactatggcacatccatacagaaaaatactactccggagtgaactgttgatacaacatggatgaatatcaaatatattatgttaagtagaagaagc

SEQ ID NO: 407137 - DNA, 122 bp, Homo sapiens
tccaatttctccatgtctcggattatctgttttggatccttcatctttaaaactgcagctcgaaccatcatgcgctgttttttgttcttagaaaaataaaagggcagatgtcaagaagtcag

SEQ ID NO: 407138 - DNA, 122 bp, Homo sapiens
cggcggggttggtgcacttggcagtaccccccaactcctggcaaccgcacggagactttgcgaaacatccgaaggcagaaaagctgtgacacttctgacagagggggtaggggggtgggggg

SEQ ID NO: 407139 - DNA, 122 bp, Homo sapiens
aggcagcaagatgtgaggctggacatgccaggagcacgccggggtctgagccgaccctgccgcagaaggcaggtgggaagtgggaaaaaggaggctcccggggggcctggcttgggcctggg

SEQ ID NO: 407140 - DNA, 122 bp, Homo sapiens
caatgctagtcgcattcggccgggagctcggttcttgagacgcgagtctaccgaagctcccgccagttgagaggcgagtctgccgaagctcccggccgaaaaagccaaatccttccttaacc

SEQ ID NO: 407141 - DNA, 122 bp, Homo sapiens
gtggatggctcctcggcaattccagcctaagtgaaggcgctcaggagcctcctgctggaacgcgacccatctctcccaggaccccggggatcttaaggtcattgagaaatactgttggatca

SEQ ID NO: 407142 - DNA, 122 bp, Homo sapiens
tactaaatagtcgcaccccagcagcctctctcgcacaccggggccctgcatgtcagatggcgtggtctgcagggggagctctgtgccttagtggctcttggcaggacactgagggcctgcct

SEQ ID NO: 407143 - DNA, 122 bp, Homo sapiens
gtggggccgcctcccaaagacttctgggagggcggtgcggctcaggctctgccccgcctccggggctatttgcatacgaccatttccagtaattcccagcagccaccgtagctatatttggt

SEQ ID NO: 407144 - DNA, 122 bp, Homo sapiens
tcttcctagtaacgtctttgatgcatgctatttattaccctatgtttgcgacgggaagaacgcactcatcactttgcagccccagtggctgctgtgcctgtattcacagcggggtttggggg

SEQ ID NO: 407145 - DNA, 122 bp, Homo sapiens
taaaggcacggataaaacgcccgggtaatcgaaatccgaatgcacctcttaccattggaccgccgaacaatattctccagaaacgtgttttgaggggccactagtcccctcctgcccccagc

SEQ ID NO: 407146 - DNA, 122 bp, Homo sapiens
agtacagaagacagtttactgtacaagcaagttgtgcgttaaaaacaaacaccaagcaaacgatagtgcaaagcagtttccacccagctccatcctctcgccagctctgggatggttttaca

SEQ ID NO: 407147 - DNA, 122 bp, Homo sapiens
gcagcttagccccttccctctacagctgaagcctggggcctctcctgggactaagtgcctcgattcctcaggcctggggatgaaccccacctcatggcacaaagagtactatgtacagtgtc

SEQ ID NO: 407148 - DNA, 122 bp, Homo sapiens
gtctgaagaaaaaggctgaagtcaatagctcttttgggccgaaggaaagttaccattacccgtttaggagtagccgttacctgagaactgtagtgtcgacgactgatgttatactctggttt

SEQ ID NO: 407149 - DNA, 122 bp, Homo sapiens
ttctaggtctctggaaaagtcttcatcctgcacagactggacaatttcaagaagtagagtcgcagaggtcatttaatcttctaatttaaatttgtaaaactttctttttggagacagggtct

SEQ ID NO: 407150 - DNA, 122 bp, Homo sapiens
acaatgaagggggtggtgcaggctggggtgcccacagagggcccacaataaagtgggtggcgcaggctgagatccccccaggctacaaggtgacaatagtgccctggcccgagtccccttga

SEQ ID NO: 407151 - DNA, 122 bp, Homo sapiens
agaacaaatcacctgctgcctcggcaggacaggatttctgccaatcccacctgtaagcagcgttcatggcttccagacaaagtgggggcccggggcctgcagaacagtcggccacattcacc

SEQ ID NO: 407152 - DNA, 122 bp, Homo sapiens
gctttaaaaagtcagccatgaaccagaaggcagttggtgcagcttgtgtgtgattcctaacgtcatgttggctgagagccagcctggttttatttcactgtgtcaaattgtacctccttatt

SEQ ID NO: 407153 - DNA, 122 bp, Homo sapiens
cacgagaacagaagggctgggggccgtgggagcctgggcgggccagggtaacgaagagcccgccgtcggtctctgcatccgtcggctcacgtggccacggagcagcaccgtgttacagcaaa

SEQ ID NO: 407154 - DNA, 122 bp, Homo sapiens
agtggatgctgctgggccccaggtatgtccccatctcgcccggctggcacaccaggatgccgtgggaagcctcctcgctgtgccccttcggtctggggaacagagactgtgccacgatgagc

SEQ ID NO: 407155 - DNA, 122 bp, Homo sapiens
gtgaggccgccggacgggggctgcggttctgccatggctgcgctgcagtatcacagacgacgggacccaaggaacggaggagtcacccacactacgcctcggccctgtgccgccttaactag

SEQ ID NO: 407156 - DNA, 122 bp, Homo sapiens
caaataacagacaaaaaaaacccacactcagtcacagagcgacctgagtcttagtagtagcgttttaatggcagcagccccaagaggagagtcagagtctggtctgcccccggagcaggagg

SEQ ID NO: 407157 - DNA, 122 bp, Homo sapiens
attacagcattttacatattcatattcatactcaaccccggctcccgctgcccccccccgcgacttagcataatttattagtactcaggattattataattaacggcggggagatggggggc

SEQ ID NO: 407158 - DNA, 122 bp, Homo sapiens
cattctctggaaagcttgtcttttcctagccgaatctggattaccaaggcttccggaactcgcaggcttccggagcgacgcaggagccggaagtggctgaaaaaaaaaagaaaaagttacac

SEQ ID NO: 407159 - DNA, 122 bp, Homo sapiens
gcaccaggcacacagatgtccgtggcgtgcgtgggcggctgcgctgaagtgtgacctgaccgtgtggaaccaaacccttccagcgtctctgctcacttagctggcagtgcctgtccccagca

SEQ ID NO: 407160 - DNA, 122 bp, Homo sapiens
ccagtgggctggtcactccggcgggtcctcgacccggccagcgcccgccggccgccagagcgcctcacctgtatgtagttgttttcacagtagtctgccacccgagtcaggttctggtaact

SEQ ID NO: 407161 - DNA, 122 bp, Homo sapiens
agtttcagggctagtttataggtgggatatggatcttgaaagatttctgagggagggcatcgagggagatatgtgaccttctactattgtgggaacctggcttatggatgagactatgacat

SEQ ID NO: 407162 - DNA, 122 bp, Homo sapiens
atactgcctcatgcactgaatccatttctcgcatagcctggcgcttggcaggcaggctggcgttccctggctctgccttccccatctccctgtcttttctcccacggcccatctgcccctcc

SEQ ID NO: 407163 - DNA, 122 bp, Homo sapiens
agagccacagacagctgctccgcctggctcctgccctgggctccgggggctgggcctgaccgttctaactaagtgagtgtggccgagatcgcctcattggcgcctttctcactcatctgtat

SEQ ID NO: 407164 - DNA, 122 bp, Homo sapiens
gctcgagctgcccggccctgcgcattgcccagagcctgctccagcagctcggcacgccgccgctggtcctcgatggcgccgcgcagcagtgccatctctcgctccagcttctcttgctcctg

SEQ ID NO: 407165 - DNA, 122 bp, Homo sapiens
tgggttgttagggctcgtgggaggactacaacccccagggtgcagtgggacaggcgttgccgggtcgcaggtcccgccagtgcgagcgcaacggaggtcgaaggcgttcagactcttagctg

SEQ ID NO: 407166 - DNA, 122 bp, Homo sapiens
ctaagagtgggctggccctagggggccaaagggacctaccaggtaagagtgttctctccacgctgggacgggctggctagggggagagttgctgggctcggctgtacctgcagtttctattt

SEQ ID NO: 407167 - DNA, 122 bp, Homo sapiens
tttattcgcactctctttaactcgccctttctggttctcttcccttcgagcgccctgcagcggagtgttagacaagccctgttgtctgtgggctctcacctcagagtcaatattatctcaga

SEQ ID NO: 407168 - DNA, 122 bp, Homo sapiens
tgggggcggcgggcccgcggggctgctgccgaacccgcggctgtcggagctgtccgcgagcgaggtgaccatgctgagccagctgcaggagcgccgcgacagctccaccagcacggtcagct

SEQ ID NO: 407169 - DNA, 122 bp, Homo sapiens
aggatgtccagagcaatccaagcgatcatgataaacttcatatgtgagggcagagggctccgcctgacccacagagccaggcacatgaaagaaacaataaaaacttgatttaactgtgggat

SEQ ID NO: 407170 - DNA, 122 bp, Homo sapiens
ccctcagcgttcccagggtgcccacgcgcccagttgcattccagaaagatccatggaccccgaccctcagcgttcccaggtgctcacgcgcccagtggcattccagaaagatccatggaccc

SEQ ID NO: 407171 - DNA, 122 bp, Homo sapiens
ttagtggtcaccctgggtattacgccgtatatgccgggatgtatatgatgtcacaagctacgggcattgacatggtaccattagagggaaacgtgaaaccttcttctgtccgggacccttcc

SEQ ID NO: 407172 - DNA, 122 bp, Homo sapiens
ggccccgctgtgctcagaagggacctgaagccagggaagccccagggtcgtcctgggccccgccgcccgccctgcctgccccgcctgcccctcccatcccgtcctctccccgcctccctccc

SEQ ID NO: 407173 - DNA, 122 bp, Homo sapiens
cacagtcacacacgttcacgcccaggcgctgtgcctgcggggcagaggatgcgggaactccgctcagtctctatcaacccgaaactgctctgatggtcaggcctactaatgttaaaaatatt

SEQ ID NO: 407174 - DNA, 122 bp, Homo sapiens
cacgcagtcagaaacggaatttcttttgtcttgtgcggagacggatgagaatgaaaccctcgactacgaagagttcgtcaaacgcttccacgaacctgcgaaggacatcggcttcaacgtcg

SEQ ID NO: 407175 - DNA, 122 bp, Homo sapiens
tttaaaattattttaaacagttttgcagtgttctttaaacttagtttctcttctttcttacgctgggacttaatgtccagtggacttagtttctcttctttcttacgctaggacttaacctc

SEQ ID NO: 407176 - DNA, 122 bp, Homo sapiens
ctgctgcctgggaaacaagtggagagtgagcacaacatcccctccaggtcccatccacagcgctgctttggccacctgctgccctcaagagtctccaaacaccagcatgtgaccccctctgg

SEQ ID NO: 407177 - DNA, 122 bp, Homo sapiens
ctcccctcaccgactttggcctttttagcaacagacacaaggaccaggctccggcggcggcgggggtcacatacgggttccctcaccctgccagccgcccgcccgcccggcgcagatgcacg

SEQ ID NO: 407178 - DNA, 122 bp, Homo sapiens
atgcggctgggggcccggaagtggtaggagcctcggtaagagttggtgttcatccgcttgcggaggaaagcgaggtacttcaacttgtttctgtagaaattgccagaaatgttgatgccttc

SEQ ID NO: 407179 - DNA, 122 bp, Homo sapiens
catgtacaacatgatggagacggagctgaagccgccgggcccgcagcaaacttcggggggcggcggcggcaactccaccgcggcggcggccggcggcaaccagaaaaacagcccggaccgcg

SEQ ID NO: 407180 - DNA, 122 bp, Homo sapiens
cgtgatccgcccgcgtcggcctcccaaagtgttggaattacaggcgtgagccaccgcgcccggcctcctcctgtgcgttatgtatgacataaggaaaaacaggctgggtgcggtggctcatg

SEQ ID NO: 407181 - DNA, 122 bp, Homo sapiens
aagtagagtgagtcaccctcagcacctctgtaagggctcagagatgctgtgatgtggcgtcgtgacagtgcattccaggaagggggatggatggtgaaggggataagatggcagcccacatg

SEQ ID NO: 407182 - DNA, 122 bp, Homo sapiens
aaagtccgtccactgctgtgctgggttgactgccatcctcctgcatgcagttactactctcgtcttgtttcacctctagttttactcaagcacatctaagaggagaaggtatctgtaacttt

SEQ ID NO: 407183 - DNA, 122 bp, Homo sapiens
tcctttaccttccagaacatgaagctgacgggatccactacggtgggctggatgatctctcgcccagggaagatgccccaagtgacagcattcggctgcagttcaggggcattggtgatgtt

SEQ ID NO: 407184 - DNA, 122 bp, Homo sapiens
cgcttgcgactctggcttccggctcagcccccagggcacccgatgcattggtgagcaagacggagggcgcggaaggaggcggggcggggggctttgcctggtcaccttgtcaccagccccct

SEQ ID NO: 407185 - DNA, 122 bp, Homo sapiens
agcatggctgcgacgtgggcccgacaggcgcctcctccgcaggtatgaacagttcgcctacgatggcaaggattacatcgccctgaacgaggacctgcactcctggaccgccgcgaacacag

SEQ ID NO: 407186 - DNA, 122 bp, Homo sapiens
gtggagagtccactgtgaagccgaggccgggcacgtgcaggccttcaagaggcaggaagccgggcctgcaaaggccgactggaggtcaagttctgggcctgaagaggccaccaaaagtcaaa

SEQ ID NO: 407187 - DNA, 122 bp, Homo sapiens
caagagacagaaattttgacccagtcacagtacaggcttattcctttccgtgctcactagcgtctaagttccaaaagtgttgcgtccgtgcctatcccctccgtgctcagctgatgcgtgca

SEQ ID NO: 407188 - DNA, 122 bp, Homo sapiens
tctgcaggaaaaacagttgtggctgaatatgccattgccctggcccagaaacacatgacacggtatgagttcctttgccaacctcccccttcaccagccagccccattttctcctgcatcct

SEQ ID NO: 407189 - DNA, 122 bp, Homo sapiens
tcaagagttacttccggtttccacggagctccgccccttaggggggttctcgctcggccgcggctgggcattaactccgctccagtgctgcttgtcagactccgcctccctccctcagccaa

SEQ ID NO: 407190 - DNA, 122 bp, Homo sapiens
aaaataagttctataagagtacaattttgaggtttattttttgtatttttattatttgtgcgaagaaccattattgagtttgcaagataagatgtatttgtattttctagtgtctttttatt

SEQ ID NO: 407191 - DNA, 122 bp, Homo sapiens
gtttacgaacatgatttgctttcaccctcctgagactggcaccgtgaaaaaagtccttcccgagacttacagatgcccaagaggcaatgtggtctccatgatagtccagcgtggtctggcca

SEQ ID NO: 407192 - DNA, 122 bp, Homo sapiens
cctggctggccctgcaggtgagccgggatgcccagcacaccggaccctgggcctgggcctcgccgacgctccttgccagtccggcgcccgggaggcctagccctcagctgcacctgcccgcg

SEQ ID NO: 407193 - DNA, 122 bp, Homo sapiens
gccacgtgaggagggcatagggcgggaggccactgcggcccggggaccccagaacaggaccgggagcctgagctcccccactgagccctgttatgtcctacacacaggggcgcggggctgtc

SEQ ID NO: 407194 - DNA, 122 bp, Homo sapiens
ttgatccagggccggtaatgggagattcgggtgaagacagcagggggctttgcatccgaccgtccataggatacgatgccctgggccaccccagcacacagaagagggcccccagagtctcc

SEQ ID NO: 407195 - DNA, 122 bp, Homo sapiens
tgccgtcagcttgcgctgacaacaggagaccaggccacactctcctagcagctgcccaggcgaggctcatgccccagaaaaagcagctccagttacacattagtcacagaaataacaatgat

SEQ ID NO: 407196 - DNA, 122 bp, Homo sapiens
gtaacagatcaatagcagggccaagttagagtcaataagttgagcttcgtatgtttcttacgtttccaacaaccatggcagaaaggaagacactggatacagacagactgactcctctgaag

SEQ ID NO: 407197 - DNA, 122 bp, Homo sapiens
aagggccgccttgaatttggtgatcatgtctctttagtctcctctaatctagaactgcaccggtaaacggtcagcaggactgtgttcctcaatgaaggttccggggtggtggggtttgggtg

SEQ ID NO: 407198 - DNA, 122 bp, Homo sapiens
aattcctcctctttccacccagatgttttagaaacacagagaacttcatgaagcttgttccgggcccgcagaggaaggggcggtaatattttggtgtcctgcagggggcgaagttacctcta

SEQ ID NO: 407199 - DNA, 122 bp, Homo sapiens
acagtcttgcactgacagcaattatttaacacatgcacaaaacaatagagtttcacaccacgtaatcaacctttgagctccgtgacttccaatgctctcactggctggattttatggtctgg

SEQ ID NO: 407200 - DNA, 122 bp, Homo sapiens
cgggctgcgccacagcgcctggagggaggtggggcgggggagggactccgggtatggccacgggggaatcacactcacccgatctttctgaagtgtcccccgaagactccgggcgggctggg

SEQ ID NO: 407201 - DNA, 122 bp, Homo sapiens
aaataagagttgtgctgcttcaaatggaatttaggaatactgagcaatgtaggtggtccccgctggtatgatgcaatgcgtttctagaaaccagagcatgagaggaatccttataaggcccg

SEQ ID NO: 407202 - DNA, 122 bp, Homo sapiens
tgagcctgggaggtggaggttatagtgaatagagatcacaccattgcactctagcttgggcgacagagtgtgagactccgtctctaaataaataaacaaatacatattcaacctactatcca

SEQ ID NO: 407203 - DNA, 122 bp, Homo sapiens
aaaccacatgccccccagtcctctcttaaaaggctgtgccgagggctggccagtgaggctcggcccggggaaagtgaaagtttgcctgggtcctctcggcgccagagccgctctccgcatcc

SEQ ID NO: 407204 - DNA, 122 bp, Homo sapiens
cttggcttttggagtgctttttaaaaagccaccttcctgggcccttgaactcttcatggacgggggaaagagaagtttcttcaccaaactgcctgaggctgggtggtttggatttctttaaa

SEQ ID NO: 407205 - DNA, 122 bp, Homo sapiens
cttcctctctctctccctctctctctttcctccctccccacagctagccgagggaaagaacggagggcagtaaaaagattcagatgtttcggaaagttgaccagatctcccaaaccctctta

SEQ ID NO: 407206 - DNA, 122 bp, Homo sapiens
tgccacaaggtgaggttttctgggtcctgggcagcacggctgtctgtgtcaccagcggaccggggtgagtggcttcctgtaccagggcagtcaggtgctctctgctaccctgtgagtattct

SEQ ID NO: 407207 - DNA, 122 bp, Homo sapiens
ttatattttgaagtagaacaaaaagggaacatatattctgacaggagattctatcataatcgctcagaacactgaactttttcaacttgatgaaaggtttctccaagttagaaatactataa

SEQ ID NO: 407208 - DNA, 122 bp, Homo sapiens
gcgggaggagcggccgccaccatcccatccaccagcgccgttcaatatatcccgcgccggcgtttctcacccactgtcaggaggctgcccgagggactccgagggcctgcggcatttagagg

SEQ ID NO: 407209 - DNA, 122 bp, Homo sapiens
cattccaggtagtgtcaatagcagggataaaggctgagaggcaagaatcagtatggggtacgtggcaaagtcagcagcagtttcatgttgctggagcagagagtagaagggtgggatgggga

SEQ ID NO: 407210 - DNA, 122 bp, Homo sapiens
caataaagagtagagaccggtggagactgtagaacctcttccaataagaagcgggaagggcgtgccttgccactttcactagggcgaaggcagggtttgccgaaacctcccgaagccggcca

SEQ ID NO: 407211 - DNA, 122 bp, Homo sapiens
gatggaaacctctctgcgctattagactgcgtccagtacagcagatggcacgagcacgtgcggcgctcagcttaggctctcggaggcagctgagttggaaatcccgacggaaagcacccaca

SEQ ID NO: 407212 - DNA, 122 bp, Homo sapiens
ctgggaaggcgtctcccggaagacgacctccgcagagctgatggcattgagatccattcccggaggggtcagctcctgacgggttcctgagccagtcttaacctgggcaaaggagatgagga

SEQ ID NO: 407213 - DNA, 122 bp, Homo sapiens
ggacctagatgggcggagatctagccctactcacccactggccacggggtaggcgagggacgctcagcaggggcttcccgcagacccagggtcttcaagccccagaagtcctgatgccagag

SEQ ID NO: 407214 - DNA, 122 bp, Homo sapiens
gacgagggccaacacccccgtgtcctcaccagcccacgacctgtatgagtggacaggaagcgtgcagcacaaagctggataccccctcagctcatccgcgagatccgcaacagcaccgtcac

SEQ ID NO: 407215 - DNA, 122 bp, Homo sapiens
tgtcctaggctctccagccatgagattttccggcccagccccaaccccgacctaagtaaccggctatcggccacccattggctgaagtccctgagcacctgttgggaggaaggctgctgcgt

SEQ ID NO: 407216 - DNA, 122 bp, Homo sapiens
cgcacttgggacgtctgcaggcactgggagggtttttcccaagccgctggcagcagcgagcggagcctcgcccattgaatcagcatgccctcccggctggctgctgagtcaggcctgcggag

SEQ ID NO: 407217 - DNA, 122 bp, Homo sapiens
aatgtgctctgagaagtgtgttgtcaggcagtttcctccttgtgtgaacgtcatggtgtgcgcttacactaacctagacgtagagcccactgcacacacaggctttatggtacacactgtcg

SEQ ID NO: 407218 - DNA, 122 bp, Homo sapiens
cctggcctacattctgtactttgtgctgaaggagttctgcatcatctgcatcgtcacgtacgtgctgaacttccttcttctcattatcaactacaaacgactagtttacttgaacgaggcct

SEQ ID NO: 407219 - DNA, 122 bp, Homo sapiens
gactcacccaagctgggtctgctcatggtgcttcttagcatcatcttcatgaatggaaatcggtccagtgagggtgagtggctgggcttgcagctgaatgggtggctgtggtctagattcca

SEQ ID NO: 407220 - DNA, 122 bp, Homo sapiens
gctcggggattacctctctggctggtcccctcctccgtgctctgcgcgcctccaccctagcgcttgtcttggctcctagaaccaggggcctggacgctgctcagggcagaggcgccccctct

SEQ ID NO: 407221 - DNA, 122 bp, Homo sapiens
ccagtttggctcagtgaggagcaccggcgagaggaggccgctgtgcctcccaggttctcccggttctgcagcccagccttcacctgttctcaggccacagccaagctgctgaattcctggca

SEQ ID NO: 407222 - DNA, 122 bp, Homo sapiens
actgtgagaaccagccaatgcttcccattggtgagtgttgaagaagggaaaggaaagcaccgtgtggcagtcttatgggaaggagttggggctcaacacattggagcctgagtcctgagggg

SEQ ID NO: 407223 - DNA, 122 bp, Homo sapiens
aaagctaccagaaaactcactgcacaaatttctatacaatataagacagaactattaatacgtctctgagggtgaataagttaacaagggtcgctggggaattgaattaacttgagttaaaa

SEQ ID NO: 407224 - DNA, 122 bp, Homo sapiens
agctcaatgtcaaggcactgcccccggcacccggcacccagcgcaggtgccggcagccggcggtgcagtaccacagatgaccactagatgccgctgccgggcagccttttgtccctgcacca

SEQ ID NO: 407225 - DNA, 122 bp, Homo sapiens
tcagcatctatgctggagggggccaggggttcttctgacagtaacgatggtgacactatgcgtcctttgttttgctgctcccctgaagatctgctgatctgtttgccaggttccaggttctt

SEQ ID NO: 407226 - DNA, 122 bp, Homo sapiens
gaaaagccattattcaatctcaaaaacctcaacaatattctgtaagcctcttgaacatgccgaaatgtataggatggatgaaacggtgctgctggggacctatttttcagcgacctgaggtg

SEQ ID NO: 407227 - DNA, 122 bp, Homo sapiens
cactgaggaggagttctactccttcctcatccccttccaaagcccctgaactcgagtagccgcccctcccatcatggttcccttagtgtggtctcgccgcacaccccgcccattgacccgga

SEQ ID NO: 407228 - DNA, 122 bp, Homo sapiens
gaaggggagctcagcctccccgagaatgcaccagagcctgagtcctggaaaccagggccacgcagctcccgcctgccctgacctcagtcccctggaatgcagaattctccacggtcagccat

SEQ ID NO: 407229 - DNA, 122 bp, Homo sapiens
aaagtctgtgtgtgtttggagtgggagagtagtggggcttaaagacaggctggggctactcgacattcagtgttcggtaactgttaaatgagcatctacagtgtgcccggctttggtctagg

SEQ ID NO: 407230 - DNA, 122 bp, Homo sapiens
tccgtgtttgttctggctggagcagagctatcgcttgcgtccaccactgcagtttgccgccgtcgcagaaccaccgctgacttctacccctccggatctggcagggtgtcccctgcgctcct

SEQ ID NO: 407231 - DNA, 122 bp, Homo sapiens
gctccttccaagggcagctctcaagagcccacgttttcagattcagcagtgaagcggacgcgtctggtacgagactacaagtcgcacaggcggagagggggcccccgggcctctggtttcac

SEQ ID NO: 407232 - DNA, 122 bp, Homo sapiens
atgaagaagtcttctgatgaagcgagaccccggaagtgcagcttcaggcaaaatcctgagcgaattctttgctgccaggacagtccataggctcttactcttagaaattacgtaagcatgag

SEQ ID NO: 407233 - DNA, 122 bp, Homo sapiens
ggtggagggtgtgggaagtggggatgattaatacgtagaagtatggaataaataagatgtcgtatttgatagcccaacagggtgactatagttggtaataatttaattgcacatttaaaaat

SEQ ID NO: 407234 - DNA, 122 bp, Homo sapiens
gcggcacccgcggggagacaggtgtcggcgcagcctgggaggctcaggtgctacctttgccgggtggggtttgtgaggagtgagctcttcgtccccggaggcgagcaaatctgtcggtggct

SEQ ID NO: 407235 - DNA, 122 bp, Homo sapiens
tcctaatcctggatgaagttgctggattctgcagcacaagtcttcatgaacaagcagcaccgctcagagatttcacggcattcaaaggtcacagaactgccactatggttaaatgtcttgtt

SEQ ID NO: 407236 - DNA, 122 bp, Homo sapiens
gtcaacgggggtctgagcagggagaactggcgggggaggaaactgggggctacttgatggcgttcagcgggtgtggtggaaccagccctggaggattgagccttgaaatgaggtttgggagc

SEQ ID NO: 407237 - DNA, 122 bp, Homo sapiens
aaatgcatgaactcatttgaaaacataatctcccacctgactggaaaatttagcattcttcgggtgtatgcaccttaaaagaaaataaattatttgaaagccttgggatctgatacatcttg

SEQ ID NO: 407238 - DNA, 122 bp, Homo sapiens
acactgagcagagggctgcgcctgtgagaaactgaggcaatgcctgaagagctcgtgagccgttactcactggtgcaacactgaaacctgccagatcctccctgagaggcttctctgagctt

SEQ ID NO: 407239 - DNA, 122 bp, Homo sapiens
aacaaatgtgtgctttggccaagcttccaggcatagagtgtgtgcatgtgtatgtgtgtgcggggttgcttacaccttactacaggtctctggcttcgaatggactctttcgtcccagagtt

SEQ ID NO: 407240 - DNA, 122 bp, Homo sapiens
cccgggggcgggaggctggacaaggacggctctaaattggctggaggggcccgtcggcggcgaagttgctagctgggggcagagacggccacgcggttgcaggagtaagagatccctctgtg

SEQ ID NO: 407241 - DNA, 122 bp, Homo sapiens
cccattcctccctggctccatcctgggatgatgaatggaggtcagggcgctgtcaatggacgacgcggcaaaccctccccaaccgaccgagggggtcgggggaggctgcgttaaggcttccc

SEQ ID NO: 407242 - DNA, 122 bp, Homo sapiens
attatattcactcctgccaaggactcccagcccaggactctctttagagcaaggaagcctcgttctctttcttctcaagaggctctcttgttctccatcaggagagccttgatttaggctac

SEQ ID NO: 407243 - DNA, 122 bp, Homo sapiens
aaatagtcactctccccgattgttaatttgtccttccctttacgtccttctacccaccgccggagaaacggcgatcttaaaagcaaggatctaaatccactcgaggtctctccagggaactg

SEQ ID NO: 407244 - DNA, 122 bp, Homo sapiens
caggagaggcctgaaaggtcccagcgtccccagctccttctcccatctttagacttaactcgtccctttccaccccaccccagcctcagaacatgaaagaaactgggtatagtcttttgttc

SEQ ID NO: 407245 - DNA, 122 bp, Homo sapiens
ccacgcggcaagcgaccttcgggctcagggcggcggcggctgcaacgaggattaggagggcggcgcggaagccaagaatagtgtcgtcagcagcagccatttggtcccaggaggaaaagagg

SEQ ID NO: 407246 - DNA, 122 bp, Homo sapiens
gttgctgtgactgtaccttacaacgtttgctttattggcaatgacgacctgtccacaactcggagcacaaccgtcagtgacattgcagtggagattctttttattataggtaagaacaaaca

SEQ ID NO: 407247 - DNA, 122 bp, Homo sapiens
gccgctttcatcatttctcggaaaagtcaatttcattttcgcttccccaggtcgcggcggcgggagcaacaagcagcggctcgtgagtccgcggctcgcacccaggggcgcccgcacgtgcg

SEQ ID NO: 407248 - DNA, 122 bp, Homo sapiens
tggtgtatacgttctagatgcaagcttgtccaacctgcagctctcgggctgcgtgtggcccgggacagctttgaatgtaagaagtttttttgcttatctgtggtagcaaatatcatgaaaat

SEQ ID NO: 407249 - DNA, 122 bp, Homo sapiens
gtttctggctcagcctcactgcctcacaatctcaaatgcaacaaaaacattttacttcttcgtccttcaaagtcattaacttgcgcatgatctcagagtgtgcaaagattttctaaacagaa

SEQ ID NO: 407250 - DNA, 122 bp, Homo sapiens
atccccctcttccaggttccatgtaaacctgctgtgcggggaggagcagggctccgatgccgccctgcatttcaacccccggctggacacgtcggaggtggtcttcaacagcaaggagcaag

SEQ ID NO: 407251 - DNA, 122 bp, Homo sapiens
cacgtcctgctacagcagctcgtgctacagcgcctcgtgctacagcccctcctgctacaacggcaacaggttcgccagccacacgcgcttctcctccgtggacagcgccaagatctccgaga

SEQ ID NO: 407252 - DNA, 122 bp, Homo sapiens
acttgctgctgttccgagtggctggcctcgagagcctcggagacctcttccccaacctcacggtcatccgcggctggaaactcttctacaactacgccctggtcatcttcgagatgaccaat

SEQ ID NO: 407253 - DNA, 122 bp, Homo sapiens
caaccctctacgaggacagaagacgcacttgctgctcaaccagagtctcatctaccccaccggacgcaaactcccctttcattcgctcatgctggtgggacggaggccccctcgggcctcgg

SEQ ID NO: 407254 - DNA, 122 bp, Homo sapiens
caaagccggcgaggaggcggcggcgctggtggggactgacccggcagtccgagaatccaccgcggccttttcacccaaccgccccctcctgcgtgggggccccgcatcccctggactggcgt

SEQ ID NO: 407255 - DNA, 122 bp, Homo sapiens
ctttcttccctggcactcttcctccgaggccagaagtctgaattactagcagctaccagccgcttggagcgggaacgtggaggtgatcccctccccgggagtagcctgtccgtcccagctct

SEQ ID NO: 407256 - DNA, 122 bp, Homo sapiens
aggcacgcgttagtaacatcgtttcccaggcagagactcagctgcaaccgaggccttgaccgccctgggaggaattttctgcccatgtgtttttcatttggcaacaggttcgccggtcacgt

SEQ ID NO: 407257 - DNA, 122 bp, Homo sapiens
ccaacccaggctgcgtctgtctgaccgccgcgacccgggacgcggggctttcgctgcctgcgctcccgaccatcgcagagcccgcgaatccccgctcagtctcctgcaccccctcctgctcc

SEQ ID NO: 407258 - DNA, 122 bp, Homo sapiens
tgaggaatcaatcgtgttagtactaaggtggccgaggggaccggctcgctcactcgttcgcgctccctggctcggcggacaccaggcagtcccccggcggtcggccgctcggaggacgcgga

SEQ ID NO: 407259 - DNA, 122 bp, Homo sapiens
gtctggagcggctggtggtcgccgggctgagcgcgctcggccgcttccggtgctgccctgcggtcctcagaggacttggtgctcggcaagcccagagactcaaacaccatgtccccaggggg

SEQ ID NO: 407260 - DNA, 122 bp, Homo sapiens
cacactttaggcgtttcaccaagaggctggcgacatgctaggtcaggttgtccggagaatcggggctgaatgggagagatcttgagggcaagagcctcagagaccttcaggcaccgagctcg

SEQ ID NO: 407261 - DNA, 122 bp, Homo sapiens
caaaaaaggcgggctgttttgtaaatatttgtctctatgtaaggaaatcaaaactgaaagcggagtaacaccaagtatgcccgtttcttgagctcaagcactggaaggatcaaaagtagcga

SEQ ID NO: 407262 - DNA, 122 bp, Homo sapiens
tgcaggtcagagaagctgagaagtttctgagaagaggaagaaggttgctgctgggacaagcgagtggctctgaaggcacaagcactgccagctcagacaagcagcccggctggccctgccaa

SEQ ID NO: 407263 - DNA, 122 bp, Homo sapiens
aggctccgagcgcctgtatcgcacattagctagcatcaggctctgagcgccggtatcgcacgttagctagcatcaggctctgagcgtagccttcagccatgatgcacctgagcttcatcagg

SEQ ID NO: 407264 - DNA, 122 bp, Homo sapiens
tattcattcagcacctgttcaggactgccggctagtggactgctggttggcaattagacccggtcacacattcagggagcttgctggtggagggagaggcaaggaaactgatgtgttaattg

SEQ ID NO: 407265 - DNA, 122 bp, Homo sapiens
gcgaaaaacgaaagagcgaaggaagcgacgcgagcctttcttaatgaatgactgcacgcccgtcgccgcctgcgcgcaacctcgggctgggcgggcgctgcgtctcggggcgcactgccagg

SEQ ID NO: 407266 - DNA, 122 bp, Homo sapiens
ttcccagcctgagctgccggagttagaggtgtccgcgcgggaaagtggctcgctggtgggcggggagccttatctctggcggtgggttgaaaatccggcgccgggcagatgcccacgttcgc

SEQ ID NO: 407267 - DNA, 122 bp, Homo sapiens
taatcgaaatgagttttggggacgtgctgctctccacttggggcccatccttcattttgccgataccaccaaagactgggccttcctcgacaggaagatccgaggtccctctctgcagctcc

SEQ ID NO: 407268 - DNA, 122 bp, Homo sapiens
tggtgtggttgcactgtgtgagcagggcaaagtctttccacggtgtagcctcctgtccatcgccagcaaacgtcacatcgccctgggaggtgtcgatgttttctttacaccactccatgccg

SEQ ID NO: 407269 - DNA, 122 bp, Homo sapiens
cttccagtaaaacaggaaaacgctaaacaccccatatcctagggacggaaaatactgccacgtgaaagagaacacagttcaagtgataccaatcatggggctcattagccggtgttgatttt

SEQ ID NO: 407270 - DNA, 122 bp, Homo sapiens
atgctacccaagagaggcacctagggctaagcactcacatctagcagctaactctgcctgcgctaataggtatctagggaatgagtaagtgcctagaatgtgctagacacttttccaagtac

SEQ ID NO: 407271 - DNA, 122 bp, Homo sapiens
gccgggcgccgggtgggcgatccggggctgggctggggcgcggcgaggtcgggcaaggcccgggcgaggccaggccgccgccgccgcctgctccggggctgccgcgccgcgctcggtcctct

SEQ ID NO: 407272 - DNA, 122 bp, Homo sapiens
ggcaggagcaggcgggagttgttgcttcggggcgcagggtccagaccttgccgagaccggcgttgggagctagcagaaccgggaagaggctcgattgtgtccggtggggccgccgggagcct

SEQ ID NO: 407273 - DNA, 122 bp, Homo sapiens
gtggggcttgagcagatgcccgtgcccggctgattctcctacatggaaaacttccaatttcgctcggattcaggctgcttctggagctagtctcccagctgggggaagtgagcggatgctgc

SEQ ID NO: 407274 - DNA, 122 bp, Homo sapiens
gatctgccttaagtttgataatctctaaactgtcaacaggactaaccaggtggaatgagccgggtaccccaaaaatcattccagagtgtttgtgggaagtgctctcttttatctccacactc

SEQ ID NO: 407275 - DNA, 122 bp, Homo sapiens
tgtgcagacaggaagtacatgccctgttaacaaggtggcagcccatctgacatctgctgacggtttctacactgaaacaggtccaatattaccaggacttttgatttattaagagaagctgg

SEQ ID NO: 407276 - DNA, 122 bp, Homo sapiens
ttcacgcgataataagaccaactcgatactcactaggatttgtagtctttcgtctttcttcgggtttactcttccggtcctagggtcacacccaccgcagggtctggcttggtacagttggg

SEQ ID NO: 407277 - DNA, 122 bp, Homo sapiens
cacatggggggtttggccagctccaccctcctggcgtgtccccaggccacagggagccctcggctcacccagtggaagtcttctcgtttgacctccacgagccactcagcaaggagcgcgtg

SEQ ID NO: 407278 - DNA, 122 bp, Homo sapiens
tggactctcactgaccattgttaaatcggtaagtcattaatcaatttcaattacctggcacgatgagagggtgaggtctgaaaactattgtcatgggtgatatgtggtctatggtttctgag

SEQ ID NO: 407279 - DNA, 122 bp, Homo sapiens
gctttgtgcgcagggctaagccaagctttctccataggcaatggggagcaactggaggttcgtagcaggagaaggacacatcttgcccaccaggaggctaagtaaaaacagttgtctcccaa

SEQ ID NO: 407280 - DNA, 122 bp, Homo sapiens
cgccccagcttagtgccaaccactagttgagctaaaggtctcagctggcggtctggagtccgtctatctgtctacgcggctgcttcccagccgggacagctggagggaggaaggggtggggg

SEQ ID NO: 407281 - DNA, 122 bp, Homo sapiens
ccctcccgcccggcctcggcgcccggcctgtgccggccccgccgcgcccgccgcactgaccgataacctcctgcagctcgtacgcgtccctgcagatgggccagccgacagcctgtgccgcc

SEQ ID NO: 407282 - DNA, 122 bp, Homo sapiens
aaggaatttttccttagccctagttctttgtgctttgataaagaacctttttttccctatcgcagtgacaacattttttaataacttgctcattagttaatctttcaatcaccgcccagtat

SEQ ID NO: 407283 - DNA, 122 bp, Homo sapiens
gtcacactgtgtctcctgcactgtgctgccacacacatgggggaactggctttcaccgggcggcctcatctcatctctggactcttagatgggctggcccagaccgctcctgtgggcaaagc

SEQ ID NO: 407284 - DNA, 122 bp, Homo sapiens
tgtctccctgtgtctgtgtgtgcctgcgtgtctgtgtgcatccctgtgtctgtgtgtgtccgtgtctgcgcatctctgtatctgtgtgtgtctgcgtgtctgtgtgtgtccgtgtgcatgtg

SEQ ID NO: 407285 - DNA, 122 bp, Homo sapiens
ggtgactcatttttctgtgtagagactcggtggcccaggcaggaggtgaaagcagccatccggaaggccctggggacccttgtgcctgttgctcgccttcaggtcaccagctgagctgcgat

SEQ ID NO: 407286 - DNA, 122 bp, Homo sapiens
cacctgcactatccatagctggctgcttatatattcttatcacattgttatgataaatggcgcagagtgaagctgtgctacccatgtggcagggagcctcctccccagcccctcctccctgt

SEQ ID NO: 407287 - DNA, 122 bp, Homo sapiens
ctcattttgagagcggtacaaagctgaggggtaatcaccccagtttataaatggagaagccgaaatcagagacaggaggtgccttatccagagtctcaaaacagaactagggcccgaaatag

SEQ ID NO: 407288 - DNA, 122 bp, Homo sapiens
tgtagatggctgccaggctctagattagttacctggtcttcttgcccataatcttttttgcgtcagagaaaattgtacaggcctatttttaattctaagcaaccctctctgttctctccctt

SEQ ID NO: 407289 - DNA, 122 bp, Homo sapiens
ttaaacttgtttcaatattgccagctttagtcaattagctttagctttagtcatttcaaccgtgcattcactcagcaaatggcaagcaaacaccaggtgctgttctaaatgccagggaccca

SEQ ID NO: 407290 - DNA, 122 bp, Homo sapiens
cgctatatggagagggggtctgtgtcaggagcttcccctggagaggtttctgttagggaccgtctttgggagtgatctatctctgctctctgggggggatctttgtctggagcttttggggg

SEQ ID NO: 407291 - DNA, 122 bp, Homo sapiens
cagcttgctcggctgggtttctgccctgcccgctccctagctctgctgcagggccggcagcggcagttctgcctgaaacgcaagaattaatagtctgctctggggagacagtggggaagccg

SEQ ID NO: 407292 - DNA, 122 bp, Homo sapiens
tagagccactcttcctggtgctggactaagaggtgcaggcttggagggtgcagggcggtccgcctctcagacgtagaggcccggcctcggatgaaggcggaagggagggcaccgcctgttgc

SEQ ID NO: 407293 - DNA, 122 bp, Homo sapiens
tgtgatccgcccacctcggcctcccatagtgctgggattacaggcctgagccactgcgcccggctgggggcctacatttgaccccacgtggtggtttgggctcatagtccatgtgcttaacc

SEQ ID NO: 407294 - DNA, 122 bp, Homo sapiens
gtccacagaggtgtgcaccttggagatgaacaccggctggtgggagccgtcctgcgagtgcgcggaggagccgccgccgccgcccccgccgccgccgccgctgcccccggaaactccggggg

SEQ ID NO: 407295 - DNA, 122 bp, Homo sapiens
agccgccgccaacgcgcaggcgcacaccgaagccgtcacgctcgcttttttttcctttgccgtccgcagttctcaataatctagctttatttgaacacaagagagtgaacaacggacacaca

SEQ ID NO: 407296 - DNA, 122 bp, Homo sapiens
tgcccggccctgagggccttgcctgaggacacccctttcctcccctccggaaggggcgaccgccctttgccaaccccaggcaaagctggggccccaaccttatgtgcgctaccgccccctcc

SEQ ID NO: 407297 - DNA, 122 bp, Homo sapiens
aagcaaaggtaatttaatcagaggctggttttgcctatctttgactcccccttcactacacggcaaagttctcttgctacttagttacacagttacttgttatagcatccagagatttttaa

SEQ ID NO: 407298 - DNA, 122 bp, Homo sapiens
tggctgcagggcagcgccctgcgaagtgcaggggtgaaggtctgcaggccccgctaaccacgcccttctcttccccaggggaggagcgcccccgggactccccgggcccggcggaggcccag

SEQ ID NO: 407299 - DNA, 122 bp, Homo sapiens
ggcaggaaccacttctgctacaagttggcaaacaagcatgcctagaagattcataatcagcgctgcatgcagaagctgccccaagatgagtgggatcacaccctggatgcctaggaagcttt

SEQ ID NO: 407300 - DNA, 122 bp, Homo sapiens
gctttacctccagagactccccctgtcttccctgcaccggctgactatacctacacacttcggtggcacaatctttgtttagatatgctgatgccttccttcgctgggaacggtccagtcct

SEQ ID NO: 407301 - DNA, 122 bp, Homo sapiens
agatctgaacaagctaagtgctcgtgcagatacatgggcctctcctccaagagttggttccgcaagaggtggaaagaactctcaatagtttaggaaagctcattttcaaaagtatacttaca

SEQ ID NO: 407302 - DNA, 122 bp, Homo sapiens
tcaggccgagcaggagcccagtccgcacctcgccaccatcgaatgtgatgccctgctgggcggacagggccgccagggcatgatcatgacagaatatccatgggcggcacccaaggctggcg

SEQ ID NO: 407303 - DNA, 122 bp, Homo sapiens
tcttccaacagccctgtttgcccagcattagggctgtttgttgaaacacctagcccaatccgagggggctcagctttctaaacagttggtccccgaatctgtcaatcaataacaccaattgg

SEQ ID NO: 407304 - DNA, 122 bp, Homo sapiens
tgtcttccccaccggctgccaggatcactccgggaccaccacgccaacggctcaccaaggcgcgcaaacctccgcgcccggaagtttagtgtgtagctgctccttcgctgtcgctcatgccc

SEQ ID NO: 407305 - DNA, 122 bp, Homo sapiens
aggcccagctacgcttagcataaaagaaaaccagcattagccactgttggaggattcgggcgctgtagtcagccagctgaaggaggagttcaaattggaatatctttcctgagaggtcagga

SEQ ID NO: 407306 - DNA, 122 bp, Homo sapiens
gccgcagctccccaggtccctctcagcccgggctccggtgggcgcggagggggagggtcgcgttctgtcagtttctagctcgctcccctcagagctgcagccaaaacccggagagtggaata

SEQ ID NO: 407307 - DNA, 122 bp, Homo sapiens
gcctcagcccgcacccggccgcagccaagcgtgggcctgccgggttcgtagcgcccgaggcgcgcggccccacctccgggccctagacaacggccgccactgccccctgccggccgccgtag

SEQ ID NO: 407308 - DNA, 122 bp, Homo sapiens
gtgtgacataaacagtttcagataaatagcagacaatgtcacaccacaacatttacacagcggagtgacgattcctgcttgaaggcatgggctttgaataaatggccctgagaaatacagtt

SEQ ID NO: 407309 - DNA, 122 bp, Homo sapiens
tgtggcccaacaaaacacgcagggtttgggctgcaactcctccaaagccggggctatctccgcgtcctccgcttggggtggcctggccgggtttcggggccccgcctcctgcctggagggcc

SEQ ID NO: 407310 - DNA, 122 bp, Homo sapiens
tcgatagtacaaattttgttccaaacacatctgccaagtacaaccctaaacttttccaagcgagaggttattttcctaacacagcgcctgctctgctgggcatcctctgtggtccagaaggc

SEQ ID NO: 407311 - DNA, 122 bp, Homo sapiens
cctataatggctatctactgctcttaggataaaaaccaaaatttataacaaggtctgctacgtcctacataatccagccttaaactatatatacagccttatcatagagaagcagaatagca

SEQ ID NO: 407312 - DNA, 122 bp, Homo sapiens
accaatcatcccacagagagagttctgctaagggctccaaagcagatgtcttagggtaaccgtcagggaatctcccttaaattccattgcctggttggaaactaagacattttaaaataatg

SEQ ID NO: 407313 - DNA, 122 bp, Homo sapiens
cagtttcaattctcgtcagtgggtccgaggcaggccctgcgccaccatgatgaatgtgtgcgtggtgccagggatcgatgggcatattaaggagcagcgccgcggtccccggcagccagctt

SEQ ID NO: 407314 - DNA, 122 bp, Homo sapiens
gccgtgaagtgggcggagcgagcgatttgaacgcgagcggcgcggacttctgccaagcaccggctcatgtgaggctcgcggcacagcgttctctgggctccccagaagccagcctttcgctc

SEQ ID NO: 407315 - DNA, 122 bp, Homo sapiens
gctgtcacttaggatcaggagtaaatagtccccgaaaaggtttaactccatccacaccagcgacaagctgctaaccatccacgcagcctgcctgcccgggagaggatggggtggctcagcac

SEQ ID NO: 407316 - DNA, 122 bp, Homo sapiens
tttccatcccaaagcaccttctcacgtagagtccagggactaggaggactcacaacgcagcgatgggcagccaggccctgcaggagtggggacagagggaacccggccggtggcccgaccct

SEQ ID NO: 407317 - DNA, 122 bp, Homo sapiens
ctggcttcatgttactgtgtgccagtccctttagcaggactgggggtacagccaggaagacgaggccctgccctctggaaggtatgttctagatgagagaccaataataaacgcaccaacac

SEQ ID NO: 407318 - DNA, 122 bp, Homo sapiens
aaagcctgaggcattacagtgtgcccacgacagccctggtggcttctgagataggagaggcgtccttgggaggctttgagcatttcctggggcttccatgcatctcacttctgccagcctca

SEQ ID NO: 407319 - DNA, 122 bp, Homo sapiens
caaagcgatgccagcagcaacccagtctcctgagtgacccaggccagggtctggaaacaacggggtgtcctggcaacagtcagggggagcttccagcagggcgaagtccctatcctcatctc

SEQ ID NO: 407320 - DNA, 122 bp, Homo sapiens
accacaacctttcatctttaagaccgtccttccacctcatgatctgtggggtgggaccatcggtgctctccagggaggagggggctagtgaggtgcaggaagtatggcgggcacccccatca

SEQ ID NO: 407321 - DNA, 122 bp, Homo sapiens
cagactgctgtgctagcaatcagcgagactccgggggcgtaggaacctccgagccaggtgcggggtataatctcgtggtgcgccgttttttaagcccgtcggaaaagcgcagtattcgggtg

SEQ ID NO: 407322 - DNA, 122 bp, Homo sapiens
acccgctgcccgaatcaggggcaaaagcaacaaactttgcaagttacaaacgggccgcaccggtggcaagcagcagcagggcatctcccgctccgagtgctcatttctgactccaaggctgt

SEQ ID NO: 407323 - DNA, 122 bp, Homo sapiens
ctgtcactggccttgtccttcttacacccgggctcagccacagctaacactaggttacatcgtgtgtatcaacaccaaccacccggtagtgaccacatgaaatacagcattgacaaggagtc

SEQ ID NO: 407324 - DNA, 122 bp, Homo sapiens
gcagcctggagtctcagtttaccgctttgtgaaatggacacaataacagtctccactctccggggaagttggcagtatttaaaagtacttaataaaccgcttagcgcggtgtagaccgtgat

SEQ ID NO: 407325 - DNA, 122 bp, Homo sapiens
gcaggctcaagggcctggaccgcttgctgaggtccctggcatggctgtgcaagaacgcagcgcgcagctgggagtgccactaggcaaggcgcaggcgcagcggcgactcggcagcctctgaa

SEQ ID NO: 407326 - DNA, 122 bp, Homo sapiens
cacgaagactaagaaatgccaggcagatgcatttgaccatcaagccccaaacactaaactcgaacctcctcctcaaacaagctggcagctgctcagtggatgtgttataccagggtgatagt

SEQ ID NO: 407327 - DNA, 122 bp, Homo sapiens
gagagtacaaggccctgatgaggacccggcgtcaggatgcccgccagagctacgtgatcccgtgagcaggcccccccgcaggcagccaggagactgtgtgtacatgtgtagctctcatgagt

SEQ ID NO: 407328 - DNA, 122 bp, Homo sapiens
ctgggagtcccatgcaggcagaaagctcatttgtgccacctctttccccagcatcgcacacgtattaggtgcccagtacatatttattgaatgacgtgtgcaagtgagtgagtgtttactac

SEQ ID NO: 407329 - DNA, 122 bp, Homo sapiens
tcccgtctctcatttttcatgacattcttaatcatcgcacctatttacacactttgccagcgcgcaccaaaataacaaccacgataattatgataataaagagagtcctttatctgctccat

SEQ ID NO: 407330 - DNA, 122 bp, Homo sapiens
gagcccggacgggacagcccaccagggtctgcttctgtgaggggccgaggcgtcattccgcgaaggtaattagctggggaggggacttgaagccgcttttgcagtgtaccttacatatgact

SEQ ID NO: 407331 - DNA, 122 bp, Homo sapiens
tgctgtagctggtcttcataggaaagcagaagcaagcttctcctcctctttattaactagcggtttatttcatatttttaaaaagaaacggggtttcactgttgcctagggtggttttggat

SEQ ID NO: 407332 - DNA, 122 bp, Homo sapiens
tcttcaccgcccatctctcctcccggcccacttccctcactgcaacccggggaccgcctccggggatccacgccccttcccgagcctctgactcgcccagcccggccctgggaccacgcctc

SEQ ID NO: 407333 - DNA, 122 bp, Homo sapiens
catcagcatcttcccacctgtggtgccctggcccagcctccttccggttggggttggacccgccctggcagccaggttttgcgtcacctgccccacccgccctgtaacctacttgcccaact

SEQ ID NO: 407334 - DNA, 122 bp, Homo sapiens
ccacctacctcccagccgcctgccttggcctcccaaagtgccgagattgcagcctctgcccggctgccaccccgtctaggaagtaaggagcgtctctgcccggctgcccatggtctgggatg

SEQ ID NO: 407335 - DNA, 122 bp, Homo sapiens
gccctgggattccagggcgctttctggtaatggtttccagactccctactccctgcctcgcgaagcccctatcctggtttcaagtctccggcttcgttccggatcctctgagtctccccctt

SEQ ID NO: 407336 - DNA, 122 bp, Homo sapiens
cgggggcggggccgccgcggggggcggggctgcagggggcggaggctgcgcagggagcggcgcgcgagccagcgaccccgcccgggcctgcgggaggacggaaccccagccccgaggacccg

SEQ ID NO: 407337 - DNA, 122 bp, Homo sapiens
cctggtcccaagggcgtttttataccttctgggatgcttgacaaagatcgctcaatggctcgctgtccccctcccctgccctccttcactttctctctctcatccagggagggtctaatctt

SEQ ID NO: 407338 - DNA, 122 bp, Homo sapiens
aactgtttacccagtgacaagtatgatgcccagcagagcccaagcctgtgtctgcctggccggctcagcagtgagccggtgtgatccctccctgatagaaagcaccaggctcctgctcctcc

SEQ ID NO: 407339 - DNA, 122 bp, Homo sapiens
aggaagaggacggcctcccgcgcgctgccggcttcctcaggaagaggacggcctcccgcgcgctgctggctttatctgggctcctgaggttctcctttgagtgtcatcacacccacacttgc

SEQ ID NO: 407340 - DNA, 122 bp, Homo sapiens
cctgtatctctcaggtcagcgtggttcagtttgctgtgcagagtccaggggagataaccacgctgtgcacacatgagattggctgacttggcaggactgtgcaattgtcagaaggccgtggg

SEQ ID NO: 407341 - DNA, 122 bp, Homo sapiens
ctcctggtgcgccgttttttaagcccgtcggaaaaccgcagtattcgggtggaagtgacccgattctccaggtgccgtctgtcaccactttctttgactaggaaagggaactccctgacccc

SEQ ID NO: 407342 - DNA, 122 bp, Homo sapiens
gacttcctcctccgcaagctgtcaacaaaggagaagcaggtttggcatccggaggccgctcggctgcctgtcctgcgcccagctcagcccggacccatcggccaccttaagtagccaagggg

SEQ ID NO: 407343 - DNA, 122 bp, Homo sapiens
cccgccccgctcccgagggcggcccaagcggcggccggctcttctacccggcgcccgggacgccacttaccgcaggccgcaggcctctagggtctcgcagccatttccccgaacgccgcgga

SEQ ID NO: 407344 - DNA, 122 bp, Homo sapiens
actccatttccactgtgatgagtagcagctaagctaaggcttgcaaccgttgttttatgccgggcccccagaggtcacaacacaggcatagctcatgattagtcagagatttgggtggagtt

SEQ ID NO: 407345 - DNA, 122 bp, Homo sapiens
gccactccccatctgcagcccgtgtgctgaggagggcacggaaaacgtccaaagcacgcacgactgcagcgaagctcatgaatgcccctgcacacacgcagtggggcagacaccggttggcc

SEQ ID NO: 407346 - DNA, 122 bp, Homo sapiens
tgtgccatgtgggtttgctgcacccattaagttgtcatttacattaggtatttctcccaacgctatccatcccccagccccagactccccaacaggccccagtatgtgatgttcccctccct

SEQ ID NO: 407347 - DNA, 122 bp, Homo sapiens
ttattattattttaacttccctccggttaagctaaattgatcttaatctttcatctcggacgtccctctaaggggagtgagcgaagattccgattgcaagtcgccgctgtcgcttgtgcccg

SEQ ID NO: 407348 - DNA, 122 bp, Homo sapiens
cacagccctcttctctgctcacacaggaagcccaggaagcctctgcctcagagatgctgccgctgctgctgccgctgcccctgctgtgggcaggtgagtggccctggggagaggggccgtgg

SEQ ID NO: 407349 - DNA, 122 bp, Homo sapiens
ctggaagcatccacagctgttttaaattggttttggtttctggaaatagcgcactcggtacggcagcatctctggcctccagccggggttaaccctgacctgaacgccctgtttagctccca

SEQ ID NO: 407350 - DNA, 122 bp, Homo sapiens
gtggctcattttcatgcacaaaaatgagaggagaaaaaggttttttaatattaatgaaaccgttgctataacatctacagcgcgccagtatgagtatcatgattaaaaattgacttcaactt

SEQ ID NO: 407351 - DNA, 122 bp, Homo sapiens
cccgctggggctggaggagctgaaggacacaggggctgggctggtgcccgaggctgtccccggcaagccgcccttcgcagagccggacgcggtgctgtccatcgttgtgggtggtgcggtgg

SEQ ID NO: 407352 - DNA, 122 bp, Homo sapiens
gacgaaagggggaaatagcagagtcacttcacccttttccccaaaccccacaaaactgctcgcagcgacgcggatgatctaccgaattccccgcgaattcggaggattaagttgtcagtcag

SEQ ID NO: 407353 - DNA, 122 bp, Homo sapiens
ggcagggtagaatcaacgtgagaaaaccccaaatgccaagccaagaaattctgtaagcaacggggggctactcatgtcacttagtttagtaacagcggttctaaagctccagcctggaaaag

SEQ ID NO: 407354 - DNA, 122 bp, Homo sapiens
catcattgtcctggtctttgtctctagtactgaacctggagagccgccctgcattacttccgctggcttccagttcctgttgctggacaccccggctcagctctggtactttatgttgcagt

SEQ ID NO: 407355 - DNA, 122 bp, Homo sapiens
aagcctgattctttgaataatcagtgaaactctgatattcgctaaagttggccccaagcacgtgggtaagtaactactggttcgcgctttgaacccaaccagccctcatcgctcggagccct

SEQ ID NO: 407356 - DNA, 122 bp, Homo sapiens
acaaaccctgcctggaaccgcagccctgctctcagaatcaaattcctgaaagtgggcaagcggaagcggaaataagccctctcccaacgccagctgactcgatttcgtctcggtcttcccca

SEQ ID NO: 407357 - DNA, 122 bp, Homo sapiens
tacccaggctggcccacagatataaacccacgggcagaccgatcaataggcttttgggggcgaacgtgataacctaccctcacctgttgtcttggttagcattgcattcagctacaagtgag

SEQ ID NO: 407358 - DNA, 122 bp, Homo sapiens
tcagttagttacggggtcaccattattgagttttcctgtctaattacacctgtcctgcagcgcatggtagaagtgaggccaggctgggcagacacccccacccactgccccgaaactgcctg

SEQ ID NO: 407359 - DNA, 122 bp, Homo sapiens
agaaggtctggaagtgcccagaatgggaggcacggaagcccctcccggggaggactcccgcgttgatggaccgttcttggtgcagactcctgactgcgtgcatgaaacctgagacaagtgca

SEQ ID NO: 407360 - DNA, 122 bp, Homo sapiens
tggcgctcagtagaccctgcgtgaaggaatgattaaattggtgcaaaagactagggtaagcggcagagatttaggagattaagtcctgccagggtgtagcctctgcagggcgggaaggctga

SEQ ID NO: 407361 - DNA, 122 bp, Homo sapiens
tcaggctcgcgcgatcgatgtcctcctggacgtgtccgcggacgtccttcacctccaccgcggcctgggtcccgcccaccgcggcctgagtctcacttttgcccggctcctcctcctgagaa

SEQ ID NO: 407362 - DNA, 122 bp, Homo sapiens
ctcggtggcgggagccgccttcttgtgggacttgggggcacgtggcgcggggcggggacgcggacagacccctcccgcatcctaggaggcctgggagggtccgcggggacgcggggaggggg

SEQ ID NO: 407363 - DNA, 122 bp, Homo sapiens
taatataagcatgggtggactggtcagaagatccggcaatggcccagaccatggggaggccggtctgcgtggaacacaggatcctggtacattgatagattgaaggtccggactgaggcctt

SEQ ID NO: 407364 - DNA, 122 bp, Homo sapiens
aaagcaacagcagccacatggctgacaacaccaccacttaacaattcaaagctcggtcaccgttttcaggagtctcttccaaatctttctgaagtgcttttgaagttctacattccccgtct

SEQ ID NO: 407365 - DNA, 122 bp, Homo sapiens
cacggactcctggcctcagttgcctttctgtgcccctgcaccccatttaaggggtggggtcggcagatgggcgggatcagtggcgaaggtgggaggaggacatggagagcagcccctccccc

SEQ ID NO: 407366 - DNA, 122 bp, Homo sapiens
ggcgagtcccgggaggcgaggatgggcccgcgagcgggcggttctggctcagtcacacgtcgctctgttcctgcttcagtgcgcaccttgacggctccttagggacagaccagccgcaggca

SEQ ID NO: 407367 - DNA, 122 bp, Homo sapiens
ccgcctcctgggttcaggtgattctcctgcctcagcctccccagtagctgggattacaggcgcctgccactggaggatggcttctcccagaggggaagacagggtcacggttctcattaaga

SEQ ID NO: 407368 - DNA, 122 bp, Homo sapiens
tggtaataagaattggagatgaaggggagaatttgagatatttaggaatttgtagcacttcgcatagcactgcaatttacctgtctgtcgttgggcacagatgagcagtggctttatggcta

SEQ ID NO: 407369 - DNA, 122 bp, Homo sapiens
catgtctgtccagcggctctgcagagttaaggctgtgggtcataccagccacaccctcagcgtggtccatgtcacagaaacatgtggaaaccaggtgatttcccagcctcctggtcaggagg

SEQ ID NO: 407370 - DNA, 122 bp, Homo sapiens
aggagagaggaagggagcggggcggagcggccgggtaaggcagacaaaaggcgccacctccggggacccgggcgccccgccccctcctctctgggagcggcgtcggcgccccgggcgagcgg

SEQ ID NO: 407371 - DNA, 122 bp, Homo sapiens
ctgcaccaggccatgcaaaatgagcccagaaaggtactttggcagctaggacctggggaacgcgagcttcccccctcaagccccccgccggtgccagctcccgggtgcgtgcgaaatggctg

SEQ ID NO: 407372 - DNA, 122 bp, Homo sapiens
accaacatcaccttctacagaaagccattcctgactactttccctcacctccaggtgccccgtgaaactttggatgtgtctctattaccgaacattcacatgattttatgatacccatcttt

SEQ ID NO: 407373 - DNA, 122 bp, Homo sapiens
ttaagaggtcggtccctgattcggtcgaatccacttgggagaccctggaggtaatgaaggcgagcacgaaggcaaggggcgcccgggccggaaaccgtgcaaccccagataccctctagacc

SEQ ID NO: 407374 - DNA, 122 bp, Homo sapiens
cgtcccccgagtgcgccgaccttgtgctacagccagaacagctccgggaaacaagggcagcgggagaaacggcccggaaagggacgaagaggcttccagctttcgccaagtcgcggctccca

SEQ ID NO: 407375 - DNA, 122 bp, Homo sapiens
cagctctcagataacccaggctttgggagggcggggctcctgccggcctcccctgtagtgcggctcgagtcctgtgaagctaccagttgccaaatgaaatctgaaacctcgagctgtgtctg

SEQ ID NO: 407376 - DNA, 122 bp, Homo sapiens
ttccccgcggggctgcaggcgccggagcggagaggccagaagttggggccgcggggttcgcgttctttgacgtgtgggtctgggaggtgtggagttgcgttggcggcggttgttttgcacgc

SEQ ID NO: 407377 - DNA, 122 bp, Homo sapiens
aacgctgcctcctcagggcttacacctcaacccgctactctcaaggtagtcgccaatcaccgcacccatctcattgatcggcacaaaaacagaccaattgacagccttagtcccgcccccta

SEQ ID NO: 407378 - DNA, 122 bp, Homo sapiens
cagcaaacattggtgctgggccctgagcgcccagaacttgcaacgtgcccgactcagcaacggaaagaatcgcccagatttagaagcatccaacatagtgcgagagttttccctgctttcct

SEQ ID NO: 407379 - DNA, 122 bp, Homo sapiens
ccggctatcaacaacttttcctacgtagaaattattcgggcactggtttatagaacctcacgtgggttcacgtagaattgaaggggacctcagcgtcccttgcagatgggatgtgcaatgta

SEQ ID NO: 407380 - DNA, 122 bp, Homo sapiens
ttcctccttttcaacatgtagcccctctggtcagtttcctctgacctccagactaaggatcgcttcccctttcctgactctctcagggctggaacctattagctctgtttgctattggcctc

SEQ ID NO: 407381 - DNA, 122 bp, Homo sapiens
ctgggagaaccggctgggtgctgcccctccccttgggccgggcacggagtaggcacctggcgggctccccaggtggcagacgctgtcgctgcgcacacctggcctctgtgccgcctgctccc

SEQ ID NO: 407382 - DNA, 122 bp, Homo sapiens
gagcggatccggtgacgcgccggccgcgccccttctccttctcgatttggctgcagattccggtcccaagatttgcatattttggcatccagtggaaaaggaaagaagaacggaacccgcag

SEQ ID NO: 407383 - DNA, 122 bp, Homo sapiens
tgatgtaatttataagagctaccgggaggggtgaagggaagtcgtttgattggctaaaagcggagccgtatctaacagccaatagaaaagcagaaagccgcctcttggtttgcgtcctgcac

SEQ ID NO: 407384 - DNA, 122 bp, Homo sapiens
caagagctggaggacgagcaacggcgtctgtgtgacgtgcagcccttcctgcccgtcctgcgcctggtggcccgtgagggcgaccgcgtgaagaagctcatcaactcacagatcagcctcct

SEQ ID NO: 407385 - DNA, 122 bp, Homo sapiens
tgctgggcagcagcgaaaacgcgctgggcgtctgctccgacaccgcagcgcccctggccgcggtggacctcaagtgggagcacaaccccgctgtgttcctgggccccggctgcgtgtacgcc

SEQ ID NO: 407386 - DNA, 122 bp, Homo sapiens
aaacctgcagagagaagagcccactgctgcgtgcgtgcacctctgtgcccaggctcctgacggcctcttgggtgtgcagtctgcggtggcagccctgacaagccaccgcaccacgtgggtct

SEQ ID NO: 407387 - DNA, 122 bp, Homo sapiens
accaacacccccagagctctgcacacgcagtcagccactctccagatcagattggaggggcgcagtccgcgattccacacccaagccgataaagaaaaacccagcaccaccctcctggctaa

SEQ ID NO: 407388 - DNA, 122 bp, Homo sapiens
cgccgggaaatgtggtttctccagccggcccggggcggtggccgcaagttgggcttacagcgcggccgatccggcgtggacccgggatggctggaccgggcagcacgggggggcagatcggg

SEQ ID NO: 407389 - DNA, 122 bp, Homo sapiens
attttacaagccagagctaaaattcagagctacaattatttttttcctctttgtggtaagcgttcttggcagcagacccacttgcttctgcttccttggattgtagagcaattaaaactact

SEQ ID NO: 407390 - DNA, 122 bp, Homo sapiens
tcatctgctcctttcaattactcctagctgggcggcctgcctgctgtctccttgcagtcccgaagaagctggtgggtatagggggaggagggaacaaggaagggtaggcttaggctggaagg

SEQ ID NO: 407391 - DNA, 122 bp, Homo sapiens
ttattgttttacccctgccgaaagggccagggaacccccgagcacagcgtcagccaatcacgcatctcctccagagccggacccaaccttcccgtgtccctctgcggagcacgcgcagtacg

SEQ ID NO: 407392 - DNA, 122 bp, Homo sapiens
cctatacctcaaccgcagcctgctgacggccatctcggcacagcgcgtgctgcccttcgacgacaacatctgcctgcgggagccctgcgagaactacatgcgctgcgtgtcggtgctgcgct

SEQ ID NO: 407393 - DNA, 122 bp, Homo sapiens
ccctgctgcccctggggttttactgggagagagggagagggtggaggggctagtgtaattcggcaatttgtgagttaaaaagcagatgagaacccacagagtaacgagacattcttctcttt

SEQ ID NO: 407394 - DNA, 122 bp, Homo sapiens
tcttgggatatggacaaggcctgggctgccacctgtctggggccttcctgagggccaggccggccacactcacctcgcttgagcaggctggcccggtagcggccctccagcgtgcagttcca

SEQ ID NO: 407395 - DNA, 122 bp, Homo sapiens
gagtccctggcagtcccggccttccgggggcggccctggggcctcgggcaactgcatccacggccctggagcccatcatgtcccatggttcacgtttttccgcctggaaactgcatgcctgt

SEQ ID NO: 407396 - DNA, 122 bp, Homo sapiens
ggacagctggcccagaggagttgcgagactaaagtgaatgattgccacagtcattccctccggtggcttctccccaagtacttggcgccagagcgcccaacattgtgcatacatggtcgctc

SEQ ID NO: 407397 - DNA, 122 bp, Homo sapiens
gggcacttcccagacttgggcgcgacagggaacctctccggaagaaatcgcgccccttctcgcagcaggatccagggccacgacccttgccgccagtttctgtgcggccacgcccccaaccc

SEQ ID NO: 407398 - DNA, 122 bp, Homo sapiens
tgcagccaggaatcaagacaacacaaatgagttctggaagtgattcatgctaggactgtacgctaaggcaatggggcagaaagcctgggagtgcagtttttttgtttttgttttttgttttt

SEQ ID NO: 407399 - DNA, 122 bp, Homo sapiens
taagccacgccttcacggagtctctgcacatagtacatgagcacaggtgcagtgtcctttcgccgccatcctctaatgacaacgctttgttgagaaaacgagggcgttagagaaaggaagag

SEQ ID NO: 407400 - DNA, 122 bp, Homo sapiens
agatccctaatttcataagcagcttcagtgagcacatagaattaacagccatatttcttacgctgttttttccacaatacctaccttgtatccagggattaaattcatgtaattctgaagga

SEQ ID NO: 407401 - DNA, 122 bp, Homo sapiens
ctcacccccgcggctcagagtgcccatcgcgggctcctgggcagtgtttatctggggccacgcccgctctgagcgccactggagtcacgattgcatctgaaggccacgttaagaagcgtcac

SEQ ID NO: 407402 - DNA, 122 bp, Homo sapiens
cgagcaaggcctcggagctgctgaaggggcattcatcctcgttttatgtggggaaagcagcgaggagaaaaggcacgcttgcaatttaatgtaactaaatgtcattccgcaccccctgtatc

SEQ ID NO: 407403 - DNA, 122 bp, Homo sapiens
ataagaagaaagttatttttgtaatatgaatcttgaactttcaagtctataatgtgatgtcgaatgctccgggatacttgctggtccatgaagctaaacagtccatgagttgaagccttcac

SEQ ID NO: 407404 - DNA, 122 bp, Homo sapiens
gagctgagactgaaagggtgggcaacccaatgggagctttgggaggctggttggtggcctcggagtggctaagagactagcgcggcgcggcgcgaagggagggagggaggaagtacaggtta

SEQ ID NO: 407405 - DNA, 122 bp, Homo sapiens
gcctcctccctgcaggtcctatgtctacgccggcttggaggccggggcggagtgttactgcgggaaccggctgccagcggtgagcgtggggctggaagagtgtaaccatgagtgcaaaggcg

SEQ ID NO: 407406 - DNA, 122 bp, Homo sapiens
tcccaacatcgcaggaagtgtacacccccgtgtgagatggtccttaaaaatattccaaggcggagggggtgatatgactacatatatggcagaaagaggaaaccaccaaggatattgttccc

SEQ ID NO: 407407 - DNA, 122 bp, Homo sapiens
ataagtctctgcaatgagcgccgacacctctccccgggccaggcgagttcctcaagaccccgctcccacctcccggggcccgaagtgggaaggaagaactcctgggaatagagtggcaaggc

SEQ ID NO: 407408 - DNA, 122 bp, Homo sapiens
tatgccttgaattcagttaccaggctttaacagaagacatcccaaatctcctatgcaactcggatctctcctctgagctcctaacccctataaaaacttttcactacacatctcttcttgga

SEQ ID NO: 407409 - DNA, 122 bp, Homo sapiens
cactgtggcctccgccctccctccctgcccggccagggcacctgggacggcggcggggagcggcagagttgcgccctcaccttgcagacgctgctgctggcagccccttcgctgtgcagtag

SEQ ID NO: 407410 - DNA, 122 bp, Homo sapiens
gagctgcctgtgaatctattgcacagtgggtgggaccctggtctaatggtgccacgcccacggggacccccacgggccgctgctacagagcagcgggtgccagcaggtcaggcgctcaggaa

SEQ ID NO: 407411 - DNA, 122 bp, Homo sapiens
tgaccctgcgcagcctgggaggcgggtcttagctccaggtgcgtacggcatctgacttgacgtggcccacaactgaaaggtctggggagaaggcgccgtgtccgggtgtggagaggggcgtc

SEQ ID NO: 407412 - DNA, 122 bp, Homo sapiens
gtagccagctgcttgcgtggcgctttaccgccggtggatttccgagctgtctgtttagtacgagccatggcaaaaccacagaaaagcttgcctgcagagacgtctgtggaggaaaggaaaga

SEQ ID NO: 407413 - DNA, 122 bp, Homo sapiens
ttctagtatgtgctaattatgaattttattaaggtttattcaatgtcacagaggaaagaacggtttgtagttttgcttacccgcagtgctggcaggtcacagctgtccaaccatgatccatt

SEQ ID NO: 407414 - DNA, 122 bp, Homo sapiens
gacaccgctgcgatgtgggaaataatattatgctctcccactgactcggatattacaaaccgtatcacagcgggccatacaccccctgcgatattgggagtaaaatcatcctctcccgccct

SEQ ID NO: 407415 - DNA, 122 bp, Homo sapiens
gcgcaattccagctgctcattcatagcacaatctgtagcctcagatttgccagtcttagtcgactaagaggagccgacatgaggcaaaaggagaaacagtctgaccttagctataaaggaca

SEQ ID NO: 407416 - DNA, 122 bp, Homo sapiens
gtctgagaccagcctgtgcaacagagcgagaccccgtctactaaaaattttaaaattagccgggtgcagtggtgcaggcctgtagtcttagctactcaggaggctgaggctggaggattgct

SEQ ID NO: 407417 - DNA, 122 bp, Homo sapiens
caccagaaggaagaaactccgaacacatccgaacatcagaaggaacagactctggacgcgcggccgttaagaactgtaacactcaccggacccgccccctttaagaactgtaacacaccgcg

SEQ ID NO: 407418 - DNA, 122 bp, Homo sapiens
gcttcattcgtcggttctggaaccaaatcttgacctgtgtttcattgagctccagggtggcggcaatctccaccctccgggcccggctcaggtacttgttgaaatggaactccttttccagt

SEQ ID NO: 407419 - DNA, 122 bp, Homo sapiens
ccttcaccctccaatagaccccagtgtgtattgttcccttttgtgcccgtaagttctcatcggtcagctcccacttataagtgagaacatgtggtatttggttttctgttcctgtgttagtt

SEQ ID NO: 407420 - DNA, 122 bp, Homo sapiens
ggccctggctgccagatgcccacagcaccctggcatgacctgccacctctgcttccacaccggagccagctacctctcctgtgcctgccactcaataaacagtgtctgcgccccacagttgt

SEQ ID NO: 407421 - DNA, 122 bp, Homo sapiens
gccgagtcatctggaacacttcaatcatccaactttactgtacatgccctggagggaggacgggggaggtggcagactatctgggagctctgggcaaggtatttgccaccacaacagcaaat

SEQ ID NO: 407422 - DNA, 122 bp, Homo sapiens
gcccggcggggccagcgcagttgaggtctggggagcccggctggcatctgctccgggctgcggcgcgggccccgcggagcccaggaggcggcgggtgcttccggccaagggccctggcggcc

SEQ ID NO: 407423 - DNA, 122 bp, Homo sapiens
tccctacttggtggagcccatggagccacctgtcagagcagacaccacagctgtcatggacgtgggacttaatttctttccttttgtctctgaaaagtttgtgatgtggtaagagaggagct

SEQ ID NO: 407424 - DNA, 122 bp, Homo sapiens
gcgcttgcaagcgcatgaagagtcctggggggacagcggtgggcgggagacctttggcgccggcgcttcctctttctcccggcttgttcccgacgcttgttcccgacggtgctcgctcctgg

SEQ ID NO: 407425 - DNA, 122 bp, Homo sapiens
ccaccttcaaccgagatgcctattcccaccgaggcaggggtgcccagacgccccccaacgcgtgcctggcctggcaccctggcctggaaaggtcccaaaaccaggggtctagggtgccttgc

SEQ ID NO: 407426 - DNA, 122 bp, Homo sapiens
tccccccacgtccccagtccacgcttctcccctaggggcgagaggagacgtggctccacgcggccactagggggcgtcaaagtccatgcccttaaaaagccaggaaaacggggagggaaggg

SEQ ID NO: 407427 - DNA, 122 bp, Homo sapiens
gaaatgacctccttcaactgggggtcctacgtgtgagagactcagattgggtgacctgggcgaggagggcaggaacctggtctgtcctgtggataatttttttgatctaattatgtattgag

SEQ ID NO: 407428 - DNA, 122 bp, Homo sapiens
taggaatagaatcgcggggtaggtggggtcgtctggaggtagctggctccgcccggcccgcgggcgagtccggaatacagttacccacctcagttgcccaccggaaagcaaagggagaggaa

SEQ ID NO: 407429 - DNA, 122 bp, Homo sapiens
aggtcgcggtgtcctcaggctgtggcgccggcctacaacccccacgccgggcccgggccccgtgattatatttgggccccgtgtgattatatttgacaggtcttagttgacgcgctgttcag

SEQ ID NO: 407430 - DNA, 122 bp, Homo sapiens
gaagcagaatggaaaaggctgtcatctgaattagtcaatgaaaggaaaggatcgtttctccgcatggtgagagctctgtggcctcctcgacaacagggaggtatgctatctccctcctgtcc

SEQ ID NO: 407431 - DNA, 122 bp, Homo sapiens
gaaatttatacttagcagggtggccaaatatacatgttcaataagctacaagaagagtcacgaatatttatgaaaggagaaacatgtgcatatgcaactgggcctcatgtacaaaaaagggc

SEQ ID NO: 407432 - DNA, 122 bp, Homo sapiens
gctgccccttcagcaaacaagaccaagccccagcaagacacagtaacctaattgcagaaccggcaccaccaccccctcttaaatagcagctgctccacctcccaccttgctcccctcaaccg

SEQ ID NO: 407433 - DNA, 122 bp, Homo sapiens
gtaccatgagactttcagtgtcctcccactgtgggcgtggcattctgccccttgaccccacgtgacttgctttggccaatgggctgttagcaaacatgactcagcgaggggttgggtggggg

SEQ ID NO: 407434 - DNA, 122 bp, Homo sapiens
acgctcagcaggagagctcacgccatctccctggcctccccttggtctcttcaggtgcaccggggcatcaaaggtgtggtgacagataaattcggcaagccagtcaaaaacgcccggatctc

SEQ ID NO: 407435 - DNA, 122 bp, Homo sapiens
cccttgttatgtttattgatgtttgtagactaattttagcaactcatcaggagctgcactcggctaattgttcactcctggaacctggcagaagcaagctgccgactctgccagggagagct

SEQ ID NO: 407436 - DNA, 122 bp, Homo sapiens
cctctgggaggcacgaatcctcaggggctcctcgagagggcgccagggagcagatgcatgcggacacctttcggccctctgcagccgccgtagctcctccctcacgccccgccccccccccc

SEQ ID NO: 407437 - DNA, 122 bp, Homo sapiens
catcgttagggcaaaggaattaagaacattattttatgaaaagggtagttgttagggggacgttttaaggtttttaactttaggcggacaagtcactacagatcagctgaaattgctttcgg

SEQ ID NO: 407438 - DNA, 122 bp, Homo sapiens
tgagcccaatgcggggctctgggtggcaagaccccaagctccctgtggtgacttgccccccggacggccaggcccagctagtgtggcaccgcgtgtgcagaactgaggttcttccagccagg

SEQ ID NO: 407439 - DNA, 122 bp, Homo sapiens
aattgaaatgggttcagactatgttggcaattgcgagaaacagtgtccaagttattcaagcgataagactaagtaacagtaacggttccataaaaaggaaagtgcagacaatttccaagtga

SEQ ID NO: 407440 - DNA, 122 bp, Homo sapiens
tagggaactacccagtcaggacgggcgggggcggggccgagacaagtatccaatgagggacgcccaatcggaatccggggaactgcccaatttacagcgccaggggacggactggggaattc

SEQ ID NO: 407441 - DNA, 122 bp, Homo sapiens
tgcgaccgttgctgcaggtggtccaggcttgggaccttgacgcgaggcgctgggtccgggcgctgcggcggagcccagtgaaagtggtgtttccttccggagaggtggtggaacagaagcgc

SEQ ID NO: 407442 - DNA, 122 bp, Homo sapiens
ttgcctacactgggctgagtttctgacacttcaggacctgtgtacacagctgtccctctgcgaagagcacctccctttcctcttttccctctgtcagcccacctcctccctcctcccagtct

SEQ ID NO: 407443 - DNA, 122 bp, Homo sapiens
aaacaaggctggtgcagcaaatctgacgcagcactacagcttttaagatttaccttgattcgtgattttaccaagcaaaggaatgcagtaaattgacctgcttcaaacgtaggtagaagtga

SEQ ID NO: 407444 - DNA, 122 bp, Homo sapiens
actacaggcacaggccaccacacctgaataatttttgcattttttgtagagacaggctttcgccatgttgtccaggctggtctccaactcctgggctcaagtgatctgcctgtgttggcctc

SEQ ID NO: 407445 - DNA, 122 bp, Homo sapiens
gcggccccagggcccaggcacaaggtggcgcagccagtggggcatcgccatggtcaacagcgtggacacaaacaccgagcccacagcgcggatgaaggtctccgtgtcgggtggcacttgag

SEQ ID NO: 407446 - DNA, 122 bp, Homo sapiens
tctggtgcgagaaattgctcagtactttaaaacagatctgcgcttccagagcgcagctatcggtgctttgcaggaggcaagtgaggcctatctggttggcctttttgaagacaccaacctgt

SEQ ID NO: 407447 - DNA, 122 bp, Homo sapiens
gccgcgcgcggctgcgcctgcgccctgttacctgtcgccatcttgccccttcagaggcaccgcaaacaaacccaattcctggtgtcccctagtcttggcggaggagccttttagatgagccc

SEQ ID NO: 407448 - DNA, 122 bp, Homo sapiens
ggggatgctggccctgctgccccagcgttcgcccagaaggccccgcgccgcacacgggggcggaagctccaggcttcgggaaaggctgcccctggccagcccaggggcccggcctttggacc

SEQ ID NO: 407449 - DNA, 122 bp, Homo sapiens
aataaaaaaaaatagctaggcgtggtggcacagtggcacgtacctttagtctcagctactcgggtggttgaggtgggagaatcacttgagcccgggaggtcaagcctacaattagctgtgat

SEQ ID NO: 407450 - DNA, 122 bp, Homo sapiens
gaaggcagcagaggaaaggtgcttagtgcaagcctaaggatcttgtaagcctttgtagcccggactctgaccagcctgttgtttctttaacatcctgcattcaagtatttgatgcaaatatg

SEQ ID NO: 407451 - DNA, 122 bp, Homo sapiens
ataggaacatttatagaaactccacctgaaatcctcctagaggctgggcatggtggctcacgcctgtaatcccaacactttgggaggccgaagcgggcagatcacgaggtcaggagttcgag

SEQ ID NO: 407452 - DNA, 122 bp, Homo sapiens
ccttggcttaatataactggtgacctgggaaacgacagaggcagaaaataatttccctttcggactgagggatggagagggcctctcatagctgactcaaaataaagactttccttcaagca

SEQ ID NO: 407453 - DNA, 122 bp, Homo sapiens
ccagccctaagaagctgcacccaccaggtcatttcctttcaccttctcagggattcccagcgacgcagaagcgcttgtgtgtgccaaagccgagggcagatgattcacatgtggctgaccct

SEQ ID NO: 407454 - DNA, 122 bp, Homo sapiens
ccagcttccccgtgacaagcccctgccttctccctaggaatttgaagtggttgctttggacgggaatgcggccccttgcccatgactagtttcggataataaagtcactttctttcaaccag

SEQ ID NO: 407455 - DNA, 122 bp, Homo sapiens
cttccagtcctaacattccaagtttctatgatacactgaagtaacccagccttctcaaaacgagatcttttggtgcttagtgttgtgcaatcactctggatttctgggggagaattagaact

SEQ ID NO: 407456 - DNA, 122 bp, Homo sapiens
tacaggcatgtaccaccacacctggcctacatttgtatttttttacagacagggtttcaccgtgttgtacacgctggtcttgagctcctgagctcaagtgaatctcctgccttggcctcctg

SEQ ID NO: 407457 - DNA, 122 bp, Homo sapiens
ggaaaaccaagaggccgggaaatgacttgcccaaggccatagaagtcgcggggacagaggcggactagaatccgggtttccacctccagaagggtttctgttctgggccacggcccccttcg

SEQ ID NO: 407458 - DNA, 122 bp, Homo sapiens
aggcagaggttacagtgagccgagattgtgccactgcactccagcctgggccacagagctcgactctgtctcaaaaaaaagaagttaaggacatagaattggtcatgccagaagcaaatgtg

SEQ ID NO: 407459 - DNA, 122 bp, Homo sapiens
gttccgggacgctcagcgggaggcggtttttaccggctcactcgagaccccaattccaggcgccctgcagcttccctcagactccccgggaccgtgtttggccttcccattcgtacgctgcg

SEQ ID NO: 407460 - DNA, 122 bp, Homo sapiens
ctggctctccttcacatctagaagaaaccgtattcatctctgatgaccttctactgaacacggcagcagcagaaccccagagaatgtcagaatgtctgacccaacttcagcctctctcctgg

SEQ ID NO: 407461 - DNA, 122 bp, Homo sapiens
cttgccactttactttttcttttcctttttctctttcttttagacgcagtctcgctctgtcgcccaggctggactgcagtggcacgatctcggctcactgcaacctctgcctcctgggttca

SEQ ID NO: 407462 - DNA, 122 bp, Homo sapiens
gtcagggcacaacttggtttatacatattttaggaagacatgggatcaatacatgaaagacgtacattggttcagtccagaaacacagtataaccggaagcaggatcttccaagtccaaggc

SEQ ID NO: 407463 - DNA, 122 bp, Homo sapiens
ctccggctggtagtcttccatactcgtctgctgcaaattgtatcctgggaactctccagccgtatttcagctcgccttcggggatctccgcctccgaagcgcaacaacaagcaatgcggtcc

SEQ ID NO: 407464 - DNA, 122 bp, Homo sapiens
tccttctattctttttctaagtcatcccagtctgaaacatagacttctttgtggttcttccggcctccaaatatacacaaactcaaaattactgcatatgctgttctctccaactagaatta

SEQ ID NO: 407465 - DNA, 122 bp, Homo sapiens
ctgagacagaatgattagcaagcttgtaggacctttttgtaaagaggatgtatatggattcgtacagacacacatctacatgcagaacgtgccattctgtatttgatgcataaaaccacctt

SEQ ID NO: 407466 - DNA, 122 bp, Homo sapiens
ccacgcttagggcaatgtgatgctggggatgcggggtgaggagggccggagatgcaggcccgccctcctgtgaggctgcccctcttatgtgctgtgggccccggggcccatcagtttgtctc

SEQ ID NO: 407467 - DNA, 122 bp, Homo sapiens
cgttctgcagctgctcataacggggacatgggcccaacgggaacttcagcagctgtagagcgaagcggggaaacaggcagcgggaaaaggagcctggcatcagcaggcctacggccagagct

SEQ ID NO: 407468 - DNA, 122 bp, Homo sapiens
tcttccagattgtggcatgtgtgagaatttccttccttttaaaggcggagtaatgttccacggtggggacggaccacatcatctgtgaacagacacctgggctccttccaccatcggctgca

SEQ ID NO: 407469 - DNA, 122 bp, Homo sapiens
cctcaaacttccccttgattttcaggttgtgaatcgacttgggaatatttgtgtaatgcccggtgaagtcatgtcaggttaaatttccgagacttaaactttttaaaaaacacaacgcttca

SEQ ID NO: 407470 - DNA, 122 bp, Homo sapiens
cgcaggcacacatgcacacacgcgcgcgcacacgcacacacacccccagcccggaccggccgacctgctccccggggtctctcccgcaggcaggtctcctcgccgagcctccgaaaaggggc

SEQ ID NO: 407471 - DNA, 122 bp, Homo sapiens
agagttcatatactttaccgctataccatgctgccttgcaaccattgatttaatagcaaacgtggtagtaaaatttggtatttttcatttagccaaaaatagcctatccattagtactggac

SEQ ID NO: 407472 - DNA, 122 bp, Homo sapiens
ccccaggctccggggagaggccggaagccagctgtggtcctcagtccagccttctagggccgcgccgcggtcgcctcctcccggcctctgcagcccgtcggtggctcccgcggcacccagaa

SEQ ID NO: 407473 - DNA, 122 bp, Homo sapiens
actcccagggacttgtttcccattggtttaacggaaggagcggggcgggaaaacccgtgtcggcttggctgcaacacctattgaccaatgttcaagcctattggtaaaggtactccgggctc

SEQ ID NO: 407474 - DNA, 122 bp, Homo sapiens
ccgatttctgtaaacacgcccactgtggcgattccaagccacacgtgatgccgtgtgcaacgagccagcatccaagatctggaaacctcggcatcagttcctagggcgctcccgagccagct

SEQ ID NO: 407475 - DNA, 122 bp, Homo sapiens
atatgacaatgatctgatgacttctgtgcccctaaactcttcctttaaccatctggttctcgagtttagtacaagcctgcttagatgcaatggaaaacttggaaaggataacaacacattca

SEQ ID NO: 407476 - DNA, 122 bp, Homo sapiens
ttgggaccttcccatgccacacctgcctggtgttttcctttgtcccagcgctgagccgagcggagctcctggctgtaaggacacctcccgtggcgttcacaggtatccaggtctactgcaga

SEQ ID NO: 407477 - DNA, 122 bp, Homo sapiens
ttgtgtgtcatgcacttcctgtgtcctggggtcatttcagccatgagcaaggttgacattcggcttgacaggcatggctgtgtgtggcttgtgtgtgttctggctgttggtcagaggctgtg

SEQ ID NO: 407478 - DNA, 122 bp, Homo sapiens
ccccttccttccgtaactgccaatttcctccccaatcccaagagcgcctctgcccagttccgcagtctctgctccaagtctgtttttgatgatgcccttagaagcaggggcagcggcaagcg

SEQ ID NO: 407479 - DNA, 122 bp, Homo sapiens
ccaagaccatcagccacgatctagacacctccaggtggacaggcagccacatggggacggcgcccatcggccacgatctagacaccaggtggacaggcagccacgtggggacagtgcccatc

SEQ ID NO: 407480 - DNA, 122 bp, Homo sapiens
tgtacctgcttgctgtcttgctcgctgcccctagggccaccctcggccggcgagtctctccgcttggcctgcaacataaaaaacagtcatatgtggaaaaagcagggaggaaatgtaaatta

SEQ ID NO: 407481 - DNA, 122 bp, Homo sapiens
cagccgccgtagctcagtcgacttggggctgctgagctcttggtccctgccagcctcacccgctccggacccccccgatcctccggactccgctggtcctggccccgcgaggagcccaccgc

SEQ ID NO: 407482 - DNA, 122 bp, Homo sapiens
gcgcagctgagcggggtgtaggttggaagggccagggccccctggggcgcaagtgggggccggcgccatggaacccccgaccgtcccctcggaaaggagcctgtctctgtcactgcccgggc

SEQ ID NO: 407483 - DNA, 122 bp, Homo sapiens
atccagcgcttcaccctgacgatcattgcccgggacgggggcggcgaggagaccacaggccgggtcaggatcaatgtgttggatgtcaacgacaacgtgcccaccttccagaaggatgccta

SEQ ID NO: 407484 - DNA, 122 bp, Homo sapiens
gcgcaccgagcagggcgcgggctgctgggcggggcgacctgggatcccagagcctggcggcgcgagccgggcacccgggccgacgaaaaggcaggaagcgcctgacttcagacaccaccccc

SEQ ID NO: 407485 - DNA, 122 bp, Homo sapiens
attctcacaacagctctgtcagggtgaatgttaccactcccactatatagatgtggaagccgaggcccagatgagttaagtgatgcatgcaaagctcctaattggcagaaacagaagttgaa

SEQ ID NO: 407486 - DNA, 122 bp, Homo sapiens
aatgggggccaggctgagagtcaggcaaggccctcagggaggtttatgcttcagtgtcgtcgagattgctggtttgttttgagaccttcagtcccagtaaccctgagatcagctggagtctc

SEQ ID NO: 407487 - DNA, 122 bp, Homo sapiens
tgaatagtttgtaaaattggttttgtgttgaagcaaaagtatctttgatgacaaatagttcggagacctgggcctgggataagctttatgctcctggctcacctttggagagggagtggggg

SEQ ID NO: 407488 - DNA, 122 bp, Homo sapiens
ctcaggaggcttcgccagtgaaaggacaaattggacctgtcccgaaagacaatttataagcgaactgtttgaaacgcacaaagtattaactgcgcagtccagatcctttatcctgggcgcag

SEQ ID NO: 407489 - DNA, 122 bp, Homo sapiens
tatttaattgctatttaacttattcattgaacaaatatttcttaaacagctattgtgtgccggatcttactttaggcatgggatacagcagtgaccagaattatgtccttactctcatggag

SEQ ID NO: 407490 - DNA, 122 bp, Homo sapiens
ggagggccttgggcctcagggctagcaaggtccctttctggagattccagttcctctgcccgccctcctttacctctttctcctcacacatctgtctgagggatggggatgagggctgccaa

SEQ ID NO: 407491 - DNA, 122 bp, Homo sapiens
ttctccctctgcctcccagaggtggtagcagatgagacaccagcagtccaggctgttcttcgagctgacaccaagcgattgaagctgctggaagaggagcggcggcttcagggacagctgga

SEQ ID NO: 407492 - DNA, 122 bp, Homo sapiens
gtggcggctgctgtgctggctgtggggacggaggcggtgaagtgccatcttcggctaggtcgtcacaggctccggctcatggcatcaagtggcatccatcataaggtctgctggggcgggct

SEQ ID NO: 407493 - DNA, 122 bp, Homo sapiens
agcatcctgggctgcttccagccacgatgtccctgcccaacacacctctcctcgcccgtccgcagatggacactgttggggacgcgtcctggtggtcacaaagcccataggagtggcctcac

SEQ ID NO: 407494 - DNA, 122 bp, Homo sapiens
gtttggggctctgcaggcaggaaactgcccagtcacgaggcccttgcccagcctggtcagcgtctggcagctgagttgctctaagcccacggagggcctcgcttggctcaggccatggagca

SEQ ID NO: 407495 - DNA, 122 bp, Homo sapiens
tttgaatatctacaaaccacttttccttgcatgaagaaaacaaggcagggccccctggcccgtcccacacctgcgagaggcagagatacagaggcctcgggcctcagccttcatttccccgc

SEQ ID NO: 407496 - DNA, 122 bp, Homo sapiens
cgaataacaaaatgtactagctgaaagactactgcaaggcactgaccccgagactttaagcgcaaaaattaaaaaataaaaataaaaaaaaaacaagccaccaccactctggttcaatcagg

SEQ ID NO: 407497 - DNA, 122 bp, Homo sapiens
ttttctttttggggtggaaccttgctctgtcacccaggttggagcacagttgtgcaatctcggctcactgctatctctgcctcccaggttcaagtgattctccttcctcagcctcccaacta

SEQ ID NO: 407498 - DNA, 122 bp, Homo sapiens
gagaggaagggcggaccccaggctcaggagcacaggggcgaggcccgagaagggcctgagcggttatggggtgggcgcagagtgaagggcagagccttgtgtatctgtgtgtgtgtgtgagc

SEQ ID NO: 407499 - DNA, 122 bp, Homo sapiens
tcccctagccccccaacccccaacaggccccagtgtgtgatgttcccccctccctgtgtccgtgtgttctcactgttcaactcccactacaggtgaatatttctagaatgtatctactccat

SEQ ID NO: 407500 - DNA, 122 bp, Homo sapiens
tagcacccgggccagcagctgcggagggtgccccggggccagcagctgcggagggtgccccgggtcccccagcactgcaggcccgctcacgccgcgctcgaattcttgccgggcctcaccca

SEQ ID NO: 407501 - DNA, 122 bp, Homo sapiens
ccatgtacccgccgcccgcattctctgtcttcagggcccgggcaccatgtacctgccgcccgcgttctctgtctgcagggcccgggcaccatgtacccgccgcccatgttctctgtcttcag

SEQ ID NO: 407502 - DNA, 122 bp, Homo sapiens
aagcctgctcaccacagtgaagagaaatcctgcattgtgatatggccttgctgaggaaagcgaaagttcctgaggaaaaggaaagcacagaagaggagagccgaggccacgagctggagaag

SEQ ID NO: 407503 - DNA, 122 bp, Homo sapiens
ttagccctagaatcaaggacgtaccaagtcacataaaagtacaaccgtcgaggccaggcgcggtggctcacgcctgtaatcccagcactttggaaggccgaggtgggtggatcacgaggtca

SEQ ID NO: 407504 - DNA, 122 bp, Homo sapiens
agcttatataacatttatatgtccgtagtgggtctaacaagtatcgttctggaaaagccacgcaataaatgccttgtgtggactgaatcatactcatacagttatagtgcaatcagcagtac

SEQ ID NO: 407505 - DNA, 122 bp, Homo sapiens
ggcgaagtgaaagttgcccagttccaaaatggccaccaccgcactttcctggcgtcggagcgactacgtagtgacagaaggaccatcagcaggtgggtgctcacagggactgtgccagttgc

SEQ ID NO: 407506 - DNA, 122 bp, Homo sapiens
cacacacacacacacaaacaaacacactgcatagtttatttattacataattcattggaccgaatttattaaatcataccagggcttagccttgtatggtctattgatttctagtttagtcc

SEQ ID NO: 407507 - DNA, 122 bp, Homo sapiens
gcacagcctcggttgtcccctgaccaggacgtggcctgccgggtagggcacagggaatgtcggggccgacccgggagagcctgacttcctgcgggccctccgccgtggtctagacgcttccc

SEQ ID NO: 407508 - DNA, 122 bp, Homo sapiens
aagattcccttccaaggcccacttcatgtgagtaatgtttaatactagcattttccaaagcggcctggctgccagcagggtcacggccaagggtacatttgaacagtctgaagaaaaaaaca

SEQ ID NO: 407509 - DNA, 122 bp, Homo sapiens
ggcttttcagcagtaaggggacatgcaccccaagggcctccacttggcctgaccttgctgcgggggctctctgtccccaggaacagtagagatggcaagcttatcaagaccctctctgccca

SEQ ID NO: 407510 - DNA, 122 bp, Homo sapiens
tctggggttgcagccaagtcctcagggggcgatgtcagcatgtcagcatggccccagagccgagcaaggcaagctcctgggtattgtgtggggcagggagggggaggtgaaggaggagggaa

SEQ ID NO: 407511 - DNA, 122 bp, Homo sapiens
ccagtgacctaactgggccggcagggtccgaggaagaccagggtcagcggcggcacggtccgttccgcgacccctctcctgtgaccccaggtaggccgccgatcggttcccggctgaggtcc

SEQ ID NO: 407512 - DNA, 122 bp, Homo sapiens
gcccaggggtgtcagctgggtggctccccccgggaaggaggtgtggggtgggggagtgggcgctgcgtggcggcctcaccatgcggtacagcttgtcctccagctcctggttgatcctctgc

SEQ ID NO: 407513 - DNA, 122 bp, Homo sapiens
ctccacacagcattcattcatatcagctgcaacttgacacccaaggcacgggaaacaaaacgtgccacagaggcagactccacagtcgctgaagcagtcacacatgcctgtctgccagttgg

SEQ ID NO: 407514 - DNA, 122 bp, Homo sapiens
tctaaagctaacatgaagtccgcctcatccggcgccctcgtctcccgatccaattcacggcgggcaaaccaggcctggttcctaatgctcagcgaagggtttcaggtagtaatggaactcct

SEQ ID NO: 407515 - DNA, 122 bp, Homo sapiens
tctacaattttcaagtgacagccattggggtaaagcaggaaacaaaataatggcactgcccgtatggaacccagaggatactgggagaaaaaagtcagcaagcaggttagctataggtagtg

SEQ ID NO: 407516 - DNA, 122 bp, Homo sapiens
tctaaggggcgggccggaggggtgtgggccggagggccgcggtgtgccgcggggcagttgcgggttgtcataacggtccccgccggagtgaggcgaggccgcgtcgctcagttctggccgtc

SEQ ID NO: 407517 - DNA, 122 bp, Homo sapiens
cccctcgtggcctgatgggcggccgggacggaggtgggctgtaagcccgccggcacccaccgtgtcctgtggaaggcttggagacctgagccaggctctactcggttagatgcgagtgagac

SEQ ID NO: 407518 - DNA, 122 bp, Homo sapiens
ccttcactacccggctgccaggaccttcaagaggcgccacaaaacggaggcagggaaacccgtagcaacgaggccccacccttgttgggctgatcctgcgcatgcgccgaccttcctcggct

SEQ ID NO: 407519 - DNA, 122 bp, Homo sapiens
ggtctcgaactcctgacctcaggtgatccatctgcctcgcgaggcgcctgggattacaggcgtgagccacgacacccagccttgtgttactctttgtgattttatggagaatactgtcactt

SEQ ID NO: 407520 - DNA, 122 bp, Homo sapiens
caccccctgacacgtgcggcaccaccccctgacacgtgcggcaccaccccctgacacgtgcggcaccacacagctagtgccggaactttttgtgcagagaaagaagaccctgcacccgcgcg

SEQ ID NO: 407521 - DNA, 122 bp, Homo sapiens
gctgtgtgactgggtaaatcactacaccgcaagcctcggtttcctatttaccaaatgggtcgaataatgcctgccacatggggctgctctgaggagtacagatgtaagagatcctgtgttca

SEQ ID NO: 407522 - DNA, 122 bp, Homo sapiens
tctttgcatttcacctgcaacgggactagttggtggaacagcacttggctcatgttggctcgctgcctcggctggtgtgcagaaaagcccaacaggcccggccctcgggattagcctgagag

SEQ ID NO: 407523 - DNA, 122 bp, Homo sapiens
aatgaattaactagaaataactttacacagagaaccaaagccaaggcccccaaaaccagacgagctacccaagaacagctaaaagaacacacccatctatgtagtaaaatagtggggagatt

SEQ ID NO: 407524 - DNA, 122 bp, Homo sapiens
atagcgctctcatgggcgcattcctgatgacgtttaggggtagggttagatgcccgtttccgctttcttcccacccacttccgggtctcctctgtttacgaatgtttgggcgcgaattactc

SEQ ID NO: 407525 - DNA, 122 bp, Homo sapiens
tggccgacagcctcctagagctcgtacccctccttttcacgaggtagcagcagcaaagtccgcagtgccaggctctgtgagtctgcaagcgtttaaaagatctccgggtttagctcaggcaa

SEQ ID NO: 407526 - DNA, 122 bp, Homo sapiens
tccctgggctttctgtgggcatctgggaggctgcagggagaccagggctgctggcacagccgatgcacctccagaatttttgctgagaccaagggcaatgacagccctagagacagaaggga

SEQ ID NO: 407527 - DNA, 122 bp, Homo sapiens
aaatgtaagtccaattaaacctctttttcgtcccggactatgttatgtatttgtcagcagcgtgaaaacggactaatacactctcatttctgagtgggacacatgctgtcactcacatatgc

SEQ ID NO: 407528 - DNA, 122 bp, Homo sapiens
ccgggagcctgtttggggggcaggcctggccgagtggctccgtgaagacgcaggcgcggccggagggcgcggggctcgggcaggatcgcgccgccgggccgggagggggctgcgggcgcgcg

SEQ ID NO: 407529 - DNA, 122 bp, Homo sapiens
cacagaggagggagcacaaaagaacgaacaatgaagcacatagagaaataaaacctaactcgacttgcaagccagtgatggccctatttttagctgacaagtgagtaatctgatgtgtgtga

SEQ ID NO: 407530 - DNA, 122 bp, Homo sapiens
gggagttgtagtacgtcccgcgcacacgctccctcgaagagtttctgccccattcctggacgtcacagccggtccccagagcaggattccttccggcgcctgcgcctgatcaccgctctgcg

SEQ ID NO: 407531 - DNA, 122 bp, Homo sapiens
cccgccccgcctggtttataggtcccggcccgagcctccggccgcccgccgggtttgtcccgcgatccccgaccatgcccgccgacctcagcggtacttggaccctgctcagcagcgacaac

SEQ ID NO: 407532 - DNA, 122 bp, Homo sapiens
tccaagtctacggggccttcgcacctctgagtgcctgagagccccggcttttgcttgggacggaggtacgggaccacaagaggccccggggtcgcaggttataaacggatgagaccgccctg

SEQ ID NO: 407533 - DNA, 122 bp, Homo sapiens
gacggagtagggaaccctagccgttatcccaccaaagggtcccagcgcctagaggggctgcggaaagctcctacaatacgaggagcccttggagcccagagcgggatcctgcgagccgaggc

SEQ ID NO: 407534 - DNA, 122 bp, Homo sapiens
tccccaggccactctcacttctgaccacaagttcaaggctcccacagcctctctggggtccgtagttcactagaacgactcgcagaactcagaaaagctctgtcctcacaactgcagcccta

SEQ ID NO: 407535 - DNA, 122 bp, Homo sapiens
aggctccgcaaggcgttgtgggctctggaagccccggtcatgaggccccaccgccccgcccggcactaagtaagtggctctcagggaaatcataacacgattagcagcttccggccagtctc

SEQ ID NO: 407536 - DNA, 122 bp, Homo sapiens
cgggccgccggaagtgggcgggcgttggagggctcgctgcttaccctcagggcttccatccgcagcctccgggagaacacgggcggcggcgggctcgggttcgggctagggctggggcgcgg

SEQ ID NO: 407537 - DNA, 122 bp, Homo sapiens
tagacatttccctccaaagcagattcctggggctggagggtccctccaaggccaggggtccgggtgattccagagcatccacgctctgcgctgaaggcactgaacctgccatcactgtcaca

SEQ ID NO: 407538 - DNA, 122 bp, Homo sapiens
gtctaagatttcccttcctcctcttgcatcatatttcaccccaaagccttgaatgactaacgcaccacttggggatgggcagaccaatgttcacaggaacaaaagggaaaagggtgggctgg

SEQ ID NO: 407539 - DNA, 122 bp, Homo sapiens
atgcacagacttaactccaacacgattggagtgtcgggagggcaactgggctgccctctccgccctccaggactgcgggacaagtctcccggcgcccgggtcgcaggagacccggagcccta

SEQ ID NO: 407540 - DNA, 122 bp, Homo sapiens
cgagctggcggccggctaccgccgcggggacccgcgcctggtccgcctgctcaacaccaccgacgtgtacctgctgcccagcctcaaccccgatggcttcgagcgtgcccgcgagggcgact

SEQ ID NO: 407541 - DNA, 122 bp, Homo sapiens
tgtctactttatccctctaggtgaatatctcaaagaaatcctacaataatcacatccaaacgcaaactcaatctccacccacagctctacctctgaaatacgcccttcttcaagtgttcctg

SEQ ID NO: 407542 - DNA, 122 bp, Homo sapiens
ttcatctctttttcattcctccattcagatgctaatcaaagctctgcagcagccaggcagcgctttttctaagccaattcttctgaaagtcttgcagagcatgcaatacataggtcatcttc

SEQ ID NO: 407543 - DNA, 122 bp, Homo sapiens
caccccagaggagcctgccttcccagctcctgcagtgcccaccccagaggaatccgcctccgcagctgttgcagtgcccacccccgaggaatctgcctccccagctgctgcagtgcccaccc

SEQ ID NO: 407544 - DNA, 122 bp, Homo sapiens
atacctccaatgagtttggcaacaaggacacttatgacaacaaggcattttccatgggggcggaagctgcgatgaggagtgaacacagatgagcaagtagagacagtgtagattatcttttt

SEQ ID NO: 407545 - DNA, 122 bp, Homo sapiens
cactgggggaggaaaagtgcaagtcaaactgcagctgcgttcggcgggagaggccggccccggaggggctgatcagcagagtggtgtgtagccttaccgcgcttttgcacaatggaaatgcg

SEQ ID NO: 407546 - DNA, 122 bp, Homo sapiens
agtaccttttgaattcccccagaagagttgttttcaaaacaaacattccagaatgaatgtcgctcttcaatggaacgtctttattgtgcttgaagtatttcttctctggttgtaattctaaa

SEQ ID NO: 407547 - DNA, 122 bp, Homo sapiens
ctccctctggagtctttacagttatttcccagcccaaagcggggattgggtttcggcccccgctcctgggctataaataccaccccctacatgcacctctctcccctccccccaacctggcc

SEQ ID NO: 407548 - DNA, 122 bp, Homo sapiens
gctggactgtactgcagcgatctgggatcgttgcagcctccctgcctgactacaggcgtgcgccgccacgcctgactggtttttgtattttttggtggagacggggtttcgccgtgttggcc

SEQ ID NO: 407549 - DNA, 122 bp, Homo sapiens
ccccttctggcttccagactgcgggcccagccacagccgtggagactaggcaggggcaggcgcctggggctccgcgaatgcagcatatatcctgctgatggcctaaggaacatacgctatga

SEQ ID NO: 407550 - DNA, 122 bp, Homo sapiens
gggaacacttcctgaggaattgagactcctttacgatcatgtcagatgtatggtaagtagcgtatctcatgtggatagaaaaatgaatacaattgtgcaattagaatgaattgtacaaatat

SEQ ID NO: 407551 - DNA, 122 bp, Homo sapiens
gctgccgtggcctcagccactgcatatgtctctgcaggacttggacgaggacgactttgacgtggggaagccgaagaagcagcggagatcgattgtaagaacgacgtccatgaccagggttg

SEQ ID NO: 407552 - DNA, 122 bp, Homo sapiens
cttcacggatgcgtacttggcatattggctgggtggggttccctgtggctctggcaaagccggtggttgtaagaaggtcaaaacttctttgggggagttctttccataacttttctatagcg

SEQ ID NO: 407553 - DNA, 122 bp, Homo sapiens
gagaggcggaaggaggtggggcctgggaagactgggttgcaacggtcgcgagactcccctcgccgtagcgcgaagaaacgagactgaagaagagagcaaggtgggaggggcgcgctggggag

SEQ ID NO: 407554 - DNA, 122 bp, Homo sapiens
gtgctaagcctcttactgctcggggcttgcggattagggggccgctccgagtgcggagcccgccgagcccacgcccacccggaactcgcgctgggcccgcaagcgccgcgcgcagcctcggt

SEQ ID NO: 407555 - DNA, 122 bp, Homo sapiens
tgaatggggcagagcaggtgagggcatgagatggacagatgggcctcatccccctgcttccgttgcctggggtcctcggtcagcctgtttgctcagacccctgaaattgggggtcaaggaag

SEQ ID NO: 407556 - DNA, 122 bp, Homo sapiens
aagccatcaatacaaaacttcgacactgtatttagttcacgagcagaccggcttgggaggcgccgcagccgcacccgcctggcggagcaggagccgcagcctcaacctgccgcccgccccgc

SEQ ID NO: 407557 - DNA, 122 bp, Homo sapiens
tcaggattaaactccttcagggttaaactccactgccacctgtgagaataggtctaataacgttctttttatgggctgctgttccctccctgtattactttcccacgttcctactgatattt

SEQ ID NO: 407558 - DNA, 122 bp, Homo sapiens
cggtctcagggaggctccgcacccgcttcgtctgctccagctgctccgccagctcctccacggcctgtgagtgcttctgcctcatctcctggatctgggcctcgtgggtcttggcctcctcc

SEQ ID NO: 407559 - DNA, 122 bp, Homo sapiens
actggctataaattggggtttcctgtgacccattcctcaggtttgattaatttgcttgagcggctcacagaactcagggagatacttgtcttacgatgacccatttattataaaggatgtta

SEQ ID NO: 407560 - DNA, 122 bp, Homo sapiens
gcgggggctgggcctggcaggagcccccagccgagtgggaagagccagataataacctaacgatactaacctaactataccgtcacccagagaggagggcagcacccctcccacatgcctcc

SEQ ID NO: 407561 - DNA, 122 bp, Homo sapiens
ggcctgtgaaaagcctcaccgagttcccctgctgagcgctccacagccggacggtcttgtcggttgagcccgtggccaagtagtttgaattagggtggaatttgacacagtccacatctgcc

SEQ ID NO: 407562 - DNA, 122 bp, Homo sapiens
cctcatctgtgtgcggcttgaactgtgcgttgcgtggcaccagtgccctggaggagcccacgcggcgtggctccacctcagtggcaccatcaaacttctccttcagtgcgtgacccacctgg

SEQ ID NO: 407563 - DNA, 122 bp, Homo sapiens
agcccctcagtggcctggttctcctgtccccctgcccttcctcaccattgcccattccctcgttcgttcattcagcacaggccttgccgtctgccctgagtcagctccgagacacctgaaga

SEQ ID NO: 407564 - DNA, 122 bp, Homo sapiens
gaagtgttgatggttaaacaagagaacatccgtgtgatttgcatattgccattagtcattcgtgggtctgcagtcaaatttagtaacctggtgtttaattcaaacataggcatatttttgtt

SEQ ID NO: 407565 - DNA, 122 bp, Homo sapiens
acatttttgtaagacacgactttacgtgctcactttaagttttcgacctgtgtttggtatcgttggggtgatcactcgcggccatgggcggacactgaacatctcgttcatgcctctgtgcg

SEQ ID NO: 407566 - DNA, 122 bp, Homo sapiens
gccctgcagctgttctcagccctgccctggtcagcatggattccctgcctggtgctcagccgagcccagcctgcccctccctgtttcagtcctggctttgactcagactctcagcttccaag

SEQ ID NO: 407567 - DNA, 122 bp, Homo sapiens
atctgttacaccgcctgatttacatgtttgctgtctagtcgtactaaaatggtatctccacgaggggatggactttcatctgttcgactcactgcctggagcatcgcaggtgttcaataaat

SEQ ID NO: 407568 - DNA, 122 bp, Homo sapiens
cagctgccctcccccatggtatggtgacagtcactaacaggtggcctgcgctggcctccacgtggctgccaagggccatccctgagcactcagcgggtgcctgttccacacggactatgaaa

SEQ ID NO: 407569 - DNA, 122 bp, Homo sapiens
tacataggtctgcccacgtcgggacgcgtgggtccgcgtctgcaggttcctatcgctccccgttttctgaatattgggagatattccacaccctggtcacactccctaacccagctcgctcc

SEQ ID NO: 407570 - DNA, 122 bp, Homo sapiens
tggcacctcggccagcctgggcgccgtgcaagtgccgctgttcgaccccgacatcacctccgactaccacagccctgtggaccacgaggacatctccgtctccgcacagacgctcagcatct

SEQ ID NO: 407571 - DNA, 122 bp, Homo sapiens
gacccggcctaggccgctggagttccgagttccagggtccttgtgatggaagggcgggcgcggcccccacacctggtcttccagccctatccaaggaggactgccagacagtcccgctctga

SEQ ID NO: 407572 - DNA, 122 bp, Homo sapiens
acctggcgggcagcctgggcagagcgggtgacagcaatgactgctgcccgaggtcggtaccgagacagaagctgggctgagctggaggaggcagagaaggtcagcccagaacagcaagaaag

SEQ ID NO: 407573 - DNA, 122 bp, Homo sapiens
ctaaagagttaaaagaacatgacttcaattacatttcttcaatttttctcaaagtaggaacggcaaatagaggggtttggaaaaggtactggtgggattaggcgagattcaggtgaaagaaa

SEQ ID NO: 407574 - DNA, 122 bp, Homo sapiens
cgtggggagctggatttagagccggcctgaggatcaagtctgtgttctcactctcccttccgtgtccccgggatgctgtaagaatgcacagggccttgggacctcggtcctccctgctgcct

SEQ ID NO: 407575 - DNA, 122 bp, Homo sapiens
tgtgctgctctgcctgggagaagcgacgggaaagccgaggttctttccaaagctaatgggcggggaagaaagactgctcggaattactgggtagtatcatctaggaaaggattgcagcggga

SEQ ID NO: 407576 - DNA, 122 bp, Homo sapiens
tcaggttgttcttgcttgttccagaagccatccctcttttgtcttctctgggcacctgtccgtcaccactgccctgctgcaccttccctggaggatgctcaggaattcgggacagccacata

SEQ ID NO: 407577 - DNA, 122 bp, Homo sapiens
tttgcaggtggcggcttccctacaggccagccgtccttccgggggagcccggagtgagaccggctcttgcccgctggcgttaaaatttcgctggggcctccaactgttgtacccgagcaagt

SEQ ID NO: 407578 - DNA, 122 bp, Homo sapiens
tgtgggacaagagtgtggggtgtggcctgtctctgtgggaccaaatgggcgtggccagctcgctgccgggggcgtggtcgggtgggcggggccggcgggggtggggcactcactcaggcgca

SEQ ID NO: 407579 - DNA, 122 bp, Homo sapiens
cacttttatgtacatttgaatttttccacaataaaaagccctttaaaacttcttctcggccgggcacggtggctcatgcctgtaatcccagcactttaggaggctgaggcaggcaaatcact

SEQ ID NO: 407580 - DNA, 122 bp, Homo sapiens
gggcctgctctggcctaggagctgtttgtgtgcaatacctcagggagtcttcatactgaccgtagaaggtaggtgccattatcactgtattttacaaatgcagaaactgaggcacacagcag

SEQ ID NO: 407581 - DNA, 122 bp, Homo sapiens
tacattagtgggcactcaaaaaatttcactatctttctataagttattgaaaacttcttacgtgtcaagtatttgtattgttaagtattagattattaaagttgctatttatattacaaata

SEQ ID NO: 407582 - DNA, 122 bp, Homo sapiens
cagtggtggggaagctggctggagtgggatgacagggaccatggaggactggccttccatcgcagcttcctttgaccttacattaaaatgaccttactttacacttcacaggatgagcagaa

SEQ ID NO: 407583 - DNA, 122 bp, Homo sapiens
tacagagggacactcaaggtgagtgggcaagtcttaatttttttttttaattggaaaactcgatctctaggaggaaagaaaaaaaaggcctgggtcccagaaaactggttgtagccctagct

SEQ ID NO: 407584 - DNA, 122 bp, Homo sapiens
acgtatttgataggtttcaacccactggggttaggatctgtgttgatatgtaattcctcccgtcttcggcttgtggaaagctcttcgactcgattcccgatggttttgacatgattccagaa

SEQ ID NO: 407585 - DNA, 122 bp, Homo sapiens
agttagggaagcagaagccagacagggagactgggtaggtgcgcgctggtaccgccgcggcgttcgctccggcttcagtgcacggccggaggaggacgccagggggcagcagcgccacgctc

SEQ ID NO: 407586 - DNA, 122 bp, Homo sapiens
acagatacctggagaacgggaaggagatgctgcagcgcgcgggtaccaggggcagtggggcgcctccctgatctcctgtagacctctcagcctggcctagcacaaggagaggaggaaaatgg

SEQ ID NO: 407587 - DNA, 122 bp, Homo sapiens
gccagatacttctcacattgctctccacccgggacagattgctgtgagtctaagtgggcacgtgtgtttctgtttctccaaagaacccctagggaatgcacccttttgggaaaaagaattct

SEQ ID NO: 407588 - DNA, 122 bp, Homo sapiens
ggaaatttaagttttctacatgaactttttaatgtaagtatatgagtatttcttttttaacgatgataggctagaaacactgaatgtgcgggtgtcatccagatcagtgcaggatcagaagc

SEQ ID NO: 407589 - DNA, 122 bp, Homo sapiens
gcaggcactccgggttttcaagttgagttcaaacaggaccaccggaggccaatcagagtgcgcggccccgccccgaacgcccggccgtgaccaaccacgaggccggatgagccaaaacacag

SEQ ID NO: 407590 - DNA, 122 bp, Homo sapiens
gaccaccacgacttccctcttccctggcgctccggaaatgcgtcagagaactgcctcgagcgcgttttccgcgcagatccgagaattcgcgagaatctccgcccagccagttcaggccaggg

SEQ ID NO: 407591 - DNA, 122 bp, Homo sapiens
cagctggccatgcctgtctactgcttgtcctgagcaggacctcccatccacactgccccacgctccaggcccatacacccatccccaggtccccgtcctgtgggggctcacatggagaggat

SEQ ID NO: 407592 - DNA, 122 bp, Homo sapiens
cagggtcaggatgatgaggagaagggacaggggagtggcagtggcagggagaggggtaggcgaggcaggtggagaatggcttccagaaagacagagaagaaaagtggcaatatgtggcatcc

SEQ ID NO: 407593 - DNA, 122 bp, Homo sapiens
agaggtctggatggctggactccccaactgggagtacctggcctgcacgtgcatgctccccgagcacacacgctatcctgcatgtaaatgtagatgtatgaggatttgaaaatatccacggc

SEQ ID NO: 407594 - DNA, 122 bp, Homo sapiens
agttatgcaaacacagcccattgatgttaacaaatagagaccagatgcaaataacccactcgggcataacatggaataactagcagaagttaaagcaaaccgtctcctccccactgccctat

SEQ ID NO: 407595 - DNA, 122 bp, Homo sapiens
gctggctctgcaagagactgtaggaggtggggacgcacctgtaggctggccgggaccccccgggatgtcacccgtgagaaccgtaccccagcatgccccacagcgccccacctggctcatcc

SEQ ID NO: 407596 - DNA, 122 bp, Homo sapiens
atcccggtctgcctccgccctcccctgcacaggtccatctaccatgcagcccccacggctcgccgtctgcagtgtttcaggctgatgggagaacagtgtttcctgtctttataatgagatgt

SEQ ID NO: 407597 - DNA, 122 bp, Homo sapiens
ccttaagttgctggagaccagcagccctgcccagatcatctccgtatccctcgtattatccgtctgtgccgtttcgcctaatccatttagtctgccccacaggaagcagcatgtcacagtgg

SEQ ID NO: 407598 - DNA, 122 bp, Homo sapiens
ggagcggatccacttaggtcagcggttaaaacgtcgttacaagaggccaccccggcatcgcggggcctgtggctgcgccccctcttgaattcaggcctagcacatcacctccgcccctcgca

SEQ ID NO: 407599 - DNA, 122 bp, Homo sapiens
gtctgggtgggatctagtatctgcactaggttggacagcttgcatcaagctcccaggaagcgctgaggctgctggcctgcagaccacactttgagcactaaggacttgcactatgtcactag

SEQ ID NO: 407600 - DNA, 122 bp, Homo sapiens
aagataaccaaagcacaaaaccagccctgaacacttaaagcagaactaaaggagtcaagtcgtcagttgcttttctttttgttagctgagcctgggtgttgtttacacagtttcaggagact

SEQ ID NO: 407601 - DNA, 122 bp, Homo sapiens
acagcttgccaaattttttgccagaaggggacctgagttgtgaccactcccagtgtgtgccgggaaaaggctcgtactggtgccagaatctcttactgtcaatgctcccaaaactcaccgct

SEQ ID NO: 407602 - DNA, 122 bp, Homo sapiens
agagggcaggcccagcacccaggcaaagccaccaaggaaagcagacaggcagcaagcggccggagagggcaggccagcacccaggcaagaagtctgggcccagcattggaagaaagtcgcct

SEQ ID NO: 407603 - DNA, 122 bp, Homo sapiens
atgttgtgtgttatcactgaaacaaacacaagccatccagttgtgcacttcagctacgtgcggcttagcgtacttcgataatgcctccagaaagtcagggaaaggaaatacagaggaagctg

SEQ ID NO: 407604 - DNA, 122 bp, Homo sapiens
ctcacagcaatgactgcgacctctccgcatacacatcggttccggcccctcccctgctcgcgggactacccagccgggtgttcacagtgagctcagccgcgctcccgccctcccccgaggct

SEQ ID NO: 407605 - DNA, 122 bp, Homo sapiens
gctgggggaccagcccagggccacgccgcgccccgggccgccttagtgtctccggccgagcgctcgagcaggttgtctctgggacactctaacttctcggcggtgccccctccccgcggcgg

SEQ ID NO: 407606 - DNA, 122 bp, Homo sapiens
tgcttcccgactcctggggcttcatcacgtcgagcagctcgggcgggctggagaacggctcgatgcacagggcctcaaaggcgtcgtgtgcccggaaggccagccccactgtggctggggcc

SEQ ID NO: 407607 - DNA, 122 bp, Homo sapiens
ccccggccgcgcccacaaggaacgggaggacgcgcagggtccatgtgcactttattcactcgtgtcgtcgcctctcgggtccatgcgtcggggcgagcgtctcagccgggcgggaccgcaaa

SEQ ID NO: 407608 - DNA, 122 bp, Homo sapiens
gactaagtggaccttagcattgggcacttggactacagaaaggcccaggactcagggtgtcgcgtccccaggaggaggaactggaaaggcaatgcccaaccccctaacttctagacgtctgg

SEQ ID NO: 407609 - DNA, 122 bp, Homo sapiens
ccccacgcattggggatcaccagaagcaccgcaggaaggcccccggcgctggtgatccggcggccccgaacacaaggtcctaccacccagtccagggccactagcccatcgtccgccaactg

SEQ ID NO: 407610 - DNA, 122 bp, Homo sapiens
gccggctcttgctccggaaaaaccaatcataggtcttatttctgaaacgtcacgaagaggcgggggaaaagaaacaactacatccccaaatggccaagagctactgaggcgggaaaattaga

SEQ ID NO: 407611 - DNA, 122 bp, Homo sapiens
tccgcagagaaactctgactacctgcacaccggaagatggggtggagccacagaagttcacgccctttacaggggagaggagcctgacctcttcccgggtggaatctgggattcaatctgtg

SEQ ID NO: 407612 - DNA, 122 bp, Homo sapiens
cccaaccctgccagaagacagcgggctgtgcaggcgccaggggccggtcacatttcaggccgcctttccccacccccgccagatctgtcagtttcacacacccctgatgtgcggtttgcctg

SEQ ID NO: 407613 - DNA, 122 bp, Homo sapiens
atagggcaaaacaataacataagcaaagtttaaaggtctgttgacaatgggaggaaaatacgtctagcgctctctgtatcaatgccccaactctgggtttgtgtggcattggtctagacagc

SEQ ID NO: 407614 - DNA, 122 bp, Homo sapiens
ccatgggctatgtgcaggcgatgaagccaccggcgcccagggctcccagagcacctacaacgacctgctgtcggtcatagaggagaagggcaaagagatccggcctgcctatgctggcagca

SEQ ID NO: 407615 - DNA, 122 bp, Homo sapiens
tcccagggccctggaaaaatcttggggcttcaaaaggggagtgagtggccttggagatcccgggtagtaagatgtggaatctgcttactcaatacccagcacctcagaggaccaagtcccca

SEQ ID NO: 407616 - DNA, 122 bp, Homo sapiens
agcctccaccttgcccaggccccagtgtctcttgctcccgtctttgtgtccacgtgtactcggtgttgagctcccacttgtaagtgagaacatgtggtatctggtgctctgttctggtgtta

SEQ ID NO: 407617 - DNA, 122 bp, Homo sapiens
ggccggcgcggcaactgcttggggatccctggggaccgtgggctggctacgaatgggtcacgcctctgtcccgcttttcagtgccgcctgggagggttgggtgggctttgcagcttcaaggg

SEQ ID NO: 407618 - DNA, 122 bp, Homo sapiens
gggctaagagcagtgcaggaggaggctgcggacaggtcgcatcaggtacctgagacgatccgcgccatctttgctgagggcgagtgccaggcctagaggggcgggatgggcctggcgctgcc

SEQ ID NO: 407619 - DNA, 122 bp, Homo sapiens
gtctcacattcctccagcttcctgtgaggcttccccaaaaatgcaaattcaatcacaaggcgcctgggctgacgtctcccctcctgtgcgttcccttctcctgggtcatctgtcgccccccc

SEQ ID NO: 407620 - DNA, 122 bp, Homo sapiens
gcctccatggcctggatcttggcggcgctgtcccagtacaaacgcttcatttcggcctggcgccgctcaccaggcctctcagctggggcctctaccgaccggcgggtgttgcagtacaggtc

SEQ ID NO: 407621 - DNA, 122 bp, Homo sapiens
tcccaccgaagagggggtcccctgggcggtcagcccctggctggcacttctggactctctcgctgccccgcaggctctgtggcctcgggacgtctgcacagccccctccccgcaaggctcag

SEQ ID NO: 407622 - DNA, 122 bp, Homo sapiens
cgcgccctccacttcttcatctttttctcttagaggctcctctttttagttactcctcatcgtctgtgtctgtgccgtgagtcagggatgttctaagagcaggaggagagcgtggtgcttcc

SEQ ID NO: 407623 - DNA, 122 bp, Homo sapiens
tgcgtcaaggcccagggacctgtttgtgggcccgagagcacgggggtcaggggtggggctcgagtctcgtcccagggctccgggacaagcttcctggaggaggcagcgtgagctctgggagg

SEQ ID NO: 407624 - DNA, 122 bp, Homo sapiens
cttagctgggtgcctgcagctcagggtctctctcggggctgcagtcatctcagggccccacgtggggagaatctgcttccaggtttgctcatgttgctgttggcaggccccaggtcctcctt

SEQ ID NO: 407625 - DNA, 122 bp, Homo sapiens
ggctgcacacttcacacacacaagctggaggctcctgggtgggactgtcaggtggggatgcgcccgcccagccagaaggtcagtgtcctgcccagtgcggcctccactggacgtgcccctct

SEQ ID NO: 407626 - DNA, 122 bp, Homo sapiens
agtcaagttaaattttaaatattaagaattctgatttattgagattgaattatgccaccacgtttatgtaaaaatgaaggtggcaccgtggtgagacctaatgagaaatagttactcagttg

SEQ ID NO: 407627 - DNA, 122 bp, Homo sapiens
tggcagggtctcagtgaggcacagaagcctctgtgccatgcgtgggtagagacccctctccgggctctgagctgctgactgcaaggcccatgtgccccctggctcctgttcgcctctggaca

SEQ ID NO: 407628 - DNA, 122 bp, Homo sapiens
agccgttccccctgctagctaaataaattaatacaaataatggagctaggtcagcattaccggcgttacccggaggtgggcgcgatatgaacgacagtctcggcggggcaacgtcctaagta

SEQ ID NO: 407629 - DNA, 122 bp, Homo sapiens
cgacccggggagggacaccatctgggaccccggcggccacaaggggcattcgggtcgccccggcacctggcatgtgtcagtccgcttggaaacccacagccacggctcacaggggcagcgcc

SEQ ID NO: 407630 - DNA, 122 bp, Homo sapiens
caggcttctaaggttctgtaacttcctatacccttattactccaaggtggtctgcgtacccgtaggcatcacctgagtgcttagtaaaattgctaatcttgggcttcacctccagcctatgg

SEQ ID NO: 407631 - DNA, 122 bp, Homo sapiens
atgggggcgcgcctgtactggtgagcgcgatgcttcgcctaggtgaacgggacaggtacacgcgtggggtgggatggagtgttcatatatgtggcttgtgatatgtactgaggggacgtggg

SEQ ID NO: 407632 - DNA, 122 bp, Homo sapiens
gctcccccgcccccaggtggccccattcacttacttctcatgactgagccttggctctgccggccttggctccctgtccttctcagcagggggtggtccaggagtggggtgcagctggcggc

SEQ ID NO: 407633 - DNA, 122 bp, Homo sapiens
ccccgggccgaggcctgaagacggctgccgtccggggtcccaggaggctgcccaggctgtcgtcgctgaccccgcaggtcccggccgtctgcagcaggtgctcagcctggtacacggcgtgc

SEQ ID NO: 407634 - DNA, 122 bp, Homo sapiens
tgctgctgctggagaggcaccggggtgaccttggccctttcttcttctggaagacccccccgcttccctcggctgccggaccgggactctgggcctctgctgggaactcacagtcgacacca

SEQ ID NO: 407635 - DNA, 122 bp, Homo sapiens
ctctgggcctttctctcctccaaggcccatctgagggcagctgcaacctgcatattgtttcgaaaataaggttgcttcctgcctacctgcagaccacccacgcccacaggctactaggagaa

SEQ ID NO: 407636 - DNA, 122 bp, Homo sapiens
gacaaacaaagctgactgattgattctgaacatgagtttggccactaagtagcccacgagcgatgggactgctgagacatggtgctgtgttatttgttccactcaagcaaattccaggcatt

SEQ ID NO: 407637 - DNA, 122 bp, Homo sapiens
gaatcctgaaagataagcccacaggcaaatgcggtattaatttcagcaaccagacacatacgttcccggctagttaacaccacaattcaagcaagaggaggcatcttttctgtgtggtttcc

SEQ ID NO: 407638 - DNA, 122 bp, Homo sapiens
cctctgctcggcctagacctgagctcattaggcggcagcggacaggccaagtagaacacgcgaagcgctgggctgcctgctgcgaccaggggcacaggatagagctgcatctcggtccccac

SEQ ID NO: 407639 - DNA, 122 bp, Homo sapiens
tcccaaaaggctatgcagcggcgggcccgcggagaaaagcgttttctctttggtgatcaacgcgaggatgttgccgcaaagccttttgggggctgtagttttctggggctaaatgcacgtgc

SEQ ID NO: 407640 - DNA, 122 bp, Homo sapiens
gatgaaggccaatgagacaaagctggagggcgacaagcggcgcctgaaggaggttctggacgcctccgagagccgcactgtcaagctggagctgcagcggcgctcgcttgagggggagctgc

SEQ ID NO: 407641 - DNA, 122 bp, Homo sapiens
ggtggggctggtggtgctccccggggtgctgtgccgacggtggtggtgggagggtgttcccgggggcgctgtgccgatggtggtgggggatgggtgctccccggggcactgtgctgacaggg

SEQ ID NO: 407642 - DNA, 122 bp, Homo sapiens
gaagacagtatttgcagatgtgaaattgtgggttttggggagctccgcgctcccagccaacggccctctagagcaagatgagaggtgtaacgtgtcaattaattgcaaagacggggcgagcc

SEQ ID NO: 407643 - DNA, 122 bp, Homo sapiens
ataaaaatggattgaaacttacgataaaagggaggcagggacaggagcggggaagcttggcgagcagaaaggaaattcaaacttattattaaggttaagaattaagatgtaaatatgtagat

SEQ ID NO: 407644 - DNA, 122 bp, Homo sapiens
cataatggcatgcaagggaagaggagaggaagtcagcctgctaaatttagcagatgcttacgccccctcacccagggctcagcccacgcatttcaccatgagtaggtgcctttctatattta

SEQ ID NO: 407645 - DNA, 122 bp, Homo sapiens
ttgagccgagtccgtgggtgtccccgcgtggccaaatgggtggaaacgagacgaggtctccggggagggggctgtcgggaactcggctgggacctcaggggcgaccctggctccacccctgg

SEQ ID NO: 407646 - DNA, 122 bp, Homo sapiens
accctccctgtctgctctctgaagctgctgtggccggtccatgtctcaaagcgtccctggcggcctgggcccggccacagccccacaggaggctccccaaccaagtaggtttggggacactg

SEQ ID NO: 407647 - DNA, 122 bp, Homo sapiens
ctgctgtggcggcggcggtggtggcggtgtcaggtcccccagagctgccttttctcggagcgcgcactgtgggagctggcggctgcaaatgggacagtggagatggtgggccacagagccag

SEQ ID NO: 407648 - DNA, 122 bp, Homo sapiens
tgatccatcacactccgacaacaatgaagagggcggggaggaaaggtgggtgggggaccccggcctcacccaaatgcccaccctgcgtggcctgaaaggcagacaacgcggcctgaaaatgg

SEQ ID NO: 407649 - DNA, 122 bp, Homo sapiens
ttttgggtttcagctgaaacgccacgggtctgggggaatagcgagggtgtgttacattttcggtcttccggtcagccggaaccactcacaccgctgctggtgctgtgtagggtgtacctctt

SEQ ID NO: 407650 - DNA, 122 bp, Homo sapiens
ggcccgctcagccctggggaggcctacctgaggcagccgggcttcgcgtcggggctggagcgctacctgtgagcctgcgccgcgcgggcaggcacctgtgcgacctgtgccccggacctgcg

SEQ ID NO: 407651 - DNA, 122 bp, Homo sapiens
tccatacgctacctctgagtcacgcctcattgagagtgatgattatgatctctggacgttcggatgctgctgagaatcgggaggatattttgagccgtggaattcgggctctgccacatgtt

SEQ ID NO: 407652 - DNA, 122 bp, Homo sapiens
gtcagatgttgtgtctaaaccacaaaagggagggaagataaagaggtgcatctgacctctcgtcctgtgatggccagaaactcagtttttaaaaggtttctctggggtcctcttggccaaga

SEQ ID NO: 407653 - DNA, 122 bp, Homo sapiens
tgccccactgacagtcacgctgcgaaggcagctctggccaataccagaaggatgggcaaacgcaacattggcatggatgcttttgctacaccgaattttgtttttctgtaatgggggaaaaa

SEQ ID NO: 407654 - DNA, 122 bp, Homo sapiens
ttcctctcacagactatgaactaactccaacttctgcttcctctctgttccaggcctacccgccgggtccctacgctacacctccggggtacggggcggccttcagcgccgcacccgtaggg

SEQ ID NO: 407655 - DNA, 122 bp, Homo sapiens
ggccgggtagttcgggccttgaggagtcccacaccctgacagctggcgccccccacgccccgcctagctctcctcggcctggggacaccggctgccaggcctctccagtttcagcctttcct

SEQ ID NO: 407656 - DNA, 122 bp, Homo sapiens
cccgcccgctcattggccctggcagcggtgacgtcacggggctagctgacagaaccccggcgccgggcgctcgggaggtattgtccgtccctccgggctttgtagaatcgtcgccggcttac

SEQ ID NO: 407657 - DNA, 122 bp, Homo sapiens
gttaaatgggaccgggagggggccagccgcggagccctgaaagggttaaaaatccaaacgcgtcgactccccccgactatttggttccaaatggacagccacgcgaccgggagagccaggga

SEQ ID NO: 407658 - DNA, 122 bp, Homo sapiens
ttttgagagatcaacaaaagaaccgaccaaagccttattaaaggtcctaagaagatctcccgggtcctttgagaagcagttaaggaaacagtgtgccctccatcatattctgttaccgtatt

SEQ ID NO: 407659 - DNA, 122 bp, Homo sapiens
ccttgcagaaacactaagagttcatttcgtatttcaaacattcttgacagaacttttccccgtgataaccaccgtatctcagcatgcagtaacagttgcttatgatcagcttccatattatc

SEQ ID NO: 407660 - DNA, 122 bp, Homo sapiens
ggctgcggcccacatcattcttcaggtacttctggacggcgttgttgcacaggtggatggcgctgcaggggggacgaggggcaggtgctcagcctcccttggcccaggagggcacccaaggc

SEQ ID NO: 407661 - DNA, 122 bp, Homo sapiens
taccggtcatcttttagaggcattttatatacatattgagtaactagaaaacactctttccgtaatacacacacacacacacacacacacacaccatcttgtcatacaacactcccacgcaa

SEQ ID NO: 407662 - DNA, 122 bp, Homo sapiens
gcggcgctgctgatgggagtggtaattggggtcctgatctcatggttgacgtggccctcacgtgagctggagccgacgcgtgcagacgtccttctaatcctagtcttcgtttggtccggttg

SEQ ID NO: 407663 - DNA, 122 bp, Homo sapiens
acgccgaggaccggagccggcaggcgggggaggggagcaggtgggctgcagcctgggagacgagcctgggtctaccggcccctccccggccctgctcatgggggacgccccagaaccaacga

SEQ ID NO: 407664 - DNA, 122 bp, Homo sapiens
gcgaatgaatacccttctggccaatggagaggtaattaggtgacgtgttgcgttgcattacgtgttaccgggggaccagtaagtcagcactgtgctgtttcccaggtgcctggtctctttga

SEQ ID NO: 407665 - DNA, 122 bp, Homo sapiens
ctctgaaattctaggtccagttgcctgctttgggaagcgctgtctgtaggccggggccaccgccttgcagtccagtccaacacccaaggacccgagtcgctggggtgggcgccggctgtggg

SEQ ID NO: 407666 - DNA, 122 bp, Homo sapiens
gagacaaagcggagaacgctggtgggcctgttgtggagtacgctttggactgagaagcatcgaggctataggacgcagctgttgccatgacggcccaggggggcctggtggctaaccgaggc

SEQ ID NO: 407667 - DNA, 122 bp, Homo sapiens
tcttagcacttcatctactccaggggccccagcaactctgatgacaaactttgcttggttcgatagaatcacctgccttgaaagtatttagactgagaaagaaatagctccgaggccatcag

SEQ ID NO: 407668 - DNA, 122 bp, Homo sapiens
ggctgggcgtccaggtggccccacagtagcagctgcagggcgcgcagcaggaggccgacgcgcgcgaccatctcgccgcctccggtgcagcccggctcggggagctactgcgcgcagggaac

SEQ ID NO: 407669 - DNA, 122 bp, Homo sapiens
tgtgaggtgtgttgcagaacagaagacacttccctgggtaaccagcagagcagtggggcccgcacggtccgtgggctgaggtgacaggcagagcagtggggcccgcacggtccgtgggctga

SEQ ID NO: 407670 - DNA, 122 bp, Homo sapiens
acctcaagtgatctacccgcttcagcctcccaaagcgctgcgattgtaggcgtgagccaccgtgccccatcagagaatctctgtgacagttccttgcttacctgggtcttggctttccccag

SEQ ID NO: 407671 - DNA, 122 bp, Homo sapiens
cagcctctaccttgattacacaacacctgattacacaacgctgattacacagcacacctgcggagctttgagagctacaagcctcctttcctccccgcaaagtccagctgggcccaagtaga

SEQ ID NO: 407672 - DNA, 122 bp, Homo sapiens
cgggcgggacctttagatatggagagtacttgggggaaccctggctgggtgggtgcggctcgcgctctgcctggcttagtgctgtcgctctatgcgcgctgcacgtgaaggcggcgcgcgcc

SEQ ID NO: 407673 - DNA, 122 bp, Homo sapiens
agggcggggccagccacgctctccgcggggccggcagggggcggtgtggaacagggcccgcggcactgagcctcggggcttcccgcagacggtgcagatcctcatcggcctcatccacctag

SEQ ID NO: 407674 - DNA, 122 bp, Homo sapiens
ccgccgggaacttctgagcttgcgtgctctatcagtacagggtcacttattttgggctgtcgttttagaaacgcttcttctttttttcccggccaaaatctattatgcaagtgatatatgct

SEQ ID NO: 407675 - DNA, 122 bp, Homo sapiens
agagcattaccgtgtgagctccgcctcccgccagagcattaccgtgtgagctccgcctcccgtcacagcattaccgtgtgagctccgcctccccacagagcattaccgtgtgagctccgcct

SEQ ID NO: 407676 - DNA, 122 bp, Homo sapiens
gaggctgcagtgagctgggatggcgctactgctccccagcccgggcaacagagtgagactcgatctcaaaaaaaaaaaaaaaaaaaaagaccagcgggggtggttcatgcctgtaatcccag

SEQ ID NO: 407677 - DNA, 122 bp, Homo sapiens
catctgctgtctgatcaaggtcaggtttaccatgataagcaaacttccttccaacattatcggaattctgggtttattttccacgaaggccaagatggaaccgaattaatcataactatttt

SEQ ID NO: 407678 - DNA, 122 bp, Homo sapiens
tgtccggacccacactggtgagaagcccttctcctgtacccactgcagccgtgccttcgccgaccgctccaacctgcgggcccacctccagacccacttggacgtcaagaagtaccagtgcc

SEQ ID NO: 407679 - DNA, 122 bp, Homo sapiens
cactttctgtattaaggttctttctccctgtgttccaccctcctgcttgtcaccttcactcgtcagctgaccatgttgcctcctatggtgtgaacttctaccagtctcacggtccctctggc

SEQ ID NO: 407680 - DNA, 122 bp, Homo sapiens
tggtgatcaatagccaactcccctccctcccaaatcgcagtggcagcgcacggccaggcccgaggttttagctcagctcaggttgactctgattccaaactccaaccatcgttaatttcaga

SEQ ID NO: 407681 - DNA, 122 bp, Homo sapiens
agggcaggagatagcacgcttctctgcttagtcctccttccatcaccactggaaaatgagcgtgaacactgcccttgaccctgcagtcataagtcatgcaggtggtggcggggtgggggtgt

SEQ ID NO: 407682 - DNA, 122 bp, Homo sapiens
actgccccgccttctccacgccccgcccctccccgccccgcgcctgccgcgcattgcagacgcccagcggcgccaagaacccggccaagctgacttggcgactcctcgcagcccctgctctg

SEQ ID NO: 407683 - DNA, 122 bp, Homo sapiens
tctaagacaaactctagtaaacccacagcggacgggtaggaggaatgaaacacagttactcgtattcagcaagttcctggggtcatatttacccgcatgtgtctccgggtaactggggggtg

SEQ ID NO: 407684 - DNA, 122 bp, Homo sapiens
gattatctttcatggggagacgcgtcccattgcctcgtggtggccccaggagcggaggatcgagtcccgcccgaagtgacgaataaatccggactctcagcaacgcggacagtagggaggat

SEQ ID NO: 407685 - DNA, 122 bp, Homo sapiens
ggctaagacacagaggggaatggctaaagggctgggctgggttgaagaaggtgcccagcacgtagtaggtcctcaagtatttattagaggattggatgaggacaagatgtatgttcatgaaa

SEQ ID NO: 407686 - DNA, 122 bp, Homo sapiens
gagcacagcccactgtccccccacccacgcccagctccgcacttggcggctcaggctccccggcgccactcaccagacttgccagccccgcggcgccccaggatggccaggttgacctcgag

SEQ ID NO: 407687 - DNA, 122 bp, Homo sapiens
atacactcagtgaagtgacataatgtactgaactgctcctagctgtacccaactttatcccgctacccgctataaataaagctcggaccgaggtcttaaggcttaaagcatttcctgacttt

SEQ ID NO: 407688 - DNA, 122 bp, Homo sapiens
cctctctccatagcgcgtacttttttctctggagctgtgccccgtggcatgggcgggccacggtttgccccctgccctctgggtctacttcataaaagcttagcaccttcctcacagagggg

SEQ ID NO: 407689 - DNA, 122 bp, Homo sapiens
tgggacagcccaggaaacaaggggtctgaggatgcattcgagatggcagattcccactgccgctgcccgctcagcccagctgttgggaacagcatggaggcagatgtggggctgagctgggg

SEQ ID NO: 407690 - DNA, 122 bp, Homo sapiens
gccccaaacaaaccgtttaaggtctctggagcccgcaagttcagcgaaataaagcggcggcgcggaggaaacctcttccacccggacctgctctccgttgcggtttggcctccagtggtggt

SEQ ID NO: 407691 - DNA, 122 bp, Homo sapiens
gcccccgctttagatgagcctcatcacgcaggtgctagggtctccactcacttcccaaagcgaccgaagccagagggctgagtcagctaggggagagaccacgctattagcccctaacactg

SEQ ID NO: 407692 - DNA, 122 bp, Homo sapiens
agagcgagctggcctgctttctcccagtaaccctgaccagcagacagcaagcccgctacacggggagagaaatgatctcattcctcagccgggcacgtgagccgccttctttctctcacaca

SEQ ID NO: 407693 - DNA, 122 bp, Homo sapiens
gtcggcggcgaggaaggacggaggagcgccggagccgctttgctgccctccgcgtggtcccgtgcctccccgacaccatggccctggctgaggtagtagtttgtgctgttggtcgggttgtg

SEQ ID NO: 407694 - DNA, 122 bp, Homo sapiens
ggagacctccttcaggggttcgttgaggcctccctgtgctcccgggagaagggaggagggcggagcagcaacatctttccctgggataagttacgggaggaaagtgtggcccgggctccgcc

SEQ ID NO: 407695 - DNA, 122 bp, Homo sapiens
gcctggcccagaatttctttgcattttaaaggccacacattcagtctccccggggcgctacggaggtagtcaccgccacatccaggactccttccacagaggtcagttcctcagctgggtgg

SEQ ID NO: 407696 - DNA, 122 bp, Homo sapiens
gagattatgtttgcctaattagttctgccccactatcagtacggataacccagggagcatcgtgattggtttgacaaagttaatggatgatctgccatgaaagcatgatcaccaaggagcca

SEQ ID NO: 407697 - DNA, 122 bp, Homo sapiens
ttcgacattgcctgcggcgggagctgccagctttttggaattcctaatcgctcctggccccggtgattggctgctcagctctgaccccacttgggctgccgcctggttggataaaaggggaa

SEQ ID NO: 407698 - DNA, 122 bp, Homo sapiens
ttattcatttcctacccataaaggcttttaatgaatgttacatggtgggaatctgtaaagcgtgggaaggtactctgtactggaagagcgtggcaacttctaaaggcctcagtttccccccc

SEQ ID NO: 407699 - DNA, 122 bp, Homo sapiens
gaatttacctgggaagagtatttacaaggaaatttatgggagaatttacaagggaattgccgtttgagttgggttttcagagtaaacaagggcttgtcactgggcctagatggagatgtggg

SEQ ID NO: 407700 - DNA, 122 bp, Homo sapiens
gcctcatccgcacacacatcagccgctgccaggtgtgcatgaagaacctgtgagccggcgcgtgccaggaagggccattttggtgcttattcttaacttattacctcaggtgccaacccaaa

SEQ ID NO: 407701 - DNA, 122 bp, Homo sapiens
atgtgtgtggggtctgcctctgctccagctaacatcccctctccccagggaacttttgggcgtgagccagcagctgtcaagcctgatgatgaccgatacctgcgggctgccatccaggagta

SEQ ID NO: 407702 - DNA, 122 bp, Homo sapiens
gcatgacacaaagacgcccgacgccaagagggaggaaagggagcagaggagacagagacacggcgagaacgaaggcaccgcgaaagaaaagctgggaacaaagacctctaatattactagct

SEQ ID NO: 407703 - DNA, 122 bp, Homo sapiens
cgggtggggcatctgcgtcctgattggcaggcatatggcccaatcgctatggtgggaaggcgtgccccggcccgcccactgttttccttggtgcgtttctctttaaatgcaaataagtgcag

SEQ ID NO: 407704 - DNA, 122 bp, Homo sapiens
ctacatacactctcaacccggattcctcctttacacgatgggcctaaagacagggtgacgcggagctcggatgatgcgtgtgaaatactccatgcgcagcgcctgagacctacaaactcgcc

SEQ ID NO: 407705 - DNA, 122 bp, Homo sapiens
cagacggcaccagaccccaggcacagcaaacacctgggtacaggtgtgccctcagcagggcggggacctctgcagccctggtccctgagatgcaccctgctggcctctgccatgtggctctg

SEQ ID NO: 407706 - DNA, 122 bp, Homo sapiens
cacctgtctctgactggtttgttcagggaaaagctggtattggttatagctccatggcaacgttaagcggtttgcaaagtttccatttgctttagtcaatccacacagcgattgtgttgctt

SEQ ID NO: 407707 - DNA, 122 bp, Homo sapiens
gggccacgcgcagatttaccgagtgaacctgcggaccctgctccgctattacaaccagagcgaggccggtgagtgaccctggcccggggcgcaggtcacgatccctccccatcccccacgga

SEQ ID NO: 407708 - DNA, 122 bp, Homo sapiens
gggcaggccagaggcttaaggaagccgcgggaggcctgaggcaaaggccgctcactgcgccgcagagcacagaagaggagggacctacccccaggcaactctggaaagcagcgatccgactg

SEQ ID NO: 407709 - DNA, 122 bp, Homo sapiens
aggcgggcgctgcctggtgactgcagcgccccagcggggccgagggaccgccctcctaggcgtctggagaaactaggcaatttttccgggtagagtggaggaacctgtagttttcctctccc

SEQ ID NO: 407710 - DNA, 122 bp, Homo sapiens
gccctgggcagtagggagacgacaggccgtaagcagcgccctccgctcagggacccgccacgattgtccctgcctggtcccaaggcatcatcagtcttctataagtctcaggaagtagctaa

SEQ ID NO: 407711 - DNA, 122 bp, Homo sapiens
agtgcgccaggagctcccctgtggactacttctggtaccgagagacgctcaacatctccacgtccatcagcgactcgggctccatccagtggtggatgctgctgtgcctggcctgcgcatgg

SEQ ID NO: 407712 - DNA, 122 bp, Homo sapiens
ttctccacgtccccaccagactcaggagcccagctggcttcacccaatggatctcgcacccgggctgcaggtggtgctgcctgccagtcccggtgtcatgcgcccacactcctcagcccttg

SEQ ID NO: 407713 - DNA, 122 bp, Homo sapiens
acgaggctggcaactcattatagccactcaatgtggttaagaggcccttctcacattacacggcccaccgcggctcagcttcacagggaggcaaaggcaagagatgaaattgctcagaaaca

SEQ ID NO: 407714 - DNA, 122 bp, Homo sapiens
cactcccgcagtcacttcctgcttccctcccgcacacgtggccctcccgcctccgggccccgcccccttggccgcaactggcaactcccgcctgaagaatagattctctggttcacagccgt

SEQ ID NO: 407715 - DNA, 122 bp, Homo sapiens
gaggtacagtgaccattccattccaatatttaatgtcccttaatttatttagagattccacgcccactagtagtaatattggctaacttatacaaaactcttactttgcaattccaagtgct

SEQ ID NO: 407716 - DNA, 122 bp, Homo sapiens
tgaataaagaatgagcacagattcagaagcaaaacttccatagtgcatgaatcctcccaacgagactgtcagaataaggatataggtttgcatttatttattttactaaaagcttcctactt

SEQ ID NO: 407717 - DNA, 122 bp, Homo sapiens
gcaggaatcgcttcaccgaatcgcctggccgcgtcctctgctagacttcacctgccgctgcggaccgtacacaaccactcccggcatgccccgcgcacgcactacctctcccaccccgcccc

SEQ ID NO: 407718 - DNA, 122 bp, Homo sapiens
cagggtggcgggaacaggaaaggtgaacccggaaatgctgaatcagggtatccgaggtggcgatcgccatcttggagtcttcactggagtccaatcacagatcacctgaggtccggagctca

SEQ ID NO: 407719 - DNA, 122 bp, Homo sapiens
agaaaaaaatctggccggggtcagaggattgccgaagggaggccttcctttcagtggacccgggtcaagaatacccacattccgaagggctgggcacgaggaggcatgggggacgctacctt

SEQ ID NO: 407720 - DNA, 122 bp, Homo sapiens
tgtgatgatggtgtaaagggtgcccccccgagcccccggaggcatgcagtggcgcaacagcgtgagcccaggagccccggtgagctcctggatggagaatctgttcagatcactccccagcc

SEQ ID NO: 407721 - DNA, 122 bp, Homo sapiens
ggggtggggtcggtggggctggtggggttgtcgccctgcccctcccggccacctcggccacgtgctgctccttgcgcttcagaacgcactcgtactgctcctcgccctgccgcagcagctcc

SEQ ID NO: 407722 - DNA, 122 bp, Homo sapiens
ccatccgcaggggccctgcttccttccacctgcgagctttttctgcagaatgcgggaagccgccgccgccgccacagaggagggggcggaggcagaggcggaggcggcacccaggggccggg

SEQ ID NO: 407723 - DNA, 122 bp, Homo sapiens
actactacatgaataacatatggggaacttcacaactgagagatcaggcatcagacaacacgaatccactggtcaatcttaacatttaaaaaaaaaaaaagaagccagggtcagtggctcac

SEQ ID NO: 407724 - DNA, 122 bp, Homo sapiens
ggggaggggacagaactcggcccccgccggggtctccaggcaacgccgcccgcccgctcgcggacgtcaggcgccttcccggcctcccattggccgccgccaatttttttcctccgggggag

SEQ ID NO: 407725 - DNA, 122 bp, Homo sapiens
cttgagtgagggcacgctctccttagaggggcggaacagtttttggcaccttatcgcgagcggcagcttatgcaagagtgatttaaaaaagaaaggcaggtccggagccaggggctaagtag

SEQ ID NO: 407726 - DNA, 122 bp, Homo sapiens
gcccaagggcagaaggggacagagggcgcggggcggggcaggggggatgggtgggtggggcggggccccatccccactcacagagaggacgcggtcgccaacctgcagtgtgcccgcgcggt

SEQ ID NO: 407727 - DNA, 122 bp, Homo sapiens
cactcctttttatacccctcttacccagctgagtcctttgtgtctcttctcttttcattgcgtctctctggcaaagccctaaccctggatcagccccactctctattttctgcatgcctgtg

SEQ ID NO: 407728 - DNA, 122 bp, Homo sapiens
ggcgcacaggtttagagttttcacatcaggtgtgaatgctccctacttaaaaatggttttcggtgccttcaagatgagttccaggttgtgggcttccctgagccctgtaagagatctttgat

SEQ ID NO: 407729 - DNA, 122 bp, Homo sapiens
tttatggcacttgtggagccacttcctctcctcaccaaaaaatgcccagtaccctgaatccgatcaaattactctcctaaagtataaggcttagtttctgtgtgctgcttcgcgagacagtt

SEQ ID NO: 407730 - DNA, 122 bp, Homo sapiens
ccacgggtcccgcatacacagaggttacactgcatggcacagtgtgaagtgcttgaccaccgtggtggtgtttagtcctcgaggccccccattgcgggtagtacccccttatagtgccgaag

SEQ ID NO: 407731 - DNA, 122 bp, Homo sapiens
cggggggcgtcaggcgtcggcgccaggagcccgcgcgcctcccgccccccggcagcccgccgccacccaccgaactggcaccagtcggcgggctccagggcgtccatcactttgtagaagcg

SEQ ID NO: 407732 - DNA, 122 bp, Homo sapiens
tgcggcaggcaccctccgtgtgcccgggcgggcccagaccccatacttcccgactgtcgccgtaatgagggtcgcctaattgactcagagaaggcagcactttgatttttcccgtttcttct

SEQ ID NO: 407733 - DNA, 122 bp, Homo sapiens
atgcccctcacgcgcttgctggaagggaattctggctgcgccccctcccctagatgccgccgctcgcccgccctaggatttctttaaacaacaaacagagaagcctggccgctgcgccccca

SEQ ID NO: 407734 - DNA, 122 bp, Homo sapiens
acttatataccaccctgagaccacagtaaagagtttacactcagagcaaggcctgaaacacgtttagtggcaagacaggttaggacacagacaaagggaaaggcttggctagcaaaggtggc

SEQ ID NO: 407735 - DNA, 122 bp, Homo sapiens
tatttgcagaatatggtccctgaaaacattttaggttatttttccatggagtctgacttacgctgagaagcctcattatagcactgaccaggagtttaaacagtcaggtgctgggcaggcct

SEQ ID NO: 407736 - DNA, 122 bp, Homo sapiens
ctccggcataaggcccacctcctacctgccgggcgggacgagcaacatgattggtggaatcgagtaattactgatcagtattgtccaatcacggagggcagtttagagccggcccaatgagg

SEQ ID NO: 407737 - DNA, 122 bp, Homo sapiens
cctctggacctggtcacccccctgtccccaccctcagcaggcagcatctgcccagcgtcacgtgcaccctctcagttaaccctttggtgaatctggttgggcaaccacacccagtggccccc

SEQ ID NO: 407738 - DNA, 122 bp, Homo sapiens
gacccccgcgtcgctgcccagcccggtccggcgcgccacgccgaggtaaggaggagggagcgagggggcattaatatgcaaatgccttgcgattgattatgcaaagccgcggggctccgtgg

SEQ ID NO: 407739 - DNA, 122 bp, Homo sapiens
ccggggactcctcgcaggtcagctgagctttgctttcagtcggcgtgcacggttcccaaacgtcggtggtgatttttgtaagtgaggtgggggtcaccacaggaagagaggggaggcaaacc

SEQ ID NO: 407740 - DNA, 122 bp, Homo sapiens
aaacccctcaatggcagagaggccgaggatccccgaatggggaggtgaggctcagaacagcgagggtgcctgagcacagcaccacactctcccggtttctgagccccgagccccgcagtgga

SEQ ID NO: 407741 - DNA, 122 bp, Homo sapiens
cggctcgggggcaggtgacgtcagcggagcccgggctcggggtgaagctgaggcggctgccgcggggggggggcggggtgcagggtgcgggtgggtcgcgccgccgccgccttccgccctca

SEQ ID NO: 407742 - DNA, 122 bp, Homo sapiens
aaacatggccagtaattttaaaatccatcccctcttcaatgatagcaaatataaaagcaacgggctgcaaggtacacgtatgtttaatgaaaaatggagggacgtggtgagtatctcctgct

SEQ ID NO: 407743 - DNA, 122 bp, Homo sapiens
catcgtctcggcccgtcccggctgggaggagttcacctgggacagcatcctctgtgccagcgtcttgtgctgtttggagaccctgggtaaccgggaagccatggcaggcagcgctgcccagg

SEQ ID NO: 407744 - DNA, 122 bp, Homo sapiens
atccccatctctgaccctagctctgaagcatggggtggaggtgtggggataaactggtgtcgtctgtggtggcaactcgaaaggaacagtcaagtctagggtagttgcgcctgtgctgcttg

SEQ ID NO: 407745 - DNA, 122 bp, Homo sapiens
tgaatttacccacattgcttcatttccctttccctccatctacctatcctctgactaattcgctgacccgttctgaagtgagctttcataacctgggcaccaggaatcctctgaaaggtgta

SEQ ID NO: 407746 - DNA, 122 bp, Homo sapiens
ccgggacacccaccgcgggtcccaggacaagtaacggactctatttcccaggagcctacgcgctcccccagttttggggccgtcttaaatgtctctaccctgcctaaaggttaagaagctcc

SEQ ID NO: 407747 - DNA, 122 bp, Homo sapiens
aatagtttttggttttcaaagactctgtatgaatcagcgtggaaggtcaaacagttaagacggaagaatctgacatgatggggcagagagcttggatacatgagaacgcgcttacctttgga

SEQ ID NO: 407748 - DNA, 122 bp, Homo sapiens
tggcctctgtgcaaggcatctcctggcttaccttggccagcctcgctcgcttgatgaggtcgttgagcttgcgcaccgctgccttctgggggaggctctggatgtctctaaagaggtcctgg

SEQ ID NO: 407749 - DNA, 122 bp, Homo sapiens
gcaccaggggcacagggccaggtggacaggcctgtctcacccctgtctctcccgtccactcgtggcttggccactggacccacgcagcagtgccaacgtgtccctggatggcaacatgcctc

SEQ ID NO: 407750 - DNA, 122 bp, Homo sapiens
ctgtgttcctggaaaacagcggtgattaagaaaccccctcatctatttgtgtttctggaacggcacactgtaaagaaccacccgtctccatgtgactcagataaaacgcgtgcagatgaccc

SEQ ID NO: 407751 - DNA, 122 bp, Homo sapiens
cgccggcttccccctgcccctcgcggctaagccggggactgccgggcggccctgcgcgctcggaagagcaggttcctcaacccaggccccggcccctcccgctaagctcgtccctcccggcg

SEQ ID NO: 407752 - DNA, 122 bp, Homo sapiens
tcaattaattcgccccccgagatattcttacctacagaagggagtgtctgttcaccaaatcgctcacttgccgcacgaccacgcacccgcggctgtcggatggatccaggcgctcttggtgg

SEQ ID NO: 407753 - DNA, 122 bp, Homo sapiens
atccagtgctttgcagggtcaccaccaccctgccttatgaaaatggattcctaggaggagcgttttgcaaaaattccactgcttcctccaacctctgccactgaaagggactctttggctta

SEQ ID NO: 407754 - DNA, 122 bp, Homo sapiens
tcgcccacctctacccggcagcgggggcagtcagagcggagccaagatgcgaatggggtacgtgacccataccccttctccctatgggccaggccccagccgttggagaatggtatctctgg

SEQ ID NO: 407755 - DNA, 122 bp, Homo sapiens
ttcacactgactctgggcggctgaattgattttgtactccctgcccctgcagcttggctccgtgcggagcgggccgcctcagtgtctgggccttccctcgcctcacgccattaccctcttct

SEQ ID NO: 407756 - DNA, 122 bp, Homo sapiens
agagtagccaatgcctctcctgtccaaaatctcatacccttggcccttctcccgtcctcgcgctgaggctggagtcaggtcaaatgtcagaacatctggatgtcccaagagtgacacctggg

SEQ ID NO: 407757 - DNA, 122 bp, Homo sapiens
cctaacaaataacacaaccctccttttacatgtaaataacatatcgaactatatcaaaatcgatgttgacctacatttttgtttccatagaattgaaaacatactttattttaggcattgca

SEQ ID NO: 407758 - DNA, 122 bp, Homo sapiens
acactgtactgcatggaatctgcctctgcccctcaccatcctccccaagagcaaaggccacgtcttctttaggtctccagcaccttgcacagtgcccattcctgccaggggctcacaaccct

SEQ ID NO: 407759 - DNA, 122 bp, Homo sapiens
tccctccaggctggacggcagtctggaaacgaccaatgagatcttggactctgcctctcacgactgccccttagtcactcagacatacggcgcagctgcaggaaaaggtacttacgtgcctt

SEQ ID NO: 407760 - DNA, 122 bp, Homo sapiens
ggaggggcctcgcttgttgcctgccaggctgacgccccggctttccggggacacagcccccggcccattggtctgctacatccctatgggcttggtcgagggctgcccctcggttcaatggc

SEQ ID NO: 407761 - DNA, 122 bp, Homo sapiens
gcggtctgtgtccggaaccctctgagctcaggcagcgtcctgggctgtttcctggggcagcggccacagccgtcctatctgcagagcatcctgctttcctggagggcatctgcgatggcccc

SEQ ID NO: 407762 - DNA, 122 bp, Homo sapiens
acgcggagaaagtgtgaatcaattcaagactaaggttgccaaaatgtttgatcagctctgcgtcagccttgacattacattacattacagatcccctgatcgccaccgtcgcagaagctctg

SEQ ID NO: 407763 - DNA, 122 bp, Homo sapiens
tcagagttacattggcagtccttaccaaccccagctaagccgggaagaatgatgggagggcgcagtcccacagcctctgagagagtacttgtagcttagcagaaggtcattggaaggaatcc

SEQ ID NO: 407764 - DNA, 122 bp, Homo sapiens
gagaccaaggcccccgggccgacggagccgggaaagaagagccggagcctccagctgccccggggaggggcgctcgcttccgcatcctagtctctatcattaaagttctagtgaccgagacc

SEQ ID NO: 407765 - DNA, 122 bp, Homo sapiens
acgtaaatctggcttgaggctggcacaacacagcaggagcagtgcaggctggtggccaggcgcccggccctgcggctgccgaatcttcgcgaagcctgcatccgaggcgcgcactggttcca

SEQ ID NO: 407766 - DNA, 122 bp, Homo sapiens
cccatctccccctggggctgacgaggtccctgcccagcacctccggtcagctggcccccacgacacgatgtgccagagcagtgcccgggcccggcccccgctgatgcaccaccctgaccccc

SEQ ID NO: 407767 - DNA, 122 bp, Homo sapiens
aaaagtggtcgcggcgttgccaaggtaggctgcgcagtgtctgggatgatgtcatggctccgtcttaaaggggacgcgggcggcagaaagtggagctgggctggtgtgcgcgcggccggagt

SEQ ID NO: 407768 - DNA, 122 bp, Homo sapiens
ttcattttcgtgggcactgtgcacggccccatgttcacaggaatccaggcacggagtggacgtcccctccctgccgcatccccagcctctcggttctctccagaggtcagcgctggattgtt

SEQ ID NO: 407769 - DNA, 122 bp, Homo sapiens
ctgcatgactaagggcccaggatttgtcctaatcgagctgaacactagttgctggttccacggttctcttccatgacccacggcttctaacagagctataacactcacctcatggcccaagg

SEQ ID NO: 407770 - DNA, 122 bp, Homo sapiens
aagaatttttttttttttttttttttttaggttggggtatgattttgatctgggcactaacggggacactgattgcttttgccagtaagtcaagaccagcagataaaaaataatttttaaaa

SEQ ID NO: 407771 - DNA, 122 bp, Homo sapiens
ctccttcttgctggtggaagcgggtcgcacgggggaaccgagaagtagtcgtggaagactcgcaggcggggacggggcggtttcccaaataacgggggctcgggggagagtgtcctggccga

SEQ ID NO: 407772 - DNA, 122 bp, Homo sapiens
ttgaatcttgactctgacactttctagtgtggggatctagataagttaatacaacatctccgagtctatattttcgtaacagtaaaatgaggtaaatcatacctatctcttcagattattgt

SEQ ID NO: 407773 - DNA, 122 bp, Homo sapiens
ttcagaggagcagctgagccgcgcctaccgcctgctgatagcacagctgacccaggagcacgccgagatccgtctctcagccttccagattgtggaggaactcttcgtcaggtctcaccagt

SEQ ID NO: 407774 - DNA, 122 bp, Homo sapiens
ctggcccactccccggctccctccttccttccctccacctagcaccggaagccgcgacggcgactggagctgtgcggcgtacccccacccccagcccgggatacttcccacctccccgatcg

SEQ ID NO: 407775 - DNA, 122 bp, Homo sapiens
tgcggtaacgcgtggtcgggctgctgctagcagtactggaaaggcgttctaaggcggcggcgtcgcgcggctgtggagcagccctgcgagcggcgggttatagcggcaccccggggacgcgt

SEQ ID NO: 407776 - DNA, 122 bp, Homo sapiens
agagagagctgagcttttgctggagtcatgtgacaggcaggacagtgactgaggatttaacgaaaggacaatttgagcacctccagttccaatgccaatgagtgcctctccctgtgtcccca

SEQ ID NO: 407777 - DNA, 122 bp, Homo sapiens
cccgggaagcggcgcgcggggaggactcgggggcgccgagaggaactgtccgggaaggggcgcgcgggccgcgggcggcgcggggtcggtaacggcccgtgcggtgggcggcggcgcccgag

SEQ ID NO: 407778 - DNA, 122 bp, Homo sapiens
tgttttggggcaccatcagccacgcccatatgagacggtgaactgagtcgataaatgtcccgtgggctctgattgctctgcagcttggccgctcccgcatttctctccctccccttgggcct

SEQ ID NO: 407779 - DNA, 122 bp, Homo sapiens
gacagctccagtgctgatgttggagccggttagcgaaccccaagagtgcagagtgtggagcgtggagcgccgggactgtgcacgcttgaccggaagcccagaccagtgcggtcctagccaga

SEQ ID NO: 407780 - DNA, 122 bp, Homo sapiens
agtcaggctgctcagaactcacttggcctcctcgagctcctcagtccgctgaatggcgtccgtctcatacttggtcctccactgggccacctccgagttggccttggaaaggacgcgctgca

SEQ ID NO: 407781 - DNA, 122 bp, Homo sapiens
aggctggagacaggcaccattgccatggggctggtcctagtcactggccgaggataagcccgtccctgtcccacattctagccccactatgcgggggtgctgttgtcctgcctgtgtctcat

SEQ ID NO: 407782 - DNA, 122 bp, Homo sapiens
ccgccctgccacgcgcaggccgcagcgcggggacccaagctgctgcccgggagcggcagtcgccagtagaaatggacagaccggtcctgtcagagcctgtggcttttgttgtaaacgtctag

SEQ ID NO: 407783 - DNA, 122 bp, Homo sapiens
gatggaggtccctcgcaccggggctttctgcacgggctgaccccagcgagcttcgtagctcgggcccagcctgctggtgtcgtttgcctaaatgtgttcaacctcgtcttcccatgagaccg

SEQ ID NO: 407784 - DNA, 122 bp, Homo sapiens
tcagtctccccatatttacaataaaaggggagcgaggtgggatggcgctgaggatccctacgtccgatcctaatctccagctcaggcaggctcggccgccactagcatcctggagcgacaac

SEQ ID NO: 407785 - DNA, 122 bp, Homo sapiens
attgcacatagccgtttgccagccccagggccacctggagggggtggacagtgcaggccccggacccctaagactggtggcttcacatcttcaggggggccagacccacccccagggagtga

SEQ ID NO: 407786 - DNA, 122 bp, Homo sapiens
caagctctttttggagaccatgttaagaaaccccagagcctggaagacacggacttgagccggctctacacagcaacatccctgatgcagattgatgacaatgtgatgaggtgtgtccgcgc

SEQ ID NO: 407787 - DNA, 122 bp, Homo sapiens
acctgcccggagggcactggggtagggcaccggatggccttagcctctggacattctcagcgacctggcactagggaatgttcctggcctaaggaaggacctgggtctggccaaaaaggcga

SEQ ID NO: 407788 - DNA, 122 bp, Homo sapiens
ctagggagcaacctgcagttgacgcagcgtccatgggacacactgttgtgttccttaaaccgagaagtggttcttgattcttggtacccgtgactacgagtaactctctggaaataagtaat

SEQ ID NO: 407789 - DNA, 122 bp, Homo sapiens
ctcaccaccaggatgagggtccccaggcactcggccagcgcctgtcggagcagccggtagcggatgtggagcatctccccgcagcgggacaccagctccttctgtcgacccatggcggggca

SEQ ID NO: 407790 - DNA, 122 bp, Homo sapiens
tggcgagggctcagtaaactgaatgctgagtgaatgagacgccacgcgccgctttgccatcggtgctttctgagtgacgttaaaacgctctggatggtggcactgggattatggatggggct

SEQ ID NO: 407791 - DNA, 122 bp, Homo sapiens
gggacctttttcccgtggcgggggcgcagggtgggggacccctaagaagtgcacagtgcgcggggccctctttccggcccttggagggaacggggtaccggggatgcagggggtagggctct

SEQ ID NO: 407792 - DNA, 122 bp, Homo sapiens
tgttgctgaggtgggtagtggcccggtccacagtgtagccgtcagccatctccaccatggcggtccccggcttgcttttcatgactttcaccttctccacattgctatacaagcagaagaca

SEQ ID NO: 407793 - DNA, 122 bp, Homo sapiens
ccagggctgagatggcgtctcccctcagactctgggctccctggggtaggggcagggtcccgccctcagaatcagcttcccaggacaggagctgtgtgtctctgcctcccttcgcgtggggc

SEQ ID NO: 407794 - DNA, 122 bp, Homo sapiens
cttgcggttgtgtgggtgtcccaacctgggtcgagataccccgcggttcaaaggctcccccgcagtgctttttaaattgacatatgcagtgataacctgctttagcctcaggctcactcacc

SEQ ID NO: 407795 - DNA, 122 bp, Homo sapiens
agggccctccagctgcacatcagccccgcctgagacaaacagcgagggaatgttcctaaacgcttgttttccctttgcatagctgattgcagagcccagcaagtctttctctaaatggcttt

SEQ ID NO: 407796 - DNA, 122 bp, Homo sapiens
ggcatccggagccggtccgagagctcacggatgcgccggcagcctcctcgcagtcccgcgcgccgcccctggccccgagcccctcggctccgttgtgctcctgggagtgagacgccacgtcc

SEQ ID NO: 407797 - DNA, 122 bp, Homo sapiens
gggtggggtgggggagcagctgcgtgggcaggggccaagatgaatgagctactcctggagcggtcactggaaatagaaggagtggccacaggcagtgacgctgggaccagggcaggaggcct

SEQ ID NO: 407798 - DNA, 122 bp, Homo sapiens
ccgctgggcactgggcatgccccaggcgtttctatataaagcggcgccgcttgggccgggcgctgtgccactgccaccgccgccgccgctgcatcccgcccggtccgagtccgcccgccacg

SEQ ID NO: 407799 - DNA, 122 bp, Homo sapiens
gcagttctgggcctttcccgttgggttcaccgtcggggaaggatcgcgcgcaggggacagcgcgagcccgggagggaaggacccggcttctccagatgcttggcgacaaagggcaggagcgg

SEQ ID NO: 407800 - DNA, 122 bp, Homo sapiens
ccggaagctcccgccactgccgggcgaatagacccccgcggacccccaagcgcgcggggccggggccctagttcaggccctcgctgcccctttaagggttctcgaaactttccccccggtat

SEQ ID NO: 407801 - DNA, 122 bp, Homo sapiens
ggatgccctctacattcctgcctcaccggcagcgcgtgacagagtgcttggaacctgtgacggcaaggatgccctctacattcctgcgtcaccggcagcgtgtgacggagtgctcagaaccc

SEQ ID NO: 407802 - DNA, 122 bp, Homo sapiens
ggtggtggcggtccccagacgcagatacagcaagcagggggactgagccagcagcccgcgcggggggtgccgcataacctaaagaatgaagtcatgccccggcctgcacccgggaaactgca

SEQ ID NO: 407803 - DNA, 122 bp, Homo sapiens
gaagcccacaaaggaaagacagttggtgcttaggagctagccttgattttctgcttgggacggtgagtatcaggaatccattcttaatgaaaagcaaacagaggatcactactttcccccac

SEQ ID NO: 407804 - DNA, 122 bp, Homo sapiens
ctcttaggaaagttacttttatttttcacttgggtttctgagagacagactaagcctccccgaaatgaagccgtggaaagccaggcagggcaggagagggaaggacgatggtcccatgctct

SEQ ID NO: 407805 - DNA, 122 bp, Homo sapiens
gttgaagctgcactaagctatgattgcacccctgcactctagcttgggtgagagcgagaccgtatctctaccaaataagcaaacaaaatacttatatagttaaacagaaaaagtaaattaca

SEQ ID NO: 407806 - DNA, 122 bp, Homo sapiens
cctgatgaaagagggccattcagcaaaacagctgaggttcctctaatcactgcactcctacgggcttttctgtaggccggagaaacaagcaccggggtgtgcattcgacattgtgagggcaa

SEQ ID NO: 407807 - DNA, 122 bp, Homo sapiens
atcttagcctcagagccctgaaatctaatagcaatttaaggaacactttttcattttcttcgagtacattttcaatgatctttttaaccctcagttgtcctttcttttcttctaacttctat

SEQ ID NO: 407808 - DNA, 122 bp, Homo sapiens
ccctgccctctccaccgcgcctggccgctcagagcccatgatgaagtgatttgggtagagcgaggtcaggccacatctgttaaccaagtagccagtcctgggcttaaaaattatttgtttcc

SEQ ID NO: 407809 - DNA, 122 bp, Homo sapiens
tctgcatttttcccactgtcttcatctgtggcactaatagttgttaagtataacccacgtcggttgttttcagaaactgacagctcaattacaggctggttgaaaattggtgggttgtcatt

SEQ ID NO: 407810 - DNA, 122 bp, Homo sapiens
cccccagggccccaatctggtcccctgacagtaatcacacaggaccctcccgggagggaccgagagcccagcttcgtcccctccgggcgcggcacagcggccccatcagaggagggccccag

SEQ ID NO: 407811 - DNA, 122 bp, Homo sapiens
aacaagtacctcatttctttttacctcagattcatgttttctaccttggcctcttctctacgtagggctgcgggcccgtatctgaaacattaacaaccatcaggaatgaggttggtctggtt

SEQ ID NO: 407812 - DNA, 122 bp, Homo sapiens
cgatgcccatgttttgggacacagcgacgatgcagtttagcaaaagaaacatgacagcagcggttaacacctccgaacttgctggctacgccaggaagccaggccaagaatgccgcgaaatt

SEQ ID NO: 407813 - DNA, 122 bp, Homo sapiens
aggtgggagcagggataagagcaggtgagtgcttgccatgtgggtcaggcccccgggatacgtggacatctgttgcgggggggtgtggttgtgaatggtgtggtgtgactctggtcggtatg

SEQ ID NO: 407814 - DNA, 122 bp, Homo sapiens
aagaacccccccaggccccgccccgggcgcgtccactgttgcgggagaatcggctccgctcgttctccgctgttccggccgtccctccaccggccccgccaccgctggccgcagtttccgcc

SEQ ID NO: 407815 - DNA, 122 bp, Homo sapiens
ataaatctagaatagcggccacatgttgttaggtggtgggtttactctgggattggcctgcggttgccagggaggagagtttggcggcagatggtggcacacaacatttagcgccatgcaaa

SEQ ID NO: 407816 - DNA, 122 bp, Homo sapiens
cgtccccgcgcctcagcagcccggggccggctcgcgcatagtgtggccggcagggcccggcgcctgcagcggccgcaaacgccgcttctgcttccttaagaaaaatctctccgaactgccgc

SEQ ID NO: 407817 - DNA, 122 bp, Homo sapiens
gcagcgtgagcagcagggcgcaggccagcagctgggagagatgcatggtgccgctggggtcgaggggcgcacacgggcggcagcgagggcgcgcaggtcggcgggcagaccagcagggggat

SEQ ID NO: 407818 - DNA, 122 bp, Homo sapiens
ctgcgaccaccgtcagtctcgaagatcagccgcgccaaggccctggcggagggaacagaacggccaaggtaggaggagagagttctgttccaggagagtcccaatgaggcaggattggtgga

SEQ ID NO: 407819 - DNA, 122 bp, Homo sapiens
tccccacctcccggcactccacggggtctaagtttcagcctgagctttagaggacggaaacgttccaaccacggcactgcacgccaggcccagtactcaccgctctcacatacaaaatcata

SEQ ID NO: 407820 - DNA, 122 bp, Homo sapiens
acacaaattctatatgcaactttaggggattctcaaactcatgaaaattcagtggaaaagcgcaggtaaaatcatcacactgaagacaaagctataacccataatgaaagctacacagcagg

SEQ ID NO: 407821 - DNA, 122 bp, Homo sapiens
gtgtggtaagctgggtcactggggctgctcaggaaaagggaacccagaagcctggcataccggcgtaaaggtaagagaatttcttaccagtcagattgctggcttctctctctctgtgcaaa

SEQ ID NO: 407822 - DNA, 122 bp, Homo sapiens
cacagacgacgacttctactccaagttctccacgggctctgtgtccatcccatggcaaaacgaggtgagcagggcagaccacttgctttggtctgggtgggagggagggactgacgggtgga

SEQ ID NO: 407823 - DNA, 122 bp, Homo sapiens
atctgaacctcccccaccgctatagggggagcaagcccagcagtcatggtatctgaacaacgcaggctgtgaaccttggccaagccactttccctccggagcacctgctgatctcttttctt

SEQ ID NO: 407824 - DNA, 122 bp, Homo sapiens
ccccatcccgcgttcccagggggcggtgggaagcggaagtgctccgctgacccgggagggcggtccctagttcacactggctgttgtcagcggcctctgaggtttcaggctcttggcggtga

SEQ ID NO: 407825 - DNA, 122 bp, Homo sapiens
agctgtaattccattgacagtgaattggagtaatagccctcccccgtctcccaagctctgcgtccagtccacacaaagcccacggcagctgcaggctgagcttgtcctgcttcagatcactc

SEQ ID NO: 407826 - DNA, 122 bp, Homo sapiens
agaagaccgcgaggaacggaaagcgcatgcgtcctagtggtgctgcagcgcccggggagtcgcggaggggaggggtgaaaatgggcttgcgggactgacgcacgcgcattgggataccagat

SEQ ID NO: 407827 - DNA, 122 bp, Homo sapiens
acatccgaggactcaccttgtcccggagctcttcaatggtcttgaagtattggctgtagtcgcattctgggctggttggggtctgcttctggtaccagtcatggatcttcacctccaggtca

SEQ ID NO: 407828 - DNA, 122 bp, Homo sapiens
agagcgcgcgtgcgcagctgggatccctgttttctccccaactctgggcccgtcccccagcgcttttgtgagcgtccactgcccttactgccattaggtctggactcagtgagctcctttta

SEQ ID NO: 407829 - DNA, 122 bp, Homo sapiens
cagcggcgcgctcgggcggcttgtgacattagcgggtccaaaggagacgtcccggttccgcgcaagcactagggactgtccaaggagtggaaagaacgaaaacaaaacttttccatatcttc

SEQ ID NO: 407830 - DNA, 122 bp, Homo sapiens
cgccccggaagcagttacctgtagtagctcaggagcccgttgctcagcacgaaccatcgccgctggtagcctttgatataattggtccatttgaagagccagccctctcgagccgagcccga

SEQ ID NO: 407831 - DNA, 122 bp, Homo sapiens
caaagagaatggctttccctttgttgataatgactcaaccaaagcattcctcccctgcttcgtttacctgccgtgggcctcttagcaaagcacacctgtccatctgtcaatatttactctgt

SEQ ID NO: 407832 - DNA, 122 bp, Homo sapiens
gtggaggttgggtgggtttgattcttgtcctagtctagcctcagttttgggcaggcactgcgttggggtggggctttctcaaatatcctgccccttttccagtagcaggaaagtgtggatga

SEQ ID NO: 407833 - DNA, 122 bp, Homo sapiens
tccacttggctctctctgacctgcctgagcactgcccgacagtctcctccggcctctccacgtcctccgtctgccgcccactaatcgttccccatacagacttcctggcgacagcacctgtc

SEQ ID NO: 407834 - DNA, 122 bp, Homo sapiens
ttacagggcctcagcaaccggatgataccgcgagagaggacgcctgacgtaattaaagtgcgcgaacggaagtggcgcggaacatgacggaaaatcagtacggttggtcccttaaggaccag

SEQ ID NO: 407835 - DNA, 122 bp, Homo sapiens
tcactcctccagctctggtggccccggcaacccccggtgttccctggcttgtagatgcatcgtgccatcctctgcctctatctccacgcagcctttccactgcatctcctgtctctgtgtct

SEQ ID NO: 407836 - DNA, 122 bp, Homo sapiens
cttctgcttctgtagatttgttcgtagactcgtcagactctcacagccctctacacttgacggaacagaccccgaagaagcctcctcctgagataaaccctgtagatggaagagagaatgcc

SEQ ID NO: 407837 - DNA, 122 bp, Homo sapiens
ctgatatatcccaggcactgtgctgaatgctaaaggctcaatgataacaactcctgctcacgaggagctcatagctggccaatcagggcctgctacctagcaggtattctgtattcactgag

SEQ ID NO: 407838 - DNA, 122 bp, Homo sapiens
tcagaacttacatcgcctccatattgccgtctccatagatacaggacgcgcaggaaacggcgtcttcagatatcccagggcaacgacggcagcccgagtaagtcaagattcgtagaaggcga

SEQ ID NO: 407839 - DNA, 122 bp, Homo sapiens
aaaggaactaatgagaccagtgcaggatcactggacacaggctctgaactggcactagggcgagactaggatctaccagacagaataggcattttggtggtcaggtgaatgttggtgcaagt

SEQ ID NO: 407840 - DNA, 122 bp, Homo sapiens
cattttatgggtaatgaagccgcagtatagaggggttaaataacgtgttcaaggacgcatcgacggggccaagcagacggaattgcagctacctgctttaccactctaagtcctcaacaaac

SEQ ID NO: 407841 - DNA, 122 bp, Homo sapiens
ctcttcctagaaatccaagattgttttttttcctaggactaggaagccaaaagtgtcacacggtcaaaaatgcttccatctactggtgaaactcaggaatacactaacatttccctgcctga

SEQ ID NO: 407842 - DNA, 122 bp, Homo sapiens
agccgatccctagcgccgcgatgcggagcacctactgcaggagatcgggggcctgggacgcgctggccgaggtgtgatcggaccccaggctagccacaaagggcacttggccccagggctag

SEQ ID NO: 407843 - DNA, 122 bp, Homo sapiens
ggacttgtttcccttgtcccttgtggttttttgcatttcctgttcccttgctgctcattgcggaagttcctcttcttaccctgcacccagagcctcgccagagaagacaagggcagaaagca

SEQ ID NO: 407844 - DNA, 122 bp, Homo sapiens
gtgaggccggagggaaagcagcgttgacagtgtcagtgtgtgtgagtgtgtgtgtgtgcacgcacttgccagcacatgctgaggtgcagtttgaaagatgtgtagaggggaagaagaagcaa

SEQ ID NO: 407845 - DNA, 122 bp, Homo sapiens
cagtccccccaaagctttaggaagccagttactacatccggaaagattcgtgcttcagaacgcaagccagggagaataatcacagaaacgcaatgcgaatgtcgtgcctctcagaaattctt

SEQ ID NO: 407846 - DNA, 122 bp, Homo sapiens
ctccctctttccctcacagccgacgaggcaacaattaggctttggggataaaacgaggtgcggagagcgggctggggcatttctccccgagatggcgggtctgacggcggcggccccgcggc

SEQ ID NO: 407847 - DNA, 122 bp, Homo sapiens
caggctgctgagcctttccaagcgaaatgccccacgtgcgccaacggccacctcggccgtcgccccacgcttggcccgcagccagaggaagcccagcaacttctgctctttcttaatttcta

SEQ ID NO: 407848 - DNA, 122 bp, Homo sapiens
taatttttgtattttgcaaggatggcctagcacattgtcagactcctgggccgtagctggcgaatgttcagagcgttggacttcttgagcggcctatggatccctttttggtctgctttttg

SEQ ID NO: 407849 - DNA, 122 bp, Homo sapiens
aggagttcatccgctgcatccaagggtaaaccgggctcgtgtacttccggtcggcgccttcgtcatggagtgctttgccctgcccgctgctgctgtcgggtttgtactgctgctcgggagaa

SEQ ID NO: 407850 - DNA, 122 bp, Homo sapiens
gaagcggacacagttctcattcccactaggtgtcgggtttctagagaagccaatcggtgccgccgcggtcccggttctaaagtccccacgcacccaccgggactcagattctccccagacgc

SEQ ID NO: 407851 - DNA, 122 bp, Homo sapiens
aagtaagaaagtgttggctattaatttatataactcaccattctcttggtttgggcccaacgacttcaagtttcttatactgtcaactaccttctttccattgcttgtatcatatactacac

SEQ ID NO: 407852 - DNA, 122 bp, Homo sapiens
ctctacgtgccgtgggggattgagaggcatctctggccaggccaagggcaacccggatcccggatctgggtagacaacagtgggactagttttgggaattcgtttttttttttttgagacag

SEQ ID NO: 407853 - DNA, 122 bp, Homo sapiens
tcatctcggacgtccctctaaggggagtgagcgaagattccgattgcaagtcgccgctgtcgcttgtgcccgtcagcccctcgcccaaaggagacgcccccgggcggggcggggcggagcgg

SEQ ID NO: 407854 - DNA, 122 bp, Homo sapiens
agcggagcaggaggtgaggtcggcggagctgggaggaccgcgcctggcggctgcaatagccgcacctgtgcacgtgatcgcgagcggctcgggcgccagggcggagcggcgctcacctgggc

SEQ ID NO: 407855 - DNA, 122 bp, Homo sapiens
tccctgttggcctaacatcttaaaaccagaggcgggcttcctggtgccgagacgtcactccgccgcggccctccccagccctctccgcctccgcctcctcccagacccttctccgggtgcga

SEQ ID NO: 407856 - DNA, 122 bp, Homo sapiens
ttgggtaaatgagtgttagaagactcatttgggttttctaaccgtcccggtggctgcccccgacccccaacatacctgaggtctccaagtacacagtcatgtcccttcccactcacagtctc

SEQ ID NO: 407857 - DNA, 122 bp, Homo sapiens
ctgtggggacgcatgtctgcctttcctccaggacagcaccaaggcggggagtcaccaggtcgcgcggttccactccagcctttgtcagctcccctcatgcagagctctcccttctgggctca

SEQ ID NO: 407858 - DNA, 122 bp, Homo sapiens
agatgtgtgagcgcagtctctacagagcgggctatgtgggctcgcttctgaatctgcagtcgccagactctttctacttctccaacctgaggccgaatggcggccagttggccgcgcttccc

SEQ ID NO: 407859 - DNA, 122 bp, Homo sapiens
cacactatgccccagtgaatttctgattgcaaaagacatcgggcatcgggcgggggcactcggctcccatctgcagccgccccttttgtcaggggcgatcagggaggggctgggctttcctt

SEQ ID NO: 407860 - DNA, 122 bp, Homo sapiens
tccagtatggctcctcacaatgcctgcattcagccagagagaagggagaaaaggacaaggcgaggcacagccctgccctttaaagacaacgcggaaatggggcatcattacttctgcttaac

SEQ ID NO: 407861 - DNA, 122 bp, Homo sapiens
tcactttgggtctaatgttgcaaataatcgctcctgaagactaaaacatctttgttgttccgcatcccttccctccacccttcaagaacttgcattttttaacttttcaagtgcttttgatt

SEQ ID NO: 407862 - DNA, 122 bp, Homo sapiens
gccccagaggcacctctttcctgctctacatcccccttgcccacgcgtacttctcgcgcccggttccaagttggcagcctacctttcccaggcgaaacctctatccgatcccaggacctgcc

SEQ ID NO: 407863 - DNA, 122 bp, Homo sapiens
taacccattatagaccagagatgagagaaacaccctaggaacagccgagcagcatgacagcgggagactggacgctgaccccgaggagccaccacaccaaccacagctgctcgtgcccagac

SEQ ID NO: 407864 - DNA, 122 bp, Homo sapiens
aattattcaatcgtgaaagggctgaagtacaatcaggccacgccaaccttccaccagtggcgagatgcccgccaggtctacggcttaaactttgcaagtaaagaagaggcaaccacgttctc

SEQ ID NO: 407865 - DNA, 122 bp, Homo sapiens
ccaagttatcgtggacaacagcaaggacctaggacctcagctcaggcacaggcaggctcacggagggttgcgcggcgggttctcgctgtgggccccccgagtccctcaccagcccggccctg

SEQ ID NO: 407866 - DNA, 122 bp, Homo sapiens
taaaaccaaaaaaaggctctttcaagtaattttcaatccctggatcatggaaaaggccagcgatcctgatgaccagagaaaagggcgaaagctagcaaaaggatggcacctgccgagtcctg

SEQ ID NO: 407867 - DNA, 122 bp, Homo sapiens
gcagcttccaaagcactgctggagcccagcccacaaaggagagatgtaggaatcgtgagacgagtctctcaggcataagagactgagaaaactctcagaattccagacatctatgctagaag

SEQ ID NO: 407868 - DNA, 122 bp, Homo sapiens
ttttactgcttttcttgctttttccattttatacattatctattgatttcttactatggacgatgaggaattctgtcttttatgccctgtattcatacaccatttccctcccctcattccca

SEQ ID NO: 407869 - DNA, 122 bp, Homo sapiens
cccaagccaggaggaaggaattgagtgggctgggaccttaatcttggcatgtgcaggccccgggactgtgagaagtcagcctctgttgtttgagcctctggtcggcgtttgttgactgccgg

SEQ ID NO: 407870 - DNA, 122 bp, Homo sapiens
agtgtgaaacagactgtgaagcccccatgagaaatagtccacccactgggaaggcccctccgctcccaggaaactccagccagagcactccagcgtgggggctaggactcctcttttccaaa

SEQ ID NO: 407871 - DNA, 122 bp, Homo sapiens
tttgagaacctgaagctcacaaggctttgtctggtttgaggtacgttttgccctttctcccgcattcggctctgcatcgaatctgaccggccgcgcctactctcggaacggccgaggaggat

SEQ ID NO: 407872 - DNA, 122 bp, Homo sapiens
cggcacacgtgacttttgtttgcagaagtgggaaggtaccctaggcagccaatcggggagcgctgagtctctgtccagccaatgagaagccaggttgttttagcgcctcgcccctcctctcc

SEQ ID NO: 407873 - DNA, 122 bp, Homo sapiens
tgcaacattcattccatacctgggaccgtgctcacttatgggcactcccccaaccccgctcgacagcaagcttggacctttgcattggcaccaaaaggcctgcagtgttccatggcgtggtt

SEQ ID NO: 407874 - DNA, 122 bp, Homo sapiens
tggccttacgcctgcgcagaggggagacgcgagcgccgcgtggacgctgacctcggtccgcgcctgcgccttggtttcttcccggcgattggttcccatctctgagggagacgcctcacttc

SEQ ID NO: 407875 - DNA, 122 bp, Homo sapiens
tcatacagtgtgtcggggcttagaattcctccgtgaaagggatgagcaggagaaaataatcgatgcctggtcctgcttttgtcttaatttatctgaccgacccagggccagccgctgccctt

SEQ ID NO: 407876 - DNA, 122 bp, Homo sapiens
aaaattacatcttcgccaagagacttaaggagcattgtcggaactagtagaaggagcaaacggcattgggagaggaagatctgcactgacctcatggtctgttccctactcagcctcagttt

SEQ ID NO: 407877 - DNA, 122 bp, Homo sapiens
aagtaattcaggataggttgtgtgctgtccagcctgttctccattacttggctcggggaccggtgccctgcagccttggggtgagggggctgcccctggattcctgcactaggctgaggttg

SEQ ID NO: 407878 - DNA, 122 bp, Homo sapiens
ccaggattacaggcatgagccaccacaacaccaagccagtgttttgcttaaaatacgttgcgtgtgtctctcgggagacaacagtttaaaagcataaatttgaaccggcccggcgcggtggc

SEQ ID NO: 407879 - DNA, 122 bp, Homo sapiens
tgcagcccagaggaagagacgcccaggactctgcggtgggggaagaccccctccccgcgccgggaagagacgtccaggaccctgaagcagggaaagccccccaccacccagaagagacgccc

SEQ ID NO: 407880 - DNA, 122 bp, Homo sapiens
gaacagcccagaccccagtctcagccctccccgcattgcggggggtgcctcacccccctgcgataggtgccctaagagccaggggaggagaagggctgactcgtactccccgcatcgcgggg

SEQ ID NO: 407881 - DNA, 122 bp, Homo sapiens
gaggttctgggaggcggcggcggccgacgccgaggagaaggcgcgcgggccgctgtctggcgtgacgctcgcgccgcgcgctcggctccccagaatcaacaagattttcaaaatggcggttc

SEQ ID NO: 407882 - DNA, 122 bp, Homo sapiens
cccaacatcagcagtggctgccggttttttttttccctctgtctctggttggcgatggtgcgaataggaaccacccttccagccccactagagtatcagcaatagaggcggcggcggcggca

SEQ ID NO: 407883 - DNA, 122 bp, Homo sapiens
caaataatgtattcacatcagtgtctgtaaacatcgtaagaatttttataattaatgtgacgaacaggagaagcacaaaagcatatgtctgtgggtgtcaatgggtacttgcacacctgtat

SEQ ID NO: 407884 - DNA, 122 bp, Homo sapiens
ccaaccatttcccagtaaaggaggagtgggagcagggtcataggaatgggaatggagtcacggcatcttaaggacaagggaatgggtattcatcttcaggtgctcacactagtggtccagga

SEQ ID NO: 407885 - DNA, 122 bp, Homo sapiens
ggtcggcgctgggtgtggtacgcagcaaagccgggaagcgcaccttgtctcgcagctcatcgctgatggcgctgtaggtgatctgcaaggggaagggctgtggcatgagcgagtgccccgct

SEQ ID NO: 407886 - DNA, 122 bp, Homo sapiens
cgcccccagtgccagggcggaggcagtcccggctcgcaggtaattattgccagcggagcccgccggggagcgggggtgggcgcgccggcggtgggcgggcgggcgcggcggggcgcgggcat

SEQ ID NO: 407887 - DNA, 122 bp, Homo sapiens
gtagttcaaaaaacgatccatgtgaggctgcctcccggtttggggggctttgttatccttcgactgtggcttggtgtggtttttattttgaattacacgggagggaaactgcgatcttttca

SEQ ID NO: 407888 - DNA, 122 bp, Homo sapiens
ggccgcctccctgcgcctggaatcccgaaggagcctgcgccccgtgtgtcccgcaggtcacggccctgcagctgggagcccggcttgactgacagttcccgccggcagcagcgctctgtggg

SEQ ID NO: 407889 - DNA, 122 bp, Homo sapiens
gggccgaggggagggggcgtacgcgtaggagaacgcggtggcaaaccattcctggaaacgcgtgatcattcccagttttgccctgcgagcctacaaacccggtaaaagaataagagacctcc

SEQ ID NO: 407890 - DNA, 122 bp, Homo sapiens
tccagggaggccgcgctctcgccccaaggcaaccagaagcccacgtgccaggagaggcatcggaaccaacaactcgggtccgttttcccgcgccagatgggattcgtttgctgtggacttcc

SEQ ID NO: 407891 - DNA, 122 bp, Homo sapiens
tctgagttcctccctatttatggcatccactcaggtgaggctgggggcgtccttaccttgcgctttggctgctcaggacaaacgccctgccattcgtcccttctctctgtccggacgccctc

SEQ ID NO: 407892 - DNA, 122 bp, Homo sapiens
aaccgctcgtccagatggtgaggtcagcacggaaattctcagcccccgctggaggaggcgcgggcagctcccgccggactggaacaagagccgaccccaggacggatggctgcagccagctc

SEQ ID NO: 407893 - DNA, 122 bp, Homo sapiens
aaatactggacaagcgaaggatatccggaagcttctacagccgtctgtcctgtggaactgcgcgtcattttgttggttgcctgtgcgtcttgtgttgtttctgtttcatgaccattcgctta

SEQ ID NO: 407894 - DNA, 122 bp, Homo sapiens
ttgtatatcttattcacttgtcaagtaattgatcaaagacttcatacttgcatatggccccgtaaaagcataaaaataacagtgagccactaagctaatttgtgctttttgagatttagttt

SEQ ID NO: 407895 - DNA, 122 bp, Homo sapiens
tctccttccaacctcagcctaaagcaaatttctcatttgaaatccatagggcagaaatgccgattatggcacctccagagagtagaaaaatattcttcctccactccatgactcatcctttg

SEQ ID NO: 407896 - DNA, 122 bp, Homo sapiens
gaggccgggcgcggaacctaccggtgtgtgcataggacacgggcaccttccagatgctgacgtgcgctgacacggacgcgaagtacttgccgaaggcgagcggtagcacgtagcgcgggtag

SEQ ID NO: 407897 - DNA, 122 bp, Homo sapiens
ccaggcactgtcttaaacacacacactcctcccagacagaattaactaattacatagacacgattctgtgcactggcttgtacatgcctcggtctcaagaaaccgtgtcataaagaacaatg

SEQ ID NO: 407898 - DNA, 122 bp, Homo sapiens
ctcagataagctatcaatagcacctttattaactaaggttcagtttgttactgtgaagtacgatactttattaagactatgccttcctgaaagctgtcaccattacactttagaggtggcag

SEQ ID NO: 407899 - DNA, 122 bp, Homo sapiens
gtccccagggggatcgccgcggtcgccacagccctgcccatcttctggggcctgcggggacgacatctagttcaatgctgcaggccctgcacacccgctccgcggaagacgcggagacatac

SEQ ID NO: 407900 - DNA, 122 bp, Homo sapiens
cagagtcggggtctccctcccctccctcctgacccgccctggcccaccctgcgagatggacgggtctttatttttgggtcacatttgaggtaatgacggggcttcctttgctcagccccctt

SEQ ID NO: 407901 - DNA, 122 bp, Homo sapiens
gtgtttgtgtgtaagagcgcgtgtgtgtctaatgaagtttgggagtcgcgcgcaggggcgcgtagggtgcgagacccggaggtccccatcccctgtcctctccgcggtcgccgcatccgggg

SEQ ID NO: 407902 - DNA, 122 bp, Homo sapiens
actccaagctcagcacagacttggtatcgccagcacctgaacttggagtctaacccccagcggaaacgctcccagctcattctccttcacacagacagaggccgatgcaggcaaggggtctt

SEQ ID NO: 407903 - DNA, 122 bp, Homo sapiens
gcttctctcaaagcccaagagtcacaaaagtggtttcatttaataaatatttgctttgctcggtgttttgatcattttcaaaaccgagtgtggcgtggcgcaagcaaagcccgccgtggcgg

SEQ ID NO: 407904 - DNA, 122 bp, Homo sapiens
tgctccttggacgcgatgctcatttccttcccacatccccgggtgctgggaccagggctgcgtggtccctgaacgcgatgttcatttcctgcccgcatctccgggtgctgggaccagggctg

SEQ ID NO: 407905 - DNA, 122 bp, Homo sapiens
gaatcatcgtggtgcacggctctccctttgcttcttcggttgcagtcctcttgcttcttgcgcgtgcgtgtagcgcttttgcaaagccgcggaggtgaagtgaacttagaggttgtggggcc

SEQ ID NO: 407906 - DNA, 122 bp, Homo sapiens
gtgggtgcaggaagagaagcgctcctcgtcagggggcagggacacagcagaaacccagggcgcttctcacacccagcagcctggacctgagacggctggggggaccccgaggacagataggg

SEQ ID NO: 407907 - DNA, 122 bp, Homo sapiens
cagccgagaagcgctctggagggctccatggagcggccgatccatagggtgcggggccgccgccgcccgcaggagccgccgccgcctattgttcatgcgcctccgcagagctgggaggaccc

SEQ ID NO: 407908 - DNA, 122 bp, Homo sapiens
ccagcacagggcctagggcatggggactggccctcttggctgaaacgactccgaccctctcggaagatgcccgcgcggcctctgcccccggggagaggggactgtgcccgatgctcaggcgc

SEQ ID NO: 407909 - DNA, 122 bp, Homo sapiens
aaacactgttcagaaaccagagcgaacagggcgaaggtcgagaacgaccaaggcaatccccggggcctctgggccaggctggggaactggggcagggccggagggaccctcctgggtgaggg

SEQ ID NO: 407910 - DNA, 122 bp, Homo sapiens
attctttaggtcagagtccgctcagattgtctcctgatgtcattccaagtgtctgatggccgtctatggcaactgggttgggcaaaagcctgctgggaaggggtagcccacagaatgcctaa

SEQ ID NO: 407911 - DNA, 122 bp, Homo sapiens
gtaaaggtaggaactagcatctttattgaatttacaatgcccttcccatatacattatttcgggccatcttctaaacagcaagtatgagttaggtggaagcaacgtgtatttgttcttggta

SEQ ID NO: 407912 - DNA, 122 bp, Homo sapiens
tcttccagggaagaatcctgagcagcacctgaagccattccctctgttctacacagatagcgttcacacccttgcattgtcaggctaacaaaattgtcacataacccattccacagcaactc

SEQ ID NO: 407913 - DNA, 122 bp, Homo sapiens
agtttttaaagggtaacctgaaaagcaacgacaattagttattttttatttattcagaaacgaggaaatacagactccaaataagtggagtcagtgctcccagttactttcttttgaattca

SEQ ID NO: 407914 - DNA, 122 bp, Homo sapiens
cggcgactctggtctcgcagaccccaggcctgtgagggtcgctcactgcggtagaggctgcgtggagtcagtggagggagcccctcagcagggagacaaggacacagcggttcccatggcct

SEQ ID NO: 407915 - DNA, 122 bp, Homo sapiens
taagaaaacggagactgctcggggcaagctagcggggccgaggcccaggacgaggccgtacgcgtgtgcctgcgtggccgcctcttttgcagtgaccaccaacaacgacagaggcggcccgc

SEQ ID NO: 407916 - DNA, 122 bp, Homo sapiens
gacgcagccgcagtacgtggccttcagcttcgtctacatccttacgggcctcacggtcatcggcgccttcctcaacctcgtggtgctgcgcttcatgaccatgaacgccgaggacgagaagc

SEQ ID NO: 407917 - DNA, 122 bp, Homo sapiens
ggtgcccgggctatggaggaaagaacacagacagtcttcctgaggtggggcagacaaaaccggtgaaagtgaaggagaattaaggcgctacacggtggtcattcaaaaagcctcagaattcc

SEQ ID NO: 407918 - DNA, 122 bp, Homo sapiens
attttctctccattgatggcagccatgtatttccctttctttgtggacttagggacctggcgggagtttttgccaggtggtttttcaatccccttgttgttacctttgagggattttttcct

SEQ ID NO: 407919 - DNA, 122 bp, Homo sapiens
attcgcccacctcggcctcccaaagtcctggaactacaggcgtgagccaccgcgcccacccggccagtatgatagtttttaggaggaaccctcaggagagtgattgtttctcccgctgtgtt

SEQ ID NO: 407920 - DNA, 122 bp, Homo sapiens
gatgatgcttatgatgcttctggtcccaaaacaaagcattatggttctatgaggatctcccgaagaaaagatgtcaggaaaggtgcagagaccctcccccacacaccacattgttgttccat

SEQ ID NO: 407921 - DNA, 122 bp, Homo sapiens
aaggggaagctgctgcgaagcgtgtgggaaactacccgctggcgcgcgcccaggcgtccccgagacccccagttccaggcttggtgccagccaggcccccagcaagccccttaacttccctt

SEQ ID NO: 407922 - DNA, 122 bp, Homo sapiens
catcacctcaggaaaccctgacgctttctacaacatggatgaaccttgaggatattatagcgagtgaagagtgaagcaaagagtcacaaaaacacaaatgctgcatgacccatgcatatggg

SEQ ID NO: 407923 - DNA, 122 bp, Homo sapiens
cccgctcgcgcggcctctcgggtagagtagtccggttccccatctgggagcgcgatggggcgcgcaccgcgaactacccgtcccatggcgcaccgcgcgcagagcgtcctccaccgccctcc

SEQ ID NO: 407924 - DNA, 122 bp, Homo sapiens
cccagctccgccagccctcaggtgcttaatgactgtatttacaggcatctagcgcagccacgcagccccggagctgcatcacctctggctatgcagtctttcacttatcaggagggttaatg

SEQ ID NO: 407925 - DNA, 122 bp, Homo sapiens
agagctcagagagtttcttgcatatggccctgtgatggcggccatggccctgcatagacacgagctggaatctgcaggtggcagccaggacgctgcgtgtgtcgagtgcacagtgtggcttg

SEQ ID NO: 407926 - DNA, 122 bp, Homo sapiens
tgcctggctgcaagtgagaaacaaacccaaggtgcatacttaaaagtcatgccagttctccggacctttttcgcagtcttcaagctctgagagcatgttaatggtgacatcaatgttttcaa

SEQ ID NO: 407927 - DNA, 122 bp, Homo sapiens
ggagagtgaccctcggacccggctgccgccgtcgccgccatcttccggccgtcccagccccgccccgcggagaaacctggccaggttcctgttagaatcctgccaggtgttaacttgtttta

SEQ ID NO: 407928 - DNA, 122 bp, Homo sapiens
gtgttgagtcccaatttagccaattaattggggtttagttttgatatggataagggagaccggcttcattcatgatgcacacacagttttgccagtaaggaaaaaaaacgcaacctgaatgt

SEQ ID NO: 407929 - DNA, 122 bp, Homo sapiens
tgtgtgtgtgtgtgtgtgtgtgtgtgtgcgcgcgcgcgcccgcgcgcccgtgcgcgcgcgcgactagtgtgcgtctccaaagtggatctcactcagagctgggaagcacaggaggaaaagac

SEQ ID NO: 407930 - DNA, 122 bp, Homo sapiens
gcagcatcagaacgtgatgtaactctgtgtattcatgtatttcaaacttgtgaagaggaccggtgccatatctgtgccgtgacttaaaagcacgacctgtttcctcaacaagctggtttcct

SEQ ID NO: 407931 - DNA, 122 bp, Homo sapiens
aagagggggaatatattagttagggtatagagtaggtatagctgctgtaacaaagagttacgagacatgaaagtctgagcagtctaggtagggaagacattcggtaatccagaatttgtcca

SEQ ID NO: 407932 - DNA, 122 bp, Homo sapiens
agtcagaaatagggagggtaattaattagactgtaagctccaggaaagcaggggcggcagcgcagcctatgctcaaagggcatttgatgattaggtaactgcttgaatcaacaacttctgac

SEQ ID NO: 407933 - DNA, 122 bp, Homo sapiens
caccagctgcttctagcctcaggccgtgcccatgtgctctggaccacggacatctacgggcgactggctgcggactacttcagcctatgatgaagtagctctgggtgagacacaggccgccc

SEQ ID NO: 407934 - DNA, 122 bp, Homo sapiens
ttgtaggaaaaagcaaatgtgaaaacactaagtgtcgttcacatcgaatggtgataatgtcgctcagcaacctgtaatcttaacatccaggttatacagatggtcgttactgaactattctg

SEQ ID NO: 407935 - DNA, 122 bp, Homo sapiens
accctagaggaccaccggtcacttgcgcggccacccggtgtggctgcttctctgtcaccccgtcagcctccttgcaggtgaccttgcctttgattttccggtgaagcctccttttctctagt

SEQ ID NO: 407936 - DNA, 122 bp, Homo sapiens
cctttcagggctatcctctgggcgctcaagatttaggattttgaaggaagaaggtgaaagcgggggaagacgattttaaaagaagggctgggttattaaattgaaaagattaatcccggagc

SEQ ID NO: 407937 - DNA, 122 bp, Homo sapiens
ttttcccagtgagtcataattgccctggtcctgacacttgtcactagaacaaggcaaaatcggtgtaatcaccagagcaattgcttcaggaatacattcttttagtgatttggctggaggaa

SEQ ID NO: 407938 - DNA, 122 bp, Homo sapiens
gcagatgtagccacgcttctctgagttaaggactcggcgtccgcaggagagccaaggcctcgctgctgggggtcagagcctctcagagaacaagaggcaagtccaagttctgcctccaccac

SEQ ID NO: 407939 - DNA, 122 bp, Homo sapiens
gcacccccagaaaattcccttccagtctgtccccacctctagagatgactatttgatttccggcaccacagattaatatgactgtccttcaaccgtcacatggtgtttttgtcaaacaacaa

SEQ ID NO: 407940 - DNA, 122 bp, Homo sapiens
tggcttggaaaccatcacccgcacacactgctgctactttatgttggtgtgtgcagctggcgtctaaagacttcctgcaggtagtcttcctgcagcggctgcccacctggccctgctgtgca

SEQ ID NO: 407941 - DNA, 122 bp, Homo sapiens
tctcccagtcactcctggggttgttagtaggcttcagcacgcctgaaggaccccgtcctacggagactcctagccaagggaaaagcagaaaacacaagaactaattccactcttatgtgtga

SEQ ID NO: 407942 - DNA, 122 bp, Homo sapiens
atataattaatgaaaggttcagcgtagttgaaccctcattaaaagtgtttttacggcaggcgcggtggctcacgcctgtaatcccagcacttttggaggccgaggtgggtggatcacaaggt

SEQ ID NO: 407943 - DNA, 122 bp, Homo sapiens
gcagtgtctttaggcagctgtgctggcggatgagggcctcgtactcggccgattgccgctcgtgcagcgtgcccaggtgctcgtggtcctgcagcagggcctcgtaggccgctgtaagttgc

SEQ ID NO: 407944 - DNA, 122 bp, Homo sapiens
gtcgctctcagtttgtgggggaagcgccgggactgaggtacatggttaacacaggctgtgcgtgaaggggcttttgacttttcccccggctccggcctctcgcgtctctctcctagggctgc

SEQ ID NO: 407945 - DNA, 122 bp, Homo sapiens
cctccccgcgcgctccccggcccggcctcgccccctccccggcatggcgggagcgcgtcgcgcgtgcccgccgctcgggctgactcaggcttcagctgctgcatttgtgagtcatcgcgcgc

SEQ ID NO: 407946 - DNA, 122 bp, Homo sapiens
gaggaaactgaagccacagaaaaagatgtttgctgatgggtcagagataaccgatgcattcgtcgcagaatctggccaggatttcttaggttaagccccactcatttgtataagaaagaata

SEQ ID NO: 407947 - DNA, 122 bp, Homo sapiens
cctgctatgactcacaatgcctccaggccaggccaccccaggacaagaaggggtgctgaccgctgagctgtcagatagactctgggctctcccctgcatgcattcagtgcatcattgagcac

SEQ ID NO: 407948 - DNA, 122 bp, Homo sapiens
cggcgcagaccggaagcggaaccggtgggggcggggcttgccgtagcggacgttctggagcgaggcgccggccccttgggccccctcaagccgcggtgtactccagcggccccctgtggcct

SEQ ID NO: 407949 - DNA, 122 bp, Homo sapiens
ggcatgagctaccatgtccggctcagaaattgacattgtatgtcactgttttctcccccccgcccccaagacggagtcttgctctgttgcccaggatggagtgcagtggtgtgatctcggct

SEQ ID NO: 407950 - DNA, 122 bp, Homo sapiens
cccggcggccagcagaagatgtggaccgatgctgcagggcccgtgggcacccaggagggtcgacaacccaggccagcggggacgggaggtgggggcgtgagagaacgctgaggcctgcaggc

SEQ ID NO: 407951 - DNA, 122 bp, Homo sapiens
tcccagagactcataaactgagctttcatcatggctgtagcttcatggtcagaacttgaacggtttcgtagaaaggagtctagaagtaaaaggtccttaaccttagaaattaagaattaatt

SEQ ID NO: 407952 - DNA, 122 bp, Homo sapiens
gcagcaggtgccttccggggagtcggcgatcttggaccgagtagctgacagcatgacgttcggtgccctccttccctgtgaggaatgctcaggtcagctggtcttcaagagcgacacttatt

SEQ ID NO: 407953 - DNA, 122 bp, Homo sapiens
tctccagccggcgggcactcacatcatctctgccatcaccgccgccgccgatgcccttcacgaccaccgccgccgccaccgccagctctcggcccctctgctgcagccgccgcagccgccgc

SEQ ID NO: 407954 - DNA, 122 bp, Homo sapiens
tctctgagcttagctgacatgagcattggcagaaatgcttctcgtaatctggataacttacgttagaattagtaagcagttatttttcatagcctgaaacgtcctgttgtgatatttcagct

SEQ ID NO: 407955 - DNA, 122 bp, Homo sapiens
ttctgagcagatttaacaaaaatgatcttgcctaattaaaaggcttcactgggtagtgttcgtcagagagcccggctgctggctgttatttcctgtgtcaaacttcctcttacccctcaagt

SEQ ID NO: 407956 - DNA, 122 bp, Homo sapiens
acaaagcgggcttttccacctagagtcccagcgctctcacctgcgcaccagccgtcgcgccgccccaggccgccaccgccagaggccccagaaacagatctcaagcagccgctgctgccgcg

SEQ ID NO: 407957 - DNA, 122 bp, Homo sapiens
gcaggatgtgcagttttgttacataggtaaacgtgtggcatggtggtttacagcacagatcgtcaggtattaagcccagacctccacaggtgtagagtgggtccacgtgttctcattattca

SEQ ID NO: 407958 - DNA, 122 bp, Homo sapiens
gccttttttttttttttttttaagcctgccgggacatttagataagttgagcctccaacccgtggccccaagacatcaaaaggcgcggggtccagtaatgctggaggcagccatcactaagc

SEQ ID NO: 407959 - DNA, 122 bp, Homo sapiens
attcaggaaagggtgatccactgagtgtccagggtcaccaaaatgcttgcagggttacaccgtctctgggggacccatgcgaggcttcatgaggccggggaagaaggccagtttcttcttaa

SEQ ID NO: 407960 - DNA, 122 bp, Homo sapiens
tcaggagaaattcagattttggagtcacaatgtttcagtgataaattccagggtgtgggacgtagattaagggtgttaagttcgtggccactgaagttacccatgatggtgttacataaaat

SEQ ID NO: 407961 - DNA, 122 bp, Homo sapiens
gaatgagttggtttatggggaaaagagaagagaatctaaaaaataaacaaatccctaacacgtggtatgggtgaaccgtatgatatgctttgccattgtgaaactttccttaagcctttaat

SEQ ID NO: 407962 - DNA, 122 bp, Homo sapiens
aacacataaatatttggttaaaacacctttaatgatagagggaaagacactaatatctcccgtctgttcttgacattttactaggttaggaagctctggagcctacagcttgaggagaagcc

SEQ ID NO: 407963 - DNA, 122 bp, Homo sapiens
tggacaatgacctgggcagctcggcgctgcggacacttttagctgagggcgcgggcgggtcggctcctccgcggctcctcggccccacctgcgcggagagggcgggatgccagagccaggtg

SEQ ID NO: 407964 - DNA, 122 bp, Homo sapiens
agaaaatgcttcatataaaagttggcatttgagctagatcttaaaggtcagatgagatttcgatctgtgaagatgggaagggcattttaagtaaaaagaaaagcataagaaagggtgtgttg

SEQ ID NO: 407965 - DNA, 122 bp, Homo sapiens
atgctggattcatcaatcccttaagatggaaagtcttttcctgtgttgtgatctccacctcgccaactatggccacagtcagttcctttggtagcacaggaggtctttaccttttttccagg

SEQ ID NO: 407966 - DNA, 122 bp, Homo sapiens
tcctcctggctgttctgactgagcttcacccctttctgccagtggataacttgccagcggcgtgctagttctcgttctcgcgttcctccagcagtataaagctctgaacgaacagttgtctc

SEQ ID NO: 407967 - DNA, 122 bp, Homo sapiens
agctcttaggcaaacacatagacacttgttctctgcctctggaattacaaatatgttactcggaaagcagcaatactcttttggacttgtttgacttcactttctttacctgtctttaagaa

SEQ ID NO: 407968 - DNA, 122 bp, Homo sapiens
ggctgggccccggcgcagtggcctagcctggaccgcaaggccgaagccgcctccgggccgcgtcccggtgtttcgggttgtgtaaccttggccaaaatgcttaagcttttttcctggctgcc

SEQ ID NO: 407969 - DNA, 122 bp, Homo sapiens
agtgggggccccaagcccagctggcaggcctggtgactcaacaatctgggatggggagcacggtaccctcgcctccccggcaggcaataccccataggggacccattcccgcagctgtccac

SEQ ID NO: 407970 - DNA, 122 bp, Homo sapiens
gcccctgcggcttaaaaccccgcgccgaatcaccccgactcttacctgtctgtacctcaacgttgtctcctgtggccaagctagtctcccgggtatcactcgggtccgctccgtcccgcccc

SEQ ID NO: 407971 - DNA, 122 bp, Homo sapiens
attaataacgccgacagggtaagtaacggagccgcgctcctcggggtggtcaccgggctgcgtggtcctcggccggcctcctgcatccgctgcccctgtgcgctccgggccggatgcgcaag

SEQ ID NO: 407972 - DNA, 122 bp, Homo sapiens
actctttgcacagctccctctccgagtccacaggactcatcacaactcgcgagacaccaccgcctccaaggtctgtctgtgcctacacttggcgactatgacaaccgttaagcgatgcaagg

SEQ ID NO: 407973 - DNA, 122 bp, Homo sapiens
tgtggtaatttacagattttgttaaacaagaaattactgccatctgtcagaaaattgacacgataattgccatctctcatgtgaatgtgcccctttaacacaacgtcattgtgcactataaa

SEQ ID NO: 407974 - DNA, 122 bp, Homo sapiens
tgcagtgagtacgaatcgtggctttcccacagtcaggaaaggcaagggagaccgacgacccgcttctctaggagtaagtaaagattaaaggtagttcgcggtatagcctaggcagggattaa

SEQ ID NO: 407975 - DNA, 122 bp, Homo sapiens
tcgtggtattcaggaactatcgtaaattggccaaaatcttgttttccagtttcttcctttcgctttttattgcctcaagttgcctgtcttccccgctcttatttttcttctagctttatgat

SEQ ID NO: 407976 - DNA, 122 bp, Homo sapiens
tgccgaggaccggcgagctaacagcagcttctgggatggtgcaaccctattctcccccggcggatatctcccgggcggctgatggcgccttaggccacgtggccccgccccgtccgggcgac

SEQ ID NO: 407977 - DNA, 122 bp, Homo sapiens
gcggtgctcaccatctcctgtcggagccgcaccttgggctgcgaggctgcggtgtcttcccgcttccgccagcctcgctccaaaggcagcatcaggtggctgggctcaagctcactgcggtc

SEQ ID NO: 407978 - DNA, 122 bp, Homo sapiens
acacggggccccatggcccgctgcgccctctccgccggttggggagagaagctcctggagcggccagatacctgttggctcctgagcagcatcgcccagtgcagcctccgtcaggaaaagca

SEQ ID NO: 407979 - DNA, 122 bp, Homo sapiens
gggcacgggacccccatgatcacataggtcacttctactaagtggcaggccaagccaccccggggcactgggctcacctgggtgtgggcaatgacacggatgacttggcagtacttcttcat

SEQ ID NO: 407980 - DNA, 122 bp, Homo sapiens
aggtctccctgctgtccctcatatctgtggaacttctcgactcataaagtttccatgtgccgttcatctttgtccagagaacccccatcattcttcaggaagttcctactaaaatgccatga

SEQ ID NO: 407981 - DNA, 122 bp, Homo sapiens
tgtcggtttcttttgtgtgctgtgtgtgtccggtttggacatcctctgcccctccgagggcgtgaagttgccccctctgtgtcgctcagatgccttattgtttttctcttaacatttaattc

SEQ ID NO: 407982 - DNA, 122 bp, Homo sapiens
aggccgtgctcctcctcctcctcctggaaagggtagaaagagtcgtcccaggcgatgctgcgggtgtcaggcagactggagaagtcctggaactctttgtagtcagcgcggtcctcctcgac

SEQ ID NO: 407983 - DNA, 122 bp, Homo sapiens
tactcagcctcggttcagctcctcactcccctcgagccccgaaccttggctgccctcactcgagccagcagatgccttcctgagaacaggcgcaccagggccaaccacgcttggctctgacg

SEQ ID NO: 407984 - DNA, 122 bp, Homo sapiens
tttaaaggcgagtgacaccatagcaaccaagccccaataggaaacagccacaaggcccttcgctgggcccgcccaccggccgcctaggcgcgagggcggggaatgaggctgtgtctccgggg

SEQ ID NO: 407985 - DNA, 122 bp, Homo sapiens
ctgttgatgatgggcacccgagtcatgagttacagtcagagcccccaacgttggcagggacgaggacgggcctggagacacagcgtcagcctcagcgcttcctcagcgacgcccctgggagg

SEQ ID NO: 407986 - DNA, 122 bp, Homo sapiens
tttgccgccaccgccgcttaaagtgcccagggtggagaaggcttttccaggacggatctccgtcgtagcttcgcggccctgggacttcctcctgctggttcactctagtctctcccacctcg

SEQ ID NO: 407987 - DNA, 122 bp, Homo sapiens
tctgacaggtggctccgcttgtcttcgctgctgcaccagggggcggggactccacctttgcggtcccgagtgaagctactcaaccttttaaaaaaaacatccacggacgggacgcgatggct

SEQ ID NO: 407988 - DNA, 122 bp, Homo sapiens
gactgcctgccatgtcgccaccggctgctgacctcattaggcctcatgtcatggaggagccggcgattaaaggactctaagaaccagagctaagtggctgcaaagatactgacagcctccct

SEQ ID NO: 407989 - DNA, 122 bp, Homo sapiens
cggtggcggcgctgccgcctgaagtgcgggcgcagctggcggagctggagctggagctctcggagggtaggagccgggccggggagagggcgcccggggccctgcggatcgcggcgacttgg

SEQ ID NO: 407990 - DNA, 122 bp, Homo sapiens
ccgccagcagcgcagccagcagcagctgcaggagcgaagcggcgttccaggatgaggagacggacgagcggcgagcgccccacatggcaccaccctgggcgcggacagcgcgtctccagaga

SEQ ID NO: 407991 - DNA, 122 bp, Homo sapiens
atagcaacacaaaacagagtaagacatcttccctgcgctgctcccgccaccccttctccccggagagcagcttctcggaaaatcacctgcacctgaatctttggctcagcatctgctctgaa

SEQ ID NO: 407992 - DNA, 122 bp, Homo sapiens
aaagccagctcctctcctttcggcttccccacggtgcctttcgggatttgtagtcagacgcgcttcagccggctctaaggagagcaaaggcaagactccaattcccagcatcccccgcgccc

SEQ ID NO: 407993 - DNA, 122 bp, Homo sapiens
ggaatgcagtgaggattaaactagctaatccacggaaagcgcttaaaacggtgcctggctcgtccctggcccccacgcgcctcggggctgatattcaactgcgcattagcaaggccgtgggc

SEQ ID NO: 407994 - DNA, 122 bp, Homo sapiens
gccggggctctgtgggggccgggactctgcagggaccggggtcgtggctactttagagcacgttttccgagccccactgaaccccaacacccagcctagcagcaaaagtgaagcttccagga

SEQ ID NO: 407995 - DNA, 122 bp, Homo sapiens
agatggacaaagccgttctcttccgctgtttagggctgagtcattgagcaagtgattacacgtggagtaaacgctgggggtaagcaggtgcgaagggacacgaatccagaatgcataaaacc

SEQ ID NO: 407996 - DNA, 122 bp, Homo sapiens
tcaggacttaccactaataaattcagcttggataccaattcttcataagcactgatatcacgtacataatgccctatgtcaatgaagatctcaaacaagtctgtggggaaaagtctacagag

SEQ ID NO: 407997 - DNA, 122 bp, Homo sapiens
gcttggtccactgcgtcccttcgtggtgatgggggcagaagacctgggcagcctgtgtcccgagcccactccccacatctcagtggctgaggacagagtccttggagggtccttgcgtattt

SEQ ID NO: 407998 - DNA, 122 bp, Homo sapiens
gaatgtggactttagttactgaacgcgtgtgatggcccgcctgtggtaagaggtgcgcctcgccagcataacgtgttaattacaggggacgctggcggtgggggaggggctctgcactttct

SEQ ID NO: 407999 - DNA, 122 bp, Homo sapiens
caccccgccaccgccaccagacaccaccatcgctgtgtagtgtgggtttttattcgtgttcgtgtgtgtgtgtggacacattttccttttcggttgctctgtcctttggttcgtgctcgcct

SEQ ID NO: 408000 - DNA, 122 bp, Homo sapiens
cgccgcgcccggcagctacagccactctgacgtgcacggcggcactgcgtttgctaggcgcgactgccacaagggaagtgcccgggtgtgctggttgccgtggcctctatttctaaagtatt

SEQ ID NO: 408001 - DNA, 122 bp, Homo sapiens
acggggagtcgctcggtggcaggctgggtgggggctcccgggccctctggggtcctctagcgaggcccccctcgccgtgcactccggagtcgccgtgctgggccccaggaccccagcccttc

SEQ ID NO: 408002 - DNA, 122 bp, Homo sapiens
cgaacggcaagtcctcctcccggaaaaggcgcctgcggttgagaagggtcttgagcagcgcggaggatcggattccgggctcctggcctcttcccggtccgcgggcacctcggctacctttc

SEQ ID NO: 408003 - DNA, 122 bp, Homo sapiens
cgggctcgcgtggccttctgggaactgtagtttccagctggcagaacggagcgccctgggcggagtcacgttgggggcgcccaggccacgccaacgcgggcgcagggctgagtatgcgggaa

SEQ ID NO: 408004 - DNA, 122 bp, Homo sapiens
ggcgaccctcgcctttattcggagaagcccacttccacccacagagttggggtagtcctccgaaatgcatttttgttttgccgtttgttttccaaccccctttcactctccccaaagcttca

SEQ ID NO: 408005 - DNA, 122 bp, Homo sapiens
cacccagttctcttccactgcattcccccggcgcgtgtgggaccgaggtggacatggatccgcaggtgagtaggggcggcgcaggtgtcctgccctggggatggggacgaaggctgaccgct

SEQ ID NO: 408006 - DNA, 122 bp, Homo sapiens
gaaagtggtttgtgaactataaagcccttgtcagtcttcagtttaatgagactgcaaacccgcccacccccatagtcttccctagttctagtcccttcccttgcctgagcttcatttagagt

SEQ ID NO: 408007 - DNA, 122 bp, Homo sapiens
accgatatggaatcaatgtttacagccggtgtgtacttaatcaacccccttccccgactgcgaccactcagatgcgccttcccgggccccacaccccaaaacccctgagccctttcgtccac

SEQ ID NO: 408008 - DNA, 122 bp, Homo sapiens
ggaaggagccagggatattaagtgcttgtcagtgcagcctccgtcccttttccgaggccccgctcccttcctggctccttacccgcaggcgtgcagcccctggaaacactcctacgtgtttg

SEQ ID NO: 408009 - DNA, 122 bp, Homo sapiens
ccaggagcttcgccacctaccagggtccgagaccttaactcggttccggaaagggcgtcccgggtgacccaagtttggggccacaagcagctccaccggctctccgcgttggtctctcccct

SEQ ID NO: 408010 - DNA, 122 bp, Homo sapiens
aggctggactacaggcgcccaccatcacgccccgctaattttttatatttttagtagagacggggtttcgccctgttagcctgtattccgcctgcctctgcctcctaaagtgttgggattac

SEQ ID NO: 408011 - DNA, 122 bp, Homo sapiens
cgcagatggtctcatgcggacacgacgcgagacctgaatccacgatcagagggtgaggtccgggagggccctggcggctttgctgactgttacaaggtggcccttcctgccccccgtcggct

SEQ ID NO: 408012 - DNA, 122 bp, Homo sapiens
gctcttcccacttcgcagcacttgccacataagtaagatggaggtctcacagagcagttgcgagtgcactgtggaggcaggtggctttgagtttggatttcagctgtgctctgactagccct

SEQ ID NO: 408013 - DNA, 122 bp, Homo sapiens
ccctcctgctcaccctgcttatctcaaatcaggctagcaatctcgatggtgttctctgcacgaatgtgagggggccatgggggttgcttaatttctgtggaaatgagaaggatttctaattg

SEQ ID NO: 408014 - DNA, 122 bp, Homo sapiens
ccccgatgtcttgcttccctcggcctcccgggacccccccgctacccccaccggggtctccgccaccgggaggctcgccagggcccccaggctccccactcaccaatcccaggcccccccgg

SEQ ID NO: 408015 - DNA, 122 bp, Homo sapiens
ttaggattcttaaagaaatcctgaaaatacgtcattatctctctttgcaattggactttacggcaaataactagtattcccaaacctggtctataggtcccttcttgagctctttttgttat

SEQ ID NO: 408016 - DNA, 122 bp, Homo sapiens
ctagctggccggcacctgttccaaacaacctgttgcgctgacatcgctttggagaggcgccggcgctttgctggtggaggcgggttgtgtggaggccccaagccttcaggaaatagtttagg

SEQ ID NO: 408017 - DNA, 122 bp, Homo sapiens
cacagcccttatcttctgtgccatattttgggcaacttcgtttatcattgattgaccgtacgcagtgatcaggccttgttctagacactgaagactctgagcatttttgggcccattttgta

SEQ ID NO: 408018 - DNA, 122 bp, Homo sapiens
gagttgcagcggctgaaatacggctgcaggttggggcagtcagtggtggtttcgtagctgcggccctggaaggccctgtcctcatagaaggtgatctgcaaaggaagaatcgttccgaatta

SEQ ID NO: 408019 - DNA, 122 bp, Homo sapiens
ctctggctctctggctccggctctctggctctcgctctcgctctcactctcgctctagcccgctcgggtcctctctggcctactcgtgctcgctctggctcgctttctctctctctctctcg

SEQ ID NO: 408020 - DNA, 122 bp, Homo sapiens
aaggcatgagctttctctgggtcagagacaccaggggcttgaaaggtcctggaatttcttcggcctatgcctttttagttattatgagggcataacagtgactgtgatttttatcagtctag

SEQ ID NO: 408021 - DNA, 122 bp, Homo sapiens
ggaagggcaaattgatgtacagttgtccctcagtatctgttgggactggttccaggaccccgtggataccgaaaccctcagatgctcaagtcccttatatcaaatggtgtagaatttacatg

SEQ ID NO: 408022 - DNA, 122 bp, Homo sapiens
agtgagggagaaagtctagggcttcaactggaaagcggcgcccttgacaacaccaaggatcggtttgtatttatttactcagagcaggagacaactgctgccctaaaagctcctcttatctc

SEQ ID NO: 408023 - DNA, 122 bp, Homo sapiens
cggcgcctagccctctgggaattgtgttctgggtcaggcttgactgactctgagggaggccggcagtcgtgaatgaactacgactcccagcagcccccgttgccgccgctgccgtacgctgg

SEQ ID NO: 408024 - DNA, 122 bp, Homo sapiens
ctggggcagcgctcgggcctccgctcgtggtcgctgtcaggaggcgctggggtgatggggcgagctggagacgcggcctggagcccacgacctgggcttctcgccctgccctactgcttgct

SEQ ID NO: 408025 - DNA, 122 bp, Homo sapiens
aaatgtccctgctttgacctcggctgggtcgtccgtcctgcctggctccaagctctgtgccggggaagagctccgaatcctctgcctggaaagggaataattcaccgccaggctctggaagc

SEQ ID NO: 408026 - DNA, 122 bp, Homo sapiens
ctgagcaactcaggggctggggggccatagccaagcaggcggacgctggggagggatgctcgatgccagggggttcttgccaagctggacgtgtattcattaacccctcccaccccattcta

SEQ ID NO: 408027 - DNA, 122 bp, Homo sapiens
ggccgggcccgtgctgattccgcctcctagagagggccacttgctgtcctggactcgcgccgtgatgggcagtctgaggaaacattatccttgagccgggggagcccatcccttttctttct

SEQ ID NO: 408028 - DNA, 122 bp, Homo sapiens
cgtcgtgtcactaaacctctctgaacctctgtttgtactcagggcaaatggaggtgcctacgcctgccttccaagctgctgggagcttaaccctgggttacaagcctttcagcaagagccca

SEQ ID NO: 408029 - DNA, 122 bp, Homo sapiens
aaaaattagcaatgctatgagtcatcgtgcattagctgcagaagagttttgcatcttgtacgaatccagacaccatatgccatgcgaaggcctattactttattcggtgccaccgctgacag

SEQ ID NO: 408030 - DNA, 122 bp, Homo sapiens
gccggacgttctgggcacgtgaccgccacccatgcgctgaggggcggacaggaggtgcttcgactgggaggagggcgaagagtgtaagggggcggaggggcgatggcagccacgtgatctgt

SEQ ID NO: 408031 - DNA, 122 bp, Homo sapiens
taattaggagcccgcctcgccggtccactgttggtcgctggtcagatgctaactccgtctcgcttcagtatccctgtaatttaagggtgccagcactggagttaagtagctagtcattcctc

SEQ ID NO: 408032 - DNA, 122 bp, Homo sapiens
ccaggcagaacgcagcaactgacagcaacagcacgcccaggagcaccccaatcagagctccggccactcggccttgggagggttctaaggagatacaggaccctcactcagaattgcaggct

SEQ ID NO: 408033 - DNA, 122 bp, Homo sapiens
agaaaaaagaaaggttttctcactgagaccttgggaaaagctaagggggtggaatgttgacgtggagcggcaggctgcactttcccaagcaatgcagccctgcgtctgctggctgctgcagc

SEQ ID NO: 408034 - DNA, 122 bp, Homo sapiens
gaaaaccctaaagttggcagaaaaatggaaaatgttttccctactaacaaaaagaatcttcgagagtctcttggtatttgtaaatggttgcatttactagtctgtttttttttggttttttt

SEQ ID NO: 408035 - DNA, 122 bp, Homo sapiens
cagggttagagggtttctttcttttttccttcgtctacccgccccccccccccacgcccccgcccgcctgttaaaaatgggagatcaaggaggagggtccagccaaaagaagcaaagaatag

SEQ ID NO: 408036 - DNA, 122 bp, Homo sapiens
gcgcggggcgcgggccggccggggtgggggcgccgtccccgcccgcgccgaggtccgcggcgggtcagctttgtttacgtcgccgcgcaatgtgctgtgtaagcatttccccttgtcccgcg

SEQ ID NO: 408037 - DNA, 122 bp, Homo sapiens
aacatgagtgggggaggggagcaggccgacatcctgccggccaactacgtggtcaaggatcgctggaaggtggtgagtgagtgacccggcgggacagagggagggtagcggggagggaggcg

SEQ ID NO: 408038 - DNA, 122 bp, Homo sapiens
tcaccaccataatggtactgggtttgagggtgaacatatcatccgcggacactggcttaacgagcccatccgaataaaacaaattataaggccaatggcacttggtatcgtgtaagatcgcc

SEQ ID NO: 408039 - DNA, 122 bp, Homo sapiens
cctactgaccacttcctccacattctctagctccctgcctcatatatttggcttgggcttcggaagactctgcaggatccttgtgcttctttcttggtctctggatggaccgcagagtgtgc

SEQ ID NO: 408040 - DNA, 122 bp, Homo sapiens
gcctccaaagttaaagggtatctagtaggaatttagaggtaagattttttttttttcccccgctatatagcaaagtttcaaagggtggttaagggcacagaaaatttgagcctcgggcggtg

SEQ ID NO: 408041 - DNA, 122 bp, Homo sapiens
gctgtcttcccagatgcccaggacccagtgggttctgaactggcctggccaggtgaccatcgctgggtgccagacctactggaccatggaggtggcagaggctctggaggccggcaacctca

SEQ ID NO: 408042 - DNA, 122 bp, Homo sapiens
ctcctccttctcccatagccaaagctgtctctgtctttcatttctttcctcctctttttgcggtgggctgtcctgaccaaacgtcccaaccctgcctgcctcatctgttccggggctgctgc

SEQ ID NO: 408043 - DNA, 122 bp, Homo sapiens
ttctggggtgatgaaaatgttctctatcttcatttgagtgattaacatgagtgcatacatcgcttaaaactcatcaaattatatatctaagatatgcattttactataggtaaatgatacct

SEQ ID NO: 408044 - DNA, 122 bp, Homo sapiens
acaaaaaaaaattgttttaatgctggtgttgtgtccggagttggttcctgcaggtgggttcgtggtctccctgacttcaaaaatggagccaccgaccttcacggtgagtgttgctgctctta

SEQ ID NO: 408045 - DNA, 122 bp, Homo sapiens
tcatttctctgctatgtttaacaatctgtgtaacagtcatacacgcaaactctagataggcgttttatgtaacaagtgccaaataagttgagagggagatggagacaaaaacgcaaagaact

SEQ ID NO: 408046 - DNA, 122 bp, Homo sapiens
ggacaagtcccggcccaacttaaaatcacatcagactgctttccagtagaggagcaaggtcgagattccggcccagggaaatcaccgcaagccctgcgcattgttcagaccccttccccctt

SEQ ID NO: 408047 - DNA, 122 bp, Homo sapiens
gaaactacaaaatgagcacgaaatgatgtttttattcttagaacagaaagtccccacacccgcggccctggtgactgatgaggatgaggttctgcggggcctctctggccgcccagctctgc

SEQ ID NO: 408048 - DNA, 122 bp, Homo sapiens
tcccctccctctctacctcccttccgatgcctcccgccccgcggcccccgggagtcccgccgacaagaaagggctttgcaacaagatggcgaggaggcaccgacacacacaacaagggaagg

SEQ ID NO: 408049 - DNA, 122 bp, Homo sapiens
gcgcccggcatccagcaggactcactcgatgacagttgtcaccgccatcattgttattagcgtgggccagggagggctgcgtaaaagcagctggtggaggagggagagatgccgtgggaccg

SEQ ID NO: 408050 - DNA, 122 bp, Homo sapiens
tcccggagattgaagggaagccccagggagagggccgctgctcgccaggctccgcaggcccgacctatctcagtgggttacctcacactgctacgcggactctaatgttggccacctgggcg

SEQ ID NO: 408051 - DNA, 122 bp, Homo sapiens
ggcagggatccagacacatgtgtatggagatgttgccttaggttactacgggaatcaaaacgttccccacagtaatggcataagtgtattttgacactgttttcagtaaaagtggggcctgt

SEQ ID NO: 408052 - DNA, 122 bp, Homo sapiens
ggctgctccctatcccacgcaggaagctctcgagccaacaccacggctcacaacctgcgtcgtttcccgagctgctctgctgagtcaaggttgggaaactcaacctctgatcacgcaagttc

SEQ ID NO: 408053 - DNA, 122 bp, Homo sapiens
tggacggcgatgcggccggggtggctgaccacctcctcgttggcattgacgtaggtggtgcggaagttgatgaggatgtccacaatgaacatgatgtccacgatgaggtccaccacagccag

SEQ ID NO: 408054 - DNA, 122 bp, Homo sapiens
gtttctccctggcccttttttctagaactttcaactccgttttaccccaggagcctataccgggtttgggcctccagactctgtcgcagtctgaggtgcctgtgagtcccccggagcagcaa

SEQ ID NO: 408055 - DNA, 122 bp, Homo sapiens
tcacctcgtgatctacccaccttggcctcccaaaatgctgggattacaggcgtgagccaccgcacccagcctgcctcagagccttcaagtgagtcagccacaggtgaaatcccacctctgtc

SEQ ID NO: 408056 - DNA, 122 bp, Homo sapiens
acaagttacttcagcaacatcgatgcatacattttaatttttgttaaacagatttcaatgcgcttatctcagttaaatgctgaaatcaatactgcattcatatgttcagacatttattttta

SEQ ID NO: 408057 - DNA, 122 bp, Homo sapiens
acaggtgaggtaaacagtactgaagtccagggcgtcggtgctcactgctctggcaatgcccggtgagactgaattatgtttaaatttattgtagatgctgatcttctggacaatcacacttt

SEQ ID NO: 408058 - DNA, 122 bp, Homo sapiens
gctcaaacaaactcatgaatgcacacttgcactgtcttgagaaaaaggtcggatccggatcgcgctcagaaaggaggttcaggagacaagtacagagatttcaactttctaaaagtgcgctg

SEQ ID NO: 408059 - DNA, 122 bp, Homo sapiens
cttggaaatgagtgctgcattgcaccattgtgccatcagaccctgctgtcctgacaaagccggcagcacatcactccagaggctttctttgcagatttgcaggtaactcaccctttgtgggg

SEQ ID NO: 408060 - DNA, 122 bp, Homo sapiens
caggtgatccacccaccttggcctcccaaagtgctgagattacaagtgtgagccaccacgcgcggccagaaaatttcatttctgaggaaatgacatattggaccttattggctctcaaagac

SEQ ID NO: 408061 - DNA, 122 bp, Homo sapiens
cacaagaagctgctggagcagagtgttccctgactcctccaaggaaaggacactccttttcgcgatctgctaagtgatgggtgtcttcccaggcactagcgttaccgcttgaccaaggagcc

SEQ ID NO: 408062 - DNA, 122 bp, Homo sapiens
gtaaattggaatgaggtcagatttggagcttctcattgcacgcggagattattattgcatcgggttccaagccaatgggaagcccgggggaggggtttggcatgaggaagcgttggttacag

SEQ ID NO: 408063 - DNA, 122 bp, Homo sapiens
agaaacactgacccctggccctgagcactgaaagagcggttagggtgatgcggctggccacggcatcgcccactagcagtgagtgctgcgcccccaccacgcccccaccctgcgctctctgt

SEQ ID NO: 408064 - DNA, 122 bp, Homo sapiens
cttccggtgagggcagccccacgcacagccccccacaccctccccagcgcctgcagcctccggtgcgcgcaggccccaagcccacatgcgcagtcctcaccttgcgcgcagccccatgtaca

SEQ ID NO: 408065 - DNA, 122 bp, Homo sapiens
ataattgtacactcatgctcgtagcagcactattcccaatggccaaaaggtggaagcaaccgagtgtccatcggaggatgattagataaacgacccatggtgcacatagcatggaatattat

SEQ ID NO: 408066 - DNA, 122 bp, Homo sapiens
ttaagtgcattagtgatggggatcgggattgtagtaagtcgtcgttaaggaagaatttcccgtgagagattaggctgaaagtgtgcattaagtttctgcccattctccctccgataggccac

SEQ ID NO: 408067 - DNA, 122 bp, Homo sapiens
ttatataataatcaaaaagcattttcaccattaagcagccccacagcctgccaaggccatcgtggatgacggtcgcattactcacgcgcgttgccacccaaccggctggggcatcgccgcac

SEQ ID NO: 408068 - DNA, 122 bp, Homo sapiens
gggtggtgcgtccctccgttccctagcgtgttgcatagagctagatgccagcggggtcctcggtaactgtacgtggcatcggattgaacctcagtcttcctaacaggttgtggtgcctcctg

SEQ ID NO: 408069 - DNA, 122 bp, Homo sapiens
tgccctggaaggtagatgtgggccgtacctggatgtgggccatctcaccctgcagcctgacgcgggcctcctgtgccagggcgagctgctgctggtaccactgccggacactctgcagggac

SEQ ID NO: 408070 - DNA, 122 bp, Homo sapiens
ctcaccccctgccctctcccaagatctcccactcggtgggcagcctgtacgcaacttgcacgagttcaatccacacaagcgcctgctcgggctctgaccctggctctgccgcttgcccgctc

SEQ ID NO: 408071 - DNA, 122 bp, Homo sapiens
taaggaagacgtcggtcactgggtaagataaaggcctcagacagtcatagtcttcctgtccggccgtgtcatagagtcctaggaggtactacttgccccccacagtgacgctgactgcttag

SEQ ID NO: 408072 - DNA, 122 bp, Homo sapiens
aattcggtcagcaaagtggctggagctgctgggacagacagcctgtgcaggcctggcccccggcacacccagaggaaggagaggctgggtggctcaggtgtggccccggagctcggcaggcc

SEQ ID NO: 408073 - DNA, 122 bp, Homo sapiens
aatgagaaaattgtcttgtgcaattttattgaataggcagcatttagtcttatgtagttacgttagtgtcctcctgtgtacctagtttcctggtttgaaagaacaacaggaattctgacctc

SEQ ID NO: 408074 - DNA, 122 bp, Homo sapiens
cgtcctcatccacttcccctagaacgttcatcagcccctccctggagtctgtttcagtgtcgtagggggtcttttcggtttctttgtaccctttttcaacctgagtcaggtgatcccacccc

SEQ ID NO: 408075 - DNA, 122 bp, Homo sapiens
tagatctactcaagttttaatggctctcctcatatttttgaaagtgaattagaatacacccggccagctatgggagaagtggcattttttgaagggaggaactgataaaatataggctgtca

SEQ ID NO: 408076 - DNA, 122 bp, Homo sapiens
ccgcggtcctctgcgcgggatgtggctctgagcttcggggtagtccgcgaggctgggttccgtgctgaggggcgtcgcgtctggccgtgcgctgcgggagcgcgcgggcctggcccgctgtc

SEQ ID NO: 408077 - DNA, 122 bp, Homo sapiens
aaagtgtggctgatcgtgggtggttcataatgacagtagctaacctttgtgagcacctgccgcatgccaggggctaagctctgcacttccagattcttcagaatcatcctgccaagaaagga

SEQ ID NO: 408078 - DNA, 122 bp, Homo sapiens
gagcgaggggcatcagctaccgccaagtccagagccatttccatcctgcagaagaagccccgccaccagcagcttctgccatctctctcctcctttttcttcagccacaggctcccagacat

SEQ ID NO: 408079 - DNA, 122 bp, Homo sapiens
aggtccccaatctgtggcatctcattcagcatcagtggaataaaggtagtatgtgttttccgctgcttccgtgccagcgaggcttcagccagcaagacacttgcctcaatagggttcttgac

SEQ ID NO: 408080 - DNA, 122 bp, Homo sapiens
tcagcacgggctctcgcgagaagctgccccaagctccaaatttgagcggccgaagtatcgcgagacctaagtatggctccggcgaccgtagcccaatctcgcgcaatgattgcgccacagat

SEQ ID NO: 408081 - DNA, 122 bp, Homo sapiens
gtatcttggtgctgctgggtttcgatcccgctccctaggttatgcagggacctctataagcgctgcgtactcctgcaatttttaaaattgttaatttaatttttacttgaaatatattcaca

SEQ ID NO: 408082 - DNA, 122 bp, Homo sapiens
tcacatcccagatggggcagcggggcagaggcgcgccccacatctcagacgatgggttgccgggcagagacgctcctcacttcctagatgtgatggcggccgggaagaggcgctcctcactt

SEQ ID NO: 408083 - DNA, 122 bp, Homo sapiens
ggatattataaaagatacagatgaacagtcagatggaggagatgcatagggtgtgttttacgggaaggggcacacagcttccatgccttcccgaggtgtgctacactccaggaacttccacc

SEQ ID NO: 408084 - DNA, 122 bp, Homo sapiens
ctcctgtattcaatttccaaaccaaatttcaagagccccctcgtcttcctccccttcccccgttacctctatgaactgaactctgcatttgttacctaatgcaagtctgttaaaatgggcca

SEQ ID NO: 408085 - DNA, 122 bp, Homo sapiens
atcagttcccggacagccttgaagaagcggaacttgtctgtggtgtccagcagcagctgccggcgggcggcagagcttccctgaagctgggcccaggcctcggccacggcctgcatgtggcg

SEQ ID NO: 408086 - DNA, 122 bp, Homo sapiens
tctggaagttccatcatgcagaaattaacaatttagggccaagcataaacggatcaaggacggagtagctgtaaagctaagtcagtctggaactttgagcagccaaagcataggaaggtgaa

SEQ ID NO: 408087 - DNA, 122 bp, Homo sapiens
tttatcatataaatgcctcccattcttttccccacagacaattaatgaatctgcaattgccgctggatgcggtgctcacctctccttaattctctttctgttgcagctccacttcgggagga

SEQ ID NO: 408088 - DNA, 122 bp, Homo sapiens
attgttttcctgacaatcgttgtgcagttgatgtccacattaaaatactggattttcccacgttagaagaatgtttaaatttagtatatgtgggacaaagtggaagacacacagatttatac

SEQ ID NO: 408089 - DNA, 122 bp, Homo sapiens
gaaactgaggctggggcggggcctgagcgggggtccctctggaggcagccgggtggggggcgcaaggcccggatctcggtccccacgcccgccggactcctccgcgccctccctccggccgc

SEQ ID NO: 408090 - DNA, 122 bp, Homo sapiens
tcctccggaccctcccagatccccacaactggaatgctggatcttgtgttgtggccccaccggcaccggggactttgttccttttattccatcgtattcccaggtctcatcggtgtcgggaa

SEQ ID NO: 408091 - DNA, 122 bp, Homo sapiens
cactcccttctgggcctgactcaattcatctgggtaatgaggagggcacaggagctgctgcgtaagctgccctccagcagtaataattgatgagtccaggcagtatccacttaccacgccaa

SEQ ID NO: 408092 - DNA, 122 bp, Homo sapiens
cagtatcctccaaaggttgggcctgggccaccctttctccggctcctcaagggctggaggcggcgtcaccagttacttccagggcaagagggaaagcagttattacctcagtgggccctgga

SEQ ID NO: 408093 - DNA, 122 bp, Homo sapiens
gatttcctttaaagtacctaccacgccacccgctacctgtaataatccatctgaagaggtcgccgggcagcgcctcggcagacagactgacctgcggggaggtgcggtttccagtggcgcgg

SEQ ID NO: 408094 - DNA, 122 bp, Homo sapiens
ttcagtaactggtgaggaaaagtcactggaaccaaacaccattcatacagctatccagagcggaggccaccgccctaccccggcagaggcacatgggggcagcaggcaggaccgagaggggc

SEQ ID NO: 408095 - DNA, 122 bp, Homo sapiens
tcgtcctccacttcggacccacagccacccccaaatcccggctatccccgcttagcaccgcggtctccagcacaccctcccactggagtagcaggtgacccaaaccagacttacctgctgtg

SEQ ID NO: 408096 - DNA, 122 bp, Homo sapiens
ctttccagcaggcatatggagaggctgtgatgagaagcggggtttcctgatgtaatactacgtgtgttagccaagggcacagccctgtacgaatatcagagatcagaggtttgtgtgccgag

SEQ ID NO: 408097 - DNA, 122 bp, Homo sapiens
gtgggcacacacagacccgggcgcacactcacatgcacacgctgccctgcctgcaatggccgctcagtccgtcctgccgttgttcctgccagcccgggtcccagcaggtgttccctaattag

SEQ ID NO: 408098 - DNA, 122 bp, Homo sapiens
tggggcgagctccccaagctccgcctccaggctccccggcctctccccacccttaagccccgcccccactgccaaagccccatttccccgcgccagagcccgggagcgccccgccacccgag

SEQ ID NO: 408099 - DNA, 122 bp, Homo sapiens
agctgcacaaatcaacgcaggcttacagccaaccaacctgggaaggaacaacagcctgcacgacatgaagacggtggtgaagacctggaggaaccgactgcccatcgtgtctgacgacttgt

SEQ ID NO: 408100 - DNA, 122 bp, Homo sapiens
cccgggcggacgggcgggcctcgcagctccgcctcctcacggcggcctccccgccccccgcgggcccctagggcgcgatccgcatccgtcccggcccaggaccaacctcctgggccggggcg

SEQ ID NO: 408101 - DNA, 122 bp, Homo sapiens
tctggagtcgtgctctgggacagatgggcaagctccgctcttggggccggaagcgtgtagcgtctccacccgggctccaatccccagcctcgcactcagcaccaggcagagttcagcctccc

SEQ ID NO: 408102 - DNA, 122 bp, Homo sapiens
tgatcctatggctcactgcagccttgaagtgggctcaatagatcctcctgcctcagcctccgagtgctgggatgacaggcatgagccactgtgcccagctccgccctttctttcacaagacg

SEQ ID NO: 408103 - DNA, 122 bp, Homo sapiens
caactggaaaatacatgtctagaactgatccagcaattacaacggagtcaaaaattaaaccggaccatctctccaactcaactcaacctggacactctcttctctgctgagtttgccttgtt

SEQ ID NO: 408104 - DNA, 122 bp, Homo sapiens
cgtcggttctgtccaaggctgcggttttgcagggagcgttaggttcctgcaccccctacccgccctttccaaagatgtctgatctcaaagaaggtgagaagtgaatgagcagagtgaagagt

SEQ ID NO: 408105 - DNA, 122 bp, Homo sapiens
tatccaagaagagatgggtggggactacgactggcctcaagtgcctcgtgtgtatgacggcgtggaggctgcttgctccgagtccggagcaactgagagagctggagagggcaaccgcgcca

SEQ ID NO: 408106 - DNA, 122 bp, Homo sapiens
tggcaactggtagcatcaggagagtatggggttccccagtggggctccggggcagcgcaacgccacaggaccttgtggtggatgtggcaaagcatctgctctggtggcctggggcaggtgag

SEQ ID NO: 408107 - DNA, 122 bp, Homo sapiens
aacaaataatgagatccaagctgtaataaaaagtctcccagtaaattaaagctgaggatccgatggcttcactgctaaattccaccaaacatttaaagaagaactcataccagtcctactca

SEQ ID NO: 408108 - DNA, 122 bp, Homo sapiens
tcctgcagaaggaatgcaggccccccgtgctggctacagacttgcgatactggggtcttccgtgaaccccgtccttcatggggctgggcatgggaacccactgccctcaaaagccagccctc

SEQ ID NO: 408109 - DNA, 122 bp, Homo sapiens
cagtttgatctcagactgctgtgctagcaatcagcgagactccgtgggcgtacgaccctccgagccaggtgcgtcattttttaagcccgtcggaaaagcacagtattcgggtgggagtgatc

SEQ ID NO: 408110 - DNA, 122 bp, Homo sapiens
cgataatcttcatcattgagttcattaataaactgataataggcctcttctctgtggagacgctcttgctgccatcttctctcattttcatgatgattatggtcttgaggtaaggtttcttc

SEQ ID NO: 408111 - DNA, 122 bp, Homo sapiens
cacagattgcgctttctctgcctctctcttcgagacgctactttaagattcagttgggcacgttctgcagagctctggcatcaaaagtttataacccaaagaagaaggcaagtgtctctgac

SEQ ID NO: 408112 - DNA, 122 bp, Homo sapiens
ggagcagaaatcctcctgcgctgtgcgtcgtctgccccgctcgggcctgcatatgggctccgcacactgctcgctctttgtgccacttcagggtcctgtccccttgagtctcaatcaagata

SEQ ID NO: 408113 - DNA, 122 bp, Homo sapiens
aagtcagccacagaaaaccaaacatcatgagcaatattctccccacattttgtcttgtgtcgcacacatgtgtcttgtatcttttaattgagaggaggggaaatagaagtcttttgctaact

SEQ ID NO: 408114 - DNA, 122 bp, Homo sapiens
ccggcgtccagagggcgcctcccagtcccgggcagcttttcttggaacaccggcggctctcggaagcccagctgctgtctgaactttgagccgagttggaagctagaaactgtttttgaggc

SEQ ID NO: 408115 - DNA, 122 bp, Homo sapiens
tattatgtctgttaaccaaggctttacatcaactgtcatcctttcctttctactcttacacgggctgtaatctgcaaggtttattccagtctccccctcctagcgccaggtggaaggggcag

SEQ ID NO: 408116 - DNA, 122 bp, Homo sapiens
agacttgtccccccatacccaccttctccacccctgctccggtcccagcgtccaggctgccgatgcctcacgcagtcccggcctccggggcacccccgggtcccacccgcccgggctacagg

SEQ ID NO: 408117 - DNA, 122 bp, Homo sapiens
ctcggtcctctttccttccccaaatcactcgaaacttaagacgtgcagcgtctgcaggtgcgcgcgggccggcggccgggcctgggcgagcctgggactgccgggcctcgcaggcattgatc

SEQ ID NO: 408118 - DNA, 122 bp, Homo sapiens
agatgcctatacctctaacgcgtcctgcaccagaacgtgacattactgtccttgaagagccgatttgatcccatcactcatgagctcaaatgcatttaacatttccaagcatcagcagctga

SEQ ID NO: 408119 - DNA, 122 bp, Homo sapiens
cagctagctccagtaccctatcctagaccctcttccctgcccccaacacaaacacacatccggccttcccatcccggacttctgtcgggtggccaggagcacccagggccagaacctgcctg

SEQ ID NO: 408120 - DNA, 122 bp, Homo sapiens
tacccgtagtgaaacgtgccctcctcctctctctcggactgcccctctttttacttcaggcgcaagttacactatcccggtctccacagcctgggcctttggggaaactaacgtctctctgg

SEQ ID NO: 408121 - DNA, 122 bp, Homo sapiens
aacaaaggaggaaagaagttgatttctagaaccaggacttgcgtagtaagtccagggcctcgggcacagctggatccaggagttaaatgaagtcatcgtgatccctccatgggtgcatatgg

SEQ ID NO: 408122 - DNA, 122 bp, Homo sapiens
cgcgcgccccgccacccggagacgctgaggagcgcacctgggcccagtgcagaggagcttcgctctcctccgtccggattggtccagccgcgtcgccgaagttgtcaggccacgcccctccc

SEQ ID NO: 408123 - DNA, 122 bp, Homo sapiens
aaacggagactcagcaacggggctgatttgtctgtggacacacagcgaactgtaagtccccgcctccctctgcacccgcgtgcaccagggggctgctgggggtgcggggacgcgggagacct

SEQ ID NO: 408124 - DNA, 122 bp, Homo sapiens
gtagcggacgttttgccaccatccttgtctgtgctactgtctgctgcagcttccgtgccccgttctcctggagcaggcaagacctggagtgaggtgcttgggtgcgctcgagagagcttccc

SEQ ID NO: 408125 - DNA, 122 bp, Homo sapiens
tacccgtgcaggggatggctgtgggggacccgggcatcagactctccgggagggggcggccgggagggcaatctcgggttcccctgcctgccgggcactgcagagcctcagagcttggggtc

SEQ ID NO: 408126 - DNA, 122 bp, Homo sapiens
ctgggcctggccggtgggagacacagcaaggactctgggagcctgcagagcagaggccgccgcggggccgggcccccgtctcctcctcaggtccaagaccagagggtctgcagggccccaga

SEQ ID NO: 408127 - DNA, 122 bp, Homo sapiens
ctgctgtggacattgttatggcctcctccgtggtacccaagatggtgagcatcttctgctcgggagacagctccatcagctttagtgcttgtttcactcagatgttttttgtccacttagcc

SEQ ID NO: 408128 - DNA, 122 bp, Homo sapiens
cttacgaatttctgttctgattttatagaaagcctatcatattccaaaaggatgctaaaccggttgtgaaatttttctttcagattctgcagataatccttttcagaagtatgctcctttgg

SEQ ID NO: 408129 - DNA, 122 bp, Homo sapiens
ttttcctcggtgcaggaatttatgttcaagttcacgcggagggagccctggattggactacgcagagttggggacgaattccactgggtcaacggggacccgtttgatccggacacgtgagc

SEQ ID NO: 408130 - DNA, 122 bp, Homo sapiens
gacggtggctccccactcccgtggcgaagggcaggcaaaccagaagcctcttttgagagccgtttgggattgagacgagtaagccacagcgagtggttagaagtaggttaggaagaagggga

SEQ ID NO: 408131 - DNA, 122 bp, Homo sapiens
gagttgtctcataggtttttgccggcaatcttcagcttgaccctggttgtttaaatctgccggaggaaatttgaacaaagttgtactttggtaattcttctgcctctgtgaacctttaacct

SEQ ID NO: 408132 - DNA, 122 bp, Homo sapiens
gcccaacactttgggaggtcaaggcaagaggatggcttcacgccagtagttctagaccagcgtagtaggcaactagccttgtctcaaaaaacatttttttttaaattagctaggtatcgtgg

SEQ ID NO: 408133 - DNA, 122 bp, Homo sapiens
caccctttgaatcgctgcgaacaccatcctattgcggttcagagaaaacaagcaaggctgcgaagcccgggggttcaggcagctgcagcgcttgggccaaggtagctccgctctctggtctg

SEQ ID NO: 408134 - DNA, 122 bp, Homo sapiens
aaaacataatcgtgtgcgtgtggcaggcatgcttcttggtgatggagacacggcaggtagcgtgtgcaccctgtgtggcggggagtcagtgagaaagacggagaagaagcagacaaatcatg

SEQ ID NO: 408135 - DNA, 122 bp, Homo sapiens
gctgaaccctgcggggggcccggctgagtttgttcatttatggaaacgctccccagacgacgctcgccgggcccgtgggaggccgcgggagcttggggggacttcccaaagcctgagccccc

SEQ ID NO: 408136 - DNA, 122 bp, Homo sapiens
tctgaagaaattctggcacaagtgcaaagatgtatgtttaaggagggttatgggagaattcgtttgtggtagtgaaaaacctctgaagactccagatgcctattaatagggaaatggcttaa

SEQ ID NO: 408137 - DNA, 122 bp, Homo sapiens
tcccagctctgtgctctttctacttcccaggaaacggagcctaagttagcaacaacaaaccgaagtcgaggactgaggacatatgcaacccccggtttgggtgcaacctttatcaatatcct

SEQ ID NO: 408138 - DNA, 122 bp, Homo sapiens
cgaccaggccgagctggaaacctccacggaatcgtggctcggggctggaaacagacctcacggaatcctggctcggggcaggacacagacctccacggaactgtgggtcggaagctgccctt

SEQ ID NO: 408139 - DNA, 122 bp, Homo sapiens
aggagccagaatggggggggtgccttggcagagttaactccttctgtgctggcaggaacccggataatgggaaaggagatagaagcagaagcacagaggcccctgaggcaaacatggagacc

SEQ ID NO: 408140 - DNA, 122 bp, Homo sapiens
gtgcaggggcgaaactcgaccccagccgagaactacactgtccttgcgcggggccctctgcgccccggaaggcgcccagtcccggtttattgtgagcttacagtacagttcgcaaggtcccg

SEQ ID NO: 408141 - DNA, 122 bp, Homo sapiens
ttgactatgaacagagccagcctgagaatgactaacatccttggacccgttgcctcaagccgcacccaaagtttttgttttcatttgtaagggcacattaaataatgagaccatagatttaa

SEQ ID NO: 408142 - DNA, 122 bp, Homo sapiens
tccacaagcagcatacttaaaactgccattcagaaaggtggcaccgatcactactccctccgctgacaaccagagagcaccacctccccagcccctcaccacacagggtgcggccaggcctc

SEQ ID NO: 408143 - DNA, 122 bp, Homo sapiens
acttcatgatccgcccgccttggcctcccaaagtgctgggattacaggcatgagccaccacgcccagcccattctggactcttgtcgagcggagccctgaggctccctagtccttgtcaccc

SEQ ID NO: 408144 - DNA, 122 bp, Homo sapiens
cacactccccacacgtgccggcccgaggctctgtagtctcgcaggtgcgccgagtgtacacgcccccagcccggatcagactgtctagactgcggggtgcaccaccccccacatagccaacc

SEQ ID NO: 408145 - DNA, 122 bp, Homo sapiens
aaaaggcactcaggccattgcttgtgcctaagtaaatatttatgtgctcagcatttgtagcgagtgagtgtcctctgtctgtctgggtcactgttgtcagtcactgtggcaagcagggccat

SEQ ID NO: 408146 - DNA, 122 bp, Homo sapiens
cattcccctcgccctgcttccaacactacccggccaggaggcgcagattccccaccgtcccggattgcgggcctcaagtgcacaaatcggacacctcgccgttgcctccgcagtgagcctat

SEQ ID NO: 408147 - DNA, 122 bp, Homo sapiens
cctgtctgcattcacagacattcgggagacggccttcgtgttcgccatcactgcggccggcgccagccacgccgtcacgcaggcctgttctatgggcgagctgctgcagtgcggctgccagg

SEQ ID NO: 408148 - DNA, 122 bp, Homo sapiens
gctacttgggaggatcgcttgcacacaggggtttgaggctgcagcaagctatgactgcaccgctttactcactacagcctgggcaacagagcaagactttgtctctaaagaggaaaaaaaaa

SEQ ID NO: 408149 - DNA, 122 bp, Homo sapiens
gcctcttgtaattaaacatgccatagctaaaaacagaatcctaagtaactaatgcacaaacgatttttcaatgccttgacttggaagaaactcatggccgtgttccacttgcctgcatgagg

SEQ ID NO: 408150 - DNA, 122 bp, Homo sapiens
ctgaagggggtggggacagtgttgataaaaggcactagaggcagctcccacacccttcctcggaactgttgcccacatgcagccccggacacagcccctagcccaaaccctacccttcttcc

SEQ ID NO: 408151 - DNA, 122 bp, Homo sapiens
caggagaggagggctgatgctggaacaccacttctagccaccaccaacctgctggcactacgtgatttgtgcctgggggcacccatgctgagtgacatgttagagaaggcagatcctccttc

SEQ ID NO: 408152 - DNA, 122 bp, Homo sapiens
catgagccccccatgcatgtgggcctgtgtggagagatttgggggcaccctctcccaccccggttaggaggcactgcacagccaggccctcagaaccgccctgggtctgtggaggggcagtg

SEQ ID NO: 408153 - DNA, 122 bp, Homo sapiens
tgccgctgagcgagatctacaagttcatcatggaccgcttcccctactacagggagaacacgcagcgctggcagaacagtctgcgccacaacctctccttcaacgactgcttcatcaagatc

SEQ ID NO: 408154 - DNA, 122 bp, Homo sapiens
acctctattttttcagggctttacgtgctaggtgtggtttcttcctctgcatcgaaccagcgacctgggtgcctccccacccaagacggacctccacatcgggaaccgccgccggcgcagcg

SEQ ID NO: 408155 - DNA, 122 bp, Homo sapiens
tctctgcttgcgccatttcctccagcctggagtgtctccgcccttcccgcctcccgtctccgagcttcttaaacacaggccttgggcctacggctctgggggtacttgggggggcgggggca

SEQ ID NO: 408156 - DNA, 122 bp, Homo sapiens
catggaagggcacacccaggttcacatggaacgctgtggaagcacacacccaggttcacacggaacgtcttagaagcacacagccaggttcacacggaatgtcgtggaaggacacacccggg

SEQ ID NO: 408157 - DNA, 122 bp, Homo sapiens
cgccaagcttccagagccctgtgtgacatcattgctgacctagtccagtggggtgggccacgacgacaggcacacctggcaactggtgataggtgcttggggcaaggggaaaacgtgggtgg

SEQ ID NO: 408158 - DNA, 122 bp, Homo sapiens
caggatttgcgctgcgtttgagcctagctgctcggttggaactgagtgtaatgttcacgacgtggctaaaggagttttgagacctaccctccgacatcttgtagaccctggttgtgggactg

SEQ ID NO: 408159 - DNA, 122 bp, Homo sapiens
ttttccaaaaatttcccatgaaaggtgtaattatgctcagtaaaaattgctccttaaaaacggttagtgactttgttgtttgaatttaagatctttaaatacattttgggaaatgagactca

SEQ ID NO: 408160 - DNA, 122 bp, Homo sapiens
atgtcattccactcaaagcccattattaataatttgaaactgtctgctctgtgaaggcaacgacctatctttactcatttttgactctgctaacatttctttttatagttgaactagaggca

SEQ ID NO: 408161 - DNA, 122 bp, Homo sapiens
cagagaagagcgcctggccgggacaggggcttttacacagcagcagggactgaccccaaccgggcgggcacctgcggggccagcgggggtccgcggagcgcggcggtgcggcacgagggcca

SEQ ID NO: 408162 - DNA, 122 bp, Homo sapiens
ggcggagagcgagctgaggcggagcgggaagagggaggatagaacggactagggcggattcgcaggaaaggagattgccctctagaggctgtcttagcccaaagcgcaacctgttgtctagg

SEQ ID NO: 408163 - DNA, 122 bp, Homo sapiens
aggctcccttgttccctggggcaaggaaccagtagagggatagggaatcacagtgtttcccggctgcaagggcccttggagatggttttacagatgaggaagcagagtccagagaaaggaag

SEQ ID NO: 408164 - DNA, 122 bp, Homo sapiens
ccgaccgaggcaaggggtcttgtgcaagtcaggtttgtagatccctagtgaccagacccacgggagctgctcattacatagcaataggattcagccatttttggaagaaagcaatactctgc

SEQ ID NO: 408165 - DNA, 122 bp, Homo sapiens
gttaggctgcagttttaaatgagtacagctgtagaaggtccaagctcaccaagtccaagacgagagaatgtggttggtttgccattcacatggctggtcttggtttgggatttttgttacct

SEQ ID NO: 408166 - DNA, 122 bp, Homo sapiens
atccccacccccgcaccatgtgagctgctcctctactccgcgtaggggaggctctgcctccggtgaccccgagggaaagagctagagcacccacaggtgctgactgctgcggcgctgaggac

SEQ ID NO: 408167 - DNA, 122 bp, Homo sapiens
tgagggccgcggtgtcgccgtgccacgtccgtctgctccggcgcgggcctccttccttcccgtgcccagcccccagcgcccacagcaggcactcgcaccgggcagggaacgccgggggagcc

SEQ ID NO: 408168 - DNA, 122 bp, Homo sapiens
tgatcttgtgatccacccacctcggcctcccaaagtgctgggattacaggcatgagccatcgcacgtggccacattatatttctatttgagtagtgtcttaagagtaacaaactggctttca

SEQ ID NO: 408169 - DNA, 122 bp, Homo sapiens
cgccctcccagcctagggtctactcttccttggcccgagcccagagatcggggtttcaggcgctgggccctgtgcggctgcccagaataggctgagcggcagcttcccgccctggcaaggga

SEQ ID NO: 408170 - DNA, 122 bp, Homo sapiens
acagctcccatcagttgagtctgggttttctgggtggggctgccttccccagaggtttggcgcttggaaaacattcattagctctgacagctgcctacaagaggcctcttcactcagctcac

SEQ ID NO: 408171 - DNA, 122 bp, Homo sapiens
cgatcggtcagagctgatgcagggaacgccccggctccaggatggctccaggaccaggctcggggtccgggatgcagaggcccaggtggcagatgccgcgctaacctgacgcggccgcagtt

SEQ ID NO: 408172 - DNA, 122 bp, Homo sapiens
ctcatgaaaaaattagcagatctgggtacactgggcccatgtcccaacagggatactgttcgaggtgtctgcgtagtggcttactcccagcaccacctgcccgcttttggcagggcattgca

SEQ ID NO: 408173 - DNA, 122 bp, Homo sapiens
caaaaacaataacaaagattgagaagctgggtggtgtcggggcgagtctgagccaaacctcgtcttttctagtgtgttttgttggggggtacacaaatgggtttaaacagctaaatcagcac

SEQ ID NO: 408174 - DNA, 122 bp, Homo sapiens
gttcggtggctgttcacacccgcctcgctgtcttggagtcttgatctgtcgtcggcgggtcgctggcacaggactaaacatggctgaggctgggctccagccagatctggctggggacagca

SEQ ID NO: 408175 - DNA, 122 bp, Homo sapiens
tcaccctgcgcccagcttccccggcccgttcccgcagggccggcctcccggcgccatgcccggcctgtactgcccctccagctggacgccgctgccgctcacggactcctgggtccgggcct

SEQ ID NO: 408176 - DNA, 122 bp, Homo sapiens
ttccatattttaagcattccggaagcagggctccgcccctcctcgctgcgtgtgggcgggcggacagccgggagcctgagagtcaaccccagccagcgctctcctcagaagacatccgctcc

SEQ ID NO: 408177 - DNA, 122 bp, Homo sapiens
acacacccactcgagaaggcggcgttctgctgggtgaacacacacacacactcgagaaggcggcgttctgctgggcgaacacacacacacactcgagaaggcggcacaccagctgggcgaac

SEQ ID NO: 408178 - DNA, 122 bp, Homo sapiens
acctgaattgcagaaattaggcctaaactctgatgacccttaatgtaaaccacattttaacgtgttgagggtcattatttgtatggcacaggtatatcgggaagaggatggatatactaccc

SEQ ID NO: 408179 - DNA, 122 bp, Homo sapiens
caggcctggttctagggcgcggccaacggtcggggacaaaatattcatggtttctgggttcgtggtcaggcagtttgggtggacacaagcaagtgccacgtaaaataagcaacggtgagaat

SEQ ID NO: 408180 - DNA, 122 bp, Homo sapiens
agggcaggtggtatacctgcaggggtgtgtgccagtcagtgtctggctgccgggggatggcggggcatcaggctttgccacctgcagggccctcagtgtggtcaggccggagtgtggcggta

SEQ ID NO: 408181 - DNA, 122 bp, Homo sapiens
gctgccaggggcgtgtgagaggccatggctccggaaggggtactctccccctgggtcccacgtgttctttgccccctgccggtccctgctctaagcttcctagtgtccgttgggaaagctgg

SEQ ID NO: 408182 - DNA, 122 bp, Homo sapiens
agcctagtaacatgtggcaccctggtcacaggaatagacacaggacccaatcaatgctgacgagccagagtaagtcattgtgagcaatgccgggatggagacttccactttctggctggatt

SEQ ID NO: 408183 - DNA, 122 bp, Homo sapiens
aggtgagtggcaggcgagccagcataactgccagagctctgcctcctgtcagattagcggcggcagcattagattctcgtaggaggctgaacccagttgtgaactgtgcatgcgagcgatct

SEQ ID NO: 408184 - DNA, 122 bp, Homo sapiens
tgggccattggtcagtctagcctgagggcgggttgttgggcggaagagagagacttcttccggcctcactcgctgtcaccatagagattgcccatccaggcagcgaagcagcagggccaggc

SEQ ID NO: 408185 - DNA, 122 bp, Homo sapiens
agtaaaaaagagaagctcagaggcactgaaattgcaaccggctcctttaattctccatagcggatgggtggggccaggcccacccacattagagaggctgaaggctcccagcgccctacccc

SEQ ID NO: 408186 - DNA, 122 bp, Homo sapiens
aacctgggaataatacccggggaaacctctggcaattctgtagtgactgctctgtttccccgggatgtcaaccctgacaatggtaggcagaagtccagcatcctatagacagcactgtcttt

SEQ ID NO: 408187 - DNA, 122 bp, Homo sapiens
aataaaaactgagggaactcagagaccggtgccggcgcaggtccttggtatgcagagcaccggtcacctgggcccactgttgtttctctatactttgtctctgcgtcttatttctctttctc

SEQ ID NO: 408188 - DNA, 122 bp, Homo sapiens
agcgtgttactcagaaacggatccgtcagaggccaatgggagctgccggccttcagggcgcgcctggtggcgccgagcatcctgggaggtgtggtccgggcgctgtgccgaggattcggggt

SEQ ID NO: 408189 - DNA, 122 bp, Homo sapiens
atagacaacagtgtcaggtaagctgatcagaaagacagacggcctctccctcaggtttgccgagggagggttcagaaaagaaacagggagcgccttcagcagtctatgcggttataggccat

SEQ ID NO: 408190 - DNA, 122 bp, Homo sapiens
gtatatcacacaacctacctactgtgtatatcatagcacttactgtgctgagacctacaacgccaccaatggagtctgtaaggtttctggggctctggctatctctgatatccataccttag

SEQ ID NO: 408191 - DNA, 122 bp, Homo sapiens
aagtacctcggggtctcttgggtgccatggattcgctctcctggcgcatgaggcttcgtgcggcttcgtgtcataaacatgggcaggcgacatccctcctccaggcctgcgggctccaccca

SEQ ID NO: 408192 - DNA, 122 bp, Homo sapiens
cttcccgaccctgcccagccaggtcctgttcccaagtactcacgtcgtgcaggccttcggcgccccagtcctgccgactttcaaagacctgtgaaacttgatttcgccccttaattttagaa

SEQ ID NO: 408193 - DNA, 122 bp, Homo sapiens
ggctcttcagtttcgcgtttggtatccggcatggctgccacctgtttctggctggagcctcggacactggctcactgcagttggtggtgtcgacagagcggtaggagggcggcgggcagcag

SEQ ID NO: 408194 - DNA, 122 bp, Homo sapiens
ccgggaccctgggctccgggggtgcgggagcgcacggggccgcggaggtgtgaaattctccgctctgcctgcccggggtggagggggcaaagcctggggggtgccggcgcgccaggggctac

SEQ ID NO: 408195 - DNA, 122 bp, Homo sapiens
aatctgtttactagcttggtggtgggtccaacagagcttgttgctccctagccgcttgctcgtgcccttggtggttaccggtagttaagcttagggcgcatagggccctcgtggctcgccac

SEQ ID NO: 408196 - DNA, 122 bp, Homo sapiens
aatctgttgagatgtcccataggctggatgttggggatacagcagggaacaagaacactgcgttcgctcaaccagtttaccatctacctctctgaacttgttcttagtctgtaaaatgaaga

SEQ ID NO: 408197 - DNA, 122 bp, Homo sapiens
ggacagcctgaggctggtccctcacatgcagggctagattggccgaaccctgagaggaatcgggctggggtcccgggaggggtgatccgaagagctggttcccaagggcccaggtcctggat

SEQ ID NO: 408198 - DNA, 122 bp, Homo sapiens
cctgggcgcggtgctgtggcctgcggctggcgcctgggagcttacgattttgcacaccaacgacgtgcacagccggctggagcagaccagcgaggactccagcaagtgcgtcaacgccagcc

SEQ ID NO: 408199 - DNA, 122 bp, Homo sapiens
acgtgtgactgggcagtgggagcccctcacatgatcccgagatgccagacagtgtctctccgcacagggcgtgtgctggtccagaggcccgtttttccagtcgccccacaccccgggtccgc

SEQ ID NO: 408200 - DNA, 122 bp, Homo sapiens
agcaataacttagcccttgtcttcctctctgaaggatttaaatggaatgaccttaattctcgctttgtttgcactctatctcttaaggagctgtgatgaagaccaagacaaacagtagatta

SEQ ID NO: 408201 - DNA, 122 bp, Homo sapiens
cggtgtgtttttgtttgctatgacagagaaagatgagtcaaggagaatgctggtgatgaccgagaaaaatgcagtggtcacgctggatggcgtcacttgggtttcagcaacagacaaggagc

SEQ ID NO: 408202 - DNA, 122 bp, Homo sapiens
taatcctcaatgaaagacactcaacaagaatacaaaaaaagaaaaataaaacaaaaagaacgaaagctgattaagtgctgttagactgcttaaagagcactaagaaagcctgtctcaaacaa

SEQ ID NO: 408203 - DNA, 122 bp, Homo sapiens
actcaacactgacaagctaggtattattaaccgcataaagaaatcaaaggctcacagagccgaagcaaactgtccaaggttactcaaccaataaatggcagagctgaggttttgagcactga

SEQ ID NO: 408204 - DNA, 122 bp, Homo sapiens
cgcgaaaagggcggatacggattcgaatagtggagggcgggccggcggcttctgcgcaggcgctttccgaacgagggaggggatggtggggagcggagagaaagtggggctcggtaattttg

SEQ ID NO: 408205 - DNA, 122 bp, Homo sapiens
cagctgctggtgggtgccctgctgcactacgcggcccttgtccagcaccacaatgaggtgcgcgtgctccacggtgctcagccggtgcgcgatgatgagtaccgtgtgcttctgcaggttgc

SEQ ID NO: 408206 - DNA, 122 bp, Homo sapiens
gccgggaggagcagggtggatgcacccctagctgagtctcgggtggttcctaaccggccccgccaggcacttcccacccagctctcagcctcagagcccagcgccctagacccagggccagg

SEQ ID NO: 408207 - DNA, 122 bp, Homo sapiens
ttgtctgaaaggaaggaatctcttctatttttcttcctatctagcattgatgtttatgatcgttcttttaaaatccgtattttccactcttcataaaaatgccacagggctgcctgacaaat

SEQ ID NO: 408208 - DNA, 122 bp, Homo sapiens
atggatgggactgtcacgggccgggacctctgaggaccagcgctgccacggggaaacctccggcccatgtgatccacccgtcctgcagaggctgggttccctaaaatctaaagacaaaacaa

SEQ ID NO: 408209 - DNA, 122 bp, Homo sapiens
gggggacagcggaggacgggagggtcggggaccggcctcgtgcggacagggtcttgagcacgcgggggcggccggtgtgtgtgggatcttggagcccctggtggaaggggcagcccgtgtgt

SEQ ID NO: 408210 - DNA, 122 bp, Homo sapiens
agtccagcctgggcaatgtggtgaaactctgtctctaaaaaaattagcagggcatggtggcgcacgcttgtaatcgcagctcctcagaagcctgaagcaagagaatcacttgaacccgggag

SEQ ID NO: 408211 - DNA, 122 bp, Homo sapiens
agttcgttaagcagcgcccttagctcctgtgacactttagggagaaagccgcagcaccggcgatgttggccgccattaacgcccggcaaagcgcccggaactagaagcagcgaagaacccgg

SEQ ID NO: 408212 - DNA, 122 bp, Homo sapiens
actaaaagctgaaggactgtgctgaggctttgtagtagccactttatggaatgggacaagcggcatggagggcacaagtcagtgttgagatccccactaagcttagaaaccattggtatgtg

SEQ ID NO: 408213 - DNA, 122 bp, Homo sapiens
aaacaaaatgtccaatgaaaactggggaaaagaccagaacagacacgtcaccaccgaagacgcccaagcagccatcaagcacgtgcgcaggtgcccccctcggcggccatcagggagctgcc

SEQ ID NO: 408214 - DNA, 122 bp, Homo sapiens
cgtgaaggcccaggcgcagagagaagcgcctcccgcggaggaagccgcgtgtgtcctggccgttcggtgttgccaggggctgcccagcttctcccgcccagccgcccacccggtggcctggg

SEQ ID NO: 408215 - DNA, 122 bp, Homo sapiens
aaaaatcaattcagattactttgatgacagtgacttccagtcttctctgaaagatctccacgatgctggcagcccggacaggggcagcggggagtcagatctcagaggagaacaccaagtta

SEQ ID NO: 408216 - DNA, 122 bp, Homo sapiens
gtgattgttatttagtctatttaatgcttcttaaatctctagaacattataaaggtttgccgtgactagtgatttatagattgtttgggacagacttcagaactctggggcctccctgaaat

SEQ ID NO: 408217 - DNA, 122 bp, Homo sapiens
tatccaaaaagaagtctggtggataaagaccccctccagggtcaccgcagcagggaaatacgagagaaattctttgagcagtttccagcgttgagtgggaggtgttgtggctggcacccttt

SEQ ID NO: 408218 - DNA, 122 bp, Homo sapiens
gagaatctcaaatcattaatcctggggaaatgaagctagaaaatgattccagaaatattacgaatcctaggcttattcaagttgtttatttcatagcagaaaaagatgctgctcaggcaaaa

SEQ ID NO: 408219 - DNA, 122 bp, Homo sapiens
cttcccgggttcaagtgattctcctgtctcagcctcccgagtagctgggactacaggcggcgccaccactcccggctaatttttgttatttttgctagagacggggtttcaccatgttggcc

SEQ ID NO: 408220 - DNA, 122 bp, Homo sapiens
ctctgccttagggagcggctgggcacccattcgccccattcaggggctgcactttatagacgttccctaggctgtttctaggctcccccaagtccctcctccagcctcgtcgggtccctcag

SEQ ID NO: 408221 - DNA, 122 bp, Homo sapiens
tgagaaagcggaggcacagagaggagaagaaatttcccctatatcacagagcgagtgagtcgtgagctggggtttaaccccacacgtgttatatgccggcgctcctcgtcttacgatggtgc

SEQ ID NO: 408222 - DNA, 122 bp, Homo sapiens
tgcagttccatggactttcttttcacgcgcgcgcccagaatggactggggacctttgggacgggatgggacgggtacacctggatgccttttcgcggggttcacggtgtagggagattagag

SEQ ID NO: 408223 - DNA, 122 bp, Homo sapiens
cccaaatccgattgactgggctgtttggggcccatatggccggacagctgtgctgctccacgtgaaaagacatcattgcccttccgatggtataaagcgagggttccccagagagctcagac

SEQ ID NO: 408224 - DNA, 122 bp, Homo sapiens
tccccctctccgggcttggactgggtttggggttgccgaggcaacggcacttctcataagcgccctccttccccttgagagagggcagcgctggctccgctccagccagaggcccccatccc

SEQ ID NO: 408225 - DNA, 122 bp, Homo sapiens
ctgtggatgtgggcttaccagagcccactcaaaaacagagtaaaaaatcaggagcgagcccggggacttagtgctagttcttctgattaataaatatgagacttttggcaagtgaagagagg

SEQ ID NO: 408226 - DNA, 122 bp, Homo sapiens
agtacaaaacaattggttaaagattaatacttctgagacactgtgtagcagaaagaaacccggatttggattaggacttgaattcagcctccaacatttactgctgtgtaaagatttgaggc

SEQ ID NO: 408227 - DNA, 122 bp, Homo sapiens
ggtggctcccccagatcccaggattctaggccccgtagacgcaagattcccctgctgccacgcaggcgaggggagcctttgatgctgccacctcccttagagctggggtaccgggtcacggc

SEQ ID NO: 408228 - DNA, 122 bp, Homo sapiens
cgagacaggtcgtcggcggcgagtgagggacagagtgcagggcgcacaccgcaatgagcccgtgtcccctccctccgcctctactcccgccccgcggcaccgcgtgtgcaggcagctcccac

SEQ ID NO: 408229 - DNA, 122 bp, Homo sapiens
tatagctgttcttctgctataattacccaatttggcaccctgggaagtctagaaatatggcgggaaaagtgatgaagagagtatcctctgctgtaaccaaactctaataactaagtctagaa

SEQ ID NO: 408230 - DNA, 122 bp, Homo sapiens
tctgttctgaggaagaagctatggaaagaattcctttggcaactctcagagaataggatacgtgtcactaggaagattttctagccaagatcttggtgcctgtgatgactcatgtttagatc

SEQ ID NO: 408231 - DNA, 122 bp, Homo sapiens
ctcaccgaaaattgggaggcaggtctgggaggcggggttgagcgcccaccgccttgggcgcgcccgcgccccccgccatcgcggcccccgcgcccccggcccacgcccgcgcggtcccggca

SEQ ID NO: 408232 - DNA, 122 bp, Homo sapiens
gccacgaaatggagccctgagacccactctcggttttcggatttggtgagtctggggcagcgtggggatgtggacacccaacaatctcccacgtgacagtgatgctgcggctgcgacctggc

SEQ ID NO: 408233 - DNA, 122 bp, Homo sapiens
aaattcccctccaatcgtgtcagaatttacctccatgccccagtcacactgttggttctgcgctctgaacctgggtgtagctcatttgaaggactctcttctgcgtttcctaacagttattt

SEQ ID NO: 408234 - DNA, 122 bp, Homo sapiens
gcccgtgggggagacaaaggccagggagacacctgcgcgccccctactcgcgccacccggcgcagcttcaagccctgcccgccctgacgcaccttcgatgtcggtcagcagcgccgcgtcca

SEQ ID NO: 408235 - DNA, 122 bp, Homo sapiens
tccttgagcacacaccttctctcaacaaatgacaatacttggcaaactgaactcctcccacgagtcgccctctgctaggaggaattgctggctgctccctgcttattgcattctctcagagc

SEQ ID NO: 408236 - DNA, 122 bp, Homo sapiens
ggataagccaccttggaataggaagaggtgttgagcctggactgtgggaggaaagagctgcgtggatagattcaaacttcctgtggtagtgctcccagtctgacctctgtagaccttcagta

SEQ ID NO: 408237 - DNA, 122 bp, Homo sapiens
attttcatctattgacagtgaatttaatttaccattgcagctcttttcctagaactatcacgttattaattctgcaatcaagctcttttgagtgcttttatttgtactaagggttttcacaa

SEQ ID NO: 408238 - DNA, 122 bp, Homo sapiens
agccctccgccaaacccaacgattcggacctcactctgtacctggtggtggcggtggccgcggtctcctgcgtcttcctggccttcgtcatcgtgctgctggcgctcaggctgcggcgctgg

SEQ ID NO: 408239 - DNA, 122 bp, Homo sapiens
cgcttttggccgtggacttccacgcagaaagacactggcgcctgagaggacggggacgaccgtgtcccgtgtcagatgcgcctggcccacggctgagtccccagcatcagccctcagctcca

SEQ ID NO: 408240 - DNA, 122 bp, Homo sapiens
gagtgggaagttggttttcccctggggtagggctgctcagcagcagggctctcctctgtccgccccagccaaaatctgcttcgggcctcgatggcctgccagcctgccagcatccgccggtg

SEQ ID NO: 408241 - DNA, 122 bp, Homo sapiens
ggcttctgtttcaaagaatacttcaattttattctaattataccactgtacatacaactgcgggaaggctatttcttaatattctaatgctgagagacacaatgcttggcacttggatagtc

SEQ ID NO: 408242 - DNA, 122 bp, Homo sapiens
ggcgactcggatcgccggggcctgtcctgtgggggctccatcgcccgcacaggagctgtgcgcccaccttgatctcactgtccagcagccgtgtgcgctggatgatctcctccgtggacatc

SEQ ID NO: 408243 - DNA, 122 bp, Homo sapiens
ttatcaactatgtgccaggcactctacagggggctctttggggaaaggtggatcatgtcacgcaatcctgccatagcctaatgaagcaagggctacaacaatctccatttttttgatgggga

SEQ ID NO: 408244 - DNA, 122 bp, Homo sapiens
gcattgcgctttctggtcaacagtccccagcagcctgcgcgctggaacactcggcccttccgcatggtcctcccttgcagaaagtgaagcatccatgactccgtgaaggaggaggccctgaa

SEQ ID NO: 408245 - DNA, 122 bp, Homo sapiens
agagagagagaccgagactgcagcagccaagagagcgtggagcgatgggctggtggaagccggagaggagcgctaggagccgcggcggcggcgcgaggtgtagaaggaggcgaaggcgttcg

SEQ ID NO: 408246 - DNA, 122 bp, Homo sapiens
cgaccgcgcgccgattggcccgggctccgggtgacgtcacgggggactgtgggttcgcagcgaacaaaagagatgctgatggcccgccaggactggggcaagacaactttttttcggtttcc

SEQ ID NO: 408247 - DNA, 122 bp, Homo sapiens
gtgtatcaatacttgcacgcatgcgtgtatgcacacacaaacacacatacacacacaagccggacatttgcctttatgctgaggtggcaaataggaacaaagctttggcctaatgaatttca

SEQ ID NO: 408248 - DNA, 122 bp, Homo sapiens
ggagcaggaagggggatattttaaacacatttaaccaggtcttcagtttggggtcagaaacgtgctgcaactcccacaccagtctgcaaacatctggcgtcccagatgggagcaataacaac

SEQ ID NO: 408249 - DNA, 122 bp, Homo sapiens
cacaggcaggcaaggaagtcgcttccacagggctctgggttggagcaagtttaggatgggcgtctcaaaccttccagctggatagggcctgagatgaagatataaaggtaatagccatggcc

SEQ ID NO: 408250 - DNA, 122 bp, Homo sapiens
cgcgtgcagctgctgtgcaaggagccactgcctcagcctcaaggttatcccgctgcgggccgccgcaatccctccgccgccccgccctctgcccaatcccggctccgggcgacccgggcccc

SEQ ID NO: 408251 - DNA, 122 bp, Homo sapiens
tgggcaccctgatgggctcaggcctccgaaaattgtctcgccagtgtcaggagcaggtaccggcattcctggccatcctcttcaccctccccacaccgtttctctttccactccccggaact

SEQ ID NO: 408252 - DNA, 122 bp, Homo sapiens
cagaccacggcggacggaggcgtcctgctgacacagcccctgtcgggatgtgggaaggggcggaggcacagctccagccccagcgtgaccgtgtgtgtgggaaaaccgtccgggtacttggg

SEQ ID NO: 408253 - DNA, 122 bp, Homo sapiens
ggtcacacagccagaaagtgttggatgcagactcccaagccaagttgcctaattccagaacgctttctcttaactgctgtaccaatctaaactgacatcttccaatgtcaatctgtgatttc

SEQ ID NO: 408254 - DNA, 122 bp, Homo sapiens
ccccacccagccagggttgtagggtgagggccggtgggtgggcgccgcctggcgggcgggcggacggggggctggcagcggggagggggcgcaggtcacgtgccggcgggcgggtgggcgcg

SEQ ID NO: 408255 - DNA, 122 bp, Homo sapiens
tttgagtttcactgcatctgtcacctactccaaaacatttgggatcctgatatgccattccggtaagattacaattcagtgcaggacctcatacccttataggatgttttctcgcctctggc

SEQ ID NO: 408256 - DNA, 122 bp, Homo sapiens
cgtagcccatagtcaactatagaatcagttggaatcaataacacctctggcttagcatcccgaaggctcacatcagacctttaaaaaacatattttgagaaagtagcctcatcggtcctaag

SEQ ID NO: 408257 - DNA, 122 bp, Homo sapiens
accagcaggctggccagcaggagacgcagctccgagggcgccgccatcggcgtcggcaagcgcctgtgcaggctctgtgtgaagagcatgtcctcgggcggcactggctcaggagcagaggg

SEQ ID NO: 408258 - DNA, 122 bp, Homo sapiens
ccgtgagggaggggccggcggcgggggcggacccctggcggtcctcctggctggggtccgcgcgctcgcggcagctccccgtggaggtcactgtccgtgccagtccctcccgctgtcccgcc

SEQ ID NO: 408259 - DNA, 122 bp, Homo sapiens
aggggctgagagtcagcaggcacacgggaacccggaaccctgtgtgctggggaggaatcccgcagtggccggggggcttgaggccgctgctttgtctcttcgtccagagccttatgtaagag

SEQ ID NO: 408260 - DNA, 122 bp, Homo sapiens
gaccttcatcatgagtgctacggctcttaaggtggcgtgtttggagttattcgtttctcccggtgggtccgtgatgtggctggctttaagaacgaagctgcagaccttcacggtgagcgtta

SEQ ID NO: 408261 - DNA, 122 bp, Homo sapiens
cttaatgctggcgttgaaagaacccctggtagctctgggatctcgagctcgtgttttgtccgtagaaaaatgcttcggattcaccttcagatgtgtcttttgtgaggaaaaaaaaaatgtaa

SEQ ID NO: 408262 - DNA, 122 bp, Homo sapiens
ccctgcctacaccgcggcggggacaggtggaggtttcaacccctgtttggcaacctcgggcgcagccaggccccgcccagaaatttccgggacacgccccggaagtactgagagggacttcc

SEQ ID NO: 408263 - DNA, 122 bp, Homo sapiens
cattcttttttttgagactgagtcttattctgtcacccaggctggaatgctatgtcgcgacgtcagctcgctgcaacccttgcttcccgaattcatgtgatcctcctgcttcagcctcccaa

SEQ ID NO: 408264 - DNA, 122 bp, Homo sapiens
tttctttctgaatttctgagtactcactttgcattttctcccgcaaatttaaaggatctccgaaggcacaagatctagtgaagactgaggatttggagcaacacctgggtttgagtctggct

SEQ ID NO: 408265 - DNA, 122 bp, Homo sapiens
ctgaggtgggggaggagtggggatccagtcacaaaaccccaggacatagcccacctgggccgtccctgcccaccgcactgctggggggggggggtgcgttctggagtcatttggggaaagga

SEQ ID NO: 408266 - DNA, 122 bp, Homo sapiens
caccgcagacgccacacaggctgctgagcctttccaagcgaaatgccccacgtgcgccaacggccacctcggccgtcgccccacgcttggcccgcagccagaggaagcccagcaacttctgc

SEQ ID NO: 408267 - DNA, 122 bp, Homo sapiens
cacactttacaaaattctagtctgacgtttgctggtcaataaaatgatggtgtgaatggtcgaaaaactacgtgggttttcaagctacacagatcattttactctaagatggggccagaaag

SEQ ID NO: 408268 - DNA, 122 bp, Homo sapiens
taatcatcccaaactggcgcaaatggtgggttttactgtccagaggtcatttcgtctctgcgtttccaacctcctcgcccttttactttttttgggctcactcaggaaactggagcagtcct

SEQ ID NO: 408269 - DNA, 122 bp, Homo sapiens
cccaacctggagggcgctgcgtctagtgaagtccgcagaactctttacctcgtggagaagcgatttttgtacttttgtctccaaagagaggtgatccaggcaagaggcggaaaatggttcca

SEQ ID NO: 408270 - DNA, 122 bp, Homo sapiens
cgggaagagtcccgggccccgcggcccaaggcaggagcatatgtgacccttttgggggctcgaccttcaacaggcttaaggcctagagtcacaggtttaatggtggagtgacagcttcagcg

SEQ ID NO: 408271 - DNA, 122 bp, Homo sapiens
cttggggtcgtatatctgccggcccaggccaaagacctggccgctctggttggcgccctgcgcgtagcccatctgcagggacatgaaagagttgttacacttgtcggttcccagcttggtgt

SEQ ID NO: 408272 - DNA, 122 bp, Homo sapiens
tgaccccaggctcattcattcaacccatgtgttttgagcatctgctgtgtgctgggcactcgtctgccgagatgatgcaggatcagctcctgacctccagaagctacagtctttcctcagga

SEQ ID NO: 408273 - DNA, 122 bp, Homo sapiens
ccatccaaggagacaatttacagttgagttaatctgggtacattagcgagacatggattccggacgacagaccaatttatgttgtttccctgtccccccttagtgctgctctgtgtgagcaa

SEQ ID NO: 408274 - DNA, 122 bp, Homo sapiens
cttctccatccctttctttattatacaaataggcagtatacacagtgagcgcccactaagcgctgggctgggggcctccaacccggaacagaagccggccacaaccctcgctccctgtcgtc

SEQ ID NO: 408275 - DNA, 122 bp, Homo sapiens
ttattgagtattcaagctgacaatcaaacacctgagccttctggttggacactttgcttccggtaagcaagctagtacaataattggccaataaagcaagccttacccaatgatccttatcc

SEQ ID NO: 408276 - DNA, 122 bp, Homo sapiens
taaccgaatcggggacagctttgtccctttccgcagtgagaacggggcccgcccggagcccggggaaccgaaggtttaggagcccaaggtcacccacgaatcccagccgttccctggggcga

SEQ ID NO: 408277 - DNA, 122 bp, Homo sapiens
gcggggcccgggtggcggtcaagaagatccgctgcgacgcccccgagaacgtggagctggcgctggctgaattctgggccctcaccagcctcaagcggcgccaccagaacgtcgtgcagttt

SEQ ID NO: 408278 - DNA, 122 bp, Homo sapiens
cacagatttgtcaaggttgggaccttagagtgatcacctgactagctggctggccaacaacgattggagggtggtggagaaatccccaaaaacaagctctggaagccagttcaaaatgcagg

SEQ ID NO: 408279 - DNA, 122 bp, Homo sapiens
ccggcctgagccagcgcccttccagcagtcattccacgtgggtgggtttggatacccttgcgagagccaggacaggggcagaagataaaacgcccctttcctcacaccccttgcccactctg

SEQ ID NO: 408280 - DNA, 122 bp, Homo sapiens
ctgcagcccccaggagatttaagatttaccccgattccactgctgatcccctcccaggttcgagcacttggagggctgctgaagttcctgggtcgaagaagaatcggggttgaactggaaga

SEQ ID NO: 408281 - DNA, 122 bp, Homo sapiens
ctcagtaaataaacaggcaacctcaagttatttcttccactcattgattcaacgcgtgcacgggactattctttgagaagcgtaccccaccctctgctaggcactgtgccaaaagcttttca

SEQ ID NO: 408282 - DNA, 122 bp, Homo sapiens
ctgatcagttctgaaagtgcctccgtaaactggagacaccagatctctgctctgcaaagccgggctgggaggacgcctcggccccgccccagggtaggggctccgcgagcctgccccctcct

SEQ ID NO: 408283 - DNA, 122 bp, Homo sapiens
ggaggagggagagttttggcgttggccgccttggggtgctgggcccgggggctgggggcgcgcgccgtggcccccgcgccccacgctgggcagtgcccggttcggccccgcatggccaggcc

SEQ ID NO: 408284 - DNA, 122 bp, Homo sapiens
gaaatccaatcagttatgttctctgaagccttccaggcacgaggacagcagcggcttctacggggacccctcagctttctgtctcaggagtcatgaacctcaggagaagcaagtgtggtata

SEQ ID NO: 408285 - DNA, 122 bp, Homo sapiens
tgctggggagatcaccatttctctctcctcttcttcagtcacaacttagtagcacctgcccgggacagggctctgggccccatgcatccccagagacagaaggcaggaactcacggtcaagg

SEQ ID NO: 408286 - DNA, 122 bp, Homo sapiens
acagggttgcggccgggcataggctctcctcacatcccagacggggcggcagggcagaggcgctccccacatctcagacaatgggcggccgggcagagccgctcatcacttcctagacggga

SEQ ID NO: 408287 - DNA, 122 bp, Homo sapiens
accaatttgcttgtaaacgctaaccatttggcgccaaaatcctgggagggtcttttaaaccgttcttcctcaaagcaccgccccactttttacaccacgcctccttttgctctgttccttcc

SEQ ID NO: 408288 - DNA, 122 bp, Homo sapiens
gcaccttgtttttgcaactctcatgtccagctggggtggggccatgcacgggcagcatcccgatgtcccaccaccgccccgtccacccagctcctccagaggatgaattacagtggcttcct

SEQ ID NO: 408289 - DNA, 122 bp, Homo sapiens
ccctgagggaagggtaaggtgtcccgaaggtgccttcagaaaaaaattacgtacgtttttcgtcgctttcccacgatcacacagatctcaggtccaggaggacgcatcgtctttttagtaac

SEQ ID NO: 408290 - DNA, 122 bp, Homo sapiens
agaggtggccgcgaagcgagacaggccagcggaacggaaaacggaagcacgagacgggggcgtgacgcaccgggcgcatcacaaagaacggcgagagggcggtggcgccgggggcacggctg

SEQ ID NO: 408291 - DNA, 122 bp, Homo sapiens
agatcctttcgtcgcctaaatggtaagagcgacttgtaccgacagtccctcggcaatttccggaagtgttcgggataggcccgagcgtggcgccctctggcggcggccagaggtggcggggg

SEQ ID NO: 408292 - DNA, 122 bp, Homo sapiens
gcgccgctgagccaatgccgcgcaaccgcgcactgcccgacagcgggtgcagccaatggacgggaggcgcccgtcctcctcgcgctgccgccccgtccacgtcctccacagtacacaatggc

SEQ ID NO: 408293 - DNA, 122 bp, Homo sapiens
agccagtgcgcccggcctaaattaaatacttttaagttgcagtgtcaccattatttttttcgagcctgtaggggttataaaaaggaaagtccagagcttaggtattggaggggccgatctcg

SEQ ID NO: 408294 - DNA, 122 bp, Homo sapiens
ccatgcagcccttggactggtcctggcggaccaccgagttccccgcgcagggggcaggtgcgccccacctgggtgccaagggaggcgacaccatctctcccccttggggtggcccagccttg

SEQ ID NO: 408295 - DNA, 122 bp, Homo sapiens
ctcacaagccaggctgtcagatcctagctctgccaggtgccaaggagctgcaagaagctacgtaacctctctggactctacttgcctcttttctcaaatggggaacacagtctcatggagct

SEQ ID NO: 408296 - DNA, 122 bp, Homo sapiens
cctggtcatttccatggcaaccaggaggaagctgctggcctaccagtctcattaactacacgcaggagagaacctgccttggtgactgctgaccactcttttggggttctaaactgggaagt

SEQ ID NO: 408297 - DNA, 122 bp, Homo sapiens
aggcggcgggagggccgccggaggaaacgctgtcactgtggaaacggtaatgctgtcaggcgacgcgcaggaggcgggggccgaggccgggcggcccttcgcggaccctccgagctcatagt

SEQ ID NO: 408298 - DNA, 122 bp, Homo sapiens
cagtgttcaggcagccagggagcccagccgctctcttagggtcaccccctcccagccctccggaggccacccttgtcccgccctgccccaagggcacagcccgcgcccctcccccagtcctc

SEQ ID NO: 408299 - DNA, 122 bp, Homo sapiens
ctccctctgcttgcgggaaggtgtgcgagaggcacgggcgggagccagggctgcaccctgcgctcaccggccagcgcgagttccaggtggccgtgggctcggcggcccgcactcagagcagc

SEQ ID NO: 408300 - DNA, 122 bp, Homo sapiens
ggcgcgccactccccgggccacccgcctccccgccatgctctcagcgtaacgggcagccgcgctaacttcccgaaactccgcggagagaaaccctgccccggcccgctcctccccgaggcgc

SEQ ID NO: 408301 - DNA, 122 bp, Homo sapiens
gccctggccccggaggggacgccgagtacccaacgggcaaggacacggccaagatgggcccgcccaccgcccgccgcgagcagccttagacacactagcccccccccccagcacagcactga

SEQ ID NO: 408302 - DNA, 122 bp, Homo sapiens
agagggagctcggcgctcccgcagcgggtcccccacccaggcacgcccccggcccggccccgcccacagcactccccactcggccccgcccacagtgcggccacgcccgtagcacgcccctc

SEQ ID NO: 408303 - DNA, 122 bp, Homo sapiens
aggcggacccggctcctgccagggttgggtgcgccgctgaacggatggctgagggagccccgcggatcgtttaggaaagccggccaggtgagaaggccgtagaacgtaacttgaaaatcagc

SEQ ID NO: 408304 - DNA, 122 bp, Homo sapiens
ctgacacagtagtaatttgagcctctgcaattgccgtctgcttcctgtgaaagtcctttccgtgcccactgacccttgagtgggcctttgagctgctgactttcagctggaacttgaaggta

SEQ ID NO: 408305 - DNA, 122 bp, Homo sapiens
acgcccccttgcactgagtcctccatccattttagtgctggaaatggggggtgggggtagcgaccccgcagtgcgacagtgaaacgtagacatattctggaaataaccccttctcacaatct

SEQ ID NO: 408306 - DNA, 122 bp, Homo sapiens
acgtattccagggcagtgtagcagcctcagcaactgggaatttgttagaaatgcatatctcgggatccatcctgacctactaaatcagaattttgctggaccctacccccaatctgtctgtt

SEQ ID NO: 408307 - DNA, 122 bp, Homo sapiens
ggagtcacatacaaagcagtcttagaacggtttcgagcaggtggtgctgttactacaaatcgctccattctgactctaaataaatatggttctttcaagacaaaagaaacaaagatgagtat

SEQ ID NO: 408308 - DNA, 122 bp, Homo sapiens
tcgagggcccgggccagtgacagggctttggtttctttctctctggcctcggcttcggcccggtcccgctcttcggcatagcgagcagagatgctcttctcttctgctaacagctgtgcaga

SEQ ID NO: 408309 - DNA, 122 bp, Homo sapiens
gcctctctctcccaacagccagttctgttagccccagcaactgccgttgagagcaaacaacggtcctgcagaaaaagaacgagacagtaaaagatgaggaggcaactggtataaaagctgga

SEQ ID NO: 408310 - DNA, 122 bp, Homo sapiens
aaggtggggagcggacaggggctcacttgagggcccgggggctgctcactcacccctgcgcgcagctggccctggccccagagcctggggcccgcccggagctgctccaggccgcgaccgct

SEQ ID NO: 408311 - DNA, 122 bp, Homo sapiens
tggtgccaagagcttcgagaacagtgctcagagtctttgccacactcagctcttccccaccgcttcatccaaggcaatgccgccaaaggtcatttcagtatgaagtctgattgaggtcctgg

SEQ ID NO: 408312 - DNA, 122 bp, Homo sapiens
gccccaggggcggtgtcacgggccagggcgccgtaggacaggaggtgcgctggaaccctgcggtccatctggtcccagctttcgtgggtgaagtctgccatctggttggccgtgggtctggg

SEQ ID NO: 408313 - DNA, 122 bp, Homo sapiens
cggcggcgggaaagaggcgggcggaggacgcaggggcgggcctgcggctcaggcaggaagcgggaaggccgggcctccctggccccgccccggccgggcggccggacctcggacgacttggc

SEQ ID NO: 408314 - DNA, 122 bp, Homo sapiens
tttatggaaaagctaattcctgatctttgcatctattttagtaatagttatgcacgagtgcgagctgtggtgatgacccgagatgactcaagtggtggatggttaccacttggagggagtgg

SEQ ID NO: 408315 - DNA, 122 bp, Homo sapiens
ccttcccttcttttcccttcccttctcttccctccagtttcacttgctatagagatatgacgtacacacagttcaaagactgagcatacatcatatcaaggacacagttcctgtccttgagg

SEQ ID NO: 408316 - DNA, 122 bp, Homo sapiens
aagaggagggcctgggatgttttgctcaagggcgaggcggggtgctcaggcctgtggggtcgctggggagagcccggcacttggcttctgaggcttttcagttgccgtccgagcaggaggga

SEQ ID NO: 408317 - DNA, 122 bp, Homo sapiens
agagcacaacatcgctcacctgcggcccccagggccagaagagaactccctcctacggagcgaaggcaagaggcctcgaacccttttgggacccggaacccatcaaaagtgacccacaaagg

SEQ ID NO: 408318 - DNA, 122 bp, Homo sapiens
aagctcataatattttgtaatatgattttgaaaagataatagagggtagagaaatgagtacgacaagaaaatgacaacactttcttaaagtgctgctattaagtgggtatgacaagcccagc

SEQ ID NO: 408319 - DNA, 122 bp, Homo sapiens
cccgcccgtcccaccgctcagggaaggttgcggccgcgcagctccgcgaaggtgccacggcgggcccgaccctcagactcgcttgtccctggagaccaaccctagcgaccaggctctgccgg

SEQ ID NO: 408320 - DNA, 122 bp, Homo sapiens
aacacagatagcgtaacccctagcacacctacacagacacttcacactgccagcctaaaccgcaggctacctcatagagacagaagccactaggaaaaaagccaaaactatgtccactcacc

SEQ ID NO: 408321 - DNA, 122 bp, Homo sapiens
aggaagacaggaaggaactcagtttgtcagattcccaaactccatttatctctactgcaccgacttggtcagtgcctgacagagcccatccttaccccagggaccaggcacagggcctcaca

SEQ ID NO: 408322 - DNA, 122 bp, Homo sapiens
gaagccgccatggcaggcttccagtcccagaccggaccaagctggaggttccgaggggcccgggtcaacaggaccaggagaggttccacgtgcggaccaaccagcggcagccccgctgcggc

SEQ ID NO: 408323 - DNA, 122 bp, Homo sapiens
atcagcttcgccgcgatcccggcactacgatcccggcactacagtcccggcgcaaccacccgcactcagattctccccaaacgccaaggatgggggtcatggctccccgaaccctcctcctg

SEQ ID NO: 408324 - DNA, 122 bp, Homo sapiens
gctgagggtaatgaaaggtgctgctcctaagccgcacgtctctgatccgccctccccgcccgccctctgctgcccgcgggccctctaagagctgcccaggctgctgccgcgggtcagaggcg

SEQ ID NO: 408325 - DNA, 122 bp, Homo sapiens
gagcataggggggcctgggtctccccacttctcctcctggacctgtgctcctttccaggccgccttggggaccccagatgctaaagatggaaagggaattggtggcctacatcccagcttgc

SEQ ID NO: 408326 - DNA, 122 bp, Homo sapiens
tatagctgtctgtggctggctgcgtatgcaaccgcacaccccattctatctgccctatctcggttacagtgtagtcctccccagggtcatcctatgtacacactacgtatttctagccaacg

SEQ ID NO: 408327 - DNA, 122 bp, Homo sapiens
gccggttgtgggcgtgcagaacacgatcctggttgactttgatgcggtgacttggggtggcgggcggggggcggcgggaggcgcggagtcgaggagttcccgcgtcgcgagcatgcttgaga

SEQ ID NO: 408328 - DNA, 122 bp, Homo sapiens
acgtaaggcgcgagtcccgcgcggccggccggggctccgcgactgggcgggcggaggcggcgccgccctgcaggatccgggctggaagcctctcggagtgctgcctccagccaaggtgtgtg

SEQ ID NO: 408329 - DNA, 122 bp, Homo sapiens
caccgctgccggggctgtgcagggctgggcggggagcgaggacccggcggctcctgattgcggccccgggggaggtggccgagccggataagctgcggcgggctggagggcggccacctccc

SEQ ID NO: 408330 - DNA, 122 bp, Homo sapiens
gtctcagtgccagagtatgagtggagataattacggagaagtcatactctctcacaccctcggctttcttgttgtgtccttcagcaaaacagtggatttaaatctccttgcacaagcttgag

SEQ ID NO: 408331 - DNA, 122 bp, Homo sapiens
tgtaccataggtgattctagctgcccttctggaatttgcatcactttcatcctttttccccgctctgctttgtctgttcattttatttctatattctgatactttgatctcactcttgagag

SEQ ID NO: 408332 - DNA, 122 bp, Homo sapiens
gggtacgccgggagttgtagtcctgacggcacagccttgcagcgtctccggaagtggaggcgggagcggcacggcagccactgcttggggtagcgggagggcagactctgggcgccactccc

SEQ ID NO: 408333 - DNA, 122 bp, Homo sapiens
aaaagtatttatcaactgcctcccttgtgccacatgttgtcctaggatctggggacacaacggtgaacagccctgttctcacagtgtttacattacaggaaagaaaacacataaacacaaat

SEQ ID NO: 408334 - DNA, 122 bp, Homo sapiens
gcgggcatttttggtctcctgtcccagcgtccaggcctgagcccgcgcgggttggctgggcgccctgctttgtaagtaaccaatcttgctggattctgaggactatccaggcggatgggccc

SEQ ID NO: 408335 - DNA, 122 bp, Homo sapiens
ccattgccagggtgagggaggccacctgggggcatatgttgctttctatcttgcagctatcggtttaggaacaaaaggaaaagcagtttttttccgtgactcagtttccaagcttaactttt

SEQ ID NO: 408336 - DNA, 122 bp, Homo sapiens
ggtgtcagaacaataggtatccctccctgctgctgagcagctgtatggggcaaaaagccccgattgagcctggcccgcctgaacctgggatagcccagatataaaatgataataacattgac

SEQ ID NO: 408337 - DNA, 122 bp, Homo sapiens
aggcgggagcaagaggtgagagagtcagcccaagctgagaagacttggccgggagccgggcgtgctctgcccgttccagggggcctaactcgatggacgtctgtctcccatctccctgctgg

SEQ ID NO: 408338 - DNA, 122 bp, Homo sapiens
gcggccccgcgcacgcgcgcgcactcacagctcatccactattgctcaggagcccgtccacgccctaaaagcaaaacccttaaccaatcattgcagccgcgtggggcatcacgggaactccg

SEQ ID NO: 408339 - DNA, 122 bp, Homo sapiens
ctatctgccctatctcggttacagtgtagtcctccccagggtcatcctatgtacacactacgtatttctagccaacgaggagggggaatcaaacagaaagagagacaaacagagatatatcg

SEQ ID NO: 408340 - DNA, 122 bp, Homo sapiens
ggctccttcctccgcccttcctcgagagctgagattgttctggaagcttctggattctggcgccccgccccagtgcccggatgctggggcgagggagggtgcactgcggcgccccctcctcg

SEQ ID NO: 408341 - DNA, 122 bp, Homo sapiens
gtctttcttaaggcactggaatcccacggatggagtgatgggtggcggagggtccctgggcgccgtgctattaggagtggcagggtatccgcgagcagggcccaggcgctccctcagcagcc

SEQ ID NO: 408342 - DNA, 122 bp, Homo sapiens
aaagctgaacctgtggggcttccctgcttccaggtgctgatgtcaccaggagaccagggccgagagactactaacagccttctccggttgccggagacaatggccaggtgcagtcacgtgac

SEQ ID NO: 408343 - DNA, 122 bp, Homo sapiens
ctcaaagcaaaaatgatttagattgaagatttttgtaaaaagcttgaaattgaagtataccgctaatacaaatgaactttttaaaagtggtgtgccagaaaacagtaaatcagtttggtaaa

SEQ ID NO: 408344 - DNA, 122 bp, Homo sapiens
gtctgctgtgttaactattttctgcacagggccttagacctggtgctttactgtccaagtcgaaacagacaatccagcacatggtgctaataaaaagagagattgggtgcctagtggccaaa

SEQ ID NO: 408345 - DNA, 122 bp, Homo sapiens
acctcaggtgatccgcctgccttggcctcccaaagtgctgggattataggcgtgagccaccgcgcccggcctaaaactgccccttcttaagaggctctgctaaaaggacatggagtccatct

SEQ ID NO: 408346 - DNA, 122 bp, Homo sapiens
ccactgtacccgatcctattcaatgattcttgctcacctgctccttgttgttctccaaagcgggcagcacctctttgacagttcgctccaccagcactcctccaaccatgcggtagcactta

SEQ ID NO: 408347 - DNA, 122 bp, Homo sapiens
gaaggatgcggttggcacacagtgcgaggagaaaggggttcttcgggctgagcgcgggctcgctcagctcagcgtcatcaaagaattgcaaagtagagaagaaagcggctgattaccaagga

SEQ ID NO: 408348 - DNA, 122 bp, Homo sapiens
gatcttccatgtggcccagggtgggtggcggctgctgactacagactacgtggccttcagcgatgctgactcaggctttgctgacgcccagctggtgctcacccgcaaggacctccctttgg

SEQ ID NO: 408349 - DNA, 122 bp, Homo sapiens
tttttattgcagtatactgtaaagtcactgcattcgactatctccgctactacacatttacgcagactgatttccataaccaaaacacaagcacaaagctcatgcccccgactcacgcaacc

SEQ ID NO: 408350 - DNA, 122 bp, Homo sapiens
ccctttctctctcctattgtcaatatcaccgggcggctgagtccatggcacacgcgcaaccgaaccttctggccagcagcgcccgcctccggcgcccgcccactggagacttcaaacgggaa

SEQ ID NO: 408351 - DNA, 122 bp, Homo sapiens
tgtgtgtaaactagtagcaaaggacgtgccggagctggcagttccccctgagaaggtgagcgagccgacgcctggccagaccagctgaatcgcagtgtccttgaaactcgagttgtttgggc

SEQ ID NO: 408352 - DNA, 122 bp, Homo sapiens
ttgcaggacccacagcaagcctggtacaggcggaggaggccttgctgtccctttttggcccgtggggctgtccatcttaaatttaaggaagagggaggcggggtgcagggactcacacctgt

SEQ ID NO: 408353 - DNA, 122 bp, Homo sapiens
cctcccaactctcatcttgaattgtaactcccataattccttcgcgctgtaggagggaaccgattggagataattgaatcatggggtcggtttcccccatactgttctagtggtagtgagta

SEQ ID NO: 408354 - DNA, 122 bp, Homo sapiens
cagtgtctcctctcagcacgcttctcacctcaccgaactgggagcgccaggtcacgtgctcgtatctccaagtgagctggaggcctcaggctgcccgtttcacctccagccctgggcacaat

SEQ ID NO: 408355 - DNA, 122 bp, Homo sapiens
cacgctgcgcacccacgggaggatttcagggaggcggtggccaagtcggggagcgcatgccggggccgtactccctcctgggacagcgagccttccgaaagtccgagccccaagaaaagttg

SEQ ID NO: 408356 - DNA, 122 bp, Homo sapiens
gagatctccaacaactgcctgtccaaggcccagctggctgaggtggtggagtccatgttccgggagtcgggattccaggacaaggaggaactgacatgggaagattttcacttcatgctgcg

SEQ ID NO: 408357 - DNA, 122 bp, Homo sapiens
ctcccagtggtggtggggagcggtgggggtagacgggggcgcgcccaggcttttctaatccggcgctggtgggggagaaccgagggcgccaccgcccctccccgcaggtccggggccgaggg

SEQ ID NO: 408358 - DNA, 122 bp, Homo sapiens
cgcggccccgcccccgccgccccagtccccgcccctcgcgccttcgtttattcctccgcgcgctgggacaggctgcttcttcgccagaaccaaccggttgcttgctgtcccagcggcgcccc

SEQ ID NO: 408359 - DNA, 122 bp, Homo sapiens
gctgactgcccctcggctctgtagaggagtgctcccttctgacaggtgggcggtcctgctcgaaggccgcgtttccccgacgttctgcccagcatgctgagggcacctctctcctcagtgcg

SEQ ID NO: 408360 - DNA, 122 bp, Homo sapiens
cgcactcgcgcttgatgcggtgcacctcgtcttggtgcgcctggtaggcggcacgcaggtcggctgccttggtcttgtcagcctgcatgcagttactgagcgcctcctctgcctgcttgcgc

SEQ ID NO: 408361 - DNA, 122 bp, Homo sapiens
cgggacctacagcccgccatgcctgagcctcccccagcctccgtgggctcctgtgcagcccgagcctccctgaggagcgccgccccctgctcaacggcgcgcagtcccatcgaccacccaag

SEQ ID NO: 408362 - DNA, 122 bp, Homo sapiens
gtttctcatctgatgaatttcatcacagtccatggatccaacacagcaaggcggcctcaccgccctcaggagagggcccctctgtcctggctgtccttcaggtgcaaagtgattcccagggc

SEQ ID NO: 408363 - DNA, 122 bp, Homo sapiens
gccccaggcccaggaggagcagagccgcacacggcccgcggcccagccgccgagcccccacgcacatcctcgtctctgctgtcgccagagtctgggttttccttgcggggtgtggctataag

SEQ ID NO: 408364 - DNA, 122 bp, Homo sapiens
gcgcaccctgggagcggagccgggccgctggcgctccgggtcttgggcttggcaccgcggcgcaccgggtggcaagcacagcgcttagcggaggccacacctgcacctcatttgcttctgag

SEQ ID NO: 408365 - DNA, 122 bp, Homo sapiens
cggaacgcgccgcagaaggggtcctggtgacgagtcccgcgttctctccttgaatccactcgccagcccgccgccctctgccgccgcaccctgcacacccgcccctctcctgtgccaggtga

SEQ ID NO: 408366 - DNA, 122 bp, Homo sapiens
tccatcctccccctcttggttgcctgtcactgtttcttcctgcatcccgtggggtttcttcgctctcgtcaccttctgggagaagaaccctggggaagaagccaaatgcggatggacagcag

SEQ ID NO: 408367 - DNA, 122 bp, Homo sapiens
gacaggcgcgcccacgccctggcaaatgtcaggggcccctccctcgccgaccaggggaagcgccgggcactcagcattcatttcaaacctggatctcccggcaccccctccctcccttagcc

SEQ ID NO: 408368 - DNA, 122 bp, Homo sapiens
ctcccggctggccggctcctgcatggacaaaggggtcctttgtgggctgaccgcggctggcggggcggcggggcgctggctccgcattgctgatgaaacggagccctttgttgtccctcctc

SEQ ID NO: 408369 - DNA, 122 bp, Homo sapiens
gatttgaaaacatcatttaaatatttctccgtgaaatatgcaatattttttaaatgagcccgtcacgccctgttgatgagagtgcaaaatgaccctgcttctaggtgctcaatatttgtaca

SEQ ID NO: 408370 - DNA, 122 bp, Homo sapiens
ccgtgaaaggaggccatgctcctagcctgggcacactgagccaggccctgttcctggggtcgcgggctagcccgctcgagagcggggggctcccggaactgcccgcgcggccccggcgccca

SEQ ID NO: 408371 - DNA, 122 bp, Homo sapiens
gaccgtggaccaaggtgacctgcgtgggtgagcgatccattagccgaatgacagcgctgccgcagaaagccagaaaaaggatatgcgtgggaagcgcaaaagcgtgggctgggcctgcagca

SEQ ID NO: 408372 - DNA, 122 bp, Homo sapiens
ctcccctgcactggctgcagccacgacactctgctgacccctggtggtgcaggcgggcagcggtcccgggcccccggagacgccagctggctcctcccaggcgggagaaaggggcgaggcag

SEQ ID NO: 408373 - DNA, 122 bp, Homo sapiens
caatacatgccaaggtcctcccaggaccgtcttcatcaagcttccccgcttgatgaaatacgtcatatcaatatccctacggagttatttttagagctcaatgaagggccggtatctcctgt

SEQ ID NO: 408374 - DNA, 122 bp, Homo sapiens
gaggtggcgcagcgtgtgatcaaactgcaccgcgggcgaggggtggctgccatgcagagccggcagtgggtccgggacagctgcaggaagctctcagggcttctccgccagaagaatgcagt

SEQ ID NO: 408375 - DNA, 122 bp, Homo sapiens
gccgcggggagcctagcatggaagagcgcgcgggtccggcaggtaagagcggcagagacccgtccgcgccgcaggcgaggactaggggagagggatgggggcggccatggccggggcgggct

SEQ ID NO: 408376 - DNA, 122 bp, Homo sapiens
tttcatccccattatgtttctttctctttttattattggaatgatccaattctcacaaagcggcccatgcttcttgtggttacactatttccatttggaatatttgtgggtttcaattattt

SEQ ID NO: 408377 - DNA, 122 bp, Homo sapiens
tggtgacacgtcctccatatctacctcctttcctagccatggctccatccgccccctccccggtcttcccagaatttacagccggtagagccgcagtcaacaaacacgcaaacaccacctgt

SEQ ID NO: 408378 - DNA, 122 bp, Homo sapiens
ggcacaagcctctctcagtaggaagtgacttttctgaacacctcacccgggtagcatttccggacttctgtttttttcatctgcccagccctgaggggaacaggctggtagcagtcagaggg

SEQ ID NO: 408379 - DNA, 122 bp, Homo sapiens
tagctccatgtccttaactcatcacaatctagtagagaagagataaaacatgcacaaagacgacattgattgtcctccaaggaggacagataaaagactgggaaatcagagtaaaagaaatt

SEQ ID NO: 408380 - DNA, 122 bp, Homo sapiens
tgctcggaggctgtcttgtcaggaccctctcccccgagcccaggccctcgtcccggcccccgggagctccgtacccagccacacatccccgaagcagccggtgcccagccggcgctccagcg

SEQ ID NO: 408381 - DNA, 122 bp, Homo sapiens
gccctcgtgcccccggagtttatttgcacctcactcctccatagctgccaccagcactggcgtgattttataatgtttgcactttcaactatagcaagataaatgggtgcgattaccccgct

SEQ ID NO: 408382 - DNA, 122 bp, Homo sapiens
ggcactttggggggccaaggcaggcggctgggaggtggaggttgtagcgagccgagatcacgccgctgcactccagcctgggcaccattgagcactgagttaacgagactccgtctgcaatc

SEQ ID NO: 408383 - DNA, 122 bp, Homo sapiens
gcctgggcgtgcctgcgttcgttgggggcacgacgtcatcgtgggaagcgtgtactttttcggattactgcttggcggattagaaacccgtagatcagttctaggttagccctgattaactg

SEQ ID NO: 408384 - DNA, 122 bp, Homo sapiens
agcgagtggttgctatgcagccttgtttattcaaggagagctttgctgagagctggagcacgccagcagtggagctcgtggccacccagcccctgctcagacaggaggctgcggcccaggac

SEQ ID NO: 408385 - DNA, 122 bp, Homo sapiens
gatgatcaacaaacactttctgctcagccccttcttcctgcagctggcttactgaagcaccgtcactggagttctttgaagatgggacaaatggagagaatcaaagattgaaaagcacttaa

SEQ ID NO: 408386 - DNA, 122 bp, Homo sapiens
gaaagacgagtcgcaagatatcatcaccaggggaaaccaggctgagctggatctttacgtcgtcaccagtgggcggggagaccagccttgtacccactggacagcgggcccattccgagtca

SEQ ID NO: 408387 - DNA, 122 bp, Homo sapiens
tcctcctccgggactggacagagacatggaaagagaggactgaggtgggcagggtatccgcgggactctgctgtcctctggactctcccagccatctgaaaggaggcatagtgggcagagtt

SEQ ID NO: 408388 - DNA, 122 bp, Homo sapiens
gggagagcacagtgactatggcactttgtattggaactcagtgtttgttggtctgtctgtcggaatggaaagcaatgcagggcacaatttcgctggtgcccacagaggctgcatttagaaca

SEQ ID NO: 408389 - DNA, 122 bp, Homo sapiens
tgcgcgcggggccgcgggaggggcgcgggttcgttcctttgaactcccagcctttgttcccggccaccagagccccagcgctcgtacacttccggccccgggacctctgcggttacctgggc

SEQ ID NO: 408390 - DNA, 122 bp, Homo sapiens
gccggcgagccaaagggactacaaatcccagtgtgcatgggcaggggcttctgggctgggcgcgggggtggaggggcagtagttgcgcactgaagtgaggtggggaatccgaggtacttgag

SEQ ID NO: 408391 - DNA, 122 bp, Homo sapiens
tagttctctcttcagcatgagctaaacatggctcctcagctggcctggatcggggagaagcgaaaaactggacaccaagaaatccagggtggcctgccatgccaccctggggaaccctattt

SEQ ID NO: 408392 - DNA, 122 bp, Homo sapiens
tggcatggcgctctagcttttgttccttttaattccgcggcctccctctcctctgcccgccgattacagcaccccgaaggcttcctgctaacgtccaagggcagcaagctctgcagacggta

SEQ ID NO: 408393 - DNA, 122 bp, Homo sapiens
gtgacgagggggcattaaagaacccagcatggggccctgctaagcttgggccggagcgcccgcccaggtggcccgtccgtgacttctgccctgtgtgcttgcccggattgttaggaagagtg

SEQ ID NO: 408394 - DNA, 122 bp, Homo sapiens
gcggagcaaggcggggaggcggggtggtgacgtcagcgcggccgcggcggagtgtagtggcggggcgggctgctggcagggagcggccgagacgtgcagggccttcccgggggatcggaagg

SEQ ID NO: 408395 - DNA, 122 bp, Homo sapiens
ggccctgcctcgcctcccgtgtgcccaagcacagcacccctaaagagtcacatcgcccttcgctgcctaccccatggtctcccccagaaccttccctgcatggtggcctgcagggggccacc

SEQ ID NO: 408396 - DNA, 122 bp, Homo sapiens
tttgcctgcacccagccatcgtcatgacaacgcctccaccgcggccagcccagtgtccaccgagggcagcggttgaatgtcctcattattccgccccccacacgctttgcccgtgccaagca

SEQ ID NO: 408397 - DNA, 122 bp, Homo sapiens
gcactccttgctcctcagtctgggctccgggtcctgccccagtcttcctccggggggttccgtcctcaacacgcccctagggcccccagcagtccggccttggtaccctctccccgtccgga

SEQ ID NO: 408398 - DNA, 122 bp, Homo sapiens
gcaagtgagagcccgcagggctgcccggaggacgaatcacataaatcgctcaggcgccaacgaagaccatcagacctgccagtgcccgtgaggtctccaagcaccctttggcatcagtgact

SEQ ID NO: 408399 - DNA, 122 bp, Homo sapiens
ctcctctgccctccccccgggccgaatagattacagctctgtattcagaaacacgcgccgcgcgcattcctcctcgcgaacccaacagaagaccaggcgcttgtggctgctggcgaaatcga

SEQ ID NO: 408400 - DNA, 122 bp, Homo sapiens
cttgcccctcaagaagcagccaggccagccaaggcccaccagcaagccccccgccagtggcgcagcagccaacgtcagcaccagcggcatcaccccgggccaggcagctgccatcgcctcga

SEQ ID NO: 408401 - DNA, 122 bp, Homo sapiens
ccgaggcctcataaaccgttttgttcattatttcacattgctatccaaatgttaaaccatcgttacagtcactactgcacaaaatgcactataaaataagagttctagaatgctcatattct

SEQ ID NO: 408402 - DNA, 122 bp, Homo sapiens
tcctcctgcccgtagtagccatggcggccatgagtttgttgcggcgggtttcggttactgcggtggcagctctgtctggccggccccttggcactcgcctcggatttgggggcttcctcact

SEQ ID NO: 408403 - DNA, 122 bp, Homo sapiens
gaccctcccggatgtgcgtggggggagtcactccttcagggagcagtggggacggcgccccgtgctagctggagggattcccctcccccaactctccatccttccccaccccttccagatgt

SEQ ID NO: 408404 - DNA, 122 bp, Homo sapiens
caggcagaggcggagggacgctgtccccgattgcagctggcggggcgaggcctggcagggcgaggcctggcgggggcggggcctggcgggggcggggccggcggcacctgggtgaggtcgct

SEQ ID NO: 408405 - DNA, 122 bp, Homo sapiens
tgccgtgattctgttgagtttcacaagggtgaagggagatacaaagactactcataattacggcatagccactgtgaacatgcaagcagtgcccaactgacatatgcaaattagaaatggaa

SEQ ID NO: 408406 - DNA, 122 bp, Homo sapiens
acctaaataatgtgctcgaacaaccaaaggattggctatacaaatgttcgttcataaattcgccacagtcattgcaaatattgaaagtggtgatgtccttgaaggaaggcactttgatactg

SEQ ID NO: 408407 - DNA, 122 bp, Homo sapiens
tgggcctgtctgtgcaggggatcataggggaggggtacgggccgccaggctgtcatgggccgcggaatgacagcaattgcctctactgtgactgcagcgctctggattcagggagagggaca

SEQ ID NO: 408408 - DNA, 122 bp, Homo sapiens
gtctgtgccggttgttcagtggcgcggctctggcttccctagggtgccaaagttctttaacgtcatcggcttgcccactgtctggcctgtgggtgtcaaatgtcccacctcttcaaatgtgc

SEQ ID NO: 408409 - DNA, 122 bp, Homo sapiens
agtcaagaattgttaggccctattaagggaggtgacccttaaccacctgagttatgcagacgagtgacatagtcagagaagttatttagaaaattaccctggcagcccttgtgaaggatgaa

SEQ ID NO: 408410 - DNA, 122 bp, Homo sapiens
ttgcagtcaaatactggatttgtaaccttcagggctgacatgctgcccagtttgcttcatcgggagaatagcaacaggtagacacatctcaaggctaaatctgctcatgtcgccactgctct

SEQ ID NO: 408411 - DNA, 122 bp, Homo sapiens
ctgcttttgtcccttctcaccctgggaatgtcacgcctcgctacttcactttgagatgctcgagaaagtggctttgttattcccttttagacatacacgaaattgttctcattccccccgct

SEQ ID NO: 408412 - DNA, 122 bp, Homo sapiens
tttcatcttaagttgggcacattgctgaccccaacaacatcagggtacttttaccaagaacgcatgggataatggatactgggtaggcagctaatggtttctgtcacaataattaacatctt

SEQ ID NO: 408413 - DNA, 122 bp, Homo sapiens
ccgtcctcggtccgtttctgtgtgttcaggcagatgaattctgtctgtcctcggggtcaccggttctgccctctctcgtctccactctgccacttagcccatccccagagatttttattatg

SEQ ID NO: 408414 - DNA, 122 bp, Homo sapiens
accaatgcttagtcccatattcctgggaagacaaacaaagcttcatgtacatttggtcaccgggtgggccatttaaacattttgtaaggggatttcattcaattgttatttgaattccaatt

SEQ ID NO: 408415 - DNA, 122 bp, Homo sapiens
accaggtgcaagtccggaggtgtttcgagtacaaaaagcaggagtacgtggtggtcgaggcggaggaagagcttacccccagcagtggagatggcctgtatctcctgaccatggagttcgcc

SEQ ID NO: 408416 - DNA, 122 bp, Homo sapiens
gcccaacatgactgctgaccctgggcctcactcacagctgggcaaccccggccccgcccccgagcccctgcctgcagaacacccggggacggcccgaggaggctcacccaggtaggagcaca

SEQ ID NO: 408417 - DNA, 122 bp, Homo sapiens
ttctgtgccccgtgagcgctcaacgccctggtgtgttcactgaccatggtgcctgggctgcggcgccgggcggggcacggcgggacttttcgggacctttcctggggggagcctcgctttcc

SEQ ID NO: 408418 - DNA, 122 bp, Homo sapiens
tgctccaggtgaggtatttccaccagcgtggatgcaactgaaaccacgccctctttccaccgtctggcccaaccccagccagaagcagctgatgggacggtaacaatgacaactggcattta

SEQ ID NO: 408419 - DNA, 122 bp, Homo sapiens
ccttacataggctgtcccaggcaatgcccagcctcatcctgtaaggaagtcggaagtctccgctttggaaactagttagctcacactcttttcgggtttgttctcttctgggcactcctagt

SEQ ID NO: 408420 - DNA, 122 bp, Homo sapiens
tccctgcctggctcgtggcgtgggcacagttagcggctgctattatgtcttgtaacattgcgacgtcgtgtccttcctcttctcctccctgtctctcctcccagagccagcctgctctttcc

SEQ ID NO: 408421 - DNA, 122 bp, Homo sapiens
ccgtggctagaacacggagagcggcgggcagtgcagccaatgggaggcggcgctgcctagcggctggtaggcggtgcctgcgcgggtgttaggttagcgcgaggcgtgacctagttgacagg

SEQ ID NO: 408422 - DNA, 122 bp, Homo sapiens
tcaggctcaaatggaggtccctcccgaatgagcactgacacctgtgtgcccggacatccacgagggccccaacacctgtgctcctgacagctccatgcactaagcagggcacagtctggatc

SEQ ID NO: 408423 - DNA, 122 bp, Homo sapiens
gtgaggcaggtaatgtcatccccattcttactaggagaaaaccaaattaagtagtttcttcgaagccaagcagctgggaaaccgtggggccagagccctaatccaccatccccaggatttac

SEQ ID NO: 408424 - DNA, 122 bp, Homo sapiens
tgcgttcccaactgctcaaatctagctggttccccaatcccagtacacttgcagtagcaacggggaccctcttcctaaagttgcaccaagccagggattctccactcatttcgcccaggtcc

SEQ ID NO: 408425 - DNA, 122 bp, Homo sapiens
gaagaagaggagcggcgcatgcaagaagagcgccgggcagcctgtgctgagaagctcaagcgactcgatgaaaagtttggggcacctgacaagcggctcaaagcagagcctgctgccccacc

SEQ ID NO: 408426 - DNA, 122 bp, Homo sapiens
aaacgtgggcgcctacggctgcctggctgctgccatggaatgctctgcagtgggcggctacgacaacagaaacacactttctcacaaggctggggccgcaccgaggctctggcaaggctggt

SEQ ID NO: 408427 - DNA, 122 bp, Homo sapiens
ctgcatttctgtagatgaagccaatgaaagcaacgtgataattatatttcttttttaaaacgctgacactgctgagtagcaagcaggtagtaaatgcttgcaagactgtttgcattgctgag

SEQ ID NO: 408428 - DNA, 122 bp, Homo sapiens
gggccctgcaggggctccgcacaaggcaggtaacattcctggggcggcagctgctctgtgcgcagctccggatccaggaaaatcgctcaggtcctggggagaggagctccaagctctctggg

SEQ ID NO: 408429 - DNA, 122 bp, Homo sapiens
gagcccttctctcctgcctggggtgcagggcctcagtgctaatatgaacagggtcccagtcgttagttggctgccatctgcactgttgtcaccccagaataaataattgagaagcacatgcc

SEQ ID NO: 408430 - DNA, 122 bp, Homo sapiens
cctcagagaacacagaaacagctgaaaccagggtccgagctcaggaaacctggactacagcgcagcagggtaaacctgacaaataaacgcgacggggaactccgtcccaagctgctgatctg

SEQ ID NO: 408431 - DNA, 122 bp, Homo sapiens
gaacattaagacacacacacaaaatagatccacggggacaaagaaggccaggcacatgcgcgcgcacacgcgcgcacacacacacacacacacacacacacacacagacaaaccaagcagcc

SEQ ID NO: 408432 - DNA, 122 bp, Homo sapiens
acttttcagccactggctggggcaaggcgtaccatcccgatgccttaggtgagataaatgcgtttccttggctttgaagcgcctctggtccgtgcagccaccagcagtacaaaaataattgc

SEQ ID NO: 408433 - DNA, 122 bp, Homo sapiens
ctctcactcagagagagacaccgataactgtttctttccatggagtacattccaccgtcccgttttcccaccacaccgcgtggcctgacgctttcctctgtcatgaacggctctgatacaac

SEQ ID NO: 408434 - DNA, 122 bp, Homo sapiens
caccaactaccatttcagccttgttgccccggttgccctttcctcaccataaacttcaaccgaatgtaacaatatggtaggagagggatctcattaagcctcatatcgtagattctacacac

SEQ ID NO: 408435 - DNA, 122 bp, Homo sapiens
attgtgagctacgcttagccctggccacaggcattcatcctgtattatgcagggaaatctcgttcttccacctgtgtgcagagatttcctgaattccagccacagcggccatttctctatgg

SEQ ID NO: 408436 - DNA, 122 bp, Homo sapiens
aactactgccacgatttaacctaaaaagcttcatctgtattttctgccacagtttgcttccgtttccttcagtcactattccctggcgaagtctccacgcgctcccgttcgccggggaactt

SEQ ID NO: 408437 - DNA, 122 bp, Homo sapiens
ccaccctgcagccgagcaatctccgtaaaacgaacacctggcttagtttctgctggaaaccgttgaatagtccccactgtcttctggaagggtctgggcagctcggcgtggcgtccacggcc

SEQ ID NO: 408438 - DNA, 122 bp, Homo sapiens
ttttttttttgagacagggtcttactctgttgctgaggctggagtgcagtggtgtgatctcggctcacaacagccttgacctcctgagcgtaagtgatgctcccacttcagcctcccaagca

SEQ ID NO: 408439 - DNA, 122 bp, Homo sapiens
aaaatggtgttgggccagtgatcatgtcggctgccttatgaaatgtacttcttgtgccctcgcagaggagttactcttgatactgaccagggttagcggaagtgatgaatgtatttatatgt

SEQ ID NO: 408440 - DNA, 122 bp, Homo sapiens
ccggacggctctcagcacttaggagacaccccattttataagtgaaaacaggatcccacacggtgacaggcagcctcccgggcagtggtcaccaggccgggggctgagtagcaccagccccg

SEQ ID NO: 408441 - DNA, 122 bp, Homo sapiens
tctagaaacatacacttctttaatcccaaagaagtcatttcagaatctgtaggtttgaggcgtgtgtatgaatttttaaatctcaagcactgatttggttagaaacacagttaatattttat

SEQ ID NO: 408442 - DNA, 122 bp, Homo sapiens
ctcatcaacccctttggcctcgccccctattctttcattggctcctcttctctaaagatccgccccctgttagtctgaaccacgtcccctcgccttcaaggcttcctaccgctggtcctcgc

SEQ ID NO: 408443 - DNA, 122 bp, Homo sapiens
gagcgagagcattgctcaccgccactcccgggacctgtgcagaacgagcggccccagccccggctctggccccagcgttgactgagaaccatcgccctgcacctgaggcaggagaacaggga

SEQ ID NO: 408444 - DNA, 122 bp, Homo sapiens
tggacagtgcctacttctcccagaaatgatgtgccacaatacacatggggaattgccagccggggaagctcagccaagtcttgatgttcggagtttggaacttagtcataaagacatttttg

SEQ ID NO: 408445 - DNA, 122 bp, Homo sapiens
ttttttttttttttttgagacaggattttgttctgttgcccaggctggagtgtagtggtgcgatctcagcttgcttgcgaccttggcctcctgggctcaagtaattctcccacctcagcctc

SEQ ID NO: 408446 - DNA, 122 bp, Homo sapiens
ctggaggcgtgcgccgggcgagaagccgcggccgcgggagcgcagtatggggaagaaccgcgagatgcgcctgactcacatctgctgctgctgcctcctttaccagctggggttcctgtcga

SEQ ID NO: 408447 - DNA, 122 bp, Homo sapiens
ctcataaaatgaaggttgatactatcaccccacagagttgttctaagaacactaaactggcgtgcattctacaaatactaattgttattttgtttgtcaccatcatcatcatcctcacccat

SEQ ID NO: 408448 - DNA, 122 bp, Homo sapiens
cagaagagactgaaatgaggcacctcttgtcacagtcaaggcagaagcggaaacggaggccgagactgcgcaggcgcagaggaggctagcgttccttgctgcctcgccccgcggcctctagg

SEQ ID NO: 408449 - DNA, 122 bp, Homo sapiens
tgttttaaagaggaataggtcaagatgaccaatctggggaagaacttttgccaggcagtgcgtatggggaacagagctgcgttggccttctgttaaagcagctggggatttcggttttggct

SEQ ID NO: 408450 - DNA, 122 bp, Homo sapiens
agtgcagcttactactctgacaaaaagagtattataaaacaacagacatagggccgggcacggtggctcaagcctgtaatcccagcactttgggaggccaaggagggcggatcacaaggtca

SEQ ID NO: 408451 - DNA, 122 bp, Homo sapiens
acctcagccaatgacgtaggcggaggtagagaagacgcccctgacttggacactccctaccgagcacacggggaagacgcccccctaacctggaactccgattggccaagggcggaaccgag

SEQ ID NO: 408452 - DNA, 122 bp, Homo sapiens
acagatgagaaaactgaagcttagaaaaatgaagtcatttgtccccgtctggattcgaaccgagatctgacaccaaagctcatgctgaggggagttaaggaggtttgttcagtccctaggca

SEQ ID NO: 408453 - DNA, 122 bp, Homo sapiens
cccagcgcataaaatataccggcgtttcctgaaataaatcgtgtcgtttcatgggaaatacggcagccgagctccggctactcctgtgccccgatatcctctctctatcgctcacttgaagc

SEQ ID NO: 408454 - DNA, 122 bp, Homo sapiens
attttcagcgcccaaaaccagaatgtcctctcctacaagcaagaatctcagagctgccagcgcccccatgaattcccccaggtcttcccccaccccagaccgtgtggcgggtgagcctctgt

SEQ ID NO: 408455 - DNA, 122 bp, Homo sapiens
gcataagcccattccccagccccccagcaccacctacacatgagtgtgggccacagaaatcgattgaacacctactatgtgccgggcactattctgaggacacagcagtgataagaaagagt

SEQ ID NO: 408456 - DNA, 122 bp, Homo sapiens
agaacgtgcctcctcgccgttgctcctaagtggagtaggtggccgggactgaaagccgggcgtgtctgactccacaactcctgctgtgaatcatcacactctgccccggccccagcgtctcc

SEQ ID NO: 408457 - DNA, 122 bp, Homo sapiens
gagaggtcagcaggctcgggggcctctgctccagcggacaacaagcgcaccgggcgggaacggccgcctccccaggcgctgcagcctagctctcatgtgacccacggaacttagcccctctg

SEQ ID NO: 408458 - DNA, 122 bp, Homo sapiens
ggggactacaggggaccagagacgtgagatagtccttaaaatacatatctaatctgtcctcgtcattttccactgccaccaccctattcaactactcggtgataaccctgtaattctccagt

SEQ ID NO: 408459 - DNA, 122 bp, Homo sapiens
ccctctccctcctaagccttccagctaagggttctgctcttccggggtcagggcaggccccgggccggtgcgctaatccggctaggaggcttcgggcgaggcaggctggagacgccagggca

SEQ ID NO: 408460 - DNA, 122 bp, Homo sapiens
acacctcctccgggttcacccacatggtcctggctgccgcgggcgggcgcacaatgggcccgtgggtccagtcctgcacccaccaccgcgacaggcgcgcactcctgggcacacgcgcgccc

SEQ ID NO: 408461 - DNA, 122 bp, Homo sapiens
gcccgagcgccgggtctaggcgggctgcaggtgccggcaagtgctggggccgggccgccgcggaacccacctgtgctgggcctcaggccttgcgccgccctcgggctgccgtcgccaacccc

SEQ ID NO: 408462 - DNA, 122 bp, Homo sapiens
ttcttctgcatcatgcatcctacactgcttttaaagaaactctgctatcctttgttttaccgtctaacatttctttgtttcccttctgacatgtttcagcctcttgtcatcacttggaacat

SEQ ID NO: 408463 - DNA, 122 bp, Homo sapiens
agagtcagatactgggttctttagggtgtgtctccagcttgaagtgtgcctcacagtagacgcaggaaggccttgtttgatttgggttacaggagaagcagaggcccctgtttggggctgca

SEQ ID NO: 408464 - DNA, 122 bp, Homo sapiens
aggagactgcgccttccagggctctgggaagagggccggggcaccgggcagacagatgcgcgcacacacatagcgcaggcacaccgctagcgagcaaagtacactggaacaccggcactgag

SEQ ID NO: 408465 - DNA, 122 bp, Homo sapiens
tggttactgttctagttgttcctgcacctgtttgtgctccataatatccccctggctgctcgtgtcccatgtccaccagtgaccatgctcacttccacttccgatgtgagcaaggagagatt

SEQ ID NO: 408466 - DNA, 122 bp, Homo sapiens
aagctgtgcaaagcaggagctcaggctggtcatcttctgtcgcccctcataagtgatgtccgcttggtctggatcgatctctcccaggagcagatccacatccacaaaagctttgtcgaact

SEQ ID NO: 408467 - DNA, 122 bp, Homo sapiens
ttcggcggcccgaggtgggggttttgagtcggttagtggaggcagtgggagcaggatgggcggagcttctgttccaaaaatttcccctaagtgcggttgacagtgtgcaggcaggcgggggt

SEQ ID NO: 408468 - DNA, 122 bp, Homo sapiens
ccgggcgggcgggggaggcgagagcaagaaacctgtgggacctgtggggagccgcgtccgcggggctggcgcgcgcgggggcggcctcgggctcgcgcgcaaaggcgcgggcgcgggcgggg

SEQ ID NO: 408469 - DNA, 122 bp, Homo sapiens
aaagaatatgcccatgtctgttggcttggtgatgttgagctgctcgagaacagtctggtccgtttcatactcaacaaataatccaaataaaacaatcatggcaatttccaggactatagcca

SEQ ID NO: 408470 - DNA, 122 bp, Homo sapiens
ggcggggcgtcagtgccggccggggtcccggggcccccgcagcccagcgggcgctcggtccgtccagactggcccagagcgcttgcggaagaaatatttctggaacacttgttatgcctcag

SEQ ID NO: 408471 - DNA, 122 bp, Homo sapiens
agctccgccttctgtcagatcagcagtggcatgagattctcataggagaacaagccctatcgtgaactgtgcaagtgagggatctaggttgcatgctccttatgagattcttaactaatgtc

SEQ ID NO: 408472 - DNA, 122 bp, Homo sapiens
agcctaatcatccctgcttctggtcttggccacttggcaatcatggggaagttgactccccgcctcacttgggcttggagctggatacttgtggccacgcccaggataggttgccagagttt

SEQ ID NO: 408473 - DNA, 122 bp, Homo sapiens
aaacaacaatacaaatacaaactaacccttgtccagtgagtattacatgccaagaggcaccgttccaagtgctttacatataattaactaatttcagcctcacaaaatccaccctatgggct

SEQ ID NO: 408474 - DNA, 122 bp, Homo sapiens
tccgaacggtcggcctctgctgcgcctgcgtggtcgggaggggaagtgaggcggtttcctcggcgccttttccggcagcggcggcggcagaactgggaggaggagttggaggccggagggag

SEQ ID NO: 408475 - DNA, 122 bp, Homo sapiens
tccagcatcagggtcatgagcctgtagctgcagcagcagggtccctgcaggcacatcctccggcacctccaccgagtaggcaggcacaggaaaggctggagcatggtcattggcatccagca

SEQ ID NO: 408476 - DNA, 122 bp, Homo sapiens
gccgccttcccgcaggcggggccggcccggcgcgcaccttgtctcggatgccctggcgcacggcctcgcgctccgcctccatcttggcgtacttggccttgcgctcctcctccgcctggcgc

SEQ ID NO: 408477 - DNA, 122 bp, Homo sapiens
tggaatgtgggaaaaatttccccagggagtcaaagtcgcccgcggcaggaagcggggttccggccactggacggctggttttcctgctctgccacctcccgggggatgtgagacctgcaggc

SEQ ID NO: 408478 - DNA, 122 bp, Homo sapiens
aatactctttggggttacttcctttaacaaagcttactggccattggagaagctgttttccgtttgtactgaagcaatagaaaaaaatatttgccaaatcagtttcactttctgttagagtt

SEQ ID NO: 408479 - DNA, 122 bp, Homo sapiens
acagacctgtcattaaaagtgccgcagctgtggactcagaacaattgtgtttgctcctcgcgcccattattagcattccaatcgtttaacatccacccgagatgaaacctctttggtggtgt

SEQ ID NO: 408480 - DNA, 122 bp, Homo sapiens
ggaggaggaggaaaaggaaggcaaaccaggatgtgtaggtttgagtggcagaagggagagcgatgtccctggatgaccacgagatggcgctgtccagcagggaaatgacatccgttctctct

SEQ ID NO: 408481 - DNA, 122 bp, Homo sapiens
gccgcagctcctgatcagggagaagagtagggggcggggcaagccgccccttgcctagtccggaaaatattctcattagggaaactgcaggaaagttgccctgggatacaaaaagaagtgga

SEQ ID NO: 408482 - DNA, 122 bp, Homo sapiens
ttgtgtaacttggtatggggctggggcacagaccaagattgacatgaaaggatgtgagatcgcatgtcttgtgtgactatctgcttctcagacaagcagttaggaactgagatgagatagta

SEQ ID NO: 408483 - DNA, 122 bp, Homo sapiens
aggctgagctggcttcaatgtctcacagctggtgcgcagagctaaatgacaactgaaatacgtcaaatatgcatctctcctctggcctccttcccacttttaggacgtgatcacgtgactac

SEQ ID NO: 408484 - DNA, 122 bp, Homo sapiens
ccccagctttgtggaacctgagggcggctcgggtcaggtcggtccccgcgggaggacaggcgcgacccgtccctcaggaccgacggcgtgtggctgcgggggcatggggtgcccctctcggc

SEQ ID NO: 408485 - DNA, 122 bp, Homo sapiens
taagtgactagtccaagatcataaagccagtaagtggcaaaaccaggaatactagttcttcgtgaatcagtaaatatttgttaagctcctggtttaggccaaacccggtatttgacactggg

SEQ ID NO: 408486 - DNA, 122 bp, Homo sapiens
accgtccaggacaggctgagggagtcaggggtggcatctgtcatggtcagctcccccaggcgaggcttgatggggggctcaggggtcatggtaggcactgcttgggtggtctcggcttcatc

SEQ ID NO: 408487 - DNA, 122 bp, Homo sapiens
ccggggctgcctggcctcctgggtgcgggaggtgcctccagattggcctggcttctgtgacgctggcccagatcacacaccagagcccttggtgggcagcggcacctgcaagcatactgcag

SEQ ID NO: 408488 - DNA, 122 bp, Homo sapiens
gaccagaggtaggaattcagggccgccattttcgtcgtctcttatcacgatgggaatcagcgttctctgctgctgctcctgctgaacacgacgacattccagccaccgggaactgctcggga

SEQ ID NO: 408489 - DNA, 122 bp, Homo sapiens
gtattgactgcccagcagtgtggatgggggccgggagtctgactaggcacctgtctggggcgaccgcctgagcagttggatacggcactagtccacctgggagccccggcctgcttggggtt

SEQ ID NO: 408490 - DNA, 122 bp, Homo sapiens
cttccaccacctctgtctcatcaggcagggcttcttgctgctgttggaaagagaaagtagcgttcagaggggtcaggaataaggccagcttcacctccaaagtgcctgtggcctcggataca

SEQ ID NO: 408491 - DNA, 122 bp, Homo sapiens
gaattgccatgtcgcatatctcctgggaagaacgctacaggcatggaggtggggtggtaccgcccccccttctctagggtggttcatctctacagaaatggcaaggaccaagatggagacca

SEQ ID NO: 408492 - DNA, 122 bp, Homo sapiens
tggtagtagccgggattctggtccatctgcgcctgggccccactcagcaccatccagacgcgggcacggtgctccagcgggacccctttccggacatagcgcttcactgaaggccgagagga

SEQ ID NO: 408493 - DNA, 122 bp, Homo sapiens
aaaatttgttgtggacctttcctgtatgttgtaccacgtggaggtttattggtcttcacccgttaggtaccaatagcctctagttgtgacaacccaaaacgtttccagaattgcctgaatca

SEQ ID NO: 408494 - DNA, 122 bp, Homo sapiens
agggagacccaaagatctggtctgtagctaagtgaattttctaaaactcattgattcacacgccatcccttgaggtaggtgcactgtcctcgtccctgatgtacagaggtgaaaactgaggc

SEQ ID NO: 408495 - DNA, 122 bp, Homo sapiens
gaattcatcttgaccaagcctaaggccgtggcatgcaaggtgttgagtcaccgggtacagcggtcttgcgacataaatattatttgatgacgaaggtactcggggcccaggtgccaaggtaa

SEQ ID NO: 408496 - DNA, 122 bp, Homo sapiens
ggcacgtgccgagccctcacggacgctcggcctctggcccctgaatccctctgggcgtctcggatcctctgagccactttgcagacaatgcaaggcagcggccaacagacgagtcccgcagc

SEQ ID NO: 408497 - DNA, 122 bp, Homo sapiens
acctgttaacttccattgtctttacttttaacgccattgtctgtgactctaatggtgtcacggctcagggtttagattttgtggttacattctattcttgtatgtcaagagtggtgtataga

SEQ ID NO: 408498 - DNA, 122 bp, Homo sapiens
tattgctggggatggggagggatcctgtcctgtggactgtcagatgtttagcagcatcctcggcctctacctactaacggccagtagcaagtcccaccccagtcttagcaaccaaaaatgtc

SEQ ID NO: 408499 - DNA, 122 bp, Homo sapiens
ttgccaccttcacagctggtgaaattaaacagaacacaactctctccacagcagacatgacgcctgaggctatgctgctctacctgaaccctttaaaaggcaaaaaagatcttctggagctc

SEQ ID NO: 408500 - DNA, 122 bp, Homo sapiens
tcttcttgcccagaatctttagaaggctcttggacatgtagtagggccggtccagggagccgttgttccgctccaggtcttccactgagccgcaacagagaccggttagagcggaccctggg

SEQ ID NO: 408501 - DNA, 122 bp, Homo sapiens
gcctcctgcaccctctgacccagccctgtctacttaggggctcctcaagtccattctccacggggcagctggagttttgttttgcttttaatccatatctcatctgcgtactatcaggtgtg

SEQ ID NO: 408502 - DNA, 122 bp, Homo sapiens
ctgggactgtggtctgagagaagaactcggaagtggaaggctgggactgcagataggaaccgttagccatgcagcctgggattagggaaggggtgacgccagcactccctgagctgcccaga

SEQ ID NO: 408503 - DNA, 122 bp, Homo sapiens
cgctgggcagaagctaccaaaggagaccccgcgagggtcaagggagggtgtcgtcaggcccgcgctgagccctgcaggatgctcagggccagggccccaccctctactggcccttctccctc

SEQ ID NO: 408504 - DNA, 122 bp, Homo sapiens
cgggaaatttcacgtaacctttctgatttaagacttcttttagataattcaaagttttggcgacattaggtaagaatttttgtgtagcagcatttgtctgcagttaatttttttcttttttt

SEQ ID NO: 408505 - DNA, 122 bp, Homo sapiens
ctttgaactcacagctattcgccgcaccattccctcttaaggaactactgcgccctccagcggaagaacagcggcggaactccacagcggcagctaaaatccctgaacgctttaaagtcctt

SEQ ID NO: 408506 - DNA, 122 bp, Homo sapiens
acgcgcaatggcgccccagcccccaccgggcctggcgggggctccgccgcgcccaccctgcgatccccattggcaagagcccggctcagacaaagaccccgccggttgcccccgccccgaga

SEQ ID NO: 408507 - DNA, 122 bp, Homo sapiens
agtggaaagattgatgtccagtggttaggagcccagcttccaagctatgtgacttgggttcgtaatttcatctgtgtttctgtttccaaatctgtaaagtggggataaaaacaattttgtta

SEQ ID NO: 408508 - DNA, 122 bp, Homo sapiens
cttaggacctgcagcccgccatgcctgagcctccccaccactgtgggctcctgcgtggcccgagcctccccaacgagcgccgccacctgctccgtggcaccaggtcccattgaccgcccaag

SEQ ID NO: 408509 - DNA, 122 bp, Homo sapiens
gaagcgtaatagaaacactcttactaggtgcctactgtgtgctgtgtgttttaaacaggtcgtatcatttaattctcattgcaagcttgtgaagtaggtagtatgtctttaattaaaaaaaa

SEQ ID NO: 408510 - DNA, 122 bp, Homo sapiens
agattctcagggaagccagcccagcagggattccatttaactaactgaatcctcaagacacgcagaaaccattatttacttttattactctaaaccaactgatttcatcactagaagcccat

SEQ ID NO: 408511 - DNA, 122 bp, Homo sapiens
gctcggccggggccctcgggagcatgcgcggcagccacccggcccggcgcccacgcggcgcggacagcctcccgccccgggcgctcaccctcgcattgcggatgttcataacggcggcgggg

SEQ ID NO: 408512 - DNA, 122 bp, Homo sapiens
gatttcagctcactgcagcctctgcttccgggttgaagttattctcctgttgcagcctcccgagtagctgggatacaggcacctgccaccatacctggctaatttttgtattttttgtggag

SEQ ID NO: 408513 - DNA, 122 bp, Homo sapiens
tgttacagttcttaaaggcggcttgtccggagttttttccttccggtgggctcgtggtctcgctggtttcaggggtgaagttgtagaccttcgcggtgaatgttacagctcataaaggcagt

SEQ ID NO: 408514 - DNA, 122 bp, Homo sapiens
taatcgaatggctgatcctaaaagccaaatgggaaaataaacaagaatggccaggaagaccggggaagagaaaaagagtaatgaagaaggactagccctactagatatctatgaaaacatat

SEQ ID NO: 408515 - DNA, 122 bp, Homo sapiens
tttaaatagggttgataatagggtggttgtgttgattaattgagatgtgtctgcaaagagcgcagaagaatttcaggtacagagcagaggccccctcaactaaaaaatatatgtactcccca

SEQ ID NO: 408516 - DNA, 122 bp, Homo sapiens
tggctaagctccgaaactagaaatttttcaaatgctagaggcagaaaatcacccaatcaccgactggatctttaaattctccagccactcagaggtaggggcgtaacaatgggcgtgtcttt

SEQ ID NO: 408517 - DNA, 122 bp, Homo sapiens
ctatgcccttccttcaggggaggggcctggcctagggcttcccggccgctggcccgcgcccgccctcacctgtgcacgaaattgttgcgatgaaggtgcaggacgccacaggccacctcaca

SEQ ID NO: 408518 - DNA, 122 bp, Homo sapiens
gtggttgggagggactattgcacgtctacactctcgtggggatgaaatagtgtttgagttcgttatttgcatttgcgcgttatctccccgaggagatgacagcttctctgccagcagcgggc

SEQ ID NO: 408519 - DNA, 122 bp, Homo sapiens
aacatagggttttgctaaaacaaaagagttcgtgggacgactggcgtcctttacagtttgcgaatctcttgagttgtctgacttagtagagacaactacgttctcccatctcctttgcagtt

SEQ ID NO: 408520 - DNA, 122 bp, Homo sapiens
gcctcaggggacagggtgactcgccactgtgccctaccatacagtgcgctctgggagtcccgggtaaagggggtcattcccgcgagggatgcggagagcagagcggccggaggagcggctag

SEQ ID NO: 408521 - DNA, 122 bp, Homo sapiens
agtgctgtttacacttgcaaaagagatccctgcccacatcaggtggactgtttcctctctcgccccacggagaaaaccatcttcatcatcttcatgctggtggtgtccttggtgtccctggc

SEQ ID NO: 408522 - DNA, 122 bp, Homo sapiens
ccagacccctgactctccttgaaagatgcagaagctgatccagggcttcttggtttggtccgctaactgctcaccttaggaatttgccccccaagtgacatggatccgattgcacattcctg

SEQ ID NO: 408523 - DNA, 122 bp, Homo sapiens
ggggctttgcctctcctccaccagtgccacactgcaagggaaattaaccagggagcccagcgctgtgcctgcagggaggggatgactgggccaggattccaccagcctcctgtccacaacca

SEQ ID NO: 408524 - DNA, 122 bp, Homo sapiens
ggatgtgcaaaaggaagacggcatccgcttctgggatgggctctgtcctcctggacatgccgagagcctgcctgatcctgggtcctgctgctggaggcggccacttcgcctggtccccgagc

SEQ ID NO: 408525 - DNA, 122 bp, Homo sapiens
tatcagcaataacaaggctacatgaaccgaagagcatcacgacgatgttactcatatggccgttttggaaccaaacagctttagtggtaagaacctaaacagtacagtcagcgataacagaa

SEQ ID NO: 408526 - DNA, 122 bp, Homo sapiens
agtctgttggctggttccgaaggttggcaggctgaacagggcacttattccactcctttgcgtctaaccgcctgaacgcagacttctcacattatacaatgaaacaactgcttttgtgaaga

SEQ ID NO: 408527 - DNA, 122 bp, Homo sapiens
tgcaccccaccggcagctccttcgggggtgtggccgaagagctccgagggcggggctgaccgagccatattcgggcgtggccggtggtgattggtgagggcggggcctgccgcagggggcgg

SEQ ID NO: 408528 - DNA, 122 bp, Homo sapiens
gtgatgtagggcccgccagacaggacgttccggggccagggaggggagccggtggtgcagcgtccctgagcagctgtgggtagcaaagcaccacagagctcacggcagggcaggggcttcct

SEQ ID NO: 408529 - DNA, 122 bp, Homo sapiens
gggcacagcaggataggagggcgaatgtcaccggtctacacttggggggacagagggccccgtgggccctgccagggaacagtcatgcaccccgaggagcccagaggcaaccctgggggatt

SEQ ID NO: 408530 - DNA, 122 bp, Homo sapiens
aacgtccaggcttggttccggccccggctgtcctccgagagtctctccccggcgggcaggcgctctgggctcctgcccaggactgtttggcgtggacttcaaagagcagaacagctgagcat

SEQ ID NO: 408531 - DNA, 122 bp, Homo sapiens
ggcccagcccacattccacccttgtgcctccccctccccttttctcccctcccctcccctcggccactggacaacccacacatgagtgatttcgcagtctggggagtgtgcacgccctggca

SEQ ID NO: 408532 - DNA, 122 bp, Homo sapiens
caggcacccctgcagcctagggggcggggctcggcagccaggtcagcgctctgtgcctgccgggagtcagcacagtccagtgtctctagcttggcctcagctctggccatcggtgccacctc

SEQ ID NO: 408533 - DNA, 122 bp, Homo sapiens
attattttccctctattcttgcattttgagacaatttttgttgaagttcaaatttacaagcgtttcgggaggatgttttcttctggggaaacaacattcacagcagtccagactgagggtac

SEQ ID NO: 408534 - DNA, 122 bp, Homo sapiens
gggcgcccgcagcggagccgcctctctccgggaggtaattaaccagtgcctgggcgcacccgagccagtccgacagctccagccactggcagagccgtgggaccaagggccggacgggtatg

SEQ ID NO: 408535 - DNA, 122 bp, Homo sapiens
ccatgcctgagcctccgccttatgtacttctctcaattgagtcaagttccaccatccttccgaacctcagtgggctcctctgccaagaaacccatccaaacactctcctgctgcaccacctc

SEQ ID NO: 408536 - DNA, 122 bp, Homo sapiens
taagaagctgaacttcaagcggctgggagctggcatgctggagccgccgttcaagcctgacgtgagtgcagcccactcctgctgagggcggggcccagccagggctggggctcaggggctct

SEQ ID NO: 408537 - DNA, 122 bp, Homo sapiens
tggagcacccaggctgcctttgtaacggccctgagctgttaatggttctgatgctgcacccggtagaaatggctccctcactatggacttagccactttgagggctgaacagtagctcatcc

SEQ ID NO: 408538 - DNA, 122 bp, Homo sapiens
tcacttaaccgcgtatcgctgcatcgctagggcgaagagagcaaggaggactgtgaagagcgaagcctgagctgccatgtggtgagtccggagatcatagctcattgataagggctaattac

SEQ ID NO: 408539 - DNA, 122 bp, Homo sapiens
ccgagattgaagagcaggtgtttccaattaaatggggcctttcaatctctccctgggctgcgactccgtgcaggctcattcattggccctgaactcggctgtatgcagaatttctctgggcg

SEQ ID NO: 408540 - DNA, 122 bp, Homo sapiens
cagcgcatgcacaagtttctctaggctctaagctgtgtacctagggctgagatcaccaggcggagagatgtgtgcgttttcccatatacgagattctgccaagttgccatccgtggtcatgc

SEQ ID NO: 408541 - DNA, 122 bp, Homo sapiens
ggtagatctcggggcgaggggaacaggatcgggtacacttgatccggaacaagaacgcctcggcctggcggttgcccgttagtcccggatcccagcggccgcttcaccactgagcccgagcc

SEQ ID NO: 408542 - DNA, 122 bp, Homo sapiens
ggccactaagtatagtaagtataaattagaaaggcagatttcagttgatgataagcatgtcgcaccatccagaagtggaaatggctgctacatgtgagctccctctcattggaagtatggaa

SEQ ID NO: 408543 - DNA, 122 bp, Homo sapiens
cccaaacccgtgaaagcagcacaaactcgaacctctcagtcactgtgtggaatctctagacgtctaacctgttgaaggaggaaacacagaggacacgagaggcgggtgacagtggaccagtg

SEQ ID NO: 408544 - DNA, 122 bp, Homo sapiens
gagtgatcccagtggccatgggcttgactccctctttccctaagggtcagacttccagaacgtgctcacgtgagcttggggccctccccacctatgctcaccccagacacggggctggatgg

SEQ ID NO: 408545 - DNA, 122 bp, Homo sapiens
ggcgacggcgcgggctgtcaggagccggctcagcccgggcgggtgggcccggagtctggtcgcgggggaagggcattggcccgcagctggccttgccctcggctgcccttcctcccccatcc

SEQ ID NO: 408546 - DNA, 122 bp, Homo sapiens
ggtacttggcctcttgttttcttgcatagcaagttgtctctgagatgtgagatgatttcacggtggtgataggcccatttgcaaatctgtttatagtaattaaactatcaaaataatgttcc

SEQ ID NO: 408547 - DNA, 122 bp, Homo sapiens
tccatcatctcctcctcctccaccactaccctcacctgcccctcccaagtcccctgtggccgcacacacccaggccaggccggcactccttgccccgctgcgcgaagtggctggagcagaag

SEQ ID NO: 408548 - DNA, 122 bp, Homo sapiens
cggaggcggaggcggaggtgcggcacgacctgctgcagggagccataaggaggcctctgtcgacaccaactctggaggagcattcaggaatggaactcgagggaaacaggcagggaagattc

SEQ ID NO: 408549 - DNA, 122 bp, Homo sapiens
caaggcgctcctgagaaaagatccccacggcggacgtggggcaacaaaacccgccgggagcgggcatctcatgagacccagagaggccctgccccaggagacaagggcagagcctgctgggg

SEQ ID NO: 408550 - DNA, 122 bp, Homo sapiens
tgctggttggggagggcatgggtggggtggggctgggaggggaggctgctgggggcggcgcgtccagctctgggccagggggtccaaagtgctcagcccccggggcacagcaggacgtttgg

SEQ ID NO: 408551 - DNA, 122 bp, Homo sapiens
tgaccccccagggcagagtgtagccatctgactggctttctctctcggcaggagacggggcgcacgcctgcaggtgggggagccccaatacgtcacacggatgagcggggcaaagcccagcc

SEQ ID NO: 408552 - DNA, 122 bp, Homo sapiens
ctccccgtccgccgccgccgccttggtctccgccaccgtgagggaaacggccgccgccgccgctgccttcgtcacctcagcttccgcccgccgccgcccccgctgctgcctcagtcccggga

SEQ ID NO: 408553 - DNA, 122 bp, Homo sapiens
ccaattaaggatggctgtgggacaggacaaggcagcaaccaatcaaagcccggaaaaccccgcctttgtccttggaaacacattctgatacttttgtttatgatatttaaagaaccagatta

SEQ ID NO: 408554 - DNA, 122 bp, Homo sapiens
ggtctagggtgttgtcggagtggcagttggtccgaatttctcccgaagcccgcggaggagcgggtaagagccccgcgaatccggccccaacctcgggaacgggatgggaggcggccctggcc

SEQ ID NO: 408555 - DNA, 122 bp, Homo sapiens
acgaggaaaaatggaaattgtctccttattgttcatctctagacatcagagtcagcaggccgagctggggctggggctgggataataagattttccacccatttcacgatgtaattggcttt

SEQ ID NO: 408556 - DNA, 122 bp, Homo sapiens
gagagtcaggtggcggcccggggcagctcagaccgcgcctcaggagccctcgaagctgggcgacgctggcagaaagaaacgcgaggcctcattgtcccccgagacaaagcggagctcttcgc

SEQ ID NO: 408557 - DNA, 122 bp, Homo sapiens
ggagggacaagagagaaagagccagatagggaaatggagatagggctgaggttctaaattcgctccaaaagggtggaagagtgcgtctttgagcccttgggttcgacagtccctccttcttg

SEQ ID NO: 408558 - DNA, 122 bp, Homo sapiens
tctaaatcagttgtgatctgcctcagacactttttgctttacacaacaatccaatcatagcgatttatttggaaatataccttcacaagttaaatcagaccacagcgctactgggcattatt

SEQ ID NO: 408559 - DNA, 122 bp, Homo sapiens
ggacgcctcctccccaccaacgcatccatccccagaggaacaagcgaggatctcagagcgcgacctggacaggtgagtcaccctacctggctcacctgcagcgctacctcctcccggctcgc

SEQ ID NO: 408560 - DNA, 122 bp, Homo sapiens
gaaagggccagccctcgagccagtgtcaggccccagaccctggaagatgcgtctgggtgccggctgagaggagaggggtccaggagctcaggtttcatgcaggttctggtgggaggatggag

SEQ ID NO: 408561 - DNA, 122 bp, Homo sapiens
ttctccgctggcacggccgttccctcctcagcctccgcttccttgtctcagccggtgccgcgcaaactgctggtccctcctacgctgctgcacgctcagcctcaccatctcctcctgcccgc

SEQ ID NO: 408562 - DNA, 122 bp, Homo sapiens
agcagagcatgaagctgaggccgggaccttccaagtggaactgggccggctcctgccccacgcccagatgccaccctcctccctggtgtttgttccgtgaggggcacaggactcagctcagg

SEQ ID NO: 408563 - DNA, 122 bp, Homo sapiens
cattattgcccataggcatgtgttttaccccatactccttctcccttttatcttgattttcgcggtgctggggagtctgcagggattccatggcgacgggctcactgggacaggggctgggg

SEQ ID NO: 408564 - DNA, 122 bp, Homo sapiens
agcatgaagtggccaatgggaaaattctaggaggtattgggactcatgaaggttctgtttcggagcccttgagctgccgcttggccagttcccacactgtggagtatgctttcgttttcaac

SEQ ID NO: 408565 - DNA, 122 bp, Homo sapiens
agaggtcttcgctggggggcggccgggggctgaagaggcgggccatgatctccccagccccgagccccggggctggctagggccgggcgccgggttacctccttcggcccggcgggccccac

SEQ ID NO: 408566 - DNA, 122 bp, Homo sapiens
aggggagagtgtgctcccaagaccagggagtgaggctggaagaacgctttagccatgcgccgtgggaccctcaggctgaccagcgcccagccttcgccacaccagggtatctctgggtacca

SEQ ID NO: 408567 - DNA, 122 bp, Homo sapiens
tgcagcagcagctgagccctgatcactaactctgttcatcttttgcaggagataccttcccggatgcagatgctgatgaagacagtctggcaggcgagctggatgaggccatggggtccagc

SEQ ID NO: 408568 - DNA, 122 bp, Homo sapiens
agccggcaggcgcactctgccctgggtatcccactgccgaggagcgtggccccacggcagcgctgatccatggagactgcgagaccgtggcacccctactgctggagaccacagtcctgatg

SEQ ID NO: 408569 - DNA, 122 bp, Homo sapiens
ctggagcaatataagggcaatgaaaccagagacaagctataaagaggagattactagggacgtctgagagagaaacaatgggccttgaacttaagagagaggacaagaggaggaggaaagct

SEQ ID NO: 408570 - DNA, 122 bp, Homo sapiens
caggtgcgtgctaccacacccagcctgagttgtcttttttacctttaagaatgacaaaatcgttcatgcttattgtgataaatctaaataaggcagaagagtgtaaaggaaacacaaatctt

SEQ ID NO: 408571 - DNA, 122 bp, Homo sapiens
cttagttgagaaccactaatttagaccatcagggcttgcccccactagccccacaatcaacgtttgtgatattcgatcagacgtatttacctcctgactgtaggagggaaaaggagggttcc

SEQ ID NO: 408572 - DNA, 122 bp, Homo sapiens
ccggccacccttgacttttttattccccactttctcttgcaagcctttaggaatttactgcgagatcttgtttttttacatcaggattcattttcccctcttcctagtccttcacatcatct

SEQ ID NO: 408573 - DNA, 122 bp, Homo sapiens
aaccccggcatgaccaccagcctcccggctctgcagtcggcgcccaggccggccgcttcgcgtcacttgactaaggacccacggcctggcaccgcccctcgtcggcccagcagccagccctc

SEQ ID NO: 408574 - DNA, 122 bp, Homo sapiens
aaatccttcggtccccagcaaactaggccagttagttgttctgtttgccgagaggtaatgcgcaccctcctgtgccaggtcctagttggggagaaggcaaagaataaaaccagcagacgttc

SEQ ID NO: 408575 - DNA, 122 bp, Homo sapiens
ccgcggaagcgggacgggattggagtgctctgctccggacgcactacgtaggtgggcctgcgggagttctgagtgcgacggcgcaggtctgcaccatggcggcccggcttgtcagccgatgc

SEQ ID NO: 408576 - DNA, 122 bp, Homo sapiens
ccagcccattcgcctccccgactcttcctctcacggcacggctgggctgctttcatcacgcgtaagtgcacaccacacacagatgctgcacgaggccaggcgagcacgaggctggccacact

SEQ ID NO: 408577 - DNA, 122 bp, Homo sapiens
tcaggtcggcgttacttgaggcgttctgatcccttcagccttccgatcccttcagccttccggtgccagctctgcagtgatggcgccccctggtgtccaatgaaagaggcgcaactgccgtt

SEQ ID NO: 408578 - DNA, 122 bp, Homo sapiens
ttataatttttatcaaatttgggaaatttttagggatgttgttgttgcttgctcctgtctcgcctctcctgaagggactccaatgacacctaattttgccagttgaggttgtctcacagctc

SEQ ID NO: 408579 - DNA, 122 bp, Homo sapiens
aaaagtaaaaacttgagattccaaagaaaatgaactgtagtggcaagcatgatacatacacgattgcactccacgactgtcaaaattcagcagggagaatcattgtcccttggtaattatgc

SEQ ID NO: 408580 - DNA, 122 bp, Homo sapiens
ctaatgctatttgagtctgagtcatttgtgcagtgaaatcaccaaagctgcacaaataaacgtgaaatgcaggactcaggctcccctggcctccccctgggattggacatccccacaagatg

SEQ ID NO: 408581 - DNA, 122 bp, Homo sapiens
ttggccctccctgactcacccaccatgagactctatgctttcttttaaatttctggagcacggagaagcacagagatgaaaagagttattttcaacttggaacatatcatgatatgacagcc

SEQ ID NO: 408582 - DNA, 122 bp, Homo sapiens
acaataagaggaaagggaggcggcttccaaagccccacccatctcctctaagctgctcatcggggactatgagcaaacatcacccctccagagccatttgtgctaaggtctatgattgaggg

SEQ ID NO: 408583 - DNA, 122 bp, Homo sapiens
ggccatggctgcaggtgatacggtggtgctctttgcctgtaggatgagatttcagccgctcgcaggttcatttgttgtggaacaacgtactccacagctggtggcatcagtgacagccgcac

SEQ ID NO: 408584 - DNA, 122 bp, Homo sapiens
ggaggacgaggcggagagccacccaagaaaggtggcggaggcggggagaccctgcgggcacggctcacgcgcacatccccggcttccccgggctccgcgccttcccaagagccccgttgtct

SEQ ID NO: 408585 - DNA, 122 bp, Homo sapiens
acctagcctaaccttgctttgccctgggtggccagcatccaagacggcagactgtgagagcggctgaggaagagcaccagaaggaaagatctgcgcaatcaaaggcatactgaccccaactc

SEQ ID NO: 408586 - DNA, 122 bp, Homo sapiens
gccggccccacgtccactgcagagcctctgcctgccccacgtccgctccagcgcctctgccggccccacgtccactgcagagcctctgccggccccacgtccactacagcgcctctgccggc

SEQ ID NO: 408587 - DNA, 122 bp, Homo sapiens
tagacgaggtgccaggccccatcgtgccggggtgggaggggcggctacttcaccactgcccggacaaggcacccagaggcccctgcaatggccgagtctctgctgcctccgtcgcccagccc

SEQ ID NO: 408588 - DNA, 122 bp, Homo sapiens
ctgataggggacagaaggcttctgctgaagcctcaggggagagaacatcagagagggacacgggtcacaacaagacaatcacattgaactgggattgataagagggaggaaaatccattgat

SEQ ID NO: 408589 - DNA, 122 bp, Homo sapiens
gagggacggccggccgggacatgaggactgcagcagggcgctcaccggctcaggatggggcgctggcggggaccgcgcagagccgcagcacccggctcagcacctggatcacggcggatccc

SEQ ID NO: 408590 - DNA, 122 bp, Homo sapiens
ggccctccccggtcccccgccctggagtggctttctgggccaacagcaccttcagcttcccgaacacctccacagccgccctggacacgctgctgtcgccctcgtcctctgagtagtcgtcg

SEQ ID NO: 408591 - DNA, 122 bp, Homo sapiens
ttagtttggcttttaatttcttttcttctaaggggatagatgcgttctgtaccaccttctcgagtactaatggttaactggaatgaacacaagcaacaaaccctccggcctggatcccaaaa

SEQ ID NO: 408592 - DNA, 122 bp, Homo sapiens
gatctccagacactcaggacaagtcagtgtccccaccaaggatggggctttgagaggctccgcccacctctgtttctgcacagcaggtttagcagctccattcttccccagagagccactcc

SEQ ID NO: 408593 - DNA, 122 bp, Homo sapiens
gttctgattctattctaaatgcagtcacgaagccagtttaggcctgtgtctatctaatgtcgatattcacggtccatctcagagaagccaaagattgcacagactaagaaacctgtgttatc

SEQ ID NO: 408594 - DNA, 122 bp, Homo sapiens
actgcaaacagtaaaaaccacctgggtagcatgaggcaatccttcttacattgcatccctcgagagagtgtttatgtggacctggtcctctgctttgtgtttggaccatcaggattattgta

SEQ ID NO: 408595 - DNA, 122 bp, Homo sapiens
atgtaccactatgcccagctttccttctactttttaaaaaaagtaattgtaaaacatggtcgagcactgtagctcacgcctataattccagaactttgggagccaaggtgggcgctagcttg

SEQ ID NO: 408596 - DNA, 122 bp, Homo sapiens
gggcactccaccggtggatccaaagttggcctgggtaggagatgtcttcaccgccacacccgctgaaccccgcccacttacctcacctctgcgccaggctgcggatgaggatgacaagggga

SEQ ID NO: 408597 - DNA, 122 bp, Homo sapiens
tacaaaagataaggaagaaaaataaaagaagaaataatagagtaaggtcagaggaaaagtcgaaatgcccaaaccctttaaatactttattagaagtgggctgtatgcatactttgggctca

SEQ ID NO: 408598 - DNA, 122 bp, Homo sapiens
aggcagctgcaggagctgccgctgctgcatgcaggcatccaacagtgtgtccctagcagccgacttggtgtccccagtgtgaagagcccaggctttgcccattaggctgtgactgaaaacaa

SEQ ID NO: 408599 - DNA, 122 bp, Homo sapiens
ttaataaaggccacaggagacattactatagcatagattgtcaaatgtaaatttactgagcgtgttttataaaaaactcacaggtgtttgaggccaaaacagattttagacttaccttgaac

SEQ ID NO: 408600 - DNA, 122 bp, Homo sapiens
gcatcaaaagcccactggttcctccggtgttgaaggcaggaattcaagaatgcagctcaacgggcccgcccactgcgggccaggaagccggctccgagctgcctttgaggacgcacctgccg

SEQ ID NO: 408601 - DNA, 122 bp, Homo sapiens
ccttaacatatgaaaagacacccaatgtgactttaaacagaaagatgccaagcaaacctacgagaggactcttccacctgactggcacagatcagaccgtctgatcccaccctgtgctggcg

SEQ ID NO: 408602 - DNA, 122 bp, Homo sapiens
ttattctttggcttcttcccggctcaggcctcagtgaagcccagttcactccagggtctgcggcgggaggcgggcgcgccccacagtgcgggctcgccacgcggtcccttggccttccccat

SEQ ID NO: 408603 - DNA, 122 bp, Homo sapiens
tcctgatgtacctatttcaggtgatgaaactctcattataatcatttgagcccaaaatagcggtatcattttaactcccttctctaccttatccctagaggcaattgcccacaagtccaacc

SEQ ID NO: 408604 - DNA, 122 bp, Homo sapiens
taactttctgcggaacccgagcccgggtggcagctcgggtggtggtatcgtatgcaaatacgcatgctgacgttacagatcatgtgggttttggcgtagattccccactgatcgaggcattt

SEQ ID NO: 408605 - DNA, 122 bp, Homo sapiens
acaagggagctgacacctcaggagctgcccaaacggggagggtccccacccgcctgcgcgcgcgcacacccgccccgcctccggcccgcgcgccgctccacactctcgcctcacctttctcc

SEQ ID NO: 408606 - DNA, 122 bp, Homo sapiens
ttgccctctctggtcacagtcctggggctgggctacttcgcggtgaggcgtggggtggggcggggcgggcctctgttttggcccgccgggccctcgtagggcgaggggagctctgggaacgg

SEQ ID NO: 408607 - DNA, 122 bp, Homo sapiens
tctttccaacaacccaggttaaatagcactcagtggagctttattgtcaagcacagggcccgggttctctgggcactggccgcctccatgctgcgtttccccgctgggccagcggtgtcatc

SEQ ID NO: 408608 - DNA, 122 bp, Homo sapiens
tccctggctgggccagaggcaaaggagctgctccaccccctggcacgttcagatagggatcgtagaaggatcttcctgggttcggtggtgcgaagattgcacaccggtaccggggcttttaa

SEQ ID NO: 408609 - DNA, 122 bp, Homo sapiens
gaagccaatggacgtgcggcattgagagggcgggtcttccggtagtgaaggcctggtgaacggctgcgcgacagaggacacttccttttgcgggtggcggcgaacgcggagagcacgccatg

SEQ ID NO: 408610 - DNA, 122 bp, Homo sapiens
atctcggcacaaagaggagacagccaaggtccgggccagggacgggagcaaggacaggggcgaggagacacccactccccaagtctgagcccctcagtcaactcacaggccgcgggaccccc

SEQ ID NO: 408611 - DNA, 122 bp, Homo sapiens
ccatagaatggaggaagtgccctggcggaaatctaccctacttaactgcctgtcttcatacgtcccctgttgatgttgtaggagtaccccagcctttatgatggaacagtgtgtaatttagt

SEQ ID NO: 408612 - DNA, 122 bp, Homo sapiens
gcggacgcttccgggggcacacacgagaaaaatcgccacatttttcagcagcggtcagtccgcggatgcccactccatcaccacggctgccatggagttcggcgcgcttgaaatcattcccg

SEQ ID NO: 408613 - DNA, 122 bp, Homo sapiens
ggcctgtggcggtctgcacctctggtacccgccctggcggctgacctcagttgtagtggccgttctcttgagctccaaggagcaacagaggaaccccaccaccaccacaacccccgtcgaca

SEQ ID NO: 408614 - DNA, 122 bp, Homo sapiens
tggaactcatttggaactccccgtgaggaggtcgaggcgcacagggcaagcaggaagaggcgagggcacttgggggtcattatttgagatcgtaagtcttgtttcccacagacctggccgcg

SEQ ID NO: 408615 - DNA, 122 bp, Homo sapiens
agccggggctgcgcccggggcttgcgggctggcgggggttccaggtgtgcgtgggttccgcgggccccgcacttggcacagctggctggcacctgctgggcttgattgggggatgagctccc

SEQ ID NO: 408616 - DNA, 122 bp, Homo sapiens
ctgggcctgacagcctcagccgtgcagaaacccggcctagggagggcatgcaaagaaggacgccagagaaaaaggtcgagacaagccccagaccccaggaagtgactgtttgggggaaggga

SEQ ID NO: 408617 - DNA, 122 bp, Homo sapiens
catggttctcttcgtttaagacagctccaccagccacaaatagagtccccgagagagagacggagagaaggtaactgcccatctccctacaggacttctgcctaaatctcctggcaccacca

SEQ ID NO: 408618 - DNA, 122 bp, Homo sapiens
caggagacccaggttctagtctcgcctttgtcattaattggctgtgcgaccttaggcagtcgcctaatcttcctgggcctttgctttcttataattcaatagctctgaagaaactataagtg

SEQ ID NO: 408619 - DNA, 122 bp, Homo sapiens
gcgcgtgtggcgagggcagcgggcgcacggtttcacggcgggtgtggcgaggggagcgggcgcacggtttcacggcgcgtgtggcgaggggagcgggcgcacggtttcacggcgcgtgtggc

SEQ ID NO: 408620 - DNA, 122 bp, Homo sapiens
agatgattcctaaatcccaggattcttagcaggaccaactgagtgaaagggtttgggttccgtagaccactctgaaggccatggctatgtctttgtctaagaaaaataatctttcctcaact

SEQ ID NO: 408621 - DNA, 122 bp, Homo sapiens
cctgtgaggctatcgccttggcacaaaccctatcacatgtcagtcaacttcccggcaagccgcagacctttagaaaccttggtgtgcgtttccccgctcggtttagaacgcacccctgcctc

SEQ ID NO: 408622 - DNA, 122 bp, Homo sapiens
gcagggagagggtggcaccctcctcccgggccctcccaggaggggcagctggcagtggggcgcagtgccgggggctcagacataatactccttgtctttgttcttcttggccttgctgggcg

SEQ ID NO: 408623 - DNA, 122 bp, Homo sapiens
gttgtcagaatatttccatccaacactttataaacacatttgattatcatgtctgatcctcgtgtcgggataggctaggttaggctccgtaacaaccaacacaatctcagtggattagcaca

SEQ ID NO: 408624 - DNA, 122 bp, Homo sapiens
ccctggccttggaggtggggtcgtccccgaaagacagttctgacgcaggccgtgtggccacgtgcttcttgcagatggagctgtgtgggcgagctcctcccagctgcacagtttgatggata

SEQ ID NO: 408625 - DNA, 122 bp, Homo sapiens
aaaaaaaaaaaaaaaaaaacctcagcacaggattagagccaaacgtgaactaggaagccgcgcgagtctcctctctccggtggaagagctgggacgtgtcccccacaccgcgacgaggtatg

SEQ ID NO: 408626 - DNA, 122 bp, Homo sapiens
tctaggtccctgtttctagacgtcggcctggccgtcgcatggggaagggagtgggtttcgcgtcatggccacgtccatgtgggtggacagcatgggggtctctgctgctccccaccatggcc

SEQ ID NO: 408627 - DNA, 122 bp, Homo sapiens
gtggcacttggaggctttctttccccctggagtccttgagctggtggaatgtatgcccgacgctactggggccattgtggcaggaaagtgggcacattcctgagcacagtgtcgctgtgctg

SEQ ID NO: 408628 - DNA, 122 bp, Homo sapiens
ttgtaaataactttctaagtgccaatattcaaaacttttggattaaaatgtatttttcaccgtgcatttactttggatgtatttatttcatttaaacaatttaaatggggctctttaaccaa

SEQ ID NO: 408629 - DNA, 122 bp, Homo sapiens
gcgccctgtgcgagggtctggccccgcccccggatcgacgccccgccccctgcgcgcgtgcgtgcctggcactcggcggcgtcctccaggcctagaaggcaagacctgtggcggcggcgacc

SEQ ID NO: 408630 - DNA, 122 bp, Homo sapiens
atgaaaaggagaggatgccaggaggtccgtgcttctgccaagagtcccaattagatgcgacggcttcagcctggtcaaggtgaaggaaagttgcttccgcgcctaggaagtgggtttgcctg

SEQ ID NO: 408631 - DNA, 122 bp, Homo sapiens
cctccatcacctccaccgtagttgagccagcgatagtactgagagtagggaaagagcctccggtaataaagtttaagcagctcgggcagctcggtggggtcaaacgtctccattgagcgcgg

SEQ ID NO: 408632 - DNA, 122 bp, Homo sapiens
ccgtctcgccgcccaggagggcagagcttgcagtgccctgcggctggtaaggctgagggtcgcccgcttgcagtcgagccgtggtgaaccgagagtcctgcaagttggacgggctcgctttc

SEQ ID NO: 408633 - DNA, 122 bp, Homo sapiens
ctagccctttagtttgctgaccgctattctagatgaagcccctgaactgccttccacggccgtggcagtctttaaggccattgttttaggtgtcccagcagtgtcatgcagcctttttatat

SEQ ID NO: 408634 - DNA, 122 bp, Homo sapiens
tggatgtgtgtttgatccatcgtctttccacagatttgctcaggattacagagttagctccgtgagaccagaggctctatctgctcatctttgtatacacaacacccacacacatgcctgat

SEQ ID NO: 408635 - DNA, 122 bp, Homo sapiens
ccccggggccgggaaggcggggagagccgcagggggaggaggaagaggaggaggagaaggcggcgcctcccagcgctttctccaaataagtcccgaaaaggggcactttccagcagctgtgg

SEQ ID NO: 408636 - DNA, 122 bp, Homo sapiens
cgctctacaggcacagccgcgccttcctgcacgcactgctgcacagtgacaacacggccgcgctgcaccacctcacggtccacaacatcgcctaccaggtgagccagtgcccggggcaaggt

SEQ ID NO: 408637 - DNA, 122 bp, Homo sapiens
atgatcctcccccgcctcggtgtcccaaagtgttgggattacaggctgagccactgcgcccgacttgcttgaagttttgagtcttgtttattctctggtctatttcaaggcatatcttttcc

SEQ ID NO: 408638 - DNA, 122 bp, Homo sapiens
tgaaaatgatgctgtttccaataagtagggatgggaagtgtcatgtgtcactctgatatgcgatacagaaatcaacatgagttgtcacaccatgcatacagggtaggacttatcatttatac

SEQ ID NO: 408639 - DNA, 122 bp, Homo sapiens
accttccagacgcagaggccggaggcagaggctggagctcagagggtcacctgctcccaccgcggagatgcccagctgggcgctgcccggcctcccccgccgcccccgacgggccgcgtccg

SEQ ID NO: 408640 - DNA, 122 bp, Homo sapiens
aattaaattaatagagagagtacggcacacacgttagatggctaatattaaaatggctgacggccaggcacgggggctcacgcctgtaatcccagcactttgggaggccgaggcgggcagat

SEQ ID NO: 408641 - DNA, 122 bp, Homo sapiens
agaatttctacaagatgaatttgagttgaaccttcagtctttccacgaagaaggtctgctcgccaccctcaaagccatctgcctttctgtctcagtttattcacagatcctttcagagacca

SEQ ID NO: 408642 - DNA, 122 bp, Homo sapiens
gagcccaggcacagcaacaggtcccagcatggtggactcagtgagtggatgaacaggatacggggacaggagagtcacgcctggctacagggacgcccatccacctcctccagcctggctga

SEQ ID NO: 408643 - DNA, 122 bp, Homo sapiens
gggttgcactgtagctccaccttgtggccgccccaagaggagggccgcatccgtcgtcgccgtgacgtatttgctgaatgccacctgttttccgtgccgcttggggactcgtgtccttgact

SEQ ID NO: 408644 - DNA, 122 bp, Homo sapiens
tgactcctgatttggcagggcatccagagggcagctcaagcttgggggaatggggctggacggtggggttctctactcagccccccagagcctctggggaaaaaggctcccgccaggtggtc

SEQ ID NO: 408645 - DNA, 122 bp, Homo sapiens
cccctggacatcctgatcgcaggtgaggagcccagcgggttcagtcagggacacaggctccgcacaggccctgccaggggagcccaggtggtgatggccggaatgaggggtgggggtcccaa

SEQ ID NO: 408646 - DNA, 122 bp, Homo sapiens
aacggcacaagaatggatttgcttatgtgctgcgaccacacagaactgtatataggctgacgtcaccggatgacgtgtcttttgtttgggttttccagaagctttactgttataaagcacca

SEQ ID NO: 408647 - DNA, 122 bp, Homo sapiens
ttccatgcaaatggccctgcctcatgtcctctgcatgcaccctctgctggccaagttgagcgaggacattgtcttttgttgggaaaggatactttttaagtgttgtttctaaattttactac

SEQ ID NO: 408648 - DNA, 122 bp, Homo sapiens
gacagagacctcggcatcagctcccgggagcccgcctggacccgtggagtaggatattggcgttctggggtcctgccggggagcccctagggtgcctgcatggacgaggggccggaccaggg

SEQ ID NO: 408649 - DNA, 122 bp, Homo sapiens
gcttagtcacatcctcatacgcgtagcacgtgcagcatgttagggagggactttcctgcccgaccgtatcagcacatggaacagtttagccagggaataggcccaattctatgttttgaaat

SEQ ID NO: 408650 - DNA, 122 bp, Homo sapiens
gatgagatcacagggttattactgggagacccctgagggaagatggccacagggacaggacgaggctgtcctctgagtggggaaaggagctatggtagtctgaggaccccccagagtcaggg

SEQ ID NO: 408651 - DNA, 122 bp, Homo sapiens
aatgagagcgcttattttcttaggtaaccttgcacaggtgaattgcctcctcacagtcctcgtcaacaaaacagatgttaaagaataactttaacttcaaaccgtctttacattttcctgtc

SEQ ID NO: 408652 - DNA, 122 bp, Homo sapiens
gctctaactccttgtgggaggggaagcacgcaggcgagtgggtgcgagggccaggacaagcgcttttggactccagcctcgtggtaccatctaggggtgtgttacaattaattctctttatt

SEQ ID NO: 408653 - DNA, 122 bp, Homo sapiens
ggacgcgtaagagccgctgccggctcctttttctctctcccactagggctgcccttccgacgctaaaaaagcagtggagctagggtgaaagccgccctcacgctcacttccggcaggcgcgc

SEQ ID NO: 408654 - DNA, 122 bp, Homo sapiens
gaaccatggagtcaatggaccaatggaagaatgccgtgggctgcgtcaagccaatagggtcgcgcggcgaggggcggggccggcgggagcagggcggggcctgagcactaggcggcggcggc

SEQ ID NO: 408655 - DNA, 122 bp, Homo sapiens
ggatcatacgctgaacagaggcgaccgggacccagcccaaaggctacacctctgaaatggcgacgccatcatcagggccacattgaattcagaggtcatgtgtcacttaccactgcctggga

SEQ ID NO: 408656 - DNA, 122 bp, Homo sapiens
tctccgggcccagtctgaatcaggcatgctgatctccattgccccaccccacacagctcacggaatcctaaaaatacagttttataaggtcaggactaggaaggcacagggaaatcattcct

SEQ ID NO: 408657 - DNA, 122 bp, Homo sapiens
ggttctaaatcctggctgcacactagaatcatcatctgggatgagtttttaaattattatcgatgctggggcctcacccccaagagattctaatataatagaatttcagtggagcctgggcc

SEQ ID NO: 408658 - DNA, 122 bp, Homo sapiens
agagcccagtgggagggccctgaacggcctgtggggcttgaaggaggggaacagaggcagcgtccatttgttctgtaagggccgggagaccaggtggtaaaggaggcctcaggcaaagacaa

SEQ ID NO: 408659 - DNA, 122 bp, Homo sapiens
gcccgttctaagtgatcatgatggggagtcttgagccccgacactgaggattggtcagcacgctttttgtcatggccacatgcttgtgatttccagggagaatttgttaacgagtacgttgg

SEQ ID NO: 408660 - DNA, 122 bp, Homo sapiens
aaacttgggtgggaagcactgaggaaggcgaaacaattcccaacttatctggatcccagacgagtccctctgattgcttaagtcactagaaaaggagattcgtctcagcgattaacaatgat

SEQ ID NO: 408661 - DNA, 122 bp, Homo sapiens
ccgggcgcggagagcgcagagaacttggccaggaggtgctggacagctccggaacccgcgcgccccctgccaaataaagcgtggagacccggactcgggctctctgggaccagcatacagca

SEQ ID NO: 408662 - DNA, 122 bp, Homo sapiens
gaggtgggtgtccccctgtcacaggaaaagaaaaatatccaggtatctgttaagaaacctcgaggtttagtggaaaatcactgctgtgagacccacctcccagcaatcccaatccaaaagtc

SEQ ID NO: 408663 - DNA, 122 bp, Homo sapiens
cccgccccccgcccgcccccggcccgccccggccccgcctatgtccccgccaccgcggaccgcacctctcggcccgtcggatcctccgaccccaccggacacccggccgctgtcaccccgct

SEQ ID NO: 408664 - DNA, 122 bp, Homo sapiens
ttcgcggggccgggcaggaagcggagttagtcgccatctttgagtggggcagacgtgggccgcttttgctcgcggtcacttcatcttaagttgtatatatgtgcagagcgcggcgcgggtgg

SEQ ID NO: 408665 - DNA, 122 bp, Homo sapiens
ccaagcattctctttctttgtctatgtatgtacagataattacatggccgatttgcttatcgctggccaaaattaatctttcttttaagaagtgccagctgggtcattaagacagctcagcc

SEQ ID NO: 408666 - DNA, 122 bp, Homo sapiens
gcgccagcaggcagcccagggcatgcgagctgacctgctccagcgagcggaagagtggcgcgcccgcagccccggcccccgccgcctcgggccggcgcagccgcgcgggctccagggtcctc

SEQ ID NO: 408667 - DNA, 122 bp, Homo sapiens
cccccagaaagctgagtgggttgggagtccagcttccgtgcatgtggggcatgggatgggcgtagggggagaatgagaagtgtgatcccagtttggagagaggactgtgacgggttggggga

SEQ ID NO: 408668 - DNA, 122 bp, Homo sapiens
gtccccgtacgcgcggcgctcccagccctacagaggggcggaacccccgggcggggccggcgcctccccggagctgcaactgcaccccaggctgcggagcctcgtgagtccggcgtgccggg

SEQ ID NO: 408669 - DNA, 122 bp, Homo sapiens
gggacattggactgcttatgaaaaaagcaggggaagggcggaatggaattatgtggccttcgttatttatccccccggtcacgcgtggtcacttgcttgacctcagtgtgtcctcgataact

SEQ ID NO: 408670 - DNA, 122 bp, Homo sapiens
actattagaagcccctagtgctttcaaggggagcacggccctaccaacacaccttaatctcggagttctatggaaaactaacacaaggggtcagagatgttttattttgttgctgttgtttt

SEQ ID NO: 408671 - DNA, 122 bp, Homo sapiens
tcttcaccaaactccatgtcatcttcacccaagtcaatgctgcactggttgacctctgtgcgacccttgtctgccttcatgctgttctcctcaactttggtgctgccttccttaccctccat

SEQ ID NO: 408672 - DNA, 122 bp, Homo sapiens
ttgtgctcgggccttcaagagttcccacaatctggcagtgcaccggatgattcacactggcgagaagccattacagtgagtattatttactggtgaacatctgggtgagaaggatatatgcc

SEQ ID NO: 408673 - DNA, 122 bp, Homo sapiens
cagctctcctcggaagaaccaccctgacattaaatggaaagtcatttttgttccacactgcgcaacctggaaaactgcagttgcaaacatgcagtccagtctttaaatcctagcctgtgcta

SEQ ID NO: 408674 - DNA, 122 bp, Homo sapiens
acaaagaccccgccaaacccggaagccgtccagtccgctccagctgcatgcctgattggacggtttccagcccagcgtccctggttggataatgcttaaatccccgccctgtcaggctttga

SEQ ID NO: 408675 - DNA, 122 bp, Homo sapiens
ctgccccatggtcgctaccattccacccgtcctcatccgggacttcgctgaccttccggccgttaaggctgttgtctgttgtcatcaggaccaggtaggtctcacccaattgggacagagag

SEQ ID NO: 408676 - DNA, 122 bp, Homo sapiens
ggcggacgtggtggaaccgttagcccggtgccaacggtcctgaaacggggggcgggatctcggggcggggcctcggggcccggccaaggcgaaggtggagccagttcggaccccggaagggg

SEQ ID NO: 408677 - DNA, 122 bp, Homo sapiens
aagaacggagggagggatcgcgctgagtataaaagccggttttcggggctttatctaactcgctgtagtaattccagcgagaggcagagggagcgagcgggcggccggctagggtggaagag

SEQ ID NO: 408678 - DNA, 122 bp, Homo sapiens
tgggcattctccaatcccatccgtcggctccaggggccctggcccgccgctccctccctccgcctgcggtcgcctttgtaacaggtccatggctgtcgccccagtcctcgccagcctggcag

SEQ ID NO: 408679 - DNA, 122 bp, Homo sapiens
caaaccgggagccgccccggccccagcgccttcttccccgcccaggcagacgcgacccgccgaggcaaagccttaggaaaaagccccgccctctggcaggctaccctccggaccccaagtgc

SEQ ID NO: 408680 - DNA, 122 bp, Homo sapiens
ccgctgctctgcagaccagaccttcccgaattatccgtggctccgatgtcccggtgctgacggccacatggggacctaacagtgccaaacgccatctgctccagctgctttttcacccagtt

SEQ ID NO: 408681 - DNA, 122 bp, Homo sapiens
gatttttcagtttctttcctctcttgtgctgacggccggcaccatcccctcactctcccacgcccctgcctctgtttttggctgaggcctcctgcgggtcccggactcagggcggcctctcc

SEQ ID NO: 408682 - DNA, 122 bp, Homo sapiens
gcctggctggagaccttccacccattgggattttgtaaaacatctactttaaaatgtggccgtgagaaaagcccccattcctccccaccatctgttcgcctctccccgattttctaggatta

SEQ ID NO: 408683 - DNA, 122 bp, Homo sapiens
tgagtggagccccagcccttcccagccagaatggaaatgagtgtttacacgtcaaatcgacgaaagccatctcttgacgtcagatctacctggactaagatccgaatggtattcccggcggg

SEQ ID NO: 408684 - DNA, 122 bp, Homo sapiens
catgcatcagctcatttaatcctcacaataactctgcaaggtggcccctgacactgcctccgttttacaggatgaggaaactgaggcacagtcaggttagacaacactcccaagggcaccgg

SEQ ID NO: 408685 - DNA, 122 bp, Homo sapiens
aatagcctcataatatccaattagatgaaaagggtgcagaaagtatatagcatgctcccacgagaataaaaagaagagagaagatacaaagacacacagtcatccctcagtctacaggagga

SEQ ID NO: 408686 - DNA, 122 bp, Homo sapiens
gagcactgcgacacgctcaatgtcagcctgcagatgggcagcaacaagggcgcctcgcagcggggcatgacggtgtatgggctgccacgccaggtctacgaccccaagtactgtctgactcc

SEQ ID NO: 408687 - DNA, 122 bp, Homo sapiens
ccagtctgacacagagaattcacagctttgctgtgagatgggtggatacaagcagcaattcggggatgtagctgtatgtccacctgctgccctccttgccgcatggccacatgtgcccctca

SEQ ID NO: 408688 - DNA, 122 bp, Homo sapiens
ctgggatcctgttcgccgagcctgcccctccacgccggccgtgcacagccctgccgataccgtgggtgcagctggcgactgcactgcgaggctttgtccattttatacgttttgtttaaaga

SEQ ID NO: 408689 - DNA, 122 bp, Homo sapiens
gggggagcgcgggcgagctcttgggggcggagcctcgttatcgggacgggcgtgttggggcggggcctaagtgcggggcagggcgggctttcggggatgcggtctggattctggaggaggcc

SEQ ID NO: 408690 - DNA, 122 bp, Homo sapiens
agctatggcaacttgaactagccgcccagccacagcaagagtacaggaccccgctgccgccgcttggccgtctgggagttgtagtccatctcggcctcatgatcaaggaattaccaagggag

SEQ ID NO: 408691 - DNA, 122 bp, Homo sapiens
cgtgggcaatggtgaacgctgtggccaggccaatgtcctcattgacgctgcagcttctctcgcgctcacacattccgcccaccggggccaggcctgggaagacggacatgtggggatggggc

SEQ ID NO: 408692 - DNA, 122 bp, Homo sapiens
tgttcattttttcattgacataccagtgtgtgggtatcttcaagttatatgtattgcagtcgtggcactgaaacccggtccatagccagttcaccacatcaatgcttaggcccaaggaagat

SEQ ID NO: 408693 - DNA, 122 bp, Homo sapiens
gggagcccgaataggacggggcggggctagcgaaggctgcgcaagcgcggccggcgggggcgtggtcttcgcctgctgcttcgcttgccggccagtggagttccccgccccacatgccgggg

SEQ ID NO: 408694 - DNA, 122 bp, Homo sapiens
tcctccctcccctccttccctggtccttgcagacactgtgggtctgaagtggcagcccctcgcccctggagcctgctctcagcatttcattgtccccaggcaagacatagatagcgggccag

SEQ ID NO: 408695 - DNA, 122 bp, Homo sapiens
ttgagcattagagaggtaaggaaagtgcctagcatcatacctggcgcacagaacccaaaacggtaggtatcatgtagcagttctgaaaatctagcccatcaggatgatgcaaatgggtactt

SEQ ID NO: 408696 - DNA, 122 bp, Homo sapiens
cttgaaggcagggtttggcatctagccagggtacagcagccgtgccagcacagcagcctccggtcaagggttgtaagtcattaacttgggtctcctaccacttccggttaagaatgcaacac

SEQ ID NO: 408697 - DNA, 122 bp, Homo sapiens
taagacctattttgcctgttattcacattacacactgaatatgctgctcccagcggaggccgagactcctgcccgggcaccccctcacagcccccactccagcctccccagactcaccctcg

SEQ ID NO: 408698 - DNA, 122 bp, Homo sapiens
cttctcggactctcccactgaaaagcatctttttcttaaaggcggagagcactttacagacggttactaaggtaaccggaaacagcaaaactgaggtggttctatctacggaagaaattcta

SEQ ID NO: 408699 - DNA, 122 bp, Homo sapiens
cgcaaaagggtaaaagtgcgggaagtagtgggaaatgaggcggatgggccggatggggcccgggctcacatcgatggccatgtgctcctgcatgctaacccggggaggctgcccacctgctg

SEQ ID NO: 408700 - DNA, 122 bp, Homo sapiens
atcgggttgggaaaggttggcccttcggctgaggactagagggacccttgactttgctggcggagaagcgctttcctcagagacgggtgtcgcggtccagctcccttccgttccgttttatt

SEQ ID NO: 408701 - DNA, 122 bp, Homo sapiens
cctgccccccggggccctaggccgcctccccccagtcccggtgggcctgcctccttcctccgctccaccccaccgcctcgcctgggcttgaaaaaatcgccgtcccttcccctcggtctgat

SEQ ID NO: 408702 - DNA, 122 bp, Homo sapiens
cgtcaccctactggtcctgtgatacgtgcccaaggactgcccgggagccagacctgccagcgggtgcaggacaccaaggtcaagactggagcagggagaaatagtgctgcggcctggagaag

SEQ ID NO: 408703 - DNA, 122 bp, Homo sapiens
actgtgctgggtcctgaaatgtcgtttctgcgtgtgcactggctgccagctgcaagtgttcgcttgcacgtctgtgggtgtggaggaacttttcttgtggccgtcttgagggctgggaataa

SEQ ID NO: 408704 - DNA, 122 bp, Homo sapiens
ctggggctggggactgcaggagcctctggggctggatgatggtcctggggactcgggctgcgtggaagggtcggcaggtgggctctgtggagacgtggtcagatgaggtttcgggttgagta

SEQ ID NO: 408705 - DNA, 122 bp, Homo sapiens
cctgctacccatatgcactctggtcctcttctctgtgtctaagccagcctggctgtctttcggtgtggcatgtagagacatctgtggcgggggaagggctgtaccacccatagtgagggatc

SEQ ID NO: 408706 - DNA, 122 bp, Homo sapiens
gaagcgatcgtccctccaggacgccagagacaatctggagacttgatgctttaaactctccgggtctggcttggggttgtgtgcgtcgaactttgaggctggattccctgcacttgggcaga

SEQ ID NO: 408707 - DNA, 122 bp, Homo sapiens
ttcaacaatcattttaatatatagtcaatggctctttgtggaagggacaaaaagaaactacgcgcagttgttgaatagactttgcgctaggcaaagacaggttaatcgagggccgcatcgcg

SEQ ID NO: 408708 - DNA, 122 bp, Homo sapiens
gggatccctgcctcgggcctgcctagacagtatgtgaatgagtatcccagagattctccccgctgtgacctcgagggccagcctgcctgtgtggccgtgagctgctttcttcccagaggaac

SEQ ID NO: 408709 - DNA, 122 bp, Homo sapiens
cacctgtacccgggcagcatctctggctgtctcattgatcatggagtcgttcaaggcctgcggggccagggattctgtcacactgcccaccatcacagacatgacagcaaaggtccctgtaa

SEQ ID NO: 408710 - DNA, 122 bp, Homo sapiens
tggcatgctcacagagaggaagccgagcaatttcctgtgctggcctggagttagtactggcgtgagcaatgagcctgggaagacgggtgctctcggagggaggacacctggtctgaggggta

SEQ ID NO: 408711 - DNA, 122 bp, Homo sapiens
gacgcaccctgcccatgcttgttcagctgctccggccccttcaggcgcaggttgttgggccggttgttgatgctctcctgggatgaggccttgaagcggccggtgtccagggcagcaaagac

SEQ ID NO: 408712 - DNA, 122 bp, Homo sapiens
gtcattctgagagtaccaaccctatttaatgagatacctgcattcactcaccccctctcccgcaaccaccccttcagcaagtcgcgctccacccaattaggaggggctttaggctgggccta

SEQ ID NO: 408713 - DNA, 122 bp, Homo sapiens
cggtctccggcctgtgaggtgagggagcgatcctcagccgtgtccctagcctctggcttccggctaatttttaaattttttgtagaggcgggatcttgctgtgttgcccgggctggtctcga

SEQ ID NO: 408714 - DNA, 122 bp, Homo sapiens
agacataacaacagagaaacgcaagatgtaataaccagcgaaaagcatgaaacacccgggcggcctcggggccttatatagggtagggcgcgctgtgattggtgcatcacctaggcaccgcc

SEQ ID NO: 408715 - DNA, 122 bp, Homo sapiens
ttcttcttttgagactgaatgtcgctctgtcgtccaggctggagtgtcgtggtgtgatctcggctcgctgtaacctctgccttctgggttcaagtgattctcctgtctcagcctctcaagta

SEQ ID NO: 408716 - DNA, 122 bp, Homo sapiens
agcctgcacatgcactctaatgatgcaagctaccaccaggcggtcagctttgccagctgacgtcccaaacagctggcatggggcatgcacacagtaggtgcttaataaatgtgtgtcgggtt

SEQ ID NO: 408717 - DNA, 122 bp, Homo sapiens
cggagtcccctggacctggccaggccctgacccaccctctctctccacagcttgagcagccgggactgctctccctgaagacccctccagagagaaaataaactagcccagaccctcctcta

SEQ ID NO: 408718 - DNA, 122 bp, Homo sapiens
aggaaatatgtaaatctagatgtttcatcaaatgctagctaaggggttactagttcttttcgaacacaatgactgaactaaagaactttagtgtctgtgtaagaaccattgtccaagccgca

SEQ ID NO: 408719 - DNA, 122 bp, Homo sapiens
ccaccctcgactccaccacggtcttttgcaggtataaagactaccgagagccgccgtggtcggaaaacaagtacgacatctccaaggacttctgggccgtcctggcagcccggctggcgttt

SEQ ID NO: 408720 - DNA, 122 bp, Homo sapiens
gccgagcgttacctggtcccgggcagcggagttctttacccaccccagttctggttctgacgccctagctcattccgcaaatttagggcttgggtctggcttgttcccctccggctcgaacc

SEQ ID NO: 408721 - DNA, 122 bp, Homo sapiens
tttctcctgctagcggctctcccggctcccctgtgagccccgatagccaggcccattgcccgtcagcacccacagccaagcgggaggcctggggaggaaggaatattgtcccgttctggctt

SEQ ID NO: 408722 - DNA, 122 bp, Homo sapiens
ggggtacacgtctggaccactcatgacaggccccactgcatcacgaccccagacaggagacggcagggcagcctcagactcccctgcctaagttcaactccgagcaccggggcaggcgtgct

SEQ ID NO: 408723 - DNA, 122 bp, Homo sapiens
tgggaggtcaaggaaggcggatcatctgaggtcacgaattcgagaccagcctgtccaacacggtgaaaccccatctctactaaaaatacaaaaattagccaagcgtggtggcacgcacctgt

SEQ ID NO: 408724 - DNA, 122 bp, Homo sapiens
tttttgaccctctgcaggttgataacactgatgctgaggggaggctcatactggctgatgcgctctgttacgcacacacgtttaacccgaaggtcatcctcaatgccgccaccttaacaggt

SEQ ID NO: 408725 - DNA, 122 bp, Homo sapiens
ctccagacagaatcaacaccaccccctcctcaggaactgggatttggctgctttccaagccgctgctgaccaggttccattgcccagcttggctgatgagatcactggcagagtaccatggg

SEQ ID NO: 408726 - DNA, 122 bp, Homo sapiens
ttaaatactctaactagctttctttactcacaatgcatttattttttattttttttacagcggataacactcaggatttttgtgacatcataggcttttaacagaaaatatgtaaggcgatc

SEQ ID NO: 408727 - DNA, 122 bp, Homo sapiens
cgagtaggactggggatagaactgccgcccaaagtgaggcgctccagggcccagacctggcgtgtcgtgcccgcagggagcctcaggcctgtgcgtgcttggggagcggagaagggaaattg

SEQ ID NO: 408728 - DNA, 122 bp, Homo sapiens
acccacctttcccgaggtccctaccacttccgggccccccagccgcatcttctggcggaccgtgcgaggtatgccgccccacaagaccaagcgaggccaggcttctctggaccgcctcaagg

SEQ ID NO: 408729 - DNA, 122 bp, Homo sapiens
cagttctcgccgggcgcgaagatgggggtcgcgctgggggcgctcatgctgcaggctggacggcgacccgacctcgatcgcgcgccgcccgggcccgctccctgcaggggcttgtgggccgg

SEQ ID NO: 408730 - DNA, 122 bp, Homo sapiens
aggagcccaggcacaaggccccagagtcccagaggagactcagacgggccctagccctttcggtctcctgtcttgagccaaggtggatcgtagggcctggggcagggtgggaagataacggg

SEQ ID NO: 408731 - DNA, 122 bp, Homo sapiens
ctccgggggcggggctcggcgctcggactgctcctgggcccggcctccagagcccgcagccgcctctgcctgcggcccggcccagcctctggcttttaaagcccaggagctgggggaggggg

SEQ ID NO: 408732 - DNA, 122 bp, Homo sapiens
ctccgcctccgccgccgccgccggggcccccggcagcatggaccccctgcagaactcccacgaagggtaccccaacagccagtgcaaccattatccgggctacagccggcccggcgcgggcg

SEQ ID NO: 408733 - DNA, 122 bp, Homo sapiens
gagaaggacaagcacaagtgtgcagaaggcagcaagcaagttgcgttgccgaaggaagggcggcgcgcccctgcttaagaagtatctggacgacctgcgacagtgcccatcagcgactccag

SEQ ID NO: 408734 - DNA, 122 bp, Homo sapiens
tagttggggtggacctggggcctgacgtcgcagaccatgccaagaagctgggccaggacacgctctcggtttctctgctgggagctctgcatgccctgcacctggcgccttgtagcctgctc

SEQ ID NO: 408735 - DNA, 122 bp, Homo sapiens
tgcgtcggtttcaaggctcctccctcctggtgaaagacagactacggggcgcctggaaaccggtccgagggcgcgcgaggcagaggagagggagcgagttgagggattgacacaaatggtca

SEQ ID NO: 408736 - DNA, 122 bp, Homo sapiens
cacacgtgatctctgcttgggaaagtggccagtgccactgtgcagtgcccagcatttatacgtgactctgtttggtgtgtgctgtgttggtcaccacttaaagtagagccagtgtgcacaat

SEQ ID NO: 408737 - DNA, 122 bp, Homo sapiens
ccgggctggcggggcgggggcgtcggggagcggcgggagctggccgggggcgggagaaggcggagacaaagtcttgcttcccgaggggagatggcgccctcctctggaaggtggagcgggac

SEQ ID NO: 408738 - DNA, 122 bp, Homo sapiens
tccctgcgcgcggtccgtgttcgtggacgagtgagccagcggtgccttcccagagactcacgctctgtgcagtagggccctttccagccagggttgcacactttctccccacgctccccaca

SEQ ID NO: 408739 - DNA, 122 bp, Homo sapiens
cgggaagggtgggcctggggtcacggagcgctttctggaaagccgtggtgaagcatcacccggtaccagccgcctcgctagctcttgccatagcagcagcgtgaacaagcgtcccgccattt

SEQ ID NO: 408740 - DNA, 122 bp, Homo sapiens
aaaagaaacaatcagcgaacagctcccagagtgggaggaaatacttgcacactttgcatccgaccaaggactaatatccagaatctacaaggaaatgaaacagatcagcatgaaaaaacaaa

SEQ ID NO: 408741 - DNA, 122 bp, Homo sapiens
gtgcgccgcggccgaggtactcagacctctccatgccccagggttcccggcggagaccagcgcctgcaacagggacacacaagcctgtaaggtcagctttgagacatccagaccccgaacac

SEQ ID NO: 408742 - DNA, 122 bp, Homo sapiens
ggcgtttgctacaacttggcttcagcctattctggggcctcatcctactggctcctctgccgggatgccagttaatatctgaccagccccgccctaaactccaaaattcagaccaaagcctt

SEQ ID NO: 408743 - DNA, 122 bp, Homo sapiens
aggaaataattaagaatttctggggggaaaatagtgatagtctgtgaatgaggaccctaccgtattagcgcaataattaatgagcctaaaagacactggttaccatatgactttccctaagc

SEQ ID NO: 408744 - DNA, 122 bp, Homo sapiens
ttccgtgtctcagatggggcctgggtcaagtcctgggagttgatggagcgtttcccaaatcgcaaaaggagaggagctagacttacctccccctcctgggaagtaatgcgcgacaagaattt

SEQ ID NO: 408745 - DNA, 122 bp, Homo sapiens
actgttttctctctgggcacctctcatttcggaaggccatcagaggcgcccactactgagcggccccggccgccgcagcagcacccggagccccagtcccggtttccccgcggtgccggagc

SEQ ID NO: 408746 - DNA, 122 bp, Homo sapiens
ccagaccctccccagcctgctgtcactgagagaatctgttcctaatgtggcccacctccccggcagggccccccgtcgacgttgggatgcggatcgatgtcgccagcatagacatggtctcc

SEQ ID NO: 408747 - DNA, 122 bp, Homo sapiens
atggggctctgcatcctcaaggcaggctcgtggaggaccgatctagggctggaggggccccgggccagctggcttagggcgcggctgccaccgccttggttcctggcccccgctcgcccctc

SEQ ID NO: 408748 - DNA, 122 bp, Homo sapiens
ggccagcgtgtggaagaggaagcgcatggatcgcatgatggtggagcacctgctgcgttgcggctactacaacacggctgtcaagctggcgcgccagagcggcatcgaggtgggtgcccgcc

SEQ ID NO: 408749 - DNA, 122 bp, Homo sapiens
tttgatcattagtttcaattcaagaaaacgttcttttgagggaattttaaaaatgaatcacgtgcacctcttaagaaaaccgagtgtcacaatcgttgttaccacgcaggtgagaggagagg

SEQ ID NO: 408750 - DNA, 122 bp, Homo sapiens
ggctacagttgaaaaaatgccttattgtttcataaactacacaccaattctttatttgatcgcatccatctttttaaacagctgggtccattttgaatgttctcgttttaaacttagcattt

SEQ ID NO: 408751 - DNA, 122 bp, Homo sapiens
gagttccgaggcctacgcacctcagaggagcagctgtggggactgtggggcaaggcccctcgcccgtcccacacgagaacggctctttctagcatgttttctcaggtgtctctttatcctct

SEQ ID NO: 408752 - DNA, 122 bp, Homo sapiens
gtcgtttaaaaaagtctgaagattatgaaccctgattagtgaattagcaaatatttcatacggttagttcttaggattagatttcaacacttcagtgcaaattcttcacacttttgtcatgt

SEQ ID NO: 408753 - DNA, 122 bp, Homo sapiens
gctgctttctcactgttccaggagaggctacacccgtgttgtaacagagcaggtgtgcggcgtcagtgtgaactgacgcttagcttagtgcagatacaggtggcgacatacagaaatactgt

SEQ ID NO: 408754 - DNA, 122 bp, Homo sapiens
ccgcggctccgggctcaggccgccgctaggtggagcgaggaggccggtggagacgcggtgcggggagacgcgcgctcgggagctgcagaggccggggagcgggcctggcgcgcgggtagagc

SEQ ID NO: 408755 - DNA, 122 bp, Homo sapiens
tggacagcacgctggaccgagatggaaccacagctttctcttcccaatccctggcctcaccgttttgtttcatacctcaccgtttgtttcaaacctcgtggtgttgaaatgattaaatgaga

SEQ ID NO: 408756 - DNA, 122 bp, Homo sapiens
tagggagtggggtaagggggcgaccccgcccagtgcagagggtggcgagtcaggagccgacgaatgctggagaggccatccgcaggggcgggtctctccagagagcagccgggtgacaacgt

SEQ ID NO: 408757 - DNA, 122 bp, Homo sapiens
catgcagatactttaaatctggactctctttggattctagagagcatgtttctaagatcacgttgtcttcttcaggagtcaaccatacaatcactttcctcaggaagttccataggacaaga

SEQ ID NO: 408758 - DNA, 122 bp, Homo sapiens
gtttgtgtcatggtgtttttgtaacaggtttgcctgccttagtggtgtcagttgttctagcgagcagaaacaacaatgaagtctatggaaaagaaagttatgggaaagaaaaaggtgatgaa

SEQ ID NO: 408759 - DNA, 122 bp, Homo sapiens
ttccagctgctgatgaatacccagctagggccaacggacaggtgctagaataggggcagacggattctgcaacaatgataacagctaacagtgatgaccaacaatggactggacagcctcag

SEQ ID NO: 408760 - DNA, 122 bp, Homo sapiens
tttgtcttagttatccccgagctatttttcaggaaccgacaggctcccccaccccaacaccggatgaaggccagcaactggaggccaggaataatcaagcacgctctcatttcaaagaggtg

SEQ ID NO: 408761 - DNA, 122 bp, Homo sapiens
ctcagaccctcactgagccttttcttttttcttttctttcttcctgtttttcttttgagacgcagtctcccaggctgcagtgcagtggctcactgcaacctcggcttcccgggttcaagcga

SEQ ID NO: 408762 - DNA, 122 bp, Homo sapiens
aatcacatccgcaagcgtttctatgtactgagttctgccagtgaatcaacaaacctaggccggttttgaggacctctgtcacaattggtatagtgttgaatagtctaccaaacgtttttttc

SEQ ID NO: 408763 - DNA, 122 bp, Homo sapiens
tgaggccgccccgctccgtcccgccccgctgacagcggctgggctggagaaggctctatacggacacacctctggggacggggaacccactgctcccagctaaagcaaccctgtttcctggc

SEQ ID NO: 408764 - DNA, 122 bp, Homo sapiens
ccccgacgcccggctgcccgctggtcccggtcgcctcagcctggcccccggctgccctggcgcccctcctggcccgcgccctgcatctccctagtgacccccctggtgccctgcagcaccca

SEQ ID NO: 408765 - DNA, 122 bp, Homo sapiens
cgctgcccgcactcccgggtcgggcctgcgcgtccctgtggggttgggcgagcggggtatcgagggtccagcagcctggacccggcccctccacagggcagtcccttttccagcttccaaaa

SEQ ID NO: 408766 - DNA, 122 bp, Homo sapiens
cctacctcacaggggagcggagccatgcaacactattttcgtgtaagctaccaccagaagcgtaaagtctttgaggtctcaagtcaaatggcctatatttgacaagagaccacacatagatt

SEQ ID NO: 408767 - DNA, 122 bp, Homo sapiens
aagcaaagggcacactaaggtcaaagacgtgctattcaagcccatttgctaacgtgcagccgtttcctggcttttcagcaaggagatgtgtgtgtcgctttattcgttcattgaacaaatgc

SEQ ID NO: 408768 - DNA, 122 bp, Homo sapiens
gttttaggaatccgagaacagccttccctgagggaccatctccagctaacatcagggaggcggcaagacccgtgttcccagcagaaggaaaagtgacctctgccatgccaggctgacctcgt

SEQ ID NO: 408769 - DNA, 122 bp, Homo sapiens
gagggctgaggagtcaactggaggcgcattcaagcctttagatggaccctgcggcccagtcggtgagctgctaagggctgagcaggagaagcaccagagggggcctgagtgcagcctcggct

SEQ ID NO: 408770 - DNA, 122 bp, Homo sapiens
tctatgttttcatggtggagctgacagatctggatctgagatactgttcccgcccctccgcgagtaatgcgcccttgggctgagacccgagctcagtccgggtgtgggagaggagcaagcgc

SEQ ID NO: 408771 - DNA, 122 bp, Homo sapiens
acagctccgtcgggaccagagacccggggaccttttacacccagggtccgcgcaaagtgtcggcctagccagtggttgggtggcgcccgggcctccaggcagtcttccaggggtcggcgaac

SEQ ID NO: 408772 - DNA, 122 bp, Homo sapiens
gctgcccttggaagtcaggtggagccacgttccaaccccgtctctttcatgtttgagctgcgtaaccttgggcctctctaagcctcatcatctaagatctgcctggaatgcctgccacccca

SEQ ID NO: 408773 - DNA, 122 bp, Homo sapiens
ctccgtcccgccccgccctccatccccgcccctcaccgtccgcgcccagcccgccggccccgccctgcccgccggccccgccctgccccacgggcttgaaccccgcccacctcttcgtccct

SEQ ID NO: 408774 - DNA, 122 bp, Homo sapiens
aatagtgcaagcttcttctcatccaaggatcggaaaaagaaaggcaaggacaggggtcatcgacccaggacccaagtttccccggcacaggcggggcgcgtcctcccagatttgtactcaag

SEQ ID NO: 408775 - DNA, 122 bp, Homo sapiens
ctcgcttctctgtcggaagaccctctcctccctgccacacggctggtccagcgtcccgggcgtgcctcctctgccagggctgaaagggccgcttacacccggggacttctccgctccggaca

SEQ ID NO: 408776 - DNA, 122 bp, Homo sapiens
acagaacaatggatgcaaattctgaggcactcgccttcaattcaaagcctgtgggaggcccgaaccagggaagtgacagcagccgaggtgtccgtgtcatcggggctctgtcactgagggtg

SEQ ID NO: 408777 - DNA, 122 bp, Homo sapiens
ggggccgagctcgggggcgtgcagctcgagactcgcccgggcacctgctcctcgtgcgcacgcccggagcccgggtcaccttgtcgtctacaagaaccaaggtgtgcccggccaccccggca

SEQ ID NO: 408778 - DNA, 122 bp, Homo sapiens
gtgtgagagttgttgatttcaccgtcaattcatacatttattcgtccaacacatatttagcgggtactcactgtctccgggcaatatgctaggagctaaagataaaagaatgagttaaacag

SEQ ID NO: 408779 - DNA, 122 bp, Homo sapiens
ctggggggcggcgccgagcgtctggcctgtgttggctgtaggcaacgaaaggagccctcccggtctgcgccggatggccccgggcggtgactcggtccggagccctggaacgctacgcccac

SEQ ID NO: 408780 - DNA, 122 bp, Homo sapiens
tccatccccacctcccactccttcccacgccccatctccccgacccccagcaccccgcgccgcccccaaccctgggccgggcaggtgcaattcctcaggcggcctacagagggcgatgtgcg

SEQ ID NO: 408781 - DNA, 122 bp, Homo sapiens
cgcacggggaaaagagaataatattactcccaatatcgctgggggtatacgccccccccccggtatattactcctaatatgcagcgaagtagatgctgatgatactcccaatatcgcaggag

SEQ ID NO: 408782 - DNA, 122 bp, Homo sapiens
ggccctggaccagcaggcgggcctgctgtactcccgctttggggctgcagggaagctggccgctgtgggcggtctcgggccagccccgccccacctgtccttttcctggagactattagtcc

SEQ ID NO: 408783 - DNA, 122 bp, Homo sapiens
ggagagcggaacagagctgggcgtggcagtgcctgcgagtcagcgccacgtaaccagaggcgctcgcactaatttgacctctaagagagactaagcgcagggaacagcgggtgcggacatta

SEQ ID NO: 408784 - DNA, 122 bp, Homo sapiens
cgagctccggggatgagctcgggggcggctgggtgcgagctcctgcctctgaggcgaaggcggcggcggcggcagcagaggcggcggcgaggcccccatgggccggcggcgggcctcagccg

SEQ ID NO: 408785 - DNA, 122 bp, Homo sapiens
ttcagacgaccccaaatcctcatgggttaaaagaaacagcaaacccctgaccagaactggcgagaatggagagtagacagcagggagggccaaagcctaagaaatcgctacaagactagatg

SEQ ID NO: 408786 - DNA, 122 bp, Homo sapiens
tatttacaccgaaatacaatttaacacaaacatacgcaaagagatatgccaaggagtactcgggggctctgttcaggcacttgttaatgaaaacgaagcgaatcttgacgccttaaaccctg

SEQ ID NO: 408787 - DNA, 122 bp, Homo sapiens
cataattaaataaaatcagaaagtaggagatagcacatgtagatttgtaagaaccaacaccggatagcccattaacccccatagatacattggctctggtggggaaaagcaccatgccaatt

SEQ ID NO: 408788 - DNA, 122 bp, Homo sapiens
cgtgggccctgtgtctacagtcaccaacttccaggcttgcgactaaagggagccaacgagcgcgtgagcgtttgagaccagctggctgagggacgccgaaaatcccgcgcggaggaaggcgg

SEQ ID NO: 408789 - DNA, 122 bp, Homo sapiens
tccgtgggccgtgattctctctgaccgggtggcattacaggcctgtgacctggctcaccacgatgctctccatgtataatgcatgcagcctccgcggtgctcaaatctcaccaaaaaccagg

SEQ ID NO: 408790 - DNA, 122 bp, Homo sapiens
ctccctttctttcccagggtgctctctcccagagcggggtgggcattggactctaagattcgggccaggcttagacattagggggtggctccaagtggaaggagaatggaaagctgggcctg

SEQ ID NO: 408791 - DNA, 122 bp, Homo sapiens
caagcactgagctagctggtggtagccgggcgcctctcggggcgcgccctattccgccctcggccctgggctgccgcacgatctgcgcgtcctgctgcacctgagcccttcccactcgggcg

SEQ ID NO: 408792 - DNA, 122 bp, Homo sapiens
tgtattggtgaagaaaaaaaccatctccttttcaggctgttttgctcagctgtacttctccggtgcttttgccactacagaatgattcctcttggccacaatgccctacgaccgctacgtgg

SEQ ID NO: 408793 - DNA, 122 bp, Homo sapiens
agcctgggcaacaagagcaaaactccatctcaaaaaaaaaaaaaaagaaagaaacagtgccgaaaaatcacaatgatttgagttcttcaaaaacctttgattggctgcattggctctgttct

SEQ ID NO: 408794 - DNA, 122 bp, Homo sapiens
gtggggcgcggggacccgcggcaggtcgggtggggggtcgataagccccttctcagtgcccgctccggggagcacggacttcccaggttgcaggtagcgctgtgtcagatgcggagcgtggg

SEQ ID NO: 408795 - DNA, 122 bp, Homo sapiens
aaaagtttttgccagataaggttcagaaacagggaagagtgaaataaatcaatgatccttcgtgggcttctgttaacggaatgtattagcgaaaggcttcacttcatcagccccctcccgcc

SEQ ID NO: 408796 - DNA, 122 bp, Homo sapiens
aagcgtgcgtgcaggcagctatacccacttttctgccctactacttcgcctcagccaatccgtaatcgcttttcctgttatggacaggcaatagtcaccaataattgtgggtcacggaagag

SEQ ID NO: 408797 - DNA, 122 bp, Homo sapiens
tctagtttctggttcaataccattcctgttatatggtcagccctgtgtagccctgggttccgcgtccaaggattcaaccaactttagatcaaaaatatttggggaaaaaaattaaaaataac

SEQ ID NO: 408798 - DNA, 122 bp, Homo sapiens
acagctgttttggaaaatgctgcctgccttcaacgcctgtttctgactcttgcggtttcccgcatggctcccagcgagacgatcccgtccgggatcccatccggctcccatccggaggcgat

SEQ ID NO: 408799 - DNA, 122 bp, Homo sapiens
cgaagacccccagctcccagaacctgctggccctcctagcccggcagggcgtggtgatgacgccccctcgaaaccggacgctgcccgacctctcggaggtgggacccttccatggtcagccg

SEQ ID NO: 408800 - DNA, 122 bp, Homo sapiens
cggttcacaccgtctgttagtgtattctaatgaaccacagcatctccggagcaacacttacggtctctcgtccccggaggcagtgtctcctggaaagttcctggggcaccaagtttgcgcgc

SEQ ID NO: 408801 - DNA, 122 bp, Homo sapiens
taaaaataagtatcacttcttttaaaattcacacaacttcttgggctgagtgaaatgtggcgcaggtgcaggactgtgggaagacaggagcgccagggaatgtctggccagcagcgcgctgc

SEQ ID NO: 408802 - DNA, 122 bp, Homo sapiens
cttcaaaatggcccttgaccgtgcccgcctgtctgcctgctgcaagacccaaagcgctgccgaagagactgcctgaattcatagggcttgcgattccgcattgccaggcgttcttctgagtc

SEQ ID NO: 408803 - DNA, 122 bp, Homo sapiens
atggtttgggattggtctacttacctagctgattatgggcagccagcttctaagtaccttcgggtgaatccaaacacagcccttactcttttggagaagtgagtatattctgaaactttttt

SEQ ID NO: 408804 - DNA, 122 bp, Homo sapiens
gctataggcaggctgtgggtcccgtgcatgcagggccttcctcgtccctgcatgacccagcgtcggggcctggcaccctcagtgcttgttaaggctctgacgtgcatacgcatggtcgcttt

SEQ ID NO: 408805 - DNA, 122 bp, Homo sapiens
tgctcctgcagggctggatccgcgtcttggagggcctgaaatttctacgttttgcaaagacgctcttttaatacaaaagaaaaaagaaataatacaaaagtagaaagtgaaaaaagaaaaat

SEQ ID NO: 408806 - DNA, 122 bp, Homo sapiens
gctgttgtttggtctttaggcctgcggaggggcgttatctggagggccgcgggtgcaggccgcagtgacagggccgctcgccccgctagtcctgcctgtctcccggtgcagctgtgttcgcg

SEQ ID NO: 408807 - DNA, 122 bp, Homo sapiens
gagccacttgatcttgttgatcttctcctctatctccaggctcttgagatagtcaaactccggctcgtggctctggaaagtgctgtacacgtcgtattcgccctggctgtggggcgcatttt

SEQ ID NO: 408808 - DNA, 122 bp, Homo sapiens
ctcccctagccacagcaaggtcctgggacctccactagtgtgcactgtggcctcttcacacgctctccgtctgcatcctctatcccagacacagactctgtcctgttgtatacaatccatct

SEQ ID NO: 408809 - DNA, 122 bp, Homo sapiens
acaggacaagctctgaattgcattccaggaaaaggggactgaggctttgtatttttcctccgcaccaagattcccaaggctgctgttaagggtttttacccagggtggggtccacggcgaag

SEQ ID NO: 408810 - DNA, 122 bp, Homo sapiens
tccccaacacacactcccaacacccccccatccagtagcttcatgtgaccagggctggggcgaatctccgagcagagagaagaaattgagtgtgtgacagtgtgaatggatgtgactatagg

SEQ ID NO: 408811 - DNA, 122 bp, Homo sapiens
ctccctggccggaaaaaacctagtcctcccaggttagcacgccgctctagcccagcctcacgtctccactgcttctcagccagccaacgcctcttctgattggctctgacgtgcgtggtgcg

SEQ ID NO: 408812 - DNA, 122 bp, Homo sapiens
tgggttgtcagctggaggccttctacttctttctaatccattagcttcttgctagtgctgcgtccccaggaggaaatcagtaaatgcaagaaataattaccttgacaatgccttgcacatag

SEQ ID NO: 408813 - DNA, 122 bp, Homo sapiens
tggccccatctgacattttttcccacccattcaaaatctcttggatccctaacagggtcacggactccaggttcggagcaacgggcaggacctccggtgttggcagaattcgggcgctcctt

SEQ ID NO: 408814 - DNA, 122 bp, Homo sapiens
gattgagcctgggtgccactgagtcccacacttgttctacagatgtctgaatgtgccttacgccccagaggaactcagaccccactcctcaggaagcaggcagaagaaggagctggaggacg

SEQ ID NO: 408815 - DNA, 122 bp, Homo sapiens
ggccagcgtgagggaggacttccctcagcgtgagagaggccactgtgaggcagggcctcacgctgacgtccctcagcgtgagagaggccagtgtgaggcagggcctcacgctgacctccctc

SEQ ID NO: 408816 - DNA, 122 bp, Homo sapiens
acgcggcggcggtggcacgagcgcggggagctgcggcggcggcgagggtggaagatgcggcggagacggcggagcacggtccctgcgcccccgggagccgctatatgagcgggcggggcacg

SEQ ID NO: 408817 - DNA, 122 bp, Homo sapiens
aatgctttttgctgagcttttcccatttccttgaacgtaggagatcaaacctcaccaacacgactgcctccacccagctacacaatgcagccctcagaaacagatgttctcagttccggtta

SEQ ID NO: 408818 - DNA, 122 bp, Homo sapiens
cagcccagagcctccttctcggggtgcaagcctggcttgggactggggggtgtctgcactcgtggagccccccatgcctgccgggagcctgaagacgcagagacctcctgcctcgcctcgcc

SEQ ID NO: 408819 - DNA, 122 bp, Homo sapiens
tctcatcttcatcaaattcaaacataaactcccctgttggtctatgcgtctgtacaaacgcggcataagttgacacatggtccgctgcataaagacagtagagaaaaacacgacaaaatgtc

SEQ ID NO: 408820 - DNA, 122 bp, Homo sapiens
gcaatgactcccgttgccaattcaaagagcttttatgaatgtttcaatatacttgtctagcgtatgtgcctgtttttggactcaaagtggccaccataggtgggagatcaagttggcaacaa

SEQ ID NO: 408821 - DNA, 122 bp, Homo sapiens
agacccattgagactggctgaggactggttgccatagagatggcctgttaggcagttctacggtgcggatgggggatggggcaggatggggcaggacaccgatatgctaaatacctaccaac

SEQ ID NO: 408822 - DNA, 122 bp, Homo sapiens
gaaagggtctccagacagttccgctgctccgggagcagcccccggccccgcccccgcgtgcgcctggccccacccccaagcgctccatgaccagcctccacgtgcatccgccccagacaggc

SEQ ID NO: 408823 - DNA, 122 bp, Homo sapiens
ccaggagctcttctaagaggaagtttttggcaataagtaatgaaagccaccaataagtagcgaaaacaactcactggagagataaggactgacaggaagatggaggatgggcagcagtggag

SEQ ID NO: 408824 - DNA, 122 bp, Homo sapiens
acgaggtctgagcacctaggcggaggcggcgcaggctttttgtagtgaggtttgcgcctgcgcagcgcgcctgcctccgccatgcacgggggtggccccccctcgggggacagcgcatgccc

SEQ ID NO: 408825 - DNA, 122 bp, Homo sapiens
gacatgggacctctgccccacatcttaccttggctgcaagcgttcaagtggatctcctcccgtcctgtgccactcgatcctcgctgcttgctaaaaagttattgaatacatttgtttcttta

SEQ ID NO: 408826 - DNA, 122 bp, Homo sapiens
gatggggttagtaatgtggccaaggaggtggttgttttctcaagggtgagacctcgtctccgatctccgtctcttggagctagcattcccctctatccacagacaccacgtctgtcgtcatt

SEQ ID NO: 408827 - DNA, 122 bp, Homo sapiens
cctccccacccagacccgccgggccgtccccgcctcccctcgaagccctccccgcccccccgcaattacctgctccgccacggcccggaacaggcacgacccgtccttggcgaccagtttcc

SEQ ID NO: 408828 - DNA, 122 bp, Homo sapiens
ggttgctctttaatgcctttggtttgctttcaaaaataagtagtctcaaaacaaagcatccgatttcccagtagttagaagaactcaataccggttccgaagcttcttcaattaaaaacgtg

SEQ ID NO: 408829 - DNA, 122 bp, Homo sapiens
agtaataactgaatttcacccttttcaagcttggaaattatatctcctcattctgctgaacgtgtctatggccactttggggctacaatggcagagcagagtagttgtgacagagacgctat

SEQ ID NO: 408830 - DNA, 122 bp, Homo sapiens
atctgtatctggcacagtatctgcttttgagcccagaaggaaataaaggccctggaggggcgctgaaccctaaagcactggagctgcagggagaggtcttctgaggcagcttctggcagccc

SEQ ID NO: 408831 - DNA, 122 bp, Homo sapiens
ttcctctgtgatcatgggcgaggggcgggccctgaacgtctccatggtaacctggggacacgactcgacatcgcctgggtaacccggagacgcggcgggcgttgaaaatgcaatggggcatg

SEQ ID NO: 408832 - DNA, 122 bp, Homo sapiens
atggaaacacatgatgagtggcagacgttaggcaggtgagcagatggtggtggtcggtggcgacccagagaggcagtgctggctgaggagagggcagcacacctcaccggggactcggtgtg

SEQ ID NO: 408833 - DNA, 122 bp, Homo sapiens
ggataaaatctaggagggagctttacagagaaattcagccaggccgctctgggggctgggcgggctgccttgaaaggctttttaaatgacccaggcagaagttcagtaatatatatggagag

SEQ ID NO: 408834 - DNA, 122 bp, Homo sapiens
tgaatgaatggacagaaaattcaatcctttatttttttctctgtaaatatgtacagtgcacgggctatgagatagcaacaaaaaatgcatagttaatggtcatagactttattccaaaacat

SEQ ID NO: 408835 - DNA, 122 bp, Homo sapiens
ggcgggtgtggacgctcctggagcgaggcggggggcggcggcggtgaggcctagggagggcgcggtccagggtcccggtgcctggctgcggaatttagggtagagtctgttcggcagccttt

SEQ ID NO: 408836 - DNA, 122 bp, Homo sapiens
ataacaagggcacacccaggctgcggaccacggttggtgtcgacggatctctttacaagacgcacccacagtgagtctgccctttgctatcattggcactctgtacccattgtgggtaggga

SEQ ID NO: 408837 - DNA, 122 bp, Homo sapiens
agagcaagggcggtgcgccgccaaggaccaactagcggcggagcttcgatcttgcctaggcgcggagagctcccaacctgggctggaaccttgcccagcacaggtcagttcgtctttctctg

SEQ ID NO: 408838 - DNA, 122 bp, Homo sapiens
gggtatcatttacacatagtaaattgtctaaatttaaatgtgcatctcaatgactttttacgtatgcagttaccatgcaggtcaagatattatgcccattttataaatgggaacgttgaggc

SEQ ID NO: 408839 - DNA, 122 bp, Homo sapiens
gagtggccaggataaaggcacggagccacatcgtggaagggcgacagttctcggggcctgcgaggtctctgtgcagttcagagggactgtgctgtccagccctggagcccagccccgcccag

SEQ ID NO: 408840 - DNA, 122 bp, Homo sapiens
gctgctgccccgactctttctagcttcaacctgtctcccttgggtctacaggtcggctgccgggaaaaaggggatttgaaggaatgggaatggggacccggccgctctggcaaagtgggggc

SEQ ID NO: 408841 - DNA, 122 bp, Homo sapiens
taaagcgcagcgccggcggctccagccacccaggtgaacccgcctctgcccgccaggcgccggcaacacagctctgccttccgcctcgcccgccgttccgcgtccttccgagctacgagagg

SEQ ID NO: 408842 - DNA, 122 bp, Homo sapiens
tatttgtaatttacaaatcaaacatctatcatacacttactatgtacctagttttattcacgaatcatccatttctaagataaaaattcccatcatttcctcactgcactaaaccaccactg

SEQ ID NO: 408843 - DNA, 122 bp, Homo sapiens
gcgcagcgtcccgggcacagctgggacttggagtccgcggccgcaaagccgcttgggaagcgcagtctcgtccgccggccgcgcgcgggcgggtccccggacgaagtcccgggccgcaacct

SEQ ID NO: 408844 - DNA, 122 bp, Homo sapiens
gtacttagagcagtgatcgtttcagtaacaattctctgtatacatttccaggcccaatgacgcaggaagcagagggaggggagaggctggagagaagaaaaagatccagagatctcctgcaa

SEQ ID NO: 408845 - DNA, 122 bp, Homo sapiens
gagggccccaagctccagcagtcttggtccctgctgctctgcctgatgctgctacagcctcgctgggaagctgagggctgggcttttatttaagttgggttgagcagtggggaaaggctggg

SEQ ID NO: 408846 - DNA, 122 bp, Homo sapiens
atgccaggcaaggcctagggaggtggtcttgctcagcaaccctgccctgagcagcaggtgcgcccatccggagatcctaggagaaggtggccacctccatccactaaggaagagaaggaaga

SEQ ID NO: 408847 - DNA, 122 bp, Homo sapiens
ggttgggcaggggatgctgacagtactgagggggctggaaagatgggggaagctgccaggcgggtaaattggatatgcttccaggctttgcatctgggaacaaagtaattgctccttccaat

SEQ ID NO: 408848 - DNA, 122 bp, Homo sapiens
ccctggagttcgttgcagtggaatccatggcccaggtgagcacagctgcagggagctgcgcggggggagccgcagagctgggcacttgcgaattaagtcccggtgaccggtgactgccgagg

SEQ ID NO: 408849 - DNA, 122 bp, Homo sapiens
agacccggcaaactccggccttgaatgacagtgcgatcggcgactgcgcagcgcgggacgcgccggggcactgccgctttaagcacgcttgtccattgttcggaatcgagccaatgagcgag

SEQ ID NO: 408850 - DNA, 122 bp, Homo sapiens
acctgagcagccccctgtccactcactgacacagaatctatttatcctgcctgctactttcgaggctgacctgttacccagccccaagcgagcggccgtttgctgacctgatagaagctcat

SEQ ID NO: 408851 - DNA, 122 bp, Homo sapiens
agggatttgctctggtaccttaactccagagaacgtaaaggtggatgctataatgccgggcgtcaaagcgatttggtacgcagtaagatgatagtagaaattataaaaataatggcaactag

SEQ ID NO: 408852 - DNA, 122 bp, Homo sapiens
ccttcttaccccgcccccccgtcctgcacacccatcagttccttggcctagttatctatgcgcacgcgcaaaagtcttcggcagcacttgtagttcccgttttcagacagtaagggcgcata

SEQ ID NO: 408853 - DNA, 122 bp, Homo sapiens
gtgccaaggaggacgatccagggcgggcctggccgcaagagggcaccttgcagaaagcaccgcagttggcagtaagcaggcattttccagaagaatcccgaaggcaaatactctgttctgct

SEQ ID NO: 408854 - DNA, 122 bp, Homo sapiens
tagactcacccaggctgtgccctctgctcagaacgacctttccccccttcctctccccctcgcttgctccgactgttctttgcaatcccggctggggttgggttaagggccttctggggctt

SEQ ID NO: 408855 - DNA, 122 bp, Homo sapiens
gaggcgtagaggtcaccctcgggaggtttcggtgaaacctggtgggaaattccgggcaggcgcccggagtcgcgcccaagtaggcagctccgtgccgccagacttgtgttcgggggagttga

SEQ ID NO: 408856 - DNA, 122 bp, Homo sapiens
cagagcaaattgagacagcccagtgagaggccgggtgtcgcttcctttcgggtttaaagtcgtctggaggctggtcccgtcccgggtctgtctgctatagggcaatgtatacactttctatt

SEQ ID NO: 408857 - DNA, 122 bp, Homo sapiens
agcgtggagaagaggcgcatcatgcagcaatgggccagcagcctggtgggcatgaagcaccgcgacgaggcgcacagggcggtgctggaggcgctcaggtactgcagggccacaggcagcga

SEQ ID NO: 408858 - DNA, 122 bp, Homo sapiens
cgcgtgatgccggggcattcgttttgcaccttgtacagcgtccgcacaagatcatcatagcggtggtggcgaaaggtcaccggggcaaccaacttgaagagaaggaggaggtggaggaagac

SEQ ID NO: 408859 - DNA, 122 bp, Homo sapiens
ataggtcataaaagccattttggcctctgtattggtcctctcttggatcactaaccttggcgagaacttattgccaaattgtcaaggagctgggccttgtaaagaggcctacatggtaatga

SEQ ID NO: 408860 - DNA, 122 bp, Homo sapiens
gcggaggagccaggtgaggaggagccaggtgagcaggaccctgtgctgggcgcggagtcacgcaggctcgaggtgagccggaacccttgtgggcccgggctgcgctcccagccgccaggggg

SEQ ID NO: 408861 - DNA, 122 bp, Homo sapiens
tgttcttccttgtgtcgaacactgtgctcacatgtagatggttaatatgtgcgggatgaacgtgccacctgtagaatgagaggttacatgctttccactgaaagcatgccttaatactgagt

SEQ ID NO: 408862 - DNA, 122 bp, Homo sapiens
gccactggagctgtttagacagagatgtgatatgatcagaattgcattctttcaagacatcgctgaatgcagtgtggaggatggctcgtggatatgtgttggaggtgggtgggggtgagtgg

SEQ ID NO: 408863 - DNA, 122 bp, Homo sapiens
aaggtgaaaaatagccaagtctgcagctctcctgacatccttgctcaggctgctgtcccacgtggagagcagatgcctgcaaagctctcggtcacttgctggagtcactcagggttctgggc

SEQ ID NO: 408864 - DNA, 122 bp, Homo sapiens
gccagtaggtagattatattgcttagccctacatagttaactacttcctccagataataccgccttttgggacatgattctcacaacctgtaatatgtgatacctgtagacttagcacacta

SEQ ID NO: 408865 - DNA, 122 bp, Homo sapiens
tgtgcacacgcgtgtgcgtgcgtgtgaacgcgtcagggtacccgaggatgcacacacgcacgtgtgagtgtgcgcgagtgcgtgctcagaggacagctctcagcaggctggggacctccttc

SEQ ID NO: 408866 - DNA, 122 bp, Homo sapiens
ttgaaaattttcagtcctctagggaagatatgatactgctgttttcagacagctgtgtttcggagtgagactgatttaaccagctggctggcatcattggagcccgaggacccgccaaccca

SEQ ID NO: 408867 - DNA, 122 bp, Homo sapiens
tagtaaatgcagacactgctcagctccagccccataaacctctctgctctagggcttctccgccctccggtgaaagctactgctcgcccctgcagtcaccacctgttcgggcggaacctgcg

SEQ ID NO: 408868 - DNA, 122 bp, Homo sapiens
ccctcctgcggcctccccccactccggagcccttccctcgcttcctcccgcccctctccccgcttgggctcgcctgtaattgcctgacaggagactgggaggaacaactttccctccgagtg

SEQ ID NO: 408869 - DNA, 122 bp, Homo sapiens
gtgacaagacctaatttgcattttaatgtccctctgtgtgaaggaggtagaggtgagaatcgaagtgggaaaccagtcaggaagactccgaggttttctatctgagacactataagattttt

SEQ ID NO: 408870 - DNA, 122 bp, Homo sapiens
tcctatagtagagatgccagggccctcctcacccatccaggggtggacccttggtggagacgccacgtgggacagagggagagggcgggatgcctggagtttctcttctaccagccttccag

SEQ ID NO: 408871 - DNA, 122 bp, Homo sapiens
gcagcagcccttagaggaagagaagctgactttgcaaggaggcttggacgcgggcatgaacgtagtcgtggaagaggctattctggacaagaatttgaaggcctgccgaggctaaagagaga

SEQ ID NO: 408872 - DNA, 122 bp, Homo sapiens
cagcggccagcagttgtgtgcagcactacccagggggccccgagtctgtctgtggctcgtcgagaagcttcctggtggggtttgtgggcaggactgtgataggagagggccttgcctgtgtt

SEQ ID NO: 408873 - DNA, 122 bp, Homo sapiens
gcgggaaaatgagcaagaacagggtgggtacagaattcagtgagagcttactggccccaacgtaaggcaggaagatcaagcagggggagtgagctgacccatgaatgatgaggttgaaaaga

SEQ ID NO: 408874 - DNA, 122 bp, Homo sapiens
cttctccgaagccagcggtggtagcgcccactcggttgagcccacgcctccgccaggcagcgcctccgccaggcagacctcctgcgggacattttgtggccaggggggttcctgcccaggga

SEQ ID NO: 408875 - DNA, 122 bp, Homo sapiens
caatatctctcaccttgctcctacaacaagttctttctgtcctgggtcaaatgttaactgcgagaaatccacagcattcttcgctctgaactcccgtaaccaggggccaatttctaaataga

SEQ ID NO: 408876 - DNA, 122 bp, Homo sapiens
ctaaactctagcactccttctgccccgcccctcggaggaaacacaccccctttgctgagccgctagccaatcaggtgtctctcagccaagttgctcatccaagtctaccccactttctactg

SEQ ID NO: 408877 - DNA, 122 bp, Homo sapiens
cgttggctcctgggagctgtagtcgctctgctctgttgccctgcagggtctcccgtgcgccgcccagagaataataaatgaggagagcctggagtttgccctgcaaaaccgattgcccagct

SEQ ID NO: 408878 - DNA, 122 bp, Homo sapiens
attgaggctgtcttgggcttcactggcagtgtgggccttcgtacccgggctacaggggtgcggctctgcctgttactgtcgagtgggtcgggccgtgggtatgagcgcttgtgtgcgctggg

SEQ ID NO: 408879 - DNA, 122 bp, Homo sapiens
acaccccaagtctagcatagtcacacaacagagaagttcagtctggcaacacactacagccggagacaaactaggtggccaccgtgatggttcaagccaggaactagttaattaaaggttga

SEQ ID NO: 408880 - DNA, 122 bp, Homo sapiens
ttgtgtgttcatgtccttgttctccatggccatgcaacaacaaacctcaggtgttactcccgacaacaaggctgcttcaataacagaaccccaaagacaaaaatattttaccccaacatata

SEQ ID NO: 408881 - DNA, 122 bp, Homo sapiens
tagaaaaagtgtgtggtaggtaagctgtcactgactagactgtgtgatgtcgagaagtcccgtcccccacccctccggactccccccttctctgctttaaccatccaattacttaacttctc

SEQ ID NO: 408882 - DNA, 122 bp, Homo sapiens
agagggccaggtgcagtggctcacgcctgcaatcccagcactttgggagtccaaagcgggcggattgcctgagaccatgcaaagggggtcagatcatgcaatgcaaagccttttaggccacg

SEQ ID NO: 408883 - DNA, 122 bp, Homo sapiens
gtgcataaccagcagcaaggaaagcccggagctggtcgggaggcttttccttggcagcatcgtgggcaggctgggcagtggcttacctcggcactctcttcatcgctgggcacactatcagt

SEQ ID NO: 408884 - DNA, 122 bp, Homo sapiens
gacttcgtgtatcctctacttcctgaaaggttttcttcttttttttcagttgccactcatcgttaatatgacattctccaggtcttctccgcacttcagaattctcttctgggcttttgaat

SEQ ID NO: 408885 - DNA, 122 bp, Homo sapiens
cacctgtaatcccagcactttgggaggctgaggagggtagatcactagagcccaggagttcgagaccagcctgggctacaggtgaaaccccatctgtataaaagatacaaaaattagccaaa

SEQ ID NO: 408886 - DNA, 122 bp, Homo sapiens
catacttgattctggaacaaactgctcacttttaacgtggtttgaactaatgaacaagtacgtcccagcatctataagccaaagaactattccctcttctaatcaccaactttgattttttt

SEQ ID NO: 408887 - DNA, 122 bp, Homo sapiens
ccaagctgcttcataacatcgatcggaagaggctccgagtggagggccgggcggggcgggcgccgcgggggcctgggagcctcccctggatgccatttgccgcccgggtgagggccccgggg

SEQ ID NO: 408888 - DNA, 122 bp, Homo sapiens
gtggcccccaggtggccaccctcagtggggatggcatgggaaagtgtgtctgagggtaggcgggtgagtgaatggccaaagacctggccagaatcccaggaaaaccaggcccggactggaac

SEQ ID NO: 408889 - DNA, 122 bp, Homo sapiens
cagctcctccctgatcgccatgcctcagtacttccacgtggttggcggcaccattggattcgctctgaaggctgggcagatcccaggcttccgggaattcctgaagaaggtccatcccagga

SEQ ID NO: 408890 - DNA, 122 bp, Homo sapiens
gccccgtgcgcacagcgccctgataattgctttttttcttgtgatgggcatcgggctgagcgtcgcaggccacccggcctcagcttggagagcattggcatggcaggtctgcaggagcaggc

SEQ ID NO: 408891 - DNA, 122 bp, Homo sapiens
tggcttgtatgtatggagtaaacggaccaaagtggggtcagatatctgcttctgtgagttcgttcaagtggggagaatcctcctaactgcaagtggggcttgagcagatgcccgtgcccggc

SEQ ID NO: 408892 - DNA, 122 bp, Homo sapiens
tggcagaagtttagctggaatgatagcagtaagaataaaaagagagaggcctgttgggagcggcgttaacaggagagtgtgagtcaccagcctgttagtgtttgctattggtgaataaaaag

SEQ ID NO: 408893 - DNA, 122 bp, Homo sapiens
gcggacgccacgcggttcggggtcggggccggtaggtatgcgggtcacactggggcagtgcggacgcaggtccctctggcatctcgggagacgcggtccttaaactccgtgtcctgggggcg

SEQ ID NO: 408894 - DNA, 122 bp, Homo sapiens
caaatcaaagcttccttcaaataagatggtcccatagtctgtatccaaataatgaatcttcgggtgtttccctttagctaagcacagatctaccttggtgatttggaccctggttgctttgt

SEQ ID NO: 408895 - DNA, 122 bp, Homo sapiens
ctcacactgcatgttgctacccgtctggaggtaatgaaattaatttagcaatgcgtaactcgtgaccagcatctttagaaataaaatagaacactgcagagtgtgctacacagcaaaggtca

SEQ ID NO: 408896 - DNA, 122 bp, Homo sapiens
accctccaatctagaatcaaatcagagagcagtcccgagtgcccacctcaaggtctgaagcgcctcctcctccacccagacccgtacacgaagtgggctgaaggaggcactgaggtcaggac

SEQ ID NO: 408897 - DNA, 122 bp, Homo sapiens
cttgaaaagaatgctggccacaatccacaggtatagagaatatggagagaaagcatctcacgcctgaagagtccaataaaacatttatagataagaatttaagagaatatgggttctttctg

SEQ ID NO: 408898 - DNA, 122 bp, Homo sapiens
ttaatggctccttacctcgtccatcttcgaggtttctccctcgctattggcttgtggccccgcctgtcgcgtcccttgctcgtacttgttggtgacagcgcccaaagagactcgcctttctc

SEQ ID NO: 408899 - DNA, 122 bp, Homo sapiens
aaacaaatgctgcttcccttctccttgcccttggacactgtggacgtaacctaggtgtttcggcagctgagttgggactaacttaagaggtcccagacattgtcaaaaactccctaaaccat

SEQ ID NO: 408900 - DNA, 122 bp, Homo sapiens
aaacgggcttctgttctacttgaagccggggaagctaaggtctccttctcaaaggagagccggaatcagaggtgagaaatgtcggtacttgaagagttaggctgctttgcatctacccagcg

SEQ ID NO: 408901 - DNA, 122 bp, Homo sapiens
ccacgctggaaggtgacacattcccaagaggcctcttggacttttgtgaccctgagactacgtggaagctgacagcagatcagggctcaggcgatagttagaagtggtggctgttccgtgcg

SEQ ID NO: 408902 - DNA, 122 bp, Homo sapiens
tcgctgctgtgtccagctctctctctcgctcattccttcctcgccatctggggatctccccggctccgtgtcccctgcagtgccccgcgccccaatcaccggccaaagcgcccgcggagcag

SEQ ID NO: 408903 - DNA, 122 bp, Homo sapiens
tgctgacaggagccaggggcttcatgctggggctcatcatctgtggagtggacatcttcacgcacagaaggaggaagaaaggtgagaaatcctgtgaggtgaccgatacccacctttctcct

SEQ ID NO: 408904 - DNA, 122 bp, Homo sapiens
ccagctggagtgtggtcttgctgacagtagctgcaggctgtagcccacccgggccggaaccgggtggaagagagtagaggactcccttctaaggagaactgcccacctccacccgtgcggct

SEQ ID NO: 408905 - DNA, 122 bp, Homo sapiens
ggtgagtgttacagctcttaaggtagcgcgtccggagttgttcgttcctcccggtgggctcgtggtcttgctaggctcagaagtgaagctgcagatctttgcggtgagtgttacagctcgta

SEQ ID NO: 408906 - DNA, 122 bp, Homo sapiens
cagacccggggccctggggggcggtgggctgggcattcagggtgtggaagcctcaggtcccggggtcccccaaatcctgcctagtccactccccacccaaccctgccccttctcatccaatg

SEQ ID NO: 408907 - DNA, 122 bp, Homo sapiens
cgtttctggaggtggctcccccgaagatcacccggctccgtcctgctgctggtcagcgcgcggatctgcagggctaggctgtgctctgcatgcggccctccgtcctcagggaggcaagaccc

SEQ ID NO: 408908 - DNA, 122 bp, Homo sapiens
agcttttcgctttgccacagtggaaagcagattttccaagaatcctggcggagccaagatcggctcgcccgcccccgcctcacgctggctcctgataggcagctagagctgtccgttttgac

SEQ ID NO: 408909 - DNA, 122 bp, Homo sapiens
tctaaggtacttaccccaaactgacttctgattattcactggaatgttacaactaaaatacgcttgctggaaaactcttgtacataaacacctgagcgatcaaggccaactccatttatctt

SEQ ID NO: 408910 - DNA, 122 bp, Homo sapiens
aatgtgaagaaaatatcctagagatttatgcttccttcccaatgcactattttaggaatccgaactcaggctctttaagcaatcttaaaccttgctacaaagttctttaaaattcaacggaa

SEQ ID NO: 408911 - DNA, 122 bp, Homo sapiens
gagggagtgtgcgaaagagcgcgacctctctccgcccgggggggacagttttgtttacagcgaaggtggttggaagagtgggggaagggcgcagagagaaaggaagtggcctggaggtcatc

SEQ ID NO: 408912 - DNA, 122 bp, Homo sapiens
gtgttctcatgaaaaactctgcatgaaacttcagacagagtatctagactgtggtcagtgcgtaaaaaacagtgtgaacattcatgttccagtgcacaaaacagtatcctcctattacaaag

SEQ ID NO: 408913 - DNA, 122 bp, Homo sapiens
gcatctgtaatcaaccaccacctctgccaatcaagcgattcttttccatcgaatctgaatcgtggaataaatgggtcaggagaaacaagaaagcacatttagtgaccttggctaatgtgggc

SEQ ID NO: 408914 - DNA, 122 bp, Homo sapiens
atagatacagcgttgatgtccttcttcagctccatgatgccgcctcctttccgacctgggcgccgcggccgcacgctaggctgcttgcgctgcaaatggccccgtgcgcgcagctgccccac

SEQ ID NO: 408915 - DNA, 122 bp, Homo sapiens
agagagagcttcagctttccaaagcacacccacaaaaaggaagataatatacagcctgctcggaatggactgaaatcattgaaataattatggacttctcaagaactatagtgtgcttgtct

SEQ ID NO: 408916 - DNA, 122 bp, Homo sapiens
atttactggttatctaaatttaaaaccctttaatatagcttccaagaagttgcggccaggcgcggtggctcacgcctgtaatcccagcactttgggaggccgaggcaggtggatcatgaggt

SEQ ID NO: 408917 - DNA, 122 bp, Homo sapiens
gccctacgcctgcccgttgtgcggcaagagcttcagccggcgctccaacctgcaccggcacgagaagatccacaccaccgggcccaaggccctggccatgctgatgctgggggcggcggcgg

SEQ ID NO: 408918 - DNA, 122 bp, Homo sapiens
tgtacaaaaagtgcatgtggtcactgccctttgagagtgtggtgtgattcttcaggagtgcgctacccaggaaagagatcagttctaaggtatgttttgttttgtttgtttgtttgtttgtt

SEQ ID NO: 408919 - DNA, 122 bp, Homo sapiens
aagtgggtgtcaaacaattcaattctgacaccatctacctggagttagtgtcagagccctcggtcccaaacaacccttcccactttagatgccaattgcaagtctccggtcactggtacttc

SEQ ID NO: 408920 - DNA, 122 bp, Homo sapiens
tgcttattttgtgggagggagggggtgggcagagggcctaccacattgccccatctcccccggaaccttcagctgctggcactgggggttttagacctggcttagcccttgttagcctctgg

SEQ ID NO: 408921 - DNA, 122 bp, Homo sapiens
ggagcatccctgtgggagactctggccagctttggcgatgcgaatcctgagagcgctccccggtaggcaattgccccagtggaacgcctccagagcactgcacggtaggcccccgcggagga

SEQ ID NO: 408922 - DNA, 122 bp, Homo sapiens
gcagctcctttactggctggggtactggggagcaggggtacccttgagttttggtacaggcgggtggtattggtggcttccgaggaaaggacagagaagccgcctatttccaatccctactg

SEQ ID NO: 408923 - DNA, 122 bp, Homo sapiens
caccggaacagctgcagccgcctggagagccagagggagccgggtggggcccgggggtggcgctggcatcgcggaacacccccgcccgcgttccaaacgaaagcacatcacccccaagcgac

SEQ ID NO: 408924 - DNA, 122 bp, Homo sapiens
ggatccggctgagaccaacccgcggcgcaggtggggctgcacagacgctgatggtgggcgcgccaccctctgttttccctcactcgccagccccgcaccccaacagcttgcgctggaaaatg

SEQ ID NO: 408925 - DNA, 122 bp, Homo sapiens
cgttacgaaaatgtaaaagaacgaacacggcttcaataccaggattgagcccaaaggtcacgttctttccctgcggctcccttccccatctggttctggggaagacactctgcacgcagccc

SEQ ID NO: 408926 - DNA, 122 bp, Homo sapiens
gaaggagaggaactgttacactcagaaagggaggcagacagagtagtaaaaagaaccgggcgctcccaagctgagctgagacctggcctctgtgtgtggcgctggctatgctcccagcgagg

SEQ ID NO: 408927 - DNA, 122 bp, Homo sapiens
agatatttgggcaggcacgacttccatgttcctgtctttcttcctaaaatatcagaggagcgggagtcacagcatctaaaatgaaactcatcttggcagtcccgtgaaatacggagctgatt

SEQ ID NO: 408928 - DNA, 122 bp, Homo sapiens
attttagatgtcaacttcattgtttttatcatagtgaaatctttatgaagttgaggtgaacgaagccctgtatgcattgttatgctatttggttttgataaaaaattgcattgtacaagatg

SEQ ID NO: 408929 - DNA, 122 bp, Homo sapiens
ctggcctctttctttctctccatcttatcttttctgtctctttctctgactccatggattcgtgtattcatgtattcattcgacaactacttcttcaccacccaccatgttccaggtcctat

SEQ ID NO: 408930 - DNA, 122 bp, Homo sapiens
gcaggtttcgaacccattgtgtatgcagcacacatcgccctgaaaggcccgtcctggccccgtcgatcaacacacctgcaacactagtgactcctgcctcagatcaatgctgcttacaaagt

SEQ ID NO: 408931 - DNA, 122 bp, Homo sapiens
ggcctggagagttttaagcccaggttgagagcacaggtgtaggctttctggtgtaggttccgacgcacctgccttccattcccgcctatccatttaggctgcgacctctggtagttctccac

SEQ ID NO: 408932 - DNA, 122 bp, Homo sapiens
tgtgtgacctgtagtgagttgcttaacctttctggacctcagtttcctcatgtaaaatgacgataatgagcagcattgctgagaggattaaatgaagtatagagcataatgtacttagtgca

SEQ ID NO: 408933 - DNA, 122 bp, Homo sapiens
tccctgcttcgcccacgacacgcccctccccgcccggcaaactgcccggagccaaggccccgcccccagagagaacctgccccgcctccctggcccgggccccgcctccttggcaagcgagt

SEQ ID NO: 408934 - DNA, 122 bp, Homo sapiens
gagctgctgcagtaaagctgaagaagtggccgcgtgcagtcctaagctcctgtggcctctcggttgccagcaagtcctttccttggctgtgggccagtgactgtttgcgagaccgcagaacg

SEQ ID NO: 408935 - DNA, 122 bp, Homo sapiens
gttaagttcttattatcaagatgcctctctgagcccaagtccttgatttcccgtccctgacgtgctgggcaccggctggtctagaagctagtctgtggctctgggaaattcagtgtggttcc

SEQ ID NO: 408936 - DNA, 122 bp, Homo sapiens
agagggtggggaccggcggaggggtgcggcaggacgtgagcgggggtgggctgggctgggcgttctctggccgccagctcatcccgctgctctgggctgcctcggccaggtggacgggttac

SEQ ID NO: 408937 - DNA, 122 bp, Homo sapiens
tgttattattttatttttcaaatgtgatttagctgctggtgcccataggaggaggtggttcgtagaagagccctagagccaatgagaagcttccagagttggacaatgggaaatcattactg

SEQ ID NO: 408938 - DNA, 122 bp, Homo sapiens
ctgggtcacatggtagatctattttgattttccaaggaaccattacactgtttttcataacggctgtaccaattacacgtctgtcaacagcgtttaaaggtcccgttttctgcacaccgtaa

SEQ ID NO: 408939 - DNA, 122 bp, Homo sapiens
cagcttctttcctctgttttcaatggctcacacaaactcacaagacacttcttatctagccgggttttttattaaaagtcaagctaccttatggatcaggcaggtaattttgtcaataaatt

SEQ ID NO: 408940 - DNA, 122 bp, Homo sapiens
tttttattagggaggctgcgagcctgttgatggatggggcgcgattcgctcttccgcctgcggggacagccggtaaacagaaatcaatcaggggcctcccaacccagcccccccagagccaa

SEQ ID NO: 408941 - DNA, 122 bp, Homo sapiens
aaagagatgcagagataaacacaatcacatcaaagggctgattcctccactttctaatagcggaataatcaataagaaagatggttaagataagattccgctcctatcgtatgcctttcttt

SEQ ID NO: 408942 - DNA, 122 bp, Homo sapiens
acttttaaatgtccaagccaggtaattaaatatgaactctgatccaaagcaacaaccactcggacatatgactcatacatttctggaagaaaagttactgcttattctataatgtaaaatgt

SEQ ID NO: 408943 - DNA, 122 bp, Homo sapiens
gcggattccaaaccttggggcagaagtgggaaacactgagacgttcagccggcaagtctccgcccacctggaacagatgctcattgccgtgccctagggagactcccggacacaaaggaagc

SEQ ID NO: 408944 - DNA, 122 bp, Homo sapiens
ttcccgctgctcgcgcctgcgccgcccgccggcctcaggaacgcgccctcttcgccggcgcgcgccctcgcagtcaccgccacccaccagctccggcaccaacagcagcgccgctgccaccg

SEQ ID NO: 408945 - DNA, 122 bp, Homo sapiens
gctccggctttggggttgggaatcaaaaccagggcccacgtgtacgtcgggagccatctgcgctccaccctgaccaggacggagccgcactcgggcgtctgggggaaagcccacggcgcggc

SEQ ID NO: 408946 - DNA, 122 bp, Homo sapiens
ccacgaccccctccgcgctcaacacgccacccgcggccacattcggcctctaccttctgccgcaacacacacaccgaccttctaaagagccttctgtgcgccagcttccgttccaaacggaa

SEQ ID NO: 408947 - DNA, 122 bp, Homo sapiens
ccagtgcctttggcgcactcaagacaggggcaaatgcttgactctggaaaacccccgaaacgctacaaacggcccaggccaggaatccaggggaagacttgatctccgacaacacgaatgcc

SEQ ID NO: 408948 - DNA, 122 bp, Homo sapiens
tgggtttgtgtcttccccaggctggccagtgctcctgggtggggtcgcggcggctctgggcgactcctcatttgcagagtcagcacaggcagggcccttcccaacagtggcagcctcgtgac

SEQ ID NO: 408949 - DNA, 122 bp, Homo sapiens
ggctgtgcaggcggccatggattccttgcggaaaatgctgatctcagtcgcaatgctgggcgcaggggctggcgtgggctacgcgctcctcgttatcgtgaccccgggagagcggcggaagc

SEQ ID NO: 408950 - DNA, 122 bp, Homo sapiens
tcaccagccggcccaacatgaagcggcaccggcgcacgcacacgggcgagaagccgtacccgtgcgacgtgtgtggccagcgcttccgcttctccaacatgctcaaggcccacaaggagaag

SEQ ID NO: 408951 - DNA, 122 bp, Homo sapiens
gaaaggcagaaaacacatcaagagtctaacacatgcttactccaagccctggcagcctagcgaccctgctctgggacccactctggccacagttttcccatctgtggaataaacaacacaac

SEQ ID NO: 408952 - DNA, 122 bp, Homo sapiens
ctgggccatgataggctggctgagccaggacaccaaggcagagcccttggaccccgaagccgacagccacgtggaggtcttcggggatgagccagagcagcagttgtcacccattttccgca

SEQ ID NO: 408953 - DNA, 122 bp, Homo sapiens
gggccgcgggagcgggcgcccagcgagcgctcagggccggcggccagcgagcacagccaccgcagccaccattccctggccagcagccttcgcagccaccacacacacccgagctacggtcc

SEQ ID NO: 408954 - DNA, 122 bp, Homo sapiens
ttacctcagctgaagtggaaactcagtccgtggcccccgcaaatgcagaggtgctggtgacgcagggagcccatggagtacttaccggttccctgagctttttcttcatgcatgttcttctg

SEQ ID NO: 408955 - DNA, 122 bp, Homo sapiens
cccactgaaggcatctgtgaatgatgtaaggcttgcctcttacagctggctcctagatcccgggcctcaccaccacttgtgctccaccacgcagggctctgtgccatgtctggccataccac

SEQ ID NO: 408956 - DNA, 122 bp, Homo sapiens
ctatcaggcacatcataggctctgcatctaaaattggcctaggccaggcacagtgggtcacgcctataatcccaatgctttgggaggccaaggtaggtggattgcttgagcccaggagttca

SEQ ID NO: 408957 - DNA, 122 bp, Homo sapiens
ttcggggggcgattttcctgaaacctgttccgggcgttttggtacccagaaagtgtgcaacgatttgtacactcggagattcactcaacgttcctgcataaaatgccctacaaaaatgatct

SEQ ID NO: 408958 - DNA, 122 bp, Homo sapiens
ccaggatgtgtctggtgggctcccactgcagatagcagagctgaagtccaaggcacccaacgtggggctcctcaacatcagagctctacctgctaccaatctcattgcagggttcacaccaa

SEQ ID NO: 408959 - DNA, 122 bp, Homo sapiens
caagaacacagcaacaataattcaacaatcatatctaaacattagctacttactaggaaccgcaatctaccaccgatttctatgtgcgtttgtagacagcatcagtgttaacaattttggca

SEQ ID NO: 408960 - DNA, 122 bp, Homo sapiens
caagctgtctgactcccaggctgacaagcagggcagggagggagaggggatagcatgatgcgggcaggactggccctcccagagggtagatgctcagctcacaagagggagctggcaggccc

SEQ ID NO: 408961 - DNA, 122 bp, Homo sapiens
agaagcctttggcccaagctccaccatcccttgagacttctctatttcaaccgaggcctccgtggagcattgtgaaaactgctggtctgtggatgataccttggcaattaatggcgagcttc

SEQ ID NO: 408962 - DNA, 122 bp, Homo sapiens
ctctggagctgcaaggaggggctttgcaggctcagagccctgctgcatcccctcctgcatcgccgctcgcaccccgcggccccgtgccactcggtcccggcgcccgcctggagcctgcagca

SEQ ID NO: 408963 - DNA, 122 bp, Homo sapiens
ggcgggaagccgagtcctggagaagcctggagacaatgggcaacaggggcattgggcctccgtccagcccccgccagcgccccagggtcacacataggcctttattttctgatcctgaaagt

SEQ ID NO: 408964 - DNA, 122 bp, Homo sapiens
gtaggtgcgcctgcgctttgcgaggttcctggctagggaggcggccttggctggcttgaccgtcatccttgaggcctgcggggcaacggtggctgtccttggcccggctttggaatgtggct

SEQ ID NO: 408965 - DNA, 122 bp, Homo sapiens
agctgatgtcacagtgttgatgagcatggacggcatttggaggcacctgcaaaactctcacgtgatacgaaactgttggtgatttcttctggtgacagtcacagatcccattacgaccgtgg

SEQ ID NO: 408966 - DNA, 122 bp, Homo sapiens
agtgatctgcccgcctcagcctcccaaagtgctaaaattacaggcgtgaaccaccttacccggccaaagagtagttatttgtttatttgttttgagacagagtctcgctctgtcactcaggc

SEQ ID NO: 408967 - DNA, 122 bp, Homo sapiens
gaaggcgcggctctggctgggctggtggccgctgccagcggaggaggacatggctgtggacgcgggctctgggctttgtgtggcgggtaggcggcggcgccgggccggtctgctccagctcc

SEQ ID NO: 408968 - DNA, 122 bp, Homo sapiens
cgttgctcgcagccccgttcggctacaagtgagtttcagggcgtcatggccaggggccaccgcggccagccgggtgtgaggctgcctttcgctgcccgcgcgctccagtggtctctgggtcc

SEQ ID NO: 408969 - DNA, 122 bp, Homo sapiens
ccagatataaacagatttatatatttgtgtccctcccctgctccccccagttccccagcccgacgcacactctacacgcaggccactctgacctctgaccccgtgttccatgtggcaggagg

SEQ ID NO: 408970 - DNA, 122 bp, Homo sapiens
agtggcctcagctgcctgtgcccacagccctgattagccgtgaggattcataactgcaggcgtgcctcatgtctaagtgctactcccacagttcccgctcctgggcggccgcctctccctcc

SEQ ID NO: 408971 - DNA, 122 bp, Homo sapiens
gccctgcggcatcccaggaagaggacagcgtggggccggagtcaggcccggtcctgggtccgtgtctccattccgccgcctactgccaggccagcccagccccggaacttctcttccagtgc

SEQ ID NO: 408972 - DNA, 122 bp, Homo sapiens
acgaagcccccgccggccaccgaaccacgtccttaccacggtgtttgtatttgccgagttcgccatttccacacacaacacaaacaagagggggcaaccccaagaaaacaagataaaaacaa

SEQ ID NO: 408973 - DNA, 122 bp, Homo sapiens
ggagcgtgcgcgaagtcacgcttctggctgcgacgcaaccgccgctgggcggtgagttgccgccaaccgccctaacggccgaaacaatgttaatggctttcagagtctggcggcgcgttccc

SEQ ID NO: 408974 - DNA, 122 bp, Homo sapiens
gctttacctgactttcgccaaaagcatgcacagaacgtggaacttggcctcctgaaaaggcgtgtcttcagcttaggttattcctttctcgatgctcaccatgatgtcaggctcctagtagg

SEQ ID NO: 408975 - DNA, 122 bp, Homo sapiens
cgactgtggcagggaccccctattttcccctcatccgaaaccgctcccccatcccgtccccgacattggatgggtagccaccgccggagctcagaggtcatcttctccagtaccctcctccc

SEQ ID NO: 408976 - DNA, 122 bp, Homo sapiens
aaagggagcagaaattcgaggtgatgtaaccaaggcattgtgaaacccctgggggtccctcggaaatcctgggatgggcagtagcttttccgtggtacatgggatggaggcttcagcatgta

SEQ ID NO: 408977 - DNA, 122 bp, Homo sapiens
ccgctcttaacggggatttgacccggagaagagagttctgtcgcctgcggcccgcgcacccgggcccctccgggctgcccctcccaggcaaatagtccttcggggatgtggattgcgccgtc

SEQ ID NO: 408978 - DNA, 122 bp, Homo sapiens
gcaccccgtgtctccttattccttacgcatcaaaaggagacccctgcacacctgtgtccacgtttgaagacacactctgcaccccgtggaacactccagaaagctaaagttgcatggaagca

SEQ ID NO: 408979 - DNA, 122 bp, Homo sapiens
aaggcctgagccaggtggctcagacccaggcagggcaaaagtactggtactgggacagaacgtcctccacctgcttcctttctcctacccttgtcaggctgggtgcttggatcagttacacc

SEQ ID NO: 408980 - DNA, 122 bp, Homo sapiens
tcttctaccttttcagaggtgagctgttgagtagtaatgtccgctacaacaccacgctcccggaatggtggttcctaagagcaaagtcagttaatacaatttctccaggtatccagctatct

SEQ ID NO: 408981 - DNA, 122 bp, Homo sapiens
catcaggaggggctgccaggggtccccagggagtcctagcctcactggctgggtccatgacgcaaccttcccactgacacccagtgtagcggacccggtggggaggggcctgaagcagctac

SEQ ID NO: 408982 - DNA, 122 bp, Homo sapiens
agccattacctgcagcgctcgcatccttcccccgtcccagcgccgcccccaccccctccccgcctcccaaggagacttctaatccggagcatgtgctgtgccctttatccggggaggaggtg

SEQ ID NO: 408983 - DNA, 122 bp, Homo sapiens
ctgtggcgcctcgtcctccgagcgctcgctcgcagcgccccctgccgggaatcccgaggacgccgcaggcgcaggaaagttaaatcccaactccggccgcggcatcctggtacaaagcaagc

SEQ ID NO: 408984 - DNA, 122 bp, Homo sapiens
tctgctgcgccaggttcgctggccgcacgtcttcaggtcctcctgttcctgggaggcgggcgcggcaggactgggaggtggcggcagcgggcgaggactcgccgaggacggggctccggccc

SEQ ID NO: 408985 - DNA, 122 bp, Homo sapiens
gtccagactggtatttattgccttgaggagcatggcagagccaagatcagtgaaccagaacgggaacagtcatttgagatcagacaggcaggcaaggaaggtatcaaccacactgcctgagg

SEQ ID NO: 408986 - DNA, 122 bp, Homo sapiens
atggtgcagagtctggttgggaccatgtggccctgaaaatcaggatgcctagagaagcttcggagtttgagaagtcccccttcctcccaccctccaactgggctaatggtggggcctggcca

SEQ ID NO: 408987 - DNA, 122 bp, Homo sapiens
tacgagctgcaatcggccacctgcggcccggacgccgtgtccatccccgcgcacttccggcgcccagtgggcatcggcgtctatggacacccctcccacctggagagcgagttcgagatgaa

SEQ ID NO: 408988 - DNA, 122 bp, Homo sapiens
gatttccagcacaagtgtgcctagcaccagctcccctgttagctcagagtctgaggtgatcgttctgatagtaatttactgaacatcttctgtgggtcaggcactgtgctggttgtcttgta

SEQ ID NO: 408989 - DNA, 122 bp, Homo sapiens
ccaaccccctaacttctagacgtctggcccctgtagtctcccgcccctggcctcgcccctcgttcctagcttgtttgccacctagtgtctctcccgggagcaagagtcctcaaagttacatc

SEQ ID NO: 408990 - DNA, 122 bp, Homo sapiens
ccataaaaggcttggttctctcaattctgaagccatgttctgttgaccttcctctaaaagcggtacccgcaattgtgcggattccgtggttccctagtcccaagccgtctgcttcctgggcc

SEQ ID NO: 408991 - DNA, 122 bp, Homo sapiens
tagagatggtgaacggatgcccgccatagtgacagttgtcgataaccggtgttatccctccggtcccctagtaacccccagtaagcggagatttcattcctggacctagctgccacgtccct

SEQ ID NO: 408992 - DNA, 122 bp, Homo sapiens
gttttaacaaaacgcatggatttacaagcttcctcacactcaagccgacagagcatcacacgaggctctgtctggtagtctccacatctcaggctgggctggatggaaggaaatgatcacag

SEQ ID NO: 408993 - DNA, 122 bp, Homo sapiens
agccccacggtctcctgtccctcagatccacctaaagctggggcagtttggcacaatggtcggactcattgccccgtgcacctgtgatgcccatcaaagaacccgcatggcctcaatgaatg

SEQ ID NO: 408994 - DNA, 122 bp, Homo sapiens
tgcagtcacggcggccatccaggcagcggcagctgttgcagtcttccacccaggagcttccgtgtgggaacggagtgccccgggaccagcaggatctcccgaacccgatcactgtggggaga

SEQ ID NO: 408995 - DNA, 122 bp, Homo sapiens
ctgcttagaactttacaacagaggccaaattagcctcattttctttatacaaagggatttcgctctgtttcagttatccattgctacataacaaacaaccccaaagtaatcacttctcagga

SEQ ID NO: 408996 - DNA, 122 bp, Homo sapiens
cagtcgccgtctcaggggtgcgtgggggaaccggaggggtgagcgcagctcctggcaccccgagcctcccgcagggcgctggggcgttgaggatgataaacccggaccacgctgcccgcctg

SEQ ID NO: 408997 - DNA, 122 bp, Homo sapiens
ttgatgtttctgggcctagttctgttgtgtgtccctgagagactgagggcagcactaattcgaattatctggtaaaagccagagtcatgtaaagcactagtgttcacttgaaaggcattcaa

SEQ ID NO: 408998 - DNA, 122 bp, Homo sapiens
ttatttcccccgttttgcagcccctcttatttttgtgtcgaggttggggtcggtactgaccgtcctgccagcagctctgaattttgaaaatacagatatcaccttcggggaagggggaaagc

SEQ ID NO: 408999 - DNA, 122 bp, Homo sapiens
ggggcctctgcgggggcagccggggacagcgaggccgggcggcgggagggtcccagctggcgcaggcaggctgccaggtggcccagcaggcgggagcgcacgtcggccgggacgccctcgca

SEQ ID NO: 409000 - DNA, 122 bp, Homo sapiens
tatcaaaggtttgcctttggtttctgcttatgaaattagtttgcacatgagaagatcactcgacatttttgtgcccagtcgttttttaatctctaaaatcagggaggagagtaaactaaacc

SEQ ID NO: 409001 - DNA, 122 bp, Homo sapiens
ataaaacaaataactaaggagaaaccataaaaatcaagtcctgcatgtaaaataatctctcgtctgttagtaggcagcactccactttttgatttttttaatgacgtttatccattacagtc

SEQ ID NO: 409002 - DNA, 122 bp, Homo sapiens
aatgtaccctgctttatagctttcctgaacaattcactattccaacttaatgccattttccgttccatggctaatgctgtttacttctatctggaattatgcccttcaccaagtcttcagct

SEQ ID NO: 409003 - DNA, 122 bp, Homo sapiens
acttgtcaattctcaaaataattagacaacagtcaacacataggccctgtattagcagaacgaaacatcactgaattatctgaacacttaagactaacattttgcagcatcacagaactgat

SEQ ID NO: 409004 - DNA, 122 bp, Homo sapiens
tcacttggttagtaagtggctgggatgccttgcttggagatgtgtttctagctgcttagacggcatcgcctctcaggcgaggtgctcagtgagtgtcaaaaccaaaagttgagccgggcaca

SEQ ID NO: 409005 - DNA, 122 bp, Homo sapiens
tgtttactgaccactgagctctgagggcctgtagctggaatacgcatctctccagcattccgtcctgggatccgtttcagctagaatatgttggattcaggagcttgtccattatttgtagg

SEQ ID NO: 409006 - DNA, 122 bp, Homo sapiens
gaccgggctccgcattcttcagacgttcctgagccccctcttgccccaacgtccccctcccgggcagccccacagtgggcgattttcccgcactccgcacgagtccatccccatggtggact

SEQ ID NO: 409007 - DNA, 122 bp, Homo sapiens
tgtctgggatctccatctgtaaaatggatctaggaacggtagttctcgactgaattaacccgacagcatctgtggaagtcgttggccctgtgccggggccagatcgcgcaactaggagcggg

SEQ ID NO: 409008 - DNA, 122 bp, Homo sapiens
aactttcaactcccaagcaaagaggagcctgccctcccaggctcatgttgctactgttcccgagactgtgtgttgctggggtcaactgctggtacctgtcagcttggtccccctgctctggg

SEQ ID NO: 409009 - DNA, 122 bp, Homo sapiens
ggacagagagccggtcggcccgccgaccccctccccggccgacctggggccccgctggtccggctacaggggctccgaccctcacccgggggccagaacaagtgccctttgggggctgaatg

SEQ ID NO: 409010 - DNA, 122 bp, Homo sapiens
gttcacctacgttgattatttttcccagatacgtacacaagtttgttttctccctggtagcgaagaaaggggaaacgggggaggggacgccccaccaaagcccaggttttctcgggtggggg

SEQ ID NO: 409011 - DNA, 122 bp, Homo sapiens
atctctcagctgatggggcagcaagaaggaagacggtttttccctggagtcgggctgcttcggggccagggctctcctccgaccgccccagccaaactccacgtggttctgctggtcgcctg

SEQ ID NO: 409012 - DNA, 122 bp, Homo sapiens
tgggaacttgcagaacctggtcagagctattacagaggatatctgtgcactccacaagcacgatggtccccgcaagtcctctgatcagtttatccccaccaacttatcctgcctgataaagg

SEQ ID NO: 409013 - DNA, 122 bp, Homo sapiens
tctcctcactggccccaggcagatgcgctctgctcagctgcctagctgctggactgcccccgcacagatcagggaagttcccagagcagcacgtgagacctgttttatgggatgttaccaca

SEQ ID NO: 409014 - DNA, 122 bp, Homo sapiens
aggaaggggtgatgggtgggggatgggagggactaggaggcccacagggctcccaggcaccgggtcagtcagagctcacggcagatacttaccaggggcaccacgcctgggatccacatggc

SEQ ID NO: 409015 - DNA, 122 bp, Homo sapiens
cttctgtccttgggcaactaattggccctctctgaaccgtacgtagccaataggcagcaccgtgcagggttttcagaggctgcaggtcctgactgcgagctgcctacacgacaggcacctgg

SEQ ID NO: 409016 - DNA, 122 bp, Homo sapiens
gcgggaacaggcacggagaaaataaacaagactaaaaagtcctgagtagcgctgtgtggccgcaaacctgaacccaccttttgcaccacgcgggacccggcactcttcctgccacccacccc

SEQ ID NO: 409017 - DNA, 122 bp, Homo sapiens
aaaagtgaattttgttagcaagtgagaaactattatacttggaggtcgaattgtaaataacgctatttgattggctagaacaaccaaccaattgcaaagaaacgctagaatcacctaatttg

SEQ ID NO: 409018 - DNA, 122 bp, Homo sapiens
cggctcttcgcggcgtggccgcctcccgtcacgcggcgtcagaaactcgcatcttcccggcgtggccgcctcccctcacgcggcgtcagaaactcgcatcttcctggtgtggccgcctcccg

SEQ ID NO: 409019 - DNA, 122 bp, Homo sapiens
tgtccctctgtgtgtgcgcctgtgcgtgcctctctgtcgctgtctctctgcagggaaagtcgctggcgggcaagcgcctcacgggcctgatgcagtcctcctgaccgttcctaccgcaggtc

SEQ ID NO: 409020 - DNA, 122 bp, Homo sapiens
ggcagccagggggtctgcttcctttatctcagcagaaaacaggccaaatttctgctccaccgtcatgtgccaggcccctgccatctcccgcatgaactacaggtacagaaggaatgttagct

SEQ ID NO: 409021 - DNA, 122 bp, Homo sapiens
cagtcgcctgggggtggcccggagagtcgaggtgctcatagtggagccctggctcccgggcggacggagccgcacggtagtagatgggggtgtggccgtggcccccgactctgctcggcggg

SEQ ID NO: 409022 - DNA, 122 bp, Homo sapiens
gctcggtcggacgcacggaaagggctgggccacgtgggcggctgctgagtggttcgccttcgcctctcagcgcgcagtcaggcggaggcaagctcagagcgcacggacagagcggtagcgcg

SEQ ID NO: 409023 - DNA, 122 bp, Homo sapiens
tgtttctgtggcttaggcctaagttaccgtgttttgaggggagggactctgagctgcacacgtgttcactgttggctgactaacctggagttgtttcattgcagagaggctggctgtggcag

SEQ ID NO: 409024 - DNA, 122 bp, Homo sapiens
catgctgtttttaaattagaaaaactcaaagcttctccctgtgacaacagccattcaggacgaagcaaggagccatcctgacacttcatcagctgattgattgataggctggaaagtctacg

SEQ ID NO: 409025 - DNA, 122 bp, Homo sapiens
cagtggcatgatcacagctcactgcagcctccacctgcccgggctcaggtgatcctcccacgtcagcccaagtcgctgggactactggtgtgcatcgccaggcccggctaatttttgtattt

SEQ ID NO: 409026 - DNA, 122 bp, Homo sapiens
atttctaaccacataatgagaagcacatgtctccaagtcttgactctcttcccagggagacgctgattgccaaagcataacctcccattaaaaagagtgttcctgaaggtggaatgtgtatc

SEQ ID NO: 409027 - DNA, 122 bp, Homo sapiens
ggaccgcagcgcggcccagccccgggcacccgcctcggacgctcgggcgccaggaggcttcgctggaggggctgggccaaggagattaagaagaaaacgactttctgcaggaggaagagccc

SEQ ID NO: 409028 - DNA, 122 bp, Homo sapiens
agccggcccggttacagctgagggggcgggggctccctggaggaaccaatcagcgcagcgcgggcggggtgacgcagcacaccttgaggtcctgggtaacctgtctgcagtgggctgggctg

SEQ ID NO: 409029 - DNA, 122 bp, Homo sapiens
tgatcagctccaaccagacaacaaatgaggacgtaagttcctgaccacacgggacacgggcgtgttcttgggttttgggcaatggaggagaaaaaggaaagaaaaggttgagcccagctttt

SEQ ID NO: 409030 - DNA, 122 bp, Homo sapiens
tatcttgtgttatactgggagacaggccaatgtttccattaatagacaagagcaccaccacgctgccaaatggagctctctgctgcaaccactacaagacaggaagaagggaagggaaggga

SEQ ID NO: 409031 - DNA, 122 bp, Homo sapiens
cctggggcgaacgaaggcagagctgggctggaaaacctggcagggcagagtctcagccagcgcggtgctttgggaccggtggcctgcagcgcccaaacccaaagaacgctttgggtcgcttc

SEQ ID NO: 409032 - DNA, 122 bp, Homo sapiens
cacgtgctctgaggcctcttattgcaacaaatgacttcctccggattccattccctccaccgcctctttcttctcgctcaagcatcttcaatggtctggatacgtttctttgcttccatttg

SEQ ID NO: 409033 - DNA, 122 bp, Homo sapiens
gcgtccctacctggaaagctggggacgctgggagactcacagcccggaaaacaagggtgacgcacccactcccacctcgacccccgctccgcctcctggtgccctttgccctgagcagtgga

SEQ ID NO: 409034 - DNA, 122 bp, Homo sapiens
tactccgagtgtgcatttcgggttttaatatggtattgtctgatgggtttgacaggctggcggtccaagttgaaaaaggtctgtgggtgtctaatagtcaaagatgcctttatgaagcttta

SEQ ID NO: 409035 - DNA, 122 bp, Homo sapiens
ctgccgtcctcctagtccgcccccccgggcagggtgcgctgccgtcctcccagtcccccccgggcagggtccgctgtggggcgcttcacgtccacatgcttctaatactcggtcccagtgca

SEQ ID NO: 409036 - DNA, 122 bp, Homo sapiens
ctctagctaaacgacccgagcaccgccccttgaggacaaacccacgaaaatgttaggcgccgccttgggcaactgcgtattgctgcctgtgacagatgaaattcgactgcatctggacattc

SEQ ID NO: 409037 - DNA, 122 bp, Homo sapiens
gggtgtgcgggatcctgagaggccagaacaccaggcaggcggggcagggtggagatgccccggccgctggtgccaggctgcatatgcaccgctggtgggcaccagatccctcccaacacgga

SEQ ID NO: 409038 - DNA, 122 bp, Homo sapiens
gtgtaatgcagtcaattaggaaggatttaataaatttattttgtgcctgcttttaaaatacgttacaccaacatttgagaataaaaagttacggagaatgttcaagtcatgactgatttcta

SEQ ID NO: 409039 - DNA, 122 bp, Homo sapiens
gggggcggtgcgttcgctggatccatgggagcggagtgcgcgcgcattatttttgctcgtcggctgggagccgggcgtcgggtcgctgggagtttgcctcttgtggcagcatcctgcttagt

SEQ ID NO: 409040 - DNA, 122 bp, Homo sapiens
tttttcttcccatttatatttcagcttctgactatggactctttctttcggatgaagacccgaggaaagggatttggctggaagcgggcagaacactggattactacatgttgcggaatggg

SEQ ID NO: 409041 - DNA, 122 bp, Homo sapiens
cagtgtcctcatgggctgtcccctgcattggagctgcacacagtgtatcatggcactcagcgtctcaccatggtcacggtgaccatagaaaccaggatgagtctcaggattaaatattgaaa

SEQ ID NO: 409042 - DNA, 122 bp, Homo sapiens
caagtggcagggccagagcttgcaattgggtctgaccacacagcctgagcttctaactaccgtggtctgctgagaacgggaggggatgagacagatcaaaagtcctttactatccccagctc

SEQ ID NO: 409043 - DNA, 122 bp, Homo sapiens
taaaataatgacttagagaatcattttgtggtatttgtttaaggctgtcgcccaggaaaacgcccaaggaccatgcacgcttcaaccctatggaaacacgaacggcccagggaaccgcccct

SEQ ID NO: 409044 - DNA, 122 bp, Homo sapiens
tgctcacacacatgtcaggtcactttactcctcttctcagaactcctcaacagctcctaacgtcacccaggaaaagccagtccttgaatggcccctaagggctccgtcatttatctgcacaa

SEQ ID NO: 409045 - DNA, 122 bp, Homo sapiens
tcccttttcctccttcacttttcctaaaagcagttcctggatctcaaaactgatctctctcggtctgttttccttcctgtctgtccctttccctctttttcctcttctccccctttctccct

SEQ ID NO: 409046 - DNA, 122 bp, Homo sapiens
gcaaggcaagagctggaatagtgcatggcaacactcacccggctgagtcacagcctacctcgcaaatggggctgtacgtgctttcctgtttccgcaagtacccatcagcccttcactgattt

SEQ ID NO: 409047 - DNA, 122 bp, Homo sapiens
cgacaggcccgggggggacctttcccggacacccagcctcctcggtggcgaggcaggtggcggcaccgacaggcccggcggggacctttcccggacacctggcctccttggcaaggcaggtg

SEQ ID NO: 409048 - DNA, 122 bp, Homo sapiens
ttgaggggggcaaggcgacgtcaaaggaggatcagagattccacaatttcacaaaactttcgcaaacagctttttgttccaacccccctgcattgtcttggacaccaaatttgcataaatcc

SEQ ID NO: 409049 - DNA, 122 bp, Homo sapiens
ttccccgcccacctgtacttccaggcccacggctcggaaggactcacatttcaggtgaggcggtgggcaatggggtggggccatggccgcccttccctccatggatccctgaagctcctcct

SEQ ID NO: 409050 - DNA, 122 bp, Homo sapiens
acctcatgatccacccacctcagcctcccaaagtgctgggattacaggtgtgagccaccacgcccagccatctcctggggtgttatgaaggtccactgagctgagtgattgtgcaggtgccc

SEQ ID NO: 409051 - DNA, 122 bp, Homo sapiens
gcacgttagctagcatcaggctctgagcgcccgtatcgcacgttagctagcatcaggctccgagcgcccgtatcacacgttagctagcatcaggttccgagcgcctgtattgcacgttagct

SEQ ID NO: 409052 - DNA, 122 bp, Homo sapiens
tctgtcttttggaatcaagtttcaaagtataaagctattgttactgattgtctgcctgttcggcaaatagctctacttatcgaaagagggaacaatttgagatagtgcttgctgaatagttg

SEQ ID NO: 409053 - DNA, 122 bp, Homo sapiens
gaacttgttttctcttaagtgggaattgggaatgggtacatgggaggcagtcatactaaacgacatgtctaaggccattttcagttctaaaggtctatgcctttattttgcctgtatttata

SEQ ID NO: 409054 - DNA, 122 bp, Homo sapiens
agaggggggtgatattactccccatatcgtggggggggtccactcccttgtgatatggttcgtaatatcgggggggagaggggcgtgatattactccccatatcgcaaagtgtgtccacctc

SEQ ID NO: 409055 - DNA, 122 bp, Homo sapiens
tcaccttccaatgacgttaccatcaaggaccttgggaaccagcttttctctctgcggatgcgccgcccggcccactccgccattttcctccggaagtgtggcacccagaggcggtcctgtag

SEQ ID NO: 409056 - DNA, 122 bp, Homo sapiens
tagagggttagggtagaaagtgccccgccctttatgcaaattaaggggcgtgtctaggcgcggagggaggtgggaggtgggagggggtgctcccgggggcggcggttgcccggatgggccgt

SEQ ID NO: 409057 - DNA, 122 bp, Homo sapiens
agctgtgctgtgcttggtacacaggaaatattcagtaaaaattcaccattttcagggattcgttattttagaagtttaccaaaatgctccctctcctctccccctgcttcctctcccctccc

SEQ ID NO: 409058 - DNA, 122 bp, Homo sapiens
ggctgctgccgaaagggcctgcaaggatcccaatcccatcattgatggcagaaaggccaacgtgaacctggcatacttaggagcaaaaccaaggatcatgcaaccaggtgagaaatgtctgt

SEQ ID NO: 409059 - DNA, 122 bp, Homo sapiens
ttttaactttacccgcttttccctatacctcccttttgggacatgaatacacaacacccacgttcatggaatcagagtcttctgggaacagttgtacaaacttgaagatgaatcatgacttg

SEQ ID NO: 409060 - DNA, 122 bp, Homo sapiens
ctggctccgccgcggcacctggacctctactttccgaggtgagcatttgggggtcgagggcgtagagcgatcgcaccctgaatggagcccagggcagccagcgacctgtcccgtggcccgca

SEQ ID NO: 409061 - DNA, 122 bp, Homo sapiens
tcctgaagatttacagttcagctttgcttacataaccatttaaaaaatacttagcaccagcgtgcttcctatatgccaaacaaatcatcaaactacttcaatatgcatttcttctttttaaa

SEQ ID NO: 409062 - DNA, 122 bp, Homo sapiens
cctaaccctggtccctccatcctcagatcgagaaaatcaaagcggaacagagcaagcagccgcctaccccactgctggggcgcaagttctttggggaccccacggaactggcggccaaggcg

SEQ ID NO: 409063 - DNA, 122 bp, Homo sapiens
ggccaagcacccctcggggagaaaccagcgagaggcgatctgcggggtcccaagagtgggcgctctttctctttccgcttgctttccggcacgagacgggcacagttggtgattatttaggg

SEQ ID NO: 409064 - DNA, 122 bp, Homo sapiens
tcgaccctttgtgtggggcgctagttgccgcgggctcgaaggcctccgaaggccccgccccgggccaccaaggggcaccacgagccccgcacagccccacccgttcaggggctgcgggagtc

SEQ ID NO: 409065 - DNA, 122 bp, Homo sapiens
agatttcttttaaacagtttgaatgaggaccaaggagtttaatgtcatggaatttctttgcgattacacttgttataagatagttttagtacttcaaaaagaatgtagtaaactggtatgta

SEQ ID NO: 409066 - DNA, 122 bp, Homo sapiens
gggggacattgtggggtaggctcagcagttctgaagaagacatccagaaatggaagacatcgtgaaattgtcattctaggggtgatatattactacttcatggattatcatctattgcccag

SEQ ID NO: 409067 - DNA, 122 bp, Homo sapiens
cgccactcgggctgggtcaggagcggctgcccgaggtccagaggaagtgtgtggacagcgcggccttcctggccggtgagtcggccccgggtcgtggccggtgaggggaccctgagcttcac

SEQ ID NO: 409068 - DNA, 122 bp, Homo sapiens
gctggccgacgtgagctacctgatggccatggagaagagcaaggccacgccggccgcgcgcgccagcaagaagatcctgctgcccgagcccaggtgaggagaagctgcccgcggccccggcc

SEQ ID NO: 409069 - DNA, 122 bp, Homo sapiens
cgcccccacagtgagcgagcagggcgcgggctgcgggagtggggggcacgcagggcaccccgcgagcggcctcgcgaccaggtactggcgggaacgcgcctagccccgcgtgccgccggggc

SEQ ID NO: 409070 - DNA, 122 bp, Homo sapiens
gacgacggaccccgacggtgccaaagtctgggacaggacagttgcgggacggttggggagcgtcagttctcgcagccatggaaacgggttagccgcgcctgcgcagtgcggcctgggccccg

SEQ ID NO: 409071 - DNA, 122 bp, Homo sapiens
agaaatccccaatctctaacctcacaatgaaatcgccacggacaaaagatcacgggataccgggagcactaaactggaagtgacacaaaaccacagcagaatccgctcacacctgccgaggt

SEQ ID NO: 409072 - DNA, 122 bp, Homo sapiens
atttttgcccttttatctattacaactaattcgagttcttttgcccttttcagtctaagacgtgggctttctgcaaagcctccccctgccagcgagctctcggagcgcggagcctttagaaa

SEQ ID NO: 409073 - DNA, 122 bp, Homo sapiens
aaactcacttggagactctctgcattgaagcatgtgcctggtgtgcccccagggacaatgcggccacgtggatgaaaacactcagaagcaaatctccctgggccaaagcccacacttcaaag

SEQ ID NO: 409074 - DNA, 122 bp, Homo sapiens
agaccactaaacagaattttatgctaaaatacataaatattgggaatgtttttttcagatcggctatgttctactatgactgtggctagattaatctgtcttaaaagaaattgaaaatactg

SEQ ID NO: 409075 - DNA, 122 bp, Homo sapiens
taattctcaattgctgaaaatgtctgatcctagaaaatgtaacattcctatgcatattaacgtggttcttgaacagttgttggccaaagattttgtaggaatccgatttttccaaaatagac

SEQ ID NO: 409076 - DNA, 122 bp, Homo sapiens
ttgaagtaaatcgtccttgcagaaatctttgtttcattagtaaagaaaactggatgaccccgttaaaagtaggtaacattgatgggaatgatttatccacataaataaacaaaatggctgtg

SEQ ID NO: 409077 - DNA, 122 bp, Homo sapiens
ggggcaggtgtcaagcctgtcactcgcactcttggccttaccctccagctctggaggctgcgcctcctcgcgactgtgtgtccgtacacaattatgccacctctgtggtgtcatcggctgcc

SEQ ID NO: 409078 - DNA, 122 bp, Homo sapiens
cagtgttccacgggcgctgcttcctgcctgggtttggagttgtcaccactttcccctctccgtctcctgcgggcgcaatggaggaggaggatgaggaagcgcgggcgctcctggcaggcggc

SEQ ID NO: 409079 - DNA, 122 bp, Homo sapiens
ggcacatgcatcagcacatatgtgggcatccagcctctggggccttggcacacacacattcgtgtgctctgctgcatgtgagcttgtgggttagaggaacaaatatctagacattcaatctt

SEQ ID NO: 409080 - DNA, 122 bp, Homo sapiens
cacaaaaatcaaacactcggataatccctgggagagagaggtctgactcaggtcacgctacgatgacacagagcgactctccctagacatactccttgtcatcgtcacctcctgtccttagc

SEQ ID NO: 409081 - DNA, 122 bp, Homo sapiens
tacggccgcccagggaggccgaggccggccactcaggtgcctttcggggttcccaagctgcgacgggaacacccccgccgccccctaccctcccttcctcctcctctgggcagggaccagcg

SEQ ID NO: 409082 - DNA, 122 bp, Homo sapiens
agacgagccttagggccaatcagaagcgacagcggtggagtcatgcccgcctgcttgaggcgccctggcgtctcattggctatgcttgagaacgaatcccaggctaagccacttagaaagga

SEQ ID NO: 409083 - DNA, 122 bp, Homo sapiens
ctccccacgcccacagcgcgcccgcccgtgcggggctagccgctcacgcccggcgcagcccgcgggcactcaagctgggcttgcccttctcgggtccccacatgcactgcgggcgcgggagc

SEQ ID NO: 409084 - DNA, 122 bp, Homo sapiens
gtcaaaatctagagacatgattcatgcagtatttgccaaagtagaacagaaacaaatcctcgtaaaaatcatgtctatcttctcaagtcaaatatatatgcatgcaagtgtgtgtcctgaaa

SEQ ID NO: 409085 - DNA, 122 bp, Homo sapiens
gctctgagcctgcaatccctgagtaactgcaaagacggaagctctcagcctgcatgtagccggcaggtgcagcccgttacagacatgttctcaggataaacagcaaccagccctccagcaag

SEQ ID NO: 409086 - DNA, 122 bp, Homo sapiens
aacagttaactaaggggtaaaaactccaaagttggtttacagatggatctttatcatttgcgggaatcagttagtagttattgcagtgcaaaagggcagtggacaagggaaatcctcctctt

SEQ ID NO: 409087 - DNA, 122 bp, Homo sapiens
tccccttatccccactgctgtggaggtttctgtacctcgcttggatgcctgtaaggatcccgggagccttgccgcactgccttgtgggtggcttggcgctcgtgattgcttcctgtgaacgc

SEQ ID NO: 409088 - DNA, 122 bp, Homo sapiens
acccagctatggggcaccagagcccagcgttcagcagctgctcaatgaatgtctgccaggcgagactgcacccaaagcatttattaggtacataattgtggcagcactggctggccatggaa

SEQ ID NO: 409089 - DNA, 122 bp, Homo sapiens
cataagcatgttgtagaggatgctgccctgccactggtggttctcgcccgccatggcccgcggcgcccgtagcccagttctgcccagtggctgcctcctgggacctatttatacctagcgcg

SEQ ID NO: 409090 - DNA, 122 bp, Homo sapiens
gcctggcatctcccacactgctgtccctggacacatacctttttgcccccagacattatccggcagccctctgaggaagagatcatcaaattggctcccccaccgaagaaggcctgagcaag

SEQ ID NO: 409091 - DNA, 122 bp, Homo sapiens
tgaccaaaagacttgtttgtgctctaggaagtccccaagagcacaggagcccagagacctcgcaggaggaagcagcagtatctgtgttccaaatcctgcccagcccccaggcagccatggta

SEQ ID NO: 409092 - DNA, 122 bp, Homo sapiens
acaagctaccattgacgcctctgctttgcccatgctgttccctccactccccaccttctccgctgggctaacttcccatctagcctgggtgtcctgcccacaataacaagagtggccagtac

SEQ ID NO: 409093 - DNA, 122 bp, Homo sapiens
ggggatggatgctctgctgcccacctgtccaggctgcggtggccccgagggcagaagtcccgcctcctccgtgctgggcacggctcttaagacttggccgtctccgtcgcccctcagcccac

SEQ ID NO: 409094 - DNA, 122 bp, Homo sapiens
gcccgtgggacgggcacggggagggcagagccagccgaggggagcggctgccgggaggtgcgctgagcagggtccgcagctaaggtccagcgcgatccgagcgcccaggaccctgcggccgt

SEQ ID NO: 409095 - DNA, 122 bp, Homo sapiens
tccttccctccctgtcgccggagatacacctcaggtcttcctggagatgatgctggctctcgcaccaaggtctgtctgatgtgctctgttgatgaatgtagaagtctctcacttgacatcaa

SEQ ID NO: 409096 - DNA, 122 bp, Homo sapiens
ggctggagaaaaaaaaatcagactagaatctctccatagtagcaacacactgacctccagcgtccgggcagcaagataaatgcaggcacaggcgatgctctctggctggaaccgcacgaaga

SEQ ID NO: 409097 - DNA, 122 bp, Homo sapiens
gagatgatgggaaggcagagctggctggcagcaatgtctctctggccagaaggtcaggggcggcctcatctgagtagcaaacacctttatatttttgaaattacttgtcctacttcctggta

SEQ ID NO: 409098 - DNA, 122 bp, Homo sapiens
ccccaggcgagggccaattggcagccgcctttgccgcgatgcttcctgggagttgtagttcggggtgaggccggggcttcatggggagttgttgggctgaacgagcggctcggagtatggga

SEQ ID NO: 409099 - DNA, 122 bp, Homo sapiens
cagtcccgtagcgcccagcgcaggcccgcagcccgcttcgcggcaggccacgcgcgcgtccgcaaagtcccagtcatcgtcgcacacggtgccccagcccccggcgtgcaacacctccacgc

SEQ ID NO: 409100 - DNA, 122 bp, Homo sapiens
gctttttaataaaatccaggtagcgccggtttaaagaatcccaaatctccatatacagcccgggattggaaaaggtacattacacaacccccctttcaagttcctctcgcaggatctaaaaa

SEQ ID NO: 409101 - DNA, 122 bp, Homo sapiens
tgtttacctgttatcagggttaatagcgtccgtctgagctgcagagacagcgctgtcctgcggacgggccgtgcttttccacggcatttcccatgtcccagggcatttttgaaaatggtggc

SEQ ID NO: 409102 - DNA, 122 bp, Homo sapiens
cctaaatgaacttgtcaaaccaacctggtgcagcagggcctgcaaaatgcagtgacgtcccggccttcatcagtcatgggccactcctcattctaaagtgcctcgtgagcaccctaacctct

SEQ ID NO: 409103 - DNA, 122 bp, Homo sapiens
tgaccttgtgatccacccacctcggcctcccaaagtgctgggattacaggcgtgaaccaccgcgcccagcttttgactattatttttgaaaggctgctgtgaatatttgaatacacgtcttt

SEQ ID NO: 409104 - DNA, 122 bp, Homo sapiens
tgcccgtttttccaggtttgtccccggaccttcctttagaacgttactccctttcctagccgactcctgaggaataatgaaaattgtgcaaaccaaaggctctgggttggttccaggaatgc

SEQ ID NO: 409105 - DNA, 122 bp, Homo sapiens
ttctgaatagggaatcgcatcctgcagccataaagtcttaagaaacaacgtctcctctctcgcagacggtggggcgtccagtattggagtctcttcagatctagccatcctctttgcaacca

SEQ ID NO: 409106 - DNA, 122 bp, Homo sapiens
ctaagcaatttaaaaaatactgtaaattaatctccaggtcacaactctttcagttatatgcgccagaaagcaagaaagcaaacccaaatatgcctgctgctgtcagcagggattgctgagaa

SEQ ID NO: 409107 - DNA, 122 bp, Homo sapiens
cattccattgtcttgtttgtttgtgcaatcccaaacacccacagtctccaagtggagatgcggaagcaggcctgcagcatgggtgtcaggagggtgtaaaatgaaagggacactaggagcaa

SEQ ID NO: 409108 - DNA, 122 bp, Homo sapiens
cttttctacccgtgaaggggtgcccagttcaagaggagcccgatggagccctgcctgccacggctgtatgcctttggggttatgatagcttgtgggcttttctagtgaaaatgtcaaatgtt

SEQ ID NO: 409109 - DNA, 122 bp, Homo sapiens
ccgcggtcgctcctgacaagaactagacagatttttggagcagggagcatccagggcaaacgcacgacagtcctccgcagtgcatctcaccggacaaacatccccggagccacaggagggga

SEQ ID NO: 409110 - DNA, 122 bp, Homo sapiens
agcgccctctgccggccgcgcgcgggactcggggtcctactgggtgcctcttcctagatccgaccccacccagttgaaagctgtccccactaacagccttcgttacctgttacctcaaacac

SEQ ID NO: 409111 - DNA, 122 bp, Homo sapiens
agctctgcgctgagtcctggccgccggctctttatgcagccagcgaggcccgtgggcggccggctcgccgagcccggtttctcattggcccagccgcaggctccccgccagcgccccgcccg

SEQ ID NO: 409112 - DNA, 122 bp, Homo sapiens
ctcgctcctgcggccaaaggccagctgtcaggtgctatgcggggtcaccagcagagtgcccgctggcaggtgggggcttccccgcttccggggtctgccccaggactcctgggtggacctcc

SEQ ID NO: 409113 - DNA, 122 bp, Homo sapiens
tgagccggggcggcactgaactgggggccgatccgcctgggcggcggtgagaggcagggccgggagccgggccgctgggtttgggcctggcccgctcgccgcaatattgatggcccgtcagt

SEQ ID NO: 409114 - DNA, 122 bp, Homo sapiens
catttaaagacaagcatggtgctttgtaaaatcttcggggtatcacagaggtgctgaatgcgtggttacatcaatgaaaaaacgcccactctttgagcctcctgaaaaggaggccacaggac

SEQ ID NO: 409115 - DNA, 122 bp, Homo sapiens
tatttttagtagagacggggtttcgccatgttagccaggatggtctcgatctcctgacctcgtgatccacctgcctcggcctcccgaagttttatttgggttttaaaaaaccaacaaatgaa

SEQ ID NO: 409116 - DNA, 122 bp, Homo sapiens
agagcatagagcagggcgatctctgtacaactctctatggttctggaggaccgcggaggtcgtgggaggagagagatgtggcctgaggatctggctcccaaactgttaagtttcaaagccct

SEQ ID NO: 409117 - DNA, 122 bp, Homo sapiens
agactcttcaacatccagagaacataaaacaatgacgccagaccaattcttgtgctccatcggcttggtgcgttataccagaagcgtattgtgacgcctaagtgcttgctcttttcattatt

SEQ ID NO: 409118 - DNA, 122 bp, Homo sapiens
ggcagggcacagcagcctccaatagctctgagcccctgctaggcctgctggcactgtcaccgggaggacccgtggctgtgcccatgtctttgggccatgctccccctcactgggccgtgctg

SEQ ID NO: 409119 - DNA, 122 bp, Homo sapiens
attatatgcccacaatactttcaagcagaattaaacacaatcttaagacccacttattgccggaagtgaacattctttgcacatgctccagctcccttgtttccttacaatacagattcttt

SEQ ID NO: 409120 - DNA, 122 bp, Homo sapiens
gagttttattccgtaccagagggtgagggctctgaagatagcgccaggtcttatttacctcgataccccacaacactcattacatgtctgatgaatgaatgcatagggggatggctgggtgc

SEQ ID NO: 409121 - DNA, 122 bp, Homo sapiens
ataacctctttccaccttttttcaatagcagacaaagtgttcttctggttaaagggcaatcgctccacttgcacttggcatcccagggcttcaagcattctcaagggcatcgcttcttcaat

SEQ ID NO: 409122 - DNA, 122 bp, Homo sapiens
tccaccgccgcagctaccacgccttttgctgcttgctacttgccgtgggagtctgcgagccgggagccccacgcactccgcgagggggcagtaggtggcttggaagtaactgacacagatgc

SEQ ID NO: 409123 - DNA, 122 bp, Homo sapiens
gcgcagccccaggttcagcaatttgctctaaatgagactgtagaggctaattccagcccccggcagctctcaccttaagctgcctggctgaggtcagcagtaagttacctggcagcgtccgg

SEQ ID NO: 409124 - DNA, 122 bp, Homo sapiens
gaaaagggataccctgtggcctagcgcctgacggacattggagaggatcacactgggggtcgtcacgccggccgtgggctccccatccgtcaggaagatgataagagggatcctccccacac

SEQ ID NO: 409125 - DNA, 122 bp, Homo sapiens
gagggcagggaaacgcataaggctggacctgtacagcaagagcctccatgagccccgtaacgagatgatgtacgccacagggctctttaattgaaaaaagctgcaaagaaacaataccaagg

SEQ ID NO: 409126 - DNA, 122 bp, Homo sapiens
ctttccagcaaggtgaggtcagtgactacgagcggccacaaaggtgccagtgaaagacaacggaggaagagagccgtttcactacctccaacagataaagaaaatgtgttaataccaaactt

SEQ ID NO: 409127 - DNA, 122 bp, Homo sapiens
ctcggctcccagcatggggggcggcccgtagacatggcagtgccgcgtgcatggagagggcggcgtccacggcgacttgtggccgagtctcaggatgcttcccccactcttcttcctcagcc

SEQ ID NO: 409128 - DNA, 122 bp, Homo sapiens
ggcaaacaaaagggtactctatcggtttccattttccatttactaatcatccaccaaaaacgcccagcgccactcctgcccagaaactgggtaaagctgctgccactgaggacagccctgaa

SEQ ID NO: 409129 - DNA, 122 bp, Homo sapiens
ggctcctcggcgacctccagcgggcgcccggggccgggatgcagggcgcgcggacagaaacgagacagacagctcaggcccagcagcacgcaagctcccgcgccttccgcgactgccacacg

SEQ ID NO: 409130 - DNA, 122 bp, Homo sapiens
aggacccccttggaaccaaacaggtactcaacacccctacgtctctcgtggggcaggcttcggctactcagctactcggcacagagcgaaaccaaggccttcctgccaacttcacactcccc

SEQ ID NO: 409131 - DNA, 122 bp, Homo sapiens
gcggagagcacgcaccaggtccctcctgcccggcaacaggcgcactccgagcgagcccagcgcctctgctcaccatgccaggtcccgctgccagaggcctagaggagaagcccagctagggg

SEQ ID NO: 409132 - DNA, 122 bp, Homo sapiens
tgatgagaagtcactgagttttaagcagcacagaactataatataatttatgttttaaagcgggggatcagggcaagagtgaagcaaggagaccatcacaagcctattgcagtggttgaggt

SEQ ID NO: 409133 - DNA, 122 bp, Homo sapiens
aagacatcccctactacttctaccgggacgacgggctcctggtgtgggaagccatcaggacgtgagcgcccgcggggcggtggtcctgggggaggagccgggacccctgcctgactacctgg

SEQ ID NO: 409134 - DNA, 122 bp, Homo sapiens
tcccctctgcctgaaggcctgagctcagccaccagccggggcgcccacaacggagcttcccgcgagactgaggaaacggaaacgttggagtagcctgcaccctctgatgtgcaccgttccct

SEQ ID NO: 409135 - DNA, 122 bp, Homo sapiens
attccactgcatcaattctttggatgtgaaaaatgagccctgctgttgaaactcagtcaacgtgtgttcactctaaaacatttcacaaggcaggaagcctgtttacattccaaaattatctt

SEQ ID NO: 409136 - DNA, 122 bp, Homo sapiens
agattgaacctctcggggttgtcaggcaggtcctgttggaggtaactgtaccgcacttgccgcagattatcagagaggatcaggctggggtaggccgtgtctgggtccagagtcacgtccac

SEQ ID NO: 409137 - DNA, 122 bp, Homo sapiens
gccatggtagggcgtcccccggtgaaatggggtccgaggcgggccccgaccccgcgtcggcgctgcggaccgtccgggagctgcagccgcgggtgcccggtgctcggtttgtaggcagtgtc

SEQ ID NO: 409138 - DNA, 122 bp, Homo sapiens
agacaccacacatccagctcacagcagggcctggtgacctcacaccggacctgcagcatccggacaccccacatccaactcacagcagggcctggcaacctcaccccagacctgcaccatcc

SEQ ID NO: 409139 - DNA, 122 bp, Homo sapiens
aggttctcagctattgtgaggattgacttggttgctgtcattttctaccaaaagatctagcgtaactggcaccactgttcaaagtagtatttcagctttgcaatgaactaagttatggttct

SEQ ID NO: 409140 - DNA, 122 bp, Homo sapiens
gaggcgtcggggctgcgccgtacaacttccggctgtaaagatggcggcttcctagtgagtcggcggctgatttagaaggaggttcaggctacggtgagccgaaggtgggtggtgaaagcgtg

SEQ ID NO: 409141 - DNA, 122 bp, Homo sapiens
actgacctgacttcaaggctgctgaaattctgcctccaccaagaagccttctgaatactccggcactcagagggctcccatttttaaatgtcctgcagctctctctgttctgctaacacttg

SEQ ID NO: 409142 - DNA, 122 bp, Homo sapiens
ggcggtggacaaagattcaggccagaacgcctggctgtcatacctcctgcttaaggccagcgagccaggactctttgcggttgggctgtacacgggcgaggtgcgcacggctcgggccctgc

SEQ ID NO: 409143 - DNA, 122 bp, Homo sapiens
gcccccaagacagtcctgaagaagcaccaccgggccctcttgtccctggctcctgccctgcgccagatggacccaggcccagcatcgatgaagtcacttgtctgtaggagggagactttgga

SEQ ID NO: 409144 - DNA, 122 bp, Homo sapiens
actcttaaaggtaggtcctgctattatccttatttttgtagataataatatagtctggggcgcagaggtctgctcaagatcatccaactggagtggcagcgctggaattagagtccaggcag

SEQ ID NO: 409145 - DNA, 122 bp, Homo sapiens
ccccgacctcctgcctcacaagccgctgcctgcctctgcctacatagaggacggccgcttcgatctctccatgccccatgtgcaagacccctcgcttgtcaggtgtgcacacgaggtatcgg

SEQ ID NO: 409146 - DNA, 122 bp, Homo sapiens
ctcctccgccacaaacttcccttcccggggcgcggccggctggtggtgaaggggctggctcggccctgactcatggagttgtgatcacagctctgtccccagattgcctgggtgcaaatccc

SEQ ID NO: 409147 - DNA, 122 bp, Homo sapiens
cattcatagaaatagtctttggagtatgggaacagtgctttcatatgatttttggagggacgcattttaagaaagatgaagtataatcttaagtgtctggaggttaaagtagctggctccaa

SEQ ID NO: 409148 - DNA, 122 bp, Homo sapiens
tggatggcgagctggcctgcggctcctttagccagaagctgggatcttcccgcagcagttcgtgttccctggtggaaaatgcagcctcatctactgactctcccttccaaaaaaaagttatt

SEQ ID NO: 409149 - DNA, 122 bp, Homo sapiens
agtgtgtctggagtacgaaagagaccacagaagtaacagagggcgggtgattccagaactcgaagaccatggtaaggcctgggcttttatactgaaataagtggagagccatggcagggctc

SEQ ID NO: 409150 - DNA, 122 bp, Homo sapiens
gtgtcgtatttatgtgtgtgtctgcctcccggttccagcggagggcgaggcgggggtcatcgttctgaagggcatctttgtgtcttcccagcactcaggacagtgcctggcacacagatgct

SEQ ID NO: 409151 - DNA, 122 bp, Homo sapiens
atatttgagccaaaatctgaggaacaggagttaactaaaggaaggaggaacgtgagtttccggagagatgaaacaaacatatgcaggggaagaacgtgacatcataaaatctaaaggaaggc

SEQ ID NO: 409152 - DNA, 122 bp, Homo sapiens
tgcatcacataaagatgaatttaaacggttttctgtggcaccaagagctaggacttgagccgaagggtgtaagctatgtgaaacagtgcttggcacacagtaggaaaccaataataacatta

SEQ ID NO: 409153 - DNA, 122 bp, Homo sapiens
agcttccagggtcttagactatcacatcctgcctcctgctagcggtctgctctgagcgtgcgctcaactgcactcaccctccggttccaaggccctcacggcccgggcgcccccgcccacag

SEQ ID NO: 409154 - DNA, 122 bp, Homo sapiens
aacctgcgggggcctgagcccgcgggaatcaggatccgcccttcggatgggggctgcgttcggaaaagggagggcacacccagttttgaactctggaaggggtggagaaaagagggaaaaag

SEQ ID NO: 409155 - DNA, 122 bp, Homo sapiens
attgacgcgccaggttactggccactgctcacctaggcgctagcaaacttctgccaagatcggaactgagtactaaacagcctccacagttctccctggtgccgtctccggcttggcgccgc

SEQ ID NO: 409156 - DNA, 122 bp, Homo sapiens
atgacagagacttaatgctaagccagtcctcccatctgtggtttaataaacaaggaataacgatggaggctcttaaagataaacaccccttcttaggtgctagaattttgcaaaacctactc

SEQ ID NO: 409157 - DNA, 122 bp, Homo sapiens
ccaagatcttccccatgaacaacgccaccgtggccgtggacatttaccagggggtgagcgcgggtgggtggggagggcgtgacccagagaggctccccgcctcgggcagggccaccggtcct

SEQ ID NO: 409158 - DNA, 122 bp, Homo sapiens
caagtttgttttctcaactggattctcttaaacctttcccttcactgcacagaaaggtaacgttagggtctggtgtcttgcagaaacaagccctacacaattgaatcccaatcaaagtcatc

SEQ ID NO: 409159 - DNA, 122 bp, Homo sapiens
gattaaatttgcttctcagaaaagttagtctgatgcttgtctgaggaataaattggaaggcgcagaaacagttagaggtcctaacaggcaggagatgatgagggcctgactgagggcagtaa

SEQ ID NO: 409160 - DNA, 122 bp, Homo sapiens
ctggcctaggcagcaggtgagtggttctcccagtgactcctacctggtactgaggaaaggcggcttgactggtgagggagagcagggcttggcttgggcagcggttaggtgtgggagggaaa

SEQ ID NO: 409161 - DNA, 122 bp, Homo sapiens
gcaacttccgccttctgagttcaagcaattctcctgcctcagtgtccggagtagctgagacgacaggtgtgcaccaccaccccctgctaatgttttgtatttttagtagagatggggtttca

SEQ ID NO: 409162 - DNA, 122 bp, Homo sapiens
agaagcacgctgtcacgatgccagatcttagctcgtggagctagtgcttggagccaacaccgcctggtatttgaggggtccagtgcatgcacagtgaagggttaaggagaggcaccccgctc

SEQ ID NO: 409163 - DNA, 122 bp, Homo sapiens
cggccctgggacatatgtggctactagggatttggcaagaaacttgtttggccgcttctccgactttgagttgcaaggaaatccgtggcctcagatgtgcgcgagttgtttgtgtgtgtgtg

SEQ ID NO: 409164 - DNA, 122 bp, Homo sapiens
gctacccccgtccaggtggctggggactcttccaggccagagtggcctttgaccctccttcgctgcccctgccacaccaaccaggccagtgtcttccctagccagaaggctctggccccacc

SEQ ID NO: 409165 - DNA, 122 bp, Homo sapiens
cgatgggccgcggcggtgggcgcacgttccgcggggactcatgccacgcgcgtcccggcccgacgcgcaattagcagccacctccgcagcccgccgccaccgcctccctgccctcccgggct

SEQ ID NO: 409166 - DNA, 122 bp, Homo sapiens
gtgggtctgccggcacggacggggcccccaggaccgggacttctgaaaagtgaaggcggccggacaatacgggcagtggccacagtgcaaggacactgtgctgcgtgctttcaagacgctgt

SEQ ID NO: 409167 - DNA, 122 bp, Homo sapiens
cgtgatctgcccatcccggcctaccaaagtgctgggattacagacgtgagccaccgcgcccggccagttgatcggttttcaaagtgggaaaccgaaactgacgaaatgggccactggacgga

SEQ ID NO: 409168 - DNA, 122 bp, Homo sapiens
gtaaggtacgggaggctcaggtcggtacccggggatgggtgggcgccttcagacaggtaccgctggcgactcgggtgcccttaccgggcatcctccagcattctgggcacctgcctacccct

SEQ ID NO: 409169 - DNA, 122 bp, Homo sapiens
ataaattaacagtcagatctaggggctcgatcagatttgtgtgtgtgtgtgtgccgtgtgcgcgtgcacagcatgttctttgactaggaggcacacctgctttggttatcttctttttgtaa

SEQ ID NO: 409170 - DNA, 122 bp, Homo sapiens
ccaagatcgtaaattctggaggagccattccttcatcatccatgtttgcatccttcacaccgttcactggttaagtgcttagtacgtttgctattgggcaaggtcctcaaacgggaggtgga

SEQ ID NO: 409171 - DNA, 122 bp, Homo sapiens
taaaaacttttcatagatttttatacattactgtttttattctgaattgcataagatggacgggcaccctatcttttagtgtttagaacctctaaatgttttaatgtggtaacacttgaaaa

SEQ ID NO: 409172 - DNA, 122 bp, Homo sapiens
cctctttaagattttcctagcctattttaacagatgcctgcaagagacccccactaggatcgtgctgacctaacctttgagacttcaaaggttgctccagccagaaaggggaaccaagttaa

SEQ ID NO: 409173 - DNA, 122 bp, Homo sapiens
ggtagtctgcagggcttgggatcctgcggggctgtgcctgctccctgcagccgccgtggtcgcgactcctccgggactggtgccagaaggaactgcgcccaccgaccccttctctcgccctc

SEQ ID NO: 409174 - DNA, 122 bp, Homo sapiens
agtggtggacttggaatgaggggcgagggagggcctgggaggagcagccacttttggagtcgctgtgccttggcacttaggggagctgcagaaagcacaggtccaggcaggagttggtagat

SEQ ID NO: 409175 - DNA, 122 bp, Homo sapiens
cacattttttggggggagggggagatttcgtcccccaactggagccctccaagctgtcatcggtcagtggcgacaccaagtggtaaactgggtgtactgcagcccttttataactcccaatt

SEQ ID NO: 409176 - DNA, 122 bp, Homo sapiens
ggaagtgaggggagggagaggccgagagaaatttcggtactgcgcatgaaccgagcgtgacgttgaggtttgaaataaccggcaaagagtaaaggctgaaactagcttcctgaaagcttcgt

SEQ ID NO: 409177 - DNA, 122 bp, Homo sapiens
ctcaaatgccttttattaaccgaaggtcagcttttgtgactctcagacgctcaacaggtgcgcaactctgctaacgcagtaggctgtcctggccaaagggtggtgctgtgagtcgcctccag

SEQ ID NO: 409178 - DNA, 122 bp, Homo sapiens
gctgtagtccagggcacggcccgacccgcgtgaagaggggaataatccttttcctcggtccggctgtgctgcacactcactctggaagcatcctagagggcgggcgctgctcctcaccctca

SEQ ID NO: 409179 - DNA, 122 bp, Homo sapiens
aacattccaatgttttcgctatgttctactgtgtctggaattgatgggttcttcatctcacggacttaaagaatgaagccgcggaacctcgcggtgagtgttacagttcttaaaaggcagtg

SEQ ID NO: 409180 - DNA, 122 bp, Homo sapiens
aaagacgagcgaagaggggcaatgctgacgagcactccatggttacagcagctcggtcatcggtgggtgtttgctaagtccagactaaatcctgtggcgtagcgctgtcaaatctgaacagg

SEQ ID NO: 409181 - DNA, 122 bp, Homo sapiens
tgtctcaaaaaaaaaaaaaaaaacaaaaaaaaacaattaatgccctcgggtaaactatgacgtttgtgctaacttttcagatgtcccaagatttgggttgttttacaaggataacgaagttc

SEQ ID NO: 409182 - DNA, 122 bp, Homo sapiens
ctgcagcaggcggacccaggcccgcctgccgccggacattcagaacctgttcccgcagcgcgagctctgcacacgctctgcgatcggcacccctggaccccctaaccacccgccgcccaacc

SEQ ID NO: 409183 - DNA, 122 bp, Homo sapiens
tacagtacctttcattctgctttgccaatgactgcttttctctctgtctcctccagtctgcgagctccaggatggtaggagctggattggccacatcccagtgaccccagtactcagcacct

SEQ ID NO: 409184 - DNA, 122 bp, Homo sapiens
cataaaggctaacagtggccctgtgcaatcccaagaacctgggtttaaaggccagctatgcggcttgggactcacctctcagaacctccccgcacccttctgtgaaatggggaaagtaagcc

SEQ ID NO: 409185 - DNA, 122 bp, Homo sapiens
cctctggcctcaggtgtggtgccggagccaaagggagggaaccagtgtatagggcagggccgtctcgtctataggcaggttgtgcactgtatcatggaaccataggtggcagctccaggaag

SEQ ID NO: 409186 - DNA, 122 bp, Homo sapiens
ctctctagtacttgggaaggaggtaggaaatgctttattggctggtcttgaatgctttctcgtgtttcatagctccatgttggtgctctgtcttaaggaaagcctcatcaatattgcccaca

SEQ ID NO: 409187 - DNA, 122 bp, Homo sapiens
gcttctcttgagcagtctgaggaaagaatagaaacagaaaccccttgggacctgagtagacgcagctggccatgcacaggcagaggctctgggtcagtgcaggaagcagagtcacagccagc

SEQ ID NO: 409188 - DNA, 122 bp, Homo sapiens
cgaggtgctgggcacggtctcccggacccggtcccgaggccccatcctgaatgtcttcatcgggcatcctgggtcctttgcagccgcggcatgaacttcccgtgcccatcccccatcaaccc

SEQ ID NO: 409189 - DNA, 122 bp, Homo sapiens
gtatagaagaagcttccctttctgttctaaacagttaggtgagaaaagcgctatttgaagcggttctggaaggatgtacctgtaactatggcctactgatatgacatcccttctcactctgg

SEQ ID NO: 409190 - DNA, 122 bp, Homo sapiens
taaaaccatggaagtttcttaaaaagctaaaaatagctctccgccagatcgccgccgcgccgccatcttggacaccagccgtgtgcagcctatcaagctggccagggtcaccaaggtcctgg

SEQ ID NO: 409191 - DNA, 122 bp, Homo sapiens
cttttgagatgcaaaggaatggcaacatctagttggtgcactttaacagattcaccacttcgttgctaaaagaaattaaaaaggacataataaacactccaagatatatacggatatatgtc

SEQ ID NO: 409192 - DNA, 122 bp, Homo sapiens
atgaatgggtggttgagtgaacgaatgttagtgtcactattgaggtcctctccgagccgtcgttcctttcacaggggtcatgcctgggttgcagggaggatgtgctgccccggggagggagg

SEQ ID NO: 409193 - DNA, 122 bp, Homo sapiens
caaatatttcgccacatgtaatattgaaaattctacagctggcagttatgtgctcagcgacggctttctggggcatgcagaggccccaggttgtcgccgtacccccaccattcccccgggag

SEQ ID NO: 409194 - DNA, 122 bp, Homo sapiens
cggcagcggccggagagcccggcccagccccttcccacagcgcggcggtgcgctgcccggcgccatgcttctgctgggcatcctaaccctggctttcgccgggcgaaccgctggaggctctg

SEQ ID NO: 409195 - DNA, 122 bp, Homo sapiens
caaaaattgtgcacaaagtgaggccttatgagcggtttttagcatgcaattttaaattcacgtgtctatacgcctaagacctgtcatctttaagatcactcctccaaataatttttttaaaa

SEQ ID NO: 409196 - DNA, 122 bp, Homo sapiens
ttgacaacagctgtctgacactcctctctcccagagctgcccagcttgtttcttggcttacgtcgtcccttcagttattattatttattttctcaaaacctagggttaatcagtaacttgcg

SEQ ID NO: 409197 - DNA, 122 bp, Homo sapiens
gcctaagatccctcagcaagttttagcaaagcctcgttgtagaatcccagcctcaaacctcgtccatctgttcctttttctgagcctctttagtcaaacccaggttgactagagaagtgcta

SEQ ID NO: 409198 - DNA, 122 bp, Homo sapiens
aaagccaccgagacctcaggcccaacctacatcaaactgggccagtgggccagcacccggcgcgatctgttttcggaggctttctgtgcccaattttccaagctgcatgtccgagtgacgcc

SEQ ID NO: 409199 - DNA, 122 bp, Homo sapiens
gccaggccttcggcgggaggctggccctcttcctgcccggctttgatcgccacatgaccgcgacccccaacaactcggatctggggagtaccgccacggcccgcggcatcctggggtacgcc

SEQ ID NO: 409200 - DNA, 122 bp, Homo sapiens
cccagcttgattcgcgggtgccggatgatgacgtatccttgcacctggcgatgattggttcgcgtggagaggcgtcgtccgacaacgcgactcggaacccggacctatgttctcgcgagagt

SEQ ID NO: 409201 - DNA, 122 bp, Homo sapiens
tagggcttggttgtccagcccttctctcccctcctaagacatacatacctactgaggtcacgctgatatattctcgttcatattattccacatagcttgcagatagcatgggtttttttgct

SEQ ID NO: 409202 - DNA, 122 bp, Homo sapiens
ccttccttccttccttccttccttccttccttcctccttcctgtttgacgaatgagttatcgttgacctatagtgtcagatattggggtgggcacaggcgatacttattcgtttgaatatgc

SEQ ID NO: 409203 - DNA, 122 bp, Homo sapiens
ctaaccacgagtcgggttgacagggctgctcgcatgcgcggtctccaccgtggtgtttgtcgcaatgggcgctgcgcggaggactacatggaatctcgactttgcagcttgaagtcattttg

SEQ ID NO: 409204 - DNA, 122 bp, Homo sapiens
aggggtcgccttttgtaggggacctggtctttttgcgagctggcagcgtgctcccagcagcgaaggccgtagtctcgctcaggaggccgcgcgccagacccggggatgcgcggtgttcaaag

SEQ ID NO: 409205 - DNA, 122 bp, Homo sapiens
tcgcctggcgccgcgcatggcccaggcggcgccggcggctgcagcaggtgggcaccgtggcgaagctctggatctacccggtgaaatcctgcaaaggggtgccggtgagcgaggctgagtgc

SEQ ID NO: 409206 - DNA, 122 bp, Homo sapiens
ttagtttcattcttccatccctaacactttatactcaaggaactgatctctgccttttgccgtttaaggagggttttcctaatatggtttctgatgcaactactacgttggatttatttgat

SEQ ID NO: 409207 - DNA, 122 bp, Homo sapiens
acaattttgttaatatctgcctgtgaaggactcctcatcaacataagataggcagccagtcgcttatctcccggagaagcatcatcaaggaaagtctgaagaagaacctcctggtcctgcag

SEQ ID NO: 409208 - DNA, 122 bp, Homo sapiens
tggtgtcaatgggatcaaggttctttctgcttgtcatttgaagactccaagacacattaacggtattcacaaataagagattttaagcttcaaattagaagaaggtttaacaatatggggaa

SEQ ID NO: 409209 - DNA, 122 bp, Homo sapiens
caggcaacccttcctgaccccatcctacagggtctctgcccaggccttcctgggcccctccgggagcactgccaggggcctgggccaactggcctggaagccttgccttttccctgtggagg

SEQ ID NO: 409210 - DNA, 122 bp, Homo sapiens
tgtgcatggagatggagaggcgggcctgcaagtgcgaacaagccaatcacggaatcccggcggccggcggcccgggaggcagtcgcgcgctcgcatccccaagatggcggccgttaaggaca

SEQ ID NO: 409211 - DNA, 122 bp, Homo sapiens
tacccgcggctcgagcgcgctgtacctggggttctggggccgccctcacccttgcgccgccgccaccaccactgccgccggcctagctcccccaggaccgaaagtgaaagtggagcccgggg

SEQ ID NO: 409212 - DNA, 122 bp, Homo sapiens
ggggatcgcttgtccccttggggccttgtcagtcggtgggtgggcttcgtttgacagttgcgtgaccagcccctcggcctcgcttctatccttgccttgtgtgtttatgacgaaccctccgg

SEQ ID NO: 409213 - DNA, 122 bp, Homo sapiens
cttcatagtctccgacgcgcctccactccctttctcctgctccaggcccagcgccttgggcgtacgcaatagacccctccaagcttcccggcttgtcacccaccggcaggggttgggagaag

SEQ ID NO: 409214 - DNA, 122 bp, Homo sapiens
gcacatcacggctgcctcagagctcctgagcccaccgtcccgcccgagtgagggtgcacacgggccctcccggctgccgtggcctcacgtggacactgcagggcactaagccccggtcgagg

SEQ ID NO: 409215 - DNA, 122 bp, Homo sapiens
ctcagagaagcaggaggggaacttcgacgacgccaccatgaaggctggccagtgcgtcatcgggctgcagattaccaacaaacgcgccagccagtcaggcacgactgtgtacggcagagcac

SEQ ID NO: 409216 - DNA, 122 bp, Homo sapiens
agacagcacgtgtggcggtgcagagggcttggctgcaagagccgataaggaggaccctggcgactgcctagtccaaaagtcctagctagagcaagatcaacttgtactgcccttagtacagc

SEQ ID NO: 409217 - DNA, 122 bp, Homo sapiens
tggcacgaggaagacaaggcttagtaaacggacttaccctgtgcaaggaatggaactggacgggaacccaggtctgaacgtcgaagtctgtgctctttcctgcctcttgctcccctagggtg

SEQ ID NO: 409218 - DNA, 122 bp, Homo sapiens
aagaaacagtttgcagatgccaaccagggccgtcctcctacaccccccagacctgcaccgcggctccctgttctgggacagtgactcagcgcccacacgctgcgctgcgtgcagctgccggc

SEQ ID NO: 409219 - DNA, 122 bp, Homo sapiens
tttatgagctgtaacactcacggcgaaggtctgcagcttcactcctaaagccagcgagaccgaaccctctggaaggaaagaacaactccagaagcgccgccttaagagctgtaacacttacc

SEQ ID NO: 409220 - DNA, 122 bp, Homo sapiens
cccaagtgtggggtgaggaattccacaggactctcagcctgctggagttcccaggcgaggcgtgctgactcggggccaggcctgagccactgctcccaggggactccggaggtggccaagga

SEQ ID NO: 409221 - DNA, 122 bp, Homo sapiens
tgtgagtttgtaattaaaacattaagcatttcagagttcaaggcataattcagttctggtcgtaggactgggtgctatcgccatcagcagcaaatactttctgtgtgtcttcccatcatcag

SEQ ID NO: 409222 - DNA, 122 bp, Homo sapiens
gggtggagtgtgaggcggggaggtcgctcgactcgccggcgctgtggcctcccgcggagccgctcagactttccctgccggcacatggacctggcccaaccctcacagccagtagacgagct

SEQ ID NO: 409223 - DNA, 122 bp, Homo sapiens
gtcgaagggcgattaacattcgctcgacaaaaccctgtcccgggccatttgggagttgcacgcgttcacacccggggctcagcccggtgcgccttcacgcgcagcctttttgtttatgcggc

SEQ ID NO: 409224 - DNA, 122 bp, Homo sapiens
cgcctgcgctgttgagggaagaccgcggcgggttacaacttgggggctatttccaccttccgtgcgactgatgcgaaccccgaagccggactctgtctgctacagtcctggcgtccaagttc

SEQ ID NO: 409225 - DNA, 122 bp, Homo sapiens
gatgtgttctcatcccaatccaggcgaccccggtaaaaatatttctgttttcttgtctttcggatcatccgggaagggataggacccaagatcctttccatcgtggctagatgctgtctgtt

SEQ ID NO: 409226 - DNA, 122 bp, Homo sapiens
ttcaatgatgtagctggtttgtctgaatttctctggtgtgcacaccggaaactcaaagcacgactctatactgtacttttgtaatgtacaatgattgccgtggagagcagcgatggagatgt

SEQ ID NO: 409227 - DNA, 122 bp, Homo sapiens
gcaaaggtgatgctgtgagcctacagattatcagcttcatggcacagcatgacccagggccggcctccccacactagctcaagccactagctcagcgccaggggcctgacctggccatggga

SEQ ID NO: 409228 - DNA, 122 bp, Homo sapiens
ctctatcaccaccttccccggtgctagagagattcgtttattcaaggatttatttagtatcgatcaacagcccatctgccttgcataaaaaaattaaaaagcaaaatatggtccttttctgt

SEQ ID NO: 409229 - DNA, 122 bp, Homo sapiens
cgtggggtgaggatgaggggccctccacccagcctgacagcgcccttggctttgcacccgcgtgctcagccgcacacactctccttgcacagctgtcgatgagcagaatgcccagacccagg

SEQ ID NO: 409230 - DNA, 122 bp, Homo sapiens
ggaaatccaagaagtcgcctaagtctttttgtccacagaatgctcacgggttgagtgtcacgtagataattgggatacggttttattgtaacaatgagcatggcggaaataaatggaaggtg

SEQ ID NO: 409231 - DNA, 122 bp, Homo sapiens
gctgggaaccgtccaatcaggaacgcagctggtgcggatagggcggcttccgggatgtggcggggcctttgtctctcgctgcagcctgagctctaggtcttgttttccctgctttgtgtttt

SEQ ID NO: 409232 - DNA, 122 bp, Homo sapiens
acaatgggggacgacagggcacagcaggtgtggagacggtgtgcagggccggagcaaaaccgttaaaggcaggtggagacaccctcctcccctcccccagcatggggtcttcctagcaccag

SEQ ID NO: 409233 - DNA, 122 bp, Homo sapiens
tattctaaagttggctcctctgagacttcaatcacatcactaagatacaaacctctcatacgctgccaaagggtccctgtaggtcaattcaggcctcttttcaattccacaactttaaggaa

SEQ ID NO: 409234 - DNA, 122 bp, Homo sapiens
cctcgagagcggactttacaacatgggctctattacgcttctcggagtcgaagtccaaatcgctttgatgctcatgacccccgatatgaacctagggctcgcgagcagtttacactgcccag

SEQ ID NO: 409235 - DNA, 122 bp, Homo sapiens
ctcgatctcctgacctcgtaatctgcctgcctcggcctcccaaagtgctgggattacaggcgtgagccacagcgcccagccatccttgttttatgcttgcaatagtaatttgtagctcgatt

SEQ ID NO: 409236 - DNA, 122 bp, Homo sapiens
agccatcggtcacctggacgagggggcagccgctcaccgagaaccctcctcctcccttcccggaggagctgggagactttcaccctgtaaactgcgggccctgagggtccttccggggccta

SEQ ID NO: 409237 - DNA, 122 bp, Homo sapiens
cattgcaaagattatatgagatcatgcatggaaatcaactagcagtgacggacacaaactcgatatataactgggaatcctgatgggcttcaaaccgcctggtttccaccacccccttccct

SEQ ID NO: 409238 - DNA, 122 bp, Homo sapiens
aaagcccctttgcagttgtgttctgttttcttccgccataaaaaaggggaaatggtgtttcgcttcacatcaccgggctgcaaagctgaggagtaatgtcctataacgtctgggggtccagg

SEQ ID NO: 409239 - DNA, 122 bp, Homo sapiens
tcttggtggccataaacagaaaaaggctaaaccctccaaacttgtgcacttagcagactccgcttctacaaagaccagccatatccaaagcagctctctaatgaggagtcggcatgagaatc

SEQ ID NO: 409240 - DNA, 122 bp, Homo sapiens
caaacagaacaacaaacacaagagttgagcagcggggtgggggtggggggttgccatctacgccgttttagtgtgagggacactgggaacgatgcccagaggctgctctcctcccagcctca

SEQ ID NO: 409241 - DNA, 122 bp, Homo sapiens
acaaagcgcctcccgcttgagcggactccaaagggacggtccgcggtgtgcagcgagctgcgctcaggggaccttgcgcccggcccttctgctgcacacagcccacccaggacctcccgcag

SEQ ID NO: 409242 - DNA, 122 bp, Homo sapiens
atccatgcagcgaattccttagccacaggtgtccctctgctctctaactcacagcgagctcgctgcccaaagtcctgctccggcttcctgggtggacctgaccgcgttcgggtgcacgtggg

SEQ ID NO: 409243 - DNA, 122 bp, Homo sapiens
gtcccggatctggcgccgctcgccgacctggagggaggctgcaccgctgaagtgcagtctcggagctgcgctcctctggaacaaagcagccagacgtggcttgagtggattcctaagccaag

SEQ ID NO: 409244 - DNA, 122 bp, Homo sapiens
ggccgcggcgctgggctcgcggcggggagcgaaggtgagcgccagaacgcggagggctggcgcggctcgcggcgccgggccccgttccccgtccgcggcggccctgcaggcgaccccgcgtc

SEQ ID NO: 409245 - DNA, 122 bp, Homo sapiens
gcaaaaatcagcagaagtaaagctgagttttgggcctggggcaaacttacacctgtagggcgacaaactgggtaggcttagtttcaggtccaggagtgcctaactccaagagtgccaaattc

SEQ ID NO: 409246 - DNA, 122 bp, Homo sapiens
ggatgctgagctgcgggggatgagcagcgtgagtgagcggtcccccagggagggatgctccgagggcgagtgcaggaggtcccttgcattcctccttcggaatggcctccccagccccagca

SEQ ID NO: 409247 - DNA, 122 bp, Homo sapiens
gacctcgtgatccgccgcatcggcctcccaaagtgctgggattacaggcatgagccaccgcgcctggccccaatttcttaaactgattgctgaagagggcaaccaaatggctgaaataattt

SEQ ID NO: 409248 - DNA, 122 bp, Homo sapiens
ccccgtctccaccaaaaaaaaaccgaaaaccagtcaggcgtggcggtgtgcgcaggcacccggcaggctgaggcaggagaatcaggcagggaggctgcagcgagccgagatggcagcagcac

SEQ ID NO: 409249 - DNA, 122 bp, Homo sapiens
ttgtcttagcagcccttctgatgaagggacatgtaaggagaaagttgaaaaaagtataaacgaaagtcatgcaaatagcaacaggatggtaattctaggctgagtaatgaacaagtgcaaaa

SEQ ID NO: 409250 - DNA, 122 bp, Homo sapiens
aagaggcagcccctctagaaaacttccttcccctcctcccctgccccggtacatattgcgcggcccttactgttgctgtgtctgtcctgtcatctggaggtgcacaactaccccatgcttca

SEQ ID NO: 409251 - DNA, 122 bp, Homo sapiens
catctaatcacttccagaataaggaccccctacaatttctaccataaaaataaactctatcgaggagctttatttaaaataagaacttcattttccatgtacttacctacaaaataagcatc

SEQ ID NO: 409252 - DNA, 122 bp, Homo sapiens
ctgtatctcagcatcgctacaattccctcccacaccccgtgtttgtatcatcagctttgccgccttacaaatttaggtgtgtcagagaatgtatgtctctggctctttcatccaaggaaaat

SEQ ID NO: 409253 - DNA, 122 bp, Homo sapiens
gccccgcgggtgaggacccctcccccggcagcagcagttctcaggagcgcagggtttcagcgtcaaggggttctgggttccaggcgggactggacaacttgggagctgggtagctgggacgc

SEQ ID NO: 409254 - DNA, 122 bp, Homo sapiens
ggttggatggtcttggggccccctgtggcaaaattctatagaccctgtcccacactctgtcgtgaaaatgggactatattacagttctaattcccaagtacagcactgtcacatactgcccc

SEQ ID NO: 409255 - DNA, 122 bp, Homo sapiens
ccctgtatgacctatatcctggggtgcctaatttcttgcactcccaaacatttgagctgccgactaattacacatgttaataggcataattttagaagtcgtttattccttttaaaagttag

SEQ ID NO: 409256 - DNA, 122 bp, Homo sapiens
tatgcagcgccccacatatggagtgagaacagcagctacagagccaaaagcactggggggcgctgagcccagcacaagaaccctcacctgagaggtaaagcgttcattatttggcccctggg

SEQ ID NO: 409257 - DNA, 122 bp, Homo sapiens
gcccccgaggcgcctctgcctgctctctccgttcttgccggcggcagcgattcggactcccgctttcgacaaagtctcagctccgcagcagcacccggcgcggactcgctgggcgcgcggac

SEQ ID NO: 409258 - DNA, 122 bp, Homo sapiens
accagagatggctgggcaggcggaaggaaacgagcccagcaaggggtcagccgcaggaatcgtcccagctctggctgtaacttgggtttgaccttggcaagttgcttgacttctgtggtcct

SEQ ID NO: 409259 - DNA, 122 bp, Homo sapiens
tgccatgtgcccgccgaagctcaggtgctgctccatggctcacaagcaataatcaacacccgctttcctaaggagctcaggactcgagcagagtcccacagaacccagccgaagttcaccct

SEQ ID NO: 409260 - DNA, 122 bp, Homo sapiens
tgccgttgtgcttgagggagacgctagagatctgcagggagctcatgaattccttgctctcgatggtcacgcccgagcctgagatgatcacctgtccgtccttcctccaggtgatacggatg

SEQ ID NO: 409261 - DNA, 122 bp, Homo sapiens
cacattcctgttggttactggggacagccagctgcgggcaggcggggcccagctctgctccgtgcggaggctgtgttctgccctctccctgcccacagcatgactcagagccacctcactgc

SEQ ID NO: 409262 - DNA, 122 bp, Homo sapiens
gcgtttggttacatcttctgtcactcagggcctgagggcggggggggggggggtcttaaacgttatccattcagcgacgctggcctgggaactgtccaatcaggcacgcagctggagcggaa

SEQ ID NO: 409263 - DNA, 122 bp, Homo sapiens
aggaccagccccatggagggagctccaacctccacagaggccctcatccaacagagaggtcgttcagggcccaggccttagacaccagtttttcacactataggttgtgatctatagtgggg

SEQ ID NO: 409264 - DNA, 122 bp, Homo sapiens
aatgctgggacgacagctccatgtttgggtcacggttgaactgggtcttgcagtcttcagcgggtaggcagaaagctgggggaatggtggcttcctgttcatttgcaccacaacagtcaggc

SEQ ID NO: 409265 - DNA, 122 bp, Homo sapiens
tccagacacacaacactgtttttaaggagcgtaatgaatgcacggtattgtggacgcaatcgccgccctggcccagcccgagcgagggcagagccggatcgcagggcttgttattgacttat

SEQ ID NO: 409266 - DNA, 122 bp, Homo sapiens
ggctaagcttcccacaaaaccaaggactacttgccttaaaggttttcctttcattggaatcgcttatgcatatgtcatcactgactcatatctcataaacatgatttacaaaaaaagcttgt

SEQ ID NO: 409267 - DNA, 122 bp, Homo sapiens
caatcaatttcattcgcatctctgaggcaaatatcctttagaatctggactcacccccatcgcaagtggttgcatgaagtcctgcactgttgatgctgtggactccattgaagacagagata

SEQ ID NO: 409268 - DNA, 122 bp, Homo sapiens
aactgttgtttgcctttcaaccttgttttacagttctgcagtgtaatggaggacgggcaacgtgcatgtgcaggctcaccactcccaggcctctgacatgagggacatgtgacagtgtcatt

SEQ ID NO: 409269 - DNA, 122 bp, Homo sapiens
ggtgctaaacctctcactgcccaggccagtggcgccggcggacggctctgagtgcggggccgccaagcccatgcccacccagaactcacgctagcccgtggccccgcccacttggaactcac

SEQ ID NO: 409270 - DNA, 122 bp, Homo sapiens
ttccctcagcattctgagtgtaatccaaacgctcagtggagtcgtggtccatttgacccacgcagggggatccggggaattctgggaaatgtagtcccgccaatcagtggagtcgcgggcac

SEQ ID NO: 409271 - DNA, 122 bp, Homo sapiens
tccggagtttgttctttctgatgttccgatgtgttcagagtttcttccttctggtgggttcgtggtctcactggcttcaggagtgaagctgcagactttcgcggtgagtgttacagctctta

SEQ ID NO: 409272 - DNA, 122 bp, Homo sapiens
accaccgctgcttcacacggatgaccccggccctgctcctgctgccgcggtccgagcccgcgccgctgcctgcgcacggccagctggacaccgtgcccttcccgccgcccaggtgcgcgcag

SEQ ID NO: 409273 - DNA, 122 bp, Homo sapiens
ggtgtgtgccagctgtctcctggcctctgactcttggaatgagatgttgtgttgccaaaacgattctcttctttccagttctaaaaactcctcgaattttagtgcagcctagatgtagtcta

SEQ ID NO: 409274 - DNA, 122 bp, Homo sapiens
gttccttataaccgggggggacgggatgatattagtcccaatgtcgcagagggtgtacaccgcctctgtaatatccacgggggaaaaggatgatacaattcccactatcgaagggggtgtac

SEQ ID NO: 409275 - DNA, 122 bp, Homo sapiens
gtcggcgtccgggaagcctggcagcaccatctctccgtcggatttggttgcgctggtcgccgacaggaccctgggctcccgggtactgggtggcgccattttttcagcctgcacggctcgtc

SEQ ID NO: 409276 - DNA, 122 bp, Homo sapiens
gagtcaagaccttgagtttcctgaggtcaggagaccgttagggaatgtgagtgtcccagacgggcgctgagcccagctcggagacccaccccgcccgtagcagcggcgcgggccccagagag

SEQ ID NO: 409277 - DNA, 122 bp, Homo sapiens
gtcaggagagatgtgagcctcgtaccaggaagatcatactgaggccaccaggttgagagccgcctggctggggggcttgtccggggacagcaggggcagaggcatggaggtgagctctgtgt

SEQ ID NO: 409278 - DNA, 122 bp, Homo sapiens
agtggggagagtgaggccggggacagtgatgggcggggccgagcgcacggtgagttccagcggaaggacttctctgagacttacgaacgcttccacaccgagagcctgcagggccgcagcaa

SEQ ID NO: 409279 - DNA, 122 bp, Homo sapiens
cctgctctgacaccctcggggaactactttgtcctcgggctccggttacgggctcgtccgcgggaccggcaccgctgcctactggcggcccatcacatcgcccctccctcccacgcctcccg

SEQ ID NO: 409280 - DNA, 122 bp, Homo sapiens
gctctatagatggtgagtggcagaggcagaagttaagctcaggcctaactgccaggtccacgtttttcatcatcccaagggaattcagaaattgttgttttcaaccttctcatctaacagaa

SEQ ID NO: 409281 - DNA, 122 bp, Homo sapiens
ctccctcctttccccacaaataaaaccaccttagagccttctcttcgcagattgtcaggacgttctacatagatgtggatgaaagactacagaaggaaggagcaacaaacgtcaaaaacaaa

SEQ ID NO: 409282 - DNA, 122 bp, Homo sapiens
ctgtcacacctggcgataatggcatcagagagagataccctgcgaggatgccgtgagatgcgccaggtaaagcacctggggtcagaaagccaccccctcctcctcttctccgtgacccccct

SEQ ID NO: 409283 - DNA, 122 bp, Homo sapiens
tctccttcccctgtcccgctacccttgaggatgacgccggcctacagctctgatgacagacgcacattaggggtataatgagcttcccgaggagctagtgtttccatcaacagagtgagtgt

SEQ ID NO: 409284 - DNA, 122 bp, Homo sapiens
cctttataagttggagtgtaaggagaaagaataatcaatgtgtggactttttttcccctgcggaataagtgaactaatgaattgttaaaattttctgaaaatgtccttaacgcaatgcaagt

SEQ ID NO: 409285 - DNA, 122 bp, Homo sapiens
cagcacagctggccggcctagcacagcagcctcggcgcagccagtgggacgtgagaaggacgctgggctctaggttcaccccggtagtgcactgccccaccttggccccacatgctcagcaa

SEQ ID NO: 409286 - DNA, 122 bp, Homo sapiens
ctcacatgcccagcaggcctggtgcaagccaggagccgggcaagcactgggcccgcagcccgcatgcttcctcccacaggcccagagcagccgtgctcaacccgggtgattttctccagcag

SEQ ID NO: 409287 - DNA, 122 bp, Homo sapiens
aggagaagcctcgtgccccagagaaccaggaagcgcagccctccccttcgttgactctggcgccctctgcaggcgaccttcagtaacaactgcacagcaacataagcagaggaatgcagaac

SEQ ID NO: 409288 - DNA, 122 bp, Homo sapiens
gcataatcatgtcacaattttaatcaaaagtcactagagattcattcgtgatgactgccacgatgaacctcctaaacctgagttcaggcaccctgtgtctaagcctacccacctttcgcact

SEQ ID NO: 409289 - DNA, 122 bp, Homo sapiens
tttaacacaggcttagaggtctcccagccctggagtctccacgtggaatctcagaatcaccgggggaacatggagcagccgctggccccagccccacccggacctggccctgctggatgcat

SEQ ID NO: 409290 - DNA, 122 bp, Homo sapiens
ttccttctcccttgcaagtagctggtgtgaggatcctagactggattccctcctttttgccgtcagacttttaaagggtagcagtgtgacatcaaacaggaaaaactccactgtccacatcc

SEQ ID NO: 409291 - DNA, 122 bp, Homo sapiens
gctgggcggctgaggccgggaggtgggagaggcgggtcctgcagccccgagagccccccgcggctgcagcggcagctgtcacctcctggcctcgccccacagcacacctgagcctcctgggc

SEQ ID NO: 409292 - DNA, 122 bp, Homo sapiens
ggaacctgcctgaggtcagcctgggagtggtgattccacagtggggtccacagtgcagcccgagcccaggggcatccagtctcctgaatgaactccagggtctcccagtggaagggacaagc

SEQ ID NO: 409293 - DNA, 122 bp, Homo sapiens
gccaggcagggctcacggtgaccctgtgaggtcgactcctagaaagggcatacaaggtgacggtgaactccacctcaaagcatcgacgcgcaaaagtctgccaggcacagaggctttcggaa

SEQ ID NO: 409294 - DNA, 122 bp, Homo sapiens
tttcgtttcgttttgtttctaatgtggacgatcatttaaaatgcctctggtggccgggcgcggtgactgacgcctgtaatcacagcactttgggaggccgaggcgggcggatcacctgaggt

SEQ ID NO: 409295 - DNA, 122 bp, Homo sapiens
cacattagcacggacccttgggtgacttgggcggaagacggggcgtcagggccgcctgcgcgcgcgtgacctccaagggtccttctggcgctcctccggcgctgcgtgcggcgctgggctgc

SEQ ID NO: 409296 - DNA, 122 bp, Homo sapiens
tgagaggcaggagtcgggcctggagacgcagccgtgaggaagagctgggtccggagaggacgcccggagggtgcaagtgggtctggagaggccgacttgaggaggttctgggcccggagagg

SEQ ID NO: 409297 - DNA, 122 bp, Homo sapiens
ccagtctggaaagtgaggagcgtctctgtcctgccgccatcccatctaggaagtgacgagcgtctctgcccggccgcccatcgtctgagatgtggggagggcctctgccccgccgccccgtc

SEQ ID NO: 409298 - DNA, 122 bp, Homo sapiens
aaccccggaggcaaagcgtcgctctagctcttattcttagcatcgaacttgctcccactacggtgggaataaggtacctggcgccggtgcatgtaacaatgggccgggggctcaggcggcag

SEQ ID NO: 409299 - DNA, 122 bp, Homo sapiens
ggcgcgctcctccgcgatgggcggaagtggtgaggcagctctgagggccgttgttcagtgcggggtctgacagaggaggctccgtgtctgcagctagtgtgtcaactcagcgtttctcctct

SEQ ID NO: 409300 - DNA, 122 bp, Homo sapiens
agagcctcttcactgagtgggagaatgggctgcttgttcatctttgtgaaaattctagaacgggaagaacaattcaaagggtgtccaccattctgctgtaccttaaccagaaacttactgga

SEQ ID NO: 409301 - DNA, 122 bp, Homo sapiens
gctgctggtggcggtgcctgtgggggagtaccaggatgtgcctgacctggtctggagcctcgatggcattcccttccgtggtggccccaccctgacgggcagtgccttgcggcaggcggcag

SEQ ID NO: 409302 - DNA, 122 bp, Homo sapiens
tgcagtgggaaggggggccgatacactgtacgagagtgagtagcaggtctcacagtgaaccggtctctttccctactgtgtcacactcctaatggaatgccgttatccaaagagcagcacga

SEQ ID NO: 409303 - DNA, 122 bp, Homo sapiens
ggcgtttgtatgggtgggtcaggtgggcaggtgttcttatggtcgggtcaggtgggcagacgtgcatatggtcgggtcaggtggacaggcatgtgtatgggtgtgcgtatggacgagtcagg

SEQ ID NO: 409304 - DNA, 122 bp, Homo sapiens
cgccaaacgacagtggcacatatggagcaggagctgggcccaagccgccctggaggctcccgtggggaaagggctcaggagtccagtgtggcctggagtgtgcatcagggagctgcccggcg

SEQ ID NO: 409305 - DNA, 122 bp, Homo sapiens
accagggggagtctggctgtgaggtcgtcagcacatggcggtgctgccggctgcctcccacgcacgcaggctctgccagcctgccttgccaatctgccaggcaactgggacaggtgcagaca

SEQ ID NO: 409306 - DNA, 122 bp, Homo sapiens
tctcgaagatcaaccgcgacctgggagccccacttcttaccatagcgaggccggcgatgccgcagccacatcacccttccggggctcaggcggaagaggctgcatgtcccgtctgcccttct

SEQ ID NO: 409307 - DNA, 122 bp, Homo sapiens
gacaaggaggagtttttttgaggatgcataagtcccactggccaagacacgggggtctgtcgggctctcggcgcactccgcgcagttgaagccacttcctccgtgaagccctccgggcagaa

SEQ ID NO: 409308 - DNA, 122 bp, Homo sapiens
cctttggggtgcccttcgcggtttctgcgtttcccccgcgttgccagcagccactcgcgccgcgcccctagcccagaaccgcccctcccaagggcgataaccccgagggcaacggccgcggg

SEQ ID NO: 409309 - DNA, 122 bp, Homo sapiens
acaggtgtgtgccactacacccagcctggataaggtggttcttaaagattttgtgcagcccgggcacagtggctcacacctgtaatcccagcactttgggaggccaaggctggtagatcacc

SEQ ID NO: 409310 - DNA, 122 bp, Homo sapiens
ggagatgacagccacacacaccacacgtaaccactggataagttttgggtcctcatttctcgttgatgttaaacacatgagcaaaaaaaccaaaaaaacaaagcggaacgacattcatttcc

SEQ ID NO: 409311 - DNA, 122 bp, Homo sapiens
ccggcgcgcgtgtcaagcgtgcggcggcggccgtggaaggtggggttggccgcctagggtcggcggtgggctcggtgtgggatagccggcccggtccgacgcgctccgcgaggtcacgcgag

SEQ ID NO: 409312 - DNA, 122 bp, Homo sapiens
acccagcacaatggggggccagggaaataaaagaaaaaaaagatgaaccatctgtagacccgcaccccagctcatgtctcccgaagaacaaagacaggtaaatagttaactaccggcatggg

SEQ ID NO: 409313 - DNA, 122 bp, Homo sapiens
cagctgcaagtcacgtgagttcgcggctgccaaatggcagtgcagaggagcacgcagcagcgcctgggaggcgctcggctccctccaagtccctattacgttaatttacttcctggtcataa

SEQ ID NO: 409314 - DNA, 122 bp, Homo sapiens
tgaatgccacagtgtcccctgtacctcaaatactgtttggcacacagtaggcactcaatacgtgtttgtttattccgcaaacaactatgaagcacccactgtgttgttctcacacggaggtg

SEQ ID NO: 409315 - DNA, 122 bp, Homo sapiens
ggagttagctggaaaggagaggtgctaacccggtggctgcttagtagggaccatcaggcccgagtgtggatgatgctgagctttgcggaaagtgagccatgtgctctgtggaatgccgggat

SEQ ID NO: 409316 - DNA, 122 bp, Homo sapiens
ggctccttggcagtctgttacaacaccacgctaatgaaagccaggtctttaagttcaccccgcctctggactattagtttctcctttgcgccctgcggggactgcattcctggaaatgaaag

SEQ ID NO: 409317 - DNA, 122 bp, Homo sapiens
agaaatgtttcaaaccgctggacactcagctgaaggcaacacagcatagcagaatgaatccgatttgaatgagaatcgataatgtgtctctgttcacacacctttccttctgtctaaatcca

SEQ ID NO: 409318 - DNA, 122 bp, Homo sapiens
cgtcgtagatgtcgtcccctgtggccaggtaccatcgaagggccgcgctgggggagcccgcggccgggcagggcaccaccacccccacggagctggaaaaggtcacctgctgcaaggagtca

SEQ ID NO: 409319 - DNA, 122 bp, Homo sapiens
gccagttgccatcacctatgacgaggagacagcgcctggggcagagcccagtatggggtgcgttcagggtagatcaggaggtatgagtgggtagtgggcgagccaggctgggggttgtgggg

SEQ ID NO: 409320 - DNA, 122 bp, Homo sapiens
tacgtgttcctgttccgctccaagcagtccctagtgctggagcgccagcgcctggacaagcgactggctctcatcgccaccatcctggaccgcgtgcgggacgagtacccccagttccagga

SEQ ID NO: 409321 - DNA, 122 bp, Homo sapiens
ggggtgaggcgggaaggggaaagaaaggcggtggcgcgggcagagcaggccggaggagggcggcctctggtgcacctgcctccgccaggctctccctgggacgggcgcccgtggctcctcct

SEQ ID NO: 409322 - DNA, 122 bp, Homo sapiens
tgaaaaaatgaatcatgtacaatgataaaggtgtggacaggaccacaagtaacggtgtaacgattagcagatttaaggaaaagtcagtctaaaaggaaacgtgagaagctaattgcagaaga

SEQ ID NO: 409323 - DNA, 122 bp, Homo sapiens
ccggtgccccgaggtgcactgacctgttgtggtagctcctagcgtgggaaaacaaagcgacgtggctggacatccccgctccgccccgcccacctcccagaccccattgtggccctttcccg

SEQ ID NO: 409324 - DNA, 122 bp, Homo sapiens
taaaccgaaccggcaggatgcagttaaccctttaccaggctgaagtgtcagcgggctggacgcgctgctccgctaaaactggctcttcccactggacgggatcctccaacactccctcaccc

SEQ ID NO: 409325 - DNA, 122 bp, Homo sapiens
tttatccatatattggtcatacccccaaaatatatcctgattccagccatttgtcatgaccgctttaatctgagctcccttcatttttcacctggattactgtaccagcctccccaatggcc

SEQ ID NO: 409326 - DNA, 122 bp, Homo sapiens
gaaacgcttgtgagaacccaggatttcagggcagcttctccctttggcctcccagaccagcgcagtactgaggacctcgtctcacccccaagaccccatttcacagaacaggacggagcacc

SEQ ID NO: 409327 - DNA, 122 bp, Homo sapiens
acctcatgatccgcccgtctcaacctcccaaagtgctgggattacaggcgtgatccaccgcgcccggccttaacttttaatgtagcctggattgtatttgtctttataccaatacaatcaga

SEQ ID NO: 409328 - DNA, 122 bp, Homo sapiens
cagctatgaagtctatgaatcctgggagaatcgggacgtcgttgtaggtgaggccgtcagcgctggtgaagagctgctgtgggatgagcccgtcctcaggcacgtagccggtgcagcagttg

SEQ ID NO: 409329 - DNA, 122 bp, Homo sapiens
agaagaaacgctcagaaaggcagaattcttcgtaggaattatcttttccctcctctcacccgacagcctgcctatttccaaaggaaaaaaaaaaagcgtgttgagtacgttctggattactc

SEQ ID NO: 409330 - DNA, 122 bp, Homo sapiens
tactcgggagactgagacaggagaatcgcttggtctcgggaggcagaagttgcagtgagtcgagattgcactactgcactccatcctggacaacagagcgagactctgtctcaaaaaaaaaa

SEQ ID NO: 409331 - DNA, 122 bp, Homo sapiens
tgctgtgtgggacccaggtcagcagaacactggacgctggcaggaggcactcaggggtggcgtcgacgcaaagcgcagagcccaggctgggaggatgcaggggagggcaaggagccggccga

SEQ ID NO: 409332 - DNA, 122 bp, Homo sapiens
ttgcgcccagtcctcaatgggccccttcgctggggtgccagtgcagattctgcgcgtaaccgtccacctagcccaggcccagcctagttcagggcccccaaccccactcccgcgccccaagc

SEQ ID NO: 409333 - DNA, 122 bp, Homo sapiens
tcctttccaccgcggcccgcgcccacctgcccctctttggcctcaggttgttttcggacgcgtctggggccaaatgagcagtgaataggagccgcaacttcaagtcagcaggaaacaggaca

SEQ ID NO: 409334 - DNA, 122 bp, Homo sapiens
cttggggctggagctgctcaaggagacaggctcctcctcgcctacagctgtcaagacaggcggaccatcctgctgctcaggctgcagagtctgccccaatgagcacagtcctcaaaccccac

SEQ ID NO: 409335 - DNA, 122 bp, Homo sapiens
ggacgggctccgggcctcccagagacacttcacctcctgggatcttgctctaaggaagcccggtgcgaaggaggtggctttctcaggtggtcgcgctagatgtccaaggctttatgttcggt

SEQ ID NO: 409336 - DNA, 122 bp, Homo sapiens
atgcgtgtgaggatggctttcctcctggaaggtctcaaacggaaaatagtttcagtgtgacgagtctctggacaaagcaagtgggtcattctgactcagagtactgagaaaggatataaaaa

SEQ ID NO: 409337 - DNA, 122 bp, Homo sapiens
ccccctcttgatcccctctctcctcattgaaccctcccccatctctgatccgctcccctccgcaactccttcactgagccaaggtgttggaactgagaaggaaattcacctccatttcttgc

SEQ ID NO: 409338 - DNA, 122 bp, Homo sapiens
ctggtatcctgcttccagccagagaatgcacatcttcatgtagtggatttcctaacaacccggggagatgaaggtaggttgtttttcctgttttacaagtggtaaaatgagattcagggcta

SEQ ID NO: 409339 - DNA, 122 bp, Homo sapiens
tctaaccctacctgttgtgatccagattcttttgagccccagggaggccaggattaaggccggctcccctgggttccagccgatcaggggagtgtgggtggtttctcgggcctgtggaagga

SEQ ID NO: 409340 - DNA, 122 bp, Homo sapiens
ggtctacagccctgggtttccgggcccctttcctgagggctaccttcagtacacatttcccgagtgctgactgcacacctggtgctccctagccacctgctttatctctcccatgctaagct

SEQ ID NO: 409341 - DNA, 122 bp, Homo sapiens
aatgcttgcttttgaaaacacttccagctactataatgttaatactagaaattatgactgcgagtaagaggaggggaaaagtcattcaggtgccattttggctttccatgaacatggctata

SEQ ID NO: 409342 - DNA, 122 bp, Homo sapiens
gtggccatacccgtggtgttccagctgggggccgagcggtctgggggccggtagatgaagcgtcgcagggagctgacggcatgggagcccaccagtgtgtagcgaccgaaggcccggcagtc

SEQ ID NO: 409343 - DNA, 122 bp, Homo sapiens
gcgccgggatccgtcgcgtggatgtcaggtccgggccagggagccaaagcggcggctccgcggggaccctccacagttccggactccagcccagcgccggcttcagggcgtgcgaccctgag

SEQ ID NO: 409344 - DNA, 122 bp, Homo sapiens
gccgccagccgctgcgggcaaggctgaacaggcggaggtgggcagccggccagggaagcacggtccaggcggctacattcggcccggccatggcagcggcgcccctgaaagtgtgcatcgtg

SEQ ID NO: 409345 - DNA, 122 bp, Homo sapiens
aactaaggggcagcagtgggaagagaaacggaggggtggtgggggagctggcgctctgaacgcctgttccttctgttcagactagtctttgtttattttgcagcgcaggaaggcggaaggga

SEQ ID NO: 409346 - DNA, 122 bp, Homo sapiens
cccagtccagggctgaaagggtgcgggtcctgcccgcccctaggtctggaggcggagtcgcggtgacccgggagcccaataaatctgcaacccacaatcacgagctgctcccgtaagcccca

SEQ ID NO: 409347 - DNA, 122 bp, Homo sapiens
agaaagaagtgagtgatagctcacccacaggggctagatctgagtcagactggaagaagtcggcacactcagggtaacggcagctgcctaaaagccaagcgctgggcatttttatgttgcag

SEQ ID NO: 409348 - DNA, 122 bp, Homo sapiens
gatccacttactgatctcagtcctgggtttacaggggatactctgcagcctggggcaggccgaagaccctccaggcctcctggtgccactttggatatctgacaaccaagcagggctctcca

SEQ ID NO: 409349 - DNA, 122 bp, Homo sapiens
cagagtgcctttcctcttgaatgaaccttcacttgtcttacagatgacataagctgagagcgaatgccttgctgtcattcaactggagtcacacctgtgctctttcacatgcaagttacaaa

SEQ ID NO: 409350 - DNA, 122 bp, Homo sapiens
gaaaatgtagtccgggggcactacctgcagactcggggtgggaggtcgccgagcttctgccggttttgctgtcacgggtcggtcggcaagttatgaggaaaaagatcaggttgcttgatcca

SEQ ID NO: 409351 - DNA, 122 bp, Homo sapiens
ctctgatgaaatcatccctcgtttttgaacagcaattttggcttttccagtttctgtgtgcgctgttggtgcaggtgtgttactcttcttattttgcagatgagcaaactgaggcacataag

SEQ ID NO: 409352 - DNA, 122 bp, Homo sapiens
gaggtggggggcatgtaggcaaagctcaagtccagcagagcatcttgtcccagtctcactcgaggggcaggggtgtgggtgaggacagtcagtaccactgaggaagacagggagatgagggg

SEQ ID NO: 409353 - DNA, 122 bp, Homo sapiens
gcacgccctgctcgcccaggtacttgaagacgcgctgcatgtactcgttgtagaagccctcgcggtaggtggctcgcaggctctccgggagccgctggcccggcgcggcgcgcacgatcgaa

SEQ ID NO: 409354 - DNA, 122 bp, Homo sapiens
tagtccacccaactgcccactgggctcctcttgcctgtttcacaggtaccttagactcagcgggacaatgaacacatctgggctcttctgccaaaacacagatctcttccagcatcctttat

SEQ ID NO: 409355 - DNA, 122 bp, Homo sapiens
ctctggccaccccttccaagggtgtgtgtgtgcctgtgtgtgtgtgtgtttcagtggctgcggggccacaccttgggatctcctgagtggcaggtggcctgttaatgagtcctgacatcaga

SEQ ID NO: 409356 - DNA, 122 bp, Homo sapiens
ttaactatgaattttttaaaatcctctgtgtgggtttagggtcctagacttgtttgccctcggtttcattcctggttcttctttcccctcctctggtccatatcacagggacactaatccct

SEQ ID NO: 409357 - DNA, 122 bp, Homo sapiens
ccacccagattcaaggcacactccaggggccctggagtcttgtttatatttcactcagaccgcagtggagaggaaagctcagggcccagaatcttccccggcatctgaaggcagagctcaga

SEQ ID NO: 409358 - DNA, 122 bp, Homo sapiens
cttggagtgtgggaaggcagggcgggctacagggataggcagtcactactcccagcacttcgctatacaaagccaaaaaaaaaaaagattcttattttcacctacctcattttttagacgga

SEQ ID NO: 409359 - DNA, 122 bp, Homo sapiens
caaatgggtaatcagctcttcaaacattatttactggacaggccatccttcccctactaacgtaaatgtcatcttttcatattaaatttctccatgcgctgggtatttactcctacatcttc

SEQ ID NO: 409360 - DNA, 122 bp, Homo sapiens
caactgccttaggtttcttctggcctccctgggagttatagtcaaggagtgtttgtgaggcgcctttaggctccccataccgacagcatcttacttcggggctctctccctgcatcaaatct

SEQ ID NO: 409361 - DNA, 122 bp, Homo sapiens
cagttctgtcagcccatggcaaaactctaaaggttgataactctggcattaggactatgtcgctattaaaacatgtggctcttatgttattcatttcattgtcctttggatttggtatcact

SEQ ID NO: 409362 - DNA, 122 bp, Homo sapiens
gccttgtaatcgtgtatttgtgttgttccctttgtttgattctggtctgggcatccccagcgtgttagtacattgctcaataacgtgaatttgtttaattgaattaagcttggaagagtttc

SEQ ID NO: 409363 - DNA, 122 bp, Homo sapiens
cagaggaactggaggccctcgtcggcaggctcgggcatctgaccagccgcagtgggcacacggccgccctagctggaaggagccgggagctcagccaagtatatagccttccagcccgagag

SEQ ID NO: 409364 - DNA, 122 bp, Homo sapiens
gaactaggccaaactacttgcacgttccctcgagaagatctttggagtagacacaaaagccgcgctggcgcatgcgcacaaaaagcgccggcaattggggtcgcagctggagatgctgcggc

SEQ ID NO: 409365 - DNA, 122 bp, Homo sapiens
cagcgggtaagagccagcctgcagggtggatactaaatacaataggtctgtgaccacacacggccccacccccaggggcccaggccccgctgaccttcccaccccggggcacacccagctgc

SEQ ID NO: 409366 - DNA, 122 bp, Homo sapiens
gcggatgctgccaggaggacaaaatgttgtagcctgaggtttttattaggtgcacactgccgctgcactgcaagtgaagcattagactgaaatgagaggtggagggacccctagggactcca

SEQ ID NO: 409367 - DNA, 122 bp, Homo sapiens
gttgagaatttttatatgcttatttgccatttgtcaaacttatatgcttaaagccatttgcggtgccttatttgccatcttctttggtgaggcgtcagttcagatcttttgcccatttttta

SEQ ID NO: 409368 - DNA, 122 bp, Homo sapiens
gagttggggttcggctttcttctcctgggatttaagtgttatttgaaacagctccctgcgcggcccttttctcctaaactttgacagaaacttccctttgtccctaccaatcctcagtgagt

SEQ ID NO: 409369 - DNA, 122 bp, Homo sapiens
cctcaggccagaggcctcacaaagcgttgggtgagactcctcttgctcgtcatgtctggccgcggcaaaggcgggaagggtcttggcaaaggcggcgctaagcgccaccgtaaagtactgcg

SEQ ID NO: 409370 - DNA, 122 bp, Homo sapiens
ctcaagtgatctgcctgtctcatcctcccaaagtactgggattacaggcgtgagccactgcgcctggccgagttattgttgaatgggtagagtttccacttgggaagatgaaaaagttctag

SEQ ID NO: 409371 - DNA, 122 bp, Homo sapiens
cttcatccccgcacacactcagccaggtcctggtctcctgaggagtcttctctctgcacacgcagtgtgcacacacaaagattgactgttccctgcccccgccgctttctggtttaaccccc

SEQ ID NO: 409372 - DNA, 122 bp, Homo sapiens
cccctgtttcaagggataagaaaccctgcgacaaaacctcctccttttccaagcggctgccgaagatggcggaggtgcaggtatgggctccgcgcgggccggggcggcaaggggccgggtgg

SEQ ID NO: 409373 - DNA, 122 bp, Homo sapiens
aagacaagaaagaaaagaaagcttgcttcaagctgtactgatgaagaggccaatgtctcacgcgcattctcccatccaagtactaaccagacctgaccctgcttagcttctgagatcagagg

SEQ ID NO: 409374 - DNA, 122 bp, Homo sapiens
tgttcaaattactttatttgcccctggaatataacgctgacccaaatgcagtgaactgcacggcccttgtggggccccaactttgatgtgggcctcggcttggaagaggcgtctgttattta

SEQ ID NO: 409375 - DNA, 122 bp, Homo sapiens
cactcgtagaccaaggagaccatgaccagcaagaagcccagactttgggaggatttcaggcgacagagtgttgggcagagcaaatgtttcatctgaacactcccctgttccaggtgactgcc

SEQ ID NO: 409376 - DNA, 122 bp, Homo sapiens
gctgctgcctacctcccgaaggggtctccgcaccaagccagacaccgccgccatcttggtcgtgtcctctatccgctgccaaacgacaacagaggggccggcagacgtgagcaggccccgcc

SEQ ID NO: 409377 - DNA, 122 bp, Homo sapiens
tttcatcccccactgaagatggatcatcccacagcagcccaggactgaataagccatgctcgcccaccaggcttctttctgacccctcatgtatcaagcatctccaggtgacctactgtctg

SEQ ID NO: 409378 - DNA, 122 bp, Homo sapiens
gaaagagtgtttcaagttcacgtttgccccttcagcaaacgtcagcgtgtcgaatgtgaacgaaagctgggaaacaaaaggccctgcataaaaccaaggtgacagaaatgtccttttgttac

SEQ ID NO: 409379 - DNA, 122 bp, Homo sapiens
agccatctcccatcctgcgtcccttcatggcaccaccatgtcaaccctgccagtggcctccgcacactgcggaccacgccacccaccacggtgagcacccacggcagcacatgcacctctgt

SEQ ID NO: 409380 - DNA, 122 bp, Homo sapiens
gggcggggcgcaggggcggggcggggcgaggggctcgcagaggcctcgggttggccgagccgggagggaggagcattagtattagcatagcccccgccccctgcgcgcagcagtgcccagca

SEQ ID NO: 409381 - DNA, 122 bp, Homo sapiens
cctacttgcttcttgcaaaaaaaaaattcacttcttttaagaaatagtggtgatagttaacgggaggttttttaaatgtctttatttgccaaaataaaaagtagatagcctatttcaatccc

SEQ ID NO: 409382 - DNA, 122 bp, Homo sapiens
gatacggtcacctgtattcgctgtggcttcaacatcaacgttcggggtgagaggcttgtacgcaggggtcctggcggagggcgcagggtcggaagcttggggaactcaagatcggttgggtt

SEQ ID NO: 409383 - DNA, 122 bp, Homo sapiens
acccccacgtcactgactcacccgtgagctggtcgtaggagccgtccaggtctcgggaatcggacaaactctccttgcggccctggccccgcatggcccccggcgccccgctcccgcccggg

SEQ ID NO: 409384 - DNA, 122 bp, Homo sapiens
ccggcttgtagagcttttgccgttctccagcgctttacaggggttatcgcacttaagcctcggaacaactttaccaggtaggaactattactgttctcgttttgaagaccaggaaacctagg

SEQ ID NO: 409385 - DNA, 122 bp, Homo sapiens
agctgtaggatattttgaaccaggagggtttcagaattcctcttcaaggccatctgggtacgtggactgcaaagcacctggcagctccctgtgcccacgaagttactgtgctccatgttgtg

SEQ ID NO: 409386 - DNA, 122 bp, Homo sapiens
cgctggccacagaggccgcttccttggtcctcaggcagctcatgggatccaggaaggaaacgaattacccttttcctgccccgcctcctgcctgggccacaaaggcagggccaaagcccatc

SEQ ID NO: 409387 - DNA, 122 bp, Homo sapiens
gaaccaagtttgtgtgggtgcttcttcctgggggccctcgggctgcgccaggtgtgagaccggaatgccaatttggggaatctctcctgttctttcctttttaattttttctacttgtcctt

SEQ ID NO: 409388 - DNA, 122 bp, Homo sapiens
gcctgctccacggcaaggtggccacgcactgcctctgcagtcctgagcacaggctccatacgggacctgaggcctgggctccatgacacttgggctatgtgcttccctggtgcttccctcct

SEQ ID NO: 409389 - DNA, 122 bp, Homo sapiens
cctgtttacatgtaggataacagatagccgcccactgacggcaaggttgtaactcactcccgggagggccgccgccaccataaaacatgaaggccccgctcgggaagtctgtgccctggcag

SEQ ID NO: 409390 - DNA, 122 bp, Homo sapiens
caagacaggaagctacctggccttctcagtacaggtgtccttaaacgaccggttcaaaaacgaatagggaaggtggaatttctcacttccagccacagcctgcaacaaagcttcccagggcc

SEQ ID NO: 409391 - DNA, 122 bp, Homo sapiens
aaaccatggatggaggggacagctgtgctgccgccatctcccttacacagttgagtaaaccgaggcacagaagaaaatgaagtagccccagatgacgtaggaaatggcagaactgaagggaa

SEQ ID NO: 409392 - DNA, 122 bp, Homo sapiens
tccgcgctgatgggtgcgaggcgggaggacggtatccggggttgccacagctgcagccagcgcaccacttgcaggcggcactgcagctcgggctccggcgggggctggcggggctcccgtgg

SEQ ID NO: 409393 - DNA, 122 bp, Homo sapiens
aagcctccccatgtgcttttccctgcatcagaatgctttcatttcagtgctgaataaaaacgagatgtcatgggggaaagaggaagttagctgtgtgtatttgtcatccctgttgtgatgtt

SEQ ID NO: 409394 - DNA, 122 bp, Homo sapiens
ccccgcaccctcccgcccgcacaccccgcgcggcccgccaaggccacttacttttggggccgccgacctcccaattccctcagagggaaacgaaagttgtcacggcgtctcccctcgggccc

SEQ ID NO: 409395 - DNA, 122 bp, Homo sapiens
gattcctaaaattaatgtatgctcttgagtagagatgaggataaagactcaggtcggcggcgaagaactcgaagtagtcgtgtgctggcaacgggcgcagctgctcctccagctgctccttg

SEQ ID NO: 409396 - DNA, 122 bp, Homo sapiens
caactgtgacatgtcttcacccccagctcatgcaacagcagacaacagtcctgtccacctcgggcagctacctgagtcccggcgtggccttctcaccctgtcacatccagcagataggcgcc

SEQ ID NO: 409397 - DNA, 122 bp, Homo sapiens
ccaaacagaacaattcattccagcgatcaaaaaggagatactttaagcttcgagggcgaacgctttactatgccaaaacggcaaaggtgaggccccatgcaggaaagcacacgcgaggacat

SEQ ID NO: 409398 - DNA, 122 bp, Homo sapiens
gggtcagtcggtcctgagacaggcgagcatcatcccaaaggagtaggcattggcctcaatcgctgtcagtgatagaaagggagttgggtttggattcccaaatccagagtggcggagatagg

SEQ ID NO: 409399 - DNA, 122 bp, Homo sapiens
tgtgatggagtcacaaaaacctcagccctgcagaaggacagtgtggaagaactggtgggccgaggccgggggtttcaggccccagcgcggccctgagcgggggcttccctcaagcggggcgc

SEQ ID NO: 409400 - DNA, 122 bp, Homo sapiens
cagtggatcttgtagtctttgtactgccggtcctcggtggccgtcacatacagtgtggcccgttctgggaagatgaggctattgggcgccagccacttgtccgggcatagagcacagtgttg

SEQ ID NO: 409401 - DNA, 122 bp, Homo sapiens
gccgccatctttgagtatctgacgtacacaaggcaaagggcgcgttttggcgctggtgaccgggggtgaccgggggtgaccggggatggccgggaagatgaaagagcactgaaactgtccca

SEQ ID NO: 409402 - DNA, 122 bp, Homo sapiens
agcagtggggagtggagtttggctgcagcagaagccaggtggccatgctgtgggctctgacgccccctcaggtcagagcctccttctccttccctgactgtgtcaggcagctgcccttgggt

SEQ ID NO: 409403 - DNA, 122 bp, Homo sapiens
gggccaggggactactttgcaatacaaataagcattttctgtcccttagcagaatgcccacggtagccccccaagttaatgaaatgaaatgggttccagcaggccattgctaggttgagcct

SEQ ID NO: 409404 - DNA, 122 bp, Homo sapiens
ctgctggccctaaggccctcgagtcgggaggggggacaggggtcagctccactctttccccgagggaccatgtgtgggacaccttgagagactcccaccagccccctggagctggagtctga

SEQ ID NO: 409405 - DNA, 122 bp, Homo sapiens
tctactaaaaatacaaaaattagccaggcgtggtggcacgtgcctgtagtcccagctactcgaaggcttaggcaggagaatcgcttgaatcagagacagggaggctgcaatgagccgagatt

SEQ ID NO: 409406 - DNA, 122 bp, Homo sapiens
gcctctaattagctgtcaattacctcaaattaatcacctcctcgcctaattaagcattatcggcaggtgggcacaaagcagaccattgtgtgagagccatgagaaaagctgggctggcaaac

SEQ ID NO: 409407 - DNA, 122 bp, Homo sapiens
agactgaggcaggagaatcgcttgaacctgggaggcagagcctgcagtgagccgagagcacgccattgcactccagcctgggcaaaaagagtgaaactccatctcaaaaaaaaaaaaaaaat

SEQ ID NO: 409408 - DNA, 122 bp, Homo sapiens
tgacacctagccgagacttctgtatagagaatgtgacccattagtagttttttatgagggcggtataatgttaccatgaaatactattcacaattgttctagaaacaaagggattttgtaaa

SEQ ID NO: 409409 - DNA, 122 bp, Homo sapiens
ctgccccaccagaaccgggggcggctggcagacaagaggacagtcgccctgcctgccgcccggaacctgaagaaggagcgaactcccagcttctctgccagcgatggtgacagcgacgggag

SEQ ID NO: 409410 - DNA, 122 bp, Homo sapiens
gttcctcctgccaccctactgcccttttctgcacagattctaagagatcaatgtctacttcgaatatggtgtctgtaattgccctccatgctccagaagggtctgactggcacaggggattg

SEQ ID NO: 409411 - DNA, 122 bp, Homo sapiens
caactcctccagcaaaggaccatggaatgtggaaccttgcccagcctgctgctcaggaggcgattgctcaaggctgtcttatgcagaggaggtcaacagttgacccatgaaccatttaaact

SEQ ID NO: 409412 - DNA, 122 bp, Homo sapiens
tagaactgaaaagtagcacttaccagggaaattggcttcataaaaatttagaactggcttcgggcagttgtgacctctaactgtaatttccttgcttcttctgtatgtttccacctcttgct

SEQ ID NO: 409413 - DNA, 122 bp, Homo sapiens
gtctctacactcagtacccctgggctgggctgggcagctgtagatcgcaacacattttcacgccttcctcttgagcctttccgtgggttgtttgcatgctcagagtgtgtgtgggctgtgga

SEQ ID NO: 409414 - DNA, 122 bp, Homo sapiens
gtccttctcgctgtagcgctcctggctggcgcggcgcggcaggaagaaccagcgctgcagcgtgtcactccagcaggcagactcatggatgaggtagcctgggaaccgggtgaccgcgggtc

SEQ ID NO: 409415 - DNA, 122 bp, Homo sapiens
gcctggcaggggggaacacggcgggggtggggaccgacgcggggcttggagcttggcagccgcgggggcgcgcgggcgcagccagggtgggaaagtcagtggcagaagacaccctggggagg

SEQ ID NO: 409416 - DNA, 122 bp, Homo sapiens
atacacacacaggtagcgaggaggccggggtgttaatacacacacaggcagcgaggaggccggggtgttaatacacacacaggtagtgaggaggccggcgtgttaatacacacacaggtagt

SEQ ID NO: 409417 - DNA, 122 bp, Homo sapiens
ggcaccagccttgagtgtcaggcatagtgccaggtgcacaagaagaaagcaaggtccctgcggatctcatacagcccagtctggggaagcaggggagcccctcttgggtatccgagttggaa

SEQ ID NO: 409418 - DNA, 122 bp, Homo sapiens
gatttaatgctaatctcattttaagtaaaatcacaaactttctttgtaaaaaggcaatcacgatatcttcgtttaacctaaattctgtattattttattgagtgttaaagaacacatattac

SEQ ID NO: 409419 - DNA, 122 bp, Homo sapiens
ggggccgcggaggggaggcgggaggcgggctctttgcggattagcataaacttggggccgcgccgctcgccgccgccagcccctcgccccagctccgagcggacggccgaggagccgcctgc

SEQ ID NO: 409420 - DNA, 122 bp, Homo sapiens
tgcagggggtctctgtgctgctgctgcaggtggtgctgctgctgcggtgagcgtgagacccgcacccccgaggagctggtaagaagccggcggagtcggcctggggagggggcggttgctaa

SEQ ID NO: 409421 - DNA, 122 bp, Homo sapiens
gtgttctgatgagcttcctgggagaccacacattagctctgtcctgcaggactgcctctccgcataaggcaagcccattaagtcggctggaacattgcacactgaaatagaatagatgttca

SEQ ID NO: 409422 - DNA, 122 bp, Homo sapiens
tccacagagaaggggcaggaccttccctccccgtccgggctggctaggcggcaacctcgccgtggaggcaaatccttccacctggagccgaaactccgcagagatgataaatctctcctcgt

SEQ ID NO: 409423 - DNA, 122 bp, Homo sapiens
cgctttgttccctgcgcggcggacgaacgtgctgggaccggggcgcggcggggcctgacacgaccgcacgggcagtacggccacgtgcgcccccaaccccacctccgaaccgcagggccacc

SEQ ID NO: 409424 - DNA, 122 bp, Homo sapiens
ttcccgggttcaagcgattctcctgcctcatccttctgagtagctggcattacaggcgcgcgccaccacggccggctaatttttttgtatttttagtagagacggggtttcaccatgttggt

SEQ ID NO: 409425 - DNA, 122 bp, Homo sapiens
gcaggagttgttccaggccccagacctgcgtgggatctccgagcagagcctggtggtgtccggcgtgcagcatcagtccaccctggagctcagcgaggtcggcgtggaggcggcggcggcca

SEQ ID NO: 409426 - DNA, 122 bp, Homo sapiens
ggcccaacgcagtggctgtggctcctgcggcccaggctgctcaggacgttcctgggaggccggtgaggcactcggaggcggcctggggtctgcctacgcaccttgggctggatgaaggccat

SEQ ID NO: 409427 - DNA, 122 bp, Homo sapiens
tgatacacagtgacccagaccgatagaactcatgaattaaaaacaaatgttaatccatttcggcttcatttctatccccgagatttcctaatggttttgtttcccaatccatttgaacaaaa

SEQ ID NO: 409428 - DNA, 122 bp, Homo sapiens
cgtgtgaactcagcgggatccttgctgactggagtcccatggggaagcatgacggggagccgggaagcgctggtcgtccgaacggggcgggagcctggacaacaggggtacgaggacccaaa

SEQ ID NO: 409429 - DNA, 122 bp, Homo sapiens
cgcccagcgagttgtggagccgcagctccgagtgtggaatccgccagccccgagaggaaacgccacacttcaccaccacttcctcagcgcgtgtgctgtgcctgggtccgtgacaagctaag

SEQ ID NO: 409430 - DNA, 122 bp, Homo sapiens
ccctggccccagatgacccccagggcaggaggtccatgctctaagccctagggcaggggccgcagtagcaggacttggtcaaaagtgctggtgacagctgaggccggcccctcttccctgca

SEQ ID NO: 409431 - DNA, 122 bp, Homo sapiens
gggctggcgggcgagccggcgggcgggtcggcgggccagcgggcggggcagcgcgggaagcgctaggcgctcatgcactcggtaaccttcaggcgccccggccgcccgcctgcaacctgcgg

SEQ ID NO: 409432 - DNA, 122 bp, Homo sapiens
cccgcgccccgcgcccctcgccaacccccggtgcgagcccagggcaccgagccccgcagccgctcaggcccacccggtgcctgcagccagcgcacactgggtgctgggaccagcactgagcg

SEQ ID NO: 409433 - DNA, 122 bp, Homo sapiens
tagagtctgatcactgcgcatgagcagttcaaggccacgctgcccgaggcggacggagagcggcagtccatcatggccatccagaacgaggtggagaaggtgattcagagctacaacatcag

SEQ ID NO: 409434 - DNA, 122 bp, Homo sapiens
tgtgtgtgaagggtttcttgtgtcctccgtgttcccctgtggaagcgagtggaggtgcctcgagcctgcacacaagatactctcaggagaccctgagctcccattgcgcctgtgaaaggaaa

SEQ ID NO: 409435 - DNA, 122 bp, Homo sapiens
atctctccctcaaacaagaagggcttcctttaatagactttaatatagctcatttacaatcgtatgaaaatccatcaagatcaatcatgttgcacaatccctaaaggataaaactgagggaa

SEQ ID NO: 409436 - DNA, 122 bp, Homo sapiens
ctcttgtgcatgtccccagagtacccgctacccaatccagcatccagagtccaaccactccggacccaggaccaactgctcaggttcctcccagacccaaggctcctggcccactgagagtg

SEQ ID NO: 409437 - DNA, 122 bp, Homo sapiens
gacaggccagcacacagtaggcgctcaaggagccggggacagaggcgagggcggcccactcgtggagcgagggcgacacccagtggccatgtggaaaatgacctgctcgagcccaaaggcgg

SEQ ID NO: 409438 - DNA, 122 bp, Homo sapiens
gcagccacccaggcgagacgctgccctgacactgcagtgatgtgcgtgcttggcaccaaccggtggcctggctgctgccctggagacagggacaatggctgcatcagccacccatgggttac

SEQ ID NO: 409439 - DNA, 122 bp, Homo sapiens
ggtgctcggaggcagggggcgtaggggccgggctgtccggcgctttagcttagcaggcgacgttgcgggccctgggcgccaggagagcttcccggagtcgaccttcctgctggctgctctgt

SEQ ID NO: 409440 - DNA, 122 bp, Homo sapiens
tagccccacctactagctctccgttccaagtcctaaatcactgggaatgtaatagacagacgaacgggagtgggcggagcgggcgccggatgtgacgtttccggaacctccgggtgtcatcc

SEQ ID NO: 409441 - DNA, 122 bp, Homo sapiens
ccgagccgccgcagctgctccaggcccactgggcggccggggtcggggcggtggggttgccgcgggtcgcccggggcgtcgtccatataccaggcctgcaccatgacgcgcagtgcgggtgc

SEQ ID NO: 409442 - DNA, 122 bp, Homo sapiens
tgtcttcctgctcttgggatggttggctggtcccccatctcaggaatccactctaatctgcggctctcggccatgaagcagcagcagtgatggggcttttttcctgcgtccaccagccatct

SEQ ID NO: 409443 - DNA, 122 bp, Homo sapiens
ttggactctattcctcggggatgttggaggaatgacttattgtcatctgaataagaacttcggttaaaccagtctagaactttaaatatggaatcatcagttgacttctttatctcagtggc

SEQ ID NO: 409444 - DNA, 122 bp, Homo sapiens
ggtgatctgcccgcctcggcctcccaaagtgctgggattacaggcgagagccaccactcccggctaggaatattttcagaaataattcccaaaccctcaaggatgggtccatctcttgctgc

SEQ ID NO: 409445 - DNA, 122 bp, Homo sapiens
agatccccagtgttgtctctcccagaccaaagtccttcctttacaattggccacatcaaacgaatcaaagtcaaggcactccctactccccaactcttgctccaaattctcagagcttgggg

SEQ ID NO: 409446 - DNA, 122 bp, Homo sapiens
agacatgccctggtttgttaataagtccaaaccttatccttcctggtgctgggtctgacacgtttccatcatggtttccaatagaattgagaataccatctattatttatttattcattaaa

SEQ ID NO: 409447 - DNA, 122 bp, Homo sapiens
ctgtctagaaagaaatctgtctacctattggatgaaagcatatcatttttaacaacagtacgttttctgcttacctgataaccacttgccaggtagtcctccaccatcctttctacctttgt

SEQ ID NO: 409448 - DNA, 122 bp, Homo sapiens
gaggaaagagaggctcaaagagtttgccaacctgcccaagaccatacaacgagtacactgcggagcctggagtcagacgtggctctttcttcaaaatgtgaattattctcactgcaaagcct

SEQ ID NO: 409449 - DNA, 122 bp, Homo sapiens
gaaccaggtcaagtgcactccgagcaggacagtaggcagatcctatctggcgcatgcgaacgcttctgtgccagttccttgaagagcaggcgcagactcaaggctgttgcttccgcccttac

SEQ ID NO: 409450 - DNA, 122 bp, Homo sapiens
cgggatgtgctccgcagaagcagtgaactcttggtgaggaagctccaggggactgagcctcggccctccaggtatacatggaagtcaagatacagtaaagtggccgggtgcagtggctcacg

SEQ ID NO: 409451 - DNA, 122 bp, Homo sapiens
agtcgctccgggttggctgcgccagtccagagttaaactttcagccaatgaaaaagggcgcgaggcgtgacgcacggaaacgtcatgggaattcccccctccggggggccgagaaggggctt

SEQ ID NO: 409452 - DNA, 122 bp, Homo sapiens
agctccggcaacaacaccttctccccggccggcttcagcaacttgcgtctaagtggtggacgccgcgaagagactggcgcaagctccgaagactttcggccttagaaggccccgcggcttcc

SEQ ID NO: 409453 - DNA, 122 bp, Homo sapiens
gtccgcacggggaacccgggaaccgtgctctgcagggccacatggggaacactgggaacccgggaactgtgctctgcggggccacacggggaacctaggaacccgggaacacgggaaccgtg

SEQ ID NO: 409454 - DNA, 122 bp, Homo sapiens
gataagatttttccgggggggctagcagctgggagattggggtcgagtcaccgtgggatacgggctcaggttctgaagacgaagagaaaaatccaagaagccggcaaagaaaatcacccctt

SEQ ID NO: 409455 - DNA, 122 bp, Homo sapiens
agggtggcaacaggagagcattaaacccagcggggggttgctgcagtgggcacagtccttcggtccctgctttataccttgtgattcagggttctcagcaacccatgccatgaggaatcctc

SEQ ID NO: 409456 - DNA, 122 bp, Homo sapiens
ggcaccaatggcccaggtgcaaccacagctctgaggccacatgggcatccccctggcaggcgtggcccacacctgcactgtctggtctgacacccagaggccctggcaagaggcaggtatcc

SEQ ID NO: 409457 - DNA, 122 bp, Homo sapiens
tatgaaatacacacacattcgtgataaatagctgaacaacctctgctggtggacggctcccgggtttgggggatttttaaaatcagaaactgaggctcggctgggcgcggtggctcacatct

SEQ ID NO: 409458 - DNA, 122 bp, Homo sapiens
ctcactgggcacccaccaggccctgggctatctatttaagtttattatccaacttcatcccggccgtattccagatctttccatccccattctattgacgaggagcctgaatcttagaggag

SEQ ID NO: 409459 - DNA, 122 bp, Homo sapiens
agacacagctatgccccttggatgctaaagaaatacgaggaagaggaaaatgactcagaacgggttggggatcaaattcttaaagacagattgtggggagaagctagaaaagaagacccaga

SEQ ID NO: 409460 - DNA, 122 bp, Homo sapiens
acctcctgcccgcctttgggtcgccgcgactaatcccgccctcggagggcggctagacaccgccttctcgtcacctctccgccaatagtgctgcccggggaggggcgccaggagcaccgtcc

SEQ ID NO: 409461 - DNA, 122 bp, Homo sapiens
ctcctctaaactctatttgtggctcacgttctgcgttttctgctttcatcctccctgacacgtctatgcatggttgactcacacctgctttttcttttccacctaaattaagtggtccttaa

SEQ ID NO: 409462 - DNA, 122 bp, Homo sapiens
tgaagagttccatatgtgaattcaggttctctcaaattgttggttgaccctggaaatgtgcgtaacaaagaccccagggatcccagaagatcccagaactgctggaatgctgaatgaactga

SEQ ID NO: 409463 - DNA, 122 bp, Homo sapiens
gagcatggagtgccggactctgtcagccagagctgggacgtcatctggtgtcagcccttccgtgggcactgggggcagcacccgcacctgacattgtcctggggcaaggggagcaccatcat

SEQ ID NO: 409464 - DNA, 122 bp, Homo sapiens
cgtccagcgtttgtccgtggtattgagcgttctgtgggtcaaattctcaaagcactcctgcgaaataggcctgcccattttgcagaaggggaacgtgaggcttggcgaagttaaagttaccg

SEQ ID NO: 409465 - DNA, 122 bp, Homo sapiens
aatagagctgcaggagggattcgtgcggggtcgggacggggtgggggtggggggggggggcgcggtgcttttttatacacagggtcagagaaggccgctgtgtgtgacgacatctaagcaga

SEQ ID NO: 409466 - DNA, 122 bp, Homo sapiens
ggaaacccgagagtgacctgaaagaagtggtgaccgcgagccgcttatgtggaaccaccgcgtcctgaccttggaggtgcgagtctgggaaaggcgcgctcccggggggagcgggccccggg

SEQ ID NO: 409467 - DNA, 122 bp, Homo sapiens
atcacatgtagaaagagctgtcacatacagggatcattagaggccttgaattaagttagacgtgcatgactaaagaggtccaatttaggagttagaattacacgctccaagattagttaaca

SEQ ID NO: 409468 - DNA, 122 bp, Homo sapiens
gttcgagaccagtctggccaacgaggtgaaaccccgtcactactaaaaatatttttaggccgggcgcagtggctcacgcctgtaatcccagcactttgggaggccaaggtgggcggatcacg

SEQ ID NO: 409469 - DNA, 122 bp, Homo sapiens
tcggagcctcggttccccccttacagcgaggtgtcgctggggtgaactggtgggaactcccgcctcggtccacctcccgcacagagcatgcgtcgcgttccagctggaaccggtttggcgag

SEQ ID NO: 409470 - DNA, 122 bp, Homo sapiens
agtagttgtggagagatgagaagaatatatgcagcaaaggtgctgtgagcccagttccaacggctgtgttctggtaatcgtgcagaacagcatgtgggctctgggccttggcaggtgcacag

SEQ ID NO: 409471 - DNA, 122 bp, Homo sapiens
taggaccctccgagccaggtgcaggttataatctcgtggtgcgccgttttttaagcttgtcggaaaagcgcagtattcgggtgggagtgacccgattttccaggtgcggtcctcaccccttt

SEQ ID NO: 409472 - DNA, 122 bp, Homo sapiens
aaagagcctggcccagagaagacactcagcaaacatttgttcaataaattattggagatacgtacacacatactctactactgtggacacttatgttgtttctatcttaaaattatgattaa

SEQ ID NO: 409473 - DNA, 122 bp, Homo sapiens
acctgcagattcctacctgtgtcctgggactcatcctcactttggggaattctggccaagcgggtggggagagagagatttggtggggtggggaagcacaggccgattctgtaatcagtctc

SEQ ID NO: 409474 - DNA, 122 bp, Homo sapiens
ttacatttgtgtttgctttgtcaaagatcagttgcccataagtacttggttttatttccgcgttctctattctgttccattggtctctgtgcctatttttataccagtaccatgctgttttg

SEQ ID NO: 409475 - DNA, 122 bp, Homo sapiens
catccacctacccccactgcccatggaaaaattgtattccacaaaacttgtccctggtgccgaaaaggttagggaccctgttgtagatttatgtatcctacgtgtctactattttgtatcct

SEQ ID NO: 409476 - DNA, 122 bp, Homo sapiens
ccaggatcagccagacctctctgcctgtccctggccctggctctggcccccagcgggactcggtgagtgtgcccgaatgtctggtcctgacctggctgtgtcccttgcagcaggtgcctggg

SEQ ID NO: 409477 - DNA, 122 bp, Homo sapiens
tgtccggttcattccagtcaccgaccactccatgaatgtgtgtatgagagtggagctttacggctgtgtctggctaggtaggtcactagcccaggaagcctatagactttattaaaaactcc

SEQ ID NO: 409478 - DNA, 122 bp, Homo sapiens
gaatggttaggcaaggagaggtttgccgccatcacgccacagccatgactaattaatcgccgtagatcgagggaaggagagcagcaaatggcctcagctgtgtgggtcccgctcggtcatgg

SEQ ID NO: 409479 - DNA, 122 bp, Homo sapiens
gacagcgccgtcaggggctcggcagacgccatggcgccgactggggctggctgcggggggcgcaagagagacaggtgagggccgggcgcggtggctcacgcctataatccctgcgctttggg

SEQ ID NO: 409480 - DNA, 122 bp, Homo sapiens
gggagaacggagtgtgtgactctcctctgatagtcttggaggaactgatgtcactgcccccgcacccctcttgtcctattctaatgtcatgtctttccctatgtctttccaccagtgcctgt

SEQ ID NO: 409481 - DNA, 122 bp, Homo sapiens
cccgcgccacgagccagcaggggcccgagctcagcctgcccagctgcaaggccatgttcccgcactatcacctggagcagtgcctgcgtcccagagccctgcgtttgagccccccacccaga

SEQ ID NO: 409482 - DNA, 122 bp, Homo sapiens
tttcttccgccccagcggagtgcgctggggcgcgccagggctaggcccgccggaggagcgcgtccccagccttccgcgcacagagccgcatcccgccccgccctgcgctggactggttcaag

SEQ ID NO: 409483 - DNA, 122 bp, Homo sapiens
ccctccagagtccacagttgcgagactcctctgaagacccctatccagagtccacagttgcgagactcctctgaagacccctctccagagtccacagttgacttcctcctcagagtcctacc

SEQ ID NO: 409484 - DNA, 122 bp, Homo sapiens
tttccccacctcttttagttttaactcatgaattgttgaaatacagtccaatcaactgggcgaggacataaatgcactaccatttcgttcttctatacttcagactattttatattagcatc

SEQ ID NO: 409485 - DNA, 122 bp, Homo sapiens
tgcgcatggccaatcagacgcgagtgtggcctcccggcgtcccgcccactccggcgcctgcgtcattttgggcaccatggcaacgaagtaaacaagcgggtaaataatagacccctgacagc

SEQ ID NO: 409486 - DNA, 122 bp, Homo sapiens
agggcctgccgcctgcgcagccgccctccgccctcgcctcgccatagcggtcatagatatcgcgtttctacgcgtccgacaacacctcgtaggcctcagccacctgcttgaatcttctcacc

SEQ ID NO: 409487 - DNA, 122 bp, Homo sapiens
ccttcaggaagcagtgttgtggtggttcccatggtggctcggggggatgttagatcctcccgccccctccctgccaatctccatcagccctcacagccccagttccaataaacatacaatct

SEQ ID NO: 409488 - DNA, 122 bp, Homo sapiens
gtttctggacagtaaaattctttccttgaaggacattagggccaaaatgggcaaggattccgagattggtacatcgagcgttatcttccaactctcttttctaaatgggctcatttagtaat

SEQ ID NO: 409489 - DNA, 122 bp, Homo sapiens
cagttttgtgctgagtaaagaacacggctgttactgacagatggacttgggtcagaatcccgatttcacccttcctttgctgtattaccttgcttgacaggagggctgctggtcacatacag

SEQ ID NO: 409490 - DNA, 122 bp, Homo sapiens
catattcatagttgagaaagatgaggcagagacggtagtgaccggcttgagcctagactgcgccaagcttgccagagcagagccgggtggaaactgtcttcctgcaaagccaggttttcctt

SEQ ID NO: 409491 - DNA, 122 bp, Homo sapiens
tcatctttgaactgtccccgccttctcccgccttgacttgtgaccctaggccctttggggcgcctctgacccagctagccagatcccggacccaaaccatgttccctgtgaaggtgaaagtg

SEQ ID NO: 409492 - DNA, 122 bp, Homo sapiens
ctttatttgttgatgaagctggaaagagtccatttgacgtgtaacctggtctccgctaagcggttgttctctattcttgtcaaatgtgaaggcttcccaagcctggttatgcattgttggct

SEQ ID NO: 409493 - DNA, 122 bp, Homo sapiens
aaggcggaaggactccccttttgcagagcaaggagggcgacggcccagcccggggctccccggcttttgcagcttccctgcctcgcaatttgcaaggaatgtggggtgcaagagcaagtggc

SEQ ID NO: 409494 - DNA, 122 bp, Homo sapiens
aggcgtggctggatcaaggaccaaatgtcagcttcagggatctgatgttctttatttcaccgctaggaggaaagggcttctggtgtttgtgccccggttttgccatttgtctttctgtggat

SEQ ID NO: 409495 - DNA, 122 bp, Homo sapiens
ctctggcctcggatctactgtagagcacccctgcttggtacagacatactcaggggctaccgtgtcttcactctccagcctgaggtggtgaaggcaggatgctctctctaagccagaccaga

SEQ ID NO: 409496 - DNA, 122 bp, Homo sapiens
gatcctgtgatgcacaaggccggccctctccacaaacacagaatctcaccggaccccacccgatcctgatgcgcggccggccctctccacaaacacggaatctcaccggaccccacccgatc

SEQ ID NO: 409497 - DNA, 122 bp, Homo sapiens
gtgctgtgagggcgctattgggctgacatgagtgacgtcacccagctcttatcccagccccggcatcacgggacttgccctggcagcaacttacctgcctggtcactgtcagtccagaccct

SEQ ID NO: 409498 - DNA, 122 bp, Homo sapiens
atgagagccacccctaaggcaatcaccccatcacagtggacagtgaggcacggcctgcaccggggcatcctccccttcatagcatcttggtttccagccctcggggcctgggaagtggctca

SEQ ID NO: 409499 - DNA, 122 bp, Homo sapiens
ccagctgattctagatttcaggaaaacgtaactataccatggaaggaagtccagggtgaacgtgctccccccgtgtctaccacagaacatggaactctccaagtggaaccacccagctgaaa

SEQ ID NO: 409500 - DNA, 122 bp, Homo sapiens
cggcgactgcgcggcgccgagagctctcgggggcgcggcgggcggttcctgcctcgcgtacggattggggcccgctcggccccgcccgcacacgcctcctacttacctgagcggcccgggtg

SEQ ID NO: 409501 - DNA, 122 bp, Homo sapiens
actttcgaaagatgactcctccaagagtcttgttttcaccagacaggaactgacaggtggcgttactgacgttggaacagcctttcagcacgagactcttagactcaatgtctgtgaatgca

SEQ ID NO: 409502 - DNA, 122 bp, Homo sapiens
ttttggtgataaaggagcagacttgatttcctccttcttctgcaaatagcctggcagattcgagagtctttttaggtttggggttggatcaggagtagtgatagagaactgtgcaactggtt

SEQ ID NO: 409503 - DNA, 122 bp, Homo sapiens
ctttgctggtttggtagtgctgggcccagggaccagccatcacaggggcacttacacagccgttcccctccggtgcacatcaaagcaggagttactgatctttgctacccagaatgttaacc

SEQ ID NO: 409504 - DNA, 122 bp, Homo sapiens
ccttctgcagtcacggtgtcgtcctaggctccctggagacggtggcagtggtggcaggtccggctctcccatgcctggccttctgcttggtggggtgggcagcaggtcctgggatgtgggca

SEQ ID NO: 409505 - DNA, 122 bp, Homo sapiens
acaggagccccgccgggtggaccagctggaatctcagagagcgccgactctgaaaatacccggctctgcagaagcacgctgggcccagggggcttctagactgacagctccatttatcaact

SEQ ID NO: 409506 - DNA, 122 bp, Homo sapiens
gtgtgtgggtctgtgctttctgcctttgcagtgtgtggtaatcgagagggtgggtcggcgcgtgctgctcatcggtgggtacagcctgatgacctgctgggggagcatcttcactgtggccc

SEQ ID NO: 409507 - DNA, 122 bp, Homo sapiens
agaatcgcttgaaccttggagttgaaggttgcagtgaggcgagatagcgccgctgctctccgacctgggcgacagtgggagacttcatctcataaataaataaataaataaatattactttt

SEQ ID NO: 409508 - DNA, 122 bp, Homo sapiens
ctggcatacaagcaacctgggggcatcaccaaccaatttcttctggatagtctgaagcatcgggagtggggagtgaatgatcctttgctgcctaactacctcaacggcttcgagtgtttcgt

SEQ ID NO: 409509 - DNA, 122 bp, Homo sapiens
tggcggctgcggagacggttcccgagagcccggcatgtgcctggcgtctgcacacgtgaccgcactgtagcacgtgatggcgccgggaactcccgacagctccccgcaaaactggcgcattt

SEQ ID NO: 409510 - DNA, 122 bp, Homo sapiens
ctgggcgcgctcctccggtgtctgcgctcagccgctctcctcttctctctcccgcccgcccgcagcgccatggtctggcagtgtgtttagcgctcaccaccatgtgcaccagcttgttgcta

SEQ ID NO: 409511 - DNA, 122 bp, Homo sapiens
gcgttgaccttcagaaagctactgacccaatgcagtagacttgagtcaaagtggggattgcggcgacaggggagcccatcaaccagaagaggacgggaggtggcgcgtggggggcgggaggg

SEQ ID NO: 409512 - DNA, 122 bp, Homo sapiens
aagaggactcctgggatggaaggtgcacacccaggcagctggaagcgctcagtcacagcccggggactcgtcccctctgcgatacggattcggagctgcttctgaagcagaatggtgtcaga

SEQ ID NO: 409513 - DNA, 122 bp, Homo sapiens
ctgtaattatccttctttgctaagctaaaggttttcctttcccaaccgtaagacagatttcgacttgagtgagagctgtgaacttttataaaagtgaaagggaagagaagaaatggcaggct

SEQ ID NO: 409514 - DNA, 122 bp, Homo sapiens
gaaagattcaccagtgcaaatcctacatggaataggagatgtaaaattccctgaaccactcggaaagtgtgaccacgctgacaggcttgaatctcaaattttaattaaggccatcttgcttt

SEQ ID NO: 409515 - DNA, 122 bp, Homo sapiens
gatcccagcaacatgccactggccgggagtcactccctccctcaagtctcccagcctgcccgatgctgcagatgctttgggtaaagctcgaccaagatggagaagtcagtcttgagccctgc

SEQ ID NO: 409516 - DNA, 122 bp, Homo sapiens
gcaaggtggatggatgatgatgatagatagatagatagatagatagatagatagatagatcgatcgatctatctccacatcagggaggcacatcaagccagatgtttaggaacacagtgttt

SEQ ID NO: 409517 - DNA, 122 bp, Homo sapiens
gtgaccttgagcgagaactgacaagctgcgtccttgcagtcctcgtaaaggtcgaagcgccggaagccctccagcatcatgccctcgtccagcatcttccgggaggacgccgtcttccgccg

SEQ ID NO: 409518 - DNA, 122 bp, Homo sapiens
attctgaaaagccagattttaatgctactgggcgtagtcactgggcgcgttccacctcttcgtttcattgtctggacgaaatccagtttccatgctagtgtcccttcccttcttcacccgct

SEQ ID NO: 409519 - DNA, 122 bp, Homo sapiens
ctcacggtgcctgctccttctcagagtcctcatttctccctttaacgcacgccctgtcagcgcctccgtctagcccgtgtcctccagaccttcgaggtcaggggcctcaattcctggcacag

SEQ ID NO: 409520 - DNA, 122 bp, Homo sapiens
ccagggcgggtccggacaacagtcagcagagagaaatctttgggaaatcctcctagtaaccgagagagatacacacagagtgagaggcaaagggagccgccacaacccctttcctcctggtg

SEQ ID NO: 409521 - DNA, 122 bp, Homo sapiens
cggggtgtgaggccggcggggtccgggtagggcatcgctgttgagtctatcttctggttccggccttttctttccgaagacctcccgctgcggccaacagccgggccacttccggggcttct

SEQ ID NO: 409522 - DNA, 122 bp, Homo sapiens
tgcccgtcgcgggcctcccaggcagctcgcccagacccctcccccctcacctctcctcagcgcctcctcgtagctgaggaatccgatccgtgactccttggcacccatgctcccctcatccc

SEQ ID NO: 409523 - DNA, 122 bp, Homo sapiens
tttacttaatgtgaaatcttgggcatattcaccttcctgtgctttctctgaatcttcttacgtttcatttccctaatgtcttaattggggataataatatgtaatgatacctacgtcactgg

SEQ ID NO: 409524 - DNA, 122 bp, Homo sapiens
catctccgtgccggaccacggcttctgccagcccatctccatcccgctgtgcacggacatcgcctacaaccagaccatcctgcccaacctgctgggccacacgaaccaagaggacgcgggcc

SEQ ID NO: 409525 - DNA, 122 bp, Homo sapiens
gcggcccctgctgctactggccctgctgggctggctgctgctggccgaagcgaagggcgacgccaagccggagggtgagggagcgaaggccgggggcgggagcgcggatccgggcgggaggg

SEQ ID NO: 409526 - DNA, 122 bp, Homo sapiens
aatgcttccgtttacgtaggtgagttctctcccgtatccaatgaaatcctcagagcggtccgaatctccacttgcagattctacacaaagtgtgtttggaaactgctccatccaaaggaatg

SEQ ID NO: 409527 - DNA, 122 bp, Homo sapiens
tcacccaagctggccctccaccctggtccacacttacccagcacactctttctacccccacgcccaggccccaaagggcaaagagtagaagggacccaagcttgcttctctcttttattgaa

SEQ ID NO: 409528 - DNA, 122 bp, Homo sapiens
acagggtagagaataaatagtagtcaccattaatgttgaagagttatattcatatgtgtacgaggggtgctaatgaatgtaatttagtcagactttgaaacagcatttatcagagtttagca

SEQ ID NO: 409529 - DNA, 122 bp, Homo sapiens
cctctacctgttccctggattcttctctctttagacctgtcaccttgaagaaagcatgatcgattccaaacatcactgtaggcaaatcaccatagtacttgaactgagttactgtgaagaaa

SEQ ID NO: 409530 - DNA, 122 bp, Homo sapiens
ttttttaaactaagcaagcctgtaacatcccttcttctcagcaatcaactcatgaaggcacggaagtggcttgtgctgaggaaggcattcggagggagctatgggggcgggggaggtggtca

SEQ ID NO: 409531 - DNA, 122 bp, Homo sapiens
ttctgctcagggtaaagtgaacagcaactgggctgatgaatgttctctgactctcagcagcggaaggtgagggtgagtgaagggtgagtggggaggaggaggaagactgcaaatctcatccc

SEQ ID NO: 409532 - DNA, 122 bp, Homo sapiens
atccgcttccgggtctgtgccaatcggcgcaggacagaagcgggacctgggccagatccccgagaggtgggcggggcctgggcgaggccggggcggggtgcaaaggacaaggggcccggcgc

SEQ ID NO: 409533 - DNA, 122 bp, Homo sapiens
ggacgtcccccgcccgagggttgaagacagcaaaaccccagctgtggggagccggaggtgcggagtttccaggttctctcttgtcacatgtgagcgtctgtaccatctctggccctttcaag

SEQ ID NO: 409534 - DNA, 122 bp, Homo sapiens
gacttgcaactccccacttttagggagcgccgcagggtcatggctgcccaggtggccttgcgtaggcagcaggaggcgcagctaaagaagcacctgatgaggagaggggaagcctctcccaa

SEQ ID NO: 409535 - DNA, 122 bp, Homo sapiens
agcgagaggatcatggcggatggccccaggtgtaagcgcagaaagcaggcgaacccgcggcgcaataacggtgagtggcggaggggaccggggagcggcggagtcagggggagctgggcagc

SEQ ID NO: 409536 - DNA, 122 bp, Homo sapiens
aagctgcagtcagtcatcttgccccagtctggggttgttcctctgctcctgcaccactgtcgtcctgggacttctccagtttcttgagttggagctagagttttctagatcccgttttcttt

SEQ ID NO: 409537 - DNA, 122 bp, Homo sapiens
gtttcaaaacaacaccatgtttcgttctgtcctctgtgctcgtggggatttcacacaggccgggctctggaaggccaacctgaacctcctggcacactgtggtgacctccgggataccccac

SEQ ID NO: 409538 - DNA, 122 bp, Homo sapiens
ccactgtccagtgggaagactccctccaggacaaaaccaccctttccttcagggatgtgacgtgctgtgctttcgttgacagtcatgcagctgctagacatgtcacttcctagctctccatt

SEQ ID NO: 409539 - DNA, 122 bp, Homo sapiens
tagaatccaggaccttctaccctgcagagtgtggttttgggagagaagtgcaaaatcccacgacaggtgagttgaaggaatgggatatggagccacatccacttccaccccttggtatctgg

SEQ ID NO: 409540 - DNA, 122 bp, Homo sapiens
aataatagtatatacttctggaggttgcgcctgaaatggcatttagagggccctggccagcgcttggcatgtataggtgcttaatgaaagtttcttcttcatgactttggaacactcacata

SEQ ID NO: 409541 - DNA, 122 bp, Homo sapiens
cactaaagaggccctgcaggtggctgtggccaacttatgcagtggcttcgagtgaacgaacgtaattagtaattaagcaaagcgggcatccaggacattcagtttcatcttcctggcacttt

SEQ ID NO: 409542 - DNA, 122 bp, Homo sapiens
aggacttcttacctcttaaaggtcccatctcttaatactgttacaatggcaattaaatatcgacatgagttttagtgggacatttaaaccatagtaatgggataatatgacttttttttttt

SEQ ID NO: 409543 - DNA, 122 bp, Homo sapiens
tgagtgggcagattgctgagtgatatttacctgcctggtggatgattctaacatattttgcgtgtacgtctcttgggaatctggaactcaatgtatctatcagagaaataggctagggcagg

SEQ ID NO: 409544 - DNA, 122 bp, Homo sapiens
tctcagggaatccctccaacagtctaggaagtagctcttgggattgtgtccattttacagcggaggaaaatcgaggcagttgagtgacccagttggaggccatgctccacacagaacccaca

SEQ ID NO: 409545 - DNA, 122 bp, Homo sapiens
ggctccgtgcgctcacagctctccgtggagctctggcagagcccgcttcactttatgtcacgccgccaccacccccgccacactttccctccctccggggctgccacctcacctccttcatc

SEQ ID NO: 409546 - DNA, 122 bp, Homo sapiens
aattgttttttcttttaagatgcggatggacgtacgtgtgggggcatcccagcccagccacgccgaggctcggaagggctaagaccctcccactgccccgcacaaagatggctgctccctcc

SEQ ID NO: 409547 - DNA, 122 bp, Homo sapiens
aaccgcgcccccggggtggggcttgggggccgccctgggactcggtggcttctgcccgagcggaggtcagcgaggacccgggaggcagcgcctggatggagctggacggggagggctctgct

SEQ ID NO: 409548 - DNA, 122 bp, Homo sapiens
accggcgcaccggcccggacccgcttggcgtagttgcccttgcggaggaggcggtgcactcggcccacagaaaactggagaccagccctggaagagtgcgttttagccttggcgcgagcttt

SEQ ID NO: 409549 - DNA, 122 bp, Homo sapiens
cacctgccgccgaggacgctcctgccccgggctggaaggggcggaaaacagcctcgcgcacggcaagggcacacggatttcatccgatccgccaaagcttccgaagtcctgtccgaggccgc

SEQ ID NO: 409550 - DNA, 122 bp, Homo sapiens
gtattggcagcctgcggggagaccaggcagaatagaaacctcggatccctagctaaatagcgctcagggaaaggggaaccggagaattcgtgttcggaaagcaatgagatagttcttttcta

SEQ ID NO: 409551 - DNA, 122 bp, Homo sapiens
ctcaggggaaaagtctggaaagagaggggtccaagcctgagggcacttcccacctaaagacggtatctggggcagggaatgaatgatgtatttttagcatccagctacctggtacaaccact

SEQ ID NO: 409552 - DNA, 122 bp, Homo sapiens
aggctgggaggttccctgatggtcccaggaagggcgtgatgcagagcaaagagcaaaacccgctggctcctttttcatcaacttccgaaagatcctaaatcgttttggctgccaagtcagta

SEQ ID NO: 409553 - DNA, 122 bp, Homo sapiens
cggggccgccgctagtagtggcggcggcggaggcgggggcagcggcggcggcggcggaggcgcctctgcagctccggctccccctggcctctcgggaactacaagtcccagggggcctggcg

SEQ ID NO: 409554 - DNA, 122 bp, Homo sapiens
gtgaggttgaggaccatgtattctgagcatccttgaaatccacaggtccctgcagctacccgggtcctcccctcggagactcttcccgtggtcacccggctcctcctcccggggactcttcc

SEQ ID NO: 409555 - DNA, 122 bp, Homo sapiens
tcaggcagtaggcacttagtaagtgtgctctgattgcagtgccagacgtatgtcatacctcgagtaagaggcaaagaggcagagatgctgggagtatggagacggagcaggttatctcagtc

SEQ ID NO: 409556 - DNA, 122 bp, Homo sapiens
ggccacaagcttcggtttacttcgtagatagttgggtacaagtgacgctaggatgataggcggagtcaacaggttcgccagatacccatgagtatttacaagggggcggggcgaaagcgact

SEQ ID NO: 409557 - DNA, 122 bp, Homo sapiens
tctgaccacacagggtgcctgttcccccactccccaaagtcccactctctgaccttcagccggcacaaggacctcagtctgaagtccttatggcagggcaggcagtttgtgtgtgtgtgtgt

SEQ ID NO: 409558 - DNA, 122 bp, Homo sapiens
cggcggagggggcgcggtgtgggggggacacggcgtggggggcgcggcgggggggcgcggcgggggggcacggtgaggtgttcactgttcactccgcattctcttgctctgcttgatttttt

SEQ ID NO: 409559 - DNA, 122 bp, Homo sapiens
agacaccagcttggacctacctccaatggcattgagagtgataatgtgaaaaccatactgcggacttttttttttttttttttttgagacaaagttttgcgctgtcgcccaggctggagtgc

SEQ ID NO: 409560 - DNA, 122 bp, Homo sapiens
ttcatactttcttgctaccacctttgcaggcaaagagcagatcttgctgcagaaggattacgagtcggcgtcgctgacagaggtgcgggctctgctgcggaagcacgaggcgttcgagagcg

SEQ ID NO: 409561 - DNA, 122 bp, Homo sapiens
ctgctcctgggggcgcgtttctccggtgtgaggtgtggaaagttccacatggccctggcacgggattgggcaaggcctcgcctcagccccgggtgagagcagagggtgctgtgggtgagagc

SEQ ID NO: 409562 - DNA, 122 bp, Homo sapiens
taaacaagtactagcagtatctccatcagaaggttgttctgagggctaaccaagaaaatgcgactatagcatgcagcatggagcctggcccagagaaggcattcacgttagctattgttact

SEQ ID NO: 409563 - DNA, 122 bp, Homo sapiens
ctctctctccataatgagcacacagtgtcactgccaagggcctcttcacagtgtcggaatcggcactgggaaccctaaaagaaaaagtaaacagtgtagaaagctcaatatgttgacattag

SEQ ID NO: 409564 - DNA, 122 bp, Homo sapiens
tggctggaacacagtgcagggacacagccagggactgggacttgggagcaggaggccatccgtgggaggctgatgagagctgagcttctgacagcaaataaaagatgttactcttaactcag

SEQ ID NO: 409565 - DNA, 122 bp, Homo sapiens
ccacctggagagccctcctcttccagctcctcacctggttccatcctgctgtgagggaaccgagtcagggcagggtctgagacaataactacagatgccaggcactggattaaactgtggcc

SEQ ID NO: 409566 - DNA, 122 bp, Homo sapiens
taggagtaagatacctgggcccccggcctctccttcttgccctgcccccgcaccccctcccgcacggggacccggataactcctttcaacagaagtcttttgggagcacacgataaggcttc

SEQ ID NO: 409567 - DNA, 122 bp, Homo sapiens
cagcgtcattcaaggcacatcactcaagggtaggagcagcctcggccgaacgctcacccgcggcattgagcccagccagcagaagagataggctgacgaccgccttacctccagaagtcgga

SEQ ID NO: 409568 - DNA, 122 bp, Homo sapiens
cctgctcgcgctgcgctcggcgccctgcagcccagtgctgtgcgccgcagccgccgccgccgccttccccgcggccgcacccccgccggcccccgcgcagccccagcctccgcccgggccgc

SEQ ID NO: 409569 - DNA, 122 bp, Homo sapiens
tttaattttaaatatttttatagatgggggggggtctcactttgttgcctagactggtctcgaactcctgtccttaagaaatcctcccggccaggcgcggtggctcatgcctgtaatcccag

SEQ ID NO: 409570 - DNA, 122 bp, Homo sapiens
cgggctggaaaacagaggggacagccaggactggtgttgggtgtcagggaacagacggagcggactgcgtgggtccagccaaggaaagtgaagcaagcagacttgtttgggtcaaggttgcc

SEQ ID NO: 409571 - DNA, 122 bp, Homo sapiens
cgatgcacttttactgaggacctgtgtgctggcaggtgctgggggctataacctcactcccggcttcttttgtttaaccgcccagattcgtgaactgtgacttttcagggtgttttcaaaga

SEQ ID NO: 409572 - DNA, 122 bp, Homo sapiens
acttccaccgctttcacgcgacgaaggtcggaagagcaagagagagaaaggtaaacttcccggcaggggacagtgaattgcttttaattacctgctgtggctcgtcgccgtggatattggac

SEQ ID NO: 409573 - DNA, 122 bp, Homo sapiens
gttcctgtgatggtgttacactgctgggagaggaatgtcttgtcttcatccggttgcctgcgccactgttctggtggcgtctggcactggtgcaagacagagctgtgcttccccgagagtgt

SEQ ID NO: 409574 - DNA, 122 bp, Homo sapiens
actgccacttcccctcaccctggctctgaacctcctagtctctggcatccacatcccttccgtttcctgggaccacagcctcacagctgcactgtgctcagcatttcacaaggactgtcaca

SEQ ID NO: 409575 - DNA, 122 bp, Homo sapiens
ttaatcttaacaaaactggcctaaggctcaggtaggagttgacggaactgctggtgatgacgacaacaataatagctgccatttagtcaacatttactttgtgccaagtgcagtgctcagcc

SEQ ID NO: 409576 - DNA, 122 bp, Homo sapiens
aggctgctgggaggtgacaggacagccggctgggtccttggcatctgactcaccgctggccgcactctgggcctgaccgccgcgctcctccttgaggtccctgctggggcctatgggtgtgc

SEQ ID NO: 409577 - DNA, 122 bp, Homo sapiens
tggagctggcctcggcctcatccacccagcacacagtcacctgttgggagaagacaccaacgcccacagaatgggcagtcagttgggccattccctgcacctggggctcttccccatgcgga

SEQ ID NO: 409578 - DNA, 122 bp, Homo sapiens
aaccgcgtgccctggctcttcttgttccacacgtggacagcataggtggcactgagcagccgcggcagctcctcggggttgatgtcctcaaagtacttcttccagtcctgccaggggatggg

SEQ ID NO: 409579 - DNA, 122 bp, Homo sapiens
gggttcgcaaactgccgtgaaaaacagcaacagatatgatgtggaaatgacagatgaactcgttgggttacctttttcctctcatacctattcccaagcctctgaattgcccacagatgctg

SEQ ID NO: 409580 - DNA, 122 bp, Homo sapiens
gtctcttttccaagcgcactcacattattcatgcaaagttaatccccgccgcgtcacggccgcccgcccgaggatgtgcgccttccttggccaagccccgcagtctccaccctcctccgccc

SEQ ID NO: 409581 - DNA, 122 bp, Homo sapiens
ggagtgaagttacctagaagcctgaggttaaatgggcatggaaatgtggctacctaaaaacgtattttattttagtgaggaataaagaggatgaagaatagaagggttaactcaggatacaa

SEQ ID NO: 409582 - DNA, 122 bp, Homo sapiens
gtgaggtgaaggccacacatacaatcaggggtcttgagaggatttaaaatgtctagtgaccgggtgcagtggctcacgcctgtaatcccagcactttgggaggctgaggcaggcggatcact

SEQ ID NO: 409583 - DNA, 122 bp, Homo sapiens
gaggcctgccccagcctcaggaggaggagcctggcccagtccgttgccaagccgaagcagcggcatttggacaaagcagatcatctgcaggtattatatacatgggcagtgcaaggaggggg

SEQ ID NO: 409584 - DNA, 122 bp, Homo sapiens
caagatctcataactcattatcttaaggacaccaccaaggggatagtgctaaaccattcacgagggccacatataagggctcacacctgtaaccttcacacattgggaagccgagatgggaa

SEQ ID NO: 409585 - DNA, 122 bp, Homo sapiens
ctcctgtgccgagggcagccaggcggtggtggcttctcgtggcctttctgtgggctccaccgtgtgcagtgaccttcagcctgaggagggggctgcagcaggacctgtggctacggtaccca

SEQ ID NO: 409586 - DNA, 122 bp, Homo sapiens
cagctcataaaggcagtgtggacccaaagagagagcagcagcaagatttattgcaaagagcgaaagaacaatgcttccgcagtgtggaaggggaccggaacaggttgccactgctggctcag

SEQ ID NO: 409587 - DNA, 122 bp, Homo sapiens
caattacggtacttaaaaaattccctcataaaactatctagttcatcttctttctttactcgatattacgtctcactattatgagttctttgtatctgttctctgattcagtgtatttaata

SEQ ID NO: 409588 - DNA, 122 bp, Homo sapiens
agcactagaaagcaagcaatctgagaagccacatgagagatgagaggaagggaactagctcggcagggcatactcctggtttcacatgcaataaggaaaagaaatttttttcacttggagtc

SEQ ID NO: 409589 - DNA, 122 bp, Homo sapiens
tgtaaagatcttgctgcctttgagcaagcactgcaaatggggtaactggaacagccttgtcgcgtgtttccacccttcgtatgaggcaggtaccatgggtcttcaccaacagcacggcctgt

SEQ ID NO: 409590 - DNA, 122 bp, Homo sapiens
ttcccgccatctggcaactccctcccagaagggtgagtttggttcttggcaaatccccttcggacacacaagctcttttattaaaatataaccccactaacagattgcagactaggcacaga

SEQ ID NO: 409591 - DNA, 122 bp, Homo sapiens
gggactccagggtggccaaggcgcggaggtgactcaatgacattgaccggcctggatgcacgtgggttgctgagccgatgctgggaaggtacggggtttgcccggtgcaggccgccggaact

SEQ ID NO: 409592 - DNA, 122 bp, Homo sapiens
aggtctcacgggcccccaagcggggtcgcaggtctctagagttgtgtttccaaccacccacgccactttggacttctttgttattattaaggataaagggcaactttctggaaaattgtgct

SEQ ID NO: 409593 - DNA, 122 bp, Homo sapiens
actacgaaaaggggttggagtggtacaggtaggaccctgggctccgcgggctggtggagacgcgtgggggagacgcggaggggaagccgcggctttccacgcccttcgagcatccaggcacc

SEQ ID NO: 409594 - DNA, 122 bp, Homo sapiens
ggcccagtgcccagcttccccagcatggcctactcggctgcagccggtctgcccgactgccggaaaggcactgagctgggccagggagccacccaagccttgacgttggctggggccgccaa

SEQ ID NO: 409595 - DNA, 122 bp, Homo sapiens
cgtagtgacggggattgttgtgttgcagaaatccggcaatcgacctgaggacttgcgagccgctcagctcccgggacgtttggtgcgtcttctaagggcgtgggcgagtttacgcgggccag

SEQ ID NO: 409596 - DNA, 122 bp, Homo sapiens
gcaagcctggtccggggttttaggttgagcccaagcggcaatgcgggatcgccaccgggccgcgcgggcttgggagggtgacgcccgcgaggacactgcggcgtccggggcgggcgggcaca

SEQ ID NO: 409597 - DNA, 122 bp, Homo sapiens
gcgcagacacctcgggcggcttgtcagcagatgcaggggcgaggaagcgggtttttcctgcgtggccgctggccgcgggggaaccgctgggagccctgcccccggcctgcggcggccctaga

SEQ ID NO: 409598 - DNA, 122 bp, Homo sapiens
cattatagtaataatttgccttcatcttccatataccaactaagcatgtttaactacgaacgtccaaaacacttcatccagtcccaaaacccatgtggctccagattgcagcctcctggacc

SEQ ID NO: 409599 - DNA, 122 bp, Homo sapiens
tgcgtgcaggcaaagtcaggaattcaggcccctgacgtcagcctccagcgctcagggcaccgcacgggagaccaaggggagggggtggggacggtggggaggaaggagggggaaaggcacca

SEQ ID NO: 409600 - DNA, 122 bp, Homo sapiens
aagaagaaagtgaggcccagggtccaggagggctttaaccattggggccccattcctctccgagggcagaagccctggcgagggctccagggtctgcatcccctgaccaggggcctcaagaa

SEQ ID NO: 409601 - DNA, 122 bp, Homo sapiens
acactggaaagaagtgccttactctagtgggaaggggatacttcactgtaactagccccacgcagagagtatggaaagcattaaatcagcaccttgctgaagggttggctgcagtgactcgg

SEQ ID NO: 409602 - DNA, 122 bp, Homo sapiens
taagtctttataggactcttgggccccaagccaggtgataggtaggaacacctgtttgtacgtctcaaatgctccatgcagtttgcagaatgcgttttttttctggttttttttcctttttt

SEQ ID NO: 409603 - DNA, 122 bp, Homo sapiens
caggaacttgagggactgatggtgaactggagacctctcttttctgttttccaatagtttcgaaattgcagtcctccccccaccaattttccagggcatacagaatctgtgtgagtagaaat

SEQ ID NO: 409604 - DNA, 122 bp, Homo sapiens
atgtccacccgaggatggtagaggaagtcccgccctgacgttggtgaggaccaacggaaacgcctatttcctgggttttcattggcccagagccgccaagtttcctgggtaatgtagttccc

SEQ ID NO: 409605 - DNA, 122 bp, Homo sapiens
tttacccacagacatagcaaaccctgtcagtgaggaaaattccccatccttgagtgcccccgtcctagaagtttgggccatattatggaacaggggtctcttatttgaaaagagcacaagga

SEQ ID NO: 409606 - DNA, 122 bp, Homo sapiens
actgtgcggggaagaggagaaacgaagacctggagggctccctgaaccgtcctacggggtcgagcgacccaggggatgtctcactgaccctgccaaacagccaaaagggaatcgagttgaca

SEQ ID NO: 409607 - DNA, 122 bp, Homo sapiens
tttcaagccctaggtaaaagtgtgtcctgcctcgttactgggaagcaccatccacacacacgagcctacccagcctggggccctgtgtgccagcacctactctttttttttgagacggagtc

SEQ ID NO: 409608 - DNA, 122 bp, Homo sapiens
tgtaagcagcttagtgcctcccgtgctgtgggaacacgaggcggtgtctcttccagtccacgagagtcactcggagaactgctggcttatatttccattttctggcagtgatccctagctag

SEQ ID NO: 409609 - DNA, 122 bp, Homo sapiens
gtaccaagccctaataggagatttctcaaaggtcagcagctcttccactcagaatcccttcgtggttagcaaaatgtgaaccccaaatatatgagatgggtctcagtcaatttatagtgttt

SEQ ID NO: 409610 - DNA, 122 bp, Homo sapiens
gaagaaacggacccacgagtatggaactcgcgccccgccccgctccctctgctgggccgccgagcacccagtctccagaacggttgtgctgcctaacgtggccgctaaccgacgctctacgg

SEQ ID NO: 409611 - DNA, 122 bp, Homo sapiens
tcgtcatagttggtcatggtcacgaagccgaaacccttgcacttgttggtggtgaaatcacggatgaccttgacgttggtgactgccccaaaaggcccgaacagctgccacagcacgctctc

SEQ ID NO: 409612 - DNA, 122 bp, Homo sapiens
tttatatttactcatggctaaatagatgcagccctgcctagcagtttattgcagaatgctcgcagctcaagccaagagaaatcagctgcgctggcagctacagagttaaaaggaaagtcaca

SEQ ID NO: 409613 - DNA, 122 bp, Homo sapiens
atctgcacagggctcagagcagtcctccaaggcacgcattggctccactctcctgagcgacggaaggagactttcctgcttggaaggcttgactccaaggggagtcgaagccggcccctcac

SEQ ID NO: 409614 - DNA, 122 bp, Homo sapiens
tgatgctggatcaactgaatccccccatccccagtcaattccagatggaatttttcttttcgagacagagtttcggtcttgttgcccaagctgttgtgcaacggcatgatcttggctcactg

SEQ ID NO: 409615 - DNA, 122 bp, Homo sapiens
atagaaatagaaactcctcatccagccgggccagggcactgacagccacagcgatgtccacggtgtaatggtcacggactccgtccccaaattagcccattttttacaaagacgataatggg

SEQ ID NO: 409616 - DNA, 122 bp, Homo sapiens
actacagcatggttctacagagactgcttcaccctccatcaagtcctccacctcgtcctccgtgggcactgatgtcaccgagtaagtgctctttggctccctgccacccagcctgttaccag

SEQ ID NO: 409617 - DNA, 122 bp, Homo sapiens
actggaaaaactaataggcgatttttctctttgccaagtcacacaaagggaaatgggctgcgctaatctgctaatgtgacctcagacaagccccctcagctgtgcaatgaggtgactgctgc

SEQ ID NO: 409618 - DNA, 122 bp, Homo sapiens
gcccagccccctgcccacgaacagccgcgcccccggagagcggggacaaaggcgaggctccgcccgagccacacacaaagcggagcgacccccgcccaccaacccctccgaggcccgcagcc

SEQ ID NO: 409619 - DNA, 122 bp, Homo sapiens
agcatccagagattcaaggtaaccttttggccgagggacccactgtcaacagactgaacacgtacaaactctgtgctttgctggaattaaaaaatgaatgaagaaccttggaatccatccct

SEQ ID NO: 409620 - DNA, 122 bp, Homo sapiens
ccagggccaggcgaagcgcagcgggccctttgggctgcagcgaggagacgcaagtttccccgcaaagccgcggggaggaggtgctgagaatgcctgcccggcgccccaacccggagccaagg

SEQ ID NO: 409621 - DNA, 122 bp, Homo sapiens
agtccatgtgagaggcaacaaaaggaccggtttctaaagctgcaaaacacctagatacaccgttcaaatgagcgtagccccctgagtcatcactctagaagaatctgtacatcatcaggact

SEQ ID NO: 409622 - DNA, 122 bp, Homo sapiens
tgttcagagatttcaagcccacagaggaggcagatttggagagtttacttccaataaaatcgtgaaattatgtgctgattcccctctatcccccattttaagaatattcttattgagatctc

SEQ ID NO: 409623 - DNA, 122 bp, Homo sapiens
ataccaaatacaaatatcttttctttctctcactatgaacacatttaaaagagaggagatcgattagcaacaataataacccaggggcacccacaaaagaaacagagctagcaaattatttc

SEQ ID NO: 409624 - DNA, 122 bp, Homo sapiens
ttgcagaatcttctcacttctcccgagctcccttccttgcgtccgtccgggcaacggccgcgtcatgcctagccccaggccgcgaggcagcccgccacccgctccctcgggctctcgggtcc

SEQ ID NO: 409625 - DNA, 122 bp, Homo sapiens
caggacctcgcgttcgggagggcgggtacttcctactccagccctgggctcggagaaggccgcgttagttctttttctagggatgtctgcggaaggggcgccaggctgagggccagcctgga

SEQ ID NO: 409626 - DNA, 122 bp, Homo sapiens
tcagggaatagagccggccaggcttcgtggctgggtcgcaggagcggatggggaaggacacggcatctgaagtctgcaccctgtgtgcaggcagccgtggtgccaacagatgtccttgggtt

SEQ ID NO: 409627 - DNA, 122 bp, Homo sapiens
gtgtcgggtttctagcgaagccaatcggcgtcgctggggtccctgttccagaagtccccgcgaacccattgggactcagattctccccagacgccgaggatggggtcatggcgtcccgaacc

SEQ ID NO: 409628 - DNA, 122 bp, Homo sapiens
cgctgagaaagctgtaatttggggtgatttggcgccctctacagactataatggcaaaagcgacgctatcatgtgcttcccatagctttagggctttgccagaactatgacgttgaggaggg

SEQ ID NO: 409629 - DNA, 122 bp, Homo sapiens
ggggccgtcctgggaaagcgcccacgtggcgcagaattagaggcggagcctacacggtgacgcaagggccggaaggagggaccctgtgtctggagaagcgggagatgggggcctggacccct

SEQ ID NO: 409630 - DNA, 122 bp, Homo sapiens
aggtggggccttatttgattgccaagtaatattccccaatggagtactagctcatggtgacgggcaggcagcttgactaatgagtcctcggcgtggccggcgcagctctccaatcgccgggc

SEQ ID NO: 409631 - DNA, 122 bp, Homo sapiens
gaatgatgagtgaagcgtagagaggtgaactgacttttccagagtcaaacggccagtaagcggcacagctggcttgagtcccctaaacctcctgaaatctagtctagagctttcttccatag

SEQ ID NO: 409632 - DNA, 122 bp, Homo sapiens
caagaatgttcatagcacttttatttgtgatagccaagaactattaagaactcaaatgtccgtcaagaggagagtggataaatattccattctaaaccatggaagatcatttaaccacagaa

SEQ ID NO: 409633 - DNA, 122 bp, Homo sapiens
ccttcggtccaggtggtctctgcatccacctgtcctggcacgtcaggagctgcgggcgaccggagcagcagcagcagcagccttccctgccccgcgccaaactcccggccagctcaaggcaa

SEQ ID NO: 409634 - DNA, 122 bp, Homo sapiens
ccgcgctctctccagcggtagtggggctcagcaacaacctctgaaccgacatagaacgaccgctctcttccctgcccctcaatcccactcccttccttcaggctccagtcccgccgctacct

SEQ ID NO: 409635 - DNA, 122 bp, Homo sapiens
caggggcctccccaggcaactggctgcagctgtgtgtgacccatgggaaacagtgcagggcgggaagaaggggaggccagcgtctctccctcactctgcctcctggggtttccgcagcagct

SEQ ID NO: 409636 - DNA, 122 bp, Homo sapiens
tcttcatggtagaaccatttagagtcctctggacataacccagtagtggggttgctgggtcgaacggtagttctgtttttagttcttttaagaattgccagactgctttccaggatggttca

SEQ ID NO: 409637 - DNA, 122 bp, Homo sapiens
ggatcctagaaacctgctcagggctacaccccagccaagcctgcccagagctagggtgaccggggacaagaactcgactcatgcagatctggccagctctgggaactattccaagtagcccc

SEQ ID NO: 409638 - DNA, 122 bp, Homo sapiens
atggaggtcctattatgtgccaggcactgtgcgtagcaccagagtcacgatgttgaacatcgcattggccagacataaatgcacatggcagctctgctcagtgacacagagcttagagcctt

SEQ ID NO: 409639 - DNA, 122 bp, Homo sapiens
taaaagggcggagcggagcccagaggaggcgacagatgtttgtgcgagattgtcacagatcggggtgaaactgaaaaggacggtctcattaacccgaaataaccagccaggctaactgaccc

SEQ ID NO: 409640 - DNA, 122 bp, Homo sapiens
ggactccacccaggcagtgggcaggcgggcaggtccgtgcgcttctgtggctgaagcggccgggccgcagctattcctgcggggcttccagggcggaggacacgggctgacacgggctgtcc

SEQ ID NO: 409641 - DNA, 122 bp, Homo sapiens
cttagaaaggcagctttccaggagagaaggcacgggcattcggctcctgctggggaggggcgaggtaacccgacatcaggtccacaggtccacagaaactgaaatttcttccaagatgaggc

SEQ ID NO: 409642 - DNA, 122 bp, Homo sapiens
gaatccctggcggagtctgaccgttctctggcgcacagccccgggggtgggcacagcagccgcccctgctgaagggactgacgcctccgacgaccagcagccaagttaaacgcactgttccg

SEQ ID NO: 409643 - DNA, 122 bp, Homo sapiens
gcaggcgcacctggtgcatggtgtgcaggagcagagcttcgtagcgcatgtcatggccttcgctgcctgtctggagccctacacggcctgcgacctggcgcctcccgcctgcaccaccgacg

SEQ ID NO: 409644 - DNA, 122 bp, Homo sapiens
tggaacgccccctggcagggcctccagcgtcacgcgggcaggaaaggaggagaacagcagcggtctcaagtacaaggctggccgggtaagtctctcaatggatttacctgtgagtcctgcag

SEQ ID NO: 409645 - DNA, 122 bp, Homo sapiens
ggccattcgctcttttgggagttgtccaagcagctgataggagagaacagcactgtgttccgcgcccacacagaatatggaagctaaatctttgtttttagtgtaaatattttatttagaat

SEQ ID NO: 409646 - DNA, 122 bp, Homo sapiens
aaaaaacaccattactcaaagcaaaaatgttcctgtcttagagatcatagaactttttttcgtggtcctcaggaagcagacctgtgagatgtaataaacaacgtccttcttgccatccatgc

SEQ ID NO: 409647 - DNA, 122 bp, Homo sapiens
cccttcaaaccgagattgttgtttttacagcgttaacagtctgaaccggagcataacgatcggctgtctcaggcgtttcatggcccgggacaggcggctctcttcttacagattacagggaa

SEQ ID NO: 409648 - DNA, 122 bp, Homo sapiens
atgtctccaatacttccctgtaggcagaccctttgcaatgtgattttttttaactctacccgtgaaaagttgggcccacctcttgaatctgggcgggtttcgtgacttgcaatgctgtggaa

SEQ ID NO: 409649 - DNA, 122 bp, Homo sapiens
tctgcccagagcggcagcgcctcccggtcactacaacaacggcggcccagtcaaaccccgcgctccaggcatggccagccgagccccgagacaccgccagccctgtaaagagaggacgggag

SEQ ID NO: 409650 - DNA, 122 bp, Homo sapiens
tcctaatctaattttcaggcacatctccagacttcaatttggctgaaataattcatgccacggacctgtgcacatgcctggaattgagagacacagttaaaagactccaagttgctttctgc

SEQ ID NO: 409651 - DNA, 122 bp, Homo sapiens
aagagatgcagaagtgtcaggcataagacaaagcactcattgttacctttggctggaaggcggcagagttggggaagataggactgggaaggttgagagggagccaggctgtggatgctatg

SEQ ID NO: 409652 - DNA, 122 bp, Homo sapiens
ctgaggttggcacgcaccagtttgtccaccggggggcactacggagccgagctaggagagcgcgcgggctcccggagcctcccagccctgattgatccgcacttgagcccggcgggaaaaca

SEQ ID NO: 409653 - DNA, 122 bp, Homo sapiens
gagagtcgcctgcttcttctttctggcttcagggagagagagaatagcaagggcaaggctcgctgggcagcttaaatgtggaactgagtttgaagaacatgttcttcatgcaccctcacagt

SEQ ID NO: 409654 - DNA, 122 bp, Homo sapiens
ccagattggccgctgggttgcagcccgcggctttcacgcagctctctcattagtgggccacgaaggtcaagggcagccgccgcctccttgcctgcattctgggcgctgcatgactccgaact

SEQ ID NO: 409655 - DNA, 122 bp, Homo sapiens
catgattgaggtctttgcaacccaaggcaatttctgatcgagaaacactgtccagatcttcggaagacggatacgctgcagtgtccaatgaacagctacaataggatggctttccaggtgat

SEQ ID NO: 409656 - DNA, 122 bp, Homo sapiens
agagcgtcccttccctgagatggaggcgtagcttcaccgtgtagtgtttaagctttaaaacgtgaaatgcagtgaggccgacagtgagttgtaggaagctcagaaatgggatgcccgcactg

SEQ ID NO: 409657 - DNA, 122 bp, Homo sapiens
tgacaacttcagggcccaacgaaatcctcctcttttcctttggccaagcaatcagaggcccgtctagctgctgttgagcccaggtggcgttaccattaacagttacatttttaaaaggtttg

SEQ ID NO: 409658 - DNA, 122 bp, Homo sapiens
gcggagagcggccccgggaagggcagcccaggggggtgggtctgcgcgcctgccttctcccgcttgcgccacttggcccgacggttctggaaccagacctgcaaggcagagagagcccaggg

SEQ ID NO: 409659 - DNA, 122 bp, Homo sapiens
tgttcgtattgcacgtagacgtgtgtataacaggacctccttccccgcgccccgccaccccgacacacacaggagctgcctaaagtatccttgccttgcagattggaggctccccaaatatt

SEQ ID NO: 409660 - DNA, 122 bp, Homo sapiens
ggaggggcggagggccagcacttggtggcttcggctccagttcccagtgccggaggctcgcgcctgtcccgcccctaccccgcctctggcccgcgggcggagcccagtgccagcccgcgccc

SEQ ID NO: 409661 - DNA, 122 bp, Homo sapiens
aggaggaccgccgcgccgcttgtcctttggataaaccttggcggttcctcctctggtgtccgtggaccccgccgcggcgttctccagggccgcggacctttgcccaccggttgcgcccgctg

SEQ ID NO: 409662 - DNA, 122 bp, Homo sapiens
tggaggtgctgggcaggggcggcgcccccttccctggccgcggtgcgcccttgcgcccggcgcttgggtcctgcgagatgagggtctagaaatacacagcaccacccgacccccgcatcggg

SEQ ID NO: 409663 - DNA, 122 bp, Homo sapiens
ggcgggacgcaggggcggggactgccgcggggcggggcctgaggcggctataaaggtggccgccgccggacgccgggctctgtggttcgggtccgctttcgtctccgtcctgctgccgttac

SEQ ID NO: 409664 - DNA, 122 bp, Homo sapiens
gggggcggtgagcggggcgggggcgggagttaaagggcgctgcgggcggtaacgtgacaccgcgacgcccgccccctcgccccatcccccctgcaacactcccccacccccccggctcccgc

SEQ ID NO: 409665 - DNA, 122 bp, Homo sapiens
ttacgccatttcatttgccactgcaccatctatcggacactagctaggctcttccaggaccggacgcacctccgtccccaaggtgccacctgacagccaacaccgacggggtgatgcatgaa

SEQ ID NO: 409666 - DNA, 122 bp, Homo sapiens
gaactgctggcactttgcatttcctccacagccctgtgggggccacagggccagattggccgggggagatgactataagccaggtggcttttcctccttgaccgtttgtaaatctggattcc

SEQ ID NO: 409667 - DNA, 122 bp, Homo sapiens
cccaggcaactttctgtaattaagggtctctggaactaactaataaagtacaatcagtgccgatgtgagaaacaatagttacaagaacatataccatgtttaaaaatagatttaaatactca

SEQ ID NO: 409668 - DNA, 122 bp, Homo sapiens
aagtcttgactgccaggcacagccccattgctgatctgctgcaggccagcccctgcactgcgggctgtccgtgatctatctggagaatcaggataaacacagagtgtgaccatccacagctg

SEQ ID NO: 409669 - DNA, 122 bp, Homo sapiens
caatagaagcaaagggtgttcgcaggtgtggctccagggactcaggcgctcaagcttcagcgcccatctcctgggcaggagatgtcagccgcagggtgaggtgcggacgtgcgcacttctcc

SEQ ID NO: 409670 - DNA, 122 bp, Homo sapiens
ttctggactttgagaaatgggctgcccctgggggtgcctccaagagcccatttgagggatcgggtggggctgacctctctgtcttctttggatcatcgccttctcacactgtcctccctctt

SEQ ID NO: 409671 - DNA, 122 bp, Homo sapiens
tggagtttgctttggcgacagccggtcctgctggaactaggacatgagggttagcgatcccgccccatggggtcacagggcagaagctgcgggcaggggtgggcatcagtggggcggtggtg

SEQ ID NO: 409672 - DNA, 122 bp, Homo sapiens
tctggtgaacacacggaggtcctggaaatggtggcgcgcccagagggcatggaagctccgcgccccttcccacagaccttgtcccgtgcatcgcttccatccggctcttcctgagttctggc

SEQ ID NO: 409673 - DNA, 122 bp, Homo sapiens
gctcctgctcagtgcgcggcgccagcgcttgtcttgtcccggctgcgtctctgggccccacgggcccctcctcacatggcaactattgtggctactagtccaggcggcttagcctctggagt

SEQ ID NO: 409674 - DNA, 122 bp, Homo sapiens
actgtgattgctctaactccgtcagagcgcaggcttatagaaggcactgtctccgagctgcgcccctctccccgccattctattaattcccaatgaagaaacgtaaggtgttgtgtatttca

SEQ ID NO: 409675 - DNA, 122 bp, Homo sapiens
agagtgcctttcacgggtgatgtgattggatgaaaaatagaaagggtgtagtttcagggccgactctgtaccagataatgacaaagtgatgtatatgctaggaaagatgcatggtagcctct

SEQ ID NO: 409676 - DNA, 122 bp, Homo sapiens
gtgcagaaacaccaaaggcggcttccagtgtctctgcgcggacccctacgagttaggagacgatgggagaacctgcgtaggtgaggctgttcccctctctctctgtccgtccatttgcgagt

SEQ ID NO: 409677 - DNA, 122 bp, Homo sapiens
cggtgggcgcccgccgggccatctccgccgtcactggctcggtgtccactttatggagcgcggagtctattaagaccttggcgagtggtggtggtgctccctccgcagtgcctgcgcacaga

SEQ ID NO: 409678 - DNA, 122 bp, Homo sapiens
ggccttgcgttgttggactcggggtggggtgggccgtgtggtgcagtctaatgactgtgtcgatatttctgggaactgttttcaatagtgagtgcttgatgatttaggtgcagccgtgccat

SEQ ID NO: 409679 - DNA, 122 bp, Homo sapiens
tcaactggaggtagagacggactgcgcaggttaactacagctcccagcatgcctgaggggcgggctcagcggctgcgcagactggcgcgcgcggacggtcatgggacttcagcatggcggtg

SEQ ID NO: 409680 - DNA, 122 bp, Homo sapiens
cagcaatttccttgtggtagagaggaatgcagctctgctccaagtagtttaacctagattcgacgcctgttcatggacagcgtgcttagtgcaaattgaatgtaacagtttgcaggttgggg

SEQ ID NO: 409681 - DNA, 122 bp, Homo sapiens
gcagagggcctggcacggggcgccaactctaaatagtcggagcagctgttattatccccccgacatcccctcatttgctgatcacgggggttaattataagcggcattaaattatacacaca

SEQ ID NO: 409682 - DNA, 122 bp, Homo sapiens
acccaaagccgcttgtctgctggtggcaggtatgacagacgtttgattcccaaccttctccgctttggtttcttcgtttactgaatgcccggcgcccacctcagtccgcgggaaacgaggga

SEQ ID NO: 409683 - DNA, 122 bp, Homo sapiens
cttctttcatcaaagagaatcctcatcccagcctgtgttgcttgacaccctggtccagtccgctctcactgaggctattgggggttcatttttgtgaataaagattgcagttctcagagaat

SEQ ID NO: 409684 - DNA, 122 bp, Homo sapiens
ccgtcaggtgccggctgccgtcggcgctgaccttcgccgccgaagctgtagccgaggctgcggccgccatgttcccgtgttaataactgctgcctggttgtttatttcaatggagatcctcc

SEQ ID NO: 409685 - DNA, 122 bp, Homo sapiens
ctgttagagaaaaaggagctggaaagttgtttatatattaggagtgcatgcttggttcagcgccaaggtcagaaaacaatgtttccacagtcacccaagattgactacagcaaatagctatc

SEQ ID NO: 409686 - DNA, 122 bp, Homo sapiens
cggccctggacctaaccccaacctctgaccccggtgagctgagcggctggcatgaaggagcgggggaggggcgctggagtgtgtcacctccacatcacggcccctgcagtgctgctgcctga

SEQ ID NO: 409687 - DNA, 122 bp, Homo sapiens
ctcggctggcagagcgcgcagcagctctgcccggaagcgaccctcgaagccggtgaagagcgaggacccaccgcagagaagcacgttttgggccaagtccgcgcgcatctccagtgacaact

SEQ ID NO: 409688 - DNA, 122 bp, Homo sapiens
cacccgctccctgcgggtcctcagaagcccggaggagccaccggccctctggcgcggggccgcagcctttccgccaccaggctcagctggaccggtccccgcctgcgcgaagagcgaggcgg

SEQ ID NO: 409689 - DNA, 122 bp, Homo sapiens
tcaactctgatgaatgattctgttctcttcacttccagaggagatttgcaccctagttatcgctgagactttccctgaagatgcagggatctttacatgttcagcaagaaatgattatggat

SEQ ID NO: 409690 - DNA, 122 bp, Homo sapiens
cctggtggagatttgggtctcggaccctagctcccctcccccctccccttgcgggctcaacggggccagataaaggagggaaaccaagcccacatctggaaagcatcaggcgcgccggacgt

SEQ ID NO: 409691 - DNA, 122 bp, Homo sapiens
gactgctgctcttattgtccccttgcgtgggtcttgtcaccttttttcaccctccttcctcgctacattactgtgtagcaatacaaggaaagaaaacaggcattatgcttttgcatcagtaa

SEQ ID NO: 409692 - DNA, 122 bp, Homo sapiens
ccgccccgactggcctccttaggcccccctctaaaaaaaaaaaaaatcgagccacacccacgattttttggattcaatatttagtccttgtagatcaaactactgaggtatatcttcatctg

SEQ ID NO: 409693 - DNA, 122 bp, Homo sapiens
ttagatacttattcaaataagtacatgggcttattaataaattattattagggacagaaacgaggaatgcaaaaagtagttgaagatcctaaatgtcagaatgatttgcctgagggtttaga

SEQ ID NO: 409694 - DNA, 122 bp, Homo sapiens
ggtttacccaacatcatttatttattcctcatcaaacaaacacaacgtagccaccccctccgggactgtgcctgtgtctgtgctgtgaacatcccaagggacggtgcagctggtgggggtgg

SEQ ID NO: 409695 - DNA, 122 bp, Homo sapiens
tgtcaacattgtcagctaatctctgattcactcatcaaccttgtaaacgtctgaaaatgtcgtgtaaatccattgcacatttattccatagtgcggtactcatcttgtaaaaaatccggaat

SEQ ID NO: 409696 - DNA, 122 bp, Homo sapiens
tggaaaagtattgacttaaactccagtgggttctaaagacggcctcgagactccagacaccgtgagtgttaaaggaaccagagtttccatcttccgtgctttttagattcagttttggattt

SEQ ID NO: 409697 - DNA, 122 bp, Homo sapiens
gcccagcactctaacttggctatatttgggggagcaccatttacttgttagatgtaaatgcgtcgtagccctgatctctcactcttgttaagttacttggataaatgaccagtggaggctgc

SEQ ID NO: 409698 - DNA, 122 bp, Homo sapiens
tggctgaacggaaaatggcacctaactgtattacatgccctcaggtcattgttattcctgcgggggcggggggtggactggcctcctggaccatcttctgtgccacttctttgagatcagga

SEQ ID NO: 409699 - DNA, 122 bp, Homo sapiens
tgaaatgcacaaggtgacaacagtgaacccacttacactccagctgtggaattcatttcacgtacatgtttgtaaagtcaagtctcattgtaggttttccttcaaaattgccatccccacag

SEQ ID NO: 409700 - DNA, 122 bp, Homo sapiens
tatgacagtgcagctttagccagtatgggtacataagttatgacatccttaatgtttctccggtgagtctaggcacttggtgatttaaagtagagttgttctcagtataaagaatttatgtg

SEQ ID NO: 409701 - DNA, 122 bp, Homo sapiens
taacagtggttctaataattaatgcctttttttttattaggagggtacagtgagagaacacggggagtgatgataaagacagcccttggtaggatcactctttcctgtgaggctgcctttgt

SEQ ID NO: 409702 - DNA, 122 bp, Homo sapiens
tcagtgctgactctacccctgatgtgaaccagtctcctcggggcaaacgccgggccaaggcggggagccgctcccgcaacagtactctcacgtccctgtgcgtgctcagccactaccctttc

SEQ ID NO: 409703 - DNA, 122 bp, Homo sapiens
tgaggccacacacttgaggctgggactcgatcccaagccccgaccccacaggcaccagctcgtgttcccagcatgcagggctgctatggtcagaatgtctgactcctaaaattcctatgttg

SEQ ID NO: 409704 - DNA, 122 bp, Homo sapiens
atttcattgtcaagcagattttataacccgagacgtcactaagatgtggccctttaagcccggcgagaaacctttgattgcttttctagccgcagcctccggcccaaaggttttcggaagca

SEQ ID NO: 409705 - DNA, 122 bp, Homo sapiens
cggcgagagacacctgaggctgggaaacggctccgggagccgcgcgaggacacagcccctcggcaggaagaggcacatttcacgctctgcggaagaaaagtctgcaattgtcccccctctgg

SEQ ID NO: 409706 - DNA, 122 bp, Homo sapiens
ctgtgtgggcgaggtgctgggagaacttgattggcacaatctcattttgtcccccatgagcggggatccttagctccattgtagaaactggctcagatgggcaagttactgaacctgggaaa

SEQ ID NO: 409707 - DNA, 122 bp, Homo sapiens
catttaacctgaagacaggaagagcaagagaggagacggagaccaggcttcagtcctccccgtacaaatactggttacgcaacctgctgccccgcctaccagggagaggcggcttgcctgct

SEQ ID NO: 409708 - DNA, 122 bp, Homo sapiens
gcgcacacacacactcgcgcgcgcacgtgcgtcacactgtcattcggatacacgccgccgcgcggctcacacccaggcacacgcctacgcactgtcactgagacacacatacctgcaggcgg

SEQ ID NO: 409709 - DNA, 122 bp, Homo sapiens
gctcattcctatcccgcaccaggccttctcgtttttttttttttttctttaaaatggaagcggcatcgtgaaaggatgatttaactcgaagcctcctttgagggaagtgttggcttttacgt

SEQ ID NO: 409710 - DNA, 122 bp, Homo sapiens
agtccagagttttagcctgtgctcccagatcaggcattgtgcgcagtgtgggaatgtcagcgctgagcacactggaaagaatgaggaggtgaacacacgcatagggtattctacacacgggc

SEQ ID NO: 409711 - DNA, 122 bp, Homo sapiens
gggtgaaactgagacacggcatgcccacacgcacccccaagcgagaaaaatagtcggtcacgtttcttattaggtgcctgatagtaatctgggctatttcattaaatgcattacaataaaaa

SEQ ID NO: 409712 - DNA, 122 bp, Homo sapiens
aggacctatctgaggaccgactggccgaagcctgcaagtttccacaaatgcagtcgctgccgcggcgtctgtctacacacacactggaaggcaagagtaacggagggaggagactggggagc

SEQ ID NO: 409713 - DNA, 122 bp, Homo sapiens
ccggaggtaaccgtgtatgtgcgtgcgagtgtgtctgtgtgcgtacaaggtccggagaagcgaaacggtcgcaggttcctacagaccccgaccctgttcccttggccacctggtccccggta

SEQ ID NO: 409714 - DNA, 122 bp, Homo sapiens
gttttggacaccgagcaggagctggcggccgctgcagacgaaaggcaggaaagggcaggccgggtgagcagacggatcggccgactagacagccaaccagcaacaacgaactgagctcgcat

SEQ ID NO: 409715 - DNA, 122 bp, Homo sapiens
gaacagaagagcaggaagtgtggttggtgggaaccacggagatgtttgtcatctcggcaccgtccgtacctgtccccccgcggagccactagcactcggcacagctcccttctcaatttcct

SEQ ID NO: 409716 - DNA, 122 bp, Homo sapiens
ggtggaatttcttagatggacttgcaggggctggcgttataaagcatgtcatcgtaaccccgtcctcgtctttgtttatttttttttaaagttcttttgttttcattttcccctccttccca

SEQ ID NO: 409717 - DNA, 122 bp, Homo sapiens
ttagcgagcaacacagagaactagtaagatgatgattgtgtatctgcaggcagataaaagcgttacggataaaaacaacaacaaagaaaacaatttggcagatgggggaggcaaagattttc

SEQ ID NO: 409718 - DNA, 122 bp, Homo sapiens
aagggggcgggctgctggctgggaggggtcggcgcggtttctggcgcgccaccggaagggcgttatcctgggggaactgagagtggaaactttcctcccgggaaaggaagaaacccgactgg

SEQ ID NO: 409719 - DNA, 122 bp, Homo sapiens
caacatcaagggagttttccggggccctctcagcaagaacgggaacaaaactctggtaatcgcttctgttttcctctctctctctctcatatttaagagggcatttggaagattgagttttt

SEQ ID NO: 409720 - DNA, 122 bp, Homo sapiens
gtggtatctggcccgccccattccagcctgaactccgcccaccgcgatccggaagcctagcgcccagtgggttgcaggaaaaacccggagctgaacacactgcccgacccgggccgctgcgc

SEQ ID NO: 409721 - DNA, 122 bp, Homo sapiens
gtgtagagtgcggaaatggggtccacatctggcttgggacgcccaaacatcgattatgtgcgaccagaggatgagcagatagggagatgagacactgagagctgggagagagggggcccccg

SEQ ID NO: 409722 - DNA, 122 bp, Homo sapiens
cagtcacctcaacagcatctcagccgttgtccgacactgggtgattctgcacgcccggctcggaaccctgtgcattgcccatctgtgagccgacctcctgcctgaagccaccttctcatagc

SEQ ID NO: 409723 - DNA, 122 bp, Homo sapiens
tttaattcttctgcccgggagacctaaccgccgaatgcgttcggaggtatgttttttaatcgccaggaaagggggagagagagagaaagagagagagagagagagaggaaaggaggagagaa

SEQ ID NO: 409724 - DNA, 122 bp, Homo sapiens
cggctccgcgttctttatgtctctggaccgctctctctcgcagctcatctctatggtttccgttgggtgtgtggtttttttgtttttttttttttggggtccggaataggcggagcttccgg

SEQ ID NO: 409725 - DNA, 122 bp, Homo sapiens
gaacacagcagaggtcagtactggggagagtgggtcgtcctgttatgaggaccccatcagcgttgcttctcaaagttttgcctagggaaccaaatataggcaaaaaggaaggagaaaggagg

SEQ ID NO: 409726 - DNA, 122 bp, Homo sapiens
gaagcccaggcctctttggatgctgctcacacatcttgcctccttatcttacctagccagcgtctctgtccttggtgtctgtgcctgccctggctggagaggaaggggctatatacctgtct

SEQ ID NO: 409727 - DNA, 122 bp, Homo sapiens
agtcttgctctgttgcccaggctggagttcaatggagtgatcttggctcactgcaacctccgcctcctgggttcaagcgattctactgcctcagctgcacgattagttgggattacaggtgt

SEQ ID NO: 409728 - DNA, 122 bp, Homo sapiens
cactccttcaggatgatgggcggggcctcctgggccggtgtggactgacgagtggctggccgccctgtccatcacgacatcccgcccccgcgctacgtcacatgacgcagcccatcatggcg

SEQ ID NO: 409729 - DNA, 122 bp, Homo sapiens
cagagtagttgcccagggtacctttcccaaaagcaactcggctgctgactaggggtctaccggctcgctcgggctcttagacacgagcgcagaaacattttctcggactcaggagcgagggc

SEQ ID NO: 409730 - DNA, 122 bp, Homo sapiens
tccctccccgcgcaagtgctcgccccgcccccggggccgcacccacagccccggctaccccggagaagcctgacttgagaaccctttctgcagagtcccggcagtgcgggactccggtagcc

SEQ ID NO: 409731 - DNA, 122 bp, Homo sapiens
cttaatttctcttgaccgagaggctttgtaatagcgtagaatctggagacagggtggcttcgttcaaacagcaccctcaccattgactagccctgtgaccttgagcaagtttttaaacgtcc

SEQ ID NO: 409732 - DNA, 122 bp, Homo sapiens
cctccttttggggatggaacttcaacgcttctttgaagcccttatgaaccaagaaaccttcgttcaggacctcaaaatcaaaccccgccacatgcagctcgcaggcctgcaggaggaaagac

SEQ ID NO: 409733 - DNA, 122 bp, Homo sapiens
acatctatctctccaggtcacagaggctgaggccaaaatggcacacacataaaagctgagcggatagctacaggaattcaagagagaaggttttttactgctaattaaaggtataaaattgt

SEQ ID NO: 409734 - DNA, 122 bp, Homo sapiens
aagtttcagtgcaggaaaagtgaattaagaggccatggggccgggcgcggtggtggtgcacgcctgtattcccagctacacgggaggcagaggcagaggcatgagaatcgctggaacccggg

SEQ ID NO: 409735 - DNA, 122 bp, Homo sapiens
cagttggcagggcatgggacggctctttcaaagcttcactggaaggcagtgctctccagccgccaaaccaccactaccagcagcagaaaacccactattaagttagtattacaaacctggca

SEQ ID NO: 409736 - DNA, 122 bp, Homo sapiens
atgcctggtgtgctgggcacctgcaaggagaccttcaacctctactacctggagtcggaccgcgacctgggggccagcacacaagaaagccagttcctcaaaatcgacaccattgcggccga

SEQ ID NO: 409737 - DNA, 122 bp, Homo sapiens
ttctgtcgcccaggcaagagtgcaatggtgtgatcttggctcatggccacctctgcatcccgggttcaagcgattctcctgcctcagcctcccaagtagctgggattacaggcatatgccac

SEQ ID NO: 409738 - DNA, 122 bp, Homo sapiens
cgccgcggagcgactacggccgcccggcgctgcgcagagagagctgccgtgcaaaaagcccggggtcggggacgccagccaaacgcaacctccacgcagagcccaagacttgcggagctctg

SEQ ID NO: 409739 - DNA, 122 bp, Homo sapiens
gatacaaacgggatctgaagagtcagtgaggaacgcaagaaacaacacaggagtcggcctcgaaaaaatggcccactattccagagccatgcctcatttccataacacaactaaacaaaaaa

SEQ ID NO: 409740 - DNA, 122 bp, Homo sapiens
gggggagggacggtgggaggggtgcggtgagcgaggggctgccctgcatgtaaacagcctcggggtcccagacgagacaagtgggaccgctcaagcctgcagaacccccggtctcggtccca

SEQ ID NO: 409741 - DNA, 122 bp, Homo sapiens
ctgctcattcattgggcccccagtcagcacgggggtgctggaagagatcgggaataatagcgcagaccaatgagcctagggagatgctttcatcgtctctccttccctcaagtgttctggaa

SEQ ID NO: 409742 - DNA, 122 bp, Homo sapiens
gagcttccttgttcagcgcgcatcttcaagtaaccggtaagtggctctttcctttcttctcgtcgcacccccttccgtaccccacttcccttctcatttcatttggcgagtagtagaattgg

SEQ ID NO: 409743 - DNA, 122 bp, Homo sapiens
gcctgggcatcccctgatcccctttcctgggcacaggctgaatagagccttgttctccaccgccggtggcgccacacagcaagggcagcccctagggggctgtgctgcttttatcccaagat

SEQ ID NO: 409744 - DNA, 122 bp, Homo sapiens
gactgtgaacttatttgacaagatgaaaataatccatcgcaaggctacatgatggatgctcggcttagtatctgggtgtgctgcaaccccacctaacatttttttctattatgccatgttac

SEQ ID NO: 409745 - DNA, 122 bp, Homo sapiens
gccgcaggaagacggtcctggtgctcatgtgcatcctcaccgcctacgtgctatgctgggcgcccttctacggcttcaccatcgtgcgcgacttcttccccaccgtgtttgtgaaggagaag

SEQ ID NO: 409746 - DNA, 122 bp, Homo sapiens
gcctggcagaccccgtgccgtagaggtgacacagaaacacacactgggtgagttaacagtcggggctggcatttggcaccacactctggatagacgggaacagcctgcacgcatgcacctcc

SEQ ID NO: 409747 - DNA, 122 bp, Homo sapiens
cccacctcgtccgctctctcctcctcctcctcctcttcctctctggtctcctccctcctccgggctgggttgcaaatggcttcgttccccgagaccgatttccagatctgcttgctgtgcaa

SEQ ID NO: 409748 - DNA, 122 bp, Homo sapiens
ttccgggtgaggagcgctgatctttctggcaccctgcaaaagcgactgctttttcagagtcgttattgtgactgccggagaccctagagtatagggtataaataaagggatgcttgtaaatt

SEQ ID NO: 409749 - DNA, 122 bp, Homo sapiens
gaacccgctctcccgccccggggaggttttgattttagtggctttcttccttttattttccgtcgtgtgcggatttcgctgcagagcgaacttgcggctcgtccgagtacatgtgagcggta

SEQ ID NO: 409750 - DNA, 122 bp, Homo sapiens
tagtagatttcgttcttgaacttctcggccttggaatcagacgcccgggtcattgcgcagcggggccacaccccttagctccgggttcctcacctgagaaatgagtttcttataaaatgcga

SEQ ID NO: 409751 - DNA, 122 bp, Homo sapiens
agatggtgagataaggacaggatcagagcaaggtggagccaattagcaaaggtttccaggcgagggcagggcagggctggcagaggaagggggtaagagggtgtgagagtgccaagcatgcg

SEQ ID NO: 409752 - DNA, 122 bp, Homo sapiens
gaaaattaaattaaattaaacatgcgccgagggactagggaaaaatagatcccccctccccgccgctgcagcaaatcaacatttctgctcacagggagagcagcgaatctaaagacatggcc

SEQ ID NO: 409753 - DNA, 122 bp, Homo sapiens
tcctgggcctgcccaggtatctgcaaactcccgggttccacagcaccttgtatttcatgacgatacaaaggagtagctattggggctctatctgctgagggagattcatcagacaccccgat

SEQ ID NO: 409754 - DNA, 122 bp, Homo sapiens
gtgtgggtatgtaggggggctttatccaccaagctatgctctattagggcgccaggcgggcgaagcaaaggcagggatggcgggcggggcggcggcggaggtggaatgggcgcttttttctt

SEQ ID NO: 409755 - DNA, 122 bp, Homo sapiens
caggcttacagggcaaggggagaggccgtgaccggggagaaggccttggccctcccgctccgtggggcagcccggctggaaggagctgggagcatacatgcccaccccatctccgccttctc

SEQ ID NO: 409756 - DNA, 122 bp, Homo sapiens
gagatcagcagggggaagagcaccgagcggcaggagctgctggggtaaaactcccagggccgcgcggcctgaacgcccaggatgtcctctgcagagagaggcagaggtgagccagtaccaag

SEQ ID NO: 409757 - DNA, 122 bp, Homo sapiens
tggggaaggggcacgggtggaggccatctccctgcttctggtcagagatctcctgctggacgcttcccgcccttggtcttaagcggggtccatttcacagaggggacaactgaggcccggag

SEQ ID NO: 409758 - DNA, 122 bp, Homo sapiens
cggagacagcgcggtaggggcagcttcaggtttcctcctggagccggtgtcgggcgcggccggcgggcgggcctcgccatgtgatgcggccgccgcgagccgggccgggaggtgggcaggcg

SEQ ID NO: 409759 - DNA, 122 bp, Homo sapiens
gacctcggggtcctggatgcaggactgtctgttacgtacagcccttgtgaccgtcacgggcggacaccggccaacgccgggttggggtgaggccgccgccgcggtccctccatcaccctcct

SEQ ID NO: 409760 - DNA, 122 bp, Homo sapiens
ggacacctggacccgccacggcgccctgccccggctctggctctaccacggggcctccaccgtcttcctggatgtctccaagtggacccagccctccggccccacccaggagcactaaacca

SEQ ID NO: 409761 - DNA, 122 bp, Homo sapiens
gtgggttcattcccctgtgctctcccaacagcagacagcatttcctttacttcactgcagcgctgggtgtaattcccatctatatccccctgcctaaactcttcagtgatttcccattgctc

SEQ ID NO: 409762 - DNA, 122 bp, Homo sapiens
gacgcgcccggagcatcccttgcgatacgctaggggacggtgctttctctgtcccagttgcgtgcggcggggctggggcccaggccgccccaaatctcccccactagagtgaccaccgcaca

SEQ ID NO: 409763 - DNA, 122 bp, Homo sapiens
gggtcgttggtcctgggtcgttggtccttggtcgttggtcctgggtcgttggtcctgggtcgttggtcctgggtcgttggtcatgccgttcagtggtttttagcatgctgacaacattgtgc

SEQ ID NO: 409764 - DNA, 122 bp, Homo sapiens
tgcggggaccctgggagcctcttcggggctcttgggaggggacatttcctaatctcaggccggggttaaagttctggtcctggtgagatgctggaagctgcggccgcagccgcaacccgtcc

SEQ ID NO: 409765 - DNA, 122 bp, Homo sapiens
ccgcggatggatggataaacagacgtggcagctacatccacaaacggatgaataaacagacgtggcacctacatccacgaacggatggataaacagacgtggcacctacatccacggacgga

SEQ ID NO: 409766 - DNA, 122 bp, Homo sapiens
gtctctgggcttttgtctacacagccgccctccccggggaccctcctgggctttcacctgcgtctctgggtgattttcacctgcgtctccaggcgtttgtcttcacagccgccctccccagg

SEQ ID NO: 409767 - DNA, 122 bp, Homo sapiens
cccacccccgcccgtccgcccgctacgccgccgccatgtcggcgcaggcccagatgcgcgcgatgctggaccagttgatgggcacctcccgggacggtaagtctctgccagggccctggggg

SEQ ID NO: 409768 - DNA, 122 bp, Homo sapiens
gaagcggcacatggcagacacaaccggggatgacccagctcctcaccagagggcaggtaccggaaaccagcaaacacgatttgacaggacgcagagcaaacaccgcattaaacagctcctgc

SEQ ID NO: 409769 - DNA, 122 bp, Homo sapiens
aaaaagataaaagtataaatgcaaaattagatacatacttgaaaatttatttttaaaatgcgaagaggaatcataacaagttgcaaattaaagagttggcaaatcaaaaatcatttagaatc

SEQ ID NO: 409770 - DNA, 122 bp, Homo sapiens
ctccaggttcccctcgccgccattttgactcctagacggagcaggaggggctcggttcggcgtggccctggggcgcctgcgcggcgctgcggagccggccggagcccccgccctcccctgcc

SEQ ID NO: 409771 - DNA, 122 bp, Homo sapiens
gacccagccccggtggcctgtccggtgaccctggacgccagtcctccggtcctggaggggcgccgaggcccttcccgccccactgctccgccctacgtcctggactcccaggtcgccgggtg

SEQ ID NO: 409772 - DNA, 122 bp, Homo sapiens
gcagtgagccgtgatggggccgctgcactccagcctgggcaacggagcaagaccctgcctcgaaagaaagcgtcccaaggcgcctggctcaccgctccagagcgcgctcccgggtcggcctc

SEQ ID NO: 409773 - DNA, 122 bp, Homo sapiens
agctttggaatgaggatgatgtgaagctgagagaagagctggggccacctcttcgacacgcgtacagaaaagtcccgttttctcgcatcccaggtggaccaggatccagatcaatctgtcga

SEQ ID NO: 409774 - DNA, 122 bp, Homo sapiens
acattcttattcttcacatccactgttaactgaccaccctttattttgcaatcagagagtcgagctggcagaactgaagtgtcttggcagctgcagagatgaaactcaactgaacaaacaga

SEQ ID NO: 409775 - DNA, 122 bp, Homo sapiens
caaaaagttcataatgagccagggtagcccccttcctctttaagggaccctctctctaagcgccccagccttgctcccaaggagcactgcaccttctgaatctggtgagtgatggggaacaa

SEQ ID NO: 409776 - DNA, 122 bp, Homo sapiens
gtcggagcggggtgacgaggacctcatgcacgaggcggcgaaggaccgatggcagagaaccgagtgcggcgcgaggcggtggccgcggccagcgggtgggtgcgtctgggcgcaggcgggca

SEQ ID NO: 409777 - DNA, 122 bp, Homo sapiens
ggtggtgggaagatggcagcaagcaagcttcagaagagacgctcaggaggcgactcttaacgagcctcacctactccgggtacgttttgatctgtttctgcgccctcgccgtataaattcag

SEQ ID NO: 409778 - DNA, 122 bp, Homo sapiens
tcccaggacaggggatcccgccaagggggccgcccccgccccggccctcccccgcccggccgcaccataaagcgcccggccgctgccgcggagcccagcagccagctccccagcaccgcacg

SEQ ID NO: 409779 - DNA, 122 bp, Homo sapiens
gcgccgccttccctcgggcggccggcaggggtcagtgtttggccgcaggtgaacagacagcggccggggctgaatctggttcttctagctgggtcttgcccctgccaatctgtctggacttg

SEQ ID NO: 409780 - DNA, 122 bp, Homo sapiens
gctgctcgtacctggtgagggcgcgggcggcggtgcgggcggcggagagcgaggctggagcgcggcggagcgggaggctgaagcgcggcggagagggaggccggggccgctgccgtctctct

SEQ ID NO: 409781 - DNA, 122 bp, Homo sapiens
cggcgggtacgaggcgccgggggacggtggcggtggaggcggcggcggctgctggggaggcggagggggcggcggcggaggcggcggaggcagcgccgcgaaggggaaggccgcggtcaggg

SEQ ID NO: 409782 - DNA, 122 bp, Homo sapiens
ccaagagaaagcaattaaaaggagggaggctcttgagcgggccaaaaggaacggaagcatcgtttctatgaacttaaaagatgccttcgctcgaagtatggaactgatagatgtggctgttg

SEQ ID NO: 409783 - DNA, 122 bp, Homo sapiens
cactgtccaagcctgagggtactgatttcagaggtgaattaccagctacctagacaggtccggccaattcatccaggtgaagaaaaacacatcttcaaaatatcctgttctcctcattctag

SEQ ID NO: 409784 - DNA, 122 bp, Homo sapiens
gccctatgggtcccctaaaatcgcccgagcgtccgccctgtctgacctgcccccctgccgcggcgcacatttcagcttttcagcttcacggtggagctcgcagtaattgagtcgcgagggtt

SEQ ID NO: 409785 - DNA, 122 bp, Homo sapiens
gcccctttctccgggctccctggtgacacatggacagtggttgtcattagtaccactggccgtttttccaggttgccacgtttccgagcccaaggcagatggcacttccaagccccttgtgg

SEQ ID NO: 409786 - DNA, 122 bp, Homo sapiens
gcgcttcgtgaacccagtgcagtgcgtcgtgggtcagatcccttagacccacgtagggaccgcgctacatccttaccggggggagttacttctctggaagacatttcagttgttgggattga

SEQ ID NO: 409787 - DNA, 122 bp, Homo sapiens
attttttattcagggatagtaacaggaaaaagaagctagtatcagaatgttttaagattccgatacagtgcatatgcaggttttagtttacaaatagcagatggtgatgatttactataaga

SEQ ID NO: 409788 - DNA, 122 bp, Homo sapiens
atctcgcctcactgcaacctccagcaccggggttccagacattctcgtgcctcaaccccgcgaatacctgggatgacaggcgcgctactgaaccggtacatttttgtattgtagagccaaga

SEQ ID NO: 409789 - DNA, 122 bp, Homo sapiens
aagagtggcagtagcttccttctgcggacagatggcaccctgaaggaacgaggccctgctcggagaccagactcgggaaaacagggtgtggagggaagctagggaactagtgctgcgcgtgc

SEQ ID NO: 409790 - DNA, 122 bp, Homo sapiens
tgcagaggggcgggtgctgtcctggcactgactcagcttttcacagcgcaaggccgagcccgaacgacgcgctggctttaatggagatctgtcgcagccgttccatcccatctgcacatcca

SEQ ID NO: 409791 - DNA, 122 bp, Homo sapiens
caccagcgtttgctcagcccgagtaccgcgcgagcgttccggagaatctggccttgggcacgcagctgcttgtagtcaacgctaccgaccctgacgaaggagtcaatgcggaagtgaggtat

SEQ ID NO: 409792 - DNA, 122 bp, Homo sapiens
cacacatcgatgaaaataactaaaggagagtgccagagcacatcaaagaaatagcagaaccggtagagcacagaaacccagtatggtcacatagagaacaaaaggaaacaccttgcctctgc

SEQ ID NO: 409793 - DNA, 122 bp, Homo sapiens
gacaggaaggcaggagatcagagaaagttttttgcttcagaggtcttcattttaggatatcgctttctagcaccatgtgaggacacagggagaagatggctaggtgcaaaccagtaagaatg

SEQ ID NO: 409794 - DNA, 122 bp, Homo sapiens
ctggtgccagaagctgaaccagcgcaaggagaagctctccaggcgggaacgggagcaccacgcggaggccgcgcagttccaggaagatgtcaacgccgatcccgaggtgcagcggtgctcca

SEQ ID NO: 409795 - DNA, 122 bp, Homo sapiens
ctctgaggccgaagatgcgttgcgtgactatgctgctgcctggacgcggggtctctagtccggaggcacggaaggacctgcctgcctgactctagtctgcaagtctcgggcacacgcgcggc

SEQ ID NO: 409796 - DNA, 122 bp, Homo sapiens
gggtgatgcgcgatcccgaggaggactgaaaagagactgaaaagcagggctgaggagtggcggcaaccggcagcgtccagctcccgcacctcgctgcacatcgcacctgagccccgccgcga

SEQ ID NO: 409797 - DNA, 122 bp, Homo sapiens
ccactaagtattggctaaaatcttccattgaaattctgccctgcaccacttccttcattgcgagcaaagccattcatcagttctttcatgctggttcaattaaatcctatagtgctcccagg

SEQ ID NO: 409798 - DNA, 122 bp, Homo sapiens
tgtaatgtttacagtgatccagacctggggatgcttgcttcccgacgtgtcctgggatcgcgcttctgaaaaagctcacctcacaacgcctcctccggacctaaatcgcgcaccagtgagtc

SEQ ID NO: 409799 - DNA, 122 bp, Homo sapiens
acaagccctggtccccgacgggctagcgagaaactgcctccgttggcaaattcgtgggggcggctccccaggccatctgcctgcctggccgttggtccgtgcggcccctcacccctaaagtg

SEQ ID NO: 409800 - DNA, 122 bp, Homo sapiens
gcaaaacacaattcgggtgggaagggcagtgtgcagcgttctccgttgtctgttctgccccgaaaagcttcccccctttaggtttaacctgcgcccccgcgctctgcatcagcgccgccccc

SEQ ID NO: 409801 - DNA, 122 bp, Homo sapiens
cccatgctccctgcatccgtcctccccacgcccatctgtgctccccatgcccatgatccccgcacccgtgctccccgcactgcgttccctgcgcccatatctgctcctcgagctcccttcca

SEQ ID NO: 409802 - DNA, 122 bp, Homo sapiens
ctccatccgcactctcagcttttattcttgcctcctacttccctgagcaaagggagcagccggtgagagtttccttcctgggctccactgagcagctgcccacctcctgccccaggcccacg

SEQ ID NO: 409803 - DNA, 122 bp, Homo sapiens
ctccggtccctcctccccctctgcactggatgcacctaggagctccccaccactcgcgcacgccctgaagataccgactaccctctgactcccctgcctggaagcccacacccgctctcctc

SEQ ID NO: 409804 - DNA, 122 bp, Homo sapiens
ctgggagcgcgcgagtggggacgcccgggcccccggaggatggtgacagcctctattctccgggagtccagctaggggcgctggtgaccacgcacttcctgtacttggccatgtgggcctgc

SEQ ID NO: 409805 - DNA, 122 bp, Homo sapiens
gagggagggaggaatcccggaggccctcccggaggccggggactcggctgaggtgggtgtcgccgcccacaggggaccggaagctgttcgtggggatgctgaacaagcagcagtcggaggag

SEQ ID NO: 409806 - DNA, 122 bp, Homo sapiens
ccacagactgcctgaccctcagcactgctctcctccatacctgacgagggaaacctgagtcggtcctcagtccccgttccaaactccacctcgtaagcgaatccctcttcaattcctctaat

SEQ ID NO: 409807 - DNA, 122 bp, Homo sapiens
ctagaagaatctcagcgaatccttctccagtactgacttcaaaggttctcagaatcgcggcgaaagcaccctacgcaaaatagcggaggtcggcgccaagaaaagcactgcaggttcagggc

SEQ ID NO: 409808 - DNA, 122 bp, Homo sapiens
gctccacaccccgccgtggccggctcgccgccctccctttcctcttccgtccggcctccccgccctcggtccaccccctccgcgcgctcgcccaccccgcccagcccggatctctgtcagcg

SEQ ID NO: 409809 - DNA, 122 bp, Homo sapiens
ttgaccagagccctttatgggagggacagacaggctgcccgaatgcggtgtgggagagtgcgggtccgctcacccttggctctgaacacattttgtgggggcaaaagggtggattccttttc

SEQ ID NO: 409810 - DNA, 122 bp, Homo sapiens
ccctccctcctccacctttcctggagccagcagacctgcgggagttggggccaaaagtgccggagctgggcttccctagaacggcctctcctctgcttccctgatagggccacctttcgagt

SEQ ID NO: 409811 - DNA, 122 bp, Homo sapiens
acaggtagacaagctcttgttcaatttctaatatatagagtccagtaacttgagaagtagcgaaaggattaaccagacttgtatattaatgaatgtgtttatttagggtgagcttaaccagc

SEQ ID NO: 409812 - DNA, 122 bp, Homo sapiens
cttgctttacctttgggagaaaggggcggagtccaacctaatggggattaactccaaacacgctggaggcttcaaacccagcctcagacatacaggcacttgaaatagaaagtagcttagtg

SEQ ID NO: 409813 - DNA, 122 bp, Homo sapiens
tccccgctcaactgtctcttttctttttggggttctcctcccactcggtgctcctggtgtcgacttggcagtcaaggagaggcatggtggcctgggttaggaagagggaccctgtcgctagc

SEQ ID NO: 409814 - DNA, 122 bp, Homo sapiens
ctcagctcccccgggtccccaagtaagctggggcctaggcatgcttccagccacttccaccggacttgagttttccaacacctcacagacaggccccttttattatctggcatcttctctat

SEQ ID NO: 409815 - DNA, 122 bp, Homo sapiens
tgtggaaaggccgcgtgggtcctgactgtgcgtggaaaggccgcgcgggtcctgactgtgcgtggaaaggccgcgcgggtcctgagtgtgcgtggaaaggccgtgcgggtcctgactgtgcg

SEQ ID NO: 409816 - DNA, 122 bp, Homo sapiens
catcccagggaaagccaccagctgggagagccatcccagacaaggcctgctccctttgggcggacctctgtggagaagccagcttggcacgttctttctcctccactgcaaagttaaatgcg

SEQ ID NO: 409817 - DNA, 122 bp, Homo sapiens
ccaggaatactgccctccccggactacagccctgctgcgtggacaagggcgaggacccgccggaaacagagacgcgagcccccgcccacctacctgctcctgagccggcctcgcggggagcg

SEQ ID NO: 409818 - DNA, 122 bp, Homo sapiens
gagggacagctttctttgtttttttgttttcctccatgaaatggggaggtgtcaagtgagcgagatgtccccggccacacagtgaagcacaaggcagccgaagacacagcaggcaggtcagg

SEQ ID NO: 409819 - DNA, 122 bp, Homo sapiens
ggcttcccccagtgaagatgaggagacctttgaactgcgggaccgtgtccgccgcatccacgtcaagcgctacagcacttacgatgaccggcagctcggccaccagtctacccatcgcgact

SEQ ID NO: 409820 - DNA, 122 bp, Homo sapiens
cttttgaagcagctggagccaggccgggtcttcagcagtgtccatctgccctcatgaccacgcctgcacccaaggctgctgtctggttctgaaacagagagagagctgactcagacttccca

SEQ ID NO: 409821 - DNA, 122 bp, Homo sapiens
cctccgccgtgacttccgaagctggctccacccccagcctctctccgttttgattccgagcgcctcttccatgccaggccaagtgagacgctaggaatataaagatgaacagaatcagcctg

SEQ ID NO: 409822 - DNA, 122 bp, Homo sapiens
tatatctcttgtgttgatgttacttgataaacctaacatagaaagcacaaaataggctggcgccgtggctcatgcctgtaatcccagcactttggaaggctgtgaggcaggcggatggcttg

SEQ ID NO: 409823 - DNA, 122 bp, Homo sapiens
gcgccagggccggttcctgacccgcctcctggctggagggttcaaaagacttcagacctccggggccctgtgcacagagatgctggctgcatggggcgtggaggggcgggatggggagccgg

SEQ ID NO: 409824 - DNA, 122 bp, Homo sapiens
acctccctgagtgtgtcagaggctccgcttgggctaatgtgcgcctttagtgatccagcccgcatggtccatcatcccaccacaagcagcctgcggtgtcgtgtcctcccgcttccctttcg

SEQ ID NO: 409825 - DNA, 122 bp, Homo sapiens
accagccacgcagatctgcatccaggcccatgaagcaggaggccaagcccggccctggggcgggtctcctttggcgctggggctagagccgccaagcccggggcttctctgcgtgggtcgag

SEQ ID NO: 409826 - DNA, 122 bp, Homo sapiens
agggatgactgagcatttataacttttgtgtatctccccgtgggtgcagcccttggccagcgagatgctttgacacagccccttaagatgttttaagggctatcccataaagccgggaaggc

SEQ ID NO: 409827 - DNA, 122 bp, Homo sapiens
aaaagaaagtggaactggaacagtatggcagagggaacagcctacacaaatgcttgggggcgcgaaagaagttggtgtgtcacggaggaacagggagggaggcagggtgggcgcagagggat

SEQ ID NO: 409828 - DNA, 122 bp, Homo sapiens
tctaggtactggagataaagtgggacaagagaggtgaggtctggacccttggcactttcacgataaaatacacaggtaaacatttgcctttagggccccctgtgattacttccactcttgca

SEQ ID NO: 409829 - DNA, 122 bp, Homo sapiens
gaaaaaaattaaaatctgtgtcttacattccatttgttaaacattccctggagtgtgtgtcgtttctcagatctgttattttctgttttcttttattactattatttttttgggagctctgt

SEQ ID NO: 409830 - DNA, 122 bp, Homo sapiens
ttaaccattaaaaccacttaagaggtcttctctcttgatcactacctactaagcgctaggcgcggtgctgagacgttctcttgattatcatattgagtctttagatttaggagaaacaggcc

SEQ ID NO: 409831 - DNA, 122 bp, Homo sapiens
ctgccagccccctgcccttttcttgccctgtctctgaaccttcagaacattgatccttgccgcagccccactagccaagagaaacagagaaagaccattccccctgcctgtccttgcggccc

SEQ ID NO: 409832 - DNA, 122 bp, Homo sapiens
agatctgtgtgtggctgtgatccgtgcgtggctgtgacccgtgcgtggctttggcccgtgcgtggctccggcccgtgtgtggcggttgcccatgtgtggctgtgacatgtggaggcgaactt

SEQ ID NO: 409833 - DNA, 122 bp, Homo sapiens
agctggtcacccggctgggaatcaagattgtgtggctgggaagacaccagtctctgtgctcgggttcagcccagtcgggcaagaaagtctgggcagctggagaaggtcgtcacagtctcccg

SEQ ID NO: 409834 - DNA, 122 bp, Homo sapiens
cacccccctgccccaaacaccccttacctcctggttgaaggcgttgacggcgtccatgttcgcgctgcggcggcggctgctccgggcccgccggtcacatagacctcgcgccgcggcggagc

SEQ ID NO: 409835 - DNA, 122 bp, Homo sapiens
catctcagagggctgcctggaagagacgtgagctttcccttggaattcacattgacctcacgttaccagctacactaaggtcaaatcaatgtttgattaaaaaaaaaaaagatcctggccat

SEQ ID NO: 409836 - DNA, 122 bp, Homo sapiens
tcccgcccggctccgccccgctcccgcgtgggcacaggcattgggctcccgggggttctccgcgcccgcccctgccggccctgaccagcctgtagtaactggcccctaggccgcagttcttt

SEQ ID NO: 409837 - DNA, 122 bp, Homo sapiens
cgcgccaacatggcttctgcgctgagcacctgcatgtggcacggggcccagggtggtgaccggcagtgactgcctcacagcagctgctcactgctcctggccccccgcttttccagcagacc

SEQ ID NO: 409838 - DNA, 122 bp, Homo sapiens
tcctaatggcaggctctggctgtggtgcgaagaggcagggggaatgtcccgcccttcagacgaaatccttgggacaggcaaaaccaggggcaggatgtgagaaacagcctcagtcataggca

SEQ ID NO: 409839 - DNA, 122 bp, Homo sapiens
ccaaactggggcccactcgccctgtatagcaataccagatatccacaccaaggttttcagcgggagaaaggaaggtgtttattggcagggtgcctaacaaggaggatcaggcagctcatgct

SEQ ID NO: 409840 - DNA, 122 bp, Homo sapiens
gaacttcccggtgcacggtgcgggcgagatctgcgtgggccagaacacgtcggacggctccgggggcccaggcggcggccccactgcctaccctaccgcgccctacctgccggacctgccct

SEQ ID NO: 409841 - DNA, 122 bp, Homo sapiens
tttgaaagtgccttgcaaagcatgttctcctggattcttcagagcctttcctgaggcagacgagcatctgctccaagtcagacaggaggaaactttgtctctggggactcggccataatagg

SEQ ID NO: 409842 - DNA, 122 bp, Homo sapiens
ccggccgtgcggggaggcggctctttcttacctcgggccgggcctgggaccagcaaactccgaacctcgacctcgcagggcctcgcagccttccaggtccctggccgccggaccgaccttgc

SEQ ID NO: 409843 - DNA, 122 bp, Homo sapiens
tttttaaatgatttaaaacctgtttctgtaccaagtggtacagaaataggggccagcccccggtccagcgccacgagctcctagggccagagtgcaagagaggcacagggcgagagggggac

SEQ ID NO: 409844 - DNA, 122 bp, Homo sapiens
aggaagctcagggtggagctggtggaggagcccaggctggacctgatgagcgcctcggcccgctcacggacactcaggtggccggtggtggtgacgggcgggggctgagagtgcagggacgt

SEQ ID NO: 409845 - DNA, 122 bp, Homo sapiens
atccagtccaggttttgcctttgactcggcctgtgaatttcggctgtgcaatgtgtagcacgtttctttctcccccctcctttctccttccctcttgcctccagtgactgtctccaggattt

SEQ ID NO: 409846 - DNA, 122 bp, Homo sapiens
agagaaactaaaagcgatcttggggctctggccggtgttttataagccagccgactgaggcgtgtgacgcaagtcctgagagccctgttgaggagtgcgcaccccacccattcccggaaaga

SEQ ID NO: 409847 - DNA, 122 bp, Homo sapiens
ctgcagagctttgggacctcagcacttgagcagcatgtggacgcgagcagcgagtaaccccgggctcccagagacgcgtgacggggtccccagggggttgcttgagggccctcaagtcagga

SEQ ID NO: 409848 - DNA, 122 bp, Homo sapiens
acaagcgacagcgacactatgctcagcaaaagaagccagacacaaaggccgtgtcctctgcgattttgtgtatatgaaatgtccaggccgggcgcggtggctcatgcctgtaatcccagcac

SEQ ID NO: 409849 - DNA, 122 bp, Homo sapiens
ttgtaataggaagcatttttgcattgttctcttgtgggtgtcactacagacatgttctggcgtgttctccgagggatggagcatcctgttatatatttgacttcaaattgagatgttggctt

SEQ ID NO: 409850 - DNA, 122 bp, Homo sapiens
gttaacatcctggatgagcctggaagtgggctttccccagagtctgcagataagagcccacggcagctgacattttgactctagcctcgtgaggccctgagacaggaggtttcctgccccgc

SEQ ID NO: 409851 - DNA, 122 bp, Homo sapiens
tcccgcagaagctccggatagggtccatgctgagcacagcggggaaggactccaggcgtacgcagaccccaccgctcagctcacagcctcccgccactagtttgaatctcggcgccggacgc

SEQ ID NO: 409852 - DNA, 122 bp, Homo sapiens
gatccttatttctaacaaactcccccgatgattccaacacacgtcaaggctggaagcaaccgattcgtttctttgggcctcagtttccccatccaacttaaaactcacacaggagtctagat

SEQ ID NO: 409853 - DNA, 122 bp, Homo sapiens
ctgaaaagggttctgtgttactgaccttaagctcacctcctgagccccaagttcccctggcgggacaagctgcttctccacataccttctggaagagcttgtcgtcaggcgtgggggtgctg

SEQ ID NO: 409854 - DNA, 122 bp, Homo sapiens
tagacaatatcctaactaaattaacagcatattcaatatcggagtgaacagggcgcttcacgctttccaccccgccccgccccgccccttttgttggtcctgcgaggcctccgtctggggta

SEQ ID NO: 409855 - DNA, 122 bp, Homo sapiens
cccggttcctaccttccaggtccaccccgtggcgctgggccaggtgaagaacattgtccccgactctgccactcactgggatccgctggcctgagcggtctacgaacaccacgttcaccctg

SEQ ID NO: 409856 - DNA, 122 bp, Homo sapiens
cacgtccttcaggtctggtgtcctttgatttaagtgagtaactctggtggtgtcatcgatcgctctgacagatttttcttttgctctagtcttgctgccaggtctgcggaaaagagaatcct

SEQ ID NO: 409857 - DNA, 122 bp, Homo sapiens
cattttttttttaaacaggaagtccagaggcccgggtccagggcatccagccccggatctcgaacgccctcctcgcccctcgccccgcgtagcccggctgcgctccccgctccccgcccggc

SEQ ID NO: 409858 - DNA, 122 bp, Homo sapiens
atccaggcacatctctttccatctggcaggggtgtggcgtatttccagagggcttcaatgcgcaatccggcagcgcactgctgggagccccggcacaggacgcctgaccacactgacataca

SEQ ID NO: 409859 - DNA, 122 bp, Homo sapiens
tgtagctcaaattcaaatctaagaaggatcagagttaatagaaaaccaaatggaaggctccggaggtactggaggaagcagaagcattactttgtagcatctctcatgccacagttgtcacc

SEQ ID NO: 409860 - DNA, 122 bp, Homo sapiens
tcagctccaaccctcacttccacgttctcacccgcaatcgcagcgaaggcaggaagttcccggagctggtgctagacaaaccgttggaccgcgaggagcagccccaactcaggctaacgctg

SEQ ID NO: 409861 - DNA, 122 bp, Homo sapiens
gcctggcctagatgctgtgtagatttccaggaggtggctcccacgtctggccctccccagcgatggccctccctcccccccactcacctctgtctagctaattccttagtccttcaggaaat

SEQ ID NO: 409862 - DNA, 122 bp, Homo sapiens
ctgcgtctgagatatgtcacgagaaggtgggggtgggccagagccaggcagggggagtagcgaggagagcaggagacagtgtgcctgctcggtcccaggactctgtttactttgtctgcttt

SEQ ID NO: 409863 - DNA, 122 bp, Homo sapiens
cgcgtccactccccgcacccccgacagcgcacctgagccccgcctcggccgcacagcgctcgccgctacccacccggacccccagaaacgccccgccgctgccgctccgccgaggaccgcca

SEQ ID NO: 409864 - DNA, 122 bp, Homo sapiens
tgtttttattgttttattttgttttgcttttaagatgggttctgagaagtttggaggtgtcggtgtgaagtgagaagccactctgctaggttttttatccctgtttaaagattccatttttg

SEQ ID NO: 409865 - DNA, 122 bp, Homo sapiens
cgtgtccgggcttcgggagctcctggttccttgctctattgggctgtggctgaggtgatccgcgctcagtgtggacgcacaagtaacttcgtaaaggttgcatggtggttggggctaaccta

SEQ ID NO: 409866 - DNA, 122 bp, Homo sapiens
acgatagactgcactccctagcctcccttgcagcctggatatgaccgtgaaactaaattacgggccatgggaatgagcaaaaaaaaagtgaggcgtgtaattgtgtgcaatgaccggcctta

SEQ ID NO: 409867 - DNA, 122 bp, Homo sapiens
ggaggctgaggcatgggaatcacttgaacctgggaggcagaggttgcagtgagccgagatcgcaccactactctctagcctgagcaacagggggaactcaggctcaaaaaattaagtaaata

SEQ ID NO: 409868 - DNA, 122 bp, Homo sapiens
aaaattcggcctggttaaactggaaagaccaggaaagcccgcccacgggcgtccggggaacgcctgcaaagtgccagcaccctaccaacccaggcgccgcacgggtggggtcgcggccgcag

SEQ ID NO: 409869 - DNA, 122 bp, Homo sapiens
atgtatcactcctgtgcaacaataataatggcatgcattaagaccttactgttttccaggcgaagcactccttacacactatctcacttaatcattccaacaaacctaagatcacggatatc

SEQ ID NO: 409870 - DNA, 122 bp, Homo sapiens
gtcgcggggacggaaggaggcgacgcaggccaggagtcgtgcgcgcgggcggcgagggggcgctgtggcccgtgtctgccggcccgagtcccggcaacggtgggcgcgacccacctcctccc

SEQ ID NO: 409871 - DNA, 122 bp, Homo sapiens
ctcttacagggaaatcggcgcccgagacacagccagcgggtgttcagaaaggaaaacgctcgctcaacagccttttcggttgattcttacattcaaggtgtgttactatttgtggcaagcat

SEQ ID NO: 409872 - DNA, 122 bp, Homo sapiens
gtgggttttctcagtctttacattattgacattttgggctacataactctttgttaggcacgggctgtcctgtgcaatctaggaaatgcagaatgtctaccacatgcctgtcctctacccac

SEQ ID NO: 409873 - DNA, 122 bp, Homo sapiens
aagagatactcaacctgtatccgcggagatcaagactgtgttctgtggctgtgctgagagcgaggtgatgattcacttccagttgagagttcatgttggatgttgtggcggggccacagcag

SEQ ID NO: 409874 - DNA, 122 bp, Homo sapiens
aacaagcggaaactcgagaagcgctaatgcttcaaagggtcaatgaccacacataatctacgtagccaacgtgttaaaacacaccaacgcatttttttttcctaaacaaagtaggaaagcgg

SEQ ID NO: 409875 - DNA, 122 bp, Homo sapiens
tcgcactcacgtgactgagttttcctttctcgccacctcactcgagcccagctgagttcacgggactccttgggcccccgcgtttcctgacctgtcttcccgggcttcctccctccgcgctc

SEQ ID NO: 409876 - DNA, 122 bp, Homo sapiens
ttcagttagctgaggttttattctgtttctactttggtggtttgaaactaattacagactcggttgtgcctacatgtgcaaaatgaaatgagaggttgagccaattactttaataatgaaga

SEQ ID NO: 409877 - DNA, 122 bp, Homo sapiens
ttttttttagcacaggtaggggctcctggctgatcgtggcccttttgtgcagttccaccccgcaccgtagggggcaggagcagcccttcctcgctcgcggttttcgacgctgctttggtctc

SEQ ID NO: 409878 - DNA, 122 bp, Homo sapiens
ctcccgcgtccggcagcccctgcccaagcaaagggacaaagcggcggctccggggccccgcggctccagcctcacgcaagcccggcctcgctcacctattgcgcgcagctccagtccccggg

SEQ ID NO: 409879 - DNA, 122 bp, Homo sapiens
cgggggggcgccacacctgtgcatgtgcaggtctagggggagcactaagaccagccgcggcgccgggaggccgaggccagtgcagcgacgcatggggagtcgctctggcgtgacgtcagaat

SEQ ID NO: 409880 - DNA, 122 bp, Homo sapiens
ctaagtcttcaaaatccagtgtgtattttacttggacatcacatctgaatttggactagccgtatttcaggttctgaatactgcaaggagctaatagctaccgtactgaacatgggctgttc

SEQ ID NO: 409881 - DNA, 122 bp, Homo sapiens
tcaagcgctctttccaacgcatcctatgcctcagctggatggacaacgccgcggaggagccggttgactattacgccaccgcgctcaagagccgtgcctacagtgtggaagacttccaacct

SEQ ID NO: 409882 - DNA, 122 bp, Homo sapiens
tgattgaccaaaatacagagaatattcccagatcatgatgttcagctgccaggcagtaaacgagcttctgggagtagaacatccatcccccttcccggaatttggcatatgtttgaggatca

SEQ ID NO: 409883 - DNA, 122 bp, Homo sapiens
ggcgtgatcgcctgcgtcgcacccgcgtctccagtggccaccccttgtcctacaggaacgcgcatctgcttagcaggcgctgagcccttgaggaggcctaaaatgaatgaacgcggctgtgc

SEQ ID NO: 409884 - DNA, 122 bp, Homo sapiens
aacccctctctaaaaacagaaggaaccagcaggccacctctgaagatcatttcataaacccgtttgaagatttgttgcccggttttgcattgattggactacttttagggttccaaaagttt

SEQ ID NO: 409885 - DNA, 122 bp, Homo sapiens
aaatatatttccttctttataagttttctaatgagaattctcatgaagagagctcttagccgggtgcagtggctcgcgcctgtaatcccagcactttaggaggccaaggtgggtggatcact

SEQ ID NO: 409886 - DNA, 122 bp, Homo sapiens
tggccctcactgagttggccaatgggaaatgacaattgtgaggtggggactgcctgcccccgtgagtaccaggctgttgaggctgggccatctcctcctcacttccattctgactgcagtct

SEQ ID NO: 409887 - DNA, 122 bp, Homo sapiens
ggccgcgccggtggctgccgcggagcccagcagacagaggcggcgcggggaccctggctccgctgcaggaggctttgagggtccccggcccccggcccaagcccatgccccctcggccggcc

SEQ ID NO: 409888 - DNA, 122 bp, Homo sapiens
ttcttgaaaatgcctctattggcaattaaggattgaagagctgaaacagagaagacccggcgtgacactggtgctcctctgaaggtttggccatgcctcagcattgttctgctacagtcagc

SEQ ID NO: 409889 - DNA, 122 bp, Homo sapiens
tccacttgccgttgcccggggtgtcggttacctcagcaaccaccgccctttcttcctgaccgccaagctgacaataaacagatgacccaacgttgcctaagttagaacatgcaccgctgctg

SEQ ID NO: 409890 - DNA, 122 bp, Homo sapiens
ggggggagggcgcaggggcgggaggagacacatgcgcgctgccgccgccgccgccgccgccgcagtccttagcttcccggggacaggaaaccttcaagaccgagctgccacggccgcctccc

SEQ ID NO: 409891 - DNA, 122 bp, Homo sapiens
ggcatttacctttggctagctctgagctcaccgcagcatggtagcgggagcgcagctgcgcgggcaaccgccgggtttgtggccggttggcgggctcagtgccgcctcagtgggctctagca

SEQ ID NO: 409892 - DNA, 122 bp, Homo sapiens
cctccggggcgggatgggtggggcagcggggagcccctcatcctctgtagtggtgggcagcggctcgggtggagtggcaggcacaggtggtgagcggaagatgtggcgcttcatgggcacag

SEQ ID NO: 409893 - DNA, 122 bp, Homo sapiens
acacagctagtaggtggtggagctgaaccagccagctgggtgtatttacaatgatccaagcgacatgcaagaaggaagaaaaggggagggcaaaaagtgcctactacgtgtcagatgcttta

SEQ ID NO: 409894 - DNA, 122 bp, Homo sapiens
atatcaggagccaaagccgaaaacctcgcagccgcgttctcccaccggaactgtatcaaccggccctccgcagagaactgctagtcctttaccaaaacagtcctccgaccgcagccacccta

SEQ ID NO: 409895 - DNA, 122 bp, Homo sapiens
agtttcccctgggagatctggccaagaactacccggtcggggcggaacgacatccggtaacgcccctcacagttcacttccgtcctccacctgcgtctctgcttgcgccatttcctccagcc

SEQ ID NO: 409896 - DNA, 122 bp, Homo sapiens
atcgccctccacgcgaccagggggcgcccgcggtatcggcccggctagttcgcaggcgtgcgccttccctcactgcgccggaacgggccacgttctcggacccagaagccgcgtcagaattc

SEQ ID NO: 409897 - DNA, 122 bp, Homo sapiens
tgtctgtgcctgcgtcttcgccccggcgagctgtttccagaatcctctgggcggtggcctcgcctcctgggctgcgctgcgatcagctggggcaggctgtgcttctcttaccaaccctgctt

SEQ ID NO: 409898 - DNA, 122 bp, Homo sapiens
agttttgggacagcatgttgttttagacccaaaacaatgacatgtaaacggagtcaggaacgtagcacgcatctcatagaaagcatttcctacacgtctggctctcggctgtggggctcctc

SEQ ID NO: 409899 - DNA, 122 bp, Homo sapiens
gggcctgagtcccctgggcactgctgggcggggcccatgtcgtacgggttggggtgacgccgccaccggctgcatctcgctgcctccaggtggggggacgctggtcaccgccctgagcccca

SEQ ID NO: 409900 - DNA, 122 bp, Homo sapiens
aaagttaccaaaaataagcaaagcggacacagtctgttccctttggaagggtatccaccgcgcggcatgtgcgagttcagtttcaagttacttgccaatataacccgtgcacttcagaaatt

SEQ ID NO: 409901 - DNA, 122 bp, Homo sapiens
cgataaccgacttttggggtgactgactcaggaataacgacacacagagaggggtggcagcgcctttgctcattccagaccctgtgggctggtggccttgcccctctgagatgtgggcattg

SEQ ID NO: 409902 - DNA, 122 bp, Homo sapiens
ctttgtcaactagactggagttcagtggcacgatcccggctcacagtaacctctgcctctcgggttcaagcgattctcctgcctcagcctccctagaagttggaattacaggcacgccacca

SEQ ID NO: 409903 - DNA, 122 bp, Homo sapiens
catactcactccacccaaatctcatatagagttagtcccctctgcatcagccctgacaggcgagcatctcctctcttcttgcatatccctgtaataggaagttcacctcctcccagagcttc

SEQ ID NO: 409904 - DNA, 122 bp, Homo sapiens
gtaacttacaagttcccattccccagtggaaagcatggcacttctgaggcgcatgctccacgagtcgcttttaagtattcctcagggctgggcttgtctggcatgcgtcactacccctagaa

SEQ ID NO: 409905 - DNA, 122 bp, Homo sapiens
acccagttcatctgtggaattcagaaccccagagtatttaatctgccatctcaggacctccgctggggagctggggcaggtgggtgggtggtcccgctgggcttccgtggtgcatgccaggg

SEQ ID NO: 409906 - DNA, 122 bp, Homo sapiens
gcaccgagccctctctcttcacctccctttgttgatgagccaggagccataaattaatcccgttctgtggctcggggaaggaccaaggtgttaaaatctcagtaaaccctgctcggctcccc

SEQ ID NO: 409907 - DNA, 122 bp, Homo sapiens
ggtttcgtcctgataatcactgtgctgtgttttccctacacgctctgtgacggggccgtccgcctccttcctgggctcctttaagagggtggtaacggtacatcaccgcgggagtggagagg

SEQ ID NO: 409908 - DNA, 122 bp, Homo sapiens
ccgaccgaaggttcttctcaatcgaagggttcgtggtctcacggcttcaaggaatgaagccgtggacggcagtggcgagtgttacagctcgattagagagtgtgctgcggcaagatttatta

SEQ ID NO: 409909 - DNA, 122 bp, Homo sapiens
cctgccgcgactcacttagcaagtctcgcggattaggtttgatcgcattcggccctttcccggatagctcgtcgcggatacttctcacagcgaagcagcagctcccagaagccgtaaagcta

SEQ ID NO: 409910 - DNA, 122 bp, Homo sapiens
agggctgttccatgactcctccagtttgggttaactgcctgtctctatgctcccccaaaacgctctacataccactactacaacattaccttactgtattgcaatcatctactcatttaact

SEQ ID NO: 409911 - DNA, 122 bp, Homo sapiens
tcggttgctccgcttagggaaggtgccagcctttagacagcttccgaataggatgctggacgtcgcataaccacgtgtttcctgttaactgagcaattaagttctgtttcttcgctcactcc

SEQ ID NO: 409912 - DNA, 122 bp, Homo sapiens
tacagaatgtgctcatttgttcattcagtatttgtggccagactgtgttgtaggtgctagcgattcaggaaatatccatgaaatttggtaagcaaagcctaatgaggaggataaatctcctg

SEQ ID NO: 409913 - DNA, 122 bp, Homo sapiens
aggtcccagtccccagcgccgggcgagctccttctccgccgggctgggtgctccggccggcggcgtccgaccagatctgagcaggtgctgtcaccaccaccaggaaggagagggactcagtt

SEQ ID NO: 409914 - DNA, 122 bp, Homo sapiens
gaagctcataaacacagctccttacagaaggagagcggggagagggctgttgacaggagacgctgtgggaatcacttcacctgggtcttactggtttgcagatgtgctattctgaacagtca

SEQ ID NO: 409915 - DNA, 122 bp, Homo sapiens
caggttagtccaatcggggaatattttccccaagtcactcagccttgtcgactcaatcatcgcagcaaatggcattatcgcgggcatctgtgtaacccaagctgccgtgggcctatcaaata

SEQ ID NO: 409916 - DNA, 122 bp, Homo sapiens
gcttttttcgaaagccaccaataccagccgctactacacctcaaacaaaacctagctacgcgggtacgctcccgaagcgttcagctctggaaacagcccaacgacgctctcaaaagccgaca

SEQ ID NO: 409917 - DNA, 122 bp, Homo sapiens
ccggcgcctcagcgggcactggggtctgttcccccttccccgtccctgctccctgccaggcgcgtgcgggacgccgctcttggtccccacgcctccgccccgccccctcccgggacgccggg

SEQ ID NO: 409918 - DNA, 122 bp, Homo sapiens
catcactctccttaccttgcccttggctgactcgatgtgttgcatggttcctgtactagacgtctaacttttttttttttttttttttgagacagggtctcactctgtcacccaggctggag

SEQ ID NO: 409919 - DNA, 122 bp, Homo sapiens
ttcctgccaggatacccagaccagaataaaactcatttgggggccgggtacggtggttcacgcctgtaatcccagcactttgggaggccgaggcgggtggatcacctgaggtcaggagtttt

SEQ ID NO: 409920 - DNA, 122 bp, Homo sapiens
aaatctctgaggattagcgctgtactttagctttttatttttttgcttggtaggggacaacgaacataatgctgaacacatatttgttacctaaaaaaggcacatgttccatgatgtcaatg

SEQ ID NO: 409921 - DNA, 122 bp, Homo sapiens
gattcatgagggacccatgggggatgccctaccccccttccctggggcacagccactgaccggcagagcctggctggggtcctcgcctgtcatgtactgcactcgcacagcaaggttgcgca

SEQ ID NO: 409922 - DNA, 122 bp, Homo sapiens
tataatgtgagctccccctactggagagcaaggactttgttttgttaacggttgtattcccgccatctagtacagtgcccggcatatggtagacattcaataaatacttgctgattaattat

SEQ ID NO: 409923 - DNA, 122 bp, Homo sapiens
atgctgcccccgcgggcgcgctccctgaagtcctttgtggtcacctcagtggtggctttccgtgagtccgagggccaggggtgggcgtgggactggccagccttccatggagtggggctggg

SEQ ID NO: 409924 - DNA, 122 bp, Homo sapiens
ttttccaattaacgaaccagcgtgatctctgaacatgtgaaacggtcgcggcttctccggcgcctagtcctggagtcacttttaatctaagcaccactccagtgagaaccacacaaatactt

SEQ ID NO: 409925 - DNA, 122 bp, Homo sapiens
atctgcctaaagtaatagatcactagtgacaaagacaatgctggaatttcagtttctaggcgtcaaacatttttggtgttttgttttccatcccacgtgtaataaaagaatgatctttggag

SEQ ID NO: 409926 - DNA, 122 bp, Homo sapiens
caggtggccatggaaatcagggtgcataccctttaaaagcagctgtggcctccgagatatcgttttcccagtcttttctccccctccctgcacgacgcctcttggcagacatccgggagaac

SEQ ID NO: 409927 - DNA, 122 bp, Homo sapiens
atgtgggagaataaattaatctcactcaagaagacagaaggatgcatttttattaggtttcggttaggggagatttggataaagccatctgcacaaaggttgtggatatagtgatgtttctg

SEQ ID NO: 409928 - DNA, 122 bp, Homo sapiens
cgcagccaccaatttcctggagcaccctagggcgagcagtcagtcctggctggaggggaccgggttctagatcccgctctcttctgggactcaggaactgccggcctccatcttgcgcctgg

SEQ ID NO: 409929 - DNA, 122 bp, Homo sapiens
gggattacaggcgcgagccaccgtacccagcctttgttccactttcattcccaccagcagcgcatgggtgttcctggagctccatgtcctcactggcacttggtgttgccagtcttttgttc

SEQ ID NO: 409930 - DNA, 122 bp, Homo sapiens
cctcgacagcctagcactggggccagattatcgagaggacatctcctgggaaaacaggcccgagctccttgggggcaggcagggctctggattttattatcttcttatcttcagtattgtgc

SEQ ID NO: 409931 - DNA, 122 bp, Homo sapiens
gcgccgcgtcaaggagatggacgcctatggcatggtctcgcccttcgcccgccgccccagcgtcaacagtgacctcaagtacatcaaggccaaggtccttcgggaaggccaggcccgtgaga

SEQ ID NO: 409932 - DNA, 122 bp, Homo sapiens
ctcctgcatgggacatgccgtcccacctgcccacgggggaggagccgcacccatccccaccggccaggcaggcgtgagccacatctcctgaggggcccaacctaacagcctctgacgacctg

SEQ ID NO: 409933 - DNA, 122 bp, Homo sapiens
tgtttctgtattaggtataacattgtgctaagaaaaacagccaactactgatttcatgtccgtttccctatgggaaattactggccatggaaggagaatatggttggtttttcctgggcagt

SEQ ID NO: 409934 - DNA, 122 bp, Homo sapiens
aaaaaagtaactttaatgctcattcaagaagccctcttccaatttaaaacctgaaaagtccgggctttccttggttagaacctcccctgtctttggcagctggccctggatgctcctctctc

SEQ ID NO: 409935 - DNA, 122 bp, Homo sapiens
cagagggcgcgagagaagcgttgggcgatgggcttggagcgggatgcggaacccagctaccggcccatgggcgctgggaagcggagatgggctaggggtgggccggagaggggcgtctcgcc

SEQ ID NO: 409936 - DNA, 122 bp, Homo sapiens
aaaaaaatggggctgagttttggagatgctattcaacgaagctagaagatgagttatcatcggtttctggggctgagtaaaaggcagtcctagaattttactgttagttgtccaagccctta

SEQ ID NO: 409937 - DNA, 122 bp, Homo sapiens
tcattgttctatacttgtacgcattgcaaatactatgctcacttgcagagtttttgaaatcgcatgcatttgtttgctcaatattacgatgtattatgttacaatgaagagtttaatgccat

SEQ ID NO: 409938 - DNA, 122 bp, Homo sapiens
ggcctcggacctgataaggtgggggccactctcaaggggtgcaggccaggacctgagccacggaagtcaggggcaggagggttaaggtttcatccgaggaacagcccgttccgggcagcccc

SEQ ID NO: 409939 - DNA, 122 bp, Homo sapiens
gctgagcacacgattctcagcactattacttgcattcttgtcactgaaaggaagagggaacggagtgtgacagcgcaggttagacccccggcgcagccatccacctgccactttgtcacagg

SEQ ID NO: 409940 - DNA, 122 bp, Homo sapiens
cgttgggtacagagtttgaggtgattcgggaaaggagtgtgatgagggaggctggcgccccggctttccgcagcctgcagcctccccgagagcaagtcgagagtgccccggcagcagctggg

SEQ ID NO: 409941 - DNA, 122 bp, Homo sapiens
ccttcgccacacctggatatctctgatgctcgctatgggacaatgggtggattgggtccacgtcgcagacaaccaatggccttttcagcagcaagaggaagaggaggaagtccctgaactta

SEQ ID NO: 409942 - DNA, 122 bp, Homo sapiens
acaggttgagagaagctcccaactgagatttgtgtagggatgaacctcattggctgtaaccgatgagcaaacgaaaggtgtgctgtagccacaggtgcaggagctggatgcccctgtgtcac

SEQ ID NO: 409943 - DNA, 122 bp, Homo sapiens
ttatattttggaagcaaagcctccaggatttgcagctcctcggtgcagacccagcatgtacgtgtttgcgtttgtgtgtgtggcttgtgtgcgcattggtggccccgccgggcgcggctggc

SEQ ID NO: 409944 - DNA, 122 bp, Homo sapiens
atgatcaaagagacacaatagaaatgcatttgcttctgcagtcggtgtattcccccagctcgtgggctgtgctgacggacagcccgggagctggcagcttttgttccatctgtcagagtata

SEQ ID NO: 409945 - DNA, 122 bp, Homo sapiens
gagagagatacttgaaaacttctcttggtttcttctaatccatctttggaatgtcctccacggatggatgccttgcagttgaaacataaatgctataaaaattaatccccctagcactaccg

SEQ ID NO: 409946 - DNA, 122 bp, Homo sapiens
ctctcctaatctggttgcttccttttgtgccccccgggggtcaggaatcccaggtttctccgctgccgcccttgatgggatccgtgaggcctccagcgggcttcgcacgaggacgcgcctgt

SEQ ID NO: 409947 - DNA, 122 bp, Homo sapiens
gaataagcctgactggaggaggttccacctgtgagtgaacgctttggcctctgactgcctcggtttctatcccagctcccccggtaatttgctctgtcatgttgggcaagttgtttaacctc

SEQ ID NO: 409948 - DNA, 122 bp, Homo sapiens
gatttctacatcaagccttcctggttatcttctatctgtcctaaattgtcatatggagcacgtaaataaaacaatctgttcttctctaacatggacctttccagaaactatcacaactacca

SEQ ID NO: 409949 - DNA, 122 bp, Homo sapiens
tgcccctccctacccctcacacatccacccctccaccctgcccccaaggcgggtacccagcgcaggcccgggcagctgccccagctcctggaccctccacatcagagttcccaagacacccg

SEQ ID NO: 409950 - DNA, 122 bp, Homo sapiens
tcccacaggagctgaggaccagcacaggtgcctctcatccacatggacggcctgaaaacacgcacctccctgctccctccgcagcaacggacgtgccatcccaccacacagcacctgctcat

SEQ ID NO: 409951 - DNA, 122 bp, Homo sapiens
gcgcgcgccgtttctgcctctgggtctcggtgtcccttggccccttcctccccctccccccggtctccggcgcccagcgcccagaccagtccccgccctccagcaggacactcttccctcct

SEQ ID NO: 409952 - DNA, 122 bp, Homo sapiens
gctttgaagcttaggtgggatttcggaatgtgtctgagactgtaagtcaaggaaagtctacggaaaggccagatcaaagtcgattgtaaccagcatcaaatgcccaggttagattttctctc

SEQ ID NO: 409953 - DNA, 122 bp, Homo sapiens
cgcccatcttccagctgagcgtaccgggaggctcccattggactggagctgctacggaggcgggactttccctttttcttgaaccccattgggttaagtccagtccgagacaagcgtctctc

SEQ ID NO: 409954 - DNA, 122 bp, Homo sapiens
gcacctgggacccctcggagatcccgtgctccgcttcccctctttaagcgggagcttctgcggcagctcgcctccctatctacgcggaagagaccagggcaccgtttacacgagaaaaacct

SEQ ID NO: 409955 - DNA, 122 bp, Homo sapiens
taaggcccagggttcaatctgaaaagccatcctggatcagatctatcctacaatttatgacgatctgggtctttgattgcatctttttcttttcctgcaataggcatggcattgacaggaga

SEQ ID NO: 409956 - DNA, 122 bp, Homo sapiens
gcaccgctgcaaacgccccgggtcgctacccggatttgacggtggctggagcggcacgggcgacgcaaggcaggtattgcaccctggggcaaggcaaggtggacaaccagcggatgcggcgc

SEQ ID NO: 409957 - DNA, 122 bp, Homo sapiens
tagtttctcaaatcagaaaaagtagtcttattatttagtaaaaatgtgaccagactgtgccgtttttgttagtagagccatttgtcatctggattacttcttctggaaattgggatggaaga

SEQ ID NO: 409958 - DNA, 122 bp, Homo sapiens
cccttacatgatgggcaggatagcatgtgtcagtcaatgtcctcagtgacctctacgcaacgggggtcatggaatgcgacaatatgctgatgctcctcggagtcagtaataaaatgactgac

SEQ ID NO: 409959 - DNA, 122 bp, Homo sapiens
taagcctgtggatggacacctctttgcattattataggaagaagaaaaagagtgaatggacgatgacgaagtagagaagtgtctgaggctgctacttctaggaatagcagaattcaaagtta

SEQ ID NO: 409960 - DNA, 122 bp, Homo sapiens
taactctctggaaagcgtcaatcatcagcatactcccagtagtcacgacttggactcaaacgaggctggttacgcatcgctgtggaaggaaggaagaggagacatttttctaattgatctga

SEQ ID NO: 409961 - DNA, 122 bp, Homo sapiens
gtctaatccctccctgaagccctaaaggttggactcgatgctctctctcagtcaccacctcgtctatttcagctgcgatcccattgtttcttgcctggttttcttctttaaaaagaaaaaca

SEQ ID NO: 409962 - DNA, 122 bp, Homo sapiens
gtgagccaccgcccctggccgagcatattaaaatctagttttcaaaaactgaactgcaggcgccgctgtaccaaacgcttccctctgctccccaaccccagcctacagaaaactggtccctt

SEQ ID NO: 409963 - DNA, 122 bp, Homo sapiens
catgcaactaaaaaccggtctggactccctcagttactatcagaagttcatgccacccagcgtccatgtcacaccaccctcaacatgatctagtctcctaccccccacctcccataatcttt

SEQ ID NO: 409964 - DNA, 122 bp, Homo sapiens
gaggtggtggtggggggaataagaatgatacctggaaccatcgtgttcagagcttcctctcggtgaggcctcctaggtgcccagccctgggcactttgctgtttccagtcttcagaccctcc

SEQ ID NO: 409965 - DNA, 122 bp, Homo sapiens
cctgcccagcgttcgggcgtgcctttttttcagccgagacacaaccctgaacgtggggcccgccagcccggcggctgcctcgtggaagtcacgttccttctgcccgtcctctcgggtactct

SEQ ID NO: 409966 - DNA, 122 bp, Homo sapiens
ggcagagacgcaggggcggggcctacggggtggtgagcgggccctctgctggtgggggggcggggccggaggagccaccgcctccccgcctcctggagaccctgagggagaaattcccttta

SEQ ID NO: 409967 - DNA, 122 bp, Homo sapiens
ccagggcgctgacaaggcagggccgggctccttccctccgttgtgtttctctgaaatgttcgaatcactggtgtgacgggagcacttaaagccgaaaaaggaaagacgaaagcaaaggattc

SEQ ID NO: 409968 - DNA, 122 bp, Homo sapiens
tggccatgatagacagaaacgtgcccgaaacacgtgttggtggtggatgcccacttggggcgaccttgtgctgctcacccgttctttctttccctccaggcgaagtccgcctcgtcagtttg

SEQ ID NO: 409969 - DNA, 122 bp, Homo sapiens
gcaggatgcgggctccgcttcagctaagcaacaagtgttcccaagaatggatatgcaggccgggcgcggtggctcacgcctgtaatcccagcgctttgggaggccgaggcgggtggatcacc

SEQ ID NO: 409970 - DNA, 122 bp, Homo sapiens
ttagaatacttacttgtgcctccagtaatgaacaaaaaccaaaccacactgaaaccagcccgggggggtcctgctgtctcagaagctcaaggtattcctgtttctactgaattgctatttcc

SEQ ID NO: 409971 - DNA, 122 bp, Homo sapiens
cgggtcatgctaacggaagtgcttcctttttacagtccgggtggacccaaagctccgtggcggtgctgaactttagggcagccactagccacggacttaagcggcaattgagctcctcaaag

SEQ ID NO: 409972 - DNA, 122 bp, Homo sapiens
ttttcatgctagcggtgcaatgccccattttatcgtgtgtctaaaaggcgtccctggtcccgcatttttcctagtttcctcagttacctcctgtgaccatttgctgtaatgaaagctggaag

SEQ ID NO: 409973 - DNA, 122 bp, Homo sapiens
ataggggaacgagttctctcattaggcaccccctataatgtatataaaccatgttttaaacgtgtacgttaaaaataacaacgctgtatatgcttaactttgtgagttaaatcactcaaatt

SEQ ID NO: 409974 - DNA, 122 bp, Homo sapiens
tctaacaacttgagcagtccattggcagaacagtgtattcacccagggggttcttcctgccggctgcacaaaccaaatcaattcaccaagacctcagcattgcattaaagaaagagttcaat

SEQ ID NO: 409975 - DNA, 122 bp, Homo sapiens
tggccgtggacgtctgcgtgctgagcgcccctgaagccgggggcacccccaagatgccggcgctcatgaggctaatgatgttgtcctggcaccagttggaaggggagtcgaaggcgaacttt

SEQ ID NO: 409976 - DNA, 122 bp, Homo sapiens
ttttgtgaggaaggaacatatataaacagttttcattttcccttcaacttcttttccttgcgttaaatttattttcatttcagttttttctagtgaattagattttgtaatatagacaaaat

SEQ ID NO: 409977 - DNA, 122 bp, Homo sapiens
tccccgcccccgcccccgccaccgctgccgccgtcgccgctgccaccgggctataaaaaccggccgagcccctaaaggtgcggatgcttattatagatcgacgcgacaccagcgcccggtgc

SEQ ID NO: 409978 - DNA, 122 bp, Homo sapiens
agactcttgaagagcttgtagcagcaaaagaatcgtgtgtgtagtgcctgcaccactgcccggggctgacctcacctgtgcctctgggcccctccgtaggaggatggacgacggcccttgaa

SEQ ID NO: 409979 - DNA, 122 bp, Homo sapiens
tgccatgggggttgaagagcacacgtttcagatgacatttgtactcatggcactctgaatcgcatgcttcttcagtccattctcatctgttaagactttccataatagttcttatgaaaaaa

SEQ ID NO: 409980 - DNA, 122 bp, Homo sapiens
gactagcccatatgaggggtccctgagattattcattggaaaaatgtacttaaggaatcacggcagagttcccacacttagctgtcggtcatctttttaaggctccttaagttcctgccaat

SEQ ID NO: 409981 - DNA, 122 bp, Homo sapiens
ctcccccactttccacaaaccctttcttgccggctacctgttccccctcacctgaggaagcgttggcacacaaggtccaagctaccaccagcgccctcctgacaacactgggacactatgaa

SEQ ID NO: 409982 - DNA, 122 bp, Homo sapiens
ctactcccaaacatcacagggcaggcagaatgcaactacgacccacgtggcagacgggggcggggaccggtcgcgtggccgcggccttggctcttgcgcctgcgcgctgcctcccgctctag

SEQ ID NO: 409983 - DNA, 122 bp, Homo sapiens
agttctcaagaaaaggaaagggaggctgagcagtggctgaagcgatgcagccttgagacacgctgtgagcatcccatccgccgccccagcgctgctggtagccaggggaggggtctgcacag

SEQ ID NO: 409984 - DNA, 122 bp, Homo sapiens
agcagctggctttcctttacccctgctaggtgggaactgcagttttgcacagttggggtacgtattattaactccaaggagagcaagaagtcattatgacttagagttagaaaaaagttaat

SEQ ID NO: 409985 - DNA, 122 bp, Homo sapiens
ctgctctgagcctcagtttccccgtctgtaagaaatgaggctacgggactcaggaggacccgtgtgtcccagcaggctgatggggacatgtgaagcagacagacagcctgcctggcccctgg

SEQ ID NO: 409986 - DNA, 122 bp, Homo sapiens
gccctgcagcccaagatgctgcctggaggcaggaggcctcccttccaagacctgggtgtccggctttctcaagttaacaaggagagaggagtgccgggcagctctgcctgcctcccctataa

SEQ ID NO: 409987 - DNA, 122 bp, Homo sapiens
acattttgctgatcaaataaaggatagatgctcactggatgtctgagaactttgagagaccgaaaaagaaggacgtatgctctacaaggtcagaatgaatctttttattttttagtgaaggg

SEQ ID NO: 409988 - DNA, 122 bp, Homo sapiens
tagcctttagcgcccggccagcgtagaggtgctctggccggccgcaccaattcccggagccgaaagcagagtccaggcaccgccacttgcaagagagggagaatgccaggcaaatacccgat

SEQ ID NO: 409989 - DNA, 122 bp, Homo sapiens
ttggctgctttgttcattctttccctccagtgcttagaacagagcctagaagatacacatcgtgttcattcagtgtttcactgtttgttgaatgaatgagtagttagttggctacatgatga

SEQ ID NO: 409990 - DNA, 122 bp, Homo sapiens
tctgaatctttaatagtcacatttattttaatagagatggttaagtcgaaaggatggttacgatgattaaatgagccaataatgaaaacagcatgttttgtaataatagaagcagctcacct

SEQ ID NO: 409991 - DNA, 122 bp, Homo sapiens
gttaaaatcctacggtactgggtattgtttactcccaaagggtttcttccaagtcttctccgctcccgtcgggcctcctgccggggcggcaggagcaaaggtggcgccgttctgtacacaga

SEQ ID NO: 409992 - DNA, 122 bp, Homo sapiens
ggcctcctcggctcccttcctccttccttgcggtcttcatgcacagctgcctcggtcccccgcttctggaattcacagcccagatgtggataggctttaccccactcatccttacaatgtgg

SEQ ID NO: 409993 - DNA, 122 bp, Homo sapiens
agcggctgggcgtggtccagggcacgggtggtcaggccgcacacgcagttctcagccaggcggcaggcggagcccagcagcgggtgcctgtccttggctgcactgtaaacatcgcagaccgc

SEQ ID NO: 409994 - DNA, 122 bp, Homo sapiens
tcctcccctagttctcagcctctcctccacctgcctctgcccagcactgtaggcactttccgtgttcagtctgctgaaatcctgtccttggagatcctccacctttgcagctccagcagcct

SEQ ID NO: 409995 - DNA, 122 bp, Homo sapiens
acctttctgatggaggttgtggtgtggagctgcagaatgattctgaaacgcgctctctgacgggatcagtctatcatccccgtggtttctattctgtggctgtgccgtcgcctgccagcggg

SEQ ID NO: 409996 - DNA, 122 bp, Homo sapiens
gggccatcccctccgggttagggtctgcagccctctctcttgcaggagttgccagcccgacgtcacccaccagcctctaacacagccgcagtgggggtggcacaggccgagccccctgcgcc

SEQ ID NO: 409997 - DNA, 122 bp, Homo sapiens
ggtagaggcccatcctccgcaccacctcccggctgaagctggggaggccgcagaagccctcggtctttagcttctgtttccgaaagttgactttggggccatagtcctgaaggatgaagaca

SEQ ID NO: 409998 - DNA, 122 bp, Homo sapiens
gcgtcctcggagagggtgggctgccccctgtcactcccgggggaagatcgccctgccctccgctctaactgcgtggttgaaaccagtttcgggacccgagtcctggtcccgctgacgcggga

SEQ ID NO: 409999 - DNA, 122 bp, Homo sapiens
attccaccggttaatggcctgctggcctgccggtctcttcagtgtgctcttttgccgacccgctcccctcgacagcctctcgacagccagctgtttgtgtgtccgccaatgctctcctctca

SEQ ID NO: 410000 - DNA, 122 bp, Homo sapiens
tagagtcccaccagcttgtctcccgctctctcctgcacaagccggctcagagagggtctgcgggtgtcctggcaccacccagcaagttgggtgctgcagccagctctgtccatacagttggt

SEQ ID NO: 410001 - DNA, 122 bp, Homo sapiens
tgtggctgggccaggtggccccattcatgtacgcactcaggtccttgtcactgtcacgcccggccctgggcctgtggccagcatcagagtgtccacaggtgttccccaacctcagccctccc

SEQ ID NO: 410002 - DNA, 122 bp, Homo sapiens
tgggggaagcagatgtgctgagctcccacatggtggtgggaggggcgctgggaccacagccggcagctgccttcttggacctttccaggtcagacctggtggaagggaaagttcagagttgg

SEQ ID NO: 410003 - DNA, 122 bp, Homo sapiens
agggccttcctcaacagctgccacctgtcactccctgctccataccctcctgtagcccaccgctgccccttggggaacctgtcccccatgtctcctgctgagtgtcccctaccccagcagtc

SEQ ID NO: 410004 - DNA, 122 bp, Homo sapiens
taagctgctaggagaagaaagtgtggcaccgaggacttgggttagcaagatacaaaatcgcgcaagagacaactaactcactgtgcattggaaatgcaaaggaatttgagggtggaagaaga

SEQ ID NO: 410005 - DNA, 122 bp, Homo sapiens
aggtgtttctgagctgcttctaacgagcagggcactgggagcagccaggagcatcctgaacgctgcctctcagtcagtggggccctggctcttggccacaacacgcccccagtggagacaga

SEQ ID NO: 410006 - DNA, 122 bp, Homo sapiens
caatcaatttaaagtaagcatcatccttagctgggcattgtggtgggcctgtgcacctagcgactcaagtctaaggcaggccattttcttgagcccaggagtttcgggttgcagtgagctgt

SEQ ID NO: 410007 - DNA, 122 bp, Homo sapiens
gctcccgcaccgcgcagccgcacctcggcaggaacctcctcctctccctccacccccgcgcggagctcagcctcctggcccaggttctgagaaggccgggtggccaggacccaatgagcacc

SEQ ID NO: 410008 - DNA, 122 bp, Homo sapiens
aggattccagttccttaccggaggttggtgccgtctgagtctgaaaagctgccctcttgccgtgttcatgctttggtagaacaccttcagagccttggcaagctctcggtcagagccggctt

SEQ ID NO: 410009 - DNA, 122 bp, Homo sapiens
tttgtaggagtctcacaggatcattcatgaagcggggagaacgggtgctgctattaagcacgttctctggttttctgtcgccatgtgcgctgtggttgtatatgctagtacatacactgcat

SEQ ID NO: 410010 - DNA, 122 bp, Homo sapiens
accccggctggatggacgggcaccgagacgggaggcggttacgtccaaacggtccccgcgcgcggggatctgaagagtcttcttcaggaggggggccggctcttcaccccttccctccgcgc

SEQ ID NO: 410011 - DNA, 122 bp, Homo sapiens
aaatggaataagtaaagtacttgcagatgcaaatggtttcaagtttcactggagacccagcgaaagcggctgttctcaaagttgccaggcagtgtggaaacgcccactgaggggcacacagt

SEQ ID NO: 410012 - DNA, 122 bp, Homo sapiens
tgctactgcttccattcgcatttcccttgatctcagcatggcttttgacactgtcaacggcgctatcatttcagagtgcttgagggaattttcatccttaaacactcaattttacatcaaaa

SEQ ID NO: 410013 - DNA, 122 bp, Homo sapiens
gcattccttggcattttccagaaccgtacctaagtggaggcgcacagagtgctgtctttccgtctggttcattttcctcggtaaagtcaccgtgagactcccccacgcggctgcacgcatgc

SEQ ID NO: 410014 - DNA, 122 bp, Homo sapiens
attgttttacggtcagggaatgtattctctttgtaatgtgttgagacttcctttggaatacggcccagtgtcagtggttgtaaatgatccatgtagtcaaaggaaagtatatcctctgtttg

SEQ ID NO: 410015 - DNA, 122 bp, Homo sapiens
ctctgggctccggtcggtgggtgcctcggctcggctttccccggcgctggctgggctcagcggcccctgagcccaagcgacacacgccccgcggtccccgatccggcccctgggagagccgc

SEQ ID NO: 410016 - DNA, 122 bp, Homo sapiens
cagccaccgagacagcagaagtcgttgaattcaaagcagaataaaggggtgcgtgggtggcggtggggtgccttaagtggaggaaacatcttttatacattaaaaaatcttcttgatctttt

SEQ ID NO: 410017 - DNA, 122 bp, Homo sapiens
tgagcagggacgggtagtgaagcggttacgccccttcttcgcgtcttggcgggagcctgacgccccgcttctcccctaacgaggtgtcccaccggcgcccgccgaggcctaggcctccgcag

SEQ ID NO: 410018 - DNA, 122 bp, Homo sapiens
gttagagacgtgaggccgcgaggctgagggctgtgaaggcggtgggcacgcacggcgtgccggggccgcctggcttcgcggcgggggaggtaacactgcgacaccccgcagacgctgtcagc

SEQ ID NO: 410019 - DNA, 122 bp, Homo sapiens
agtgggcgccttccctcggccactcacctgtcatttatcgagcgcctactgtgtgccaggcgttgtctggggacacggctgtgaaccacttcccagctccgtcttggagctgacattctggt

SEQ ID NO: 410020 - DNA, 122 bp, Homo sapiens
ccgtcattccgaacttttgggcgacggatccatctcccgggatgaaaaaccaagccaggccgcccgggggctggttctgcgtcggcggggggtccctaatgggaattaaaggcgggggtgat

SEQ ID NO: 410021 - DNA, 122 bp, Homo sapiens
ctacactaaaccaatctattatttaaatcaacaaattcacactcattcactgaggtcaaacgagccctgccatttcaacaccattttaagtgaacctccaaagccttgatcatatctctgca

SEQ ID NO: 410022 - DNA, 122 bp, Homo sapiens
actaaccagacgccaaaataagaccaataattacccacaataatcattttctccggcatgcggaccagtcgatatccccaaggtcaaatatgagcaaactgtgccataggtatgaaatgcac

SEQ ID NO: 410023 - DNA, 122 bp, Homo sapiens
ccccaaatcctttcatatttacctctcacaaacacttgccttgtaacgtgtgtacctgtgcgtacatttacaggtaaagacaatattttaaggcaagttcacataaatggcttggagatatc

SEQ ID NO: 410024 - DNA, 122 bp, Homo sapiens
agattctttttctgaaaagtgtgacctaggagggaggagtgaaaaatgaacagttatttccggtaacaagagctatttttataaagcacttggtgggagaggaggggcacagaggaatgggg

SEQ ID NO: 410025 - DNA, 122 bp, Homo sapiens
cagggtcgcggcccggaacgtggggattggtccgggcttgagctcctcggccttccacgccgcctcctcccacagctgccacctccgtacggccccctcggccaacggagcccgaacctcgg

SEQ ID NO: 410026 - DNA, 122 bp, Homo sapiens
ctgtccacagacgctggggtgcgctcacctctgggctaccgtgagcgaggctgctgtgaacgtgggtgcccgtatccatgagtccctgcttttggttcttctgggcatgtacgcagcggtgg

SEQ ID NO: 410027 - DNA, 122 bp, Homo sapiens
ctcattgtctccccgacttatcctaatgcgaaattggattctgagcatttgtagcaaaatcgctgggatctggagaggaagactcagtccagaatcctcccagggccttgaaagtccatctc

SEQ ID NO: 410028 - DNA, 122 bp, Homo sapiens
tcctgaaaagcgtattgctttatttactgggaataaactggcagtcaacaatgctagaaacgcctggcctccaggtcagggccccatgtcctgtctggagggagcggcgtgcagagctcctg

SEQ ID NO: 410029 - DNA, 122 bp, Homo sapiens
ggctgggccgaggcggccgcccggagcacagaggcagcggtcgggtagaggtgagcgtggcggaggcaaagggacgcatcccccacggcgcgctggccgtgcggggctagagggccgcctgc

SEQ ID NO: 410030 - DNA, 122 bp, Homo sapiens
ctggagaggccttcctatgaggaagtgcgttagtcacgtaggagacggccccagctggcccggccacccagctgaggcgccaagctgcacgtgaaaaagccgtcttgggcatacagccccac

SEQ ID NO: 410031 - DNA, 122 bp, Homo sapiens
caaactcctgacctcaggtgatctgcccgcctcggcctcccaaagtgttgggattacaggcgtgagccactgcacccggcccaactatggccatttttataaatcattgattacattagcct

SEQ ID NO: 410032 - DNA, 122 bp, Homo sapiens
agcctcaacgcgcgcccaccggaaccccgccccgcgcctccagccaatgagaccggagcgcgcccccggagccccgccccgcgcccctagccaatgagtccgaagcgcctgctctcggagcc

SEQ ID NO: 410033 - DNA, 122 bp, Homo sapiens
agaatcaggaaaaggaagggttcgaactttccctgagagcccccaggaagggatgcagcccggttgacaccttgattttagccccgtgaaacccattcagcgcttctgatctccctaagtgt

SEQ ID NO: 410034 - DNA, 122 bp, Homo sapiens
aagtgagggggcagggtccaaagctggaaatggaaggtctgggattctgtgtggtttgtacgaaatgcctttcattgggcctcacacatatttagcactcagtaaatgtttatgttgttacc

SEQ ID NO: 410035 - DNA, 122 bp, Homo sapiens
ggcgcagatggccgccacggtgcccagcagggactccggggaggaagccgcggagccaagcgccccctccaggaccccccagtgcgagccgcaggccccggagatgctgcagcgaggtatgg

SEQ ID NO: 410036 - DNA, 122 bp, Homo sapiens
tgtccaagatgattaaggagcacagacacaagggtgaggtgggagcgaaagtttaataagcgaaagacgaaaactctcctccagcagagagggaagcctgaatgggttgcccactaggaggc

SEQ ID NO: 410037 - DNA, 122 bp, Homo sapiens
ttgattttcaattgggttagacagttagtctttccccttcattggttgtctgtgtgcacacgtgcttacgtttgtatatgtttgtcagcagtgatcttatagccagaagtgaaaatgattaa

SEQ ID NO: 410038 - DNA, 122 bp, Homo sapiens
tgcttcctgattggtagccgggcgaatccacgtgacttggccgctaatgcccgcccaacccgctcccctattggttgaaatcacagcccttcagctgccacggtgagaacgcagcactcggg

SEQ ID NO: 410039 - DNA, 122 bp, Homo sapiens
ggcctcccgccgtgtctgggaaagtttgcgggcgccccgggacgcgggcatctccagggccgctcggcgcctccccatctccccgcgcccgccctggccgcccccaggggcgccctggggcc

SEQ ID NO: 410040 - DNA, 122 bp, Homo sapiens
catttagcacaaagcaatccacctaaagactccataaatccaaaaaagggagtcactgatcgaggaattctcagatttctgccaaggcaccctcccttggactggaggtcagcctggtacag

SEQ ID NO: 410041 - DNA, 122 bp, Homo sapiens
attttgtcagaaatactcggagatcaattaaactagatggaaaaggagaacccaaaggggcgaagagagcgaagccagtgaagtacactgcagcaaagctgcatgagaaaggtgtcctgcta

SEQ ID NO: 410042 - DNA, 122 bp, Homo sapiens
cccacccagctgaacagcctatacaaactctgcagtcactgccacccctaaaaaggcatacgaagagctcagagtctacactttgtcctctgtcgggctggggtcggcacagatcatagact

SEQ ID NO: 410043 - DNA, 122 bp, Homo sapiens
cggggctgcgacaggggcaggtccctcctgccctgctgtggtcaggcagggcccatggggcgcctttgtcctgacaggaggagtggcggggctggcgtggccccgtgcaccctcggctctgc

SEQ ID NO: 410044 - DNA, 122 bp, Homo sapiens
attgtctcctcatctatttacgaggtaacctttttctaaagccagaaaaaaacagctaatcgttgcatcttctggttgaggtggtaaacaactcagttatcaaccggcagagcatagctgtt

SEQ ID NO: 410045 - DNA, 122 bp, Homo sapiens
gaacgggagctcggtggagcacgtggtggagtttggccttgactaccccgagggcatggccgttgactggatgggcaagaacctctactgggccgacactgggaccaacagaatcgaagtgg

SEQ ID NO: 410046 - DNA, 122 bp, Homo sapiens
gagggctggataatgagtggactaggtgctagttttgggctccctccccccaccacttcccggaatagccccacccttctaaccgctccctgtcccgttccacacgcagttctaccctgaaa

SEQ ID NO: 410047 - DNA, 122 bp, Homo sapiens
atatccatacagatttggggatgcttaagaaccacccccagggccgggagcggtggctcacgcctgtaatcccaacactgggagaccaaggcgggcggaccacttaaggccaggagttcgag

SEQ ID NO: 410048 - DNA, 122 bp, Homo sapiens
agaggcccgggagattccggagaggcgtctgggtgttttcggcgtcgtagaggtgggctgcgtagggcgagcactcctaaaaaagaacgcggagctcaggctcagcatcagacctgccacac

SEQ ID NO: 410049 - DNA, 122 bp, Homo sapiens
acattgtcaccgtccgcacagagacccaacatccatgtgtctgaatggggggggggggggcgggaccctacttcaggcgccctctgccccagtgattcccgtccaagacgtagtgcaaattt

SEQ ID NO: 410050 - DNA, 122 bp, Homo sapiens
gccaaagagaggggccctaagagtctgcggtcccgggacggactgaggcgacactgagggcggtgcctgaaagtccgggctccaggaggcggggtgcgaggccgccaagcgtcgcgggaagc

SEQ ID NO: 410051 - DNA, 122 bp, Homo sapiens
gcgcccgctccttgcgcacacgccaggcagcgccgccgcagccccacggcgcgcaggccacgcccgtgccacgcccactctcacgcccctcctggcggccccgccccgcgcccccgctgccg

SEQ ID NO: 410052 - DNA, 122 bp, Homo sapiens
gctattcaaaaataaaaatatatataataacaattattttaatatttcatcttttatgaccgtcctggtttctggcagccatagtccctaccccgacagcccccagcccagatggcattcaa

SEQ ID NO: 410053 - DNA, 122 bp, Homo sapiens
atcagaataaagagtttatgcttttgatttcctttcagaatgaacaagttcttcaagaaacggagatgcacaagaagcgattctcatctcaatgccccaagaacgcaccctgcagcctggca

SEQ ID NO: 410054 - DNA, 122 bp, Homo sapiens
ccctcccagccaagagtgagggaacggaagagggaagattcaatccctgactatccaaaccgcaggatggtggaaagacgtggacctctgccaccccccggccctccacctccctgctccca

SEQ ID NO: 410055 - DNA, 122 bp, Homo sapiens
caaatctggtgggtaagccagtgttgaaacataggcacaaatggcttagcttgtcactctcgtgcagtttgcaaacccttccccaagctgccaaactgtactgattgccaggcctctgtaat

SEQ ID NO: 410056 - DNA, 122 bp, Homo sapiens
aattatcattttacacatcaagaaactgaggcccagggcagttaggtgatttgccctgggcgactattcctctaaggtgttaagtgtctgtcaccagtcagagtagcacttaatgacttact

SEQ ID NO: 410057 - DNA, 122 bp, Homo sapiens
atttggttatgctccagtctgaagccaggcctgtactgggcaccagggtgggtgacttgacgatcctcagcagagatttagtccacagaagaattggtgacaccatggcccctggtgaaata

SEQ ID NO: 410058 - DNA, 122 bp, Homo sapiens
aaggggcaaagcaacgcggcgcctcctgaattcctggccctgcgaacgtcatgtcgttaacgtgttatttatggcaccctcctgactctgctgtcatgttaggcctctgggtggggcattgt

SEQ ID NO: 410059 - DNA, 122 bp, Homo sapiens
tgcagcagagaaactgaaatgggaatcatttcctgtgggtgcactgatgtgcacagtgggcggaaccgggaaggcaagtcagaggcatttttctcatttctgaatccatgagtctggctttt

SEQ ID NO: 410060 - DNA, 122 bp, Homo sapiens
ctccactgtccgtgtcatagctcaagtcctcatgtctcacccaggctattaaaactgtctcgctactctggtctcttaagcctaaaccattcttcatactacaagttttcttctgaactcga

SEQ ID NO: 410061 - DNA, 122 bp, Homo sapiens
cgcagaacgcgaccgtcagttgcgcgcggccggacgctgtcccagcatcacgggctgcgtcggctgcccttttggcttgcaggggacaggcagagcgactcagagaaaagtcacctgaggac

SEQ ID NO: 410062 - DNA, 122 bp, Homo sapiens
taaggggcccgcccttcccacccggggcgtgtcacgtgtactggtggtggggggcgggggcggcgaggtgagggagagtgcgggttcagacagacagaggcaaggggagcctggaaggggca

SEQ ID NO: 410063 - DNA, 122 bp, Homo sapiens
taggtgcacactgcaaaaggcacatgcacagtaaagacaaagctggagtcacagagttttcgaccccaagtctgcacctctctcctccaggcaggtgtgtgttgactccatccccccatccc

SEQ ID NO: 410064 - DNA, 122 bp, Homo sapiens
gcggcgccctgggtctggaacgcggttgccaccgaggaggcggcggccctgcgtctggaacgccgttgccaccgaggaggcggcggccccgagcgcgcctggaagccccgggcaaccggcca

SEQ ID NO: 410065 - DNA, 122 bp, Homo sapiens
cactcctgaagtaataagaattttggtggttattgtttctcacttgtaatttcataccttcgtgttatatgttttgctgtgtgtaagtgtggcctgtgtcatggacgtttctgctttgggga

SEQ ID NO: 410066 - DNA, 122 bp, Homo sapiens
tcacccaaggagtcctgtcccacccgcaggctcgggcgcccgcctgcagacctcggacgccggccagcgtcttgtcgtgcaaggccgtccacagccagcatggccttaatgagcccatttca

SEQ ID NO: 410067 - DNA, 122 bp, Homo sapiens
gtgccatgcaaaggacgggagaagcattggcctctaaactgggcgcaggccctgcctaagcgtccccgctaccacagtaaccgaagccacgcccagttcctgaaccacgtcggctcccctcc

SEQ ID NO: 410068 - DNA, 122 bp, Homo sapiens
aaaaaacttcatatggaaattttatttgaaaatgagtggaagtgccttacattagaattacggacttaaaaattttgctaataaattgtgtgtttgaaaggtgttttttgtttttgtctttt

SEQ ID NO: 410069 - DNA, 122 bp, Homo sapiens
ggaaccgaggtagagaggccgcacagctgagtctcaggccggtgccatcttaagtgtgggcgccgcgacgataccgagtttcactcactgccccagtggtctagttagtccacgaagatgcc

SEQ ID NO: 410070 - DNA, 122 bp, Homo sapiens
gcgtcaatcaagccggcgacggtgaatgcagttcgggagagctgatacccctcggggaggcggctccgggagcctgcggacgtggcggacgcctgggacggggtgggcctggcctccgcgct

SEQ ID NO: 410071 - DNA, 122 bp, Homo sapiens
gggggtctcaatgacttgctttggtgctttatctaccaggtggttgagctggtgccctcgcgggcagaactaggtggtaaggtggccagagtcttgagatactctccaagtgggagtgagtt

SEQ ID NO: 410072 - DNA, 122 bp, Homo sapiens
gaggaggaagagagatcaccctaaagttcttccagttgcacagaaccgcccccgaggcaccgctgcaccggctctttggttcagagaccctacatcacatcccactgatggagtgatagaat

SEQ ID NO: 410073 - DNA, 122 bp, Homo sapiens
gcacctgagctgtgtgttaccggcgcagcaccaggccacttgcagaagtactgctgcattcgccagcaagggccgccatcacgatgcgcctcgcagaccgcagggcttgagcaacaggaact

SEQ ID NO: 410074 - DNA, 122 bp, Homo sapiens
agagagagagagagagagagagcgagagagagagagagagccccacacctctcgcgagagcgtcggctctttgcatcgctctctgtcggagtggagtactattagcatggaactctggtgtt

SEQ ID NO: 410075 - DNA, 122 bp, Homo sapiens
cttgtcaacatctcattctatctgggagcatggctgctaaggattctaggagcctgagttcggagaatgctacctacctttgatctaattggagtagaaatcaagatacagtcacattgtca

SEQ ID NO: 410076 - DNA, 122 bp, Homo sapiens
gagaagattgccactgaagacaactagggctcagtcccactgggggcctgtgggaaatggcgaacatgtctcagggttgttccacctggggccaggaagctgggccatatatcctgcaacct

SEQ ID NO: 410077 - DNA, 122 bp, Homo sapiens
aaacgcctttctctcccaagcaaaagctccaggaggaatcttctggagcaaagttagaaccgcagggaagcttgaaaagaggaaacagaccagcctggccggtggaggttaaattaaactac

SEQ ID NO: 410078 - DNA, 122 bp, Homo sapiens
gttctcagtaataagcagttctacaggaacatgccttgtcacctacttcctaaaaatagccgtgacctttttagtggacacagcaagctcacatctgttatcaccactccttccccactgtc

SEQ ID NO: 410079 - DNA, 122 bp, Homo sapiens
atttaacccgtctgtttctaatacaaagcgctcgggatgagggcgggtggagcctacgggcgtgggcgggtagcccagccctctgagccagggaatgaaactggagttctggctaaactttt

SEQ ID NO: 410080 - DNA, 122 bp, Homo sapiens
tacagagagagtttcctaattctttgttctatagctgcatggcttcctactttgtgatgccgtccgtgacttccacatgagggacattgtggtcatcactttgaaggctaatcccatctcta

SEQ ID NO: 410081 - DNA, 122 bp, Homo sapiens
gggacaacaggggcctgcccgagtgacctgggctcaccttcatcccactacacggccacccggaagggctcacaccaccttctgactcccgagggaagctaccgagaaccgcctggacccac

SEQ ID NO: 410082 - DNA, 122 bp, Homo sapiens
cccccgccccccggccgcagccttcggaggagactgggccgccgaggcggtcgtgagagacggacggagaggaagcgccggctggaatctcctaaccgcccgcttctcatcttgtcctgggg

SEQ ID NO: 410083 - DNA, 122 bp, Homo sapiens
ccttcggcgcttcggctcctgtagctctgactattcggaccgtcaaggtagaataggaggcggccagttccccgctctaagaagttgcctgcgctctgaggtgagctgacaggcccctctct

SEQ ID NO: 410084 - DNA, 122 bp, Homo sapiens
ccagccggggcggggcagggtgccgcaggctgggcttgctaataaagacccgagtctccccgcctgtgttttgttttcctggggggagggaagggggcaaagtcatggtcctagcccccgcc

SEQ ID NO: 410085 - DNA, 122 bp, Homo sapiens
ctcactgagggtcacagcctgtggcccatggcagggctgcccaggacaggggcttggccccggaggcctgcagtgtgaggcgtggcccacaggccttcccagagggggttctgggagcctcc

SEQ ID NO: 410086 - DNA, 122 bp, Homo sapiens
ctcctaagccgcgacagagacctactctgccgcctcctcagcctcccacagtaaacctctcggcctctagtccacagtccacggaggcccccatgctagatggcatgtcccctggggaaagc

SEQ ID NO: 410087 - DNA, 122 bp, Homo sapiens
tgcgtttcaaagctttgtcatgatggcgctgcagaaagcaagcgagctaggcctacctggcggggctttcagaggacgccaacgtgggcgccagccacgccagcagggtcaccgtccttccc

SEQ ID NO: 410088 - DNA, 122 bp, Homo sapiens
gtcccgcgccagtcctcccgctttggtcccgccctgaggctcggcccggctcccccgccccggatttgaaatctaggtcttcctgagagtccgcgggcttccgctcccagcgcgggattctg

SEQ ID NO: 410089 - DNA, 122 bp, Homo sapiens
gggccccagggcccagcgttgggctcgaggggccatagggtgggtgggcgggcaggcaggcgggcgtcctcggtggcagttctggggccccggggcagtggttggtgacacggaatagggga

SEQ ID NO: 410090 - DNA, 122 bp, Homo sapiens
tttctgtaaatcctgcccatgtcatccccctcagggttcaagcagggcttaagaataactcggtggagactcttgtgggtaagggggatgctgaatgcctcctccattcccagcattggtct

SEQ ID NO: 410091 - DNA, 122 bp, Homo sapiens
gaaagggcaggcgctggagcccatgcatccgggaacactggtggtaggcggtcgggtgggcgtgagcgggctctccatctcccagcccagtctgcaggtcgccacctcaggattttcttcct

SEQ ID NO: 410092 - DNA, 122 bp, Homo sapiens
acccaagagccgagtggtccaggggccccggggaagcagagaaggtccttgagttcacggcgccgtcgtaggggcacatggatgtccatggcctggaaaggaacctttttgctttttttttt

SEQ ID NO: 410093 - DNA, 122 bp, Homo sapiens
taagtggacacatgcagttcaaagccatgttgttcaaggctcaacagcactgtactgcaacgtgggtgagcgtgaacgcatgtgcatgcatgcgctggaatttactgccaatctacccaatt

SEQ ID NO: 410094 - DNA, 122 bp, Homo sapiens
attcattgtgacctctcctgagtggcgagttgccagtttgcacttcatttcctgtggaatcgcttcatgacctcagtattcctggaactttaaacaacattttttgaagggtgaatattagt

SEQ ID NO: 410095 - DNA, 122 bp, Homo sapiens
gggaggtgaggggagagggcctgggagccagtggccagggtcaaagcccagctcagccaccgggcagccagggccagtccctgacgaatgagggccacctggcccggccactacaagggtgg

SEQ ID NO: 410096 - DNA, 122 bp, Homo sapiens
atcttgcaaataatatgcttcttgtagcttttgcttatgatacaggggtgaagtggacaacggcattagagctgaagagggcgcatggtagatccctaccctaaccctgctactacaacaag

SEQ ID NO: 410097 - DNA, 122 bp, Homo sapiens
ggccaccccaagccggcgcagggtccatgctgtactcccaacccctggctccccacggcccgtgaggatgctcagcctcatgcaaaggtctcaggacgaaattgtccaggaagggaaggcga

SEQ ID NO: 410098 - DNA, 122 bp, Homo sapiens
ccgcgggagctcagagctgccccgtgtctgagggcgcggctgtgtggagtggggtcccctcggccaggcgggaaaggccctggatcgtgtgtgtgaccctggtactgggcaacccctgggac

SEQ ID NO: 410099 - DNA, 122 bp, Homo sapiens
cccgggcacggtgactccggggtggccaggaccaaatgtgtctccttctggcttttgcaccgcaccaactaatccgcggcaggccgcacagctgccctggccttcgcggaggactaaggcga

SEQ ID NO: 410100 - DNA, 122 bp, Homo sapiens
gatcactctgatttgagaaaagggaggaggggaagatagtctgaatggaaatctgaaatacggaatgttttagagaaatatgtcacttgcatatagaatgttttaattgaggtataaattaa

SEQ ID NO: 410101 - DNA, 122 bp, Homo sapiens
tgcagtcgcagcagcagctcagccttgcggtagggccgtagtgccaggaggtgcagcactcggtcacggaagggcctctgggacaccccgctgcccccactcacggcactggcaccactctt

SEQ ID NO: 410102 - DNA, 122 bp, Homo sapiens
cgcgcccagtagaggctataaaatgtacgtttttctagtttcacttcagtctttcttgaccgtatagataataggccttttgccatgtctgggcgtggcaagcagggaggcaaagctcgcgc

SEQ ID NO: 410103 - DNA, 122 bp, Homo sapiens
tcgtacaaatccctcgtgcggcaaaagtagtttgtctttactaggccaccgtctcgtcagcgttacggagtattttgtccgcctgccgccgccgtcccagatattaatcacggagttccagg

SEQ ID NO: 410104 - DNA, 122 bp, Homo sapiens
gagatgttcactgatgccctagaagcaggaacagaggggctcccctgcgctcgccaagggcgcctgacaaatctggaggcccccatgacagaatcagctccagagtaggaaatgtgtctggc

SEQ ID NO: 410105 - DNA, 122 bp, Homo sapiens
gagcctgtctgtgagcacagcctgctctaacccggccgttggccacctgccttccgagcacgtccagggtatgcgtttattaacaggtgactcgcgtaacaccttgggtacgtggctcagct

SEQ ID NO: 410106 - DNA, 122 bp, Homo sapiens
tttagggcagacaaaagcttcaagagtcattactgaatgtgctgatgtggtcactggactcggccagccactcacttcagtaggatctcctgggtctagagaaatagcaaatattcaggagc

SEQ ID NO: 410107 - DNA, 122 bp, Homo sapiens
ccctccttccggctgggcaaggggccgcggggagcagctcgggactgaaccgagaggtgccgaaggaaccggcgggccgcttgatcccgtgagtgtgggcgcgagagggctgtgggacccgg

SEQ ID NO: 410108 - DNA, 122 bp, Homo sapiens
ggccacactcctggctcattagtcatccgacctgaggttgtcgggtgaaggacctttcaacgagtcttcaggggacacccagctctgcaggcccaggcccttgctcctccccagcacagatg

SEQ ID NO: 410109 - DNA, 122 bp, Homo sapiens
cctcttcctcccaggaaatgcaatgccctcagtgcgcccaccttttggcaaagccactgccggctgcgggtttcccctcccccgccaggcgagctctgcgcggcggcttcgcgggcacacgc

SEQ ID NO: 410110 - DNA, 122 bp, Homo sapiens
tggaatccccatttgaaatacaaagagttacaatacaaatgtaaaaacaaattattgtaacgtcagaggctgaaatgcatatgcaggatcccttttgttaatctttggatgaatgagaggga

SEQ ID NO: 410111 - DNA, 122 bp, Homo sapiens
gttggcgggggaaaaaagcagggaaaggcattccagaaaaaggaaactgtaaacagcacacgaaaaagcatagtgaatgaataggaagcctgagaccaaacttagggtttcctacacttatt

SEQ ID NO: 410112 - DNA, 122 bp, Homo sapiens
agcgatcctcccaccttggcttcccaaagtgctggaattacaggtgtgagccactgcgcccggccctgagaatttcttacagggaaagggagagtgtttcacgcagctgctcaggagccgtt

SEQ ID NO: 410113 - DNA, 122 bp, Homo sapiens
gggcacccaccacctcttgcaacgcgaccctgagacagtggggcaagtatcccgatttcacgaacaaagaaactgagcaactaatagaggaatgggccacgctcctactgggaggccgggca

SEQ ID NO: 410114 - DNA, 122 bp, Homo sapiens
cgacacatccgggcaaggacaaacgtacaacgaactcaagggagctttcacaggctggaacgggctcagagcacccctgttcttagaggaacaatcaatgggaagcaaaggtgtacccaggc

SEQ ID NO: 410115 - DNA, 122 bp, Homo sapiens
ccctcagctgagggagcgctctgaaataatacaccattgcagccggggaaagcagagcggcgcaaaagagctctcgccgggtccgcctgctccctctccgcttcgctcctcttctcttcttt

SEQ ID NO: 410116 - DNA, 122 bp, Homo sapiens
aaccagtagaatgtcacataggctgtggctcttaaacccactggatcttctcagtggccacgtggtgccagccccagacagtggccaggcctccttggtggtagggtcttcagggtccttcc

SEQ ID NO: 410117 - DNA, 122 bp, Homo sapiens
ttaacatctttaaatacttctggggtcagattaggtatagtacaacaaagtactcctgcccggagacccaagaatgaaaattgtaggttcattccaaaactccagatccctaaagaatgaat

SEQ ID NO: 410118 - DNA, 122 bp, Homo sapiens
gtgactcacaggacaaagctgaggccactgaggagggagacggcacccaaaccacagaaacgctggtgcttagcaacaaagaagtggtgcaacctggctggccagaagatcccatcctcggt

SEQ ID NO: 410119 - DNA, 122 bp, Homo sapiens
cactatagtttcccatgacgtagttttcgcacttgctgatagagaagacagtttgaaaagcgtctaccttgaagattttcttggaaaattctccagtgggggctgcctactcatgatttttg

SEQ ID NO: 410120 - DNA, 122 bp, Homo sapiens
gccaggcagggcgagcacgcgccgggaggccttggaggcgtagggggcgggggtacggctcgcctgctcgcaagatggcggacgaggacggggaagggattcatccctcagcccctcacagg

SEQ ID NO: 410121 - DNA, 122 bp, Homo sapiens
gcgctgaggcggcttgggcgccatgccctttgggttactcagctcttcagcctcctggaacgctaggacaaaggagtgccttggtgctggcagaagccggggggcacagctgggttttacaa

SEQ ID NO: 410122 - DNA, 122 bp, Homo sapiens
cgtcattctgcctgtggttgctcctcagtgcttgcggctgcacgaaatcatcttgtgtgtcgcgcccgaccccacgtggcgatcgtgttgattagcagagtgttgtgcgtgcttcaggaatg

SEQ ID NO: 410123 - DNA, 122 bp, Homo sapiens
tgcatgccacaggcagctcggcttggacacttgggcacagagcccatactgggtcctccacgtgactctcaacctaacaaaatgttaaaggagatgctttttctattaacataaatcagcaa

SEQ ID NO: 410124 - DNA, 122 bp, Homo sapiens
aagtctcgctctgttgtacaggctggagtgcagtggtgcgatctcggctcactgcaatctcggtgtcccaggttcaagcaattctcgtgcctcagctctcgaatagctggaattacaggcat

SEQ ID NO: 410125 - DNA, 122 bp, Homo sapiens
cggggaaaagggagaagatggtgcttttggtatgggaaagcaaaagaagttggaggagagcgcgggtctgaggcacagcaaaaagtgggtgttaacgggaaaactgccctagagtttggggg

SEQ ID NO: 410126 - DNA, 122 bp, Homo sapiens
agcccaaatacactggcaggggtgtgtaaagtctttttttgtcacagaatcccgctgaaccgtacttatttcaaattccatcaccccttaccgtgtacgtgatggtttcttcggtgtcctgt

SEQ ID NO: 410127 - DNA, 122 bp, Homo sapiens
ttccccatcgactgggcgcgccgagcggtctaagcgactgcgtctgatggggcggggagccgccgggttgagcctatccgctgcggggagggcgggacttcctgcgcgggggcccgagccgc

SEQ ID NO: 410128 - DNA, 122 bp, Homo sapiens
ccatccacccattcattcattcaatcacacaatactggcatgcctctggtgtgctggtgacgggaaacatatgcaaagcagatacccttccatcttggggcatatgttctactgaggggaaa

SEQ ID NO: 410129 - DNA, 122 bp, Homo sapiens
tattccatggacatgttccacacgcgcttcaagcaggagggtgtcctgaacagcaaggtacgcggggactggggacagggagggcgtcctgaacggcaaggtacgcggggactggggacagg

SEQ ID NO: 410130 - DNA, 122 bp, Homo sapiens
gtccgccgagcctcccccgtgcccgaggctgaaagagaagggggcgcggagcgcggggcacgctggtcattgtagtccagtccatatgagctcccggggcactggactacaactcccggcag

SEQ ID NO: 410131 - DNA, 122 bp, Homo sapiens
tgacagcaattcagaattaatattttgaaacttttataacaatttgacagaaaaatgttacgcgtgttgggtttaataataaaaattctgcctagagtagtcaaattcatagagatagaaag

SEQ ID NO: 410132 - DNA, 122 bp, Homo sapiens
gtgcatcaggaagtgtcatttaaaaaggacctgagttgggctgagttatcagcaaatacacgccatggctgtgctccccaccccccaccgtacactagcagggcagcagctctgattgtcta

SEQ ID NO: 410133 - DNA, 122 bp, Homo sapiens
cttccctttcgggcgcgttcttctcctggttgttgcagggtgggctgtctgggaagtagacggagacggaggctggtgtcatgacactgctcgtgagtggagcagccctgggtcagcggtgg

SEQ ID NO: 410134 - DNA, 122 bp, Homo sapiens
gtcttgtggtctgcattttattaatcaactacctggaaggattgaagggtgaggacaggtcgagaaaagctttaagttaagcctgggcatgagttaagggtcaatgagctggtaatatgggg

SEQ ID NO: 410135 - DNA, 122 bp, Homo sapiens
tgtcttacaagtattaggcttgtctatctacaccagaggacaaaggtgccgggctaatttcgaaactgcccaccagggggcggcataccacattccctgctgcgatcagctcgcacagacag

SEQ ID NO: 410136 - DNA, 122 bp, Homo sapiens
atgacacagtgtttgtagggacctcattcaggtgggatgacgcagtgtagggacctcaggcgggtggaatgacacagtgtttgtagggacctcacacgggtggaatgacacagtgtttgtag

SEQ ID NO: 410137 - DNA, 122 bp, Homo sapiens
gaggaggagggagagttttggcgttggccgccttggggtgctgggcccgggggctgggggcgcgcgccgtggcccccgcgccccacgctgggcagtgcccggttcggccccgcatggccagg

SEQ ID NO: 410138 - DNA, 122 bp, Homo sapiens
cccacacgccagccacgttagactggcccataccttaacctccttctgatacccgagacgcgatgctggttgctggattcccagctggttgctggtccccagaagcatccctgggaggaact

SEQ ID NO: 410139 - DNA, 122 bp, Homo sapiens
atgcatttccttttgtttccttgctttaaagcaggggttcttggtctttcgaggttacatcgagagcagtgagtcatatccaaaatgaggaaaggagcatagaaatttgtcaaatttcttgt

SEQ ID NO: 410140 - DNA, 122 bp, Homo sapiens
ctgcagggatggagggcggggaagccaggctgcttgccgcaggtctcccaggaggggttgcgggatgtgcctgcggtggcagcagctgacctcctgggctcgtgggcccccgggcgtgtgtg

SEQ ID NO: 410141 - DNA, 122 bp, Homo sapiens
gtgttgtgcaacattctgtggaactgatgcaaggatatatggcctgtttacacattccttcgctcgcagactgcatggcagtaatttaattcagcagcacatggcatgctgcagcaaggagc

SEQ ID NO: 410142 - DNA, 122 bp, Homo sapiens
ccctcttggccagagtagctcagtttaagacaattgaaaggacatcttctgggacaatagcgctctctgctggccaggacagatatcagatccagttgtaatgataacaattactatataat

SEQ ID NO: 410143 - DNA, 122 bp, Homo sapiens
agagttctgacaggtgatgcaaaggtgactgcatctacaacttaaatactgcatgcaggacggatcattgaattgtaagaatgacttaacagcaaagactcaggaaagactagtacagtaag

SEQ ID NO: 410144 - DNA, 122 bp, Homo sapiens
gcccggggctggatctggctcagccgctggtggattcggaacccgggaggcccccaggcccggtgggcttcagttcccacgctctgtaaaatggggcttggactggaattctagtgtccatt

SEQ ID NO: 410145 - DNA, 122 bp, Homo sapiens
gctgcggggctgtgggactgcggggctgtgggactgcgatgttgcctggcttcggggctgcggggctgcggggctgcgatgttgcccgggtgcggggtgcggggctctccgaggccggctca

SEQ ID NO: 410146 - DNA, 122 bp, Homo sapiens
cagagggaccccttcggagcatctcagaggccaggaagcctggcttctggccgccctgcccgctcctcacgtgtgaggggaactggggaagtcgagtcagcccgctggggttcctgattctc

SEQ ID NO: 410147 - DNA, 122 bp, Homo sapiens
tgctaggcgggctcgaaccgggcgggagtcactgtccaccttgcttcgccagggtgttatcgccagccagtccccttccgcatgcccaagggcagcctcaggaagcgagcccaccaccgtcg

SEQ ID NO: 410148 - DNA, 122 bp, Homo sapiens
agtggtgcgtgcttccccgctggggtaactgaagttgccggagctgggttcactggggatcgtaagggagcttcccgggcggggccatccccagctgggggaggtggcatccaggcacctca

SEQ ID NO: 410149 - DNA, 122 bp, Homo sapiens
ctcagccaccacctggtccacaaagtcaccaccacccctctgcagttgacaagcatcttacgggtggcgtgggattcccctcagaacccccggcctctgcctcttgagtgcttcccgtttgc

SEQ ID NO: 410150 - DNA, 122 bp, Homo sapiens
ggctggtgtagaactggagcccagagacacactctttttctcttttgtctctcttgttggcgtccctttcactgccctcattcattctcctgaagcatgtttaaggcagagtcacataatac

SEQ ID NO: 410151 - DNA, 122 bp, Homo sapiens
tgtgcactcacacttgtctggataggtgtgtacttaagtttgcatgtttttttctgtgtgcgtgtgtaggggcatatacatccaggtggctttgtgccatgtggctttgtaccccaggctct

SEQ ID NO: 410152 - DNA, 122 bp, Homo sapiens
tgcctagtgagggctgagcacatacagatgggctgtttctgacaggcaggtttaggctctcgggacagcagaggcagcctcggggcctggggctcccaccccacgtggcaggggtgtgctgg

SEQ ID NO: 410153 - DNA, 122 bp, Homo sapiens
agtcaaagaaaggggtgatggacgcacgtggaaaatctggtcactcccaccgaaatattgcgcttttcggacctgcttaaaaaactgcacaccacgagattatatcccgcacctggctcaga

SEQ ID NO: 410154 - DNA, 122 bp, Homo sapiens
tcggggctcccctggagcacaagctggggaaggcgacccttgggcagcaccccctccacacgcaggcttcagggctccgtcttcccacccagctaggcttgggtggtgtggggaggtggcat

SEQ ID NO: 410155 - DNA, 122 bp, Homo sapiens
ccatttcatggaaagcagtccctttacgaagctacaaagcatctttcatgtcttgatgcacgcgtatgtgaacgtctgctgccttcatagaaacacaggtgttcacaccatttttaaacaca

SEQ ID NO: 410156 - DNA, 122 bp, Homo sapiens
gagtggagatgggacttgttcaaggccattcagctggtataccgcagaacttccaacagtcggctgtgcaggtagtgacctcagccagccccgcgaccgaagtacaacgtcccggctcattt

SEQ ID NO: 410157 - DNA, 122 bp, Homo sapiens
gaccgcagcctggcagagagggagtggtggcaggaagtgaagctgctggcttcccagtcacggcctccatgatccacgtgtggcagcaagaatcacagctgcatcatgacacccagagggaa

SEQ ID NO: 410158 - DNA, 122 bp, Homo sapiens
ccacgggacaggaaggtgagatccgggacctcagctttgcaagcaggctccgccggcgaccgctgacgggcgctgggctcgcggcgctgcaaggcggcgaggcccgggcctggcgccgcctg

SEQ ID NO: 410159 - DNA, 122 bp, Homo sapiens
cattgggcggagactctcaggtgacctggaaggccttcggcctcggggtcggagccggaacggagcctgcagctccgccgttttccaccagggcgcgcgcctgcaccacttcccggagcaga

SEQ ID NO: 410160 - DNA, 122 bp, Homo sapiens
tcttagaaaggacttgattcgtcttgggagcactatactgagagctaggcaagtggaaaccggaaggggcaggcagaggggtcacccagtgcgatgtcaagagtggggccggctggtccggg

SEQ ID NO: 410161 - DNA, 122 bp, Homo sapiens
ctgtctgcaccatgggagccccttctcactgacaatgaggagcattcagactgtctacaccgtggccgcgccttctcaccaatgctgaggagcaccgatactgtctgcaccgtggccgcccc

SEQ ID NO: 410162 - DNA, 122 bp, Homo sapiens
actgctaggtatgtgagtgagttccttaatctctgtaatactcacaggattgttgcagatcgaagtgttaatgtataagaagcaagcacttatgatggtgcctgccaggtggttagcatcaa

SEQ ID NO: 410163 - DNA, 122 bp, Homo sapiens
taaggtggaatagaaaaggcaccaggaaacttgggactgagcatgcgccctgcaacataacggtgtcaacaagctcgctacctgtccgaccggttccggcggccggggctgcctgttccagc

SEQ ID NO: 410164 - DNA, 122 bp, Homo sapiens
taaggcaaatactttccagaaacgctgaataattttagcaaagataaagactgcaaaaaccgcagttacttttgtaccaacgtaataatttgtctaaaactctggatgtttataatgcttaa

SEQ ID NO: 410165 - DNA, 122 bp, Homo sapiens
ccggctggtggggaggagacagccccctgcatgagctcacagaggcgccctggtgggctccggcggctgcagagcgtctgtgggcgtgtattggcgatcaggcgctggaggggcgctttgtc

SEQ ID NO: 410166 - DNA, 122 bp, Homo sapiens
ggtcccattcctctttccttggagacaggaagtgtcccattgctgcttgcccttcacccccgccccagcaggcccattgcatcagctgcaggccgggggttggggggtgtcccagccctcag

SEQ ID NO: 410167 - DNA, 122 bp, Homo sapiens
cttccggttcggtgccgctgtgccgggggctactctcttgccagtggggaccacagccctcggtatcccataggtcaagggcgtcaggccctctcagtgagcttcagtcattcactttagaa

SEQ ID NO: 410168 - DNA, 122 bp, Homo sapiens
ccggtcgtccacaccgagcgacatcaactcccctcgacaccggacacactccctctgcaacgtaaggccagcagcagcggggcctgggcccctgggccctgcccagaaactgcaggggcggg

SEQ ID NO: 410169 - DNA, 122 bp, Homo sapiens
gatcacaggggcaaaaagttcacctcaactgaaacctctcacgaaccacaaaaatgtggccgagggagcctcaaaaagcagtaccccaagcggggacggtaaagtcagaaaagacaaggctg

SEQ ID NO: 410170 - DNA, 122 bp, Homo sapiens
cctggcgcagtttctctccaagtctacatggaaaacaggtagggagcatttgaatcagaccgtcgacggggaagttggcggcagatgccgggcagcgccttgctgctccttccgtgttctcc

SEQ ID NO: 410171 - DNA, 122 bp, Homo sapiens
cttctgcatattagatacccagatgccttgtattttctaagtatttaaaatactgctgggcgtggtggtgcgtgcctgtagtcccagctacttcatgggcctgaggcaggaggatggcttgt

SEQ ID NO: 410172 - DNA, 122 bp, Homo sapiens
caggggagaggggaggggagggccaggaccctggtggctgctgggacatggcaggttccacgacagggaaggatgcagacacactgccctgtgtttctcacccacagggaacttgcaacaat

SEQ ID NO: 410173 - DNA, 122 bp, Homo sapiens
tgtggcctattacctcatctaaaacatagggttaataatagtgcttgcattgagggtggccggaggactcagtgggataagatacaaggctaggtgctggttatgacaagcactcagtaatc

SEQ ID NO: 410174 - DNA, 122 bp, Homo sapiens
atggatacctttgtagagggaagtccccccaccttcccgatcctctgggcttagcacccccgccgtgtgctcccagagccctccacactggcccactcttatgagtagctctcactatacta

SEQ ID NO: 410175 - DNA, 122 bp, Homo sapiens
gtggccaatatcctgctcaacggcgtgaagtatgagagcgagctgacgggctccagcgagcgcgcggagcagcctctgtccgtggggcgcctctgctccaccatctgcaacatgcccaaggc

SEQ ID NO: 410176 - DNA, 122 bp, Homo sapiens
tttggcgaccctgtgggaggccagggccgggcagattcgctattctgtgcgggaagagatcgacagaggctccttcgtaggcaacatcgccaaggacttgggtttggagcccctggcactgg

SEQ ID NO: 410177 - DNA, 122 bp, Homo sapiens
gtccccgacagcccgagctcagaacgtggcaataagggtgcgcagtcgccctgaggggtgcgaacccagcaccccaacctcaggaatggagcaacactcacccgtgcggagctcccagggag

SEQ ID NO: 410178 - DNA, 122 bp, Homo sapiens
actgcactccagcctgggtgatggaatgggactatttcaaaaaaaaaaaaatgcagtaggcgagcagggaggacttcgaacccagttggaccacaggagcccttctagccctgtgaggggcc

SEQ ID NO: 410179 - DNA, 122 bp, Homo sapiens
cagaacagcacggacgggctccgcaggctagcgcacctgagtaacaactgggcgggcagccggcctctgcgcccgtttatatcgctcctcacaaaatggcgcccgcgccacccggaaatgaa

SEQ ID NO: 410180 - DNA, 122 bp, Homo sapiens
ggccacagctaggccgagatatcctgcagggaaactcacactgcagctttgtgtgtgtctcgccgccccgtacctgagcttccagacactatacctccgtagagttccagtggcacagctcc

SEQ ID NO: 410181 - DNA, 122 bp, Homo sapiens
ccttctagaatgacagactgtgcgaggaagcaggggcaggggtttccagcccgggctgtgcgaggcatcctggggctggcagcaccttcccggctcaccagtgccacctgcgggggagggac

SEQ ID NO: 410182 - DNA, 122 bp, Homo sapiens
aaccgcaaatctatgcttttaattcagcttctaaattctaccccttttcgagtattgtgccgaaagccccgccccctttgtcatctccgcccccggtgcggcgggatttggaatccagagcc

SEQ ID NO: 410183 - DNA, 122 bp, Homo sapiens
aagagagctggatcctggagcccttaacgctgctcccagggccttcataaataaaagagccgtttatgtcattgtctcatttgtttcgcagggaaaagtccctgcaatcctctcctcactcc

SEQ ID NO: 410184 - DNA, 122 bp, Homo sapiens
atacagagatggattcgggggttgcacgcctcaccctggaggtgctcgcaacgggctccccggcatcaccaccacgcagcgcctgtgctgggggtgcccaccctgcagagccccaccatccc

SEQ ID NO: 410185 - DNA, 122 bp, Homo sapiens
accagcctgcccctctctggggatgtccggccggtcgaggggagggacttgagcaattggcgaggggaaattccctccaaccgctgccagtctgaagatcctaaagtgggtggaggcagttg

SEQ ID NO: 410186 - DNA, 122 bp, Homo sapiens
tgccccagcccctgcccaggctgcgtagcctagcgggggtctgcggtcctagcccctccccgcgccacctactgcagtgccggaccctggggccccctcgcctggtctgcaggcggggtggg

SEQ ID NO: 410187 - DNA, 122 bp, Homo sapiens
tctcctgggtctggcaggtgaacgagctgggagtctgtgtctctgtgtaagcccctctgccggccggcttgctttaattaatgtctgtgtgcgcccaggcaagcacttgtgcacaactacct

SEQ ID NO: 410188 - DNA, 122 bp, Homo sapiens
tcagaaccccacttccgccactccgcgctgaatgtttcgcgtcaactcagcaagcgcacacgtcatggctcacatggggcagtcggctcatttcaaagatgccagtttgcaaactggcatgc

SEQ ID NO: 410189 - DNA, 122 bp, Homo sapiens
ctccaaccccaggtcggtaactccggggactcccttcgtgactcctcctctaactgggtccgggaccccggtcctccgcgttgtcctagactcctaaacttcgaggaccccctgccacccct

SEQ ID NO: 410190 - DNA, 122 bp, Homo sapiens
ccattgtgctgtgggtgagctctgtgttgtctggtaagagggacccttcctttctctaatcgtgtctagcttggctgcagcttccaaggatgaacattcagtacctgggtttcccagaggaa

SEQ ID NO: 410191 - DNA, 122 bp, Homo sapiens
tctatctcaaccttcaaggcctgtttcttggtactcttgccctgtttcataggattcttacggtttgtgggaggcttggagggagtagtgaggaaccagtttcctgaggatgtcctcaatag

SEQ ID NO: 410192 - DNA, 122 bp, Homo sapiens
tgagccaacgcccccgatgagagtcaggttctaacagccccactactcagtgaacacgcacgttctcacactggcccggattaaaatctagctctgacaacaccaccgtcccccagaacctg

SEQ ID NO: 410193 - DNA, 122 bp, Homo sapiens
ccgccctccccctcccaaagtaaatcaaatcaaggaatatgagtgcctgcagacaagcctcgcttcttttcttccccttcagggctagcgtttggggaaggcaaggctgcggctactcttgg

SEQ ID NO: 410194 - DNA, 122 bp, Homo sapiens
actgccaggcactgaagcctcccaacttttgcgcactcgcggagcctgagccagaagggtcggacgcccacgcccctggcaggagctcggtggagcaggcaagccccagttgtcaccacttt

SEQ ID NO: 410195 - DNA, 122 bp, Homo sapiens
tccagttacagaaggcaaaagccctccaagccttttttattgggcccttgtgagttctgccgttggctgagccagacagagttgaatggaggaatggcgaggtgtgtgtgtgtgtgtgtgca

SEQ ID NO: 410196 - DNA, 122 bp, Homo sapiens
tgccgagggggtggggccttcctagggagtgggcggggctagttggtagggctcactccgcggtcctggtgccgcgtgcaggtcggtgcgcgcttctcccgaggtggaacgggcggcagtca

SEQ ID NO: 410197 - DNA, 122 bp, Homo sapiens
taatcttgtgcctccagtgttctaaataggggcaatctttttgctcacggtctgagccatcgaatgagtaacctcgacctcctaagacccttcactgggctcacgtgtgtgtgagtcccaca

SEQ ID NO: 410198 - DNA, 122 bp, Homo sapiens
ggcggggctggcgagcatgcgcagtatggggcggggcggggcagggctggtgagcaagcccgcggggagcgagcgcggaggcgggcgttgctacggcaacggtgggcggccagggagttgcc

SEQ ID NO: 410199 - DNA, 122 bp, Homo sapiens
cactcctcacacctgacgctgctcagggagaagccaggcagctataatagtgttcttggccggagaacatctggcctagcaggcagggtgtcatctatgaagctgggtggagagaaagctgt

SEQ ID NO: 410200 - DNA, 122 bp, Homo sapiens
tttccttcccaaaagaatatttggcaatatctagaaacattttttggtttttacaacttccgcaggggttgcacctatggcatctagtgggtaattgccagaaatgctgctaaacatctgac

SEQ ID NO: 410201 - DNA, 122 bp, Homo sapiens
gaacaggtcctgattcctaagagttagccgttgtggattcttgtgtgggatccaggttttcggttgagttttggaaaggttagattgcagaatctgcaatttctaggtaattgacgtgttct

SEQ ID NO: 410202 - DNA, 122 bp, Homo sapiens
ggccagggtcgcggccccgcccacctcagagtggaccactgacaacaaggccggcaacggcgccagcagggcccaggaaggaaaccagcccttcctgggttcctgaggtcagctccctggac

SEQ ID NO: 410203 - DNA, 122 bp, Homo sapiens
gctggtgctcagcagcgagaggacgcgtcactctgccgttctgcagggtgacgccctccccgtacctcgctgagagccacctgcagacacagcaggccacagcagaatgcacaggtcactgt

SEQ ID NO: 410204 - DNA, 122 bp, Homo sapiens
gagcgcgggactgtccggctggactcatttgccggggttcctggcttcggggtggggggccgcaggctcatgggcccccttggccctgcattcctggggccctgagccctggggagaggccc

SEQ ID NO: 410205 - DNA, 122 bp, Homo sapiens
gattataaggccctttaggcccctttcctgggaaccctctgggagatgaggccttgacctcgttgacttgacccaccttggcccatgtgggtgagctactgtggctggtggggatgggagtg

SEQ ID NO: 410206 - DNA, 122 bp, Homo sapiens
ggactgacttccttggaactccatccctcagcggtcaagtcctctctttttcattatccccggggcgtagtcttatctttctgctctctttccatggatacattttcacttcccaacaatgc

SEQ ID NO: 410207 - DNA, 122 bp, Homo sapiens
cggcacaggccgacactgaggcctggaaactaccaatcccagaatgcatgacttgagcgccggccccaggctgcggggtctgccgggcaatgtggtttgccagacgttagcgtccgggaagg

SEQ ID NO: 410208 - DNA, 122 bp, Homo sapiens
ttaagactgggaaacggggcaccaggctgggctttagaaatcgctggagaagcctgggtgcggccgcagcccgcgcggcctaggacggaagcgacgccccgccccgctccgcgccccgggca

SEQ ID NO: 410209 - DNA, 122 bp, Homo sapiens
gggcgggcccgcagtcctgcagttgcagtcgtgttctccgagttcctgtctctctgccaacgccgcccggatggcttcccaaaaccgcgacccagccgccactagcgtcgccgccgcccgta

SEQ ID NO: 410210 - DNA, 122 bp, Homo sapiens
cacgcgataccagggctggggatcagcccccggaatggagggggtcggcggaacaggcagcgagaaccgggaataaccagagtgggaccagcacaggggtgcagcctcctgtctcatcaccc

SEQ ID NO: 410211 - DNA, 122 bp, Homo sapiens
attgactccatcctgccttcttgactgtcttttattgacaaatgaagattcagacttgaacgtctttaactttcgaatttgttctgcagcgaatgagaaaacagagtcatcctctgcacagc

SEQ ID NO: 410212 - DNA, 122 bp, Homo sapiens
ccctcgctcccgtcgaaggctgatgccatccttcagtgatgtgtggacggacacattccgcgtatcccccaatcagtggatggacgcgtgggttgcagagcacgccacacacattcagtcag

SEQ ID NO: 410213 - DNA, 122 bp, Homo sapiens
tgtggtctggcaggtgtggattccgccggtgaaggctgaaggcagctaccttaaagatgccgggatccgcagcgaagggctcggagttgtcagagaggatcgagagcttcgtggagaccctg

SEQ ID NO: 410214 - DNA, 122 bp, Homo sapiens
atcttcgtaggagaaatggaaatttgctccccaccagaaggtttgctggaaattaagacgcggcaattcttaatccagtttcctgcggtaggaagcagctgacaagagaagtcccagtccga

SEQ ID NO: 410215 - DNA, 122 bp, Homo sapiens
ccccattccccacagtctccagctccggcaacaccattctgctttctatctctgtgaatccgactactccaggtagctcatgtaaatggaatcatacagtatttgtccttttctgactggct

SEQ ID NO: 410216 - DNA, 122 bp, Homo sapiens
gggggaggggcggcggctcgggccggcgggcgggagacagggactctgggctgagccagccgcttgacacatgtggaagctgaaacctggacaggggaagtgacccctggcggagggtcggg

SEQ ID NO: 410217 - DNA, 122 bp, Homo sapiens
ttcatacaggacacaaatatttgtacatttgatatccattctaagagatctatccacatacgagctagttccatcaataatctctttgtcaccaatcctccaagtccttccttccttccttt

SEQ ID NO: 410218 - DNA, 122 bp, Homo sapiens
cttccctgcgcccaaggacgactgggccgccgcctacggcccgggccccgcggcccctgccgccagcccagcttcgctggcattcgggccccctccagactttagcccggtgccggcgcccc

SEQ ID NO: 410219 - DNA, 122 bp, Homo sapiens
cgtcatgtgtgcctttcccttagcctgcaatgctctttgccctcaggtctgatttgaaaacgtcaaatatactttcaagttcctgctcaaatcacttccttggcaaagatgcctctgcacag

SEQ ID NO: 410220 - DNA, 122 bp, Homo sapiens
ccatcccacaggagaggcgggatctccctccccatccccgcaatgaagagacagagatgccgagccacagacaagcccacccaaggcttcacgggctctgctgggccggacccgagtctctg

SEQ ID NO: 410221 - DNA, 122 bp, Homo sapiens
accccaacagaattttttttaaattttaatccacagggggtatttcctttcctgtttacccgagcgaagagtggcccccggtggcccaaggaggggcgcctccaggcgcagggctccggcgg

SEQ ID NO: 410222 - DNA, 122 bp, Homo sapiens
gcagtggctgtgacaataagggaggtccagcttgccttctctttctccttccccctggggcggatccatctgtcaaggtgcagaaggagtgtttgcccacttcccaatccagaactggattc

SEQ ID NO: 410223 - DNA, 122 bp, Homo sapiens
tttaactccttatgcacatgatctctcttttcaggaatggcaaaacagaggtaaatagatcgtttacacgtaaacctgatgtctggttggggaggtgaaacaaacagaaacaagacacaact

SEQ ID NO: 410224 - DNA, 122 bp, Homo sapiens
gccggagacgctgcgctggggcccagggagcccccgtgaggccggatctcagggcctcagcgcagaggcaggctccacataaggtcatgctccgtcacggccttgggggtgttagtggtggc

SEQ ID NO: 410225 - DNA, 122 bp, Homo sapiens
agacttgggccctgccccctttgccagtggtgcatacaggcctagagagacagagggggccgcccaaggtcacagagcagggccccagggcctgtgctgccccaacaaccttcccgaagtgg

SEQ ID NO: 410226 - DNA, 122 bp, Homo sapiens
ctacattctccatttcccggactccaaggcagagaagaatgagaccggctgaattcaaatcgtggttcagtgacttactgcctgatacatggctctgggtaccttacctaaactctctcacc

SEQ ID NO: 410227 - DNA, 122 bp, Homo sapiens
gcagccccacccgtgacgcttaaaggtggcgccgttgggatgccccgctcctttcgtgagcgcgcgctctgggcgctgggctcgcggcctcgcgctgggccttcactctctgcggcgcagtc

SEQ ID NO: 410228 - DNA, 122 bp, Homo sapiens
aggggccactagggaggggctctggcggggtcgcaggggcgtggtctgcgggcgtgggggcgggacctcggggcctcgggggcggggcctgagggcgcgcgcacgcgtccggcgcgccccct

SEQ ID NO: 410229 - DNA, 122 bp, Homo sapiens
ttggcaggttttattattccgcctgaacaatccggccgcccagtggctgagggtcgctgacgtcggaggcagagccggggagtagttgggattttgctctgtcagtaacacatgtgtaagag

SEQ ID NO: 410230 - DNA, 122 bp, Homo sapiens
agtgtgtgcttttccagcgtgcacttcaaaacgtttccagcctctcccgtgacccggttccggctctgctgccacattttcaggtgtttgttacagcaacagccccgcttcctggtagcaat

SEQ ID NO: 410231 - DNA, 122 bp, Homo sapiens
gggccatgcccttcagtgggcacacttctgggagcccgtcctgagctcggtcactgacgtcgacggccgcctggcggcgctcgagccgctggccgagagtgacgtcatcagaggcggtccgg

SEQ ID NO: 410232 - DNA, 122 bp, Homo sapiens
acgcctttctgcggccggaggcggctacgagggggcgctgcgaaagcggatttccaggcacgcctggcgccactaagcggcgctgagacggcgctgcctcctgactgccggttggaggctac

SEQ ID NO: 410233 - DNA, 122 bp, Homo sapiens
aaaagttaaaaacagaactaccagcccagtgttatccgtccttcgttaagttcaaagtcacggtgccacttcctttcccatctaaaggggactgctcgcgacccaagccaaggcccgcaagt

SEQ ID NO: 410234 - DNA, 122 bp, Homo sapiens
taagaccctccgaaccaggtgtgggacataatctcgtagtgcgccgttttttaagcccgacggaaaagagcagtattcgtgtgggagtgacccgattttccaggtgccatccatcacccctt

SEQ ID NO: 410235 - DNA, 122 bp, Homo sapiens
gaaaaagcccgcctgtgaagctgtcaaggtcctcacagtacaattttctctctgcctcagcgcctcctcctcccctgtaagtgacgcagatgtgcactggggcctatacggagagatggagg

SEQ ID NO: 410236 - DNA, 122 bp, Homo sapiens
gagcatcctgaatctgaaattttcaatttcaaaatacttcaaaatcctaaactttttgagcgccagcatgatgttcaaagaaaatgctccttgaagcattttggattttgggttttagaatt

SEQ ID NO: 410237 - DNA, 122 bp, Homo sapiens
tttgtggcatgaggtaaaacaatgtgaggtatcctggagatcataaaggagttttcatgacgtggaatcagcattcttagtatgcagattaaattatgaaatttgaataaatttgcatagag

SEQ ID NO: 410238 - DNA, 122 bp, Homo sapiens
ccagcaactgcgggacgcctcagctcgacacggaggcggcggccggacccccggcccgctcgctgctgctcagttcctacgcttcgcatcccttcggggctccccacggaccttcggcgcct

SEQ ID NO: 410239 - DNA, 122 bp, Homo sapiens
ggcgcctgccattacgcccaggtgatttttttttttttttgagacggagtcgcgctctttcgcccaggctagagtgcagtgacacgatctcgactcactgcaggctccgcctccagagtagc

SEQ ID NO: 410240 - DNA, 122 bp, Homo sapiens
tcagggacgacctggaagtgtcacatgagttatgggtctcctggcggggcggagagtcaccgctgagctccacctttagtccctgcctcagggctgtgtgcagtatcctgaaaaaagccggt

SEQ ID NO: 410241 - DNA, 122 bp, Homo sapiens
agcgagagctcgagactgaggcgaaagactgagcctgcccagtaatcgcctgtggaaaggcgacgacggcgccctcgtgactccgcgccgaccaaccaaagctcgcggccgtccccatgagc

SEQ ID NO: 410242 - DNA, 122 bp, Homo sapiens
gtgatgactgttaaatccacaacatttagttaaaaaaaaacccaggcataagagaatacacgtgtatgatcacaggttaaaacctagacccatcaggagggcgggcatgagaagcagaaaat

SEQ ID NO: 410243 - DNA, 122 bp, Homo sapiens
cagagagcctttgttctagtctcgctggacaccccagaaagcccaccaggagctgccccacggaacctgaaggggagaagggcatatccccatgtgccaggaagcacaatgccctggactaa

SEQ ID NO: 410244 - DNA, 122 bp, Homo sapiens
gcgcactagcgcgcgtacgaagtggtggccgcacaacttctcacgcatctctggggtgggcgcggggcccaacgcgaacaccagggcagggcccagcagcaccagcgcccaggcgggcagac

SEQ ID NO: 410245 - DNA, 122 bp, Homo sapiens
cgcccctgctttgcatattcatgaagtctagcgaggccggtcgcccaggctagccgtggacgggtcatgaattattcatgaggaaacctctggtcccgcccagaaaggcctcgttgactatt

SEQ ID NO: 410246 - DNA, 122 bp, Homo sapiens
ggcgtggcgcgtaggtaagcggacccggtgcctgcctcgtccaggggatgctcactagagcgctaggcttttttatttttattttttagagacaggggtctcgctgtctcgcccaggctgga

SEQ ID NO: 410247 - DNA, 122 bp, Homo sapiens
ccaggagtgatggcagggctgaggttggctctagggctgggaggagcgtggttaaagccacggaccctggatccagaacgcctgagttcacatcttggctcttatcagctgtgtgacctgtg

SEQ ID NO: 410248 - DNA, 122 bp, Homo sapiens
aaccgcatcctcttccaggagttccggcagcggtgagctagagcgagggcccaggcccggcggaggggctgggtgggacccgggtctggaagccgacacacctgcattcaggtctccaccca

SEQ ID NO: 410249 - DNA, 122 bp, Homo sapiens
gatgtgtcgggcccgctctggagtctgcatcctgtccattgataatgatgtcagtcctcacgtcagtacacactttcctgattactgtaagtcttgaaacctggtctaataaatctttcaac

SEQ ID NO: 410250 - DNA, 122 bp, Homo sapiens
cgtgcacagttgcagacacccacacccagccacacagccacaaagacacattcagaacggcgcatccgcagccagctcccgcctgcgcgcacagattcgaggctccggacacgccccggccc

SEQ ID NO: 410251 - DNA, 122 bp, Homo sapiens
aacagagcggggccccgattggcccttcgaacttgggtggggccagagcattcctggccccgccccctgcagcgggccgctcgctcatgcgctctggcctcaggctcgctgtcgcgccattt

SEQ ID NO: 410252 - DNA, 122 bp, Homo sapiens
acttagtcccagagggaggcagctgggtgggcggcagggtctgggccaacttgttcctgtcgtgggtgtttccctgcaggaacctacttattctcaccccaactccgtgaggaggaaatagg

SEQ ID NO: 410253 - DNA, 122 bp, Homo sapiens
ataaaaggtgacggagctagcgtacaagaggtcgtctttagtggagaggcctgaggtctccgcagtgacgggggtggcagcgcgaccccttagtcttcaactacaggccagtcccaggtgcc

SEQ ID NO: 410254 - DNA, 122 bp, Homo sapiens
aagggggctacttgtggctagaagcagcccggactcctgagcaagactagaccaagaggccggtatgtggacacccccgcgtgggcacccccacggggacaccctggccaccgccgcgcgga

SEQ ID NO: 410255 - DNA, 122 bp, Homo sapiens
tagtggcgtggcaatgtgcactccagggtggaagctcttctcatcctgctaactatctttcgtcactcacccccgcccagggcttccagatcctgtgtgacctgcacgatggcttctctggg

SEQ ID NO: 410256 - DNA, 122 bp, Homo sapiens
agttctcccaatctgtgtctttctgtctgcatctctgtggttacataactagaaaagggccggttcaggaatgaatcccagatggctccgctcagtgtttgctttgaagtcggttcaattcg

SEQ ID NO: 410257 - DNA, 122 bp, Homo sapiens
aacaagtccatactgagatgttaggcggcaggggagagctggggaggaggcatctcacctcggaccacagtgcctgggtagagacagcggtactgctggctccagtaggctgcaatcctggt

SEQ ID NO: 410258 - DNA, 122 bp, Homo sapiens
ctgaagcaactgacgcgccacccccgcgcctgccttatatagcgacgggcccgcccagcgcgcggcgctttttccagaagcctcccgaaccttccggaagaaccctccccagccgccgccgc

SEQ ID NO: 410259 - DNA, 122 bp, Homo sapiens
ctccgtgtgggtcaaacctctgcctgcccactggagagcagcgggaatggcttcaggaagcggctgccgcctccgagactcaccgacctgccgtgctgccacttctacaccgaaatggctgg

SEQ ID NO: 410260 - DNA, 122 bp, Homo sapiens
agcccctccctttaggaagcaccttcttccccaagagatccccgcctgcttccctgggaccgttgtgagtgtagctgggagaacttggtgataggctagagacactctagcccgggttctcc

SEQ ID NO: 410261 - DNA, 122 bp, Homo sapiens
tgagctgggctggaaatgattcttccagactgcagagaagacagtggcctgcccgccggccggcctgcctgccctccccgaggccaacaggaaatcccagaatttatagatgaccccgttac

SEQ ID NO: 410262 - DNA, 122 bp, Homo sapiens
tggcgcctcttccgggcttggcagcgggcggggtccattgagtaaagccttgcgtgcctgcgcccgcgacggaggcgcgcttcaaagcgcaggcgcggggagggggtgggggaggagggaaa

SEQ ID NO: 410263 - DNA, 122 bp, Homo sapiens
tcagagggaaatcaaggcagcaggcacaggaatcacaagcacaggcgggcatgtggccgacgcgtggctgccggcgcagcactgagcgcgggtgtggggcgacccgcagtcccccgcggtgt

SEQ ID NO: 410264 - DNA, 122 bp, Homo sapiens
aaaagctaggtaagggccagcatgtagaaaaatgattgtatggactgctaaaagacagatcgaaacagaatgcaggctgggtacaaagacagcgagagaggtagggatcagctataaagatt

SEQ ID NO: 410265 - DNA, 122 bp, Homo sapiens
atggtgcctccaaggaaactttgccaaatataatctcacctgcttccttccagacagtgtcgctaagtgcatttcacagtttttggatctggcaggcatatgtctctatgtagaaaataagt

SEQ ID NO: 410266 - DNA, 122 bp, Homo sapiens
cgccacgatccaagagagtcttcttcccggctgggcgggggtctccatggaaacgggggtcggttgatcctgggggggaaaccataggaattaccccactcctcggaaagggaggtggaggc

SEQ ID NO: 410267 - DNA, 122 bp, Homo sapiens
ttctctctaatttataaaaaaggacaacttgtgtaggatttctaacaaataggaagggttcgtgacaaagattacctactccctgtgtcagatgtgtcttagtggttgacctgcacaacagc

SEQ ID NO: 410268 - DNA, 122 bp, Homo sapiens
cccagagtctcctcctaatctgctgacaagtatgaacccgccgctgttcgaacccagcgtcgccgcagccccggccaagtaaaagaaagaggtggctgccagcaagccaacgagccttcccc

SEQ ID NO: 410269 - DNA, 122 bp, Homo sapiens
ctcacatcctgggttaacgatccactcgggtggggcccgagtccggccaaagtcccttcccggggccccaatacccactttcaaggtcccaggggacacagagacagcaacagagatgggga

SEQ ID NO: 410270 - DNA, 122 bp, Homo sapiens
ccgccacatccgccgtaaaagaatggggcacacttcccttcagtcacatcaaagtaccagcgggagatcattgctcggcacggccccgtctcggcttgttcagagcacacctctaatcagag

SEQ ID NO: 410271 - DNA, 122 bp, Homo sapiens
ccgcgcgtcccccttcggccgtggcttgcgaggactgcagctgcagggacgagaaggtggcgccgctggctccttgacgcgctcccgggcctcaggtatcagcccccgctctgggtgcgccc

SEQ ID NO: 410272 - DNA, 122 bp, Homo sapiens
ctctgtcgcccaggctgcagtacagtggcgcaatctcggcttactgtagcctctgtctcccgggttccagtgattctccttccccaactcccgggtaactgggattttcaggcacacaccac

SEQ ID NO: 410273 - DNA, 122 bp, Homo sapiens
gtgcacccacttagagttgtgagcccttaaaaggaacagggattgctcactcggggagctcggctcttgagacaggaatcttgcccattccccgaacgaataaaccccttccttaactcagc

SEQ ID NO: 410274 - DNA, 122 bp, Homo sapiens
tccgcccacggccccgccccgctcccaagtgcgcgcggacccctagctccctctgagttgcgctgggcttggctgctgcaccatgaccctggaggcgatccgctactcgcggggctccctgc

SEQ ID NO: 410275 - DNA, 122 bp, Homo sapiens
ggtaagtatctctgcctgtcatgcatgagagagggggtcgattccctgacggggaggttacggaaaattgtgtggggattttgtcaaccttcaaaagtctcagaaatgtctccttgttttgg

SEQ ID NO: 410276 - DNA, 122 bp, Homo sapiens
aagtgcacatttcacttcttcttgttaccggaaaggggtcccaatccagaccccaagagacggttcgtggatctcgcccaagaaagaattcagggcacgcctgtaaagtgaaagcaagttta

SEQ ID NO: 410277 - DNA, 122 bp, Homo sapiens
ctcccttctccacccttgggatttctcgtttgttcgcctcctctccggtaccctcaatcccgtagatgcaggtgggcatcctccagccccagcaagtactgcggaccagttgggctggctgg

SEQ ID NO: 410278 - DNA, 122 bp, Homo sapiens
cgtgtcaccagagtaaagcagcaaagctggaaatgtgcccagagagaccttcccacaagccgcctgagggagccatttaaatgtctctgagccctcctagtgcagagattcagatgcaaggc

SEQ ID NO: 410279 - DNA, 122 bp, Homo sapiens
tcatttgactgaagcccatgcagaatgacgggaaagctgagagcatgggctcggcgtgcacgtacgcccttactctctgccccagcttcatgctaggctgctctgttgctctgtgaaaatgt

SEQ ID NO: 410280 - DNA, 122 bp, Homo sapiens
tgaccatcagaactatcctgcaccggaaggagttttactgcgactctagcaaacacatcacgaatgcaggagagactgaggagaagcccacgtgttccgatcagttactcactctcgggggt

SEQ ID NO: 410281 - DNA, 122 bp, Homo sapiens
aggaatccatatgaatagcagcctgccaaaagcatgctaacacaatacaaaattgtgtaacgcacattggataatatcggatcaagtaattcaagtaaagcgatctctgtgaaaatattatg

SEQ ID NO: 410282 - DNA, 122 bp, Homo sapiens
cctgcggctggcggcccagtggattctgggaattgtagtcccagccatccagggcattgccgttcagggccacgggaaaacctgactgcgctcccagaagcctccggtgtacctcgctggga

SEQ ID NO: 410283 - DNA, 122 bp, Homo sapiens
ttatttatagagttcaattgtcagcagcagagtgcctaattttccttcttctttgatattcgacaactcattcactgttcagatcaagaagacagctgcaaattgctccatggcagatactc

SEQ ID NO: 410284 - DNA, 122 bp, Homo sapiens
ccttccttgctgtctgttgaaatctggcccctagtgttgctgacgatggcgggagcatgtcgtggacccgaggcagccacaggctttcctgatgattcatgataatggtaatcatttcttcc

SEQ ID NO: 410285 - DNA, 122 bp, Homo sapiens
tcggtgtggggctaccccgtcgtccctgagggcgccgctcacctctgctcagggctgctccgcccgtttccctgcacacactcggcgtgcgagaagtgtccatggcccgtggggctcgaggc

SEQ ID NO: 410286 - DNA, 122 bp, Homo sapiens
attgtgcagactctttcctaacccacacctcatcttaatttatttgccttcaattctgggcggcggtgttggggagggtctcaattttcccatgtatttcccagtgtttattgaatacatga

SEQ ID NO: 410287 - DNA, 122 bp, Homo sapiens
aaaccacccatgtaggtcaggagtcactggaaaagttgttaggccggtatttctacacctcgcatttgtcagcccttgccaaaacggtgaggcagcggtgtgttacctgccgacagcataat

SEQ ID NO: 410288 - DNA, 122 bp, Homo sapiens
tagcatttaataggaactttggcatatgtaaatattttctaggttcagttttagcaaatccgttgctctcatgaagactgtagagaaaatgtttgtactgatttaggaatgttaagaatgtg

SEQ ID NO: 410289 - DNA, 122 bp, Homo sapiens
tgggctctgaatgcccagaccttgtgctgcccttgggggagggtcttctgcaagcacagccgcctgcaagcattcaccttagtccgagcatctgagcctctccatggtactcggggagaggt

SEQ ID NO: 410290 - DNA, 122 bp, Homo sapiens
agtgggcttggagtgacaggttccctatcttgtttctttctgcagaaaaaaggcgtaaagcggaaagcagatactaccacccctacacctacagccatcttggctcctggttctccagctag

SEQ ID NO: 410291 - DNA, 122 bp, Homo sapiens
aagttttgcggggccgaggaccttctccctgtgcgtggcttcgctaggtgttaaggccaacgcagaggagcaaattttaattaacaggaaaagtgacacaactaatccaaagcattgctgaa

SEQ ID NO: 410292 - DNA, 122 bp, Homo sapiens
gtagttgttaatcactcaattaaataattggtgtgtgtcccccccaacctcaccttctgccgggaacatctggcatcggaaacacacaaccattcacatgcacattggacacacactatgcc

SEQ ID NO: 410293 - DNA, 122 bp, Homo sapiens
gcggcggcggccgtggaggctacagtggcagcacctggacggggcgggcagggcgggacccgtggctcctccccgccctggacctgcgcctccctgccccaaagtggaagggcttaagtgtc

SEQ ID NO: 410294 - DNA, 122 bp, Homo sapiens
ttattttccttttcattttctgcttttgagggagtttccatagtaacgtgtccttccagtcgcctagcctgaagggaagccccggagctccagcttcaaggctcagctctcccagatgcaag

SEQ ID NO: 410295 - DNA, 122 bp, Homo sapiens
taatagtccaattcagctctcagtttctgcattgattcctccagagaaatataataagctcgttctttggttggctcctgattttgattgacagaaaaaataacagcagaaagattacattt

SEQ ID NO: 410296 - DNA, 122 bp, Homo sapiens
atgcattcctttaaattcagagtacctggggggcacgcgtagtgaacaggctcaggacctcgggatctgtcagctccctcctaagttctgtttgcgggggctgctcaggtggggcgtatact

SEQ ID NO: 410297 - DNA, 122 bp, Homo sapiens
ggaagacaaagagatccgatttccctgggactggtgaggggagcttggcggggaggggaacggcagggcagtcaagtgtgaaagagaatttcctgggttcaaagttaacgcagtcaccttat

SEQ ID NO: 410298 - DNA, 122 bp, Homo sapiens
aacaaggtagcttgccctagacactcctgtctacagatctgatgtacaaatagcagtcttcgttgtttacttggtgaggaggtggccttgcatttttgggcatttggctatgctcccaattg

SEQ ID NO: 410299 - DNA, 122 bp, Homo sapiens
gtgacttgaccccatttcaaaaaaagtttgacatagtgcttcaacatttccgcattcctccgcgactacaaaggctgcagccgcctccttctgctttctgtctctgctctctgtcttcacac

SEQ ID NO: 410300 - DNA, 122 bp, Homo sapiens
ttggcttttataattgtaattttttaaaaaaagaatatttaccatgattacagctgcactcgctaaagtttttaagcaaaatctattctatgtgctctgggaggttaaaagaaaaaagtgtt

SEQ ID NO: 410301 - DNA, 122 bp, Homo sapiens
gctttattattttagcaccacggcagcaggaggtttcggctaagttggaggtactggccacgactgcatgcccgcgcccgccaggtgatacctccgccggtgacccaggggctctgcgacac

SEQ ID NO: 410302 - DNA, 122 bp, Homo sapiens
tagcggcctcagatggtctcacactccgtggtggcagtggagcaggctccgcagtcacagcggatggccacgggataggtgtagaaggggtcgactcccggggcacagttgggcagcttgac

SEQ ID NO: 410303 - DNA, 122 bp, Homo sapiens
gcttaaaagaagatgtttcactttagtaggaagaccaattcaaacatcatttacaactgacgtttattcagtatgagtcatgaactgaaacttggtgtgggatctggtggaattatgggcta

SEQ ID NO: 410304 - DNA, 122 bp, Homo sapiens
agaggtccctgggaatgaccagtgggtgcacacagccaggcctccaagctcatgaagcagcgactggccagggagccacgtgaatgacacaccacatgccggacacgggcgggcttgggcac

SEQ ID NO: 410305 - DNA, 122 bp, Homo sapiens
tgccaggtctcctttcgtgtcctgcagcctgtgccagctcctcagtctctctttgtctttcgtgaccttgatgttttagataagtactgggcggctgttttgtagaacgtccctcggtttgg

SEQ ID NO: 410306 - DNA, 122 bp, Homo sapiens
agccaccaccttcggctccggctgcagccgcgggagggcagcctcccccgcccacagccgcgctattgtacgccgcccggcaggcctgaccgcctagttcactggctcccctactcctcctc

SEQ ID NO: 410307 - DNA, 122 bp, Homo sapiens
gtccaaggaggagccgccgccgccgccgccgtgacgctgggccgcgcgctcaggacgcggcgccctccccgcctcagagcagcgtcttgctgaaggcagcggcagcaactaagatggcggcg

SEQ ID NO: 410308 - DNA, 122 bp, Homo sapiens
ttactggcagcttgaagaagagtaaggaaagtgctggggaggctgtcagctactgacgttcgacttcaggttccctccaggtggaagaacgaggaccagaaagcaagggggaacgtgcccat

SEQ ID NO: 410309 - DNA, 122 bp, Homo sapiens
ttgaaggcaagaggcagttccgttgaagcccagtgctggcggagaggccctgcactggtgcgctcacacagccctgtgtttttgtgttttaggtcggtaggctccacgacaaaagtcaaccc

SEQ ID NO: 410310 - DNA, 122 bp, Homo sapiens
ccaggaaagcagcgaccttgtctgtctggaagaatgcagcgctcccagcacctgacccaacgcacatttgagggatggatagaaaatgaatgaatgaaagtctctcccaaataacagagctg

SEQ ID NO: 410311 - DNA, 122 bp, Homo sapiens
accactgagagcaggaccagcagcatcttgaaggaggctctggagttgctcccaactctgcgttgagagaaacatggcagctccctttataaacatgagcagaacaatggcacctttgagct

SEQ ID NO: 410312 - DNA, 122 bp, Homo sapiens
ttcgccgggaggccgggcaccactgcccagcctttgccattcacgggtgaaaaaagtaaccgtagcatcgtgcggcctttccctctcccgtcctcattttctgcatctggaacggggagtgg

SEQ ID NO: 410313 - DNA, 122 bp, Homo sapiens
ttgccggccactgggaggggccggtgcaccctgggcagcccctgccagggccctgagacccgagcctccccgccgagggcacctgtctcggctttgccccattcgagcagggccctcgccga

SEQ ID NO: 410314 - DNA, 122 bp, Homo sapiens
ccggcagcggccagttttccctccttcggggccggtcctgccgcgtgacccctttcccgccgaggcagcctccacccgcatccccgggcgctcgtgtagccctcacctggcaaacaggacgg

SEQ ID NO: 410315 - DNA, 122 bp, Homo sapiens
gtgtctgcgcgctggtgtctgaggcccaggctgaggcctccgctattgctggagcgcaggcggcggagaggatgactgccgctgccattctctcttgagctagcgagccgccgccaccctcc

SEQ ID NO: 410316 - DNA, 122 bp, Homo sapiens
gggcacagaagcctattactgtcagacgctgaggcgttgccgtgggaaccaagggcctttcgggtcagatcagagcctttctcagacaattctttccgtaactgacgagctcctgtccagcg

SEQ ID NO: 410317 - DNA, 122 bp, Homo sapiens
agtgaccgggaaagttgatgcagaagccgccgtcgccgcacaggtggggcttggcgcattcgttcaggtctgtgcgggaggaaggggccacgaagggggtgtaggaggcggcgggcaagggg

SEQ ID NO: 410318 - DNA, 122 bp, Homo sapiens
accttgtgatctgcccgcctcggcctcccaaagtgctgggattacaggtgtgagccaccgcgcccggccaagttttcaattttcattgtaatgaaaggtatatgccacattaatcaaagtca

SEQ ID NO: 410319 - DNA, 122 bp, Homo sapiens
tcgcctgtcagtcggcgccgagaagagactgttggggcgctggggccgggcctcgcggagcgccagagtgcgctctcgctggctgacagcctatctcgggagccagaggaggccccgggctt

SEQ ID NO: 410320 - DNA, 122 bp, Homo sapiens
ctatgataagccgatttatactttcactacttttgtaaaagggtctaaataacctgaaggcgggtatcacaggttttaatatgtttatcgcccttagagaggcagttttgtcaagtggttac

SEQ ID NO: 410321 - DNA, 122 bp, Homo sapiens
ctcagccccaaaccctgcagctcccgggaccctggcacccggtcaccctccacagcgccacggggctcctctgaccccacccttgttgccagcccagccggagtctgacttctccgtggtgc

SEQ ID NO: 410322 - DNA, 122 bp, Homo sapiens
gggacgccatgcggggaggcaggggcgcccctttctggctgtggccgctgcccaagctggcgctgctgcctctgttgtgggtgcttttccagcggacgcgtccccagggtgagtgctggagg

SEQ ID NO: 410323 - DNA, 122 bp, Homo sapiens
tcttcttgctctctccaggccaaacagtccttagctacgctgaccaaggacgtccccaagcggcattccctcgccatgccgggcgagacggtgctcaatggcaaccaggagtgggtggtgca

SEQ ID NO: 410324 - DNA, 122 bp, Homo sapiens
actcaaccgaagcccgcccacggagagcattaaaaccagccctggccagaggggaatcgccgatcccagaggtccgaacttgagtgcccacaaaaggtggaagggccccttccaccttgcta

SEQ ID NO: 410325 - DNA, 122 bp, Homo sapiens
cacgtatcctaaaagggcacagcttcttttcccatttaatgaaaagcctcctatagttgtcgatgagcatcagttgacttattattgacaacgaagtgcacataatcttctttttctcattg

SEQ ID NO: 410326 - DNA, 122 bp, Homo sapiens
actcaattcaattatcttaaacaagaaagggactttattggctcacaaaactttaaagtccggaggtagggcaggctttaggcacagctggatctagggcctccagaaaaatgacatcagaa

SEQ ID NO: 410327 - DNA, 122 bp, Homo sapiens
ggggtttcaccatgttagccaggatggtctcgatctcctgacctcgtgatccgcccgcctcggcctcccaaagtgggatctaaacattctttagggcttcagggaaaggaaatgggggaggg

SEQ ID NO: 410328 - DNA, 122 bp, Homo sapiens
taaggatttggaccagttaccttggcagggtcagaactgcagcaggttaatcaggtgagtcgtcggggattttaaagaagccgaagccggtttctttggctatgaaagtctacaaaaccccc

SEQ ID NO: 410329 - DNA, 122 bp, Homo sapiens
cctacccgcgcagggtgtgctagcgcgctcagccctctccggccggcttagtctagttcccgggcctcgctcggttccagaactttccagaaaatgccgcgctccctacggctcaagggtca

SEQ ID NO: 410330 - DNA, 122 bp, Homo sapiens
ggcccgattcattaaggaccggctcctttgtgggccccagctccaggcccattgctgtcacggggctgttacaggcataatgacaggggcattagaggcccgagagcaattaacaggctgct

SEQ ID NO: 410331 - DNA, 122 bp, Homo sapiens
ccgggccgcccgggtccccggcagcggggtaggatggcgctaaagcggatccagaaggtacgcactttcccaccctccaactctttgggtgtccgaagcgtcgaggtgtgggcggggcgccg

SEQ ID NO: 410332 - DNA, 122 bp, Homo sapiens
tgtaaatacaagagggtaggaggtggtaaaatgagtggaagggaaatacatttagtgaagcgggttcctgtaacactgtgttccgtatggcacgtttggtatcaggattttggagacacccc

SEQ ID NO: 410333 - DNA, 122 bp, Homo sapiens
cctgaccacgagtagcattgggagcgttaacatgtctgtggacatcgatggcaccacctacgcaggtgtgctgtttgcccagaagcctgtggtccacctcatcacggggtctgctccccaga

SEQ ID NO: 410334 - DNA, 122 bp, Homo sapiens
agcgttagtgctgtcgggcgtgctaagcccgaggggccaccaggcggttgggacccgccgcggccaccctgtgccaccgcgagtgcagcccgccctgcccggggtctccctgtgctctccgc

SEQ ID NO: 410335 - DNA, 122 bp, Homo sapiens
cggcccggaagaggggaggggcgatgacccgggaaagggttggcgcgcgcgggatcggctcgcgcgcctgaggggcggtgccgggggcggggcttcgccgcgaggccacccccgagccccgg

SEQ ID NO: 410336 - DNA, 122 bp, Homo sapiens
gggaaatccgacccgaaggaagctttgctctaagacctccttggccgtgttgggctcagacgtggactgaggtttcagaggaagcagtggagcggcaggagccaggtaaaggcagtgggtca

SEQ ID NO: 410337 - DNA, 122 bp, Homo sapiens
tctggggagagccacacaaaagggggttggtaagggaagcaggtgtcttttacttagaagcgaaagactaaagaagcagaatgagagtggcagtgggatagcaataattctgattcacaaat

SEQ ID NO: 410338 - DNA, 122 bp, Homo sapiens
ggccaagactcagggaaacactgagacagagcgcttggcacaggaggagcggggtcagggcgaagtcccagggccccaggcgtggctctcagggtctcaggccccgaaggcggtgtatggat

SEQ ID NO: 410339 - DNA, 122 bp, Homo sapiens
catgccataagatgacttcagaaatcctacttcagaagtgtaataaatggatggggaaatcgtttgatggggaaaagtctcttgtaagtaaaagtagtcaaattcaaatggccttttctctc

SEQ ID NO: 410340 - DNA, 122 bp, Homo sapiens
catgttagtttagggtttattgcattgttagagctgttggggtagggaagcttacaacaacgagaatcattgaagaaacgtgagtgatgctcaccttgaccttgctcagggtaatcggctta

SEQ ID NO: 410341 - DNA, 122 bp, Homo sapiens
aagtgctatgggtttcaaaacaactctccagatagcaagcattcctgtggtgggaggcagcggatgagtggaaaacctttcccattcattcaaagaagggaaagagactgaacttactccca

SEQ ID NO: 410342 - DNA, 122 bp, Homo sapiens
atggaatcgggaggaggagcagcgtcggcctggggagattagctgactgaggggggagagcgcaggctgggatgcatcctgtttccccaggaatgggctcgctgcccccttctgcccagtgt

SEQ ID NO: 410343 - DNA, 122 bp, Homo sapiens
cccaccctcaacctccgatgtacacacgttttaagattccctgaagtcaggaggtgggagcggagagtttcagttcagatcttgacatgagagtacttcgaccaaggaaaagaaagggaaga

SEQ ID NO: 410344 - DNA, 122 bp, Homo sapiens
atctgttcctagctactgctccgcagggcaagcccgctcctgcccgggcccgcccacaagcgaggccccgccccaaaccccgccccctgcgctccgggaaagcggagccttgcggctccacc

SEQ ID NO: 410345 - DNA, 122 bp, Homo sapiens
caaaaagcgagcgagagagggagcgggcgagcgcgcggggggccgcggcgcggcgtctggcgaatcacagggaaggggcaacattttaaaaggttgcagggcatgcaaaagtgaaagagaaa

SEQ ID NO: 410346 - DNA, 122 bp, Homo sapiens
gccaaggcactgtcttagttgctaagaggagccaggcactgcagtataagcctgggctaccgcctttctgggcggttgaaagttccagctctcaccagtgctgcagcctgcacttcatggac

SEQ ID NO: 410347 - DNA, 122 bp, Homo sapiens
atggtgttgcgcagtcaggccggctgcatcatggtctcagcccagggaaaatgtcaaatgcggtgccccttattcatgttactgagaatttcaagagagtaacaccagagcatcaaaccaag

SEQ ID NO: 410348 - DNA, 122 bp, Homo sapiens
gaggagcgagggaggggagcggcggggcccgtgatcgggtggtcctggggtctccggaggcgtcccctgagctaggcgtgcggtcccgcggggctgccttacctccttcccgccgcgcccgg

SEQ ID NO: 410349 - DNA, 122 bp, Homo sapiens
gcagcccccatcatccccaggtcctagcccaacaaggctcaggctccagccctaaggccacggacatccctgccagtgcctcgcctcccccagttgctggggtgcccttcttcaagcagtct

SEQ ID NO: 410350 - DNA, 122 bp, Homo sapiens
gaccctctccaacacctagcagagcactggagaggctgaaccccaggaccggacagcctgcgtttgaatcttgactctgctgcatactagcagaaggccttggtggcaatttatggaactct

SEQ ID NO: 410351 - DNA, 122 bp, Homo sapiens
ctctcctagcacctcctacccaagtcttggcctgtttacccatttctctctcattctaaacgacagttaagagttcccaggggagtaagatcatgtgctgtttatctctctattcccaggtg

SEQ ID NO: 410352 - DNA, 122 bp, Homo sapiens
cgggaaactgcgcgcaagcgcacaacagcgatttcacactgcctctttagactcctgatccgcgggaaaattccacttgtccgtgttttctccaagctctccgtaggtgcaagtcacctgtt

SEQ ID NO: 410353 - DNA, 122 bp, Homo sapiens
ttaaccaactacccagctactcacctaccaggtcaaacatccagcaaatgctaacctatccgtctgccgtttgctccacccactctacccctcacccatccactcacccatgatttgaatga

SEQ ID NO: 410354 - DNA, 122 bp, Homo sapiens
ccctccttggctctgccctctagcccagaaggtctgaggcaatgggggcaagcttggagccgacagtgctgagcaggcaggagccaagagaggggaagcttgagcctcacgcagttaggggt

SEQ ID NO: 410355 - DNA, 122 bp, Homo sapiens
ggatgactcgctgcttgagtttattatccacgaaccctgcaggtctgggcttcatcgcgtcggtcttccaagccacagctcggaccgccagctcctagtcaaccgggggcctcgtaggggtt

SEQ ID NO: 410356 - DNA, 122 bp, Homo sapiens
aggtgaggggtgtcagtggaggggctggggtccccccttgggactgtctgctcacttggtcggggctccttaggaagggatatgtggctttggtctgagattaatagagcactaagagtttt

SEQ ID NO: 410357 - DNA, 122 bp, Homo sapiens
cccactctttcactcgttcaacaatctttcaacaaatgttcgccaaacgcggatgtgtgccggactcgaggaaggaggagggcgagccaccgctgccgcgccagagaagcatctaagcccat

SEQ ID NO: 410358 - DNA, 122 bp, Homo sapiens
gggaggagggcggggtccaggatcttcagactcttgtctacctcccccaggactcaatgtcgcacccagcatttgctaggatgcaaactagagacacccatcacacagctccccacgctgga

SEQ ID NO: 410359 - DNA, 122 bp, Homo sapiens
ggcccagtgagctgcaggagcatatggagcaggaactggagcagctagcccaactgccctcgaggtaagccacctcccagggagcctgcctgctggaggagtccactcagggttctggccac

SEQ ID NO: 410360 - DNA, 122 bp, Homo sapiens
acggcagctgccacgccgctgtctcccaacacgtgaccagagtgggccgggccgccaattcgtgcagccatgtttgccactttcctggaggcagagcgcatgcgtcgcagaaccgaaacgtt

SEQ ID NO: 410361 - DNA, 122 bp, Homo sapiens
caggcagccttactgactgagcgggaagaacgtcttcatgggctagaaatggagcgccggcgactgcacaaccagctgcaggaactcaagggcaacatccgtgtattctgccgggtccgccc

SEQ ID NO: 410362 - DNA, 122 bp, Homo sapiens
atgccggcggccttggcatcctattcttttttgttttggtttggcgggagctctcagacccgcccagccccacttaggctcctttctccaatctcaatttatgacatctggaaattagctgg

SEQ ID NO: 410363 - DNA, 122 bp, Homo sapiens
tgatttatatagcagaaggggtttggaaagtacaaatccacatgctaatgaaatcatgggcgttggagagaatcatttggaaatgtaggaaccataacacctacccagcttgtccactaatc

SEQ ID NO: 410364 - DNA, 122 bp, Homo sapiens
cagactaggacctctgcatctgcttgcttttcagttgtctcccaaccaaagtcatctgttcgatagcctgaccctagagctccaagatgtcatcactcacgccaggctcaccatcgtccccg

SEQ ID NO: 410365 - DNA, 122 bp, Homo sapiens
aaggtttgctggggaggaagcctagaagtaactcccccagggctcttcccagtctactgccggaggtggagaccagagcagaggcacaagccagcacctgccattctgcacccagtgtcctc

SEQ ID NO: 410366 - DNA, 122 bp, Homo sapiens
ctgggattgcaggtgtcagccaccatgcctggctggacatctccttataaagcttgaatccgactacctctccctctgttctaatgtccaccatggctccctgctactctgaggatcatgtc

SEQ ID NO: 410367 - DNA, 122 bp, Homo sapiens
gggggccggggaactccctatttgccctattttggtcccaacactgaaccaaggaaattgcgcccaaggttgaagcacacgcaatccgtccgtcatgcagacaaatgctctttcaggggtcc

SEQ ID NO: 410368 - DNA, 122 bp, Homo sapiens
gggcgggctccgaggggggtcccttcagccctgggggaaagggggcgggcaccccggctccgccccgcaaacagggtgctgcctcctggcggccaagcgccaccaaagcgggtgatccagat

SEQ ID NO: 410369 - DNA, 122 bp, Homo sapiens
caactccttcctttccgactcatccttcctgaggccccgcagtcctgcacacggtggtgacggacttccatttgtgtccagtgtaaaagcaaatcccatcataacaacatgtctttgagagt

SEQ ID NO: 410370 - DNA, 122 bp, Homo sapiens
gctcggcggcgggtcctgtcccccgtccttctgccacagggccatgtagtcacctcctgtcgcggagttttcctgtttcaagtccttcagtgatgcttacatccgccccgcacagcgtaaag

SEQ ID NO: 410371 - DNA, 122 bp, Homo sapiens
atcgcggccaccatgctgcccgctggtcagccctggtcttcagacttcctgggacccctccggcaccaaggaggcatcactcacagccgcttgcgacaccggggccgcctgaacctccgcca

SEQ ID NO: 410372 - DNA, 122 bp, Homo sapiens
tacagtataattgaatttgtcctccaagtaatcccaaactccccatgcattcaacccaatcgcctgtatctcctgcattcacttcaaaatttcttagtagcaactgctgttcataatgatgg

SEQ ID NO: 410373 - DNA, 122 bp, Homo sapiens
ctaagggtgcaacttacggcaagcctgtccatcatggtgttaaccagctaaaattttgctcgaagccttcagtccgttgcggaggagcgagctggacgccactgtggggctctgggagtcct

SEQ ID NO: 410374 - DNA, 122 bp, Homo sapiens
gagaggggccagctgtgggcgccgggctctgcaggcacagaggggagctgtcgcgctccgcggcccagggttccgcctggctggcaccacccctggaagggcagcccctcgtctcccggcct

SEQ ID NO: 410375 - DNA, 122 bp, Homo sapiens
cagagtgagtggttcttgaaccatctgcctgatttacaaactaattactcagaggctggtcgctgcacgggagctgtgcacgctcctcaggacgctcaccgcctcctcttcgggcaccaggg

SEQ ID NO: 410376 - DNA, 122 bp, Homo sapiens
gagctcggctgagtgtgacagagctccagcctgggggcagcgaggctgctgcacggcccacgggactctgtcttgaagcgagaccgttaccatgactggcgccgggcgcccacatactgagg

SEQ ID NO: 410377 - DNA, 122 bp, Homo sapiens
agagaggggcagagaagacacagcattgtgtgaggccagagagaggtcccctgcgtggagcgcaagggagggcacagagaggggacaggagtcactgctgcctcccaccgcgcccacctgtc

SEQ ID NO: 410378 - DNA, 122 bp, Homo sapiens
tgggcttgcatcccctcttctgcaaccccaaatgactaatatgggtcattctggcgaccacgctgagatctgggcgttggtcctcccgtgttccctttcctgctcctcctgtgttcccttct

SEQ ID NO: 410379 - DNA, 122 bp, Homo sapiens
ccccgccatgttagcggccaagaggcaagatggagggctctttaaggggccaccgtatcccggctaccccttcatcatgatccccgacctgacgagcccctacctccccaacggatcgctct

SEQ ID NO: 410380 - DNA, 122 bp, Homo sapiens
ggcattctccctactttacagacagagaaacagacacagtgagttgagtagactgcccaacgtaactcaggttacgttaagtggctgcaccagggtttaagtttcaacctaggtctcgattt

SEQ ID NO: 410381 - DNA, 122 bp, Homo sapiens
gtgggacgtggcgacccggcaagggggactggccgcgaccctccggccgtcgggctcgggcggctgcgctcccactaatcttcccagaaacttgacaactgcacggcgacggccggacgggg

SEQ ID NO: 410382 - DNA, 122 bp, Homo sapiens
acacacaggaagaggtttttctcaaaaagaatggaggaagaacaaaggcaggcccgcttgcgggagagtcagtacgcagcgttggacgctatgaacagcctccctggtccctttttcattct

SEQ ID NO: 410383 - DNA, 122 bp, Homo sapiens
catttgacaaggaatcaagacagaaagggggtggatcctggaatgagcttcctcagaaagcgtcctgcagccctgcgaacctgtgaagtcccagccttgccctccagcagcaccctgacagc

SEQ ID NO: 410384 - DNA, 122 bp, Homo sapiens
atggacccctgcccaacatttggctcaggtgtccacacagatgacagcaccgcacgcagacgggagggagcttctcaccacataatgaggttttctggggagagcaggggaggggggtcttc

SEQ ID NO: 410385 - DNA, 122 bp, Homo sapiens
cccagctttagaatttagaacttctgatagttcagttctttaaggcgactgctgtgttatcgcggatggtaacagccagtatcattaggccttcaaaaccttacctaagccatcaggagact

SEQ ID NO: 410386 - DNA, 122 bp, Homo sapiens
cgccagggagtgcggcctttccaaatgagtgctgctccagcatgtgtacagccgtttccacgtgtggatctcatgtaatctttgctactgcatagcatagacaggatccccttttgcaaatt

SEQ ID NO: 410387 - DNA, 122 bp, Homo sapiens
tgcattgaatccactgcttattattttggttcaagtatattaagacatttcaccctcacacgtagttagaagtgggaagaccctatggatccccaaaaggatcctccatccatactctgaga

SEQ ID NO: 410388 - DNA, 122 bp, Homo sapiens
tggcccatcacctccaccgcctggagggggtgagaaggcgaaatccgaagccaggtgtcccgccatggggaaggaaggcgccccaagcatggtgaaatcttggtttttctttatatcttcta

SEQ ID NO: 410389 - DNA, 122 bp, Homo sapiens
tttccttcgtagatgatcccaaaacatatgcgactgtggatcgcagctggggatgtgtcgcgtcccctcggtgctcagcctctgcgtatccacggtgcccataaacacagcgtccgctgctc

SEQ ID NO: 410390 - DNA, 122 bp, Homo sapiens
catgtggggagagatgctcctcaagacaagtttcttcacccagagaaggggaggtctggacggagccatggctgacatgacttctaggatgtccacatcaaccaagaaaaatgtcacaaaga

SEQ ID NO: 410391 - DNA, 122 bp, Homo sapiens
ggtttccatggaagcgctcattgaccagggctcaccagcgcctggcgatgcctacccttccgctttggagactggaaattcggttaactgagtttcagggatgtctaataccctcaacattt

SEQ ID NO: 410392 - DNA, 122 bp, Homo sapiens
gagacagacacgcgcagacggacgacctcatgcagtgacaggcacagacaaacgcagggacgactttcacagacggacggacacacttggacaccctgtcggtctcgctcgaggctggtgaa

SEQ ID NO: 410393 - DNA, 122 bp, Homo sapiens
tcccaccctcatcccactaatctcagcctgcatatttattttgctcgcacatactaaacccggcagaccacactgtttcacacctcagtgccttattgatgctttttcatctaccttcccac

SEQ ID NO: 410394 - DNA, 122 bp, Homo sapiens
tgagatgttcagtctggctgggcagtgcaaagtagaacagccagagagattggcaggggccgcacatgtaaggcttaagcaatccagaaattgtctggagggaagtagggagctatggaggg

SEQ ID NO: 410395 - DNA, 122 bp, Homo sapiens
aatcggaacgtcagaattgggcgccgacctaatgacatgcggggttaaaaactcaccggccggaagtgttcttttcacaaagcaaaccctccaggggcaagagttcagcctctaggttccgc

SEQ ID NO: 410396 - DNA, 122 bp, Homo sapiens
ttgcgggccagctggagttccgggtgggcgtgggcttggcgggccccgcactcggagcagcgagtcagccctgctggccccggacaatggggaacttagcacccgggccagcggctgcagag

SEQ ID NO: 410397 - DNA, 122 bp, Homo sapiens
ggaggaggtaccggggaggagcgtgtgtggccccggcctctcactagcagcggcggctcccgacgctagcctgctcgagcgcacccagcaccctccccaagaccatggcccgcacctggacc

SEQ ID NO: 410398 - DNA, 122 bp, Homo sapiens
gcgggaagacaaaggcgcctgtgagcgcggaggacgctctcctgggactctggcctggagcgggactgcagccttgcgtgcggcgagggcgctgcgctactcagggcttccgcgaagccagg

SEQ ID NO: 410399 - DNA, 122 bp, Homo sapiens
gacaatcccgacgcccggctctacgtgaggcgtttttccctcgttctcattcatgggcggcgctgggcattctctgccatccttaggggtcctccacagcatgcgggaggccggcgccccag

SEQ ID NO: 410400 - DNA, 122 bp, Homo sapiens
ggtggatccctcagcgtggcttgcccaatggagcaatgccggctggtggcctggccgctccgccccttccctacccctcgcggagggcccgccccctgccccgcgccggctagcggaggaga

SEQ ID NO: 410401 - DNA, 122 bp, Homo sapiens
cagagttaaaaacacttttaaaaacagtgtctggaacacagcaagtgtgcaataaatgttcgatgttgtattaacaacgtagtagactgaaaaaacagagtcatgacatttcacttctagaa

SEQ ID NO: 410402 - DNA, 122 bp, Homo sapiens
gaagtcatttcccggcgcctggaagccgctgccccacacaggacagcaggtggggagaggcggcctcctggcatggaaaacggtgaggaaagctgtctgagagcggcctctgcgcgccgggc

SEQ ID NO: 410403 - DNA, 122 bp, Homo sapiens
cagcctgcttcaacctcaaaggggatggggggctgagtggtgccagaggagcagcaggctcgctcggggagagtagggccttaggatagaagggaaatgaactaaacaaccagcttcctccc

SEQ ID NO: 410404 - DNA, 122 bp, Homo sapiens
gacacacagagtgctctcagggttcacgcaggaaggaaaggggaaagccgacttcaacggcgatgggttctcagccttcgtctgacccaggacaggtgcatcgggcccaccaccgtgtgcca

SEQ ID NO: 410405 - DNA, 122 bp, Homo sapiens
aaactcttgccggtgaggctctagtaaactagtttcacctgagagaggcctcattaagaacggaatgctccggtatgttttaagaagtttccttttccccgcccccggccagaagcaaggga

SEQ ID NO: 410406 - DNA, 122 bp, Homo sapiens
tgattgtataacaggagtagcccatcatgaacaaatgtatcatctcataaagtatgctcacgttaaatatactgtcagaacaatggaaaaagctgttttgcctttgttgaaagaataatgga

SEQ ID NO: 410407 - DNA, 122 bp, Homo sapiens
gcacggtgcactctgggagctgtcactaggcccttcggctcccggtctcggtgtagctgccgtggttgccaggagagctgcgccggcgagaagcggccgagccagcagcaggtaaaagcgtc

SEQ ID NO: 410408 - DNA, 122 bp, Homo sapiens
actggcgcggtgccctctgggacttgttctgggacttgtagtcttgtactggcgctggcccgcctttcttccttagtggggaaaaccgggtgtaagccccggaagtacttgttgcctgagca

SEQ ID NO: 410409 - DNA, 122 bp, Homo sapiens
cttcccctgtttgttgggcgagcccaagatccaggcctgctccaggtctgagagcccaagcgactccgagggtgaagaaatcgacgtgacagtaaagaagaggcagtctttgagtacgcgga

SEQ ID NO: 410410 - DNA, 122 bp, Homo sapiens
ctgtactgaaaacttacaaacaagaatgtacaagctatcagatgtccctcaacctatgaccgaattttatcttttagtataggtgagaaagaaggagatctatgtggctgtcatcctaatat

SEQ ID NO: 410411 - DNA, 122 bp, Homo sapiens
tcacggcagcagctttacggtcccggaggagaggcgagccgcagacaggcacaccccggccggcgataaaaaccgccgctgaaagcccacggagcaatttcccgggaccccgagcgacgcca

SEQ ID NO: 410412 - DNA, 122 bp, Homo sapiens
ggctcatggctgcagcgagccacaccagccagtcctgggacgggtttccccgggctggggcgtgctcctgacttggatgactcaaagtaaagaacctcaccaggggccctggcatgcgaggc

SEQ ID NO: 410413 - DNA, 122 bp, Homo sapiens
aacccgcgggaggaaatctgcccccagcccagccccagtccctcagaggagccggctcctcgcccctcgggtccgactccccgagacgaaccttccatccggacgcttccaaactcccccaa

SEQ ID NO: 410414 - DNA, 122 bp, Homo sapiens
ccccacgtctcaccgagcaagggcttgtctctcccttgtggcttttgctgtgtggctccccgcacctgaggctgcgctggtcaggacaggttgggccatgctgcggaaacagccaggcctga

SEQ ID NO: 410415 - DNA, 122 bp, Homo sapiens
cacgcgtccccctccggcctcgcgtctcctttccggcctcgcgtctcctttccggccccgcgtctcctctgcagccccgcattgtgcctccagacccgcgctacctcctccagacccgcgcg

SEQ ID NO: 410416 - DNA, 122 bp, Homo sapiens
gcccttgtaagtaaatctctatgctgcttactgttagttcctgtttctgaagtgctgattcgatgtgtaaggcttctcctctcttttagatctgtctagagaggagtgttttgcttcagtga

SEQ ID NO: 410417 - DNA, 122 bp, Homo sapiens
aaggcaggggtccacacggtactcctcgatactcctcgcgggggcccgcacggtacccctcgcaggggcccccatgatactcctcacaggggtccacacagtacccctcgcaggggccccca

SEQ ID NO: 410418 - DNA, 122 bp, Homo sapiens
ggcaggagccactcccacagtgaacccctctaggtgcaattacaggatgattttgtgtctcgtgggtgtcgctgctagggtggagggccacgcctcctcttttgaattctgactttcctgcc

SEQ ID NO: 410419 - DNA, 122 bp, Homo sapiens
gtctgggggacaagagctagacttcgtcccaaaaaaaaaaaaaaaagaaagtaaattccacgaaagacgggccttgctcaccctgctcgacgctgggttcccaagcccagtcctgcacctag

SEQ ID NO: 410420 - DNA, 122 bp, Homo sapiens
cctgagctcccaaatcatctgaagcaggacctcttaatcactcaccgctgcgctctgagccgctgggaaccaaggctggttgctaaggacgctgtgggagtcgctctgagacagacgttgct

SEQ ID NO: 410421 - DNA, 122 bp, Homo sapiens
ccggccctctctactgatggatggagcatcgcccccaagcggtgacccaccggtgagtcccgggtggcctagggtaaggcggaccgggagccacctcacacccacacagcctgcgggaagga

SEQ ID NO: 410422 - DNA, 122 bp, Homo sapiens
gcagtgacgcagtctcggctcactgcagcctctgcctcctgggttcaagtgattctcatgcgtcagccacccgagtagctaggtttacaggcacctgccaccgcaccctgctaatttttgta

SEQ ID NO: 410423 - DNA, 122 bp, Homo sapiens
ttcaccctattcttccatgtcagtggcatctcacctggtaggctcgagcggttcccaaggcgccgagttgatgtggcctccactgcggacctgagccgctaacagagactaaaggccggatc

SEQ ID NO: 410424 - DNA, 122 bp, Homo sapiens
catgacaaccaaaacccagatgcagaaattgttcctaatcacatagattaccctagaaaccggaagggccttgaagtcaaaagcattcagagaacatgctgaacaaattgaatttgcagttt

SEQ ID NO: 410425 - DNA, 122 bp, Homo sapiens
gagatttcttttgagaattaactcatgtgactacagaggcctagaagtcccaccttctaccgtctgcaaattggagaaccaggagaaccagtggtgtaatccagcctgatttcgaaggcctg

SEQ ID NO: 410426 - DNA, 122 bp, Homo sapiens
ggaaggctataaattgtcaagcctaatggccctggtaaatcacagtgcttcctgcaaccccgggcaggggagcctcgcaggggctgagagctcagcctaccagcctctctattcaggtggag

SEQ ID NO: 410427 - DNA, 122 bp, Homo sapiens
agtaacagactagtgggagaaatgctttttgagtaagggtggagtggatgcttttagatacgattcaagtcctaggggtataatgagaacaaccccttgggaaggaagagacctaggtctgg

SEQ ID NO: 410428 - DNA, 122 bp, Homo sapiens
aatacttattatatatcttccaagtcaatcctgagaaaatccataaagctcatctcagggcgaaagcttgtacatttaagtaacaggattccaaataaacaatattgctgagttaactaaaa

SEQ ID NO: 410429 - DNA, 122 bp, Homo sapiens
acggctcctgtgaaggattcagaggctggagctgggcgatgggccaccgcgcggaggaggcgcgggcggtggtccgagttcctcaagggatctacagacggcgcccctcctacccagggtgt

SEQ ID NO: 410430 - DNA, 122 bp, Homo sapiens
gagaagaaatattgaggaggattgagttttatggcaaagatactgagtttggtttggacacgctgtatttgtggtcctatggaatattaagtattgctgttcagtagacacctgaatgtaag

SEQ ID NO: 410431 - DNA, 122 bp, Homo sapiens
ggccccagaagctcggtggcgaaactttgacgccttctatttaaagtcgcggggctcgcccgcccccggcgccgggaacccgagccgcccccgcaggggcagggctggggagggcaggggcc

SEQ ID NO: 410432 - DNA, 122 bp, Homo sapiens
cacccaggaacaagcaaactgcctgagagctgcatctattttgcaatagtgcccctgaagcgcgcacgacgccgcagggtaggcgtcccgctcctgactggactcgtggcacggtcctaaat

SEQ ID NO: 410433 - DNA, 122 bp, Homo sapiens
ggccccaaggcagggaggcccccctctcacagcagattggcaacgggcaggctgggaaggcgtccttcacagtggccatcccctgaagggccaggccgggccgggcccgtgggctgcagctc

SEQ ID NO: 410434 - DNA, 122 bp, Homo sapiens
tcaaaaacacatgaactgcagatgccataggcctcaaatcagctgtaattctaggagacacgtgttgatctagttatctaacattgttgttataagaaaatgagtttactgcatttttcaat

SEQ ID NO: 410435 - DNA, 122 bp, Homo sapiens
cccacgcatctccctcctacccccgagtcgcgcagatgcctggcgggcctgatgcggggacgatgatcacacccccgcgagcagccatcggaaggcgctcaggtataccccgaagtcggctg

SEQ ID NO: 410436 - DNA, 122 bp, Homo sapiens
agtgcgggaccaagagagcccctgctactcctggagtgtcattcatggatctggcttgctcgagaacaaccttttgcgtcttatttgaggtgaaatttcatcacctgccggttgctcattcc

SEQ ID NO: 410437 - DNA, 122 bp, Homo sapiens
ggggagagaacgcgtgacacagaaaggggccggagttcgggaccctacgcagttttgggacgttatgggcatggagggaaatgtttgctttggaggctttgggtaagctagggatccgacaa

SEQ ID NO: 410438 - DNA, 122 bp, Homo sapiens
gcaagggtggtgtgggcaagaccacctgcaggtaaggaggctgcggcgggggccaggaggcgtgtaggatataccactgggcgaaggggaggccaaggaccggcttttccaccacgaccggg

SEQ ID NO: 410439 - DNA, 122 bp, Homo sapiens
aactggggccacgagctcccacgatttctccccccatcacaagtggttaggagcagcagccgtgtgagcactggtgtgagcggacgtgtgagacttcaccagactgcgggtccttagccggg

SEQ ID NO: 410440 - DNA, 122 bp, Homo sapiens
gtgtcccgtgaactgggtggggtgtcccgtgaacagagtgggggtgtcccgtgaactgagcgatggtgtcccgtgaactgagcgatggtgtcccgtgaactgagtgggggtgtcccatgaac

SEQ ID NO: 410441 - DNA, 122 bp, Homo sapiens
cagggcctcgtctcagagtcctccaggctgctggatgacaagcgccggcgctgggcattccgactgacggcattgtcatcagcctgccaggcacctggggaagagaaaatgaacattacagg

SEQ ID NO: 410442 - DNA, 122 bp, Homo sapiens
ctcaaactcttgacctcgtgatccacccgcctcagcctcccaaagttctgggattacaggcgtgagccaccgcacccagtctttggcattcttgagaaagagaagtggctgccccccacacc

SEQ ID NO: 410443 - DNA, 122 bp, Homo sapiens
ttcagatacgctggttcggatcgatcaaagtgaagattgtgtctgggaggcctgcgtggccgacctctcttaaggcttagttttctctttcctacacttatctcaaaggtttgcagcgaaag

SEQ ID NO: 410444 - DNA, 122 bp, Homo sapiens
ctccaggtcttcccataggaaggcccctgggctgtcattctgaggtgcctatttcccccgcgccgtgtccacgtccacgagtccacgaaccctccgagttctctctcctcacctgccgaggg

SEQ ID NO: 410445 - DNA, 122 bp, Homo sapiens
cggtgggtgcactcagcattcccctcacttagaggatggccggtcacacgcaaagatgagcgaaggaaaggtcccggggctgctcccctgcccgcccactccttctgacctctcccggtcag

SEQ ID NO: 410446 - DNA, 122 bp, Homo sapiens
agcgggggttgcgggggtgggccccaggcgagctgacaaaagggcggcgcgcgtctgaaccgccattggggcccacagctcccttaggactagctctggatcctcccggcgggtaagggtgg

SEQ ID NO: 410447 - DNA, 122 bp, Homo sapiens
ctgattatttaattggcacgggagagccacgcaggttacgaatttgtaagaaaaccccagcgggccctgtttctgatcccttgggaggcattcatttaagaaaacttgtattttctgtgtgc

SEQ ID NO: 410448 - DNA, 122 bp, Homo sapiens
agttacagtcacatccggcaaactcgcacactgcagatctaggactaccccgcgcggccccgcccactttcccagcagcgggacgctgtcaccccgactcaggagctcctgggcccgcgggc

SEQ ID NO: 410449 - DNA, 122 bp, Homo sapiens
tgaactcctggcctcaagtgatccacccacttcggcctcccaaagtgctaggattataagcgtgagtcaccatgcctggccctcaaaagtattttgaattacttacagtggtggaagtctgg

SEQ ID NO: 410450 - DNA, 122 bp, Homo sapiens
agccgccaggcttcgcgtcgcccagcggcagatcgggctcctgggagcctctcccctggccgtttgctcggcctcggccccagctgccctggggcctagccactagctcccctggcgctagc

SEQ ID NO: 410451 - DNA, 122 bp, Homo sapiens
tttcagtcatactcatggtccaaatctcatttaagagaaccacttcctggctggatacagcggctcatgcctataatcccagcactgtgggataacaaagtggagaaatcatttgaggcaag

SEQ ID NO: 410452 - DNA, 122 bp, Homo sapiens
gaagctggaactcttagaaaaggaaagtaaaaccctgtgctcaggagcgcatgaaggaatcgtatttggttttctttgtagctggagagaaaagacccctctgaagacaaggaggacattga

SEQ ID NO: 410453 - DNA, 122 bp, Homo sapiens
cagaggttgaggccgcacaggctttctagctgacttgctgctcctccctgctctgctccacgtgagttccatgttcagctcatcctaacatgggcccctgagcacctgtcctgacctctgtt

SEQ ID NO: 410454 - DNA, 122 bp, Homo sapiens
gtttcaataagcgacataggcgtgttaactagccaagacagactgtcagcaaagcaggaccgcgtcgcaccccttctccgacggtgagcccgtccaaccatgccccgccccttttcaatccg

SEQ ID NO: 410455 - DNA, 122 bp, Homo sapiens
tccaggccccagacgaccctccgaccttgtgccgggaaggccccgcggcgcggtgcgcaccgcgaactcccctgtggttctcaatagttggaattgaaaggacgccgggtgggtccggcccg

SEQ ID NO: 410456 - DNA, 122 bp, Homo sapiens
gtcgtttattgttaaggaattaataggaatgcgggaatgcagatggcctggctgtcagctcggagaggcgatttttctgatctccaaggaggtttccagcatctttcattaagcactcgtgt

SEQ ID NO: 410457 - DNA, 122 bp, Homo sapiens
acacctgcgcacgtgcccagtggcacatacacaccctcatggatagcagacatatgcacacgcaggctgctccctcaaacacctgcccccaccccagctctggggtgccgacgtgccctggg

SEQ ID NO: 410458 - DNA, 122 bp, Homo sapiens
caggaaggcaggggaggcgtcttgggcacttggggacagcgacgcctcctcgcggggtctcgggtttaccctgagtctccagcccgcgtagcctcagcaccgctctccacaccgggtccggc

SEQ ID NO: 410459 - DNA, 122 bp, Homo sapiens
ctctttttcacttctgctcctcttgtcatgtgtgggtttggtgagccagtatctttaatgcgacttttttcagcactggagttttacaaagcctgggcccagtggtgccggaaacactaaga

SEQ ID NO: 410460 - DNA, 122 bp, Homo sapiens
agaatcactctgagcagagccctgagctgggctggcctccacagccaagtctgaagagtccgcacgtgctttcacaatcattcactgaggccgggtaatgcacagcctctggcctggctaga

SEQ ID NO: 410461 - DNA, 122 bp, Homo sapiens
tttagtggccattccaagtggttgaaatgccgaaggagaaaattcacagtatatgtactgcgggaagacagacttctagtgaatccaatcaaaggcttttacaaaggctggcctggcacaaa

SEQ ID NO: 410462 - DNA, 122 bp, Homo sapiens
cgagaccggaaggaggcggcacagacctggaggacgaccgcggagctgagcgcttagagccgccgaaccatagagatcggaaataggagcgagcggcagcgccggaaaggaggccaagagcg

SEQ ID NO: 410463 - DNA, 122 bp, Homo sapiens
agatcattcacgcttcctttaatccccgctgcagctgaggctggagtttggagtttgacccgcttggaggctctctcagcagcgggcatataggaggaagggtcactgctgtctccggaagc

SEQ ID NO: 410464 - DNA, 122 bp, Homo sapiens
gtggccgcccacctgagctcgcgttgtcttatgggagttttagttctctccttcagagaccgctgagacactgggggaatgcggtggtagaacatacgccgacctagcggctgtaaagctca

SEQ ID NO: 410465 - DNA, 122 bp, Homo sapiens
agaagccatcgtttgggagctgtcagacttgatgtctcagagacccgggatccaaaggcccgtccccctatacagcttgagatatttaataaagtaaagcctcgaggatcaaggggctgcaa

SEQ ID NO: 410466 - DNA, 122 bp, Homo sapiens
tttcggtcgttgtcttcacgtatcagtcttatctttttggccaaattatgagttcttaggcgtttaggaccctttttttcttgaataccacagttcattcattgtcttgcgttacagtatat

SEQ ID NO: 410467 - DNA, 122 bp, Homo sapiens
aggaaaggaagattctagcaccgtacgtcagcattaagaaatcaggaaacgggccgggcgcggtggctcacgcctgtaatctcagcactttgggaggatgaggtgggcggatcacgaggtca

SEQ ID NO: 410468 - DNA, 122 bp, Homo sapiens
cctggttgccatgccaacccagggcctgtgtgaactcgggaaactcgcaggcaacacaaacgctgcgcgcgagtgcccgcccgctaggcgagcgcgcgccgccagggccgaaggcggggtcc

SEQ ID NO: 410469 - DNA, 122 bp, Homo sapiens
cagattgttaatagtacaggagtctgtggcgaaggttccttcctcagaacactgtgcgagcgtgtgtgtatggatgtggctgctgcagtgtgggcggcagggggagtggagagtctacccgg

SEQ ID NO: 410470 - DNA, 122 bp, Homo sapiens
ccgcagcggctcgcgcagctccgctcttgcgccccgcgcccggctcagcggacggactagcgcgcccggtcaagaatcctggggaacccgctccgccccctggctccagcgccctccaatga

SEQ ID NO: 410471 - DNA, 122 bp, Homo sapiens
gcggtgggcggcccccggcgagtccacacccctgccccgcctcctcccggtaggaaactccgggaccctgcaagggatgactcaccccagtgattcaaccgcgccaccgagcgcggagctgc

SEQ ID NO: 410472 - DNA, 122 bp, Homo sapiens
aattccaacatacacgggtggtcctgccctggataaaactcaggaagcaaaatcaaccttcgagagaggtgaggtaggaagtctgagcattgccgacgggccggagcaaatcgctcccgggc

SEQ ID NO: 410473 - DNA, 122 bp, Homo sapiens
atctaagcctttaaaaaggcacagagattaagtccattgattacatcattcgtcactatgcgcttggtattgaaaaaaatattttggacccttgatttgtattcttttaaaattaaaacatt

SEQ ID NO: 410474 - DNA, 122 bp, Homo sapiens
tttgcctgtgtcttcagggcatggcccttcctacagccatgtgccccgtgatcattatgacgagaggcagagacaaaatgcctcttacctcttacaccatgctgttcagaaagtccggcaag

SEQ ID NO: 410475 - DNA, 122 bp, Homo sapiens
aggtggtcacggagccagccctgggcccagagcagctctggaggacaacgtgaggccttccggccagaggaggtaactgagaactgggttggtgcttccggaggccttggaaacggcaggaa

SEQ ID NO: 410476 - DNA, 122 bp, Homo sapiens
agactcccgcaagctacggtgggtccccagcccagaggactcctgggggtccccattttccgcaagcgccccactgcctccacgtgctgcccgcgcaggtccagtgccgccgccgcgtactt

SEQ ID NO: 410477 - DNA, 122 bp, Homo sapiens
aatgcccttgcagaccgccttccgacacagcttaattctatcagcgtttccattgtcattcgcaagcagcacagactgacaggctgaagacccacacctagtggatttcacccgcctagaga

SEQ ID NO: 410478 - DNA, 122 bp, Homo sapiens
gtcccgcttacagctcaaatgccttttattaaccgaaggtcagcttttgtgactctcagacgctcaacaggtgcgcaactctgctaacgcagtaggctgtcctggccaaagggtggtgctgt

SEQ ID NO: 410479 - DNA, 122 bp, Homo sapiens
ggatcccgagctgaacagaggaaaaaatgtcaagcatctggttgagtttctattcaacagcgatttcttaggaaggaatcactttaaaaagcaagacaggctgaaaggtgatatttgttctt

SEQ ID NO: 410480 - DNA, 122 bp, Homo sapiens
acctcaagttatccgcctgcctcgacctcccaaagtactgggattataggcatgagccaccgtgcctagccgaccttgaaactttggatggaatgaatgatccccaggtgtcagatgtcagc

SEQ ID NO: 410481 - DNA, 122 bp, Homo sapiens
cttcccgcgggggcaggcctcgggactgcagcccgccatgcctgagccttcccccgcctccgtgggttcctgtgcagcccaagcctacctgacgagcgccgccccctgctccatggcgccca

SEQ ID NO: 410482 - DNA, 122 bp, Homo sapiens
ccccagggccccgtggacagagctggtcccagcgtacgcacgccacttcctgggcttggccggtggtacgccagaggctgcccatagcaggaaacccccgcagaggccagggcctcttgttc

SEQ ID NO: 410483 - DNA, 122 bp, Homo sapiens
aaggaccgcacggccgagatggtggcggtcaacggctttctctaccgctttgacctcaaccgcagcctgggcatcgccgtgtaccgctgcagcgccagcacccggctctggtacgagtgcgc

SEQ ID NO: 410484 - DNA, 122 bp, Homo sapiens
accaccatccacgcgtccagcaggaagagcggattcctcgggcgtgaggctcaccactcacgttgtctgcacacctgcctgacgacctctcccgaacctggattcccaccacagaattcagc

SEQ ID NO: 410485 - DNA, 122 bp, Homo sapiens
cccactcttggtcttgttccctgtgtaaatctctggtttgaaaaccttgtagcattcaggcgtttcaagcttgagggctgaaatgtcacttttaaagcagggttaaaaaggtcacacagctg

SEQ ID NO: 410486 - DNA, 122 bp, Homo sapiens
gcaaacatcactgtttataaattgccttaaagtcccctcaagatgagtcattttccaccccgactgctttcaaagatactgctactataattctattcagatggtttctaacttaataaacc

SEQ ID NO: 410487 - DNA, 122 bp, Homo sapiens
gacactgatggagcgaccgctccggggctcccgccacccgcggctgtttccggtgccccccggggtcttgggaccctcccaaggtgggtcctgctctagttcagaagcttatgacgcctttg

SEQ ID NO: 410488 - DNA, 122 bp, Homo sapiens
ggcgcgggcgtgggcggtgggcggtgggcggcagggctggggcgaatccaccccttccagcgaggaggcccggtctaggaggatggaagcccgggacgcgcccgcccgcaggtgaggcgcgc

SEQ ID NO: 410489 - DNA, 122 bp, Homo sapiens
ctctggcgcctgcgccgccgtgcgcgcgccctgccagaacaggaggggacgaggcgggcgcgcggcgccggcagcctagctcagccgggacaccgccctagtcccagcccagggggccgctc

SEQ ID NO: 410490 - DNA, 122 bp, Homo sapiens
cgcgggaggagcgcgggggacgccggcgcgcgccgccccacctcccggcgcccgcgcccgcgccccgccccgcccccgagccccggaggacccgcccatatccccgcccacagccccgcccc

SEQ ID NO: 410491 - DNA, 122 bp, Homo sapiens
gccaggaggttgcggttttgagagaggcaccgccaggttgtaatattggagaatcctctccgctttggcttgccgacctctcacttgcccccttttatctctctgacaccccccgcaccccg

SEQ ID NO: 410492 - DNA, 122 bp, Homo sapiens
taaataggaataatcaattttacatttaccttttattttacattttacaaagcactttcacgaacactatcttttctgatccacattaacaatcgtgggaagggctttatttaatcaaatgg

SEQ ID NO: 410493 - DNA, 122 bp, Homo sapiens
agaagggcggagccgtcttgtttggaatgacgtctgttcagagagccaatcccagtctcgcgactcctgcttgctgggcgcggcttgggcctccaggctgcgcagcgcagccgctatcgggc

SEQ ID NO: 410494 - DNA, 122 bp, Homo sapiens
ggcaccaccttccaggtcagcagtcccagccctgcgtatcggaggcctgctctcccacagcgtccacagtcactgggccaggctcgcacctgtgaggggccaggacccataccggagcccgg

SEQ ID NO: 410495 - DNA, 122 bp, Homo sapiens
atttttgtctgacaaatacaacttcaaagtttaccacaatcacttgaaacaaccagttaacgataatgttttacaccagaattccttttgagaaagctcattatttactggaaagaaatatt

SEQ ID NO: 410496 - DNA, 122 bp, Homo sapiens
tacaaattttggagctgttactgctatgttagtaaaatacttctctggcatttgatgattcgggctggcagaaactcagatccttatgatgtgaggtcatcactgggtgaggtggtacatac

SEQ ID NO: 410497 - DNA, 122 bp, Homo sapiens
tctcgggcgaggcgggggattcaagcgcgttataaggcgaggagcccggggcgtccgagacgccgcgctcggagccgcgagggaaccgccgcccgcatggccccggcccgccgccccgccgg

SEQ ID NO: 410498 - DNA, 122 bp, Homo sapiens
agcgcggggaaaccagggaaggaaggctgctgcagccctcggaggccgcgctgggctctccggccgctgagccgcctgcactgggggcaacaagcccttggatctcacctctctcgggcgct

SEQ ID NO: 410499 - DNA, 122 bp, Homo sapiens
tccggtcctgagctcccgggccaatccgggaggcttcctgtgggattacctggtggcgagcgagcgccgagccagcgccgagccagcgcggcccctcgggtgcggcgggcgcggggtggact

SEQ ID NO: 410500 - DNA, 122 bp, Homo sapiens
gccaagatcagcacatccctaccccgggacacacacagatatgcaggcaacacctgttggcgtgccccacagcacatcctgcaagctcccctccggcagaggcctcagctgtccgcctggct

SEQ ID NO: 410501 - DNA, 122 bp, Homo sapiens
ctgatgttttacacaggctaccggtggttattagttttctgctcacatgtttgtgtgtggcgttgctgggatgtgccttgtgttgctacacaaacagcgatcccgaagtctgccagcaagat

SEQ ID NO: 410502 - DNA, 122 bp, Homo sapiens
gccgaccaccgagaagtgaggactccacaggccgagagcccacgtgaagccggagcccgtcggtgactgacagacgctctgaaccccacagatgtcgccgcccctcacacctgcgcgcgctc

SEQ ID NO: 410503 - DNA, 122 bp, Homo sapiens
cagccgccagatgacaacatagccactggcaacaggcagagacgtggcccggctgttccccgtgttaaggccaccagcaggggcagcatttctgcaaccctgggcagctgaccaagcacact

SEQ ID NO: 410504 - DNA, 122 bp, Homo sapiens
ccccaaccgcgaggggctgcgctactaccggcgcctgctggagcggctgcgggagctgggcgtgcagcccgtggtcaccctgtaccactgggacctgccccagcgcctgcaggacgcctacg

SEQ ID NO: 410505 - DNA, 122 bp, Homo sapiens
ctcagttccaccgatcagcttcgccgttttctcagatccgcatctcattttctcccctaacgctgctacgccccgttccagagtcatcagctcttcgtcggtgtctggcccagcctcctggg

SEQ ID NO: 410506 - DNA, 122 bp, Homo sapiens
gcaggataacttgaacactgcagtggccctgtccatctaaactttacaaggttttgtaaacgttactgaacttgcttcttcccgactacattaaagcacttacttgagatattaaacatttt

SEQ ID NO: 410507 - DNA, 122 bp, Homo sapiens
ctgcaggctaactcatttaatcctcacaattgtcccatgtgttaggaactattattgttacgacggtttgcagagggggagaagggacacggaggaattacagacccacattctgccttcct

SEQ ID NO: 410508 - DNA, 122 bp, Homo sapiens
ttatctcctatggactccttccactggactgaagacactcaatttgggaagctgtgtgatcgccacaaaccttcaggaaatacgaaatggattttctgagatacggggcagtgtggtacgta

SEQ ID NO: 410509 - DNA, 122 bp, Homo sapiens
tgagcggctccaggcgggggccgggcccgggggcggggtctgtggcgcgcgtccccgccacgtgtccccggtcaccggccctgcccccgggccctgtgcttataacctgggatgggcacccc

SEQ ID NO: 410510 - DNA, 122 bp, Homo sapiens
cctctgctctctgataaactccacacaatatttgaaattaaggggcttgctttttttccccgaatagatcaattctgcctgtaaaagcagcccaagaaataatgttagtgagctctccgttg

SEQ ID NO: 410511 - DNA, 122 bp, Homo sapiens
cacattcatgtccagcctccctcctgcctccccagactgagtggtgccctcagacggaaacgcggtattttcagataaacaccagaggcatgactgatgtggcccttgccttgtggagtgtg

SEQ ID NO: 410512 - DNA, 122 bp, Homo sapiens
tcgcctgaactcttaagctgcatctggaagatggcttattggttttaaccagattgtcatcgtggcactgtctgtgaagacggattcaaatgttttcatgtaactatgtaaaaagctctaag

SEQ ID NO: 410513 - DNA, 122 bp, Homo sapiens
gaagtgcgagagaactcttcaggtgtcaccaaggtgggaaggtgctacgaggcgaggcgccgagcggcgacccccatcccgctcgcccggagtcaacatggccgccgcgcagggaggcgggg

SEQ ID NO: 410514 - DNA, 122 bp, Homo sapiens
tgggagcagctgctggcagcaaagagacttgcaggatttggcctacccatggccacttaccgcgcacgctcaggaccgggggcttggtgggaaaggaaggagggacttagggtgcgcctgcg

SEQ ID NO: 410515 - DNA, 122 bp, Homo sapiens
caaagtggcttctctcctagaaacttgtcctgcagggcaccccccatgggaccacacacccggccccaggggctgtgctcttgcagacttggctctggccacacctgctggttcactggccc

SEQ ID NO: 410516 - DNA, 122 bp, Homo sapiens
ggcctttgggtcaataacagaacataacaaaaacactaaaaatttctgtacataaacacacgcatatcacaagtctagtcagaaagaaatacatagaaaaacaagatagaattttaaaaata

SEQ ID NO: 410517 - DNA, 122 bp, Homo sapiens
gcggccgagcacatgggcccgcgggccgggcgggctcggggcggccgggacgaggaggggcgacgacgagctgcgagcaaagatgtgccccgggacccccggcaccttccagtggatttcct

SEQ ID NO: 410518 - DNA, 122 bp, Homo sapiens
cgcccccgcactggccctgcccactgcccggtcagcctcgttgctatggggactggtgggcggtgaggggggaaagccccggatgttcgttggggattcaacatggcggcgggagtgtccgc

SEQ ID NO: 410519 - DNA, 122 bp, Homo sapiens
tcaccgcgaaggtccacggcttcattctttaagtcagtgagactgagaacccgccaattccggacacacagctacagccaagcctctttgcttctctgggccagcctctctggagctgaatc

SEQ ID NO: 410520 - DNA, 122 bp, Homo sapiens
gtaaagtgagtctgttagcaagacagagacttacataacataatcacagaagcgacaccgcgtcaactttgtcatattctattggttaaaagtaagtcacaagtcctgtctatgttcatggg

SEQ ID NO: 410521 - DNA, 122 bp, Homo sapiens
tggcgtccaaacgggagctcggtccccgtcacacccttccctgcgtgccgcaccccttcccggccactcccgccgtccagcgccttctacggccacgcccaccccaccaccatctctgtcac

SEQ ID NO: 410522 - DNA, 122 bp, Homo sapiens
acaggcactgctgagaccagcacccccacctcctccaagcagcccccccagccaccccaccgcagggagccatcctgcaaggggagtgcacacagaacccaggacaggcaccatctccggcc

SEQ ID NO: 410523 - DNA, 122 bp, Homo sapiens
ctgggattacaggcatgagccactgcggctggcccaatttttgcatttttttggtagagacgggggtttcactatgcttcccaggctggtctcaaactcctggactcaagcgatctgcctgt

SEQ ID NO: 410524 - DNA, 122 bp, Homo sapiens
ccagaaccctgggcccaaaggggtctggtcttgattaagattattttcctttgtaacgttcggtttggaggaaaaggcgggagggtcggaaggaaatgggaggagcgcacgatccatcagcg

SEQ ID NO: 410525 - DNA, 122 bp, Homo sapiens
gcaggtcgctcaccctccagacctttaggccgaggcctgccagtctctggacggctacggcgtaggatggcaggcacaatctctgggggcagatgaaggtaatcacggagatactggatacc

SEQ ID NO: 410526 - DNA, 122 bp, Homo sapiens
ctgggaactggaagcgactgggagttcagatctaagtcgagagggtgcctccctccttcacggcccataattaccctgcagtatgcagacagttaagcacaaataagggttttgagattctg

SEQ ID NO: 410527 - DNA, 122 bp, Homo sapiens
gatggtcagagaaggcctctgggcaaggaaacgtaagacgtgagtgaccgggagcagccacgcacaggtgtggggagcgaggtaagcagctcctgggcaccactgaaccgggtgggtctgag

SEQ ID NO: 410528 - DNA, 122 bp, Homo sapiens
tctccattcctattcagaaagaacatccccttttcaagcttcagtatcttttcatgaggtcgagaaagtgctgaagaaagactgtggctatcactcaagaccccacaagccaaggcaatggt

SEQ ID NO: 410529 - DNA, 122 bp, Homo sapiens
ttcaagcaattctcctgtctcagccttctgagtaggatgacaggtgtgcaccaccacgcccggctaattatttttagtggagatggggtttcagcacgttggccatgctagtcttgaactgc

SEQ ID NO: 410530 - DNA, 122 bp, Homo sapiens
cgtcagtgatgtgtgcaattgcctagcggcctgggctagggaactatgcaaccaagatagcgcggtttgctggggggtgggcacaaagcaggttgctgtcaggcggcgtgtgagtgggcatg

SEQ ID NO: 410531 - DNA, 122 bp, Homo sapiens
tgggggggacaggcatcaggtatgaagagtttggggctggcggggcgtgtccggctgtggcgtgggcaccactatgggagaccctggcttggcaagtgaccttgcagccttggctggggaag

SEQ ID NO: 410532 - DNA, 122 bp, Homo sapiens
tcctttctacaacctgaactttggagattttcaagaccagccacaaggcctctactcctacggcctggccctcctccccgcccggttcgcgctagactccatttcccagaaaccccggtgtc

SEQ ID NO: 410533 - DNA, 122 bp, Homo sapiens
cagggagcagaagccagcacctcagatagaagcctcccctccagggaaatgagtcacagacgagcccgggtgaggctgcgcggctgcgcctgccccgacctttgcttttaacttcctttctc

SEQ ID NO: 410534 - DNA, 122 bp, Homo sapiens
gtcaactggggggcggcagcggcgctaagcggactgtatggcggtggcctaggcccctggcggaattttgggacctttcgcgactctagcgactctcaggctgccttcccttctcggtggcg

SEQ ID NO: 410535 - DNA, 122 bp, Homo sapiens
agaaaccagactcaaggcagctttaaagcattctgaatttttaaaatcagaacacatattcgtatcattacttcaaaaagcaaagacacaacagtgaaaaaccttttattgctcttggaagt

SEQ ID NO: 410536 - DNA, 122 bp, Homo sapiens
ccctcccgccaaaccgccgagtgggcccaggcgtccgacccgcccccggcgccatagcaacgcagaaggcttcgactcccagggggccttgcggctactcagccaggaggggcgcgaagatc

SEQ ID NO: 410537 - DNA, 122 bp, Homo sapiens
cgtggccgccgctccggcgggaaccgagcggaggagccgggtggacccctgcctggagggcgcctgccccgggcgacccttacctcgcgggggtagctagggaaacggaagatggcggcggc

SEQ ID NO: 410538 - DNA, 122 bp, Homo sapiens
cttatttagttggataggaaagagtttcaagggtttgaatagggtaggaggaccaagcctcgaaggcaggggtgggagagagttcatcagtcttctcaagtgtcttctctctcaacagcaag

SEQ ID NO: 410539 - DNA, 122 bp, Homo sapiens
ttccaacctttcatccgggtctcgggcaggggcgtgtctgggcagaggggcgggtggtggcggaaaggaaggatgtcgtgggagactggagagtggggagggaagcgggaaggggcgggggc

SEQ ID NO: 410540 - DNA, 122 bp, Homo sapiens
cggtgacacaggcggcgtggggttagacaggtaccggtcagattacggtggcacaggctgcgtggggttagacaggtaccggtcagattacggtggcacaggcggcgtggggttagacaggt

SEQ ID NO: 410541 - DNA, 122 bp, Homo sapiens
ccgcggggggcgggggtttgcgccaagagaggaccggagctcgtgtcccgcccggggaggcgaacctcgctcagctctctgcctccggggactcgatgaggagaaagtgacgcggaggcaaa

SEQ ID NO: 410542 - DNA, 122 bp, Homo sapiens
tgagccgtaccccgcctttgggcttcctgcagggagcatggacggcattctgcgcaccttcgacctcttcatggcctacagccccggctacttcgtggtggacattgtggcccgagacctgg

SEQ ID NO: 410543 - DNA, 122 bp, Homo sapiens
gccagcatgcaggttacgggtgattcccgcgatcgcgtgtttggattaaaccaggttcagcgggagtcgcctggtccagacacactggaccccggtgacttgggtcctgacacagactggcc

SEQ ID NO: 410544 - DNA, 122 bp, Homo sapiens
tcactcaggctggagtggtggcgcgatcacggcttgctgcacactgcagcctcaacctcccgggcccatgtagtcctcccaccgcagcctcccaagtaactgggactacaggcatgtgcaac

SEQ ID NO: 410545 - DNA, 122 bp, Homo sapiens
agcatgaattaggaagctacctggatgagcccacaatggccctcttagacatgccaacgacgcccctgcagaatctgctttttctctggctgttcctaggcctggatagggttcccaggcct

SEQ ID NO: 410546 - DNA, 122 bp, Homo sapiens
gagccaactccccacaaggaagtcttgtgcaactctcaggcgcctgcagccacgtgagcgcgcggctttcattttactcaggtattattactattattacttcttttgagacaaggtctcat

SEQ ID NO: 410547 - DNA, 122 bp, Homo sapiens
tggcggctccactagggggtatgttttctgggcagccacccggtccccctcaggccccgccgggccttccgggccaagcttcgcttcttcaggcagctccaggcgctcctagaccttccagc

SEQ ID NO: 410548 - DNA, 122 bp, Homo sapiens
cgacgatggcgggcacaagggtgggcttgcagcagctgctgctggtgctcccacaggctgcggttctccgcgctcagctcatccagccgccgctcctgctcgtcgatgcgctggcgctggat

SEQ ID NO: 410549 - DNA, 122 bp, Homo sapiens
tgtactggcacccacccccacttccttgttctccagagcaggaaacaagcttggagagtgcgataactagcccaagcttcacaatgggtgagtggcaggactgaggtttgattcgggtctct

SEQ ID NO: 410550 - DNA, 122 bp, Homo sapiens
agatacccgggttgaagttcatcctcagacacagctgcatgttgggagcacccgtcccttcgtgcccacagtggctggagacgcggctgttccagagggcatccagtctgaattcatgtccg

SEQ ID NO: 410551 - DNA, 122 bp, Homo sapiens
tgaaaagtggttgaactgccactcacctcccaagtagagtgagtcgtcctccatgtcgcccggaacaaggatcacaaggtttttcggctgggaccttatgttgcagaaagacgctatctctt

SEQ ID NO: 410552 - DNA, 122 bp, Homo sapiens
acctggatcaggcgagggtcacgccaagccggctacacaccacggaaaggagcccttccgcgcttttatcccaccgaccaatcgcacagcgactagcaccgattgacaagctccacggacca

SEQ ID NO: 410553 - DNA, 122 bp, Homo sapiens
cccgtggaaatgcattttgcttctgtaaatcacagcctagtcctgctatattttaacccccgttctatcgcctttagacgtcacgatcatagctcactgcagcctcactgccctggcccccg

SEQ ID NO: 410554 - DNA, 122 bp, Homo sapiens
acatggggcagtgggcatagctgtgtgcagtgagaggcgccaatgggcacaggtgtgcaccgtgagagagggcagtgggcacaggtgtgctaagtgggtgctgaggggacagagggctcatg

SEQ ID NO: 410555 - DNA, 122 bp, Homo sapiens
ccgagccctgctcgtggagccattggtgctgcggcggggagaagaggccacaggcggggacgccccagacactcccgtggggcccgtgccagggtctcctgctcctcagaaagagcccttgt

SEQ ID NO: 410556 - DNA, 122 bp, Homo sapiens
gttcctgaatcgcactgagctccccggaaaggaaaggacgttcccagagttagagaagaacggagagcaaactgaagagagaccccgttccctttagcagtcggctggcctgtttctccatc

SEQ ID NO: 410557 - DNA, 122 bp, Homo sapiens
ctgcgccctccccgcaccacgcggccaccccgagcctggggaccgccgaggaggggcgcgcgggagtcccacctacctgagtgccagaagcctctcgcccaggagcgccagcgcgatcccca

SEQ ID NO: 410558 - DNA, 122 bp, Homo sapiens
ttgtatttgcacccgggctccaggccccccacggtgacctcgctctcctcgcccctgacacgcaccacctggggccgcccgtccctgtccttgtactgcacagtgaaggagtcgaagcggcc

SEQ ID NO: 410559 - DNA, 122 bp, Homo sapiens
gggctctgccagtggcctggcttgaacggacgatgcggtcagtagggctggaggtctacacgcagagtttctcccggaaactgcccttcccagatgagacccacgagcgctatgtactgggg

SEQ ID NO: 410560 - DNA, 122 bp, Homo sapiens
ccctgcacctggcccgtcccgttgcctgccctcttaggaacacacgccccgtttagcccccgagaatgccaccctggcagtccccggccaccagggagaggggcagaccctgaccgtggccc

SEQ ID NO: 410561 - DNA, 122 bp, Homo sapiens
tggaccgagggaggccaggctgggtgcaggtgggcggcgcagcgctgcggggccgggatgcggggcgggggaacctcggctcccgggaagccccgagcctgggggaaccctgggcaccctgt

SEQ ID NO: 410562 - DNA, 122 bp, Homo sapiens
tccggtcaaaccctaactcttacgggtggggcgggcaacttccgcccagagcaaggaaagcgtcacatccgtcaaatggcttcacccctcctcccttctccgctgtagctgcgtttacaacg

SEQ ID NO: 410563 - DNA, 122 bp, Homo sapiens
tcccacgagcctcatctttatccccgactctggccgccggcgggaagcggcgtgtccgagcgcacaccccgtggagactgaccctaggtctgttactccaaagtccctggtctctccttccc

SEQ ID NO: 410564 - DNA, 122 bp, Homo sapiens
tgtgctgcccctgcatccgggtgccacaggaaggcggtgaatgactccagcagggtgtgccggggcccagggtgccttacaaagctgccctcccagggctgtggcagggctgggattcacat

SEQ ID NO: 410565 - DNA, 122 bp, Homo sapiens
gcccacaccccgcctttagttaacgcccctcactacgctatacccagggtgcccacaccccgcctttagttaacgcccatcagtacgctatacccagggcgcccacaccctgcctttagata

SEQ ID NO: 410566 - DNA, 122 bp, Homo sapiens
caggccttgggctgcgtcccgcctctgccctccccagccttgcgaccctgcaggtcactccgagccttgggttcctcacctcaaagcgaggctgcttggaagaatgggaggcaaaggcatgt

SEQ ID NO: 410567 - DNA, 122 bp, Homo sapiens
ccaaagataggatggaggttgatatttatatatttggagaaaaacaggcacgtccgaccccgggctacccacctcgatagaggcaccagcaaccgacggggcaggccaagaatggagtagat

SEQ ID NO: 410568 - DNA, 122 bp, Homo sapiens
cggcgggaggggcggacgcagggcccgccccgcgtccctgatctggccgctcggcgtccgcggctgtcgccctagtcccgccttctcgccaaagctgaccaatcaaacgcctaggccttagc

SEQ ID NO: 410569 - DNA, 122 bp, Homo sapiens
cctctttcctggggtgcccgcaatgggtcttccggaatgtttgcctcaagaagctgtttccgtgcagttccctgttcgtggctccctgtttcccgccatggggcctttgcacatgctgcacc

SEQ ID NO: 410570 - DNA, 122 bp, Homo sapiens
ccggcagcccagagaggggctcccacagtgcagcggccgggctgaagacctcctcaagtgcggccagagtgggcgccgaggccgagcgagggctgccagcaggttgtcgcctctcataaaga

SEQ ID NO: 410571 - DNA, 122 bp, Homo sapiens
aagcggggaagctccagtcacctgggactccttcagcttttccctaaaggactggtaatgcgctgaaggtgattccttaaatcctaactacatagccattggtttggggagtcccaggattg

SEQ ID NO: 410572 - DNA, 122 bp, Homo sapiens
aggttctggcatccatcatggcaaactggagaccgcggtgaattccaccggaatggcgcgcgcattgccacatgggaactgtagttcttggctaggacctttctggggctgggccgctggaa

SEQ ID NO: 410573 - DNA, 122 bp, Homo sapiens
gcgcgctgcggctccggcacccgagccccgccgccacctccccgcccggcgcgcccctgccgcactacctgggcgcctcggtcatcatcaccaacgggaggtgacccgctggccgcccgcgc

SEQ ID NO: 410574 - DNA, 122 bp, Homo sapiens
cggctccttgtccacttaatcgctggtgacttgaacaaatcacttcccctcttggggctgcggttcctgcttcgggaaggaaagggtgacagctgagtcccattcagcacagaaaggctcaa

SEQ ID NO: 410575 - DNA, 122 bp, Homo sapiens
gaatcatggcagagggggaagtccttcaggaaacttacaatcatggcagaagggcaggtccgacttccatggtggccgcacagagagtgggaacatgtgaaggagcaactgtcaaacatgta

SEQ ID NO: 410576 - DNA, 122 bp, Homo sapiens
gcattatctctttccttctccttcccattaagacggaaaaaacatccgggagagccggtccgtttctcaggcagactaggccattaggtgcctcggagaaaggacccaaggctgctccgtcc

SEQ ID NO: 410577 - DNA, 122 bp, Homo sapiens
ccccccttctggcccagcactgacccccggctgtacctccacgccctgtcgcccacgcggcgccaacctgcccctgctgacccaagcaggtgtccctggagtccaacgcgtccatgagctcc

SEQ ID NO: 410578 - DNA, 122 bp, Homo sapiens
ttcttcaagatcataaggtgcgcgctgtcccatgtgataagatccgaggtccgggcagggcggcgcaacctcccgaagtgaagcctgcgaggtcagcggccagaaaaaaacaattgatattc

SEQ ID NO: 410579 - DNA, 122 bp, Homo sapiens
tacaatgcacacccgtggagtcggctggcagacaatcctggccaccactcaggcctccgccgcccagagagagcatccctggccaccggctcgcagcccccatgcctcggggcccagtgccg

SEQ ID NO: 410580 - DNA, 122 bp, Homo sapiens
gccggatggataggacgctcctcccggagagtagtgagacccctggtgcggggcgattggcggcgggagcgatgagtggcagccgcacggcccaacgggagctgtgcgtgggccgcggggcg

SEQ ID NO: 410581 - DNA, 122 bp, Homo sapiens
atcactttcatcgcccccgctcaccgggctaaatgctgagagtctctgaaagtcaactgtcgaggtcaggggctgagaaattccaggctaccttgcgtactagccggcgctggcatcgttag

SEQ ID NO: 410582 - DNA, 122 bp, Homo sapiens
aaggagacggaggcgcaaagatgcagtgacttgtctgaggttgcacaaaagggcagagcccgatgtgaacccaaacctgtgcccaggtctgcaactgtcacaggagcctgcctcctagttgc

SEQ ID NO: 410583 - DNA, 122 bp, Homo sapiens
gtgcagatctgggacgcagccgcagggaagaagctgtccatgttggagggccacacggcacgcgtcggtgaggagcccgggtcccatggctggtgagctccctgaggccccagctccgcgag

SEQ ID NO: 410584 - DNA, 122 bp, Homo sapiens
cacactacttcatatttcttctgctctgaacacacctggccctgcaagttactgaagtcccgagggtccatgtgcataaggtggtggcaaagcctgtctagaagaagtgtgtgaatctatat

SEQ ID NO: 410585 - DNA, 122 bp, Homo sapiens
catcctgttctctctgtgtcttcagcatccagcacagagctgaggtacagcatgcgggggcgggtgctgcaggggtaatgaggcccaccttcgatggcagtgcggcacaccagatgagagta

SEQ ID NO: 410586 - DNA, 122 bp, Homo sapiens
tactatgtgctagagcctgtcacagatgctggggacaccaagatgattaagacacaagctcgggagccacagtggctcaggcctgttgtcctggcgcataaggaggcaaggctaggcatttg

SEQ ID NO: 410587 - DNA, 122 bp, Homo sapiens
ttttttctcattgttgaaatagaaaggttggcttcacactctttcctcatgctaactggacgtgaaaatcttgtctttttgcattacaaaatctgggagttatttgtcattatgactcattt

SEQ ID NO: 410588 - DNA, 122 bp, Homo sapiens
gcatctttccccggggctcgccacccccagcgcagctaaactggggagctaaaggtgatacggccaccgtttgcaggattcaaaataacctcacagaaaggctagctggcggtagaagcggc

SEQ ID NO: 410589 - DNA, 122 bp, Homo sapiens
aaatctccagtacatttccagacagtggcaggcagaataatgatcccccaaagatgtccgcgtcataaatccctagaatctgtgaatatgttaggtcacatagcaagaaggaattaagacta

SEQ ID NO: 410590 - DNA, 122 bp, Homo sapiens
gaaattctgatatcaaaacattccaataacttttttttttcaggcgcagtctcactctgtcgcccgggctggagtgctgtgagctgtccgtggtgctgaattcactgtgacgtcactcctgt

SEQ ID NO: 410591 - DNA, 122 bp, Homo sapiens
tcagctcacccacaaccttaaaaagcaactctcaacccgttaaaaagctcccagccaccccgggacagtgggtggatttgcagatacaccgtggaaaaaatgatagctatcactttgggcat

SEQ ID NO: 410592 - DNA, 122 bp, Homo sapiens
caattctctccccttcccaaactcctcctgtctaactccaggcctagtactagtggcacccgacagccctgcctttacctactggaaacttccagagcttggcaggcacacctaactcctgc

SEQ ID NO: 410593 - DNA, 122 bp, Homo sapiens
gcttcgtggggtgtcatgtccattgcggcccgaggctggccgcggggctctgctggagggcgctgagagccgggccccgaggccgcacggccggagactacaactcccaggaggcaccgcgg

SEQ ID NO: 410594 - DNA, 122 bp, Homo sapiens
agtgtgagtggtggacatcacattggagggtcacatggcctagatggtgctgagctgcttcgagccctgtatgatgttgaaatcttaaaattctgtattctttatactatacattatatagt

SEQ ID NO: 410595 - DNA, 122 bp, Homo sapiens
tcatatactcaaagacatttactgaggagaggtgaatgagaagtataaaatcactgacctcgtgccgtttgtggcttaattatggaggcatatgttaaacacctttatgcatatataattac

SEQ ID NO: 410596 - DNA, 122 bp, Homo sapiens
gaagggtctaggggtggacagcagcgtgggcgacagcgaggctgcgaggagacctcgctccggaggtcccacgggctccaagggcacctggcctagttcggcaccctctgggacccctcgaa

SEQ ID NO: 410597 - DNA, 122 bp, Homo sapiens
ggaggggtctgaggacaggcggtcctgactcccgctgcccggtggaactaagaccagggacgaggccacgcaggagatcaaggtactcactgcgttgggtgctgctgcgctgcagcccacga

SEQ ID NO: 410598 - DNA, 122 bp, Homo sapiens
aggagaaaccccgcaaaggctcgttctccagggtgcagtgggaacgcctgcgctccagtgcgacccagaacagcaggtctttggagccccctccgggccctgggcctgcccgcaggagcgcg

SEQ ID NO: 410599 - DNA, 122 bp, Homo sapiens
atcaactcaaggtctggatcttgttcactggcaaggaccatgcaaggtgttgttgattttcgcctgcttgccattctgatgttatgaggaaaagctcagtggtgattaaaaagcatcgaggc

SEQ ID NO: 410600 - DNA, 122 bp, Homo sapiens
aaagtgggttaaacagcgcgcggatttgcgaggaacatagccaacaaatgagatatcaaacgcagcttcccatgtaagagatcagactccggcgggcacgcacgccggcgctctgctggagc

SEQ ID NO: 410601 - DNA, 122 bp, Homo sapiens
cttccacagtgacccttgttctcagctgggcacagaaaccctttgtaggagcacgtgtcccgatgtttattttggaaaacagattcttgctgttactggccgagatcccgcccgctgccctc

SEQ ID NO: 410602 - DNA, 122 bp, Homo sapiens
ggcggccagggtcgaggctgggagactcagagccgctgaggctgccggagctcagggagccgcttaggtagctgtcgcggtccgacagcgagtccggggggctggggggcgcgtcgaacacg

SEQ ID NO: 410603 - DNA, 122 bp, Homo sapiens
ggaaggcaagtccgaggcggggctcgaaacagccgagacccggggctcaggtcagaaatgcggccttttagggaggcctttgccaagctgctgtccggttcccccgagagaggggcccgttt

SEQ ID NO: 410604 - DNA, 122 bp, Homo sapiens
gctccttatcacacattccactccttgtcctgttttcagtgtcaaggagttacattctcacgcacaaacaacgtacacacagtgcctcagtatttttccatgcctcgagctcaaatgccttg

SEQ ID NO: 410605 - DNA, 122 bp, Homo sapiens
acccctgtacccgccgccatccgtcctggcgctccggatgagtcaatgaggggcagggcccgaggagtggtcttcccaagaacccctggtggcctcccaaggccggtgctgtgtacctcctc

SEQ ID NO: 410606 - DNA, 122 bp, Homo sapiens
tgatgagattccggttgtgccttcctggctggaatgccacatagatgatgctgtgacctgcgaagaccttcacatctggaggcacacgacaccctcctgcctctcacaggtgatttatttta

SEQ ID NO: 410607 - DNA, 122 bp, Homo sapiens
ctcaggcgtctgtcctggcaacagtggcttctcctctgtgatctgcacctcctgcagctccgccatggtggcctggcaggatgaggaaatgagactgggaagttgtctctacatccccacat

SEQ ID NO: 410608 - DNA, 122 bp, Homo sapiens
caaccggcgcctctggccaagaaaggcgagctgaaccgggtgcggttagctatgcgcatgcgtcagcgcttaccgcggacttgctactcctcgcgttctcctctttcttcctctcagtgcct

SEQ ID NO: 410609 - DNA, 122 bp, Homo sapiens
gggggccccggacaaggaagggaggcggaggcggcatctgcaggccccttccccggccctcgcccccagccgctcctcaggccaccctgctgtggctggccaggcagggcggggatggagga

SEQ ID NO: 410610 - DNA, 122 bp, Homo sapiens
cggcagcaggggtggctggggcagcgggcacagcgggcagtgtgggagccagcggcagcccggtgcccacctcagccccccgcccagtccagccttgtcgcagggctggccacggcgtcggg

SEQ ID NO: 410611 - DNA, 122 bp, Homo sapiens
agctcgagcggcttctgctgccgggagctggcgggcgggcggaggggggggcagaagctgcgcggttatttatatcccccgcagctgctggggaaacatccgctccaaggtcgccgacagga

SEQ ID NO: 410612 - DNA, 122 bp, Homo sapiens
cagcctgaggattgggcccaggctgcattctgagggagatgccgtcttccgcctgtcccccggacgaaaggaggttgctagccccagaatgttcacagtgacccacccctaaggtggtcttg

SEQ ID NO: 410613 - DNA, 122 bp, Homo sapiens
gctgccctgggtctccaagccaagctgagtccagggacttcagaacaacccaaaacagaccgcagcaaccgtccccaaagcgaaccggggaccccgagccccccacatccggctgggaccag

SEQ ID NO: 410614 - DNA, 122 bp, Homo sapiens
cccacccccagggcagcacgtgcggggcggggctgtggcccgagcccggagctgattgggcgcgggcctggtgggcggggccgggccgcagctgtcagagccgcggcggcgaacgaggcgca

SEQ ID NO: 410615 - DNA, 122 bp, Homo sapiens
gtctgttcctctgatgcagtgggtgaccccccctgctttcttgaatgacatcagctgagccgtaatcaaagtgctcatgcctgactcaccacgcactgtggagaattgacttccagcatagc

SEQ ID NO: 410616 - DNA, 122 bp, Homo sapiens
ctctcctgccacctgagcgcagtgcccaacttaacaccgcttcttctcactttttaggaccgcgagtaacccagtacccgcggtgaaggttttgggtcgactttagagtttagttaggaggt

SEQ ID NO: 410617 - DNA, 122 bp, Homo sapiens
cggtgttgagtcgccagaagctggctccccatgggtggtagccaaggatgtaccgctctccgtggtgctgaagtatagagctggtcaagtgagttaagttgcaacgatgtgaaagcgcgctc

SEQ ID NO: 410618 - DNA, 122 bp, Homo sapiens
taaagcggtgagtgagtatttgggcactgtgatgattaattttatatgtcaatttccatgcgccatggggtgtcccccaaataagacatgtataggtgtgcctgtgaaggtgattcctgatg

SEQ ID NO: 410619 - DNA, 122 bp, Homo sapiens
gcaggggttttcagactgcggcctgggacccccttaagagcgtgtgaaatcaacataaagcgtcttgcctggcattacaaagcgggggaagtggaaggaaactagcagccacgtggcgcggg

SEQ ID NO: 410620 - DNA, 122 bp, Homo sapiens
cccgcttcgatctcctctcgcggctcctattcatcatctccgcattgtatatggcagcctcgcaggggcaggggccggcgaggtttatctctgcgcaatattctctcaccctcacaaactgg

SEQ ID NO: 410621 - DNA, 122 bp, Homo sapiens
gcggcggtcaccgcctgccgcctgtcattggccctgccgaggaggaggagccgcaggaggcggtagcgagagatcgccattggagcaacctgggaggacaaaaccaaatgcagaaagctgga

SEQ ID NO: 410622 - DNA, 122 bp, Homo sapiens
tccaagctttctacaagactccgtcctccaggagacctctggctgcctcaccttctcaggcgtcctcaccagggcccatgaccccttcatttcaggttgttcttgtgtgggtgcatgcaggc

SEQ ID NO: 410623 - DNA, 122 bp, Homo sapiens
gttctaaactccttcccagcttgcgcttgacacagccttgtcttctctccctccgtgcctcgcagtggtagggttccatggaacacgcaggtgaacagtttgacctatggatgagccgatct

SEQ ID NO: 410624 - DNA, 122 bp, Homo sapiens
ctgcagctggttctcgtgcagcaaaagacggtccaggttcaccaggccccggaaggtgcccgggcccagactccacagcttgttgccgtggagaaacaggtggctgaggttgaccaggtcca

SEQ ID NO: 410625 - DNA, 122 bp, Homo sapiens
tcctcataacaggcttcggtaagagaacaggcaaacatcactgcgggcgcctctagggctcgtttccctgtcccagtaccgggaatcggggaggggtccaagcagagttcacttagttaaca

SEQ ID NO: 410626 - DNA, 122 bp, Homo sapiens
aaatgccccgagctgaaaattttaggtgaagccatgaagaatatactgaacccaattctacgattctctgggatgctcctgaaagtacaaacaaacctccttccacttctagcctttttttc

SEQ ID NO: 410627 - DNA, 122 bp, Homo sapiens
ctcccagacggggtggtggcctggcagaggggctcctcacttcccagaaggggcggccgccgggcagaggggctcctcacttctcagacggggcggctgccgggcggaggggctcctcactt

SEQ ID NO: 410628 - DNA, 122 bp, Homo sapiens
tgaaatggacttttattaatgttaggcataatgttttgttttttagagttggtggataatcgatgtttgggtctgtatttgagcttacaaactaaaaatagcacacaaccattttgggatct

SEQ ID NO: 410629 - DNA, 122 bp, Homo sapiens
cttgctgaatggaattaagcactttcttgtcacaaatatatcagtttgatgattttcgggcgcggtcttgtggatgcgagtcctctcagggtcgttcgtgaggccccagggcgtgggtgcgc

SEQ ID NO: 410630 - DNA, 122 bp, Homo sapiens
tttctgttgagcctaacaacacctctgctggtgctggtttggattggaggccccaggatgcggaaaaagggtgtgtaagaggagggtgctccggagatataaatgtgtgctttattttcctc

SEQ ID NO: 410631 - DNA, 122 bp, Homo sapiens
aaagtcttagagacattttaatcaacacagctcttttaggttttcttcaaaatcccctttcgccctaaggcattcatgtattcacaggaagttggaaaacaaatctaggtgagaggtactgc

SEQ ID NO: 410632 - DNA, 122 bp, Homo sapiens
aggcacctggattggacctttccaaggcgtgcttctgcccccagagaaggtgcaggcaggcgccgtgaggaacacgcagcatctctgggaggtaagtggccggctgcacagcgcctccccac

SEQ ID NO: 410633 - DNA, 122 bp, Homo sapiens
gccttgtagggtggcaacgcgcctcttggccccgggggtgcaagcggtggccgcgcgcttcgacctgctgctgatcgcccagcacctggacgagtccctggggctcctgcgccgcactgcgc

SEQ ID NO: 410634 - DNA, 122 bp, Homo sapiens
cttcctagtgggtgtgaaaggcagcggtggccacagaggcggcggagagatggccttcagcggttcccaggctccctacctgagtccagtgagttccagggctatgggcacagggctgcctc

SEQ ID NO: 410635 - DNA, 122 bp, Homo sapiens
ctagcaaggtttcattttaggtttccatctcactcaaccaggggagttttatcctgggaacggccaaaggcagcaggaaggtagtgaccctgactcaccttgggcaaatcccagcactctgg

SEQ ID NO: 410636 - DNA, 122 bp, Homo sapiens
ggagaaaaataaaatgatttgacaggtgcaaggagccccgaggtgtgggctcgtgaggctcgtccccgtggtgcagcgcagacctgagaatgaataaaaatctttcctaagcactccaggat

SEQ ID NO: 410637 - DNA, 122 bp, Homo sapiens
tccgcggaatgcggtcagaaactcgcagagtggggcctgcagcttgccccccctagagtccgaccctcgacgtccaggatcgtttttttaaatttgtgtttttaacttgacctttaagattg

SEQ ID NO: 410638 - DNA, 122 bp, Homo sapiens
ccctgggggtccccaaggctcctggggtgtccacgtgcggggggtgaccaggccctgccacgcagcccctttgcacgctgggcgcgcccagcagagcgcgcagggctgggcggagccgtggc

SEQ ID NO: 410639 - DNA, 122 bp, Homo sapiens
tcatctggattccttgaaggagccagatcctggtgtccaagtgtgactttcctgagccgacgtgggccttctgggagcagatttaattaaatggaagtttcatctatttctgctgggtgtgg

SEQ ID NO: 410640 - DNA, 122 bp, Homo sapiens
ggcgccgccggctgagggggcaccttggctggggtccggcggggcagcctgaggagagggcgccggcggcggcaccaactgcaacagcgaggcctcttctggctcgggcggttacgcggctc

SEQ ID NO: 410641 - DNA, 122 bp, Homo sapiens
ggcttccgctcgcagtcgtggtcccgcggctcgcccagcaccgtgtcctcctcctataagcgcagcatgctcgccccgcgcctcgcttacagctcggccatgctcagctccgccgagagcag

SEQ ID NO: 410642 - DNA, 122 bp, Homo sapiens
ggccctcttcagcaagggatcagaaacctggcaggcactcagacactcctctgcacacctcgtcctgaggagtctccctccaacccagtgcgtagaccagcacgcctcgatccctcccacat

SEQ ID NO: 410643 - DNA, 122 bp, Homo sapiens
cggagggcctttctggtgggggatgaggaccctagatggggacacccctgcgcattcttacgtgatgtcaacgacccctgcgacacaaaccctattgtctccactcaccccgggttgaccgg

SEQ ID NO: 410644 - DNA, 122 bp, Homo sapiens
ccacttccttgggtatcctggtagtctctagaaacacctgggtgagctcactgccagcagcggctaccttgttacacctgttctggcagaggctcaatcatgagcagcaagggccagaccca

SEQ ID NO: 410645 - DNA, 122 bp, Homo sapiens
tttcagagaagtccgatgctgatggcagcagctttgaggaggcgttggacgagctgtcaccggtccacaagaggaagggccggcagtccaactggaacccgcagcaccttctcatcctgcag

SEQ ID NO: 410646 - DNA, 122 bp, Homo sapiens
tagctacaataacctagaaacagcttttctacacagtgaattttaatacctaagaagtagcgttctctggtagttgttttaatcttgtaacagttaatgggccgggtgataggatgtacagc

SEQ ID NO: 410647 - DNA, 122 bp, Homo sapiens
ttggtgcagatgagaggtttgccgggggggtgaccttaggtgggtagcagctgctgtgagcgcacccattccacagcactcaccgcagcccccggcctccaggcagcggccccagccatcct

SEQ ID NO: 410648 - DNA, 122 bp, Homo sapiens
gacagcagttaaagaaaggcggcataaagtcagaaacaagtctgagatgcaacagtgtctcgctctgttacccaggctggagttcagcggcatgatcacggctcactgcagcctccatctgc

SEQ ID NO: 410649 - DNA, 122 bp, Homo sapiens
tccgctgtccgggctctagtcccgccctcgcccctccccgcccaccggcctcgcagtcaccgcggacgccaatcttgtgcatggagtcgccattttgctcctagagaggccgccaggagacc

SEQ ID NO: 410650 - DNA, 122 bp, Homo sapiens
gtgggtcggggagggatggacactgaacagcaaggctcacctcacatccaggaggccccccgccagccccgccatgccacaggcactgacggttgccactaagcctcagaggccaactgcat

SEQ ID NO: 410651 - DNA, 122 bp, Homo sapiens
ccaaaactcatcttcctgtgcacttgctgtgtgcactggcgctgtgtgtaaatgccacctcgatttaggaaaaagatgacgtaagtacggcacaaagtggccggtacgcggcaggtgcatgg

SEQ ID NO: 410652 - DNA, 122 bp, Homo sapiens
agactcctgtgttgtttccagtggttttgctataaccaacaacgtggcattgaacatcctcgaacatttccacttccctctgctaatctgttaggatgacatctgcatgataacaccccttt

SEQ ID NO: 410653 - DNA, 122 bp, Homo sapiens
ggagggatcagggaacactcaatgactcatgcagagcaaacaaggatgcagctaagaggacgggtccaaaacgcaccgcgccagggagacagttccggtctgtggggtgaccgcgggccagg

SEQ ID NO: 410654 - DNA, 122 bp, Homo sapiens
cggagctaggagaactgggttctcctccattattattctatctactgggctcttttgttccggaactctgcggtctgaatttccatattcttctgcttcactccattcatttatttgcacat

SEQ ID NO: 410655 - DNA, 122 bp, Homo sapiens
aacctggccgaggcctcactgtggccctgtcctttggttctgggtatccctggcctttcccgggagggagaagcagcagcagattgtcctacctcggacatagcgggctccttccttccagg

SEQ ID NO: 410656 - DNA, 122 bp, Homo sapiens
ttcttgcagccgagaggcccacacaggacaaggaggcctgacccaggctgttggagcccgcgaagagggggtgaaactccaaggggcgtaagggtgatcacacgtgcggccaagcttcccgt

SEQ ID NO: 410657 - DNA, 122 bp, Homo sapiens
gcagaggggatccttcaacagtacattgagaggttcaccatcagtgaggctgttctcgaacgcttggagatgccaaaaattctggaaagaagccattcaacagagccaaatttatcctcctt

SEQ ID NO: 410658 - DNA, 122 bp, Homo sapiens
tacatcaatggtgccagttttattttcagagactatgaaaacaatctggtcaatttctatcgcaatcttaaagatagttttccttaaccataagcaattttactgcctggaaaatattcagc

SEQ ID NO: 410659 - DNA, 122 bp, Homo sapiens
gccgggaacccgacttagcccggagacgctcaagagcaagaagccgagcggaaaagttagcgcaggtactgtgatctcgggtctagagcgcccgcgccttcggggccccttcgcagggagcg

SEQ ID NO: 410660 - DNA, 122 bp, Homo sapiens
tgtaaatagtggtaaatagtgaaagcctgtccttccctaaatgtaaagccatctgtccggcgtaaggacgacaccgtcagctgtccgactcgcacacatttaataaactgagctcttgcatt

SEQ ID NO: 410661 - DNA, 122 bp, Homo sapiens
ccccaaaggaaaatccatgacaaactttgatacagatccaacatctgtgcaagatgtctacgatagatacaaaacaatgatgaaagaaatcaaagaaggcctaaatgattggagggatacac

SEQ ID NO: 410662 - DNA, 122 bp, Homo sapiens
aatgactctaatgcccaaagaaaaatattacaaatgccgctgtctcggccaccaatcgggcgccgctttcctgcgcgggcgatggctcctctctggcgcggagggcacccacatttgcatga

SEQ ID NO: 410663 - DNA, 122 bp, Homo sapiens
cgacgtgaagggcggcgccgggcgcgacgacctgcacgcgggcacagcgctgcaccaccgcgggccgccgcacctcggacccccgccgccgcccccacaccagggccaccctgggggctggg

SEQ ID NO: 410664 - DNA, 122 bp, Homo sapiens
ggctccctgtggagcagcaatccggcgactgctggaaagcgagggttcgaggcgcagattcgtcgcgcgatctccggcgcgtcggaacctgttcgcagcgctctcgcagaggcgccctcggc

SEQ ID NO: 410665 - DNA, 122 bp, Homo sapiens
acgcgcaggctccgaaagcgggccgtcgcacagagggaccacaactcccagagtgctccgcgtccttgctttcgcctctacttgtgctccagggcgcacgcgcagccctgggagcgggttct

SEQ ID NO: 410666 - DNA, 122 bp, Homo sapiens
ctctgatcgtaaaaccgtggacgctgagcaaatggccccaggtgtgtgctctctcagtttcgctgggataatagtcaggaacagcaagagggtgacctggtttcgatggagcagctcctgct

SEQ ID NO: 410667 - DNA, 122 bp, Homo sapiens
cccagcgcctgctgccttgccttgccccgcctccacctccctccgggctcctggcccctgcgcttacgctaagcgtgtccgccccgcccgctctagctctgagagccactcgcccagtgctt

SEQ ID NO: 410668 - DNA, 122 bp, Homo sapiens
ttgtgctcttgctggaacccacataacgccggaaacagacagaccgacttgcctgtttcacggggtccacttccaatgagtcgaaacggaaaattttcccactggcatgtcagtcatttgga

SEQ ID NO: 410669 - DNA, 122 bp, Homo sapiens
ccccaagagcgccccttcagggggtccatccggccttgatctcagatgggggggtgtttgcggagggcggggcatcgcctcaacagctgggggctgcatcatggcaggaacgagtttccctg

SEQ ID NO: 410670 - DNA, 122 bp, Homo sapiens
cagccggagggccggggtgggcttgcaccgctatcgcgagagctcgtgaggtgggggcggcggggagctggggaggggctcgcggagagcctgccccgcctccctttccttcccctcccctg

SEQ ID NO: 410671 - DNA, 122 bp, Homo sapiens
tccatggctattgcttcaggcgggttaagtctggtggaaagagactgcctagcgttcctgcggcaggaaaacaaaacatcgtggcgcaaagtctccctgcactcgccggcccccagcaggag

SEQ ID NO: 410672 - DNA, 122 bp, Homo sapiens
gccttaccggagcgccgcgccaggccgcccgcacacccagagctcgcccacggttggcagcgcccaaggttgcatggcatggcccgcttaagtgccactcagccggccccaggcgggatcag

SEQ ID NO: 410673 - DNA, 122 bp, Homo sapiens
tggattccaccccagcccgccccctccccacgcacacagccacggcccctcgcgtcttcgcggcacgttaattaaatgcggaaaacagacagaggctgatgtcattgctctcacaagatcat

SEQ ID NO: 410674 - DNA, 122 bp, Homo sapiens
tgtccaaaagcacagccaggccaaagagaagcaccatcccatgttctcccactcccactccggtgcttcttcaggtaggctaaacttcaggctaaaatgtgaagatcacagtgacacattcc

SEQ ID NO: 410675 - DNA, 122 bp, Homo sapiens
ccctcacgcgcttgctggaagggaattctggctgcgccccctcccctagatgccgccgctcgcccgccctaggatttctttaaacaacaaacagagaagcctggccgctgcgcccccacagt

SEQ ID NO: 410676 - DNA, 122 bp, Homo sapiens
ttgcacacagctatatacgttatccactgaaattagtatttgcaggtaactacccttttgcggaggcctacttaaaaactatcctgttgaacacaaggtacctttaagtgagacagttttac

SEQ ID NO: 410677 - DNA, 122 bp, Homo sapiens
gggcagtgtcttccctatcagactgggcatggcggacagctggctggtttagagccgcctcgtcctccccgctgggctcaccgctgtcgagcagctgctgcaccacggggaagttggcatga

SEQ ID NO: 410678 - DNA, 122 bp, Homo sapiens
tccccggaaggaaagcgcagcccgggctgggctcgcaaggtggggaggtgcgggactgggcgtggggaggcggggcgcgcgccgggggacccctccctcctgtcctccttgcggtcgaccgg

SEQ ID NO: 410679 - DNA, 122 bp, Homo sapiens
agcatctcccacccagccctcttagtgtctaccatgaacatcctcacagagcaactccaccgcctattacggggaggcctctagcttcagccctaggggcaaaagtaaggcagggctcagca

SEQ ID NO: 410680 - DNA, 122 bp, Homo sapiens
cgtgcggcgcgtggggagggctctcagctgctccctggagtctgctttcctcccgctgatcgtgtgaggcgctcagcgacacgttagcaagaaagatgccacaagaaataaagtttgttatg

SEQ ID NO: 410681 - DNA, 122 bp, Homo sapiens
gatgagtgggcgcctgagggacgagcgcagggttacctgcctgggctctcacctggtggccggctcagaggtggcgcgccggagacgtatcataaccttcctgggtcccccttcccgcgcca

SEQ ID NO: 410682 - DNA, 122 bp, Homo sapiens
ggccctcgctgtcactggagcttgggcggcctcctcccagcgcagcctgcaccttgcactcgcgccctgagacgtttgcctcttgcatgaaaagcagctctgattgggcttaacatgaaggg

SEQ ID NO: 410683 - DNA, 122 bp, Homo sapiens
cacaatggccctattgcccccatgtatggaaacccggataagataatggcaatggagaagcgcctttccttatccagaagagagactctaacagcagtaaaggtttccccttagcagtaagg

SEQ ID NO: 410684 - DNA, 122 bp, Homo sapiens
cagagggtgcgaggtggcacagccccgcagcgcccgatctgcccacgcagggcggatgaacggaaacccaccctggcctagcttggggacaccaatgcttctgctgttgcccacgccgggag

SEQ ID NO: 410685 - DNA, 122 bp, Homo sapiens
tgggtagttgtaagaggatcagcctcgatgattgctctgaactggtcgtggtcaatttcccgtggccggccactacgcttctcatctgaacccccactgtactgtgtgttcattagcagttc

SEQ ID NO: 410686 - DNA, 122 bp, Homo sapiens
gctgctctgtctcgctcaccggccgggctatgttgattgtcccctcgcggcgcccggaagcgaccctcagtaaacaaagccgtgtgtgggcgcagccccagaagcctggggcgcgcagtcca

SEQ ID NO: 410687 - DNA, 122 bp, Homo sapiens
tgtagaagagcggcagccgccggatgacgaaggcgtaggtgacgtcggggtagatctcggcgcagcagtcgtacttcttgctgttgtaggtgcccgtggcattgacgatggcccactcgccg

SEQ ID NO: 410688 - DNA, 122 bp, Homo sapiens
ttctgtggctcctcagccactgataaatgccgctccctgcaactactgagcccagaggagcgtgtttctgtcaccgactataagcgactgctggattctggggcattccacctgttgctgga

SEQ ID NO: 410689 - DNA, 122 bp, Homo sapiens
tgggataaataaatgaaaccatagtcgtagtttaaaatatattgtcaaatctgaaaaaaacgatgtctaaaatgtgtgaggagggtttggataaggagttaaggaatataattataaaatga

SEQ ID NO: 410690 - DNA, 122 bp, Homo sapiens
gcccgggtgcccagggcgcaggctgcggccccgcgtgcggccctcccagactgaccggcgcgagcatgctcagtccccgcggcggggctcccctctcgagccaagaccccaggcctcgggca

SEQ ID NO: 410691 - DNA, 122 bp, Homo sapiens
ccacatagagagattttcaagttctccaaggccgctaatgtctccaccccacatctgggccgaggcagggcatgaaagcacacacccaccaggctggagggggagggcagctgtccaccctg

SEQ ID NO: 410692 - DNA, 122 bp, Homo sapiens
cactccagcctgggcaacacagcaagaccctgtctcaaaaataataataatatggctgggcgcagtggctcacgcctgtaatcccagcattttgggaggtcgagacgggtggatcatgaggt

SEQ ID NO: 410693 - DNA, 122 bp, Homo sapiens
agacgttccccttccagagccggtacaggaaggccctggacatggaggagtacagcctgtcgccgtcgtcgccctcctccaacacgtggctccttctctgcctccggtgcctcttcttcacc

SEQ ID NO: 410694 - DNA, 122 bp, Homo sapiens
cggcgtgggccgaggtagagaaccaccaaaattaccatctcggagcggtgccggaagtcccgccttaccgtatgcaacaaacggagacaggtccgttcctgaacgttgattggctccgcgtc

SEQ ID NO: 410695 - DNA, 122 bp, Homo sapiens
actttcgcccatgggggggacctctgccacaccttttctgtttttctgccacaccacaagcgactcgacctaccctttcaagcctccctgcagctttgggctggcccccatgggcccaaggt

SEQ ID NO: 410696 - DNA, 122 bp, Homo sapiens
tgtcctctgttcctggttccagtcacttacaggagctggctgcgccgtgctcccttcacgcggctttccacccaaagcgcatcacggccgccagcccctgacgctagccccttcgccacctc

SEQ ID NO: 410697 - DNA, 122 bp, Homo sapiens
gtgggccgcaggtgccgagggaggtggcaccgcaggcgggagtagcccagcccgtggagccggttcagaacctggcttgaagtgtcaccagcaccctgcccctgagcacagggcagcgccac

SEQ ID NO: 410698 - DNA, 122 bp, Homo sapiens
gcggtggggcgaacagcaacgcgcgtaccctagctcttggctgctgtgctgagactagcccgcgcgcccgcgcgcctctccctcgaggactcggagccgcccgcgcactcgccaggggccgc

SEQ ID NO: 410699 - DNA, 122 bp, Homo sapiens
acggaggagaggcccggagacaatcggggggacggcacggtgggggaacggtgcggggtgcgaaagctggagaggagaggggtgaggagggcgggaaggggtgcgcgggagggcgacagcgg

SEQ ID NO: 410700 - DNA, 122 bp, Homo sapiens
ataagaatgaaggcaatgctgatacaggaaaccacacggatgaacttcaaaaacattatacgaagtgaaagaagccggacacaaaagaccacatatagtatgattctacttatatgaaattt

SEQ ID NO: 410701 - DNA, 122 bp, Homo sapiens
cggacgccggcgctggggacgtgggcgcggcacggggtggccggggggcaccgccgcgtccggagcccgtccccagactcgccccagggttccgtttctggatcggagtttccgcggccggg

SEQ ID NO: 410702 - DNA, 122 bp, Homo sapiens
aactgagttttaaccaaaagcatgactgcttttcatttatatggtttcagatccggctaacgagctcatatctccctcattatgtctgttctcaataactccgaagtcaagcttttccttct

SEQ ID NO: 410703 - DNA, 122 bp, Homo sapiens
gaccagtactgtgacttgcaccatggagacacctggaaaacatacagtgattcacacacacgccccaaacagcagtgtgtgtgtgtgtgtgtgtgtgtgtgtgtatgtgtggtttcacactt

SEQ ID NO: 410704 - DNA, 122 bp, Homo sapiens
gtagtttccccactgaggaagaaccctggttagcgaggcaagtcacgtgattttgggaatcgtgttgaatctacacccatttaaggtggaagtctatatagcttgattctttggtggtttag

SEQ ID NO: 410705 - DNA, 122 bp, Homo sapiens
cgaaccgaggtcaccccgccctgggtctgggagtcccgggcgctgcccctaccccgccgacgcccggattgcgtcccaccggcgtccccatccccggtcacagccccctcccctggtcctgc

SEQ ID NO: 410706 - DNA, 122 bp, Homo sapiens
tgagcacttcccgtccccgcagggcggcggcggtgggggtggcggtggcggggggctgcacgtggccattcccgactcggtcctcaccccgcccggcgccgacggcgcggccgcccgcaaga

SEQ ID NO: 410707 - DNA, 122 bp, Homo sapiens
agctcaacagcttcatttcatgctttttgatcaaatattaaataactgctaaaagtgcttcgagagttaagtatagtctaaagatctggtcattaactcaaaccatcactactactggaggg

SEQ ID NO: 410708 - DNA, 122 bp, Homo sapiens
tgaggaaagaggaaaaatccatgctcctgccaagagtgtgtgccaaggagttggggaagtcgctgggccctcctatgctcagtttcaatctcctaaactgggaatagtaagtctttttgtgc

SEQ ID NO: 410709 - DNA, 122 bp, Homo sapiens
cgaagcagggtctgtctccctcaagccccaaagcgagggcttagcagagtgtggggttggcgcggggctgcagggtgctggctgactgcctcggggacagagaacaggccagcttgacagta

SEQ ID NO: 410710 - DNA, 122 bp, Homo sapiens
ggagatgagatggggaggaccggattcgaaatgcctgggccgcctgttctgggcccgccccgccaggtgcctgtgctcgggaggggccttgcccagcacgcattctagaaggaagcggcccc

SEQ ID NO: 410711 - DNA, 122 bp, Homo sapiens
gggataaaggtctcttttctctgtcttttgttctattcaggccctcaaaggattggatgacgcccaactgcattgaggaaggcattctactttactgaatttactcattctaatgctaatct

SEQ ID NO: 410712 - DNA, 122 bp, Homo sapiens
ccttttgttgacagacgcgcgcgtgacgctctcagccaatgagcggccgccattcggggccgtgcccatataaggcaggccttggcgaaggggcccaacttcgaaatagggaggagtaggcg

SEQ ID NO: 410713 - DNA, 122 bp, Homo sapiens
ttggcctggagccctgggggccgcttacctcagggggcttgcccaggtgctgggacaggacgatgaggttgaccagcgtctctgggtagccactatcctggagacacaggcagacacgggga

SEQ ID NO: 410714 - DNA, 122 bp, Homo sapiens
ttgacttccttctatccttttctgctcacaggccccctccctaatgtcccctgtgctctccgcaaaagaaataggctggaggcccaatagcaaccctgcccacacaagggagggccatgtga

SEQ ID NO: 410715 - DNA, 122 bp, Homo sapiens
gagaaacccagaatcctgttcactggaaggttgccgggtggcggctgacagcctcaaagtcgcaattgagtctgcgcaccggccattcaggatgggacgaccttataccgcggtgaggcggc

SEQ ID NO: 410716 - DNA, 122 bp, Homo sapiens
ccgggttcgttagggcgcccactgagacgtaagtgggcggagcctagagaacgctcctctcggtgagtctgggacatagctccgccccttccaggcaagatttaaaggagaagcgcccggca

SEQ ID NO: 410717 - DNA, 122 bp, Homo sapiens
agccctgtggcgcagaccccacatcagggagcgtactgtgtggcaagagccatcttgtgacgtaggccagacacgtgtctttctctttaaaatgacggttatcctctcacggttagaggccc

SEQ ID NO: 410718 - DNA, 122 bp, Homo sapiens
gggagcgcctgcccggtccatccctccccggccccgcgtggcaagcaccgcaggttgaggcgcccccaaaccgaggaagagggtttgggagcctgtgactccaaagccctctgcaacttccc

SEQ ID NO: 410719 - DNA, 122 bp, Homo sapiens
ggtcacgcagaccccctgacagtgaccctcggcccccttttgagtcctcgggcccagaatcgtatcccaaagccctcccatggcctagaaaataaataagttattgtttgtcttagtgtcct

SEQ ID NO: 410720 - DNA, 122 bp, Homo sapiens
cgcgcacccctggactcaccatggcgcgggcggcagcaggtggccagcggagagggcaggcggcggccgggcgcgcaggctgccgtcccggggcggggccgcgctcgggccgccctccggta

SEQ ID NO: 410721 - DNA, 122 bp, Homo sapiens
gcacacattctgcaaggccgtggaaacaaagggaggaactgtttgtagccctcgtccagacgccccaaacaaacagtaagtcagaagggaacagagcacagcacagtccctccctccgcccc

SEQ ID NO: 410722 - DNA, 122 bp, Homo sapiens
caggtgcggaccgggagccggaccgaggtttggcagaagcaacgtgtgctcgggagcaaccggcgcgggtgccactgaggcagcggagggaggcaggatcgactgacgggcgaacggacgga

SEQ ID NO: 410723 - DNA, 122 bp, Homo sapiens
gaaaggaggggaggagtcagggcaggcccattcccaatgttgaggactcccaggagggagcgccacactttcccacagtgcctcttctgccgaccacctgcctcactctctgcctccccctg

SEQ ID NO: 410724 - DNA, 122 bp, Homo sapiens
cattaaccgcgggcagaaacagaacagaaaccactaccttggcggccgcccgcccccgggcgtcgcctacgtcataacactgcgcggccgcccctcgcgcaccacgtgctaggggagcgggc

SEQ ID NO: 410725 - DNA, 122 bp, Homo sapiens
gcacccggccctgcccttgagaccaacaccatcctgattcttgatactttccgtgaaatgcgttggctcactggtttggtttttgtcctctctggaaactgttcagatgctctctttgttct

SEQ ID NO: 410726 - DNA, 122 bp, Homo sapiens
cccagctcgggacaacctcgagggtggaggttgatgcccaggcagctggtcaccctcctccgtgtgtggggcactgggcagctgtcactcaagggggtccaggctcctccgcctgacatgag

SEQ ID NO: 410727 - DNA, 122 bp, Homo sapiens
gatgctgttacacatcctacaatgcacaagacagctccctacaacaaagaatgacctggccgaattattaaagtacaaagttgagaagccctgactttgagtgttgaatgtttgtagagcac

SEQ ID NO: 410728 - DNA, 122 bp, Homo sapiens
tgttttggtataacaatagagtaacacccttgctgatcagcaactttctcccacaaaccccggggcccatagcccacccgaccccaggcagctgtgccccccacccctttagtgatggaggg

SEQ ID NO: 410729 - DNA, 122 bp, Homo sapiens
agaattttgagtaatatcccagctattcatctgaactggggaagaaatatcagttcagggcgtctggccacctagtaagctgtggataaagatgttgatgttatttacttctcaggcattcc

SEQ ID NO: 410730 - DNA, 122 bp, Homo sapiens
ccaaacaggaaccagctagttacctcttaaggttgttgtgaaacaatgagtagaatgtgacgcaatacaggttcagtaggtaaaggtagctttaacttttcaaaacatttaattaatctagg

SEQ ID NO: 410731 - DNA, 122 bp, Homo sapiens
cagctgtcaggataccgcggaagtgttgacgctgaaaatatttgactcaagctcttcctgcgaacaaggcttataagtttctagctggcaatgaaattgtgaaacgagtttaaggacaagga

SEQ ID NO: 410732 - DNA, 122 bp, Homo sapiens
taatgctgagtctttttgttttttccacaggtttatatatgcagcaacaatattcaagcgcgacaacaggttattgaacttgcccgccagttgaatttcattcccattgacttgggatcctt

SEQ ID NO: 410733 - DNA, 122 bp, Homo sapiens
agatcggggagcagtaggacagagcggttctgagcaacccaggcaagagtttcaagagcgcgctggtcaccagcgtcacatgcctcagagaagtcaagagacctgagaagtgtccattggat

SEQ ID NO: 410734 - DNA, 122 bp, Homo sapiens
cccacctgggacctgtctccagcccttcgagctgtgcactgcatccctcctctctctcctcgcagctagcaaagcacctgatatgtagcgggtgccaactaaatgctagctgaacagaaagc

SEQ ID NO: 410735 - DNA, 122 bp, Homo sapiens
tagtattctgtctgcagaggtgggctgggctggggaggcacctcaggtctcatgcctgcccgaccccagagtgatgtccttgccacctctctcccatcccaaatctcaggcagtgccaccca

SEQ ID NO: 410736 - DNA, 122 bp, Homo sapiens
gaaaaagagagggcatgggttgcggagccgacatcacggccggggtctttgctgtttagacgcctgggttcccggatcccagacacgcgcacgggcaggaagttagaccggagacagcgagt

SEQ ID NO: 410737 - DNA, 122 bp, Homo sapiens
gccccgtgcagaggtccaggaggacaggcctggcagcaggaggagcgtggggagccacagcgggaagacaaggagaggtggacaggaggccgcgcatcctcccgggtaggtgtgacagatac

SEQ ID NO: 410738 - DNA, 122 bp, Homo sapiens
ccgcgcgggatgtcgcgggggccttcagtcccgccgctcacacatttctccgcgcgctcccgtcccacaaggggcagctgccggagtttcagtggacctctctagacccaggcgtgcggtgg

SEQ ID NO: 410739 - DNA, 122 bp, Homo sapiens
ataagaagtaacttgccccaaattgtgcttttttgttattctgagacaaggtctcactcccgtcacccagtctggagtgcagtggcatgatcacagctcactgcagcctcaaactcctgggc

SEQ ID NO: 410740 - DNA, 122 bp, Homo sapiens
acttcctccgggtggctgactccaccttcttgttcttcttgtgcaccaggaagttcttgacggccagggcgccggccttgcgcaccgtgccctgtgcggcggtcagcaggatgtccgactgg

SEQ ID NO: 410741 - DNA, 122 bp, Homo sapiens
ccaggccctgcgcccgcgtgccgcggtgttttcagcggctggcaggagctccttctcaaccgttagcacccaaagagaatcccaacagcacacttccagcgcggattaaaacaaacaaacaa

SEQ ID NO: 410742 - DNA, 122 bp, Homo sapiens
catcctggtgaggctgcatttcctgagagtaatgactaataaaggctttgggcaaagcctcgcctgcaactcctctagccagcattattaacaacaagggcacagcttttcaagaggccccg

SEQ ID NO: 410743 - DNA, 122 bp, Homo sapiens
cgaacgaacgcagcgcgtaatttaaaatattgtatctgtaacaaagctgcacctcgtgggcggagttgtgctctgcggctgcgaaagtccagcttcggcgactaggtgtgagtaagccagta

SEQ ID NO: 410744 - DNA, 122 bp, Homo sapiens
gggtggggaagagggcgagtgggcaggtcaagcagcagggacagccgagctgggccaccccggcatctttcacctggcatcttcctgcatctgctatttgactctggccatctctgggtctg

SEQ ID NO: 410745 - DNA, 122 bp, Homo sapiens
catccggatgatggatagatgaggagacacagtgcagactgggcgtggctgaccaccacacgtgcccctggagccatgggccgccggcttcatttccagggtggtgttacaatcaaaagaat

SEQ ID NO: 410746 - DNA, 122 bp, Homo sapiens
gagcgctgcttctcgtccccgcccgagccgaacctcgattctccttcccggcccgatgcacgtcactctagggttctcagctgagttcgcccgcctagttctttggttcgcgtctccgcccg

SEQ ID NO: 410747 - DNA, 122 bp, Homo sapiens
accactggaaaaaggaaaggagtcaggaagtaaagtgcacctcccactcccggaaaatggcggcccccgcacactgcctttcccatatcacgtggtattacacgcaacagttcccgcccatt

SEQ ID NO: 410748 - DNA, 122 bp, Homo sapiens
gaaaggtaacggctcgccccctccaaagcccaggaagtggctctaatttggggggatcatcggggtctcccctgaaggctttgcagcttctgggagggcgcccgttccctacctactgcctg

SEQ ID NO: 410749 - DNA, 122 bp, Homo sapiens
ggtccatgtagccttcagaaaagattccgcaggctccccagagggctgcagagccaagagcggggtccaagcgtcctcggatgaaaattcagctgagtcacaattgtttcggagttttcagt

SEQ ID NO: 410750 - DNA, 122 bp, Homo sapiens
gataatgaggaatcgccatggcaacccgggaacaagcccacagcgccttgtttccccgaacgcagagccccggcagcccctccatccaccgagacatacacggctggaaggacgtggtgctg

SEQ ID NO: 410751 - DNA, 122 bp, Homo sapiens
ctctaggcgggctctgctcttctttaaggagtcccacagggcctggcccgcccctgacctcgcaacccttgagattagtaacgggatgagtgaggatccgggtggcccctgcgtggcagcca

SEQ ID NO: 410752 - DNA, 122 bp, Homo sapiens
ggacttgcaaggtcctgaggttctgaaatccgggattgggtcccaggaatctggggcatccggtgatcggcagctcagagccacttgggggatcctgggaatcggctcggaggtgcccgcca

SEQ ID NO: 410753 - DNA, 122 bp, Homo sapiens
gggaaactccgctcactcccccgccccggccaatcagaggccgccgctccccgcctcccgcgccctcccgcgccggcccgcaccctccagccccgccggcctcttcctaaatcccgagcgaa

SEQ ID NO: 410754 - DNA, 122 bp, Homo sapiens
tgggcatggtggctcatgcctgtaatcccagctctttggaaggccgaggcgggaggatcacgaggtcagatcgaggccatcctggctaacacggtgaaacccgtctcttctaaaaatacgaa

SEQ ID NO: 410755 - DNA, 122 bp, Homo sapiens
tgacgcaggctctgtgcacacaacaaccaggataggttcagcctctaaagagaacagtaacgtaaactcttctgtttgactgcttatcttcctgatttgtaatatgctacctgagttggata

SEQ ID NO: 410756 - DNA, 122 bp, Homo sapiens
atctgccagggacgaggctgtcggcaaccacgccgggctctcagggcaggcccaggaccccgccccccacggcaggcccacctcaatctcctcgaagctggaggggaacctgcgttcctcaa

SEQ ID NO: 410757 - DNA, 122 bp, Homo sapiens
gctgagctcttggtccctgccagcctcacccgctccggacccccccgatcctccggactccgctggtcctggccccgcgaggagcccaccgcctagctccaaagaaccccccgagggcacgt

SEQ ID NO: 410758 - DNA, 122 bp, Homo sapiens
cctttcttcaggctacctcctgggagaggttcaaaatttctgtgagtttattatgcagtgcgatttagcttcttctttgtctcatcctttccagtccaaagcagccctggggcctctctttg

SEQ ID NO: 410759 - DNA, 122 bp, Homo sapiens
caatttcttaattaaagttaaaaagtcatcagcctttcattcaacacaaatgttgtgagtcgttgctgaggtgaatttggttgggtcctagctcaggagagcacccatctaacagagaaagc

SEQ ID NO: 410760 - DNA, 122 bp, Homo sapiens
gctgcagagctcagcacgcgcacaggaacgtgtgcgggacagaggacatatgtgctcagccggcaggagcagcggcctgtgtgagcccctggggagaagcagccccccacccaggcctgtgt

SEQ ID NO: 410761 - DNA, 122 bp, Homo sapiens
gcaccagctccttagggggcagtgtgcacccctggaaggactcccaaggtctgggacttgcgactcaggacagaccattccctgcagatcattcatctgccaatttaagaaatgggagagag

SEQ ID NO: 410762 - DNA, 122 bp, Homo sapiens
gagcagggccccgaggaaggggatgctgacgggctgaaggcctgcagggagggagcgcgccgcccgggagtctggcgggcagatcttggcagacacctgtcaccttggcccgcgctaccttc

SEQ ID NO: 410763 - DNA, 122 bp, Homo sapiens
gagaaaggagtgaagacgcaggcttgggctcgttcactggcacaaactgtgaatccctggcgtccctcagggagtctggcaatggggttgggatggtaccaaggattcctggtcctaagggc

SEQ ID NO: 410764 - DNA, 122 bp, Homo sapiens
taccccggtggtgcagctcgagcaacaggcggctcagaagggttcgcagccgctggctctcgctgcagttcatggctttcggggagtgacacggcggctccaggacgctgctgacctttccc

SEQ ID NO: 410765 - DNA, 122 bp, Homo sapiens
tcgtgtggcctccgcacttgcccagggcctctgccgtgtgacagccccaccccagccccacgctgccccagggtctccctggagcgccgtctgtcctctgccaggctgtacctgggtcccgt

SEQ ID NO: 410766 - DNA, 122 bp, Homo sapiens
taggtaatggtggctcctcagagcacagagaggtgcagtggagtcccagagcccctgagccgagaatcaagcccagatctgcctggctctgaagcctgggctgcgccaagcctatcacatat

SEQ ID NO: 410767 - DNA, 122 bp, Homo sapiens
ctcttccgatagttctggcagagacggctgcggggagacacgggcggaggcgggtccgggcgggccccacgtcgcgcagcctcagcgtgttgcgcctcccgcggctgcggccagagacttcc

SEQ ID NO: 410768 - DNA, 122 bp, Homo sapiens
tcttctgagcgctttccgagtcatcggtcctcagagcagcccctgaggcccgcaaggaagcggggctccaagccctgccgtgctcccggctccccgaggctccccgaggccacccaacccct

SEQ ID NO: 410769 - DNA, 122 bp, Homo sapiens
gcctcctcgtatgggtccacgacgactgggtcccggtcaaggagaaacgggagcacagggcggggtctggggcccccccggggcccatcaaaggatacacttgaagttgtctgagtcgacta

SEQ ID NO: 410770 - DNA, 122 bp, Homo sapiens
ttcactaaagtaaaacaacaaagccaacacaacaaagaggccatcacggccgcgcagcgccgaaatccactcatgacaggcactacacgatccgcctgcagtctccgccactcgctggggcc

SEQ ID NO: 410771 - DNA, 122 bp, Homo sapiens
gtacagagacaaaaagcccactcagcacaaacagagttgtctgttgttagccttcaaaatcgtccgtggtgtcactcttagtgcaacagtttctagattggcaaacccaagtctggggcccc

SEQ ID NO: 410772 - DNA, 122 bp, Homo sapiens
gaaatccaggcttatacgcagactccgattcctagagaactaaatttggctttagtgtgacgggatttgattaagcacttagtatagtcttttgaacacggaaatcctgttgtacttaaagc

SEQ ID NO: 410773 - DNA, 122 bp, Homo sapiens
tctatttctttcactagaggttgctcactttcacttcttggttcctttcgcctcctctgacggctccgggagcgtctgtgcgcgcgcgtgtgtgcgtgcccgtgtgcccgcgcgcgaccggc

SEQ ID NO: 410774 - DNA, 122 bp, Homo sapiens
cgcggcattgtctgtgcggggacccgggacgggtcggggcatcacaggcgcgggaatccacgtgtggactctgcgttcgcgggcgcggtgacccccgcggggatttgttggtgccccgagac

SEQ ID NO: 410775 - DNA, 122 bp, Homo sapiens
ccagagtcagggcgcggggagctgagcgcaacgcccaggcacccactgccatccgaagagcgtctcgagctcacgggctcctggcagtctgttgagcgaatccctcatcccggcccctctga

SEQ ID NO: 410776 - DNA, 122 bp, Homo sapiens
ttaagatttctgatacgcacgtcccaggggagatggctgaagttggggccttttaaaatgcgaccggacaatgcttttgagactataacatagagaacttccctgggtgacagagagaccgg

SEQ ID NO: 410777 - DNA, 122 bp, Homo sapiens
acattggtaaaatatgttatgtgcattttgaaaacagaaaacaaattgcgttggcatgtacgtgggtgggaagaaaaagaaaattaacaggatttacacaattataatcaccagcagtgtga

SEQ ID NO: 410778 - DNA, 122 bp, Homo sapiens
agatgtgcagattcccgcagggcgtacctgagcccggagagggggcgtcgtagcgcacagcgcactcgtttccgcattcccaccccgcacggccagttgtcacagccatcctccagtaaaaa

SEQ ID NO: 410779 - DNA, 122 bp, Homo sapiens
gtagccagaaggccaaacgcttctccccctcctcctcccatgccccaaagaaaaccaaaccggcgccaattaaaatggaccaacatacctgacagtcgcccaccttcccaagcaccaccagg

SEQ ID NO: 410780 - DNA, 122 bp, Homo sapiens
ctcaaccccgggagtcccaagtacagagtaggggtccgcaggcctgtgctgtctctgaaccgctggggaggggcctgcgttgccgctcgggctcctgcagcaccggccatcgtcagccctcc

SEQ ID NO: 410781 - DNA, 122 bp, Homo sapiens
gtcgagttctcacgggtcagtgatgggcgctctggcccacgccaaccgggctgtgcctgccgggccactggctcctggtcctctccatctgtggcacatggcacgccccactggcctgtgtc

SEQ ID NO: 410782 - DNA, 122 bp, Homo sapiens
cctgctgtagcagccagaaagctacaactcccagccggctgagcgccaccagcgctttcgcgtccaagtccctttgctgagtgtgagggcctgcgcagtagaacccgcgggcccagagctcc

SEQ ID NO: 410783 - DNA, 122 bp, Homo sapiens
aagtgcttgggctctcagctagatttttgggttccacttaaattaggcaagtcactgactcgttcagtgcctcagttcctttgtaagaataatgatacctgtttcacaggatgggtaggagg

SEQ ID NO: 410784 - DNA, 122 bp, Homo sapiens
tcctttagtggtttggcgtggagggcgggggcagcgtcaatttaactccagtctaaaccacgaacaggtcacagactagccaagtggctgagacgagtgtggggtgcgtgactctgcctgcg

SEQ ID NO: 410785 - DNA, 122 bp, Homo sapiens
ccgcccctgcacggtgctcggccccctcgggctccgcgcgcggctacaacccggactgggcgcgcccccggcatcccgcatctctgcgcgcgtcccacatcccgcatccggcatcccagcgg

SEQ ID NO: 410786 - DNA, 122 bp, Homo sapiens
acacaaatactgtatcagtagaaataccaggtttaacaagcacaaagccaagaaaaccaacgatgccagatactgaatttctatagcactgacctttgaacaccctagcaggtgtaaactgc

SEQ ID NO: 410787 - DNA, 122 bp, Homo sapiens
cacccgaatattgcgcttttcggaccggcttaaaaaactgcgcaccacgagattatatcccgcacctggctcggagggtcctacgcccaaggagtctggctgattgctagcacaggagtctg

SEQ ID NO: 410788 - DNA, 122 bp, Homo sapiens
attcaattatttttaaaagaaaagattctcacctgccacgggagttgcgcctggcagtagcgggctggcaagctgggcactgccactcaccatctggtacttcatagagggccggcctcaga

SEQ ID NO: 410789 - DNA, 122 bp, Homo sapiens
cgggctctgagccctgacgtgcgtttttttctttcggaacaaaagatgaccacttctctgcggtgctgacttagagtcccagcgccgactgcctcacaaataatggcccccagcttctccgc

SEQ ID NO: 410790 - DNA, 122 bp, Homo sapiens
gaaggaacaaactctggacacaccatctttaagaactgtaacactcaccgcaggggtccgcggtttcattattgaagtcagccagaccaaaaacccataggaaggaaccaattccggacaca

SEQ ID NO: 410791 - DNA, 122 bp, Homo sapiens
ggctgggaaccagtgcatgtcctgcattaatggggggtgatggccccaaagtgatcctgccgcatcccctcaccacactcccacccaccctggagaaactgaggcttggagaggccagttac

SEQ ID NO: 410792 - DNA, 122 bp, Homo sapiens
ctaggcgacgggtggaagccggtaccgagaggaactacagcgtcgccgcctgggttgtgtcgccgcggtaggcgctgcgctctgagcgcagcgcaggccccgtaccgaccgcccgcccgccc

SEQ ID NO: 410793 - DNA, 122 bp, Homo sapiens
ttttggcgcggtctcctggctctgcgggcccagggctccggatgaggtctcccgccgtcccgacccccgcaaggggccagcttggtgtcgccttcgttcttctgccaccccattcggtaggg

SEQ ID NO: 410794 - DNA, 122 bp, Homo sapiens
cggcgcgcctccaggttccgcccaggcgtcgctgagtggcggcggcggggagaatgcgcgcggcgcagccaatccgggggcgttcctacaccccctgcccgcccccgaccttccagagcaga

SEQ ID NO: 410795 - DNA, 122 bp, Homo sapiens
aggggaaataataataatcagttttcatggagtaacatccctccacctcatggcctttagcgtatatggttacaatttttaatggcaagtatgcaggtataaaatgctcacttcttgaggcc

SEQ ID NO: 410796 - DNA, 122 bp, Homo sapiens
tgtgactaattttttcccttcctaagacctgcagaggaaaaaatgacctcaccagactttcgtataaatctcatagtatttatcagtggaaagataccagggagtccctatttatgaaactt

SEQ ID NO: 410797 - DNA, 122 bp, Homo sapiens
gacttccccatccaggcacagtgccggtccaatccccctttaatttcccatgactcctcgcgtcctgaagccccgcccccagttccccagccccgccccgaagtttgaggggtgtggacggt

SEQ ID NO: 410798 - DNA, 122 bp, Homo sapiens
ctgcagggttccgcggtgtctctgctcccgcccatggcctggccccgccgcccgcccgcccgcccacccgcccactggaatgtgtgtaaacgggagtgcggctcagaccacggactctgtct

SEQ ID NO: 410799 - DNA, 122 bp, Homo sapiens
aatccagttgcctctgtaatcctgcccacagctgttgagcagcaaatctcttcaacctttcggagatggactgcatttcctaccaagaccctggctgatagcagagtgaccccaggaaacac

SEQ ID NO: 410800 - DNA, 122 bp, Homo sapiens
aggggtagggacccttttagctgggtctggaggtatgaatagacgttcaccattcacagccgggcgcagtggctcacgcctgtaaccccagcactttgggaggctgaggcgggcggatcacc

SEQ ID NO: 410801 - DNA, 122 bp, Homo sapiens
cactccaccagcatgcaagctgcaagagggtctttgcctgtctatgactttaaacctctgcgcttagttagaacagcgcctggaacctaacaggtgctcaattagggcttgtcgaatgattg

SEQ ID NO: 410802 - DNA, 122 bp, Homo sapiens
gtatgtcagttcatatgatacaaaatagcaataatccaagtgctcagcgggggcgctgcccggtggctctggccccgccgggccgttggcccagcccgccggcccctgagctccggtagccc

SEQ ID NO: 410803 - DNA, 122 bp, Homo sapiens
gtgggaagccagatgtgtcacggacgtagggaggggaagatgaaggtcccagcaaaatcccgggaacatacctgtcaaagggtcagcgagaaaaccagtcccttggctggttgaaaggaaca

SEQ ID NO: 410804 - DNA, 122 bp, Homo sapiens
ttgcctttgacaaagaccagaagagctgaatttgtcctcaactgttttctcctaccttcccgtatttgctttaagtcctcttaccattagtactctgggaacctaggcagaccaaacgcccc

SEQ ID NO: 410805 - DNA, 122 bp, Homo sapiens
cccacttccggaggaaagggcgttgctgcacgccccgcgggttgccaaggtgattcaattcgcttcccacaaagaggtccggctcctccacttccgttaggctgagcaccggctgaatcgcg

SEQ ID NO: 410806 - DNA, 122 bp, Homo sapiens
gacgaggttctggaactctgctccttgatcgcatttctcacactaggcctggcttcctgccgcctttaaatgtgaatctgaacccgcctattccagatattagatctagcagcaaaccttct

SEQ ID NO: 410807 - DNA, 122 bp, Homo sapiens
gccctacttccgctttcaccttggagacggcgactctctgcgtactgattggaacatccgcgaaatgatacgcctctctgcaatgctattggtcgaaatgcatgtcaatctcccagcgtctt

SEQ ID NO: 410808 - DNA, 122 bp, Homo sapiens
ggactggggagcgttgccctgggaaacggaagtggaatcagaaacccagagttggccgggcgcggtggttcacgcctgtaatcccagcactttgggaggccaaggcgggcggatcacgaggt

SEQ ID NO: 410809 - DNA, 122 bp, Homo sapiens
caactgtcctcaggcctggggcagcgtagccctgacctacggcctgtgctttagaggccccgctctggcctccctcagcgtgtggccctccccatgggtaaggagtgcccagggtcaatggg

SEQ ID NO: 410810 - DNA, 122 bp, Homo sapiens
ttgtttgccttagattcatttggttttaactacttaaaactcttcttaaggttcaaagtacggagggagaagctcctcatgttccagccacttaccagctaggtcttacgaagtcgaaaaga

SEQ ID NO: 410811 - DNA, 122 bp, Homo sapiens
gggcggggaggtgaggctggagcccaggacgccctgggagagtgccctactctgccgcagcgccaagctcgcagagccgcgggtaaggggtacaaagtgcgcctggtgcggctggaaggatt

SEQ ID NO: 410812 - DNA, 122 bp, Homo sapiens
tgactggtatctctgtgcgcgccaccgtcctccctccaccgtcccagggctgggcaacttcgacaaagcctctgggcagctcgcccatgggaacctccccgcactgcggtgcgggggtgcac

SEQ ID NO: 410813 - DNA, 122 bp, Homo sapiens
gcacccggcctgcacgcgttctttgaaagcagtcgagggggcgctaggtgtgggcagggacgagctggcgcggcgtcgctgggtgcaccgcgaccacgggcagagccacgcggcgggaggac

SEQ ID NO: 410814 - DNA, 122 bp, Homo sapiens
gaaccggtgtggagaagtaacttcagctgctgagttggggccgccctggctgcgcggtggcggaggaggagaggagaagcgctctcgggacattgcggcggcgatccccgcagagggtgaag

SEQ ID NO: 410815 - DNA, 122 bp, Homo sapiens
atcatctcattggtgagctccttgaagcgcagccacagctcgctctcctccaggcccacgcgcagttcgcgctctgtggggtcgcccttctcgctgcccgcctgcagctcattctccacggc

SEQ ID NO: 410816 - DNA, 122 bp, Homo sapiens
gccaagaggaagagataaagttgaaaccgagcatacccgccctgcatgtcgcacactccacgtgcggctatgaaaagaagtggaggctcagagtggttatgtaacgtgcccaagatccctca

SEQ ID NO: 410817 - DNA, 122 bp, Homo sapiens
ggtaagccattggggatatggcacttatgaaagccaagtccaagtctttccggggggggacgtccaggtctaatgagtgttcagggtggacacagacaaacacacatatgtgaggtgccggt

SEQ ID NO: 410818 - DNA, 122 bp, Homo sapiens
cggagcttcctggaggctgggcctccctctcaggcttggccctggccagggacactgatccgtctctccccacgtgtagaagggccacaatccctagggcaggactgctgggaaaccccatc

SEQ ID NO: 410819 - DNA, 122 bp, Homo sapiens
ccatgggagacttgaccaatcgactaccgcatctgcagacgtgcgcggaaatggcacgcccgtttccgtgtgaacccgaaactgccacttgctggctgaggagagccgctgcggcgttccac

SEQ ID NO: 410820 - DNA, 122 bp, Homo sapiens
cgccactgaggccggttggaagattctagggtgccccttcccaggttccagcaggcactccgggatgttctagagtcaggccagggattcaacagcgaacctgaccgaaactcaaacctcag

SEQ ID NO: 410821 - DNA, 122 bp, Homo sapiens
tccgggacaagcaggagtggcaattcccaggcagtgtgggtaccaagccatcttgggggacggcccggtgggcatacgagaggacagcagcagcctggcaggggcaacgccctcctcatggt

SEQ ID NO: 410822 - DNA, 122 bp, Homo sapiens
ttacatattaaaggctatagagaacccagtgaccaaggcatgcaactgacattgttgctccgatttccccagtattatttcaccatgtaaacttttacttcctgtcataatgtaactagtgc

SEQ ID NO: 410823 - DNA, 122 bp, Homo sapiens
gctattcccagaagtgcagatcacttcaaaaatagatgcacgtcttagttcagtgattgacgtttttctaccaaggactgtgtgcacaagcatccctctagtgagatcttaagatcttggat

SEQ ID NO: 410824 - DNA, 122 bp, Homo sapiens
aactctgcctcccgggctcaagtgattctttcatctcagcttcttgagtagctgggactacgatgtgagccaccacacccagctactttttgtatttttttggcagagacaaggtttcgcca

SEQ ID NO: 410825 - DNA, 122 bp, Homo sapiens
cgcgggcgaagacaaagggaggaacagtttttatgaaaccagctctttccaccgaggcgacgtgctggaggtgccccggacccacctgacccactatggcatctacctaggagacaaccgtg

SEQ ID NO: 410826 - DNA, 122 bp, Homo sapiens
ttcctctgcacccagcgctgcacgggcatggggcgtgggtaatcagcctcccgaaagccacgcgagtcacggtcctgcctgcgaagaactcccagggcgaccttggggctgaggagtgggta

SEQ ID NO: 410827 - DNA, 122 bp, Homo sapiens
ggagctctgtttatcctgcttaaatgaattatggaatggaatttccccagagccatctcccgtcctcagtgggagggtgccaggccgggagagcagggcaagaatgaagatcctgctaagcg

SEQ ID NO: 410828 - DNA, 122 bp, Homo sapiens
ggtagcaggattctagtcactcgatttgcctgtcccctgacagaggagaccagaagtccccgctgagcagcccagacctttgctttcttctccttttacaaaaaaggtggaaaactcagggt

SEQ ID NO: 410829 - DNA, 122 bp, Homo sapiens
gattacaggcttgagccacggcgcccggccttataaacgcttataattttttaactctttcgattttattagacttttttttttaacttgaaacaacctttattttattttatttgagagtc

SEQ ID NO: 410830 - DNA, 122 bp, Homo sapiens
ggccacgcgctgggcttagatcattcctcagtgccggaggcgctcatgtaccctatgtaccgcttcactgaggggccccccttgcataaggacgacgtgaatggcatccggcacctctatgg

SEQ ID NO: 410831 - DNA, 122 bp, Homo sapiens
caggtgggggagaggggaggcagcgagcgagagggcgaggggagcgcgggcgctgagcagcgctcacttggagagcggcaagcaagctagacaagcctgattccatgtcacccgctgccacc

SEQ ID NO: 410832 - DNA, 122 bp, Homo sapiens
tgggttctgtgctctcttccccatcccgggtgtcctgtccattctcaagatggccacatgcgtgctggtggagtgtcccatgacagatgcaaaatgcctgaattttctgactcttcccgtca

SEQ ID NO: 410833 - DNA, 122 bp, Homo sapiens
gagcagcctctagaacgagctggaggattctgcctaccgatacagagccttcgagtcgtccggggccgccattacaatccacctccatccgcttggaaatggccttcgtcccggcctatgac

SEQ ID NO: 410834 - DNA, 122 bp, Homo sapiens
acaaccagtatggaggctcctactcgggcccggaccgcaggcccatccagggccagtacccgtatccctacagcagggagaggatgcagggcccggggcagatccagacacacggaatcccg

SEQ ID NO: 410835 - DNA, 122 bp, Homo sapiens
aaggttgcagggatttggatgctaacatatctcctagtttccagcgctcgccctgcagagcgtgccatctcggcagctgttgaaaggtcagttggaaaagcattcattcggggagcgacgag

SEQ ID NO: 410836 - DNA, 122 bp, Homo sapiens
gcagagcttttccgactgtgctctgtgggactctagagaccaagaaagtacttgaaaaaacgtttttaagccgaactagtacacagtcgaggagctcggcagggtcctgttttcgtggccag

SEQ ID NO: 410837 - DNA, 122 bp, Homo sapiens
cccaacccccacctccacacccctgccccaatgccagagcacctgatttaattgggatagcgtaaataaattagtatttttgaagcttctcaagttttttctatgctgctagggtttatatt

SEQ ID NO: 410838 - DNA, 122 bp, Homo sapiens
aggtcttgcagccgagtctgctcaccctgaacaagcccccgagtcccggtccttggagtacggtggcgacggtgtgtgtgtgtatatatagacatctgcactgccccctctctggaacccgc

SEQ ID NO: 410839 - DNA, 122 bp, Homo sapiens
tttttctgtgtatggactgtcacaaatcctctgcaccccaagaacaccccattggatttccgggctggctgcttgggctacacacctgggtcaggcctctcgcagggatgctcctgccactg

SEQ ID NO: 410840 - DNA, 122 bp, Homo sapiens
atctgaaaaaaataaatgcttctctaattactttatctagtgtgttgagggacccaatgccgccaccgtattcaataaggagctagaaggactcacagaacttagacaagctgttctattca

SEQ ID NO: 410841 - DNA, 122 bp, Homo sapiens
gtgggcaccgtcacagtgccatctcacaggcaaggaggccaggcccaggccctgaggatgcgccgctcaggtgggagcttccggggagctcgcgcgacagcctgggggagcgcggattcgtc

SEQ ID NO: 410842 - DNA, 122 bp, Homo sapiens
ttttcagaggtgattatggtcatgagggctctgccctcatcaacggattaatgtcattatcgcaggagtgtgttgctgataaaaaggaggaactcggcctcctttctcctcttgcacatgca

SEQ ID NO: 410843 - DNA, 122 bp, Homo sapiens
ccagggcgtcaatgcgggtttcgccgggagcagcagagcgcggagcggagactcctggggcgcagatcggggtagggctggaggtggagccgtccccggagccgcgcgcccgagaagggacc

SEQ ID NO: 410844 - DNA, 122 bp, Homo sapiens
gcggtgtcgctggttcagatctcgcagagctcagagtcctgcatgcctcagtcctcgcctcgctcctcctcgcggaggattctgggaggtgacgtcgcgggtctcggtcgcggggcccgttt

SEQ ID NO: 410845 - DNA, 122 bp, Homo sapiens
actcccagcaagctgtcctcgtcacaggtagggtttgtcacagtgccggggtgcaggtgccgtgggctggggaagagcacatgaggcagcgtcccggagaagccccgtggtcctgtccgggg

SEQ ID NO: 410846 - DNA, 122 bp, Homo sapiens
ctctgcaggtgccgctcttccccagaggacaccccttccctgccagtcaaccccaccagccgcaggcagacatttcccccgagaaagctctccaggatccctgctccccaggcctgtgtctg

SEQ ID NO: 410847 - DNA, 122 bp, Homo sapiens
gtctagtaggagaagctgcttgaggaaactgtgatctccacgcagtcaggggctacgcaccggcgaaggagaagagctccgtggctggaaggaggtttccgatacccactgccaaaggaaaa

SEQ ID NO: 410848 - DNA, 122 bp, Homo sapiens
ccccctgcaggaatcccttggtttccacagccaagccataaataggtcgcgccagatgggcggcctccacattgggactatcccttagagtctttgtctgctcttgggtgccagacacaggc

SEQ ID NO: 410849 - DNA, 122 bp, Homo sapiens
ataacaaacaattacaatagccactcttctgtttgaattgttggaattaggcatgctgggcggagcacacagtggtggagtccagggtggaggctgatggcctgatggaaaccccactcctg

SEQ ID NO: 410850 - DNA, 122 bp, Homo sapiens
tttgaagtgaggtgtagttggtcacccgggctgagcggaacgcggggccggggtgggaggcgcgcctggagggagggtcgtgcgtggacggagagcggcccgggtctcacgcgcccgggaga

SEQ ID NO: 410851 - DNA, 122 bp, Homo sapiens
aggctctattgccactgcacccgggctcctaactgtttttcaaacttatattgaactactcggttcaccttctggggtggctgtctttgatgatactgtctctatggcggcaggtatcataa

SEQ ID NO: 410852 - DNA, 122 bp, Homo sapiens
ctcattctccaagtaaaaaaagccagatttgtggctcacttcgtggggaaatgtgtccagcgcaccaacgcaggcgagggactgggggaggagggaagtgccctcctgcagcacgcgaggtt

SEQ ID NO: 410853 - DNA, 122 bp, Homo sapiens
ggggaacccgtccccccggggggcctggggaccagcaagacgaggcgggtaaatgggcttcgcgggcggccgcaggcaaagccagggaggatctcacatcctcgtcagctcggcagcagcaa

SEQ ID NO: 410854 - DNA, 122 bp, Homo sapiens
gccgggcgcgtccttgcagggcctgggctgtctccctcccactctcagaaataaggcacacgcctgggcattcgtgggccaacgggccttggctaaaccgtccccacatttgtcaggtaggc

SEQ ID NO: 410855 - DNA, 122 bp, Homo sapiens
gtgtccacatctccttaatgttctggaagcttcgcccgctctccgcagaccagtgcagggcggtacatattgattggtgcgggcgtgcttgttctattgggaaggagaaagcaagccttctt

SEQ ID NO: 410856 - DNA, 122 bp, Homo sapiens
agagaggcggttccagggggctgggggcctgccagggacactaatggaacacagctggaccggcccgccagggaggaggaggaggagggcctagagggggctccagcggcaccagaggcggc

SEQ ID NO: 410857 - DNA, 122 bp, Homo sapiens
aaaaataagtttaatgttagaaccctattcgttatagcataacacgctagacataagctgcgggagtgtgaacgaacaaagtatctgtttgaattcacaggattctagactacatcaggcag

SEQ ID NO: 410858 - DNA, 122 bp, Homo sapiens
gggccgggccggggccggggcctgggacgtgggtggagccggggcgggggcggggcccttcgcggtgccgtgaacgctgaggccacctcgctgcgcaggcgcggtcgtgagctcctcagacg

SEQ ID NO: 410859 - DNA, 122 bp, Homo sapiens
aaagcctcctcagttgtcggccctggaaggtgcccagcggcggcagcgccagacgcgccccgttagctcagcgtcgctgagcatccgcagccgccaccaggccccgcccagcggccgcagcc

SEQ ID NO: 410860 - DNA, 122 bp, Homo sapiens
cgcctagcccctactccgcgtcctcccgggcaccttttttggtgggacatcccaagtctccgctggagaggctgtggatggatgtacagcaaaggaaagatctgcagcatgagagactgagg

SEQ ID NO: 410861 - DNA, 122 bp, Homo sapiens
caccccagcctcctgcatcagagcaaagcgatagacagaatgattgtgagtcgatcctggcgtgggcgttctgtggatgctgggcctccttctttcagtgccccctgaagtctgggtaacgc

SEQ ID NO: 410862 - DNA, 122 bp, Homo sapiens
ccggggcgccggtgtcctgccgcctccttctccttgctctcacctgcgcctattagtccacgcgccttcaaggccaggggctacagcccagacagagaggggacagcagagggagagagagc

SEQ ID NO: 410863 - DNA, 122 bp, Homo sapiens
actcctgggtccccctccactgcatgcgagccccccgttccaaggcaggagccagggtcacgaaaatgcatgcttcttcatcaatccgaggtctcaaacggctcccccagccccactgcctg

SEQ ID NO: 410864 - DNA, 122 bp, Homo sapiens
aagggcagggtaggccacttggcctatttactttcaaaacaatttgcatttagagtgtttcgcatcagaataacatgagtaagatgaactggaacacaaaattttcagctctttggtcaaaa

SEQ ID NO: 410865 - DNA, 122 bp, Homo sapiens
ggccgggggcggcggcaggacctgagcagccaggagggctgggggacagtcaggtcaggccggtggctacccggccgctggagagggccggatggcacgtggcaccaagcaaaaggaggctg

SEQ ID NO: 410866 - DNA, 122 bp, Homo sapiens
tctggttcacggggaagagcgctgtttaggagacggacgtgctccacgcagacatgcgtccggctctggttcacggggaagagcgctgtttaggagacggacgtgctccacgcagacacgcg

SEQ ID NO: 410867 - DNA, 122 bp, Homo sapiens
aaccggcggcccgtgggggtgcagggtaactctccttccctgcctcttaaagatgaggggcgctcactgtgtctgttatggcaccgtggtctctggcgcggcggaggaaggtttccggcccc

SEQ ID NO: 410868 - DNA, 122 bp, Homo sapiens
ccgcccgccggcgatccccgtccggctccgctgttcactagagcccccggctcgccccgccgcttctctaggcgccaggccgcgcctccggacgcccagccacgccccctacgctcactgtc

SEQ ID NO: 410869 - DNA, 122 bp, Homo sapiens
tggcctaatgaagggaggatgaaatgaactgtgcaggctgctagctctactacctccaaccgcacagagcaaaattgctcttatgtagtagtcattcaataaatgtatttgtgaattttggt

SEQ ID NO: 410870 - DNA, 122 bp, Homo sapiens
aggtgacatggttttcccaaggttacacagttaatgaaggacatagcaggaattccaacacggattccactcgaggatccggtttttcccgcattgcccatctccatctggttgagggtcac

SEQ ID NO: 410871 - DNA, 122 bp, Homo sapiens
tactttgtcgcttgcacccaggcctccccaagcggccgggctcgggttctgcctctcctccgaggccagcctctatctgagaagacttgggatgctcccgaaagcggaatggggagcggcgg

SEQ ID NO: 410872 - DNA, 122 bp, Homo sapiens
cagaatcccggatctccgagtcagctagctcactagggtcggtgcacacccgcgcccactcggggtggcttcattgccagagccactgactcccaaaacaaaacgaatcttctacaattagc

SEQ ID NO: 410873 - DNA, 122 bp, Homo sapiens
cctgcttggtttgctgcagggcggcctccagctcagacagcttggcgctggcatccttaacggccaactccccgcgctgctccgcatctgcgatggcggcctccagggaagccctctggcct

SEQ ID NO: 410874 - DNA, 122 bp, Homo sapiens
gatgatcaaatgcggattcctgtctctgtcttaaggcaccaggatcctgggacctcccagcgccctgcagacgtgcacattcccagtccgtgccccagccgtcctgggtccccttacaagcc

SEQ ID NO: 410875 - DNA, 122 bp, Homo sapiens
ccccaaccacaactcgggccagacttcgccccactcaccaggaacccagcgccgcgagcccgctcaatccgcgcgactgcggctgcccctccggttaacaacactccccaccccctgcgaac

SEQ ID NO: 410876 - DNA, 122 bp, Homo sapiens
agctcagccttgcaagaccccaggcgcccgcgctgcacctgcgactgtcgccgccgccgtcgcagtcggaccaactgctggcagaatcttcgtccgcacggccccagctggagttgcacttg

SEQ ID NO: 410877 - DNA, 122 bp, Homo sapiens
cagggcgccaaaaggagaccaagaatggaaactgcgcatgcgcacaaccaacagcgctcccgcccctttttatttgaattcggagaaccagaggcgcctgcagattctggaggggtctcgcc

SEQ ID NO: 410878 - DNA, 122 bp, Homo sapiens
atgtcctaaggccggggggctaaggggggggtcccaaaagtgcgtctccgagctccggggcgcctgcacacccaggcgccgctcctggtgacccccagtgcgcccctactccctgcaggggg

SEQ ID NO: 410879 - DNA, 122 bp, Homo sapiens
tgtaccttccccaaggttatttatccaggagaagacagagccagaagctgagaactgcctcgtgttttataccaaacaaggccccttcagctgaagacttttccttgcggtcttgggaaggg

SEQ ID NO: 410880 - DNA, 122 bp, Homo sapiens
caaacccattaggttctcttccgccctagccggaagtcacggtacccctaacaaagatggcggcaaattgaatttgcaaagctttctagtttctccgaggaggtaaagagaaccaagaagcc

SEQ ID NO: 410881 - DNA, 122 bp, Homo sapiens
cttcacagctggaacaacaagttgtgcagtgaatcccagtgatttaaccaagtagcaaaccgggtcattggcttcattggcttcattggaatctcggttgccaggcgaactaggaatcacta

SEQ ID NO: 410882 - DNA, 122 bp, Homo sapiens
gcgcaggcgcgacgtagccggctggtaactgaagcgccttgactttttgggcgtggctcccggagggcggggtggtgggggaagggaaggatggagctggagcatgcgcagtgcgcacagcg

SEQ ID NO: 410883 - DNA, 122 bp, Homo sapiens
ggtcgtcgatggcctggccctgctccagccgctgctccatctcgatgagcagcttcactccgtccaccaccatctgcaccagctccacctctgagaagcccaggcggtcagcgttggagacg

SEQ ID NO: 410884 - DNA, 122 bp, Homo sapiens
tgcttgacctagcttccaagccaaacttactttccactgtgctgcttctagtcctgctaccggtgtcctccctgagccgtcgggttaaaagctttccttcctggccgggtgcggtgactcac

SEQ ID NO: 410885 - DNA, 122 bp, Homo sapiens
aggaccagaacctcggcgatcagggaccaggacgtggcagagtgcagcgggtagcttcgacggcacaaggccatggcctagcaataactaaaatgtgatgaacgctaacagtgtgctaaata

SEQ ID NO: 410886 - DNA, 122 bp, Homo sapiens
gcaggccaggccgtgcatgggcctgtgaagctaggggggacaccccctgcagatggaaaacgctttggttgcctgtgtgggaagcggtttgcagtgaagccaaagcgtgaccggcacatcat

SEQ ID NO: 410887 - DNA, 122 bp, Homo sapiens
tgcccagcctggctgagcgcggtgcgtgtggctctctcacttccgaccgaccctcccctccggcccgcagccctgcccaaacggaagtgcgccctctacccgggtcccccaccgccgcgagg

SEQ ID NO: 410888 - DNA, 122 bp, Homo sapiens
aggcaaagcggttccagcagagccccgctcactactcatgtatgctcatcagtgctcgtgcggtccctcagggacacactcctacgtgtcatcacggagggttccgtctcatgatggcacca

SEQ ID NO: 410889 - DNA, 122 bp, Homo sapiens
cttccccacgccttagtaactgcgacgcgacggcagacagtgtaggcggcaaccgacggccgggacgtctaacctcaagtcccagcaagccccgcggccacgtcctctgactacctcgcgcc

SEQ ID NO: 410890 - DNA, 122 bp, Homo sapiens
ccttctgccggcttccaagggctccagccatagcagacaaggccatgcactggaccatctcggcgccgccctgctgctgagtgaggacgccagaggtgtccatccgctgcacagacttcggg

SEQ ID NO: 410891 - DNA, 122 bp, Homo sapiens
caagatgttgaaaccccgtctctactaaaaatacataaatttgccaggcttggtggcgggcgcctgtaatcccagctactcggaaggctgaggcatagaattgcttgaactcggggggcgga

SEQ ID NO: 410892 - DNA, 122 bp, Homo sapiens
gggctcgggtggcatgtgcggggacataccacttaatgtacatacaagcctgtcgtgtggcgcagttgatctcaacttttaaataaagaagatgagcatcgccccctccatcatccctgccc

SEQ ID NO: 410893 - DNA, 122 bp, Homo sapiens
agcgtctactgctaagatacctctgactctcttgtcccctatctttttctgtgcctcttgcgaaagcagctgggcttaggctgcagcacctaagtggcattgagattggctccctttttcac

SEQ ID NO: 410894 - DNA, 122 bp, Homo sapiens
gcacccgggccagtggctgcggagggtgtactaggtcccccagcagtgccggcccactggcgctgcactggatttctcactgggccttagctgtcttcccatggggcagggctggggacctg

SEQ ID NO: 410895 - DNA, 122 bp, Homo sapiens
aaaaatctgggattggtgttgggagagataatggggtagataatgaggaatttctgccctcggtgtccattggcatactctgtactgtagttacccagagttgtttcctgccaggcactcag

SEQ ID NO: 410896 - DNA, 122 bp, Homo sapiens
tcctcaggcttcagggatgacttcttagggggcaggggaggtagtcgcccaggcgaccggcgaacaggcccccccatgggcagccgcttcagagatggccctcccctccgtggatccaacat

SEQ ID NO: 410897 - DNA, 122 bp, Homo sapiens
cgtcccgcggacgccctccaagccggccacgtggcctccgtcgccccgcctctctgcgctcgccccaagtgccgcacttggcccacggcccctaagcccgcgctggcgcacttgtgcctcag

SEQ ID NO: 410898 - DNA, 122 bp, Homo sapiens
gtcacacaccatcacggcagtacacactcacacactctccagatgtctcacgccgtctcccggcagtacacactcacacagcctccaggtgtcacacgccatttcccagtgtcaccgcgaac

SEQ ID NO: 410899 - DNA, 122 bp, Homo sapiens
tacatttctagaacccagatcaccttgctaaaatgtaaagtttacctcactccatgcttccgcaaatctgcattgttttccacactgagtttagaataaaacacaaattcctgagcctgggc

SEQ ID NO: 410900 - DNA, 122 bp, Homo sapiens
acatagaactcagcaatagccttgaagagtttccctttcagcacataattatccctataacgaaacacaccctctgtgacaatatttgatatcaagtcaaattacagaatacatctctacat

SEQ ID NO: 410901 - DNA, 122 bp, Homo sapiens
cggacagcgaggtatatggctctgtgccccacggggttggcactgagtagcagctgcccacgacccccagggctggggcagcccgcggccctgccgggtgtggagagacagagccaagcagg

SEQ ID NO: 410902 - DNA, 122 bp, Homo sapiens
tcatctctcagaccccaccctcttcctttgatcctcccactgaatgctgagctggaaagacgaagcaaagctgttcagatgtaattattttaattcagccagatgctgggaattagtctctt

SEQ ID NO: 410903 - DNA, 122 bp, Homo sapiens
gtgtgatgtattttgtaaaaatgggacaatttgcagtcatgagattcagacgctgttttgcgaatgggagacccagcatcaaccccggggcctaagtggaatcactgctatcttcctcagaa

SEQ ID NO: 410904 - DNA, 122 bp, Homo sapiens
acttgcttctgctgtctctcattaagggaacagttctcattttaggtcgcagcttaccttcggcatccatagacctgtcaattagccctctccctgtattctgattcatttccagcagcaga

SEQ ID NO: 410905 - DNA, 122 bp, Homo sapiens
ataaaagggtaactttcaatttctggctgatttttatatttcagattccacccatcaacacggaggccaaggaaaatttaatgagccaaataacttatggctcttcaaattacaagatctgt

SEQ ID NO: 410906 - DNA, 122 bp, Homo sapiens
acgctggtgtcgaactcctgggctaaagcaatccgcatcatgatgtttgtaagatccattcgtgcagttatttccttttgcactgctgagcactgcatgcctcgctcattcattcttctgtg

SEQ ID NO: 410907 - DNA, 122 bp, Homo sapiens
ctcatctggaatggaaatctatcgtctctcgcccttgcacgggtcacgattatacaccttcgtgacctttagcgggcttacatatgtatctttttgtgttccgcaggctatgaccacctgct

SEQ ID NO: 410908 - DNA, 122 bp, Homo sapiens
ttattatcactataatattccactgatgataagattcactattgctataccacagcttttcgggacaggggaaaacacactacattcctctgagctcaagatttatatacccaagtgcctac

SEQ ID NO: 410909 - DNA, 122 bp, Homo sapiens
gagtgcaaaataggccctgattgagaaccactgttgtagataaataaattcccctttccccgttccctactgagtctcagcagcagctgctgtacggagacctatctgtggtctccatgttt

SEQ ID NO: 410910 - DNA, 122 bp, Homo sapiens
ccgccagctaccagcattaattctgggccttgttattaacataacgtttctgttcagcatcgccacaaccaccgataagataggaatgagcacaaaactagggcactggaaaccaggggagg

SEQ ID NO: 410911 - DNA, 122 bp, Homo sapiens
gctctgcctctctcaactgctggaacacagtgaccccaggtggccagcacctccccagcccgtggccactgtgaggacagcagctcagacagaagcatttccaccctcacagaggctgtgct

SEQ ID NO: 410912 - DNA, 122 bp, Homo sapiens
tcagtgctattgtccctgggcctggccttgagcgggtccactggggaaggccgtgtgcgccggctccgcggaagatgccggaccaagccctacagcagatgctggacaggtacgggcagctg

SEQ ID NO: 410913 - DNA, 122 bp, Homo sapiens
tgtaagaaaatgaaaagatgggggttcatgattgcaaactctccctgggcaaaactcagccgtctgtgaatttgttgtgttgccttggcaaagccctgtcctgtacacagagcctccatctc

SEQ ID NO: 410914 - DNA, 122 bp, Homo sapiens
ttccaggccctggtgaagtacggaatgccggaagggccgggctcaaagctccgcctctggcgcgaccgacgactggagcgcagggcaggggtagaggctcgtagatggaactggtagtcagc

SEQ ID NO: 410915 - DNA, 122 bp, Homo sapiens
gaggacaggctcctgacgggcgggggatgctgcccctgaaaagcctggcagctgcggggacgcctctgcgtgcggaagtctccactcagaagcaactttggggtcacttccccgactcgcag

SEQ ID NO: 410916 - DNA, 122 bp, Homo sapiens
accggctctgacctcagccctctccaaggtacctgaaaagatggttgaccatagaacatgcgctatctctgtgtcgtatgtaatatggtccacatcttctcaatatcaaattcagtcataga

SEQ ID NO: 410917 - DNA, 122 bp, Homo sapiens
ggaaggccagctggaggctgagaggtacaatgactaaaatgcatggtaaatacattatcccggaaatgcagcctgaacagctgaccaaaaatggaaagaaggtggtgcaaaacaaaccaaaa

SEQ ID NO: 410918 - DNA, 122 bp, Homo sapiens
gccactctcccttgttgcccagacacccctggccggccgggtggaaacacggcaaccgcgcggagagcctacctgatgaagctcagatggacgcccagggagcggtgcaccccggaacagtc

SEQ ID NO: 410919 - DNA, 122 bp, Homo sapiens
cgcgccgcttcccatggagggcgtcggcgacaggaaggacctcccctgctccttaacaaacgttagggtcgcagtttcctaagagacgcgactgggattgggggagggggtccaggcagaga

SEQ ID NO: 410920 - DNA, 122 bp, Homo sapiens
attcaggatcccatccccacccgaggcaggacacccagtgcacgccccaactccgggacgcgggctctgaccctggaacttccgagattcccgcgacgccccctgtctctgggtccagaact

SEQ ID NO: 410921 - DNA, 122 bp, Homo sapiens
agtgtgaaaagaagggctactaataatttcgctgggcagtggcataaaataggcttgttccgggtaaactgatccatacggttttccagtgaataagccaaattcagttttgggcgctagta

SEQ ID NO: 410922 - DNA, 122 bp, Homo sapiens
ttttggccttgcccccggatttgttcactgggtctttgtttttcttggctgactttccagcgtccttcttctcgtcgtccttgggcggcattgcgaagctcggagagtagcagcagacaccg

SEQ ID NO: 410923 - DNA, 122 bp, Homo sapiens
ccacaacgtgcaagggttccacccctaccgacgctagcccgcggcgccgcgacgtctgcacggcccagacccaggattccaaacttgtgaactcgtgacaatcacaaacttggcggcaaagt

SEQ ID NO: 410924 - DNA, 122 bp, Homo sapiens
cctgcgtgagtgtgcagcggccccgctcaaggacgggacggaggatgaggtataagcagtcgtggatgttgtagagggggctcacagttttaagtagggctgccctgggtagtgactggaag

SEQ ID NO: 410925 - DNA, 122 bp, Homo sapiens
gaaaagcaaaaacagaatgacctcaacattttgcaacacatattggaagaaaccagcctccgcagaaatcaactgatggaagctggagtaaacatggactttttacaaattgcaaaagtaat

SEQ ID NO: 410926 - DNA, 122 bp, Homo sapiens
cacagccttcgccggcagggacgcgcgggacaaccgcgcaggcggctctgcaggggtgggcgcgccatcacccctctcggtccctgcctgcttggcgctttccgagccccagccgcgctcag

SEQ ID NO: 410927 - DNA, 122 bp, Homo sapiens
gcttgggcctgtccccgcttgaggaggagcgttcctggcagggcggagtccccggagtgacgcagaggaggtgaaactctccagcccagatctagttcgggcttcagaaagtcggatggggc

SEQ ID NO: 410928 - DNA, 122 bp, Homo sapiens
gggccggagcgagaagatggcgaagacgtacgattatctcttcaagctcctgctgatcggcgactcgggggtaggcaagacctgcctcctgttccgcttctcagaggacgccttcaacacca

SEQ ID NO: 410929 - DNA, 122 bp, Homo sapiens
ctcattaagagaaataccaagtggtcaccacagtcacatacttcataacccatgcctcatcggtgctgggacgggagagggaagcgccgatctaaatgacatggggtccaaatcccaaataa

SEQ ID NO: 410930 - DNA, 122 bp, Homo sapiens
agtgacacctacagacaggtccgtttggtttttcaggtttacgcacagcccctttgatgacggtgacatacagtgtgacacggctccttggagggggggaaatggttctcatatgcagaaag

SEQ ID NO: 410931 - DNA, 122 bp, Homo sapiens
tcgagttcatggtctgtctgcacacgtgaggccacctgccaggccacatcccagcacaggcgtcatccagtgatttcctcatcggccagagtctgcgtctgcagctttgtgagccacgcggc

SEQ ID NO: 410932 - DNA, 122 bp, Homo sapiens
tccttgtgtccccagcagccgggaaggtgcctgttcccacggcagctgcagagaagactgcgggcaacaggcatctcccctctgcctttcacgagaaggaccacaggagcagggtgctgatg

SEQ ID NO: 410933 - DNA, 122 bp, Homo sapiens
aaacaaacagaaggacttgggattccggagcagtcgcccctatcgctgctcctgcagttgcggacgccaccgaccccgccgccggaggactgggcactgaaaggcctctaggcctaggcgcg

SEQ ID NO: 410934 - DNA, 122 bp, Homo sapiens
gggaccctaagaagccagacagattgtatgtctcctccacagggtaaaagttctcagcaacggggttcttctgaaacaagaaagcaccacaccaaaaagggtcagctttaaactctgaccag

SEQ ID NO: 410935 - DNA, 122 bp, Homo sapiens
tagactccgccgttgccgtggcgcgatttaggatttatagatcccggcaaagccctggtgcgatgtaggatttttagaaccccagcatcgctctggtgcgacttaaaggataggccccagca

SEQ ID NO: 410936 - DNA, 122 bp, Homo sapiens
gggaaacagacatgaagatggaaggaccaccataggtaagacacctcacgaaaatgttgacgctgctttctggactctggcttatgcatggaaaatatgcaagaacaatgaagttcgttgcc

SEQ ID NO: 410937 - DNA, 122 bp, Homo sapiens
gtgcgcacatccgcactcccgcctccggctcccgcacagacgctgtgcacgcagctctctcgcgtgtcttctcgtttgctctaagaccacccttccaggtggggattgcggcatccactggg

SEQ ID NO: 410938 - DNA, 122 bp, Homo sapiens
cgggcacggggcgggcccttaacaggcaccgctgcggggactggagtcggcggagaaaaccggggtccccagcgctgggggtgggtgagggtcgctcattttcccgggacggtgacgggtac

SEQ ID NO: 410939 - DNA, 122 bp, Homo sapiens
aggatcgggggcggagaccccaatgctcctgacagcaccgagccgggcctcgcgcatttccgtggttcccgcatcccagctgcggggagccatagtttccggtctgtgctctgtgagggcag

SEQ ID NO: 410940 - DNA, 122 bp, Homo sapiens
agcttctgccactgtcgcccttgggagccgtacgtggcatacaaagaaatcccaggactccgcctgcccacctggccaccctctgtttacaccttccgcgtaaacgcccactgtttacatcc

SEQ ID NO: 410941 - DNA, 122 bp, Homo sapiens
ggtgagctgcagggtgaacgcggggagctacggggccggctggcgcggctggagctggagcgggcacagctggagatgcagagccagcagctgcgcgagtccaaccagcagctggacctgag

SEQ ID NO: 410942 - DNA, 122 bp, Homo sapiens
catgaccatttcccatggttggtctgattgggaaatcaccgggttaactcaaaaatgttgcgctagagtcctggaaatctgttacccgtgcttaccttgttgcataatgatttcacatcctt

SEQ ID NO: 410943 - DNA, 122 bp, Homo sapiens
tgcggagctggctcccgtgcacggggctgtagcgcccaggactgcccaggcctggctttgcggggttgcttccagccacgctgtttctccccggactgtagctgtgagggccactgagatct

SEQ ID NO: 410944 - DNA, 122 bp, Homo sapiens
ctacgtgaaggtgcagggcctggtcatatcacagatgctgcgcaagagcgtggagactcgcgactggctcagcactctggagccccggaatgtgcgggccgtcatgaagcgggtggtggagg

SEQ ID NO: 410945 - DNA, 122 bp, Homo sapiens
gggcggccgggcggggcagagcctgggcggggcgcggcaccgcagctggatggctggggccgcccggatcgccgccgccgccgccgcacggtgagtgccagcaggaccctcggggcccgcgc

SEQ ID NO: 410946 - DNA, 122 bp, Homo sapiens
gtctcccgagttcccagggcaggaagaggaggacgaggatgaggatgatgaggaggaagacgaggacgaatgagagtcatctccacaagactgtgatttgcaggatgtgtgtgacaaggaga

SEQ ID NO: 410947 - DNA, 122 bp, Homo sapiens
acagtgacgccgtgagtctgaggatgaagacgcgggcgcggtgggtggagcaggaggggccggagtattgggacctacagacactgggcgccaaggcccaggcacagactgaccgagtgaac

SEQ ID NO: 410948 - DNA, 122 bp, Homo sapiens
ccagaaaattgtctcggctttagtctgggacatctggtcaacaacctgccctgcccaggccgccagcgcagggccttgcccgcggcgcgttgatggaggccgcagctggtgccctctgcagc

SEQ ID NO: 410949 - DNA, 122 bp, Homo sapiens
aggcaagtgtggattggtcaaaagccaaactgtcctgacccttgcctgtcccccttgctgcgacccagaggcttactttctctctccagttactggtaggaggcatctgagtgtccagctaa

SEQ ID NO: 410950 - DNA, 122 bp, Homo sapiens
aaactggtggactgtcagctttatttagctcacctagtgttttcaagaaaattgagccaccgtctaagaaatcaagaggtttcacattaaaattagaatttctggcctctctcgatcggtca

SEQ ID NO: 410951 - DNA, 122 bp, Homo sapiens
ctttctgtgtgtagtatgcagcttcacagaccacaggtgatttttttctttcttgcatatcgtaatagaggagtggcctaattgttcaccattagcagccccttaaggcatgtaacagagat

SEQ ID NO: 410952 - DNA, 122 bp, Homo sapiens
caggagagtggcaaccactgggcgcaagtgtccatccatgcagccaaactcagtgccaaccgagagggtcttcttgatgaaaaggctgtgtcttaagacaaattgtgaatgaaactaagaat

SEQ ID NO: 410953 - DNA, 122 bp, Homo sapiens
agtggaaaattgagaacctgctacagtgtggtaatgatgaaagtattagcagtggaggtacggtttattttaagaaacttggcagtgaaggcaaggggagaagtaggccatgtctaaagaag

SEQ ID NO: 410954 - DNA, 122 bp, Homo sapiens
agctgctgtcccgggtggtaagcccctcactgcccggggctggtggggcggccagctgctcggagtgtggggcccgccaaggccatgtccacccagaacttgctctggcctaccgcgagcag

SEQ ID NO: 410955 - DNA, 122 bp, Homo sapiens
cacaatccaacatggcagcgggggcgggcgagaccacaggacggagggcgcgggggagcgcgccggaaacgcgcggctgcggcccgggagaaacccccccactcggcggcgggcctcgcggc

SEQ ID NO: 410956 - DNA, 122 bp, Homo sapiens
atgggccagcgaggggaggttctgcctcccccactcgccgcacctctaacagaccgggagcgggcagagactttgaattaaatcatatctaaaactggaaaaatccgtatatgtgctggacc

SEQ ID NO: 410957 - DNA, 122 bp, Homo sapiens
ctggacaggaagagtggcccctgtgcagagcagtgcctctggggttcagagaacatgtggcgacagtgccaaacactacctgggccaaggaagggctccaggcctagaaggtctctggtgag

SEQ ID NO: 410958 - DNA, 122 bp, Homo sapiens
aggggtggttttctgagctaacttgtcacctttggctgcgagaacgtgagaaagactcagcgaactgacatttcttgctcatcatatggccacattcagttataagtagtgcagagtagtga

SEQ ID NO: 410959 - DNA, 122 bp, Homo sapiens
cactgtcagctcccccaggagcggctcctcagggggctccggggcctcagtgctgagttccgtggggctgggggtctcttcctctgcagctgagaaaaggagatatagagaggatgccaggt

SEQ ID NO: 410960 - DNA, 122 bp, Homo sapiens
gaccttcgcggtgagtgttccagctcttgatgccacgcgtctggagttgcttgttcttcacggtgggttcgtggtctcgctggcttcaggaatgaagctgcagactttcgcgcacgtgagtg

SEQ ID NO: 410961 - DNA, 122 bp, Homo sapiens
agcttaataattacagattcatattcctggtttgatcccaaaagctaatgtgttcctcatcgtgcagctggaatctacttcctagattaagccggagccttcctgcagagacagtgggcaaa

SEQ ID NO: 410962 - DNA, 122 bp, Homo sapiens
ttccatctggaattttatttgatgattagtctagcatcgtaatggtgtccttcgtgttgacgtgaaaacccagtcttccttcagttcatttcccgtttattagggatgcaaaactccagcca

SEQ ID NO: 410963 - DNA, 122 bp, Homo sapiens
gcccagggactccggggtgggagaagtccagcttcttcttagctgaggacatttgagtctcgtcacagcccccaaaagaatactcatttttgtagctggagggcctggcctctgtctatctt

SEQ ID NO: 410964 - DNA, 122 bp, Homo sapiens
tacaaaagtgcttctaaagtactactgaaagctccgtgggagtgcccgctggcgtgggcgcggtggaagggaggaagaacgtgtacgccccaggcctccgtaaccatggctgcgaggggcgg

SEQ ID NO: 410965 - DNA, 122 bp, Homo sapiens
ccgtctatgggatacctgggaaagccaggggttgggggccaagactgggtgggcggggtccggctgtgaggcagggaacggcggggggaagctgggggagctgtcctgcgtctttgcgctgc

SEQ ID NO: 410966 - DNA, 122 bp, Homo sapiens
tgagtactgcagagccgctggccagctgcctgcctgggtcacacggctgcctctgatggccggaacctagcagaaggggggctttcggagcccctttccacaggcagtcccggccggtgggg

SEQ ID NO: 410967 - DNA, 122 bp, Homo sapiens
aaatgccgccggaagtcagaggtttgccctgttcctctgtagacccaggcagcttccggccgtcagattagtcgtcagtgcgcagacaccacccttcgtggacacgccctctaggcgtaagg

SEQ ID NO: 410968 - DNA, 122 bp, Homo sapiens
caggggcccaggtgtgtcctccgtgtgcgcctggtggagccgggcctgggcccttctgcccgcagtggtctaagcagacggagagaatggtcccatgtgggcacaccctgtggcgcggcctc

SEQ ID NO: 410969 - DNA, 122 bp, Homo sapiens
caaaggcgggaggagtgtaacggcattcagggaggatcgtttttgttaatttcagcaatccgaatgtaaaaaatgacagcgccacgcaagttgacggaggcttttgattgaattgactgatt

SEQ ID NO: 410970 - DNA, 122 bp, Homo sapiens
catttatctcactgcctccaaaggtctagttactgaaatgatatatcttttgatataacacgtggaatcctcaaagtaagcagcagtttgaaatacttgtttttgtgagggtcagatgacca

SEQ ID NO: 410971 - DNA, 122 bp, Homo sapiens
tcagccggacgactctgggggcgtaggccgacaccgccctccctccagccaatctaatagcgctctcatgggcgcattcctgatgacgtttaggggtagggttagatgcccgtttccgcttt

SEQ ID NO: 410972 - DNA, 122 bp, Homo sapiens
gggcccggacccctggggtagctagtctgccacgaaccagccgcgcgcttctgcccttgtcggtttaggaaactgggaagttccctggtcctgctccccagcccgcagaggggacactgagg

SEQ ID NO: 410973 - DNA, 122 bp, Homo sapiens
gcttagcgcccttctcaacaactgctgtcatcagggagagcgagcagagtgcgtgcactccgggcggcgaagccccagcagaggcctgcctggctgtgctctgggtgccactcattcatgag

SEQ ID NO: 410974 - DNA, 122 bp, Homo sapiens
catttttcacctaatcaatccagtccatcagccccggatgtttctccacaccaggcaattcgccatcatgttcttcaagttattttgctaaacattatccaacctcaaacaaggggcgtggc

SEQ ID NO: 410975 - DNA, 122 bp, Homo sapiens
ctgacagatttttattataatagtcatctccttctaaaatctggtgagcagcttccctgccgactcaataatgcctattgctgaacatctgcagttacacaaaggactattactgttggctg

SEQ ID NO: 410976 - DNA, 122 bp, Homo sapiens
tgtttttgaaaatgatgtctctgcagttgcacagactgtgttggacctaggtccgtagaacgccgtgatgtcatcattgatgtcagagaatctgcgatgggcctggtgacctttgaacctta

SEQ ID NO: 410977 - DNA, 122 bp, Homo sapiens
ttctcccccttaggcccatggacagaccttcacgttcccagatctgtttcccgagaaagacgagagccctgaaggcagcgctgccgacgacctctacagcatgctcgaggaggagaggcagc

SEQ ID NO: 410978 - DNA, 122 bp, Homo sapiens
gcccaggtagagtcgtgcacaggtcctaccctccagcagctcagaatgtgcttaggccgacgcgaaaacaagtaagtacaatgtgaatattgatgcgtaccagtcaccatgaaaacacagaa

SEQ ID NO: 410979 - DNA, 122 bp, Homo sapiens
gtggttttcctggtttggggaaagcgggtaaatggtggctggttgcggctaactgggccgcgctaaaaggtaacccaaggcaggtggattacctggggaaacagctggagcagtggtcctgg

SEQ ID NO: 410980 - DNA, 122 bp, Homo sapiens
cagtaaatgaatgagggacaggttgggaggtggccagccccctccagcccatggagggcacggggcaggagagctgggctgagccagcaggagcccagggagcctggtctctgccttcctat

SEQ ID NO: 410981 - DNA, 122 bp, Homo sapiens
acctcctgccgcccggagccctcctgtctctgactttgttttccttcctctcatctttctcgcccacttctaatttatctgtctgcgccggtgtcacttcctaagcccccctaaagcctgtg

SEQ ID NO: 410982 - DNA, 122 bp, Homo sapiens
tcggggtttcgggcgctgggccctgtgcagctgtccagaataggctgtgcggctggttcccgccctggcaaggcatccagccatggaatctgcactgctgttgggggcaggcaaggtcgggg

SEQ ID NO: 410983 - DNA, 122 bp, Homo sapiens
gtgcccttacgttccttcggctggcccctcgccccaaaggagcccgctggcgtgggccggcggcaatggggcagtggcgagagttgctctctgcagagttccagatcctctctcctatttcg

SEQ ID NO: 410984 - DNA, 122 bp, Homo sapiens
ttccagagataacctggtagaatatgaaggttttagagtgagacggatctagattcaaatcggctctgatactcactgcctgtgtgaccttgggccagctaccttcccttggattctgagtg

SEQ ID NO: 410985 - DNA, 122 bp, Homo sapiens
gtttgaacattgtgatgtaaagcacaacatccagtgcatttgaataagtgagtttgggatcggcattctgcatatattagaatgtcaatgaggaacttaaattagggccctactaaaaaatt

SEQ ID NO: 410986 - DNA, 122 bp, Homo sapiens
cagggctggtatatcctgccgggttatatcagttttccctgttcaggagccccaccaaaccgaagcaatccaggcccatccctggggctgaggctgagtcacactggctccgggatataggc

SEQ ID NO: 410987 - DNA, 122 bp, Homo sapiens
caaaattttccttttcaggtctgtttgatcacacaagtgactcacatagatgtgcaaatacgcatagaaatccctgaccacagtgccatcttctgctgggctcagtgttcaggtggagccag

SEQ ID NO: 410988 - DNA, 122 bp, Homo sapiens
gcccttatcagcccggtatcttgagcagcctctgacggggaaacatcccggagcatctaacgaaggaaagttggacgccttttgagactttttaaatcctgaagaataggcctctgttgcca

SEQ ID NO: 410989 - DNA, 122 bp, Homo sapiens
tgcacgctcccttacccctcggacctcgcagggccgcggcggacacggcccgatcggggacgtgaacgcgcagaactacatttcccagcgtcccgctcgcgctggaactacacttcccgggg

SEQ ID NO: 410990 - DNA, 122 bp, Homo sapiens
agacgtcataaaaggaaaagaatggaaaattttggaaaggaagttttctgagaccatttacgtgacaaagaagtcaggaaaatgtggcattgttgtgattatcttcatcatttcaggatctg

SEQ ID NO: 410991 - DNA, 122 bp, Homo sapiens
cgtcttggtcctggcttgcgggtggcacacagacaagcgaccggggtggcccggagaggtcgtgcccctggctgcgagacgacgcgacagcagggcgctccgggggccgcagcggcgtcgaa

SEQ ID NO: 410992 - DNA, 122 bp, Homo sapiens
tatccacgctcaaaagtaactcaagtttgcgcgccagtgggaaacttggcgctcatgactcgccagcgcgggtcgaaactccttcctgatgccctctcagctgtttttcttcccccgcgtgg

SEQ ID NO: 410993 - DNA, 122 bp, Homo sapiens
agagaggacagacggggtgaccagagtggaggatgagccaagccttggcacagacccaagcgggtggaggccccgggcaacaccggtcaccacgagggcctctacgaagggctctgtcctcc

SEQ ID NO: 410994 - DNA, 122 bp, Homo sapiens
cggcagcagtctgcagggctaagagcaccgcgggaggagccttgcaggtgggtcgcgtgacgcacatgtcacgtgatgcgcctgaggccgttcgcgccatctttgttgagggcgagtgccag

SEQ ID NO: 410995 - DNA, 122 bp, Homo sapiens
caggataggttacgcatatggggaaaggaggggtccttcaatcttgaacatgctgccaagcgagtcagcacacaggctggcttgagggagacagaaatatctgtaacaaacaaaagccagga

SEQ ID NO: 410996 - DNA, 122 bp, Homo sapiens
aggagggaaaagtgagagcccctagtcaactaacgcatcatgcgacacttagggtgtcaccggagagaatttcccgagttcgttctcccctgtcgaccccttcactctggcatcggagccct

SEQ ID NO: 410997 - DNA, 122 bp, Homo sapiens
ggacggaccccgagggcgagctccccagccgggactgccagctcggccgccgtccttccgcggcctgggctagtgctcaaggttgggcggcttgcactcttgagtccctggccggctgcaaa

SEQ ID NO: 410998 - DNA, 122 bp, Homo sapiens
cagtcccttcctcccacctcacctgccctctcagtatacatctgcttagcccatctgccacggctcagcatcaacagcacctcccccaggaagctttcccagactgctcccttccctcagct

SEQ ID NO: 410999 - DNA, 122 bp, Homo sapiens
cgcgcgcacgcaccctgcgcacacaccacacacacacacacgatcacacacacacccgcgcgctcgctcccacccggcagtcatccatcaatcgaaaagcacacatccagggccaggctcct

SEQ ID NO: 411000 - DNA, 122 bp, Homo sapiens
cattcctatggaaaggtgaacgggttgcatttgaaagccaatggaatacgggtgttgtaccggatttcatcacatagctggaaagcaaaccggatgagactacacaatggagtgagtgtcca

SEQ ID NO: 411001 - DNA, 122 bp, Homo sapiens
cgcggcgcgtccggcgctgggggactgttgggtcagaaagtgttcagggagcagctgttgcgccctccctcggccccgccgctcggagacgccccgccccctgccttcaccggccgccccgc

SEQ ID NO: 411002 - DNA, 122 bp, Homo sapiens
aaaaaaaaaaaagtacccgaagaaagcaattacaatctgccttccccaagaacaaaaacccgtgccttcaaatgcacacattgcattcctatccctacatttgcataggactcattggctgg

SEQ ID NO: 411003 - DNA, 122 bp, Homo sapiens
cttgtaatgagcacactctccagctgtattggaaggagtctcctccagagtctccagacgcgttggaagcccgctgcacaggaaggagcggcgttcatgatgctgcagccgtgaccacgtgc

SEQ ID NO: 411004 - DNA, 122 bp, Homo sapiens
caaccacacataaaagatataaacaggcaaatgtcaggctcatttcctggaatggagcatcgccactaaacccatgaccgagcttaagggacttgttcaccagaggctgaaccccagtttcc

SEQ ID NO: 411005 - DNA, 122 bp, Homo sapiens
cgccctgtgtgatctggaacatccatcctctccggcctgcaggcatcagagctcctgggccgccggcctttggacccggatcaagacttacactacctgcccctgcttctcaggccttcgga

SEQ ID NO: 411006 - DNA, 122 bp, Homo sapiens
ctggataactctgatcaatcgccgttcgctggagccctggcagtgcggggatccgggacgcgcctgtctgggaattctccggccaagcactcacccagtgtagatattgtcaggattttggc

SEQ ID NO: 411007 - DNA, 122 bp, Homo sapiens
acatgccaatgggtatgggatgtggaaagactgcaattccattcttaccatggtttgcctcgactatcaaggtgatccaatatggcaagagaaaaagactaatggtctcaaatttttaacaa

SEQ ID NO: 411008 - DNA, 122 bp, Homo sapiens
tgtggtatgttcatacaatggaataccacacaacagtaagagaacagatctgtgctgccacgtggataaacttacatagtgctgccagaaagaagtcagagacaaagagcagctgattccat

SEQ ID NO: 411009 - DNA, 122 bp, Homo sapiens
cagcccctctgtgtcccgctgcacacacgcgctgctggtcacctgggggcctgtaggccgcgctgtcatgtcctcggccgtcccatagagcagcagcgtgtagcggtacaacgtccctggac

SEQ ID NO: 411010 - DNA, 122 bp, Homo sapiens
gcgcgcctggggagggcgcgggaacctgggaatgcccaaaagcgcgaaggaaagcgggcacgggagcccagagcccttaagactctcctgaggtcctgggcgcgacttttccctgtgcagcc

SEQ ID NO: 411011 - DNA, 122 bp, Homo sapiens
ggcaaaggggctctctcaccatggacttgagttacagttcctggacccctaggctggctgcgtttctcttcacggggtggttgaccgcatgagaagggtcatgaaccacaagttatgatggc

SEQ ID NO: 411012 - DNA, 122 bp, Homo sapiens
tgcttataggtgctgtaccaggtggaaggattcgttgacaaaaacaatgaccttctctatcgagacctgtcccaagccatgtggaaggccagccatgccctcatcaagtctttgttccccga

SEQ ID NO: 411013 - DNA, 122 bp, Homo sapiens
gtggacagtatagtgtgtcacctcctggccactctgcacccctcagggactgtggggggccgcggcaggtgctgtcctcaaagcaattataaacaaggcaaaggacaggctgtgacttccct

SEQ ID NO: 411014 - DNA, 122 bp, Homo sapiens
gggcttggcgagagcaaggaggcccggggctggctaggaccagggtgggggcagccggggcgctcgagaggccccccagctgcacagtcccgcagtggtctgggaactgcccgtgtggcacg

SEQ ID NO: 411015 - DNA, 122 bp, Homo sapiens
tcctcgcagcaccgtagtgcgcttgcgctgagcagcccgcgagggcggaagtgggagctgcgaccgcgctccctgtgaggtgggcaagcggcgaaatggcgccctccgggagtcttgcagtt

SEQ ID NO: 411016 - DNA, 122 bp, Homo sapiens
tggaataaatgcttaagttaggagagcagcgggctgaagacattgccaagggggcgggcccggccggtgacgtgagcccgccagtccggggcccgcggccaatggcggcgcagacagggcgg

SEQ ID NO: 411017 - DNA, 122 bp, Homo sapiens
cactaggataccgagcacaaacgggtttgcgcggccagcgagagtcaaggtaggtgccagcggcgtactaacgttaccgactccgcgctgctaccgccgaattactttcttgacttacagac

SEQ ID NO: 411018 - DNA, 122 bp, Homo sapiens
gctacttcaggtcagggaccatgtcatttttttttttccctctgtatctccagggcttatcgctgaaacttagcaggcactcagtaaatattttgctaagcagttaaaactaagagaagaaa

SEQ ID NO: 411019 - DNA, 122 bp, Homo sapiens
accggctccgcatcacagcggcggcggcggcggcggcggcggagcggcccccactcgggccggcctctccgtcagcctggcagctctcccgcgcgccacccggagcactgctgcccgaatag

SEQ ID NO: 411020 - DNA, 122 bp, Homo sapiens
cgtgcgggagctcactgagttcgccaagagcatccccagcttcagcagcctcttcctcaacgaccaggttacccttctcaagtatggcgtgcacgaggccatcttcgccatgctggcctcta

SEQ ID NO: 411021 - DNA, 122 bp, Homo sapiens
atagggacattgccttagataacgccaataataatacacaggggaaaatccaaatgcctgcgtgcaagtactttagcccttgtaccatttacagatgctgaaggtgcagcggtggggatggc

SEQ ID NO: 411022 - DNA, 122 bp, Homo sapiens
cagctgcttttctcatctagacaccgagcagggcaggatggagccagcctgtggcgcatacgcactccccccgctgcaacgcctcggccctccatcatgccagccaggcaggtcatcggcag

SEQ ID NO: 411023 - DNA, 122 bp, Homo sapiens
gggcttccccgcccgcccgacgacttcctgctgccccagcagccgccacagtcaccaccacggcccctggacgacccagagctcctgctgccgccccctgacttcatggaggcgccccagga

SEQ ID NO: 411024 - DNA, 122 bp, Homo sapiens
cagaacgcggaggggcccgaccccagtctggtggcgtaggtgtgtgacaaagtatgagggcgcgccaagctctccagttccacatctgctgtcgagtccagcgcctgccacgctcccgtgcg

SEQ ID NO: 411025 - DNA, 122 bp, Homo sapiens
ggcctgctcgattccaggcgcaccccagatggcgtcaacgttgacctttgcattgtggggcgggaagttttctgtggccatctccggcgttctttataggcagcggcctagccgagagaaac

SEQ ID NO: 411026 - DNA, 122 bp, Homo sapiens
gggattatatatgatctagcaattccacttcggagtagtggtagtgaaactgagtttaaacgtcaaaataatggaaagcaaagatttaatcagatatttgaatacacccatgttcataggag

SEQ ID NO: 411027 - DNA, 122 bp, Homo sapiens
gaatatggctattttattcatatggagaagatgacatcatcaggccctactgataaaccccggaaatgcctctcagtacccactctgcattacctaaatgactgcagctctacaccagctgt

SEQ ID NO: 411028 - DNA, 122 bp, Homo sapiens
cactggggcaggcccccggccaggtgcatgggaggaagcacggagaatttacaagcctctcgattcctcagtccagacgctgttgggtcccctccgctggagatcgcgcttcccccaaatct

SEQ ID NO: 411029 - DNA, 122 bp, Homo sapiens
gggcatcccccgaagggaggcaggcagggaggggcgcagggcaggggctcctgacgtgaacgtctttttcacagcaaagccagaggccactgaggtctcccccaacaaagggacactgtctg

SEQ ID NO: 411030 - DNA, 122 bp, Homo sapiens
gtaggttgaccttggtgagagcgcaagcaagttccaaacccggggccaccttgcagggcgcgtccaccgtcccacggaccccgcgcacctgccctctcccccggctggctcgccgtgcccac

SEQ ID NO: 411031 - DNA, 122 bp, Homo sapiens
gacgcggaggccgcctggggtagcggcggcgggagtcctggcgctctgcaggtaggagctcgcccgctcggcgggcgcggaaacttgggccgagtttgcgggcggcgcgtggagaaggggcg

SEQ ID NO: 411032 - DNA, 122 bp, Homo sapiens
cggaaaagtttgtttctccaacgcgcaactttcccgctccaggcggcggggaccccgagccggagttttggccaaaaaatcccagagtcctatacctcctgcgcgcccagacctcgggggcg

SEQ ID NO: 411033 - DNA, 122 bp, Homo sapiens
ggacagctcctggaccaagactcagggaacattgagacagagcgtttgtcacaggaggagcggggtcagggcgaagtcccagagccccaggcatggctctcagggtctcaggccccgaaggc

SEQ ID NO: 411034 - DNA, 122 bp, Homo sapiens
gtcgcctccctggggtgagacgttcgacgtgtcagacttcaccaagagcatctcccgcctcggtgcagtaatggacttggaaacgatttactccggcacttggttcctgtctccataaatgc

SEQ ID NO: 411035 - DNA, 122 bp, Homo sapiens
ctcgtggtggagccctgcggtttcccagcggagccgggcccggggctgctccctcgcgggcgaggctcacctgtcccggcccggccccctcccgcgccccaggtggttcagggcagggagga

SEQ ID NO: 411036 - DNA, 122 bp, Homo sapiens
ggccctcgtccagggagcagtcgtcgtggaatccctccagaggagccaggggccccaccccgccgggctgggcctataaagaaacctccaccacctacaaaagtagaagagctgcctcccaa

SEQ ID NO: 411037 - DNA, 122 bp, Homo sapiens
ctgagagaaatgtttatggccaatagtcccttagagctagtggtggcgtctcgtcaaagtcgtggtgctcatactgagagaaatgtttatggccaatagtcccttagagccagtggtggtgt

SEQ ID NO: 411038 - DNA, 122 bp, Homo sapiens
actaccgcccacaagctggagcccggcttcggggcggggcgagggtcagtcacgtgggcccgcagccctctcctcgatttccctacaaggacttgggccgacgggccccgcccttcgccgtg

SEQ ID NO: 411039 - DNA, 122 bp, Homo sapiens
ttagcgtagctcccaggacttaagttgaagtgcattctagccagttttctttttttgagacgaagttttgctcttgttgcccaggcaggagtgcagtggcgcgatctcggctcactgcaatc

SEQ ID NO: 411040 - DNA, 122 bp, Homo sapiens
agaccccccgctgaccctccgccgccggtctcccacgccccgggactctctgccacgccccgccgcctctgcaggacacccccactgtgcccatgacaagcacactgtcaacacgtttgctg

SEQ ID NO: 411041 - DNA, 122 bp, Homo sapiens
gggcgtgctttccacttccagagtctaaaataaacctgtctctgcacagctgcaattacacggcggcgtttccgaaatgacctggcacagtgcgcggcgcctcacataggcccagggccgcg

SEQ ID NO: 411042 - DNA, 122 bp, Homo sapiens
tctgcagccggctcgtctgtgtgtggggcgtcccggctgctgcaccgagccccgtggggacggcacctggtgcctgcagaggggtcagcctgcagctgcagtcacagggaggggcccttacg

SEQ ID NO: 411043 - DNA, 122 bp, Homo sapiens
ttaaacaagactgcagtaaacgtttctttccaagtgagaaaggtctttttcgttctcagacggtttgaaggtgtttgtgccaacgtgacccccggggagatttggaggaagctttctacgtc

SEQ ID NO: 411044 - DNA, 122 bp, Homo sapiens
tccataaaattcagagtataggactggtgagttttctcttcgttcttgttaaccatatatcgagttgttatttgtagctatagtgatataaatatcagaaagagattatattcaaagaatga

SEQ ID NO: 411045 - DNA, 122 bp, Homo sapiens
taggaacccgttttcttctcccaaagacttaataagagcagaaaaaggtaaagggagcaacggtgatgactgaaactttagagaaaaaagaaacgtaatgcacaaaattcttcatgtggaaa

SEQ ID NO: 411046 - DNA, 122 bp, Homo sapiens
ggactggtgcagcggcacagccaaccgagagcgcaagcgcaagcgggagtccaagtacagcgggatcgacgaggctctgctctgctggtaccacattgcccgggccaaggcctgggacgtga

SEQ ID NO: 411047 - DNA, 122 bp, Homo sapiens
gcattgagaggaggtctggcgagcaccatctagggctgaagaactaggcagtggctccagcgcggggcggtgggggggacaagtgagccagggcaagaagaatggatttggccctagagtac

SEQ ID NO: 411048 - DNA, 122 bp, Homo sapiens
ccagagctggccgagggcaagaccaccgaggcagacgaggtgggaaagggaggggggcgccgctcctcacctgaccccagcagcagcgtcacagcccaacccggtctcccgcaagatggagc

SEQ ID NO: 411049 - DNA, 122 bp, Homo sapiens
cgcggttcaggctggccatgaagccgcgtgtgtttgtccagctcggacgtgtggccctgccgggtgtaggggggacacccatgcctccaacacgcataagggggtgactgtatgggggtcgt

SEQ ID NO: 411050 - DNA, 122 bp, Homo sapiens
ggcttgtggggcttggcaaggactaggcggggggcatcgaaccctaaggagctgagccaccgctggggtcggggtccagtcctggggaacgcgggtccctggagcacagcagggcctgaccg

SEQ ID NO: 411051 - DNA, 122 bp, Homo sapiens
ttgaacccaggaggcagaagttgccatgagccgagatcccaccaccgcatccagcctgggcggcagagtgagactccgtgtcaaaaaaaagaagatctcaggcagtgaccctctagatggaa

SEQ ID NO: 411052 - DNA, 122 bp, Homo sapiens
acctgcgcttgcgcaggggaggaacacgcagtccggaaaaacgccggggattctgggtcgcgcagccgtggagctacctcaaggcggaactggggagtccagggcttcggcagcctgaacac

SEQ ID NO: 411053 - DNA, 122 bp, Homo sapiens
ttgtattcctttgactatttcatgctgagtcaaagccatgtgggggttataatttacatacgctgaggttaaattctgtagggtactgctatggtagatagctagtcaggtataagcagggc

SEQ ID NO: 411054 - DNA, 122 bp, Homo sapiens
caaaacgaacgaagccggccgcaggagtcggaggccccgaaagggatgtagccagtgacccggcgcttcctggatggggcgtggccggttcccgggcccgcctcctttcccgtccccaccac

SEQ ID NO: 411055 - DNA, 122 bp, Homo sapiens
gagcagaggcaaaactgtttgtttgtgtttttccactcactgtttggcctattttgttgccgtaatcaagaaatgaatgtagccggaaaaaagaaaaatacatgtgtaattgtcagatttca

SEQ ID NO: 411056 - DNA, 122 bp, Homo sapiens
cccatggtcacttctatgcgtagccctggtgcccgccgcccacagccggaccgcactcctcggcctccgcctaacccctggctcagccacacgagtgacagctctgcccgcccgggcgggcg

SEQ ID NO: 411057 - DNA, 122 bp, Homo sapiens
tttccctcccctactgcgttacctcagtctttaaagacccgcaggcaggagaattccatccgcccccagctcttagaaaacccaggaccagttccttcctggccttcggggtcccatcaaag

SEQ ID NO: 411058 - DNA, 122 bp, Homo sapiens
ggaaggcggcgcccatcgggggcggggctgagaactaggctggcgccgctgcctggtaagcggggaccaagaggcccacggcctccatcaggaagcaggtgcttctccaaatcccggatttc

SEQ ID NO: 411059 - DNA, 122 bp, Homo sapiens
ttcctcattcagccagcatctgttaattacctacgaagtacagagatgcgtaagacatgacgtgtgcctgcagagtttctcatcagggaggccatgttagcgacgtgtctcccaaagcccac

SEQ ID NO: 411060 - DNA, 122 bp, Homo sapiens
gccggaatgccaatgagattcggcggatacgcagctgtcaccggccgcagactgccctgtcgccacctccagtgcctgcactccagtagccaagcaacataggaaatcgcgctcagaaccca

SEQ ID NO: 411061 - DNA, 122 bp, Homo sapiens
taactgtggcctcaccagcaactcagttttgaaacatgcttaaaatgtccctcttcctttcgtaagttctcttacaaacaagatccacttcagaagaaaagttcatttatgcaaacgttctg

SEQ ID NO: 411062 - DNA, 122 bp, Homo sapiens
cccagcagccgcccatcaggtgccacccagtgcaccaccggctcggggtcacccaccgctcggcagcgcaggctcaccgcctggccttccaccaccagggcccggccccccgcctgccgtgt

SEQ ID NO: 411063 - DNA, 122 bp, Homo sapiens
gcacatctgggcacataggaagtcccgggttcttttcttggctttgcaactgatcccgggcgtgaccttgggccaaacccttaactcgtgccctggggctctgttaacatcgcctcccaaag

SEQ ID NO: 411064 - DNA, 122 bp, Homo sapiens
acctgagggcattcaccgtttccacttgcccctacctttgtggcacttggtacagcaaatcgaattattttgagggtggatatattttccttggggacacacactatctctcttctccctgt

SEQ ID NO: 411065 - DNA, 122 bp, Homo sapiens
catgtgaaaccctctgccatgacagccagaactccacccccaggggtgctcggaggggctcgcggccggctatgcccatcagttccagctcctccttctggatttctcgtttgtagtttcct

SEQ ID NO: 411066 - DNA, 122 bp, Homo sapiens
tctctctctctctctgaaatacaagccaactcagctgagcacagtgacgttgggttgcctcgatgctcacaaagtactgaaatcgcctatccaactagctcccactgcactctgtcgccctc

SEQ ID NO: 411067 - DNA, 122 bp, Homo sapiens
gactgtgggagtagctcagagacttcagcacatataaccaggtacaacgtgacacggggccgcacagacctgtatttgtaccggaaaaaaattttctatttatctactcttgtctgatgcca

SEQ ID NO: 411068 - DNA, 122 bp, Homo sapiens
ccaaattccactcgagtttttagattcagctggtcagtttcacacacatgagtctcttggcgctcctgtgcgtctgttggccaggggagggagcatccgccgctccgccgtgctgagccctt

SEQ ID NO: 411069 - DNA, 122 bp, Homo sapiens
gaggggcccggtatttatgaggaattgctgctctgtatcacggaacacaaactttacaaacgcgtctttggaggctcaccagtgccgggaggtcaggccgtcccctgctctttcttgggttt

SEQ ID NO: 411070 - DNA, 122 bp, Homo sapiens
agaggttttgctgccatattctaatgtccagggccgtcttcatttatccaactgtgatctcgtccctgacactttcccatcccgtcatcagattgtctaaatagcgatgttttgtgagctct

SEQ ID NO: 411071 - DNA, 122 bp, Homo sapiens
gcctcccactcttaggattgctgctcctggaggcttctgcaacggatggtgggtcaaagccggatgaggcctctctccactcagcagcagggaaggagtttttcccagtcactcccagcaga

SEQ ID NO: 411072 - DNA, 122 bp, Homo sapiens
gcgcagtcattaggagtcacacagtctgaccttgagcaaattattaacattacgaacaagcgaaaaaaaaaaaaaaaacagaaataaagcaccaggcacacagtctagggcacagtaagttc

SEQ ID NO: 411073 - DNA, 122 bp, Homo sapiens
gggtctctgtgtgtgtctgagcagctgctctgccaagactccacacagctgtgtgtgtgtcggacccaaggccttggtggcatgggctcatgagggaatctcctgatccaccagtcgcaaag

SEQ ID NO: 411074 - DNA, 122 bp, Homo sapiens
gcaggccccgggccggtgcgctaatccggctaggaggcttcgggcgaggcaggctggagacgccagggcagccccagggcagcggctcctgtccccaagtcctcgggccctcctccagcctc

SEQ ID NO: 411075 - DNA, 122 bp, Homo sapiens
tgccccattacatcagaaaactctgggtggagctgccaggggctcagagtgccggggacacgactaccaccagccccacagggcagtgccagcacccagctccacccatggaggggtcccta

SEQ ID NO: 411076 - DNA, 122 bp, Homo sapiens
aattgtcgcctaagtggttccgggttggtggatgaccttgagccctcaggaacgagatggcggttctctggaggctgagtgccgtttgcggtgccctaggaggccgaggtgaggggtcttcc

SEQ ID NO: 411077 - DNA, 122 bp, Homo sapiens
gaccatggcgaggcaggtcgttactgaatcaatcctctcgaccccgagaagcaggcactgcgggtgacccattgtacagacgaggagactgaggagtaaagtcaaggcccgacagcaagtga

SEQ ID NO: 411078 - DNA, 122 bp, Homo sapiens
agggcgcagctctgcccaggccggagtcctttaggggagggatggcagccggggcctggccgtggttttcatgctgccctgcgccaagccacctctgctgagagggaggtttagaacctcag

SEQ ID NO: 411079 - DNA, 122 bp, Homo sapiens
atcatgtgtcaagtatctgcctcaaagcaacttgttgcatactctttacttctatatacacgctcgcagtttcttaatatttactagaaatcagaatgcaattctttaatttttatgttccc

SEQ ID NO: 411080 - DNA, 122 bp, Homo sapiens
gggcctgggtcaccggggcaatggtggcctggtcagggagccaggcatggtgctcaagtccgtctcggtttgccctgtgggcctcctcttccctctcccgaggacaaggcgggtgtcgtggt

SEQ ID NO: 411081 - DNA, 122 bp, Homo sapiens
ctttggcacccacatatgcagatgtccaccgcgcctgccggacgccagctctccaccagccggaactcaccgccacccaccctgggctgccagctcagctggggcccagccactcccccagg

SEQ ID NO: 411082 - DNA, 122 bp, Homo sapiens
ggaagtctctgctgctgatggggatgtccatgcaggcccacccggggcactgcctccagccggtgcagtctggccccagaaaagtcctggaagtttctgggctcttggatgtctccttgttg

SEQ ID NO: 411083 - DNA, 122 bp, Homo sapiens
catctcaacaacctctacttcctgtccctgtgccggcgctggggcgtctacgcggtggtgcgggggctcttcctgctcaagctgggacttagcctgctcatgttgttggccggcccggacca

SEQ ID NO: 411084 - DNA, 122 bp, Homo sapiens
gcaacaaaataatggcaccagcttttaagccaagctggataataaagcccacttcaactccgtgaatggctgtgatagagactgcctactctacgataaaaagcaatattttctgtatttaa

SEQ ID NO: 411085 - DNA, 122 bp, Homo sapiens
agaaacacaatctggccgcctagaggctgcgtgaagctcgtgaccctgcggggtgactaacggagctcagctgggtgggaccagaaaccacgtctgggcactcctgagtcacaggctcagaa

SEQ ID NO: 411086 - DNA, 122 bp, Homo sapiens
ggggaggacaaaggttggggagttgagaaggatggagatgggtgcatctggaagggagtccgtcctgaggagtcccccatcagctgtcagccagccagcagcaaagcaaattaagactacac

SEQ ID NO: 411087 - DNA, 122 bp, Homo sapiens
ttttggaccgcggggccgggtatcgagggaggcaaagctggggtcccagtggtgtggctgcggtctggggagcgctttcagtctcagatttagttggcctcactgttaacctatttagagct

SEQ ID NO: 411088 - DNA, 122 bp, Homo sapiens
ttgggcacacagttgctggtgtcaggtgtttattaaggggtcttggtttgtgtgtgcgcacgtgtgcatgggcatgcattcgggaagggtcctggtagataggaatcagtggactggaggcc

SEQ ID NO: 411089 - DNA, 122 bp, Homo sapiens
ggaggctgggacgcagctggacgcagctgggcgcggaagcttggggcggaggcgcgtgcccgccttcccagctcagccccggcagggctcccggctccagcccactgggagctcgcggcgcg

SEQ ID NO: 411090 - DNA, 122 bp, Homo sapiens
gtgactcaattcctacactctcaagacagggctggcattagttacacagactctgtgctgcgttctgccccttcctggagaagccatcgccaagttctcagtgagtgctcacagagggcatg

SEQ ID NO: 411091 - DNA, 122 bp, Homo sapiens
gctctccctccgatgggttgcagtgaactgtggcttcccccctgcggtgctgaactcgcccgtgtagctgtgattttagagctgccgacagctctaaggtgtgtagggcttggtctgggaac

SEQ ID NO: 411092 - DNA, 122 bp, Homo sapiens
agccagggtctctctcctgggacgagtgctcgcagagggttgcggggagggcaaagggagcgcaccaagaccaccaggctgctccaggccttgccgcagggcgctgggttgagggtgcccgg

SEQ ID NO: 411093 - DNA, 122 bp, Homo sapiens
tatatagttcaaaaatactttaggtggtcagctccacattctttgttgacgtgacactaacggccaataatatgcttcttaattatcaaattatagtttcccaattgggaaactaattgggg

SEQ ID NO: 411094 - DNA, 122 bp, Homo sapiens
tgaacctggcagttggaggttgcagtgagcggagacagcactactgcactccagcccgggcgacacagccagactctgtctcaaaaaaactaaattacaggccgggcgtggtggctcatgcc

SEQ ID NO: 411095 - DNA, 122 bp, Homo sapiens
agttacaattacacagttctttttatcagagaccacaatacaaaaatcaaatgaaagagacgcattcaaataactcaactgcaattacccatcccagatcttctttaatggaatgccaggag

SEQ ID NO: 411096 - DNA, 122 bp, Homo sapiens
ttattaccataaagtttttggagtcagaagtctaccaagtctcaccagccagaacccaggcgccgggggctgcttcccttcctggtgcccctgggaaggattgcttctgctgtctcaggttc

SEQ ID NO: 411097 - DNA, 122 bp, Homo sapiens
acctgcagccaaattcactccttgctgacaagaggctcctagaggagaagggctactccccggcccccaggaaactctctgaacatagctatctgccatcaaggcctggatcagccaagcag

SEQ ID NO: 411098 - DNA, 122 bp, Homo sapiens
cagaggcccaaacagcaccagggaccaggagagaaggccatgtggaagtcaggtacaacacgggaaccaaagtcatttggaggagtcacaaaaggatcttggaagtcagttgtgcagatgac

SEQ ID NO: 411099 - DNA, 122 bp, Homo sapiens
tggagcttagctctcagactccgaagagggcgactgagacttgggcctgggagttggcttcggggtacccaaggcgacgacagctgagttgtaccacgaagctcaggccgaggcctcctccc

SEQ ID NO: 411100 - DNA, 122 bp, Homo sapiens
cagcttctctactcaactcaggcaaggaagccgaaagccccagagccacactgcctttctcggggaaagtggagaggacctactgtttgctccattagttacattgctttccatgctcatga

SEQ ID NO: 411101 - DNA, 122 bp, Homo sapiens
attgcctggggcaggggtggcagtcgaggccgccggggccgaggtgaggctgcagctctccgggcggcggtagcgctggggaggaggaggagagaagatggcgtcggagctagagccagagg

SEQ ID NO: 411102 - DNA, 122 bp, Homo sapiens
cactctgacttcggcatccaagccacatttcctttctgagtcagtggcccgctttccagacggggtggtgacagggtgcgccctgacgaagggctgacactttcccaggactgttcagggcc

SEQ ID NO: 411103 - DNA, 122 bp, Homo sapiens
tgcccctccccatgtcctgctgttgttgatttactcagactacagggttagaggcgtcgccgttccccaggagttggggaagatgtgtagatcacgtggggtctctgcctctgggaaggaat

SEQ ID NO: 411104 - DNA, 122 bp, Homo sapiens
cgggccgggacgggctgtgggcggagccatgggggagagcccaggcgcttgcgcgagctccgcccacaaagacttgtggtcactagtgcgctggtgcgtcacagggcgcggaagggcaatgc

SEQ ID NO: 411105 - DNA, 122 bp, Homo sapiens
agtggtaataccctccactccacagcaccgaaataccttgagcacatatatccatctgctcggaatccaccctgagctcggccctgcagcacctggagtttatcccagggtgtggcagtaac

SEQ ID NO: 411106 - DNA, 122 bp, Homo sapiens
gtatggggaacccctcagcttccgtgtggagggtcagggaggctggatggcttttccttccgttcctgtaggcccgaagccttccccggatgcactcatgaccggggcctggccagcaggcg

SEQ ID NO: 411107 - DNA, 122 bp, Homo sapiens
cgatcctagcagcaggtcagggactcggcggaaatgacgtcctctccgggcagaagaagccggccacgtcgcagattataagggcggagctgacgtcgcagccagggcagggcgatactcga

SEQ ID NO: 411108 - DNA, 122 bp, Homo sapiens
tcaccacctgcgcagtaattcagtgcagcccatgcagcttcccagcggggtccatcaccacgtgcgcaataattcagcatagcacgtgcagcttcccagcgggatccatcaccacatgggca

SEQ ID NO: 411109 - DNA, 122 bp, Homo sapiens
cagcaaggtccctgcagatgccgcgggtctgaggactacgctttggaaggcctcgcagtgcgtctagatctgacagctgctctgcatgagcctggctccaggctgaagcaatagtcggtcaa

SEQ ID NO: 411110 - DNA, 122 bp, Homo sapiens
ctgctgtgtaggtggccagcgtgacactcctgcagtagccgctcactctctggtagtgctcggggctgaccacgctgtatatgtaggcgtagtaagccacctcggcggcagtgaccatcccg

SEQ ID NO: 411111 - DNA, 122 bp, Homo sapiens
ccaaaccgggattcccctttggccatctctcattctttcaattctaaagatggagactggcgaacggcgatggggtctgcggtgggcggtgtttcgtcgcgacagactctaggaaatttcac

SEQ ID NO: 411112 - DNA, 122 bp, Homo sapiens
cacagaggtgatgtgttcgtattgcacgtagacgtgtgtataacaggacctccttccccgcgccccgccaccccgacacacacaggagctgcctaaagtatccttgccttgcagattggagg

SEQ ID NO: 411113 - DNA, 122 bp, Homo sapiens
tgcgttcttgccagcatcctcaggttcccgagccggtgaccagggacctgtgcgggaaagcgtggggctctggaatttgatcgcctttggtctaacaaagccactcagcttaaatgcagact

SEQ ID NO: 411114 - DNA, 122 bp, Homo sapiens
cactgcaacacccgtttgggtctgtacagtgcgccctgataaactaatttcctctggggacgctaaaaagctcctcaaacccaggcctcctctccgaaagcacgccgaccaagccgcccttc

SEQ ID NO: 411115 - DNA, 122 bp, Homo sapiens
aggggcgctgacctggggggtgctgggcgagtgtgagcagcgtgcaggcgggcgtgcggccggccccgtgggcaggggcacatatgcggcagcccggcgctgctgtgggctgacatgaagag

SEQ ID NO: 411116 - DNA, 122 bp, Homo sapiens
atggtgtatcccatggggaagcgcgacgtgggcgcggccatgttccccacctgaccacgccgccgaggggtaccgaacgtcccaaagcacccacttccgtaacttctccatgttgactcctg

SEQ ID NO: 411117 - DNA, 122 bp, Homo sapiens
atagcacttgccgatctgcgtgtgtccagaagtggcccttggccgagcgccgaactcgctcgccctctagatgtccaagtgccacgtgaactatgcaatttaaagggttgacccacactaga

SEQ ID NO: 411118 - DNA, 122 bp, Homo sapiens
ccggggaaccagcgcagttacggcacacacgaggcggggcctgcacagatgccgggcgcccgatcctcagtgacaaaatagagactccgtggaagggacactgaggtgggggaggctgcggt

SEQ ID NO: 411119 - DNA, 122 bp, Homo sapiens
gctccagcatgtggactcttctgagaccctgatgctcatatatgtgcatgcgtgtgagtacgtgtctgccttcaggtataggcatccaccagcatgtgaacagccagtgttacccatagggg

SEQ ID NO: 411120 - DNA, 122 bp, Homo sapiens
aagaatttgtcaaagatttgtctaaggtggcagcctggcagctaattctcaagcctctcccgatggaatctctactctttgaagggttttcctccatctagaaaaatctaagtagcgacgca

SEQ ID NO: 411121 - DNA, 122 bp, Homo sapiens
caccccagcgtttaccccaaagcacaatgccctggtcacttggcaagcggctgggcctgacggaggccgaggggcagaccggggctccagccagacccctgaaaggaaggtgctcccccact

SEQ ID NO: 411122 - DNA, 122 bp, Homo sapiens
gtaacacccaccgcgaagatctgcaggttcactcctgagctgccgagaccacgaacccaccggaagaaagaaacttcgaacacatccgaacatgagaaataacaaactccagatacgcgtct

SEQ ID NO: 411123 - DNA, 122 bp, Homo sapiens
ggagcggcgtggtggtgttactaaacataacagatggcagctgtctgcggctatatagggcgcgctgacaaatccctctggatggccacgcggcgctgggctgcggggcctgggtgcacttc

SEQ ID NO: 411124 - DNA, 122 bp, Homo sapiens
atcaatgcaagtctccacccacccaaaagctctttcggacttggactttgggggtgggggcgtggactgtggaaaagggttggggtcgacatgggagttggggggacagtaagaatcgcttc

SEQ ID NO: 411125 - DNA, 122 bp, Homo sapiens
agcagcgtgtggtcatcggtcgtgtctgccaaggggcacagggaccgatggctcctgccacgagggggcccaaggcctcctacgtattcccgttctgggaagccgagctcaggagagccgca

SEQ ID NO: 411126 - DNA, 122 bp, Homo sapiens
ccccgcctccccatcactggtctctacaacaagagtccctactactgcgggacttgtggccgctggttccgcgccatggcgggcttgcgactgcatcagcgggtccatgcccgagctcggac

SEQ ID NO: 411127 - DNA, 122 bp, Homo sapiens
ccggagcccacagctcaacaggcttgggtccccttccattctgtgggaagtttgttctttcgctttttgcaacatagcttgctgctgctcactctttggtttcgtgccgcctttaagcgctg

SEQ ID NO: 411128 - DNA, 122 bp, Homo sapiens
cctgtcctgaggtaatgacccagtctttacctcagccccctcggcgatcccgaacgagcgcgcttcccggtgacggttaaaccggactctccttaaccgcagcttttcgcctcctccctcag

SEQ ID NO: 411129 - DNA, 122 bp, Homo sapiens
ctgacttccaggagctacgcaagacttggccaagtcaatgcgcatgcgcaaggagagagccgcttctccccatcacagcgattcccagggttgtcgtagaaaccactccctgaggcttcgca

SEQ ID NO: 411130 - DNA, 122 bp, Homo sapiens
tccagcatgggtgacagagcgagaccttgtctcaaaaaagaaaaataaagccagagtcttcgcagtgcccacaagaccctacgtgacctgatctcccatgactcattgctcctcgacagcca

SEQ ID NO: 411131 - DNA, 122 bp, Homo sapiens
aaacaggctaaatggggtagagatgcttaggcaattctgcacaccatgccagaagtagaacgaaattcaaatccagtgctttgcagggtcaccaccaccctgccttatgaaaatggattcct

SEQ ID NO: 411132 - DNA, 122 bp, Homo sapiens
tagtatcttatgaaagctcaagtcagagctgtaagggaccttagagattatctcatcattcgctcatttcatgtagagggaaaagacaactccaagtttaagtgatttgttcaaaggcacac

SEQ ID NO: 411133 - DNA, 122 bp, Homo sapiens
tgaaggtatcagacctacctgaaggccagaggggctgctcacgcctctctgaatctttgccgctaaaccaggtattaattgtcagcacttggggaagattcactgactgcccactatgactg

SEQ ID NO: 411134 - DNA, 122 bp, Homo sapiens
ctccaggccggtgcgctgagctccgctccgcgggcgaccgagggcggcttcagcgcgagccgggagaccccaggccagctccctcgggaagcccctaccctctggtgaacccatcccctagg

SEQ ID NO: 411135 - DNA, 122 bp, Homo sapiens
cgccccggccccgccccgggagcacggcgcgcgcaaatccccggccttcctccccgcccccggccagcctctccgcctcgacgtgcggttgcttttcagacaaataaggaggtggaggaggc

SEQ ID NO: 411136 - DNA, 122 bp, Homo sapiens
aggcacggtgctctgggcagccccgtgtggcacacaggcagctgaaggctggcggccccacgagacgctcactcggcacaggctcagctcagagccccagtcggtgcggccactccctgcct

SEQ ID NO: 411137 - DNA, 122 bp, Homo sapiens
ctgtagtaccagctactggggacgctgaggcaggaggatcacttgagcccaggaggttgacgctcagtgaactatgattatgccactgtgctctagactgggtgacagaacgagaccctgcc

SEQ ID NO: 411138 - DNA, 122 bp, Homo sapiens
gaagaaaagcacttgtgttatttagacacaaacggaactagccaatttttttccagtgaacgcattttttacttgaaagtataatgaactatgtttattgagtcttgagtattaggcagaca

SEQ ID NO: 411139 - DNA, 122 bp, Homo sapiens
gtaaggagttctgcccgcaccccccatcccccgattttgagggtcaccccttggcactggcgtagaaagctgaacttacaaggaggggaaatgtcagtggggaagaggaacgccctgcgcct

SEQ ID NO: 411140 - DNA, 122 bp, Homo sapiens
cattgatgtgcatgccagagacatagttgattctttcataagaggcaggtgagcattttccggggtcactggcatttcaaaagggaccctttgtggtccgctgatctgtctcaacggtttcc

SEQ ID NO: 411141 - DNA, 122 bp, Homo sapiens
gtgtcatccgggttctgttccttgttgctaaacgtgcaaaaccctctgacatagtgacatcgcacacacacacacgttcagtcgcagtcagtgacatcgcccattcacatactcccgtacac

SEQ ID NO: 411142 - DNA, 122 bp, Homo sapiens
atgcaggcagggctggtgcaggcttctccatactcccttccacttggcaccagcaggcatcgagcaaccagggatcttaaactggcctctccaaatactccattgaacaggactgcaggctg

SEQ ID NO: 411143 - DNA, 122 bp, Homo sapiens
tgggtgtatttcacaggaaaaaaggtgcagtgccacagtattggggagtcccaaaaggcacgctgttagggtatcagcaaagaccaccaaaatagggctgcatacagcaaagcgtgctggca

SEQ ID NO: 411144 - DNA, 122 bp, Homo sapiens
ttttcacggaacaaaaataaaaccttcgcagccttggagagatgtggctgaaataacccccgggtatgtgaaatgagcctgaggtatgtgagtggccaaacagcagccctggtacccgagga

SEQ ID NO: 411145 - DNA, 122 bp, Homo sapiens
tctacctgacgcaaaggaccctggagtgaggatacagggactctgcatgaccaacacgctcgtttctacctgagcaaaggaccctggagtgagggaactgtgtgtgaccaacacgttcattt

SEQ ID NO: 411146 - DNA, 122 bp, Homo sapiens
ccacggtgagtgagctctctttgcttggtgcatcatcgctccacctagttcaagttctggcggcttcctgattttgattctcttgggaaatgaggcctgctttagcctgaggctggctcagg

SEQ ID NO: 411147 - DNA, 122 bp, Homo sapiens
gtcctttccgttgtgaaaagtcttcacaaaatacttcaaaaaccatgtttcagcccatgtcgtatgagtaacccacaatctcatatctgttatttgtagccaggatagtcacataacttatc

SEQ ID NO: 411148 - DNA, 122 bp, Homo sapiens
aaaacaggttaagaaaattacttgggtgggcagacttaggaacgctctactcggtaaaagcgttatacaaagtcataggagaaaaatatgggacaattcatgattatacttaatctaatttg

SEQ ID NO: 411149 - DNA, 122 bp, Homo sapiens
gcaccagggccttctctaaaaaaagggccttgtgacacactgagcacgcaaagccacagccgtccctgctatccccaccctggcctgacctccctaggtcgaaacccttgagagttgcccca

SEQ ID NO: 411150 - DNA, 122 bp, Homo sapiens
caggccgtcaggcccagccccctttcgtcagaccccgcccccagccctgctgagcgaccccgccagtcgggtccatcctgcagtaaatgcacaacccggacggaagtgcctctccgacagca

SEQ ID NO: 411151 - DNA, 122 bp, Homo sapiens
cgaccctcgggctctggccatcagcagccgcggtgcagctgcctccccctgcctccaggtcgcccagcagagctttctagagctgggtgctcagaagaccccaggcggaggcaagaaccttg

SEQ ID NO: 411152 - DNA, 122 bp, Homo sapiens
aacaggaattataatccaacttttctggctggacttaaaatgactatgtttagtcaaaggcgattagtcactgcaagaacagatgctggagccaggtttctctgactccctgtccaggcctc

SEQ ID NO: 411153 - DNA, 122 bp, Homo sapiens
agtattcaatcggacaagaaatcatgcatcaacgcaggagtgacatttaccagctggtatcgtgaggaggtgggcactcggttgcacagtacacggtagtccctctccaaaagaaagacctg

SEQ ID NO: 411154 - DNA, 122 bp, Homo sapiens
gttgggtcggttgccgggtcctcaaaattataaccgccactggatctgcgctgtgcggtacggtagcctctagcccgaactaagaaatggtgcagatgggagatacatattgggtttcagag

SEQ ID NO: 411155 - DNA, 122 bp, Homo sapiens
cccaagccacctcgaggtcgagtgcgccctggggctatgtctggggaggtcatggcgtctcggggcgaatgatatgcacgttttggggcaaaactctcctaggcctcgcaggagcagctgta

SEQ ID NO: 411156 - DNA, 122 bp, Homo sapiens
ctcctccttctcctgcctcctctccaccctctccccacttgctgccctcttcccaacctgcggttccctagactcgaaagcgcaacctctaccacaatagcgcccatgtggtgccccagcag

SEQ ID NO: 411157 - DNA, 122 bp, Homo sapiens
tcctccagtcaaatttctggcagagtcaacacttacaccaaatccccagagccaccagcccgacaaccatccccacgcacaggatcagcagaatcaaagccatcacacgccaccaggaggag

SEQ ID NO: 411158 - DNA, 122 bp, Homo sapiens
ttggctgaaaaaccaaagcaacacgaatcagtacagaggaaagaaagggaagagaatacacgaggggtgatacatgaggccctgcatgatccctttatgaggacagcagccatcagttaaat

SEQ ID NO: 411159 - DNA, 122 bp, Homo sapiens
gcaaagcccatgggtggggacgggcacctcccaaatgtacagtgggcaccgataggctctcgctagagacaccaactgcgtgccccggggatccggggcgggtgggcgggcatgagtgggcc

SEQ ID NO: 411160 - DNA, 122 bp, Homo sapiens
ttccatccccttcatgcaatcctattgtcctctttcctctttaccaccattgtgtttccacgcctgtttccctgaacagaggtgagctcctcaagggcatagtctagtcttattccctgtca

SEQ ID NO: 411161 - DNA, 122 bp, Homo sapiens
tggtcaccgctggtcctggtccccttgggagggactgtggtcaccgctggtcctggtccccgtgagaatggtctgtggtcaccgctgcctgttccctgtggaagggaacgtggtcactgctg

SEQ ID NO: 411162 - DNA, 122 bp, Homo sapiens
aacggaaccagggagggttgtggtacggaggcatttaggacccaggggaaagctaggctccgtatagaaggacagagaatcgggcgcacacgcctcctaccaaaatcacagccccttgtgga

SEQ ID NO: 411163 - DNA, 122 bp, Homo sapiens
atccggcagtgtctctggccaatgctaggcggggaccattgtgacgtggccacagagccacggagtgtgcccggctctcaaaggagcggccctgacggccagactgatcacaggctactcca

SEQ ID NO: 411164 - DNA, 122 bp, Homo sapiens
taagagcaaacccaagtgctttctgagaaaggtagatagctggttatgttcctagtcgagcgatgaggctgactccacaaaggaagaagcctctggctcagaaaatggaagggtttatcgtc

SEQ ID NO: 411165 - DNA, 122 bp, Homo sapiens
gaggggaatcctgccccatttatcatcaacacagtaaaaaggggtcgaagagaccgagagcgccagaggacgccatgggctccacatccacttggattccagggagtaagcctctcgacttc

SEQ ID NO: 411166 - DNA, 122 bp, Homo sapiens
gatgtgtctggagttccaaagcaacctggagcaacctggctctttgtgtgtttctactgacgcccatggtaatcacacaataatgttaactaccgaaacccttacagattttgagtgctcct

SEQ ID NO: 411167 - DNA, 122 bp, Homo sapiens
cctgccacaggcccacactggagggagtcagcggctgagggtcgggccgttcgttaccaccgcacagcctggctcatcctggctgactcggggcagtgctgcccgggccaggcggagcaggg

SEQ ID NO: 411168 - DNA, 122 bp, Homo sapiens
ttccaagactcgcgataaccctctggggccgggagcagggagcgagacgctgagcttctgcgcctgcgccctagcgccggctgcagcctcctcacttcgagagcctgctgtttccgcggatg

SEQ ID NO: 411169 - DNA, 122 bp, Homo sapiens
gccactgctcagcgtctgcacatccctacaatggctaaaacagcaatgggtaaggcactgcgcctcgttctccgtcggctctacctggagcccacctctcacctcctctcttgagctctaga

SEQ ID NO: 411170 - DNA, 122 bp, Homo sapiens
tctctgcaaacaccggccttcctccgcaagacaaacggcctcgtctccagcccgtgccggcgctgctgataaatatttaaagctaaaaggccgagaggaagggtgggggcgggctgggggct

SEQ ID NO: 411171 - DNA, 122 bp, Homo sapiens
gctacttgcccgggcagtgggccagactcataaacatagtggccattcagaatcctgcaacgttcatgttttcgtgtattagcggtggaaaataataggaacaaggcgagacctggacttca

SEQ ID NO: 411172 - DNA, 122 bp, Homo sapiens
gcgaggtgagtggggccctaggactccgggcagggctggagcgacgggagggcgtcctggcggcggtggcggcgctgggctctggctgggacgccggcgggtcgggcagagagggggcgccg

SEQ ID NO: 411173 - DNA, 122 bp, Homo sapiens
ctgaggcggcttcctatgctatctctcttccgaggttctcacagagttcaggtaactcttcgaaagacattttgcacaacctcaagttggttataccttctcgaggttgtcgctccactgtc

SEQ ID NO: 411174 - DNA, 122 bp, Homo sapiens
gggagcgaatgggaaccgcgcgcggggagctccgtgctgtgtctagggagcgccttagcgcgccatccccgtttagcctcgcagcttccctgtagaggcaacaaccgttatctccttcgtta

SEQ ID NO: 411175 - DNA, 122 bp, Homo sapiens
ccatcacatccaggctctcggaggtggctgcactgtcttcttggatggtctggagctcgtcggactcagagggcctgtctttgaaggtgttgtcctccctccccggggcatctcgggaaaag

SEQ ID NO: 411176 - DNA, 122 bp, Homo sapiens
gtggcaggcgaccgtggtggcagtggtggcggcggcggcggtgagtgaccgcggtggtggcgccggcgggaccgtgagaactcgcggcggctcgcagcctcacaccaaacacccacgacgtc

SEQ ID NO: 411177 - DNA, 122 bp, Homo sapiens
ataaaaagaatagctgagtattcttgcttttcttcagtagaaagacttctggtctacaaacgtttatattcacatagagaaataaccacaccccagatacctaaaaaatagctttatgtttc

SEQ ID NO: 411178 - DNA, 122 bp, Homo sapiens
tgcggtggtgagttgacaagtcttgcttgctcttttgcagtgcgaactgcaaaatcctcgcgttgttttgctccctggactagtcagatgttgcgttaatacttgtgtagtctattttggct

SEQ ID NO: 411179 - DNA, 122 bp, Homo sapiens
aaaaagtgtgtttttgtgcctgcacatgtctgagtgcggatgtttgcatatcatttagtacgcctctgtgatttcccttagtttattatttttctgtgtcaggatcttgacgtgactcggtg

SEQ ID NO: 411180 - DNA, 122 bp, Homo sapiens
aactcacagcaggtttctacatgtgcaggtttctacatggatggcaactctatttggctccgcgaggctctttgttgaccccggagcaaacacaccacctttgttatttaccattgttttat

SEQ ID NO: 411181 - DNA, 122 bp, Homo sapiens
ccttcttccctagggctgtagccagttaaggcctcaggcctgctgatggcactgcctggccggagagtgtgggtacctttggacaagctttgtcaggccatgggcaaggcacagggtggtat

SEQ ID NO: 411182 - DNA, 122 bp, Homo sapiens
cggcttccccgaggcatggtggcggcggtgggacccgggcgaccttagagacggcggcagcggtgctgtcgcggggacaaatgccgcagcgcttgtcacagccggcgcaaaaaaggcggggc

SEQ ID NO: 411183 - DNA, 122 bp, Homo sapiens
ctttctctcctggctcggggtaaaaagtggctgcggtgtttggcaatgctaattcaatgccgcaacatatagttgaggccgaggataaagaaaagacattttaagtttgtagtaaaagtggt

SEQ ID NO: 411184 - DNA, 122 bp, Homo sapiens
ttgcagatggccttgatggaatcagccagtttgcagtgatctaagacgatgtcccaaatccggatgatttccgtgtagatccgccctgatttctccattgcacacgtgttctgctccgtggc

SEQ ID NO: 411185 - DNA, 122 bp, Homo sapiens
agaccagctgcccctgaaccccagaacaaccagctggatcagttctcacaggagctacagcgcggagactgggtaagtcaacgatccccagagctgggacagaaggggcagcaatggggcag

SEQ ID NO: 411186 - DNA, 122 bp, Homo sapiens
gcgacaacccatttggagaggtcgctttaatgtgtagccaaaggcatgaaaacattctcacgttgttcgccagtgatccaacttaaaggaataaaatgaaattaataacattaattaagagc

SEQ ID NO: 411187 - DNA, 122 bp, Homo sapiens
agccaccacagctggtgaagtcaccccggatttatagctaggcaggagtgaacagagtgccggctctgaactctggtccgccctcagaaacagaccagctgataagacttgtattaattctc

SEQ ID NO: 411188 - DNA, 122 bp, Homo sapiens
ctcctttgagtccagagaaaagccttttctacaaactcaagaagagggggcggagaaggacgggccgcctgccaaagcagtgacccatgttgattgtgaatttcaacaatagtgacttgagg

SEQ ID NO: 411189 - DNA, 122 bp, Homo sapiens
ctccctggaggagaactgaaacttagggtggggactgtagaaaggggcggagagatcagccgcccagccaggagttaagctgaggtcgtctgagccctgcgacagcctggacagcaactcag

SEQ ID NO: 411190 - DNA, 122 bp, Homo sapiens
tcctagaggaaagtctgagggggtccgtctccccagactcgggcgtttccggatgcctgacgcctccccgcagatctcaggttctcaggaacccggggtgatatcccgaatggtctctccag

SEQ ID NO: 411191 - DNA, 122 bp, Homo sapiens
tggtggcggtggtcttgcatgccatccctgacctgttgcgagtcttccctggctgtctgccgaccttggagccacgggagcgttggctgctgctggccacccgggttctcttggcatctgtg

SEQ ID NO: 411192 - DNA, 122 bp, Homo sapiens
ataatgtaggaagctgtctggtccattggaaacactaatctgatctcagaagtggctgatcgtggcaggatgtgtcgacgatgatgatggcaagaaagcaagatgtccgaattcccacctac

SEQ ID NO: 411193 - DNA, 122 bp, Homo sapiens
agccttgttttcttctgccatctccagaatcccaaatgtactaatcaagactcccttgttcgttctaggataacacatgactggaccacagggaaataaatggccatgaaaagatgacaccc

SEQ ID NO: 411194 - DNA, 122 bp, Homo sapiens
gcccgggaggctgggtggtctggagccacgtttccttctatttccacaagccatctgctgcgtgcatagagccgggtgtgaatgcggagtcgtccgacggtggcctgggcggcagccacggc

SEQ ID NO: 411195 - DNA, 122 bp, Homo sapiens
cagtcgctcttggaacccagcttccggactgtgaggagcccaagccacacagagaggccacgtgtggatgctcccatgaacagccccagtgcagcccagcagacatcaacatccagccatgt

SEQ ID NO: 411196 - DNA, 122 bp, Homo sapiens
aagtctgggctgctctcagagcctcagggccctgccaccccaaagtcctaggacagggagcgtgtcctctaacttttctctctccctgcactttatctccaccaggaattctcaaccttttt

SEQ ID NO: 411197 - DNA, 122 bp, Homo sapiens
agccaagaaggaaatacagatgaggtgggcggacagtatgcagatgacgggggcgggccgcgcctggcgggcggtgtgcagttgaggtggtccggcaggatgcagatgaagggggcgggccg

SEQ ID NO: 411198 - DNA, 122 bp, Homo sapiens
ggggtcatggtaggcactgcttgggtggtctcggcttcatcctctggagttggacagacacgtgtggggacagtgaggtccctggctcctcagttcagcatagaaaggatgtgtcacaaaac

SEQ ID NO: 411199 - DNA, 122 bp, Homo sapiens
ccaggacgctagggggcaaggtctacaggcggggctcctggaaataaagactccgagaggcggtgcggcgagaggaggggcggaagtgacgtcgtgtggggcgggtccgaccgcgcacaatg

SEQ ID NO: 411200 - DNA, 122 bp, Homo sapiens
aaagttgcagcaaatttcacacccaataaaggaaacttccctctgccactcacccacacacgagatcaaaaagatgacacctgttgtcacccctgcccggggacgtatggtctttcccggtc

SEQ ID NO: 411201 - DNA, 122 bp, Homo sapiens
gttccttattctctgtgccctctggtagatattattctatttaataatttattttcttaacgtttacctacccaccaagtctgtctcttttgttttgtgggaacgtaagttaaaaaacaaaa

SEQ ID NO: 411202 - DNA, 122 bp, Homo sapiens
aatcacagtgaccaggctgaggagtggacaggttcctgcagagccacaaggcagcagcgccgtggggggtggggctgcagttggggatgactcacccccaatccagtgggggtgcccagaca

SEQ ID NO: 411203 - DNA, 122 bp, Homo sapiens
ttgcgggatgaacgcgtttgcccaagaccgagtgttaaaatggagtcataagagtcgccccgtgcgggtgtttatagaaggtgaaaacacgcaggtttgcaggccagcgcactgggaaccga

SEQ ID NO: 411204 - DNA, 122 bp, Homo sapiens
cccaccgtcacaggcaaggcccaaacaccgggaacggcaagagggtgcatttgccactcccgtgtcgctagcaccggccttgacagtggactattacaaggatttctgtgggcccgctctga

SEQ ID NO: 411205 - DNA, 122 bp, Homo sapiens
caggggcgtggcggacatcagagttcctgtgactgtcagctctggggttctccgggaacacgtcaaaggcctggggctctgagcccacagagcccttggggtgggctccagggatcataggg

SEQ ID NO: 411206 - DNA, 122 bp, Homo sapiens
gtgggacataatctgccccattcccccggatgagccccggggagagtaagaggagtgcggcgtcacgaggaatcagaggagaggagggtgggtcccttcaagcctagtctcgtttgctggaa

SEQ ID NO: 411207 - DNA, 122 bp, Homo sapiens
gtgcctccttctcacaacgctaagatgggaagcagacacgtgccctgtagggcatctgctcgtatgtccggcttgagctcctgcctgagagttgctgtggctctggagtctcagaagctgca

SEQ ID NO: 411208 - DNA, 122 bp, Homo sapiens
agcagggaaggcgtgggagcgggacagaggggcagcccggagagcgctggccaatcggagcgcgctccgccagcggccaatcacgggccgcctagcccggcaaatctgcccggcagtgcggg

SEQ ID NO: 411209 - DNA, 122 bp, Homo sapiens
tccaattcatgcctagacttttgtgtatccccaaattcctggtgatgttctgctacacgacggaccattgacactaggtgtctggccttagcatgacaaagaactggagggaacttcacact

SEQ ID NO: 411210 - DNA, 122 bp, Homo sapiens
cagcgactgctcctctggggacgtcagaaggcaggacggagaccccctacaaaacacacccggacgagcaggaccaagcaaggatggggcactcccaccgcctcctgcaacacacacccccc

SEQ ID NO: 411211 - DNA, 122 bp, Homo sapiens
agtaatactatcctctttatgacttgcagcaaaccagagaatgcattcaatcaaatgaaccgatcttgtagaaacactggaatcatttatgcgttgcagtttctctttcttgttttcgctcc

SEQ ID NO: 411212 - DNA, 122 bp, Homo sapiens
taccagaggcaaatttaagctctgctcttgaaagcaatccagcaaacatttacagagtggcgctaagtgccctgctctgtggagagatacagtaatgagactggcccagtttctatgccaag

SEQ ID NO: 411213 - DNA, 122 bp, Homo sapiens
cgagtcacgcggtgatgtcgagcgaagctgttttccgagaaggtcggggcagagccggtgcggggcgggtggtgtccgcggggcgggcgcaggtctccccgcagccgcagcctccgttccgg

SEQ ID NO: 411214 - DNA, 122 bp, Homo sapiens
cgccggtggatcgcgagccaaggcggcgggtggagcctgagccgtgaggccgtggccaatcgcgccgctccgggggaggagccccaaagggggaaaagaaagtgcggcggaaagtaagaggc

SEQ ID NO: 411215 - DNA, 122 bp, Homo sapiens
gccacctacagcctcggagggtgagcgtcatggcggcttcttgccctctcccggtgaccccggacctgcccacgctgcgtgccaagttgcagggactgctgcagttcctgagggatgccctg

SEQ ID NO: 411216 - DNA, 122 bp, Homo sapiens
ttctgcacttttcggcactctgccctaaagcaagaaccatatcccacatttgtgaggctacggaagacctgaagagaatctatactggagatgatgggtaccaaagacagtcttaaagccct

SEQ ID NO: 411217 - DNA, 122 bp, Homo sapiens
tttgagccatcgtacccagccgtgttttatttttttgagatagggtcttgctttgttacccgggtttgtcatagatccgtgcccattttatagctggaaaccctgaggcccaggggactgag

SEQ ID NO: 411218 - DNA, 122 bp, Homo sapiens
ggggtggcctcgtccgtgcgcacagctcacctgtctgtggttttttctaggactgcccgccgcctccgtcctgcacttgattcctctcgccttattgctggacggtggtggaagggcaagaa

SEQ ID NO: 411219 - DNA, 122 bp, Homo sapiens
gacctactacatccaccagttactggggaaccctgaattcgcagcccctgaaatcatcctcgggaaccctgtctccctgacctcggatacgtggagtgttggagtgctcacatacgtacttc

SEQ ID NO: 411220 - DNA, 122 bp, Homo sapiens
gggcaccctaaaaacggatgtcaaagtctgattgcgccggccactcagttagcccaggcccgtcacccacctctccgcggctgccaggttaccagccacacttcccacccacccagccgggt

SEQ ID NO: 411221 - DNA, 122 bp, Homo sapiens
tctgggcttaagtgacttggccgtgatcaaaacacaggcagagtcacaaacacgagaccccgctgcccactcccgacggagaggtaattccacaaacacgagaccccgctgcccactccaca

SEQ ID NO: 411222 - DNA, 122 bp, Homo sapiens
gcaaggaaataaactatgaggcaagagaaaggctttagaagatcctccaactgttctcatcgttctgttagctggtctcctgatgaggttctgggtgagtctcaggggctgaggaggtgagt

SEQ ID NO: 411223 - DNA, 122 bp, Homo sapiens
cttctcaacttgattaccaattttccattcaggctgaaatatgtggagttcaggcagatgcgaatgaaagctggatccaagctgatctttaataggcttgtttccagcatgcctttgatcat

SEQ ID NO: 411224 - DNA, 122 bp, Homo sapiens
ctgacctggctaaaaacaaaattcccaacaaacacacaaaaatcccaaaacaaatgtatacgctacggtaaacaaaaaggcattttgttcagatgtaaaatatgttttgtgagattattgtc

SEQ ID NO: 411225 - DNA, 122 bp, Homo sapiens
gggtgatactagctctcattaaccgtccacagatttggggtgttatgtgactgaaaggaacgaggctgcaggaaagccacaagataacgatccgtttctgtgtgtcagctgtattcttcctc

SEQ ID NO: 411226 - DNA, 122 bp, Homo sapiens
gttggtgcccattggctttcgcataaaagctccgaggttacagacgtttccacctcttgccggcctcttaggtaattggcgtccgtggtaaccaatcaggaagaggatctgagggaacgccg

SEQ ID NO: 411227 - DNA, 122 bp, Homo sapiens
ccccgaggccccaagcaactctcctccaactgtctttagggataaccctgagcgggcagccgctctactctatacctaactttatccgtaccagatacctagcctcactcagggcccccctt

SEQ ID NO: 411228 - DNA, 122 bp, Homo sapiens
ggttacttcacagtctacacataacccggagcacgaaaaagcctctggtaacacaagagacgctaacacagacaatatcagattcaaagaaagactgaaaatgccaggccatttagctgaga

SEQ ID NO: 411229 - DNA, 122 bp, Homo sapiens
atcttaccgttgattggaccaaattgttactcccttattttcattggaccttacggcagccggcgcgcgagagttacccaatcagcaagcgctccgcctcctgccttttcccgccctccgct

SEQ ID NO: 411230 - DNA, 122 bp, Homo sapiens
ggagcccttctaagtatggagggtccggtgctgcatggctctcaacagctggccctgacccgtgtcaccccatctgtccactcgcctttgtcaatccccataaatctgcctgatggggaatg

SEQ ID NO: 411231 - DNA, 122 bp, Homo sapiens
ggctttagcatttgacttggcaaaccgttttgctaaagatcaacccttcgctctgtggttcgccccctctctgtcacagcctcacagccgagttgtctttgaaacaagactagagctcctgg

SEQ ID NO: 411232 - DNA, 122 bp, Homo sapiens
tcagctggatgttaatagctgattaattcaggatgctgatttaatttgtgacctataaaacgctatttcacagagaatgggctgtgttggcatgtgcagagaccagctccccagatggaata

SEQ ID NO: 411233 - DNA, 122 bp, Homo sapiens
tatgtgcctcaggatatggacttgtctttgcccagatttgtcctctgggctctcatgaagcgagtctcagacctaaagtaaaaccccaagacttagctctcatgatgccggcagcagtcacc

SEQ ID NO: 411234 - DNA, 122 bp, Homo sapiens
acgagattcccgagtacgtctacagtcagccttgtgacatttgaagttctacaatgaacccgtcggagatgcaaagaaaagcacctccacggagacagagacaccgcagtcgagcaccatcg

SEQ ID NO: 411235 - DNA, 122 bp, Homo sapiens
atacactgtgttgtgatgaattgtttcaagcaaccagaagagtactgagaatatttaacccgcacccgtgcacccaccctgaattaagacgtgtgtcgcaactcagcatctttatcggcagc

SEQ ID NO: 411236 - DNA, 122 bp, Homo sapiens
ccgctctagaggcggaggtatccgtgctgtccagtatccgtggctataattggtcggacacgctggggaaatactcttacaggcctctagggggcagaatgatcagtataacttattcagaa

SEQ ID NO: 411237 - DNA, 122 bp, Homo sapiens
ggaaggaggcctgagggccgcgtgcagcgggcgggcagctgggtgggctgggggcggccgcgcggcgtcccggagcctcgggccgcccggagccggcgggcgggcggaggcggaggcggcgg

SEQ ID NO: 411238 - DNA, 122 bp, Homo sapiens
atcagacttagattagaaacaatgataaccaaggcccatttgccctaggcaaaaggctggcggcaggaggccttaaagagatttaacaggctctgtgttttatttcatcatgtattctatct

SEQ ID NO: 411239 - DNA, 122 bp, Homo sapiens
tcttcgcgacctgcgcaggcggtcgctctgataaccgcatcccggtttccgggacgacagcggaagtcacttctcacacgcctttcttattggataccggcttttcatggggccgagcgccg

SEQ ID NO: 411240 - DNA, 122 bp, Homo sapiens
cagaaatcttaagccctttacattgcctccaggcaacagagctccaaaactaatttactgcgttgtcctaagagaaagaagtgcctcagtttcttcatatttcaaaaaggcaaacacaacca

SEQ ID NO: 411241 - DNA, 122 bp, Homo sapiens
ctaacttctgggacgccatggcgatcgagggctcctaaaaccccagattccgacgggaaccggctcctaaacagtccctcgggcctcggcccgacttctcacacgcccctccctcacctcgg

SEQ ID NO: 411242 - DNA, 122 bp, Homo sapiens
aacaccacagcgcagtctagtggccggaggagccaaggaggcgcggggtggagactgggccgagcaggggatagagatgaactccagaaaggaacagcgacttgctgaaagtcacagggcaa

SEQ ID NO: 411243 - DNA, 122 bp, Homo sapiens
tggaagaaagacaaggatggataaaaccaaatcagtcattagtagtaggaggtacgaggccgtgagtgatggctcacagctgtaatttagcactttgggagtctaaggcaggaggatcacta

SEQ ID NO: 411244 - DNA, 122 bp, Homo sapiens
taacagtgttagttttatttttgtactgcaatttttagtttaaaatatgttggatgcactcgtcaaataattatgtatactgtctgttgctgcctggtgattcataaccaccagcttaattt

SEQ ID NO: 411245 - DNA, 122 bp, Homo sapiens
catttctagcattgactgaagagctcaagcttgacactcgacctcaatccttagcagcaccgcccaccatgctcccggaagctgcgacactacgccctgcgctagtcccgggacgtggggtt

SEQ ID NO: 411246 - DNA, 122 bp, Homo sapiens
aaccttaagccaatgcacatttatagaacaattccatgtgatcctggggaagacagactgcgggtggagggcagtgctgaaaaggagcctctggaagagagggccttctcccgcttctctcc

SEQ ID NO: 411247 - DNA, 122 bp, Homo sapiens
tgccagggtttactttctgcatcaatttcacaggcgtccagcctggctgaggattttttgcggtttttaactggaagggaaataagtcggcatcagcacttagggctgcttaacttttaaaa

SEQ ID NO: 411248 - DNA, 122 bp, Homo sapiens
aaacccactggagctcaggtggaagccagcaaaattggcacaggcctgtccaagacacagcggagtagggcaaggtggtcagcactacttacagaattgctgaggtctcttccagagctgtg

SEQ ID NO: 411249 - DNA, 122 bp, Homo sapiens
gagaaagggccctggctcctttcattgtgaaagggcactgggcatgggagagcatgcagccgttagaagaaactctctctcagatcctttgctaagcactttgtttttatttttaatttaat

SEQ ID NO: 411250 - DNA, 122 bp, Homo sapiens
ggggtcgcggccggggtcagagtcaagctcaggtgtaggggctgggcccttcactaaggccgcatcggagccgctctcccgggcggtggggagcgcgacctttctcagacccgagtcaggat

SEQ ID NO: 411251 - DNA, 122 bp, Homo sapiens
tgcccccgccggcccgcggctgccagccggccctgcccgcgcccgggccccgcgagcggccgcacttcaccttacggaggggagataatgagatcaattagaggcgccgtcaccgcgccgga

SEQ ID NO: 411252 - DNA, 122 bp, Homo sapiens
tcaatgtaggcattcagaaaacagggcaaaagccacttctctcagggaagacagcctgaccgggagaagatactgagtttactgtggggctattgcacttagaagacctgaaagtcatctaa

SEQ ID NO: 411253 - DNA, 122 bp, Homo sapiens
agggtggacgtgctggtgggacgccgagggggaggccacccggcgaagctgcatccctctcgcttctgtcgtcggagaccggcattcttggcgccctccacctccagccccagagaccattc

SEQ ID NO: 411254 - DNA, 122 bp, Homo sapiens
attttgcttgtcactaatccttatcttcaccagtaaaaatcattcagtgaggattaatagcgctttactacaggagtgggtggctgtctttgaattattaaagagcaattgttgcttctgta

SEQ ID NO: 411255 - DNA, 122 bp, Homo sapiens
ccattgtttttagtacatatgttttgtgtatttaaaaaactgtgttgaggcgccctggctcgccctgcgccagaggctcgcgcactcagcaggttgggctgcggcggcggcggctggggaag

SEQ ID NO: 411256 - DNA, 122 bp, Homo sapiens
agaccagcttcccaggggggcctccatcggaacagaagtcagccgcttgctctgtgtctgcgcctgtccctctttccccagatggaggggaagagaggagagaggcacagaagacaggtgca

SEQ ID NO: 411257 - DNA, 122 bp, Homo sapiens
tgtccacctggctagagctcagacaaggttttccccacagatacaaacttccaaccagcacgtaggtttccaggctaacccacaaaagcaagttgagtctagctcctccatattgatccaca

SEQ ID NO: 411258 - DNA, 122 bp, Homo sapiens
tccaccaagcagcctggaaatgctcatcctcacagggcattggagaggtttctcaagaagcgagtgcctccatgggggaaataattaaccccagattaaatgctgcttcagacctaatggat

SEQ ID NO: 411259 - DNA, 122 bp, Homo sapiens
ccgaggcctgacgcgcgccccagcggcgcgagcggaagagatagagcttcgcggagacggcggaagcggagagcaacagcgcgccggtaacaaccagccccgtatcccctccctctgtacct

SEQ ID NO: 411260 - DNA, 122 bp, Homo sapiens
aaaatagactatatgatgagtgtccagagaaggtgttaaaactcagcggctaatatagaacgctttatgagtttccacgagaataagtcaaatgtaaatgagcctcaagtctggatcacaaa

SEQ ID NO: 411261 - DNA, 122 bp, Homo sapiens
caagatacatgaatgtaccccttacacatggcacaaattactatatgcaatgatgttcatcgaagcattgttggtgttaacaaaatattggaaacagcaaatattcatgaaaatgtgacaga

SEQ ID NO: 411262 - DNA, 122 bp, Homo sapiens
gatgaagccagagaaagagaagccacgtttcccgccatggaaacacacttatgagtccttcgcgatgggcaaagcccacgtttgagtagcagctgctcgtccccttgccctttgcccaggtc

SEQ ID NO: 411263 - DNA, 122 bp, Homo sapiens
gaaatcacccgtcttctgcgtcgctcacgctgggagctgtagaccggagctgttcctattcggccatcttggctcgggaagtgtcgctgaattctcttatgtacataatcatgttttctgct

SEQ ID NO: 411264 - DNA, 122 bp, Homo sapiens
gccaggacgttctgggggccgagagctcaccctgcaggccacccccggccccggccccagcgttctcgcagtggaatagtcacgtttgtctgggcagctccttcagcgttgcctgcttcctc

SEQ ID NO: 411265 - DNA, 122 bp, Homo sapiens
agcctccttagctaccgatggtttttcctctccttcagagatgtggaagaaaggaaaggtcgtgaacaacagggtaaggggaaaccaactgattcttcgaatagataaagattgatcataag

SEQ ID NO: 411266 - DNA, 122 bp, Homo sapiens
tactcccagatttcccactagagataaattggcagtcttaaaaatgggttcacggtctttcgtgcctttggctttagaagacacggtggccagcctactgttctttggatcatcccactcat

SEQ ID NO: 411267 - DNA, 122 bp, Homo sapiens
gaacaaagccgcgcccactcaggccacgcccgcaccttgtcgctcccctacccatccttacgtttcagatactgactttgcttcttttaccgagagaacagaatcagaagggaacttccaga

SEQ ID NO: 411268 - DNA, 122 bp, Homo sapiens
ccggctgtgggggtcacggacccctgcttttctggggtgtggctgtagttgtagtataaacggtcgtgcttattttctatacactgacctcacgctcttcacgttcctgctgacctcacaat

SEQ ID NO: 411269 - DNA, 122 bp, Homo sapiens
ggcggaggagggggaggcggcggcggctgcagcatccagagctggccgtggcggccggcgcgccccgcgcacaaaagcacccagccccaggggagggcgatgaacacaccacatcccgggcc

SEQ ID NO: 411270 - DNA, 122 bp, Homo sapiens
ggtcagctggccgccggcacctgtgagattgtgaccttggaccgggacagcagccagcctcggaggacgatcgcccggcagaccgcccgctgtgcgtgtagaaaggggcagatcgccggcac

SEQ ID NO: 411271 - DNA, 122 bp, Homo sapiens
gaccctcgagtcagcccagagctgctgctgggtgtggacatgctgcagagccccctgacccggccccggcccggcccccgctggctccggagccgcaactcggagctgcgtcagttgcgtcg

SEQ ID NO: 411272 - DNA, 122 bp, Homo sapiens
gccgacaggactcctggcaatgtcaggagctgtggaggtcctcactagtccgcgctgggccgcagctttccggagcgcagaggaagctggccagcctgcagatagcactgggaaagacaccg

SEQ ID NO: 411273 - DNA, 122 bp, Homo sapiens
cctggtccaagctggagcagggcagaggctgacagccggctcagcccaaggctgccggtgcgtgcatatgcgtgtgtgctcgcgtaagccctgtgtgtggtgctcaccgcccagggcgagga

SEQ ID NO: 411274 - DNA, 122 bp, Homo sapiens
ggtttcagccgcagaggggcgggagaaagggcctggttggtaggcgggctcagcggttcgcgcccagttagccccgagcttcggagacccgagagaccagaggatggctgacacgaaggggc

SEQ ID NO: 411275 - DNA, 122 bp, Homo sapiens
tggagaggtgggggggcggccaatcagggagcagcggccgggggcggagctgggccggggcggggcgaccctcgggaggccgggccacccgggaagcctctgctgccgccgcaccggcccgc

SEQ ID NO: 411276 - DNA, 122 bp, Homo sapiens
atcacctcccaccaggccactcctccgacacatggggattacaattcgaaatgctatttccgtggggacacagagccaaaccatatcaatttccaaccttaactatataaaatagaaggagg

SEQ ID NO: 411277 - DNA, 122 bp, Homo sapiens
tgaggctagcactgaccatcgggaagctctgggtggcacagcttcaggtcctggcaggtgcgagcagggctgtcctgggtccctgttggccgcctcatctgctcgatctcctcccgcaggga

SEQ ID NO: 411278 - DNA, 122 bp, Homo sapiens
gaaggaaaggggaatggtagagggaaggggaagagaaagaaaagaaaacctatggaggtacgttaataatcagaaggggccagaggaagccacctgacacatttgtgagacaatttaaaagg

SEQ ID NO: 411279 - DNA, 122 bp, Homo sapiens
tgagggaacaaagagctcctgatgaaatcaagatttgtgtgtggcttaagtatggggcctcgggacaggcgagactgtttggtgaaggaatcttcttcaggaaaatatggggagcttgcaga

SEQ ID NO: 411280 - DNA, 122 bp, Homo sapiens
cgtgccactggtcaccatcagccgggggcgcgtcgtgtatgagaacggcgtcttcatgtgcgccgagggcaccggcaagttctgtcccctgaggtccttcccagacactgtctacaagaagc

SEQ ID NO: 411281 - DNA, 122 bp, Homo sapiens
cggaaaatggggtggatgtgagcggcgccggcctcttcctgctggaatgggaattagcggcgaggattattttgaggacgcgaggtccctttgtgcccaaatgcgcctcctcctgcccggct

SEQ ID NO: 411282 - DNA, 122 bp, Homo sapiens
aagctgggagttgccactcccagacttgttggaatgcagttggagggggcgagctgggagcgcgcttgctcccaatcacaggagaaggaggaggtggaggaggagggctgcttgaggaagta

SEQ ID NO: 411283 - DNA, 122 bp, Homo sapiens
agttggggggaaagaggaaatcttaaaactgagttaagtcagcagttcagcaagtgcttacgaaagacagtcaaaatataggcaagttactttaaatgggtattatttgtccttactttccc

SEQ ID NO: 411284 - DNA, 122 bp, Homo sapiens
ggcacttgcactgtcttcttagcagaattgccaatggccttcctcgagtcctacgtttagcgattggcaagaatcatgcactgacagagctcgactccggagggcacaaggaagtagacaac

SEQ ID NO: 411285 - DNA, 122 bp, Homo sapiens
cggccgggtgacattgggtggcgtgtgctgcagtgtgtgtacgagagcgagatgtgtacacgcctctgcccgtacaggcggagaattcggttcttattcatggagaactccgggcgcacaca

SEQ ID NO: 411286 - DNA, 122 bp, Homo sapiens
tccagccaggcccaggggctgagaggaggctgtgtggagaggtggttaggagccagggctcggtcagctgagttcgcatgccagcttcctagctgtgggacctcaagcaacttgtagcccct

SEQ ID NO: 411287 - DNA, 122 bp, Homo sapiens
agccctgcacgtgttggggcatagtggatgggtctgactgtcgctctgccctaaactttccgcttttggggatgagccaagaaaaggaggaaaaaagatactaaaaaatggacccacttgta

SEQ ID NO: 411288 - DNA, 122 bp, Homo sapiens
tcactgatgtggctccaggctgacctgctcctgtcaaagaatattgagcaagatgcctctcgtggaatgttctgggaccttaaaacagatacccaagtattccccctgatttcatggttccc

SEQ ID NO: 411289 - DNA, 122 bp, Homo sapiens
cgactagcgtcctgggggcggggctgatatgtcgaggggcgtggcctgctgctctgtgggcggggccaaacttaggtttcattcacttggggacccggaataggttgaggccagtaaagttc

SEQ ID NO: 411290 - DNA, 122 bp, Homo sapiens
gatccaggtagcctcggaagggatcacctgctggatgggtgtgagctcctcagggtggggcgccgaaaccctcatggctcctgaggtagagccggcctccttggtaacacatgggactggga

SEQ ID NO: 411291 - DNA, 122 bp, Homo sapiens
ataacttttttgaatagtcgtgtgtcttgattaccaactcactctgtctttgctgtatgccgtattaaataccaattccatattacttttcacttgtttaaagcatttgtttttttctgatt

SEQ ID NO: 411292 - DNA, 122 bp, Homo sapiens
tactcttcctgcagtcagggtctgcgtgcacctttcgcaccagggccccgtgcttgtagacggcagccccaggctcgggagtcaggtccaggaaagggctggagccactgccactgcccccg

SEQ ID NO: 411293 - DNA, 122 bp, Homo sapiens
gctcattctcccctgctacacacatacacacacaaataatgtttctaaaaagttcagttgcgactttgtgcctcgcctgtcctgttcatcctcgtcctgggccggggaatgcttctgggggc

SEQ ID NO: 411294 - DNA, 122 bp, Homo sapiens
gctttcagctttgggaccaggctgcccaaaggtactcctttatacacccggcaccttccacgaaagatggtacttcccaagcaagcccctatgatttgtcactatagatggaaccctgactt

SEQ ID NO: 411295 - DNA, 122 bp, Homo sapiens
cgccgcgcccggggcccctctgtcctcgctgctgtggccagagccgagccggcgcaggggcggaggtgctgcaggagagttaaggaaaacgggccatcacctcagttcgcaggtccgcgctg

SEQ ID NO: 411296 - DNA, 122 bp, Homo sapiens
gtgttactggtggagctatgcaagctcgtggatttagggagtccagcctacgagaatggccgcctgtgacagaaagcaggggcgagcgtctgggaatagagctgtgctcatggcagaacaaa

SEQ ID NO: 411297 - DNA, 122 bp, Homo sapiens
tgcagggtgggggcggggctccgcatgtctctgcgggggctgggggctcccagtgataaccgccattgcagaattaaaactgagacagtgaaagagatctgacctaaccaattccatcttgc

SEQ ID NO: 411298 - DNA, 122 bp, Homo sapiens
gatgtcctaaaacatctctgtctctcccgatccttccttgttctataggtggcattgagtcgtctgtggaggtcaaaggctgtacagccatgattggctgcaggctgatgtctggaatctta

SEQ ID NO: 411299 - DNA, 122 bp, Homo sapiens
tccatctcaaaaaaaaaaagtaaattattcatttgtcattgatatgctttctatcaatatcgggaagaagaaaacagctgttagtgaggaatagacttgcacctactccaactctagctgaa

SEQ ID NO: 411300 - DNA, 122 bp, Homo sapiens
actagagcctcacttcccgtttgatgagaaactacgtgatttactagtaagccatggctgcgctttccctggtgaagaataagacgtgccttacagactccctaaaaggcacagacttgcaa

SEQ ID NO: 411301 - DNA, 122 bp, Homo sapiens
gcatagacgcgcgcggttggcagtggtctgttatccgctcctttctccaggcctcctctccgggattaagcgcctcaggacccgtccgccaggccacagcctgggctcaacctctcccagac

SEQ ID NO: 411302 - DNA, 122 bp, Homo sapiens
tctcaagaccctggctctgtgggcgactgcacgtgtggcggtgaccatcaaggtttctgacggatcttgtcaagagacttaagtcatcgtcacagtatttcagacgaacgcagtgatgtggc

SEQ ID NO: 411303 - DNA, 122 bp, Homo sapiens
aaataaactatctgaataaaacttcttaacgggggttgaggctgaagctgaaacgggagtcggacacgatcttggctcctgaagtctttaaaggtcagtttgatgcacacttctataccacc

SEQ ID NO: 411304 - DNA, 122 bp, Homo sapiens
agggtctttaattacacatgtatcttgtttgtaaatttagtcacatataatacaagaatgcgtaacaaaaaccatgtctccacatttctggcccttgccccaaacaacatttttagttcaag

SEQ ID NO: 411305 - DNA, 122 bp, Homo sapiens
accctgccgaaggctgtttcaggttcaggcttggccgaggtcccaagtcaacagggccagcgacggccagggccccaaggcgagcagagccccgcacagaacgtgcagggaggctcccacgc

SEQ ID NO: 411306 - DNA, 122 bp, Homo sapiens
gtggtgtcctaagaccacacgtcactacagccggctgcgcgctctttcggcagctgtggccgtctcagcagctattgtttgtccctgaagtactggtgccggcaggattaggcgtggagcca

SEQ ID NO: 411307 - DNA, 122 bp, Homo sapiens
tgggcttgatcttagagaaacatgcaagctgctacaacttagcggagaatttccatgccacgtcaatttacagccagccccctaccagagttctgtcgctcagggcaccagcggtgctttgt

SEQ ID NO: 411308 - DNA, 122 bp, Homo sapiens
cctaaccaccccggtcaccactcgggacatatccagccccacccaaaaaacagaaaaactcggtgatgcaggactcaagacgctccccagccaaaaaccacccagggatgtgcggacctagc

SEQ ID NO: 411309 - DNA, 122 bp, Homo sapiens
cggtgggtacaggacagtgggtgcagccaaccgagcgtgagctgaagcagggcaaggcatcgcctcacctgggaagcgcaaggggtcagggaattccctttcctagccaaaggaagctgtga

SEQ ID NO: 411310 - DNA, 122 bp, Homo sapiens
ccaatcagacaccttctcctcccgcactacccaataggcatgttgggggggcggggcctccgtgaagtcccggcctcctgttcgttctctccgcctcccgaggccccgggtgagaaacgggg

SEQ ID NO: 411311 - DNA, 122 bp, Homo sapiens
tttgcattctcctcggagcacacagaaagacattttccagttatcttgcacacaagtgggcggcgggacccgttttggccgggaacgttgtcaggaacgctgtacaccacttccaggcggtc

SEQ ID NO: 411312 - DNA, 122 bp, Homo sapiens
aatcttgatttcttatgtttgtagaagggcctgggaatccgcacatttgacaagagcccccggtgagtctcaagaacaggaggttttgaccccaaactccatctgtccctcagtcactgctg

SEQ ID NO: 411313 - DNA, 122 bp, Homo sapiens
gaattgtaagaaaggggtagaaggctacattctatcctttggcccagccccagccccaaccgtgttgattgttaaactcacattaggccctctgctcagaacctctcaggagagaaaattga

SEQ ID NO: 411314 - DNA, 122 bp, Homo sapiens
tcccctatcagaaagcccggcctcggaccacttctcctcctcaccatctgggggcgctgccgcgctccccaagccttgtggaatttcgaaaatgtgcgccagggcgacacctcttgatggta

SEQ ID NO: 411315 - DNA, 122 bp, Homo sapiens
actggaagtgatctctgaagcagttgaaaaacaaaccgagcggcatcagcggatgaaccacggataaaccaactgtcatgtagctgaacaatggaagattattgggcaataaaaagaaacga

SEQ ID NO: 411316 - DNA, 122 bp, Homo sapiens
accctggtcaagagctgcgggtcagatggtgacggggaccaagcttttagatcaaggtggcgcaggtggaactttcaggtcaggctgacggctctttgcctgtcactgagagctatcagact

SEQ ID NO: 411317 - DNA, 122 bp, Homo sapiens
tcagttcatggaagcagctatctccttcacttactagcagtaagactttgttttcatcttcgagtttcaaattcttcactgtaaaatcttggtgattaaacacaatgcagttgctgcaaaga

SEQ ID NO: 411318 - DNA, 122 bp, Homo sapiens
tcaggaagcgagcccaccaccgtcggcccagcgcctgttgatcggccaggccttctgggccggtcatactgggcccttcctaacctgaggagattgcacagtagggctccctggtctggtca

SEQ ID NO: 411319 - DNA, 122 bp, Homo sapiens
catggggagctacggtgtcttccaggcaggccacttagctgaaggctgaccaggcggcagcgaattccaggcccaccgccacccagcctcgcgactgcagcggcccaaggctcctgttcact

SEQ ID NO: 411320 - DNA, 122 bp, Homo sapiens
agggcggagagactgggtagtcggagggattccttacacccaggccggtgggccagggctcgggatgtgtcgagctgctggagtccaaagtcaggcatttccctgcctctgcccggtaaagc

SEQ ID NO: 411321 - DNA, 122 bp, Homo sapiens
ctccccgcgctgatttaggagccgggattgcggtggcagcagccggcagccaggctggcccggcgcggcgcggcggccactggggtgggcggcggcgaaggcggcggcgagggcgggcgccc

SEQ ID NO: 411322 - DNA, 122 bp, Homo sapiens
gggaactaggacagacgagtcagagctgcccagaagccccagggcctgggttggggcaggcgggaagatccctgctgagcatggtcacctagcaggtcacccagcagggcagcggccacagc

SEQ ID NO: 411323 - DNA, 122 bp, Homo sapiens
gcaaggatgcctgctggagaacattccttactgcccggtgtgaggaaggcaatttctaaccgcaaaggagccaaaggagagtgggctccctggtgaaatgtttgcccgggtcctcatgcagg

SEQ ID NO: 411324 - DNA, 122 bp, Homo sapiens
gggcacctctggagtagtggctgcatggatgacccagccatgtgcagcagccttgaatcccgtttccctcactgactagctgtgtggccttggacaggtatttgaactctctaagcgctggt

SEQ ID NO: 411325 - DNA, 122 bp, Homo sapiens
agaactgacgtgaatgcccacagggctggatccaaggagtggggaagcaagtggggagggcgggatgcgtgcaacagacaaaagatgaagaaccagtgaccaaatcctgttagtagaaaaca

SEQ ID NO: 411326 - DNA, 122 bp, Homo sapiens
attacagaatcaactggagaggaaaaaatcttcatctaacactgaagtctttctattctgcgaggtgaaatcctttgacctagattctgtcccttgaaaggcaagtgacagtaggtgagcct

SEQ ID NO: 411327 - DNA, 122 bp, Homo sapiens
gaaagggaccaagctgattcctccccagaaagtcaggggtcatcttggtcctcagggaggcgggggagtcagcagccctgtgggctcagtctgtcctctggccaccttaccctgaggctttt

SEQ ID NO: 411328 - DNA, 122 bp, Homo sapiens
cgcgtgtttgtggtttctgacttggctgtaggtgacctctcagtttttcccagggctcggcgtgtgctctgtaacacagagctgctgagttgctgctttgcccagctgtgtccggctaagcc

SEQ ID NO: 411329 - DNA, 122 bp, Homo sapiens
tagcaatgcattattctccctcctacagctgtaaggcactttggtgaatgtgtaattcctcggcaatagttagttgtgtctttagaagcaacagagcctcctgtgatccagctactacagca

SEQ ID NO: 411330 - DNA, 122 bp, Homo sapiens
gattgggtcatatgtccatcctaaaccaagccttgggaccaggggataaagcactgtaatcgcccatccatgggttacctgcccccttctggaagcaggattgggatcagtcccaccccaat

SEQ ID NO: 411331 - DNA, 122 bp, Homo sapiens
gtctttagaaggccagttcctttacgtgcctctcaagcccatgctgaatttctctgttctcgtcctagtgcctcttttgacaagccacgagcctcactcagcccagagtgacacttatcact

SEQ ID NO: 411332 - DNA, 122 bp, Homo sapiens
tttctcactttattaaagtcacaatagatttggcagcagacaaaagtggctggtcccctccggccctccgctaggcgggcccatcccccatgccccacacctggccctccctaggcagggcc

SEQ ID NO: 411333 - DNA, 122 bp, Homo sapiens
gcccccaataaatatttgcaggggatgccagggcttgtggccgtggcgggggtgggtatgcgccaaccctatttcaggcagcgctcaaagtaggtggagccgatgtagccaccccgcatgga

SEQ ID NO: 411334 - DNA, 122 bp, Homo sapiens
tgcccgggacaggtccccgggaccctccagcccaggtgaggaggcggtccctccccagcacgtctaggaagcgctgccttggggtcaccagactgtaactctcatggcacaacaagaatacg

SEQ ID NO: 411335 - DNA, 122 bp, Homo sapiens
aggacattatccctgtggttccctcagtgaaaggagactcgaagcgcgactagaagtcgccgggccccatagatctgcggtgcccaggccgtaggcggaggcgcgggcagaggcggcggcgg

SEQ ID NO: 411336 - DNA, 122 bp, Homo sapiens
tctctgccctcagccagtagggagctcagcatcgccagcatcaaggtgacagttgctacccgaaggtctccggggatccgcaaagccttcttccaagacataactgagacgaagggaaaagc

SEQ ID NO: 411337 - DNA, 122 bp, Homo sapiens
cggccgcgtcagcggtaggtggggctgtggttacgctgccgggcgggggtcgcgccggttcggtccccggggctctgcgggcgccgggcagagacctgcggccagggcgtgtcccgtgtgcc

SEQ ID NO: 411338 - DNA, 122 bp, Homo sapiens
ctgtcttctcctcactgatgcacatagatgcctgaccagaggagagatttagttttcatccgaggattatttgttatgttgcagttctgaaattcccataatgtttaaactagaacacaagt

SEQ ID NO: 411339 - DNA, 122 bp, Homo sapiens
ggggatgagtacctgtgccaagacatccttgaaaactccaggatacgcaccacctgactgcggaacagtgagcacaagacacccggagcgctgcagaatgggcacggcatccttggtaccgg

SEQ ID NO: 411340 - DNA, 122 bp, Homo sapiens
tggttgactcccactgagatttatgcattgctgcattgcaaaggttgaaccacttcagcccggcagcgttttcctgtgacccctgcgtttacaataactattaaagacgacagtaaaacata

SEQ ID NO: 411341 - DNA, 122 bp, Homo sapiens
aaggaaaagatgaatagccttttaggtacttcgggacctgctctgagacctcttgcctgacgcccttggtttttgatagaattctagagaaggggtgagcccttttgtctgcctggacacat

SEQ ID NO: 411342 - DNA, 122 bp, Homo sapiens
gccatcctgtgtgaatccgttcttccctgttctggctccctctccagcggggaggctcaacgtgtttccaagaggagcaggcggctcaggcaagaagtggaggggaataaaattaaatcgcg

SEQ ID NO: 411343 - DNA, 122 bp, Homo sapiens
cacttatccagctgacccaggcgagccgcctagcctcatttttctcccttgtgaaaagaacgccctgcctcttcagggtggtcacggggctcaaatgagagcatgtcagtcatggttcgtgc

SEQ ID NO: 411344 - DNA, 122 bp, Homo sapiens
cctttcctagtcaaggaaaggggtgacagacagcacctggaaaatcaggtcactcccacccgaatactgcgcttttccaaccggcgtaaaaaacagcacaccacgagattataccccgcacc

SEQ ID NO: 411345 - DNA, 122 bp, Homo sapiens
gccatagcaacagacagctgtctcctgaggctggcagccaggctagctagcacaggaagacgcttaatgccttccatccctgagtgctgcattcactgtgtgctagtgttcctacccgggaa

SEQ ID NO: 411346 - DNA, 122 bp, Homo sapiens
acctcctccaagaagtccccctgactttcccaggcaggtgagaggcttcctccatgctcccgctgtgcactgcctcatccaatcacatctgttaggtccccccaccagaaggagtccctcat

SEQ ID NO: 411347 - DNA, 122 bp, Homo sapiens
gtaatccagttgtgtgtgagaatcagtaatgtgatagttgtttccagctcttccaaaggacgcatgtttaacttctagatgtatttttagagctgaactgttggggcagaggaggcttgtag

SEQ ID NO: 411348 - DNA, 122 bp, Homo sapiens
ggaatgaaccccgtgaaccaaccagtggatccagcatatgagcctctgccaaacggtccacgcagagccgcagccacgttcctctcgagaggagagcgagacattctccagggtggaccaca

SEQ ID NO: 411349 - DNA, 122 bp, Homo sapiens
ggtggaggagtcgggggcgtcccgctggactggggcacagctctgcagcagcagccggtgcggttttgccttgtaagtgacaccgttgcctgcaggcatctctgacagctgctcctgctcca

SEQ ID NO: 411350 - DNA, 122 bp, Homo sapiens
ccttcccatccattccctctgcaccctgaccccgctgcccgcagagcagccgagggggctcgttccactgcccgccccctccaaccagagccacgtcctgggctaggccagggtccttgtct

SEQ ID NO: 411351 - DNA, 122 bp, Homo sapiens
ctcctacacgacagaagataaccgggccactgaagagaaactcattttacttgtgggccgcgtgtagtaaaatctgtgaccaccagggggaagcacagacctggtgctgctgtagacctggt

SEQ ID NO: 411352 - DNA, 122 bp, Homo sapiens
cgcggagaaaacagccggcgcgccgcgcgagtgcagtctgggtctggagcctgagccctgcggaacctcggcgctcggccccaccccgcccgtacctgcacttatttattgttgttatttct

SEQ ID NO: 411353 - DNA, 122 bp, Homo sapiens
gtgatgccccgtgagcacccacagaccgaccgtgggcaccaaggcaggctgctcccacaccgaggcctgcagaattcctaccctcaagtacatgggagcacctccacacactggatggaagg

SEQ ID NO: 411354 - DNA, 122 bp, Homo sapiens
caacctaatacggctgcccatggcaatggtcagcgtgtgatggagagagcgatattctaccggggcagttgctggcagggagctctgatgaggcaggtgggccgtgatggaaggatacggtg

SEQ ID NO: 411355 - DNA, 122 bp, Homo sapiens
cgtactcgctgacccactctgattcccttagtgcctcggtgggaagctaggagtctggatcgcccacttcatccctcaggagtccccctccaccctgacctgagcccactccactgacccca

SEQ ID NO: 411356 - DNA, 122 bp, Homo sapiens
gtaatttgctgtggccctggaggggagcttgcacccgaggtttcccagtgcagcgctttccgtgtgaaacattttgctttcattcggcagctttaggcgtgaagaaaagggggagggggttg

SEQ ID NO: 411357 - DNA, 122 bp, Homo sapiens
tggggagcccgcgggaaggcagtaactcgtagagagaacggaggaaagttcgagtccgaacggaggaaagttcgagtccaaactccacccgcggtggccactctcctgctcgtttcccttcg

SEQ ID NO: 411358 - DNA, 122 bp, Homo sapiens
aaaaaaacttgaggctgtccttgcaaacggtcctcatggtgctgggggtggtgccaggcccggcgtttgcctggaacacagagcatgcgagaaggagcagaggacgtgggtgccagggaagg

SEQ ID NO: 411359 - DNA, 122 bp, Homo sapiens
taagaaggactttcggagtgaaactccacagtgcggttcaaagacacgcttaggatgccccgggatggagagaggactgagcttggactggaattcctggaacagacgagggcttgtgagct

SEQ ID NO: 411360 - DNA, 122 bp, Homo sapiens
gcaccctctggatctcggggtccatctccacgttgagcggggccaggaggctcttgttgacggtgacctgagggatgcccccgggtgggcacacggagggacacttgggccccagcccggcg

SEQ ID NO: 411361 - DNA, 122 bp, Homo sapiens
caccactatacagtaagcaagagggccctgcagtgccccggcgccagcagggggcgctggcgaccactgtaagcaagagagccctgcgcctctctgcgccggcgccggcgcggcgcgcctct

SEQ ID NO: 411362 - DNA, 122 bp, Homo sapiens
tcccctgagcaggcggctctcacctcatcaacagactgctccaagagttgacctctaagacggctgctcagaaccggaagagcagaagtggcagtgagatggaagctggtgtggtcacaaat

SEQ ID NO: 411363 - DNA, 122 bp, Homo sapiens
tcagtgaagacctccaccgccctgctggtggcctggagggaaccagtcctatttgtgctccgccagcctgctgtgtgtctgaaagcccactgtagttcagctttcagttgctcccaggttcc

SEQ ID NO: 411364 - DNA, 122 bp, Homo sapiens
tgcgcagcagcgagaatttcgacgagctgctcaaggcactgggtaagctggtgcagagggcgcgccccgacggggagatgcggcccggaggtgccctggtcccggaagtgccccggtcctgg

SEQ ID NO: 411365 - DNA, 122 bp, Homo sapiens
ggaatggaggagttgtttggggagggaaaggagagagaaggaaaggagtgaggtatttcccgtctaacagaaagcagcgtatcaactcctattgttctgcactggatgcattcagctgagga

SEQ ID NO: 411366 - DNA, 122 bp, Homo sapiens
gagaaagaacgcagcttttaacgcgttctccttggttgggcacctttcttgggaaagctccgcctaccattgcccttgtacctgtcctctcctctctccctttcctgaagtgactgcccgtc

SEQ ID NO: 411367 - DNA, 122 bp, Homo sapiens
gagcgacaccaggaccctatcccagaggtacaagtatgaagtgtttctgacgcgaggctccgggacaaatgaattcaaattcctgaagtctgttatccctaagcatccgggcgctgtgaatg

SEQ ID NO: 411368 - DNA, 122 bp, Homo sapiens
aggcgcgctctgggcgccccgagtcactgcaggtggaggagagccgcgtgtggacctcaccgtggagaccttggcggcagcttcacaccacgcccttgctgcttgccgagcagcgtgaacgg

SEQ ID NO: 411369 - DNA, 122 bp, Homo sapiens
caatattcattttattaggccattgtgagagatctcagctcagcataatgggcaacttcccgtgactctgggccactgggttattctgggacttaactactctgagttttctcactagaaag

SEQ ID NO: 411370 - DNA, 122 bp, Homo sapiens
gtaattgcctcactgtgcaccagcaacagtttgcaaattggcaacgatccctgcagctcacgctgcacagaacgggcctggacagcctgtgcctggtaaataagccgacaggagatgctcgc

SEQ ID NO: 411371 - DNA, 122 bp, Homo sapiens
ctggctccagagccacagggtgagggacacaggactctgtccccacggtgctgaccacttcgtcgtcattacaagaaagtattcccaaaggcatcggtttacttgttatcttaggttgagtt

SEQ ID NO: 411372 - DNA, 122 bp, Homo sapiens
agcatggtacatacagtgttgtccttccacagacatgtacataccctctgcacctggcctcggtccactgctaagaccccaggacccctctctctgacctcaaagtcatcatccaggtcact

SEQ ID NO: 411373 - DNA, 122 bp, Homo sapiens
gggcgcgctgcctgcaggtcagagggcgcagcctgcggcggggcctcggggcgggaaagccgaggctcggggagaggacggcgggaccccaccccgcaggctaagcacagccctcgccctct

SEQ ID NO: 411374 - DNA, 122 bp, Homo sapiens
tcctccagatgccccagaacggggcgaggaacagcctcccatcacgcctgtccctccacacgattctttttgttagcaagcacgtgtggtgtggcggggctgacaatccacccacgcgaagg

SEQ ID NO: 411375 - DNA, 122 bp, Homo sapiens
tgactccctcaatgttctcccttctttatcatacaggctccttaactactggctgctttgcgtgtggtggactttaaatgatcacacgggtgccttaatcacagcctttttatgagtgacac

SEQ ID NO: 411376 - DNA, 122 bp, Homo sapiens
gtcggggcctgcaggatggtcatggtcgggtggcagctgcgagagtgacacatggtgagccgagcggagtgtaaggccaagtgagggtcggctgccggcagaggtaatttatgtgctcctga

SEQ ID NO: 411377 - DNA, 122 bp, Homo sapiens
attggccctatttctgaagtcaacgtagttctgtcatcagaggatgctgtacttttctggcgcaggtgcgagagaagctgccaatctctcctggagcgggtgggactaaggagggccccggg

SEQ ID NO: 411378 - DNA, 122 bp, Homo sapiens
acagccacacagtccagagaatcctgctcattgagtaattatttctcatttaacgtgctccgttgctgtagagaacttaatgtcttccaggagctcctcacaggcttttgagctgtgactgt

SEQ ID NO: 411379 - DNA, 122 bp, Homo sapiens
cccaaccagagtgacctgattgagcaggcagccgagatgctttatggattgatccacgcccgctacatccttaccaaccgtggcatcgcccagatggtgaggcctctctgctcctacctgcc

SEQ ID NO: 411380 - DNA, 122 bp, Homo sapiens
aaggggtgacagatggcacctggaaaatcgggtcactcccacctgaatactgcgcttttccgatgggcttaaaaaacggcgcaccacgagataatatctcgcagctggctcggagggtccta

SEQ ID NO: 411381 - DNA, 122 bp, Homo sapiens
ctgcggcatctcgcggcagcgcgtggacaggttgaggatggcggtggccgccatgtgggccgcctccatgtcgtgcgtgtagtcgaagctgctcttgctgcacgtgctgctggcgctgctgc

SEQ ID NO: 411382 - DNA, 122 bp, Homo sapiens
gcgccgggcggcaggcggggtggcgggcagcccctgggcgggcggggtcctggcgagaagcgagccggcggcctgaggaggcgactgactgagcagcgcacccggggagcaaggaggcgcgg

SEQ ID NO: 411383 - DNA, 122 bp, Homo sapiens
gagcagcacctggcctggcactccctctgcacacattccatgggcaggcaagcaggggcccgggccaggcagtgtactgtccactgctctgccatcccccatgacaccccattcctgttcct

SEQ ID NO: 411384 - DNA, 122 bp, Homo sapiens
ccaaaaaaaatcagtgagtgagatgggagtgtcacggagcgctgtgtttcaggtcctccgcgacatcctcaaggaggttcagagtaacatggtgccgcgcagcatgctcaaggagtgggcgc

SEQ ID NO: 411385 - DNA, 122 bp, Homo sapiens
gggtggctgggccagaagcagataccaggctttctgactcctgctctaggattctcaccacgtactggctagacttatacttctcaaatcttaatttcctaaaggcaagtaacagtttgaat

SEQ ID NO: 411386 - DNA, 122 bp, Homo sapiens
tatatatatgtaaactttgcagttgctttgggctttagccctaaatgaagacaaagtgtacgccattcatggctatttattttcctttttgtctctacttagtgatttaatttcagcgtcat

SEQ ID NO: 411387 - DNA, 122 bp, Homo sapiens
cctgtgggagatcagcaagcagatagaaggccatacgatttgtgctctgggtgacggggccgcctggcctgtgcaggtattcaccacccttctgcgtagcacggagggtgggtggcatcaag

SEQ ID NO: 411388 - DNA, 122 bp, Homo sapiens
gtcaccaggcaggctgtggggcctcctccaagcactgcctctgctactgctgggggtccacggttacgaggcaggggctgcctcatcccacaccaccacggcactcctgcgacaccgcagcc

SEQ ID NO: 411389 - DNA, 122 bp, Homo sapiens
gagtcaggagcccacaggtgtaatgctgttgagcttgatccctaagccaagctgcgctttcggctttgccatgtactagttgtaaattatttaacttcttgtgcctctattacttcatctgt

SEQ ID NO: 411390 - DNA, 122 bp, Homo sapiens
agaccaagaacccaccaattctggacacattttggcgaccacgaagggactttcgcctatcgcccagtggtatgacaatcaccatgtggtgagaccatcgcctattgccgagcagtgagaca

SEQ ID NO: 411391 - DNA, 122 bp, Homo sapiens
ccccgcgccccgcggggcggggggctgggaattggagcctttctttgccagctctggctccgcttcctgcccgccctcctccctcgcttcggcggaaagcttctctctcaccttcgctgagg

SEQ ID NO: 411392 - DNA, 122 bp, Homo sapiens
gccgcattcactctcctcaggcagaactactgtcctgagtgaggtccctagccgtatctgcgaggatatatacgcaggcacgcacatacatgcacactcacacacagaacacacatgcacac

SEQ ID NO: 411393 - DNA, 122 bp, Homo sapiens
cgaactcgagagaggcgggagagcgagagggacgccgccagcgagcctgcccacggccggcgctcgcagaccctcggccccgctccccggatccccccgcgccctccacgcccctcccgcgc

SEQ ID NO: 411394 - DNA, 122 bp, Homo sapiens
gtcgcgcagcccgttactgacgtactggttcttcctccacatgctgtagtcggagctatgcgcggcccctgcaggaccacccggccgcgccgcggaccatggtcagacactgcggtcgggct

SEQ ID NO: 411395 - DNA, 122 bp, Homo sapiens
cgtacaggttcatcttgtatttatggtctggctccaggcccgagatggtgaccccttcctcgtgccctggcaccctcactgccttgggctgcccatctccattcctgtactggaccaggaag

SEQ ID NO: 411396 - DNA, 122 bp, Homo sapiens
agcgcctggtcctgggaccccgcgggcactgtggagccgcccctgcgggcccaccctgggcgcctcccagggacttggtttgatttaaacaaaaataaaggtggcattgggtagcctgtgtg

SEQ ID NO: 411397 - DNA, 122 bp, Homo sapiens
ggtttcccctgtaccaagcacagtgctgactgcattacatgggtttttctttttactattcgtgacaaccttctgaggtaggtatcattactgtccccatttacagatgagacaactgaggc

SEQ ID NO: 411398 - DNA, 122 bp, Homo sapiens
tagaagaacaaatgaattcttaatccccaaaatcaacagacagccttccctgtgaagaaacgttctgtcaagtgctgtatgtggccagtgcccataagccctgatggtgaagcattagtaaa

SEQ ID NO: 411399 - DNA, 122 bp, Homo sapiens
gagcacacactcttggacattctgctgccataaagcagagggttgcagatggccatgtaccggtcaaaggccatcacagccaggatgtagatctcaacatggaccaaggcgataaaaaggta

SEQ ID NO: 411400 - DNA, 122 bp, Homo sapiens
ttcagccaccgtgcagaaaggtgcctgcgtcctaggtgtgcgggtgatgccgcagccctccgcagtccccggagagttgctgtgctgccgagactgcggagagcatgttcaggaagggattt

SEQ ID NO: 411401 - DNA, 122 bp, Homo sapiens
ccgccggctttccacccacctgcccggctcatcacctctgactcctgcgggccttccagccggcgctatctcgcagcccccgaccagctcggcctgctgtcgggcatctctgctgtcctccg

SEQ ID NO: 411402 - DNA, 122 bp, Homo sapiens
gatgtcccctgccagattgaggcaagactatctataagtcacgtgcaacagaaaccttaccgttgtaatgaatgtaaacagtccttcagtgatgtttctgtctttgatcttcatcaacaatc

SEQ ID NO: 411403 - DNA, 122 bp, Homo sapiens
gaggaaggaattggagtttcctctttttctgaacgaaggcgaggaatctgcctgggattccgcctacggggccacaaaggaagccatggccccacgattctaccacaacatttctgacgctg

SEQ ID NO: 411404 - DNA, 122 bp, Homo sapiens
gcaagtcagctctcttttctcacctcctgtaagcaacactaagtatctggctgttcctttcgtactcgagtcctggccgctccatgacagcacttgtggtggtactgaactgtgatggacac

SEQ ID NO: 411405 - DNA, 122 bp, Homo sapiens
ccgaccctcgtcccggaggctcaggctggcccttccaatggcactggtggggcagggcagcggggcaccctcccgggccgcccggcccataggcccctcctcctgccaggctctccgccctt

SEQ ID NO: 411406 - DNA, 122 bp, Homo sapiens
gagggcagggcttagcaatgtgtgtcatggcgatgaggtcgctgtcatctttaactctgacgtttaggaaggccagttgtgcaaatttctttttatgcttcctttcagttgctagcatggtt

SEQ ID NO: 411407 - DNA, 122 bp, Homo sapiens
gattattattttcatttctttaagctcccaggcgctgcagcatggtcatgcccgagaactcgtgccatcccaggtgaagcagcgctgggccgggaccagccgcacctggcccggctctgagc

SEQ ID NO: 411408 - DNA, 122 bp, Homo sapiens
cccagcaaaggagctggtgctcaacaggcctttagagtcctctctccagctgtggctggccggctgcccgctctccctgctcctctcagctccagagaaaaatggcttttagataaagctcc

SEQ ID NO: 411409 - DNA, 122 bp, Homo sapiens
cgctgccaccgcggagcctgcaggtgctcctgctgctgctgctgttgctgctgctgctgccgggcatgtgggctgaggcaggcttgcccagggcaggcgggggttcacagccccccttccgc

SEQ ID NO: 411410 - DNA, 122 bp, Homo sapiens
cgatgtcgcgtgtcatatcctcgtctcccacgttgcaattagaaacaatatcagtgggggcgtgtccaccttctgtcgttttgaaggtaatatcatcgtcttgcctccaggatcatgggaac

SEQ ID NO: 411411 - DNA, 122 bp, Homo sapiens
gaacctgatttagcccacagtttgagctgtggagtggtgacctggcctcttggtgagttccgggtccccgtgggactgtgtgctttgcccttccgggttctgcggaaggaactcgttagctc

SEQ ID NO: 411412 - DNA, 122 bp, Homo sapiens
agccactctcaggattgcggggcagtgggcaagacctgatccagagggtgtgcattaagccgttgccctcgttgcgtttaattctcccgtcactccccagtcactaagggaggcctcctact

SEQ ID NO: 411413 - DNA, 122 bp, Homo sapiens
aatcaccctcattaggagcttcgtcaccggcctaatgaaagcaaaccgtgtggaaatcgccggtaaacagttgggtctgtgctgtaattaattcggtgtctcttttaatcaaactgaaaggg

SEQ ID NO: 411414 - DNA, 122 bp, Homo sapiens
tggctcaggaaccagagctcacggttcctgctgtctctgccccttgacctcggtgtgaggcggctgcgactgggtctctgctgtgtaaatattgtgcctgagggccattttgacaatgaccg

SEQ ID NO: 411415 - DNA, 122 bp, Homo sapiens
acacactgcactgagaccaaggcaggatgcagatgtgatgggactccgcatggcttcacacgggctgcaagcaccttggagccaaggcgttgagggcaccccactgccctgggtgtcagccc

SEQ ID NO: 411416 - DNA, 122 bp, Homo sapiens
cgacacttcatggataacgtagatgcttcaagtccagttcggctctcattggctaccgcacgcagtgagggggcggggaaagtagcggcgaggccccgccctcacgcaggagccaatcctga

SEQ ID NO: 411417 - DNA, 122 bp, Homo sapiens
tccaatagagtctgcactaggaaactggtgggagccgaggtccggaagtccgacgctggtcggtgggcgcatgcgcagcgcgcgctctacggcgctgaaccggggcgagcagagagctgtca

SEQ ID NO: 411418 - DNA, 122 bp, Homo sapiens
tgcactgcccaggtgtagaatgaggtcccctgggcctggggttagagggatcacaggttgcggaaatccgacggagctggagcccggaggtgtaattttccatctccacaccagggggcagc

SEQ ID NO: 411419 - DNA, 122 bp, Homo sapiens
gtagttgagaaatctctaagaggtgagtctgtggggactgacgacttggcttccttggaccgccaaggaagggtctggtaggagccaagaagggtcggcaccacggaccttcagtaggcaag

SEQ ID NO: 411420 - DNA, 122 bp, Homo sapiens
gaagagttggtattgcagttcaactttgaagacagtctgctggcagaatcccctcctccgcgggggaggtcagtcctttctctcaaagccttcaacttattgggtgaggcccactcacatta

SEQ ID NO: 411421 - DNA, 122 bp, Homo sapiens
ctgtgcaagacttaggccaagaacagggaagagcaggacacggtgggtgggaagaagccacggccactcagcacatctctggagggagagcaaacagaccctggaagaaaatttggcagctt

SEQ ID NO: 411422 - DNA, 122 bp, Homo sapiens
cacggacttgttcgggagtgggagcgcctgtgtatcccagttcccccttggaaatagactcgactcctggactgttagcctcggtatttagagagacatccccctggcttggcccaggggcc

SEQ ID NO: 411423 - DNA, 122 bp, Homo sapiens
aaggatggcggaggagttttccttggaagtcattatagaacgaatgtgcttgcgcacgtgcgtccatccccgcacacagtcggccacactcaccttacagaaagccagcagcgcggccccat

SEQ ID NO: 411424 - DNA, 122 bp, Homo sapiens
ccagagggcagccagtcaagaagatttctggttattgggctcaaagcatctttaaatggtcgactgagggtgagagaagcaaccccacacatttcctggtttgcagtttgaatgtgtttagc

SEQ ID NO: 411425 - DNA, 122 bp, Homo sapiens
agtaaaaaggttctgtttcacagctgctcagagacagctcctctgggcatgctcaggtatcggaaaataatgccttttaaacagagaaatgccaatcaggattttgtgcatactttcccttt

SEQ ID NO: 411426 - DNA, 122 bp, Homo sapiens
gggctagctatcgcaaccggcgtgtgtcgccggcggcagagagacaagcgagatgggaagcgacagttgggagatgcacaccgtctccttaatcagctcaggagggaccccatttcaaggtg

SEQ ID NO: 411427 - DNA, 122 bp, Homo sapiens
atccggggccggtttctaaggctccggacggcgccggcagagtctgtcttaaagcgacagcgcgcacagccaggttccagcagtccctgcgccaggggtgctgggtggggtgggcctgggtg

SEQ ID NO: 411428 - DNA, 122 bp, Homo sapiens
cctgtttgtggcctgctgaccaaaaccactgaagacggattgcccgctctcctgacactccgcactggagttagtcatcaaaagattgctcagggaatccaaagttttacaggttgtctcgt

SEQ ID NO: 411429 - DNA, 122 bp, Homo sapiens
caacctatccagcggcggcttcggaaaaaacccggggctgggtcaggatgggaaaggcagcgaactgaaccgttttgagccccaagttcggggccgaatgtcttccctgtgcgcagaagcaa

SEQ ID NO: 411430 - DNA, 122 bp, Homo sapiens
gcacctacccatagtccccaaggtccagggtgtgcagctccagctggggctccccaagcccggctggcgccccctgcgaggcaaagcggaccagcttgtgggcgccggacgccagcgggccc

SEQ ID NO: 411431 - DNA, 122 bp, Homo sapiens
gccgcggagacccccgggagaggcgacagaccccctctcccggagtaggagggctttgggcggacccagccctccaccccctcctgaggaggaggggggggaaatggaggctcggggcggtt

SEQ ID NO: 411432 - DNA, 122 bp, Homo sapiens
cactggcataaaaaactaaagagaaaagcctgggactggaaatttgcagagcagctccaccggttgaaagttggctttgtttagtgcccaacttcgcagaagattttcctcggctgagtggg

SEQ ID NO: 411433 - DNA, 122 bp, Homo sapiens
ggcaacatggcgaagtcccatctctacaaaaacacaacaaattagccaggcatggtggtgcgtgcctgtaatcccagctaccatggatgctgaggtgggagaacatttgaacccacgacctc

SEQ ID NO: 411434 - DNA, 122 bp, Homo sapiens
gattcacccagatgggtaacctgagcatatgccctcctatggatcagctcaggaattccacgctggcttcaacacaaaggccttttcacccgtgcttgctaacattcagattcccattaaag

SEQ ID NO: 411435 - DNA, 122 bp, Homo sapiens
aagtctgttacaggtcaggaccatggagttggatggctgtcaatgggcctattctaggagcgctcgggtggccgagttacacctggctataagtcatcccgtgcacctgactaaatgcatcc

SEQ ID NO: 411436 - DNA, 122 bp, Homo sapiens
gacttccatcagtgcaagatttcggcagtgtctacaaaatgaacatttggtctgatgtagcgtgctgtgacccacagctgcaacaaccagctgcgtctgctcaaacttcagccatcagccag

SEQ ID NO: 411437 - DNA, 122 bp, Homo sapiens
tggctatgccttctaactccaaccagtcacttgagaatattctttcaagattctgggccccgattcttttctgtttaaatccctaaagcaaagatctaattctcaagcaatgtctgtagttc

SEQ ID NO: 411438 - DNA, 122 bp, Homo sapiens
tgcccacatttcaggtaggtctcctggaaatctttgtgcaacactggaattagctgccatcgaaccatgggctctgtgctgttggagccaagagaaaagagtaataagagttggaactggtc

SEQ ID NO: 411439 - DNA, 122 bp, Homo sapiens
cagtctccccaggcacaacacagctaacacaaggccccgcaggcaggactctgggacagacgcaggccaggtgagcatctgaacaaggggcagtcggccagggtgggcttgcgggagtcccc

SEQ ID NO: 411440 - DNA, 122 bp, Homo sapiens
ggcataggacaaaggaaatacagatgcaagataaaacgttaggcaaaatccctgtagtcccgattctgagttagaggtataagtatgaactcatacttgaaaaacaatttatttcatatttc

SEQ ID NO: 411441 - DNA, 122 bp, Homo sapiens
tgaacaaggctgtaccagagtgcctgtgctgttgtatcctgacacaccaggtactgcatacgtctccatctcgaaatgcagaagcacactgaacacacatggcttagctctttaacaataat

SEQ ID NO: 411442 - DNA, 122 bp, Homo sapiens
aagacaagcaacaatggaaaagtgtggcaacatcctggccacatggcaagggaaagcaaacgctcgcacatgctggtggaagtataactggcaccacttctatggagcagaatttggcacta

SEQ ID NO: 411443 - DNA, 122 bp, Homo sapiens
gtaactgttctataaggatgggtaggtatcctggcaagatatttcctctgaaatagtaaacgtgaccttagaagttactgtctagggcactctcagctgaataaagtctcccaaggaaacac

SEQ ID NO: 411444 - DNA, 122 bp, Homo sapiens
caggctgccagggcgattcctgtccgcccatctcgacccccgacctggccccgcaagggccgggagcctggccttccatgaagctgtctcaggccgggaccagccccagccccgacggccgc

SEQ ID NO: 411445 - DNA, 122 bp, Homo sapiens
caattctggccttctgaagcttatattctaaatggaggatgctgtagactgctgtgaatacggtggaatcaataagcatttacattgtgatgggaaagacttttgtggttagggaagcattc

SEQ ID NO: 411446 - DNA, 122 bp, Homo sapiens
gtcccgcactgggagggagagcgtgagctgtgtggccaccccaactccgacgcctccctgcgtccccagccctgctggccacacctgcgcagagtttctgggtccccacagttgctgttggt

SEQ ID NO: 411447 - DNA, 122 bp, Homo sapiens
atctaatgaggcaggagccttctcagtgatctccactttccagacgaggaaacagagacacgcagagaaagacagaggcttgcccgaagtcgcacagccagtgttttggggagctggaattt

SEQ ID NO: 411448 - DNA, 122 bp, Homo sapiens
gttgggccaggtgtggtggctcatgtctgtaatcccagcactttgggagactgaggtgggcggatcccttgtggtgaggagctgggcatggtggaacaagcctgtaatcccagttactcggg

SEQ ID NO: 411449 - DNA, 122 bp, Homo sapiens
ttgacacaggtctccttaacagctgaggcagtgatgcctacaaacactggacaagacagccgcttacgtcaatgatgggtgctgcactgccagtactctcgggagtcaagcatgggaaagaa

SEQ ID NO: 411450 - DNA, 122 bp, Homo sapiens
cttcagatgcgctacaagcacgcttcacgcgggcgacaaactgatgggagctacaactggcgcttcattgcgctataaactgatgggcgctttatgtgccacaaactgacggatgggcgctt

SEQ ID NO: 411451 - DNA, 122 bp, Homo sapiens
acctggcaaacccaagacgatgcgctcttacttgtgttgtttgaaggggccctgctgccgcgcagttgtcattaatgccaccctcacctcccaggaactgcaccactaggacggacgacaca

SEQ ID NO: 411452 - DNA, 122 bp, Homo sapiens
atgaggagatcagtataaacaggagggacaatagggatggattattggccttattgataccgggttcaaagggaggataggatgataccatgcatagcccaggctgtctgtgagtgtggttc

SEQ ID NO: 411453 - DNA, 122 bp, Homo sapiens
catctccagattcttccccagccactcctggctgcttcctcctcaggtgccgccaccttacggagctgaactcggtcacctgacgcttcagcaagcaggggcttgtcctgaagctggggccg

SEQ ID NO: 411454 - DNA, 122 bp, Homo sapiens
gggagtggagagaaccctgccttgtaacagggcagcggacagcaggtaaattgccttccccgggagtagcgtgccgcccggcaggggcctgggtgtgccaaggcccggctctggggatttca

SEQ ID NO: 411455 - DNA, 122 bp, Homo sapiens
agcagggcttgggacctgcagcctaccatgcccgagcccccctcaccccctgtgggttcccgtgcatcccaagcctccccgatgggtgccgccccctgctctgaggtgcccagtcccatcga

SEQ ID NO: 411456 - DNA, 122 bp, Homo sapiens
tttcatttccaaatattcacctcccagcttgggggccgagaggtatctcaagccttctttcgcaaaggcatctatattcaagacccagccgttttactcggtgttgttttttttcttagatt

SEQ ID NO: 411457 - DNA, 122 bp, Homo sapiens
ttaagaagcgggtgtgccttctgcattctttcctcttctgccaaaggccccaaagttctacgagatggttaaggtgaccaactgtcctggtttgccctggactgagggagtttctggaatgt

SEQ ID NO: 411458 - DNA, 122 bp, Homo sapiens
gaacaccacgctgtctggttaataagcaccggtggtgacctgtggaaccaaccgctgcagcgcggttctgtgttcgccgcccctcgtccgagcgttcccccctcccctccctttttccatca

SEQ ID NO: 411459 - DNA, 122 bp, Homo sapiens
tgtttcagtaaagtgacttacaggaaccagacaggaattgtaattatacaaaggggatttcggaggaaggaagttagtctcagtccagggaataatgagggcctgagctcaggagtgcagtg

SEQ ID NO: 411460 - DNA, 122 bp, Homo sapiens
cgagccctgagccggacagagcgcaagtcccacggagggcgagccctgagccggacagagcgcaagtcccacggagggcaagccctgagccggacagagcgcaagtcccacggagggcgagc

SEQ ID NO: 411461 - DNA, 122 bp, Homo sapiens
acgagcgcgacttggccttagcgcgggccttgcctccctgctttccgcgtcctgacattacggctaaaattgcagttacagcttcttttacaaggagaagaatgtggaaagaataaccaatt

SEQ ID NO: 411462 - DNA, 122 bp, Homo sapiens
cgtattctcccaacttcctgttgtgccacggctggtccaagctgctcttatcagacaatgcgaggcacttccacaggaggggacaaccccgtccttaggagccccttctccctgcccccagg

SEQ ID NO: 411463 - DNA, 122 bp, Homo sapiens
ataaggggatgagtcttgtttgtaacgtggcatcccttgtgccttgggtccctgcatatccgttgacccacagtttcccctttggctctgcctcacagagtgtggaaaccagtgtgcttggg

SEQ ID NO: 411464 - DNA, 122 bp, Homo sapiens
ttagcgtgtgtgatttcaaaattttagcatgcatcaagaaacaacatttttcttcacagccgaaataaccagattgcacttttaaaaaataattagttgggcatggtggctcatgcctgtaa

SEQ ID NO: 411465 - DNA, 122 bp, Homo sapiens
agggacttgacctccgcctggcaccctggcgtaagggtgattgccacatctcggattcgccgcggggcaactacctgggaaaaccgcagactgggcaatgaaagactacatccggcaaccgg

SEQ ID NO: 411466 - DNA, 122 bp, Homo sapiens
gcctccatcttgcagattagaagatgatgtgtctggagagtcggctttctgatcaagtttcgccttactaagtggtgcaccctgggaaagggacagggagaagcacaaagtgtggggccacc

SEQ ID NO: 411467 - DNA, 122 bp, Homo sapiens
atctccttcaggtcgtcttccgatagggtctttgtactcaccttcttccccaggaggtctcggaagtccagctgctccacctcctgctggcggatcgcctcctcagtgtgctgcctcgtctc

SEQ ID NO: 411468 - DNA, 122 bp, Homo sapiens
aagaggatcaaggatgagtttcctttttcccaacttaggtgactagtggacacggagatacggggaagaattgtaggttgatcaacaaaagatgagttccgattcgtaaattatgactttga

SEQ ID NO: 411469 - DNA, 122 bp, Homo sapiens
ttccatcagaatctctaacagctccaggacccaaaagaagtgaagagccgctgtctgcagcgtccacaccttgtcatggaagctgacgtggatgaagtccctgtactgcagccctgtggtgt

SEQ ID NO: 411470 - DNA, 122 bp, Homo sapiens
aagcaggaaggcagcagcagctcagagcaatgcggtggtcaggaaaggctccaacgacttcgggccagagagggacgggtttgcggggtgaagaaaggggtgatgggcttcagtgcttcaga

SEQ ID NO: 411471 - DNA, 122 bp, Homo sapiens
aagctgatctgcaaggattcggagttgtgctaaaaggactttgatttttttccccctttacgaacgctggcaattgacatcactacagacagcctggttagagaacaaactgcctcatccca

SEQ ID NO: 411472 - DNA, 122 bp, Homo sapiens
gcagtatctcactttattttggccacaacctgatgtcatagacaccatcagttttgcatacggggaaattgagggtcagattggttaactgatttacataggagtgtggctgggacttagaa

SEQ ID NO: 411473 - DNA, 122 bp, Homo sapiens
aatgaaaattacctgtgtctgtagaatagactctgaaacttttatcccagaagccacagacgagaatatagcggttgtctgaagtgatgacaaagcactgggaatgcacttgaatactttgg

SEQ ID NO: 411474 - DNA, 122 bp, Homo sapiens
ggctgaatctctcaatagtttttcaacctcatacgcaacgtaagacacacttgaagagtgcggcgcaaaaggtaaaaaccagcctagagttttaacatgtttcatctaacttcccaacgcgt

SEQ ID NO: 411475 - DNA, 122 bp, Homo sapiens
atatttagcagtaaccttatgaggttcaaattggtaaatctcttgtaatttagccttcatcgaataataggtaccagtgtattaaaaatgtgtattttttgcagccccttgaaccagagtag

SEQ ID NO: 411476 - DNA, 122 bp, Homo sapiens
gagaactgtaaatagggatttgggcagtcccggctgattctgaataaaagtccggaggggcgttactttcgggtctcggcctgtgtgtccccagccctttgttgtcccctccgcaggaaggt

SEQ ID NO: 411477 - DNA, 122 bp, Homo sapiens
ggcattcatcatttctccccagctgcacccatttcccacggctgctgcaacaatgtgccacgaactgggtggctttgaacaactgacatttattgtctcacaggtctagaggcggaagtcca

SEQ ID NO: 411478 - DNA, 122 bp, Homo sapiens
atgccggccacacccctctctgtgactcagtctctgagcgttttaatacgatggtgtccccgcgggatcaaacttcagcgtcacagctgaggactggcttcgtggtccctgatgggagagca

SEQ ID NO: 411479 - DNA, 122 bp, Homo sapiens
tgctggcagaacaactggagtcgggggtccacggcggtcatgactatcgacacacggtggcgctgttgaggctcggtcctgcgcattcccgagtgtcaggagccctggaagaagttgcaggc

SEQ ID NO: 411480 - DNA, 122 bp, Homo sapiens
ggacatggctcctgactcctgtgcggaacgtgagtgactgagcggcaaagcccgagtgagcgagcggtgggctgccgggccgggcggggggcgccggggcgggctcggggggctgtgtgggg

SEQ ID NO: 411481 - DNA, 122 bp, Homo sapiens
acctcaggtgattcacctgcctcagcctcccaaagtgctgggattacaggcgttagccaccgcgcccagttccagagctccgcttttaaaactgtatgaacactacctaattataaccactt

SEQ ID NO: 411482 - DNA, 122 bp, Homo sapiens
tagggtgttgtaggaaagggaagggtagaaatttcccctgggttactggtacataaagtacgtatggccagaaagcattagaagaatgtcatttaaaaaccattcaggaagagcctcgcttt

SEQ ID NO: 411483 - DNA, 122 bp, Homo sapiens
gagaggagtggtgtgagtcaagaatgcctgttgctgggggcagctcctcaatcctgatgtcggggtgcagggtggggtctcaacttgaattttcactatctggcctgtatgtaacccagagt

SEQ ID NO: 411484 - DNA, 122 bp, Homo sapiens
tcctgggagagattatgaaatctctgtatcttccgcaagaatgtttgtttgcttcccttgcgagtgtaagacggagccgggaacattgaggcttggggctgggactcagcagctcttctgcc

SEQ ID NO: 411485 - DNA, 122 bp, Homo sapiens
ctactgcttagggcactaccaaccttatggtaggtacttagtaattatttgttgaataagcgaaacttgctgtattagtctgggttctccagagaaacagaatcaatgggatagatagatag

SEQ ID NO: 411486 - DNA, 122 bp, Homo sapiens
gcagtggctgagagtaagtcacctccgccttctcctatcagcaagggtctcctgcaggtccgggcgggccgcttgctcagtagacttatatgcagttggcttgaggttcggcggtcctggtc

SEQ ID NO: 411487 - DNA, 122 bp, Homo sapiens
caaagaaaagcagaatagatttccaaacctttaccctaatccagggaggagaagacgggacgtcaaaatatagtcttgggtatagaagcattgggtcgcaaagacctgaacaacggctgaaa

SEQ ID NO: 411488 - DNA, 122 bp, Homo sapiens
cccacctacaacatgtgggaatcctgggagatagaattcaagttgagatttgggtgaggacgcagcgaaaccatgtcagagggtaagaggtcccagtggcagagtaaaagcatcattcagac

SEQ ID NO: 411489 - DNA, 122 bp, Homo sapiens
tgaaactgtgagaaaatccaagcaataattcacactgtcaggtcagcagaaatgggaatgcgggtctgatataactgaaagatttgcttaagtgatctatctatgaactgaaccgctcagaa

SEQ ID NO: 411490 - DNA, 122 bp, Homo sapiens
cacgggcgaaggcgtcagccggggccacacgggagtcactgaccacagccaggcgagagccggctttccggtgccgccacattccgggcaccaggctccgggctcttcagagcatttggggc

SEQ ID NO: 411491 - DNA, 122 bp, Homo sapiens
tttcccaaaaaggagggaaatgttcacgaacatctattctggggcagcctgagtcccatccggacgacggggagctgggggtgatctgggtcccatctggatggggaggagctgggggtgat

SEQ ID NO: 411492 - DNA, 122 bp, Homo sapiens
ctcaccaagtgcccctggactcacagtgaagtctgaaggttcaggagaggctcagacacacggttggggaagggccatcttgactgtctcctttgaacgtacctggtccagtgtgtcccttc

SEQ ID NO: 411493 - DNA, 122 bp, Homo sapiens
gaggcctggctgccccaaggctgtgtgtcacatgccccaaggctcatggccactgcagcacgtggggagacgcaggaaaacaaatggggccatcagggagacacagggccggcagttcttca

SEQ ID NO: 411494 - DNA, 122 bp, Homo sapiens
gaccccaatttatgttggagtggtgtgttgggggcacattttcttggcctgcagatccctcgttttcttcccaaggtaactggggctggcttgcaagatgagagggaggaggggaaaccgaa

SEQ ID NO: 411495 - DNA, 122 bp, Homo sapiens
tcttctctaccaggaccacttcacgtccccagatgaatatgaggagccagcagccctatacgatgccattgcggccaacgaggagcggctggtcatctcacatgagggtgacccagcatggc

SEQ ID NO: 411496 - DNA, 122 bp, Homo sapiens
tcgccgcgagggaaacacgcacctggggactgtgggaattcggccctcactcttactggccgggagcaggggatatttggtgatttttgtggtttgtatgatgatcttggatttgtcactac

SEQ ID NO: 411497 - DNA, 122 bp, Homo sapiens
taatgtggacgggcaagcgttgccatgacagcgccgcgggtggggatgcgggaggctgagcgcaccggccagctagcccctttgtgcggcgggggctgcggagtgctccctccaagaccggt

SEQ ID NO: 411498 - DNA, 122 bp, Homo sapiens
aaaagcaacttcataaagaaatgaggcatgccagggagagccagcaaccatggctggtgccgtcctgtctgcccatcctatcagtgatgttgcaaatgttttgatatttcagcactgagctg

SEQ ID NO: 411499 - DNA, 122 bp, Homo sapiens
ttttaaaaagtttgctctgtaaattggaatgaggtcagatttggagcttctcattgcacgcggagattattattgcatcgggttccaagccaatgggaagcccgggggaggggtttggcatg

SEQ ID NO: 411500 - DNA, 122 bp, Homo sapiens
caacaaatgtttgtggagtgagtgggtgaccctctccttttaccaacggtaaacagcccgcggaaagaaaaagtgacttagccaaagtctctccaggcatttggggcagagtcgggactagc

SEQ ID NO: 411501 - DNA, 122 bp, Homo sapiens
ggctcttcatgatttctcagaaaccttggtgggccacccaaaaagtgtgttggaaatccacggtgatccttaatatggtgatgggattgtccgaaaaggtattctacttccattcgcgtttt

SEQ ID NO: 411502 - DNA, 122 bp, Homo sapiens
aaacgttgtcacaatcttccaaatgacaatatttccttcatgtcagacgactgtgatttccgggcagcacgggttgcggttttgttagggttctggtctgctgcgagccttgggagttttgt

SEQ ID NO: 411503 - DNA, 122 bp, Homo sapiens
caaatgatcgggaatgatacgatgatggtatacaacttctcagagggaactcacgccagtcgtaaggtaccaccccctgaaatacacacaccacccagctagttagacgtgtgcgctgtctc

SEQ ID NO: 411504 - DNA, 122 bp, Homo sapiens
gggaagaacgttcctttggtgggtgtcggcaaatggggaccggaccccagagtccagaggcggggctagcgcgcgctcccaaactgttggctctttcctcccgtcccgccctttccctgcct

SEQ ID NO: 411505 - DNA, 122 bp, Homo sapiens
ttatctctccctgtgtgcatgtctgcccctggagacaggactctctagctgccagcctcccggagaagccccaggctgagctcacccagtcccctccaggccctgaactgcctctcctcgtc

SEQ ID NO: 411506 - DNA, 122 bp, Homo sapiens
tgcgttcaggcaaggtggcagaacgcctcgccgtggacgaagagagcacatctcttcttgcgaggcctaaggaagtagggctcccactcgcctcggcaacccaaggacccagccaaggagag

SEQ ID NO: 411507 - DNA, 122 bp, Homo sapiens
catgtggaaggggtcctaatggacgcggccatcgtgaagcagagactggtcccttggctgcggagggagacccctggtgaaggccctcgtgctctcctgaggccggggaagtccgctgagca

SEQ ID NO: 411508 - DNA, 122 bp, Homo sapiens
ggggttttctctcaaaattttaaatatttcaccccactctcttcttgcttgcatgatttccgaagacaagtccaatgtgattcttatccttatcccaccttatcttatttccacctcatcct

SEQ ID NO: 411509 - DNA, 122 bp, Homo sapiens
taagagggtgtgagagtgccaagcatgcgacaggctctccatgcctgcctggggctggggcgggagaccccagggaacatggggtgtcagaggcctatctgcccccttgccaccacgacaag

SEQ ID NO: 411510 - DNA, 122 bp, Homo sapiens
caatttgggtccgctcatggtaattggtttcagatgaaaccagaacaactcatttcacaccgtcctcatcccactgcccgaggaacagaaggacgtaatataacatattcagggcagaatcc

SEQ ID NO: 411511 - DNA, 122 bp, Homo sapiens
cacgtctccctctaccgagtaacaatcgggagagagttcatcctcaggcccaaggcacgccggacccgagcgagcaggcgggcgcgcaaccgcagggcggaccggggctccgaggcctagag

SEQ ID NO: 411512 - DNA, 122 bp, Homo sapiens
acaggtcggccagcttctacccctcgtgcttcgctggaggaatctcacccccacagggcccggggcaaggcccctgctcgatgggggcaaccacttggtaggaagcctctgtcctttttaac

SEQ ID NO: 411513 - DNA, 122 bp, Homo sapiens
cacagagtcaggatctcacatttcaccccaggctcaactgaggatgtggcttattaaacacggaagtgcatcggttgttgtggttattcagacagaacaagggtgtgcatgcacaggggcag

SEQ ID NO: 411514 - DNA, 122 bp, Homo sapiens
ttttattgtattaaatatgtccaaagtcttgaatttcattcctagttttgttatcttaagcgaaatgcattagtatgtataaagtgcttagaagagggcctggaacatagtaagtgttacaa

SEQ ID NO: 411515 - DNA, 122 bp, Homo sapiens
ggatgaagaacagtgtcatatgatgttagagcttagagaatttctagttcaggccggacgcggtggctcacggctgtaatcccagcactttgggaggccgaggcaggtggatcatgatgtca

SEQ ID NO: 411516 - DNA, 122 bp, Homo sapiens
aagttcgtcgttgagggtgtggcatcaacaccactgtctccctggagagcaggcagcccgcggtgggcgggggctcgcctcccccatcctgaggtacaggagactcacatgcccgattgaca

SEQ ID NO: 411517 - DNA, 122 bp, Homo sapiens
gtgggcttccaggggtgtctaaggggcagagaggtggggggtgagcaagcgctgaaagcccggagcccttgcgacagactggctggaaggaagaggcctcggccaccacaggatgcaatgtc

SEQ ID NO: 411518 - DNA, 122 bp, Homo sapiens
gggtgcacagcgggttctcagagggtgctcctgagccccctggagctccgggtactcggccggccggcggccactcggcagcgctgcgggctgccgggaactgttctccgctcggggtgctg

SEQ ID NO: 411519 - DNA, 122 bp, Homo sapiens
ggttgaagaagccggccagccacacggtggtgggcagggcaaagtctgtcgtccaggcctcgagttcctgcaaggacacacgagccgctaggaggagaggacatagaatgacatgggaacga

SEQ ID NO: 411520 - DNA, 122 bp, Homo sapiens
taataacacaaagatgagcttctagatagcccaccagatagccagccgtcttccgcccagcgtctcccatcataaatcttcattcttactcaggttttctgtagatttttaaggctagagct

SEQ ID NO: 411521 - DNA, 122 bp, Homo sapiens
cccagattcgcccagttgggcaaggctggccaccccgcagcccgagtgtgcaccggcccccggcaattgctggcttgttagcgtgtgattgattgccttattaaagcgtgttcttgtaagtg

SEQ ID NO: 411522 - DNA, 122 bp, Homo sapiens
tgtgccttctgaatttccaactgccaagcttttgtgtactagacaaatcccataatgctacgtcatagaaaaaagaatcagttgtattggagaaaagggaaactttccaggccagactcagc

SEQ ID NO: 411523 - DNA, 122 bp, Homo sapiens
tcacagtgccgcctactggagttgacatatttcgcagcacccacaggccagtagctccagcgtgagacagcaagggttaagaggctagtttgctggtagagaatggacaatgggaaggcttg

SEQ ID NO: 411524 - DNA, 122 bp, Homo sapiens
gcagacccaggctcactcgtgggggttagtgggggttagcgtggggcagagggcggggaacggtctgccagacccaggctcactcgtggtccaggatgtttgggatgtctcgcccctcacaa

SEQ ID NO: 411525 - DNA, 122 bp, Homo sapiens
tccctggggccagctcccggctcctctcggcctcgccctcaagtcgggactttccttcttcggtaacatgtctccaccgggcctgcaatcattagccagccgggatgagactaagtgcttaa

SEQ ID NO: 411526 - DNA, 122 bp, Homo sapiens
ggacactgtaactcttgctctctaccttgctcacggggcctcaggcttcagtgcttacctcgatgtctcatacctctgcagcggggtactgctccaacccgggcatccccattggcacaagg

SEQ ID NO: 411527 - DNA, 122 bp, Homo sapiens
tcaggaagcaggaaaagacagtgaagggctttgggaaaataaataaaaccctctcagccacgttgtaggattggccatttgtggttgcagagccttcattaaaaggtttccattttctatac

SEQ ID NO: 411528 - DNA, 122 bp, Homo sapiens
ctgtctgcctgtctgtacccctctgcgtctctccccgcccccatccgtctgtgtcgcacgcgcacccccatcgggcttctgctcttgtcaattgcccctggggccctgcccccacctccgcc

SEQ ID NO: 411529 - DNA, 122 bp, Homo sapiens
cctggaggcagcaggtgacgatgacagcctcaaggcctccggggcactcggctctggttgcgagagctgttactggcgatctttaaacagcactggtctgctctggagctgcccgttctggg

SEQ ID NO: 411530 - DNA, 122 bp, Homo sapiens
ggctgctgagaagggaaggttcctatgtatagacccttttccatgagaggaactgaagcccgggtggaccagccagaacatgaaaggatttggggaccagccctagcgcatatcctgaggcc

SEQ ID NO: 411531 - DNA, 122 bp, Homo sapiens
aggaagggggaatgctgagattaaaattaaggggtgcctttcagtatattaggagaacttcgtgaagattttgaaaaatgccacactctagataaatatagatatagcttttcaaacatggg

SEQ ID NO: 411532 - DNA, 122 bp, Homo sapiens
gtttacccgccgagctactcgggccgcggcggccaccggtgcctggggattcgtggcaggcgcaccctggcctctgcagacagctccctgcgctgcgggcttggccgggatgcagggcgggg

SEQ ID NO: 411533 - DNA, 122 bp, Homo sapiens
ccttttccttcctgacttgtagttgctcctccatcctggagagtcctttgttgaaaataccgcaaatatcttctgaagaggactctcccagggaacattcactacaactgtaacgaccacag

SEQ ID NO: 411534 - DNA, 122 bp, Homo sapiens
gaaggcattcatgacggaggccggcgcagatgggaacaacaggcttttagtgtcgccccccgcagcccccgtctacccccgcagcccccgtctccccgctcggcccggctccggcgggagga

SEQ ID NO: 411535 - DNA, 122 bp, Homo sapiens
cggtctccttagcgcccgcaagttccggcctccaaggaggacgctggcgggtggcctcggcgccggcttctcctctggcagagcacaaaacagccctgggcaaaaaccacaggcaactcaaa

SEQ ID NO: 411536 - DNA, 122 bp, Homo sapiens
cctgaagccagggcaactccgggatccaccaagaagaggaagaagcagagtcaggaaagccggatgccagagacagtgccccaagaggagatgccagggccgccactgaattcagagtctgg

SEQ ID NO: 411537 - DNA, 122 bp, Homo sapiens
gataaaatgtatccagtatatttctaatgagtaagtatggaaaattactgtactctgagacggtttaggccaagtctgtgttatggctatctttatatagatagtgcatgtttgaagattgg

SEQ ID NO: 411538 - DNA, 122 bp, Homo sapiens
caatcccgaggctgcatacaaatgaccacgcagcacgggggcggggcctgttggtggtggcgcggcgccgcggaggtcagcccacccccagccccagccagccagtcaccaccctggaaagg

SEQ ID NO: 411539 - DNA, 122 bp, Homo sapiens
ttgatccaatgttaggtttgaaagccacccactgctgtaaactcagctggatccgcgggccgtgattaaacacattgcccgctttgttgccgagatggtgtttcggaaggcgctgtgaatgc

SEQ ID NO: 411540 - DNA, 122 bp, Homo sapiens
ttactacagatattatctgaagctttaaagcctcctggagtgaaagctagttcataaccacgctgtttggagcgaagaaaactacctggaattcttgttctccaaagatatggaattatccc

SEQ ID NO: 411541 - DNA, 122 bp, Homo sapiens
ggcggcgggggcaaaaagccaaagcggcgggggcaaaaagccgcggcgggcaaataaccgcggcaccggaggggggcaaaaagccgcagcgggcggcaaaaacccgtggcgggcataaaccc

SEQ ID NO: 411542 - DNA, 122 bp, Homo sapiens
gcggcggggcgcgcggcagacgagagcgaccggcgagcactgacgtttccttgaaggagccgccgtgactcaggccgggcaagatttcctgccccgagtcccaaaacaaacaaatggccctt

SEQ ID NO: 411543 - DNA, 122 bp, Homo sapiens
ttttataggcctgaggattgacttctaaagtgcctagatgtggccgggcgtaatggcttacgcctgtaatcctagcactttggaaggccaaggcgggtggatcacttgaggtcaggagttcg

SEQ ID NO: 411544 - DNA, 122 bp, Homo sapiens
gctcttccaaggttaattctctgctacacaatagcttttgttggtatctgtgaggctttgcggggttgaaggaatctcaggtgtcacccattaataacaatcatgacagtgacaactaatgt

SEQ ID NO: 411545 - DNA, 122 bp, Homo sapiens
cagagccaggccatgcagttcaaatgcagcccagcccaggagctgggctcaccgcctggacgttcacctgcgggcacccatctgcaggaccaacagcctcgtttctactgacacctggtgca

SEQ ID NO: 411546 - DNA, 122 bp, Homo sapiens
gggagcggccccaggcgctttctagagcgtgagcggtgggggagcaggcgcagggtggcacgagcggaggcggggcccgggcgtggggcacggctggggaagctgccgcctccggccctgcc

SEQ ID NO: 411547 - DNA, 122 bp, Homo sapiens
gctataggtggaaccagaaggagggagggagggcgggtggtaaagcggggatggcatagccgaggggtttgtggcaccaattgtgcagttaggcaaatctggcttcaattcctggttctgcc

SEQ ID NO: 411548 - DNA, 122 bp, Homo sapiens
cctgatgtaaaacttgggtgatcccctcccatgctgtttatcttcactgtgtcatcataacggggtcttttggcctcccggctcctttcttcagatcgtatggagtagcctttgagtttttc

SEQ ID NO: 411549 - DNA, 122 bp, Homo sapiens
agagacacagagggagaattatgccaaaggtaactatcaccaccagaacgcggccatccacgtaccaggctctgaaaggcatttaagtgattaggttatatttttttagaaagtgacttttt

SEQ ID NO: 411550 - DNA, 122 bp, Homo sapiens
acacaggtccagaataacactgtttcataataatattgataagaaaaaaatggcttatgtcgttttgcctaaagttgcagtttccaagaactatcaatgacattaaatgaggtcttaatgta

SEQ ID NO: 411551 - DNA, 122 bp, Homo sapiens
agccaccgtgaccagccaggttttcgggttttatctgtttgagacttggtctcactctgccgcccagcctggagcgcagtggtgcaatcttggctcactgcaacctctatcgcccgagttca

SEQ ID NO: 411552 - DNA, 122 bp, Homo sapiens
gtttgatctctatgatccatcctgttgggacttgattcgttcctcaaattttcaatttaccgtaaacaaaggggacgcgcgctgacccggaagtgaaagctggaacccggccggagtagctc

SEQ ID NO: 411553 - DNA, 122 bp, Homo sapiens
gggacattgccccggcatctattctggcatcgcccggagagctgcactgatggggggagccgggggagggggtccgagccgccgccgcgccgctgccgccgctgccgccgccgccgccgccg

SEQ ID NO: 411554 - DNA, 122 bp, Homo sapiens
ccaagagctcctggaacacccatcccagagagggacagtgttctccctgaggtcacacagcgggtcaacagccttggcacccccctgtgcccccagggtctgttggtgatcctggatcaacc

SEQ ID NO: 411555 - DNA, 122 bp, Homo sapiens
ctcggtctagtctagagttcgcaaagcctatcctccctgtagccgggtgccaagcagcctcgagcctgctccccagcccacctgccaacaaaaggcgccctccgactgcaacccagccctcc

SEQ ID NO: 411556 - DNA, 122 bp, Homo sapiens
cgctctgctccctgcgctcgcccctcccccgcacccgcaaatgcagccaggaggaagaggcgaggaggaatgcaggaggcattccagccccacccccgcaagcctcctccagcgagttccga

SEQ ID NO: 411557 - DNA, 122 bp, Homo sapiens
cggtgattggtccatttggagaggcctacgaaaaactcccggcctgagtccgggaggccgcggaggtttgagggcgggagtgagttagaaacaaggctccagacggccgagtctcccaaact

SEQ ID NO: 411558 - DNA, 122 bp, Homo sapiens
actcaaacagaccctcaaaccctattcaggcacctcccccaaacccattaggttctcttccgccctagccggaagtcacggtacccctaacaaagatggcggcaaattgaatttgcaaagct

SEQ ID NO: 411559 - DNA, 122 bp, Homo sapiens
cgggggcttccgcggagacagccagtgcgctgccagggtcctgcgggttggggcgagggccgagaggtgggagttggaggtgaacgtgggggcagcatgctggctgcccggcccctgcctgg

SEQ ID NO: 411560 - DNA, 122 bp, Homo sapiens
cccctatgcaccggcgcgccactgcagatggctcaccctcccccgccaaatcgctgctcccgccggagctgccgtcgccatgtcgttgaacttgaatggttcgtcctccccttttccctctt

SEQ ID NO: 411561 - DNA, 122 bp, Homo sapiens
acagggaacctgccgggctcacagtgtgggagcagctggacaccaggcttcttggtgaaccggcgaggggccgagtcccgcctggtgggcatttgccgccgcctccccaccaccagtcactg

SEQ ID NO: 411562 - DNA, 122 bp, Homo sapiens
cagcatcttttctctgagacgccgcttggattttctttcctgcctgtttgtcctagacaccggcaggagttcaagaatgatgtgacacagtgatgtggccatggggtctgtgcagactgacc

SEQ ID NO: 411563 - DNA, 122 bp, Homo sapiens
caacagcgcttagtgtgcctgcagcaggccccacaaagtagtgtctttagatgtgtgcaacgagggcgcggtggctcacgcctgtaatcccatcactttgggaggctgagacgggtggatca

SEQ ID NO: 411564 - DNA, 122 bp, Homo sapiens
agtctccttcctccgccccttcccaggcttccctgacccagcgcgcagccaatccccgcccgccgtcgcgggcttctggtccaatcaccatggtctccccgcccacccccattgctccgccc

SEQ ID NO: 411565 - DNA, 122 bp, Homo sapiens
ttcggcgggcaagcgggtgtaatccacagctatccgtggtagggcatggtagcttccaaccgcggggaccccaagagtctcccgtcagccgagtagcagccaggaaggagaggctgggatgg

SEQ ID NO: 411566 - DNA, 122 bp, Homo sapiens
ctgctctgcagggaacctcaggtaagactggaaaaaatatggatgtgtggatggtgctcacgtatcttctgtgagaacatatttcttgggcatcactgggtggtccattggctgctatcagg

SEQ ID NO: 411567 - DNA, 122 bp, Homo sapiens
tcatatctctgttgcccctaaaaacaaggtcccctttttctgaaacatacatttttaaaacgtgcctctatatttcacatcaaggcagcctgctccagaagatgggggctcagaggaaagga

SEQ ID NO: 411568 - DNA, 122 bp, Homo sapiens
ggctcctcccgctgcagccagctcggaagaaaagtgcactctctatcaggcttcctgcagcggagacacccattagagaacccaagcacaaagacaaagcaaatagttggtcctgctcggag

SEQ ID NO: 411569 - DNA, 122 bp, Homo sapiens
acctggcacaaaaatttactctttcactttaatgtctggcaacttgaaggtaagactcaccgtgcaccttagtttattcactgagaaaatgaaaatgtttagattagagattatcctctatg

SEQ ID NO: 411570 - DNA, 122 bp, Homo sapiens
ccccctgccctgggcgggagaggtgagtggcccccgtgaggtgctctgccttccccctgccgtgggcgggagagagctgtggtgtctgccgcacgcgtttggcatggtaggtgtgagggggg

SEQ ID NO: 411571 - DNA, 122 bp, Homo sapiens
cagatggcaatgtatttgcaattgaggagagagtagccaatcacacttaatgaaacagaccgtttacacttggaatggcctggagtaagttgatattcagcgtctacactcaaatatcaatc

SEQ ID NO: 411572 - DNA, 122 bp, Homo sapiens
gtttgaggggcacccagctgaccctgctgaccctctagccgacacagctgctctcagccacgcccgcctacggagcaatagcatcggcgcccgacactccacaccaaggcctctggatgccg

SEQ ID NO: 411573 - DNA, 122 bp, Homo sapiens
agagtgcagggcgggcggggccaggccagcagggagtgagcttgtctggccgcctcgcctcggagccactgcactgctggctgcagacacaggctgcaccatgaagccagccctcctgccct

SEQ ID NO: 411574 - DNA, 122 bp, Homo sapiens
cgcactctggcggtgtccctctctgaatctctcttttatgacaactgatttccccatctccggcttccgagcctccgcatcttcgcctttgtttgtctttaaagaagcagccctgggctggg

SEQ ID NO: 411575 - DNA, 122 bp, Homo sapiens
actttgctcaaccctctcttccattaagaccgtggtgatcttcacacccagagccaattacgtgctattctgtgcatcacagaaaccatcataatgccaaaaaccatgttggctgaatgaca

SEQ ID NO: 411576 - DNA, 122 bp, Homo sapiens
gggagcctcaatggcgtgaccgggaagtgattgtgacgaggcggggagcaagccaatcagcggcagcggggagccggccagggagcagcgcaggaggcgtcctgcccgactccaggcttcag

SEQ ID NO: 411577 - DNA, 122 bp, Homo sapiens
ggcagagtgtgtcaagtaaatcttactttcaagccctgggaagatgtaccctcatgctagcggtgggggtgggcattcctgttgtactaggggctgtgacccctcccaagacccagccttac

SEQ ID NO: 411578 - DNA, 122 bp, Homo sapiens
agcctgagggaggccgagcgcgatcctgactccccagatacgtgaacttgcgggtgagatcgtccacaggcgcgtcctccagggaagccctgtggctgatctgatctggactaggtgtgcag

SEQ ID NO: 411579 - DNA, 122 bp, Homo sapiens
agtgcaggtggggtggcctcaacactcccaggctttctgcttcttcagtgttttcctcagcgtgactaacgaaaatgctctttgttctttattccagagtcaaagacatccctgccacgcag

SEQ ID NO: 411580 - DNA, 122 bp, Homo sapiens
tggggtggctgaggcacctccccaagagcttggggtggtcccggctatgaactggccccacgtgctgcctgcctgtgccttgttgtgaggatggaaggatgaggacaccagtcagcggcacc

SEQ ID NO: 411581 - DNA, 122 bp, Homo sapiens
tcggccagtggccggaggcaggagcgcgtctgagcccatggcgaggggacccgccgccaccgcctccacccccgccgccccgccaccgccgccagctcccgggcaccatgcgaaccgccccg

SEQ ID NO: 411582 - DNA, 122 bp, Homo sapiens
ggcaggagggtgcgcgggcgcacctcggtcagcgagttcaatatcacctacgtggtggagcggagcctgtacagccacctgaacctgacccagctagtgcggcctgcctcagacaggaccct

SEQ ID NO: 411583 - DNA, 122 bp, Homo sapiens
gcggcgtggcggagattaaagatggggtctaatctggccctgtggacccggctcagcagacgatggaatcccagatctcatcgggaagtctgtcagccaaaaacacacacctcaaagcggag

SEQ ID NO: 411584 - DNA, 122 bp, Homo sapiens
agaagatcattttgcattttctcctacatttatagaggtgactctcaacaaacttggctgcgcattagaatcacctgggacgtttcttaaattcctgaagcccaggcctcatcccaaaccaa

SEQ ID NO: 411585 - DNA, 122 bp, Homo sapiens
cctggaggttccttaaagatcacctgctgggtgggatttactacattccccaggaggtcacggcccagggcctctgatcaggatttcctttggggtgggcagattgggtgtggaaaggaggc

SEQ ID NO: 411586 - DNA, 122 bp, Homo sapiens
gtttgccgagcgggcgctccgggtcgcacgcaagtccgcgcggggtccgggccacgcacgcggtttcatcgccatccccagccgggccacgcgcgcaggcagacaagctgttcgcggcgacc

SEQ ID NO: 411587 - DNA, 122 bp, Homo sapiens
tcgtggcgcagggggcgggaccagaggcggtcacgtgaggggctctgggctaccgggtcacgtgaccgaggcacagatcagctgatgccggagggtttgaagccgcgccgcgagggagcgag

SEQ ID NO: 411588 - DNA, 122 bp, Homo sapiens
gtggagcggcgccgaccttcgcccggtcagcggccccgacccccgcgccgcgcccctgctcgccctgctccacgctgccccgcgcccgctgctgctgctcgcttacttcagtcgcctctgcg

SEQ ID NO: 411589 - DNA, 122 bp, Homo sapiens
cactgagtttcccctgcccccagatgtagtgttcttctgccagcccgagggctgcctgagcgtgcggcagcggcgcatgagccttcgggatgatacctcttttgtcttcaccctcactgaca

SEQ ID NO: 411590 - DNA, 122 bp, Homo sapiens
ccttgcagccaccacggagggacggggcgcgtctccttctgaatgacgcaaggggcggggcgcgtggtggggcggggaaggcgcgaggcgcgccgcgatcggggactgtcctaagacgggcg

SEQ ID NO: 411591 - DNA, 122 bp, Homo sapiens
ccttcactgaccacatacttcaaactgaatatgtcacagaatactagagactctacatttcgaattcctttgaatctattcatttgtcctaccacgtcttccagtgtcatttcaaactggga

SEQ ID NO: 411592 - DNA, 122 bp, Homo sapiens
agattcagcgctagagtccatgcacttaaacaccatacctttccttgtaatatgcatgtgcgtgtgttaacttcattgaagtaaaatataaaatgcagaaaagtgcacaagtcgaaagcata

SEQ ID NO: 411593 - DNA, 122 bp, Homo sapiens
aggatccgtgtttaaccagctccccggggctcccaagtcgaagacctactgccttgagagcgctgtccagggtgtccgggggtgttggatcagtgagaggggggtgccggggcgggtgtaat

SEQ ID NO: 411594 - DNA, 122 bp, Homo sapiens
gggccctgggcaggcttgggcctgggccaggcggtggttgacggttgccgtcatgcgagtcggctgcctcctgcgtggggaacctatggaatgtcctctgtggtcagcagctgcctctgttc

SEQ ID NO: 411595 - DNA, 122 bp, Homo sapiens
ccaggctcttgaatatatatatatatatattctacaagaagtggtctggaagggactggccgacgctggtaatctttccacgtgaacgagaaacccacgctgggcatttctgatccactaaa

SEQ ID NO: 411596 - DNA, 122 bp, Homo sapiens
acaacactgtgaacctctgtgttaacatgaacaggtgataaagggggtcaaatagccaatcgcagctgccaataggagagtttcatgaaacatgcaaatctcaaagccagctatttagctga

SEQ ID NO: 411597 - DNA, 122 bp, Homo sapiens
aacttgatgtcgcctctgtgtcatcaccacgggattttcctcctctgggttctccttttccgagtggggtcagctcccccatgagtcacagcaccaatcacttctggctgcttgcaaacccc

SEQ ID NO: 411598 - DNA, 122 bp, Homo sapiens
ttatctgaattaacaccatacctggtacccactgattaaaagctgggggttaccaatgcgcgtgggcacagttagaagcttatgtagcaaaaatgagcacatcctggaagggcccgggagaa

SEQ ID NO: 411599 - DNA, 122 bp, Homo sapiens
gtgagtgttacagctcttagggcggcgcatactggagttgttcgttcctcccgctgggctcgttcttctcgctggcttcaggagtgaagctgcagaccttaggggtgagtgttacagctcat

SEQ ID NO: 411600 - DNA, 122 bp, Homo sapiens
taggtgctaagcagcagtgacattctgaggtcatggcacgaatcacagtggggccttgcccgggtcagcagcacccagagtcagggtcctccgctgcctgaggcgtcaacatgcctgcctgc

SEQ ID NO: 411601 - DNA, 122 bp, Homo sapiens
tattcacccaggatatgttattgtgtgcttagccttggactttgttgcttgtgtgttggacgcctaatagtcttgacagctaaataggcttttgtaagcgagagtggtaaagtccaacatgt

SEQ ID NO: 411602 - DNA, 122 bp, Homo sapiens
ctaagtggtcgaagtgatttgtttccgtggtcttctcagtattgaagggggtgggggaagcggatttgagggggtgcatgtccttgccgtcggtgggctcactttctaaaaactattgagat

SEQ ID NO: 411603 - DNA, 122 bp, Homo sapiens
agatgggaggactggcatcccccgaacccacgggtccctgcctggagacactgggagacccggtcctctgcgtgcttcagagtcaggcacacctggctttgttcccgcagccatttgctctg

SEQ ID NO: 411604 - DNA, 122 bp, Homo sapiens
ggccctcgtgggtgctgggcagacaggtgcgcaggaggcggcgctgggcagacagacaggcgtcggccagctgaggccggcgttgctattcacagcacgtcacctccttcccaagtgtctgc

SEQ ID NO: 411605 - DNA, 122 bp, Homo sapiens
gcgctggggcgaccctgacttaggacctcctgccgtttctctgggtgactgctctgtagtcgtgagtcgtctctttaatgctgagcatcagtacctgcacagccctgaatggagcagctgcc

SEQ ID NO: 411606 - DNA, 122 bp, Homo sapiens
tggaagacaccccggcctgtggagagactgccagggcctcaaatcacttaggaaagggcgcgggtccggttggaccttgaaggacaggcaggcgagggtactccagggaacagctaagcaaa

SEQ ID NO: 411607 - DNA, 122 bp, Homo sapiens
aggagaggttgtgagagtccagctggtgacaacagtgacccctggtggcctggaaggtgccggccccgggctctgctgcacaggccgtgcctccacctaaacctcattgcaccgaggggccc

SEQ ID NO: 411608 - DNA, 122 bp, Homo sapiens
tgccagccttcttcaccgagagcagcgagtacagctgtgtgatggacggccagaccatggcggtggccactggagggggcaccagccctccccagcccaaccccttccgctccccctttcgc

SEQ ID NO: 411609 - DNA, 122 bp, Homo sapiens
atatattacaaaaaaggtttgagtctctttctgtgggatatatgatgcaacacaacaagccgtggattgggtgttgctttgtaaggaaaatcaattacatatgtcttaagtacttcaatctc

SEQ ID NO: 411610 - DNA, 122 bp, Homo sapiens
aaaggcttgggacttctggggaagtggcggcttttagcccctgcgggagccgagccgggccgggggaggagggatggtgctgtttctgggatgagtgcgagttgggggccgagggaacacgg

SEQ ID NO: 411611 - DNA, 122 bp, Homo sapiens
ggctgtgcaagagacagcaagcatgcggaatgttggtctttggtggatatgggtgaagggcgcacaggcatccttcgtgctatccttgcaacttttcggtaactctgaaattatctcaaaac

SEQ ID NO: 411612 - DNA, 122 bp, Homo sapiens
ctcaggcccactctgtcatccaacaagctcactgcaactggcccatcttaaaaacaacaccggctggtcacgctggctcacacctgtaatcccagcgctgtgggaggccggggcggggggat

SEQ ID NO: 411613 - DNA, 122 bp, Homo sapiens
ttaaatacatcatctgggctgttccaggactgggaggggattagcactacggtggagctgcggataggcccaagcaggcctcaaataaatgtaaagctttttattctcgtggaaacagctat

SEQ ID NO: 411614 - DNA, 122 bp, Homo sapiens
ctctgttatctgcacagcagagccacccaaacccttcatcaccagcaacaactccaaccccgtggaggatgaggatgctgtagccttaacctgtgaacctgagattcagaacacaacctacc

SEQ ID NO: 411615 - DNA, 122 bp, Homo sapiens
atcaggacccacagaaccggtgtcagccccaggtggccgggagccagaggagcatcagcccgacaggcacagggcgccccaaaagctcagagtggcagcctgtgctcaggtgacagcccggg

SEQ ID NO: 411616 - DNA, 122 bp, Homo sapiens
agcagcctcactcataacagccaaaaggtggaaacaacccactatccgtcaactgataaacgcataagcaaaagtgggcacttccacaccacggaaccgactccagcggggggagggtgagg

SEQ ID NO: 411617 - DNA, 122 bp, Homo sapiens
ggtcctctggaaatttcgcaggtgagagaaggaaaacaagagtgataacaaatgctgcttcgggggtgaagtcacattccaggtgaattcctgttacttagttcattcccattttgtctttt

SEQ ID NO: 411618 - DNA, 122 bp, Homo sapiens
cccatgcacccccccaacacaccaccaccactacttcttttccttgagttttgcatataccggattccatcaagttctgaatattaagttttaaccctgggcatgtgattgtgaacacacct

SEQ ID NO: 411619 - DNA, 122 bp, Homo sapiens
gatgttgtgctacaaactgttagaaaaggctgtaaatgcagcagggttaattatagccctcgataaaatccaaacttctactccctttcaataaagccatggctacattttttcaacaatgg

SEQ ID NO: 411620 - DNA, 122 bp, Homo sapiens
taaactctttattgtgcttttccaagcaaaatgaccttcataatttgtaataaatcccaccgttctgtggaacagcatgatgttggattccaccagcaaccaccctttagctacaaactaca

SEQ ID NO: 411621 - DNA, 122 bp, Homo sapiens
ctgggagtatgtacagccctagttgttctatgaggatttctctggtaccaacccccattccggctgagcaagctcataaaatccttaaactcccagcataccttcctgcaaaccttcccaga

SEQ ID NO: 411622 - DNA, 122 bp, Homo sapiens
ggaacccaaactgggacttctggggggattaactttcagtcacatacgttcaggactgtgcgtatgcgtgtcgggagacgcgtgaaccaaagaagccacagagcccgaaaaagacctgcaac

SEQ ID NO: 411623 - DNA, 122 bp, Homo sapiens
tgagtctgaggtccgtggtcctctgacctcgtttagggatgagatctagtcctcagagcccggggcggggctgccgaggacaccggcttgctcttcaggcagctctggcccgggtggcggga

SEQ ID NO: 411624 - DNA, 122 bp, Homo sapiens
cgccgcggcgggcggcgtgtgtgcgagtgtgccgcgctctcgccccatgcctggcacatgcgtaaaagcgagttgcgcccaaagtcccagccataccctccttagcaaataataacaaaccc

SEQ ID NO: 411625 - DNA, 122 bp, Homo sapiens
tggcgtggatggggttgcccttggccacgtagaagtgccgcgagatgaagctgacaatggcgtccgtgcagcggtagttctcgtggaagaccaggcggctctgccgcgccacctcgtgagtc

SEQ ID NO: 411626 - DNA, 122 bp, Homo sapiens
gtgcacaatttttcagcctcccaaagtgctgggatcacaggcgtgagccaccgcgcccggcgcactgtaggatcttttttaatgcattatataccttgctgagattttagcagagatcacaa

SEQ ID NO: 411627 - DNA, 122 bp, Homo sapiens
ggccataaaggcggccgccacttccaagttccccccgcatagattcattgcggaccagctcgaccatctcaatgtcaccaagaaatggtcctaatcctgagtcgtcacccttggattttatg

SEQ ID NO: 411628 - DNA, 122 bp, Homo sapiens
tagatgggccttccgactttcgtccagcctgactccttctgctgagatgcggagagcccgcggaaaccaaatgacttcatttgctctggcacttaagaaccgaattcacttccgtggtggtg

SEQ ID NO: 411629 - DNA, 122 bp, Homo sapiens
catcacgctaatatctactcaagcgtgtccgtgtgtggaacacagggtctgcagtcccagcgtgtgtggatcgtgtggggatgtgtcatttccctgcacacaggtcacgcctgtgcagacag

SEQ ID NO: 411630 - DNA, 122 bp, Homo sapiens
ctgggctcacctcgtctagttccgaagtcctgggcagtccgctcactcgagctgtcagcgcgtcctgcactgggaaaccagctgacttgccgacatactttttccacaccgcggatccgcga

SEQ ID NO: 411631 - DNA, 122 bp, Homo sapiens
ttttccaactcacaggcacagatacctttggggctggattagcatttgcgttgggatccacggcgggaagggtacaggatgggaactgacaaaaacagagccaagctggtcgggtcggtgcc

SEQ ID NO: 411632 - DNA, 122 bp, Homo sapiens
cagcgcgagttctgggtgggcgcaggcttggcgggccccacagtcggagctgccgtcaggcgccaccagccctgggtagtgaggggcttagcacccgggccagcagctgcggagggtgcgcc

SEQ ID NO: 411633 - DNA, 122 bp, Homo sapiens
tctttgtagtcagcgcggtcctcctcgacctgtgtgcctaggagtggggacggcggtggccgggtcatgcagcgcgccccgccaccctgcagctgggtcccagccagcagcaccacgctggg

SEQ ID NO: 411634 - DNA, 122 bp, Homo sapiens
tgctaacttctcacgtaaacggggcaggaaacagcgcaagtagaacgatcgtgccaccaccgaaggggtgccgcctgcgagctcggaggcttcagcctgtttgggaagagtaggctgagcgg

SEQ ID NO: 411635 - DNA, 122 bp, Homo sapiens
tacccctgtgaagcctctcaggctgatggatgggagtgagtctcaaagatctgtcaatcccgcctgtcagaagcctgccaaatgaaagatatgccaggctgactcaacaaaaagctcagcat

SEQ ID NO: 411636 - DNA, 122 bp, Homo sapiens
ctggctgaatacaaagcagtgattcagcagagaagctgcaacctcaatgggaacagagagcgagtactgaacatagcaccagaaacacgagagaaagagagagactgagagagagaccatct

SEQ ID NO: 411637 - DNA, 122 bp, Homo sapiens
ccctctctgggctatgtgggaggtgcccacgtttccacgccttcctcgtggagggtgtggcgggctgtctgtgccgcgggggtactcggctgcactgtgcacagccctcaccgcccagtgcc

SEQ ID NO: 411638 - DNA, 122 bp, Homo sapiens
tcctttcaaactggaggccggggaacaagttctaataaatgtaaaatcgaattctacctacgctgaatatctggattttcaaacaacccttgggaccatgccagcccgggcccggggcccag

SEQ ID NO: 411639 - DNA, 122 bp, Homo sapiens
tttgaccatatcccattcacatcaggtcacaaaagctgcctggtcagcttcctctagtgtcgacaagacctcagggttgggtgtcccccactccaccccatccgtttgacagatggagcctt

SEQ ID NO: 411640 - DNA, 122 bp, Homo sapiens
aaagctccaacttctctagttggccactggcatgacaggaggctttgtagaaccaatccccgcctccagagcagggagggttttccacttaatgccttttgacagtatgctcattctatagg

SEQ ID NO: 411641 - DNA, 122 bp, Homo sapiens
agggctgccactgcaggcgcgtgggggagggatcggatctgcgaggaccggggcccgccgcgcccaggcagccacgtcgagaagccacatagctggggaccaggtgcacgggtgcttccagc

SEQ ID NO: 411642 - DNA, 122 bp, Homo sapiens
tcccggctgccaaggaggctgcttccatgccccgcagccagctcctgtctggctgtgcagcgcgtcgctgctgcccctggtgagacgatgttcccagctgagcagcgcaagaagagaggcaa

SEQ ID NO: 411643 - DNA, 122 bp, Homo sapiens
ggtgcagagtcagaggtgcacgtggacagagacagagagacagggacacgtgggcagagacggataaagacagagacccagagaaagccagatatgttgacagacacagagacagacgccag

SEQ ID NO: 411644 - DNA, 122 bp, Homo sapiens
taaagagaaaaactaaaagtctgacattgggggattggttaaataaatcaggagctgttacgtaggcattgaaaactaggacagtatgtatagggtggttccagttacgtttatataaatat

SEQ ID NO: 411645 - DNA, 122 bp, Homo sapiens
aatcgatatcactgcctctctcagaggtgactgtggctgtgatgacggacacggaggagacgaacaggagcagaacagtttcactgccacgtccatttccgtgacagcacctgtgattgatg

SEQ ID NO: 411646 - DNA, 122 bp, Homo sapiens
ccaagatctgcagatccgctggatctaaggggacgcaagcctgagtcctctgcaccctggcgctgagccaagaagacaggaactcctcaagggagagagggttggaggggcggggagaaggg

SEQ ID NO: 411647 - DNA, 122 bp, Homo sapiens
ctgctgatgatgtattttaagcagcaacaagcaacgcttactcaagcaccaaaaaaaccccggtaacaaggaggagtttcctttttttttttttttttgagatggagtcttgctctgtggcc

SEQ ID NO: 411648 - DNA, 122 bp, Homo sapiens
gaagactggcttcctgtcccctgccccagaccctgcacctgtaacctactgtctgtctctcggaattcccctatgctagatatttcatgtaagtgagatcatacggcatttgtcctttggtg

SEQ ID NO: 411649 - DNA, 122 bp, Homo sapiens
ttcagtccctagtgtctgggtccccgccctccagccgcctttgagtcgtgcctgggtcctcgcccttgcctcagaaccgcgaagaaaggaagctcgcgtgtttgctagaaaacctagttggg

SEQ ID NO: 411650 - DNA, 122 bp, Homo sapiens
cagctcttatgggcagtgcagacccaaagagtgagcagcagcaagatttactgcaaagagcgaaaaaatagatctcccacagtgtgaaagtcactccagcggattgctgctgctagctcagc

SEQ ID NO: 411651 - DNA, 122 bp, Homo sapiens
cacctgtaattccagcaccttgggaggccgagatggacacatcacttgaggtcaggaggtcgataccagcctggccaacatggtgaaactcctccgtctctactaaaaaagaacatacaaaa

SEQ ID NO: 411652 - DNA, 122 bp, Homo sapiens
ccaactcggtttggaaacgcagatggcgcggcctgccacttccccttcatcttcgagggccgctcctactctgcctgcaccaccgacggtcgctccgacggcttgccctggtgcagtaccac

SEQ ID NO: 411653 - DNA, 122 bp, Homo sapiens
aagacaaggagatatgttaaagcccaaaggccaggcacaagacgcccaggagggactagtcgcgagagagggcaggaggccagctgggtacccggccgccgcccgtagccccagctcacagc

SEQ ID NO: 411654 - DNA, 122 bp, Homo sapiens
accccacaaatactgctttctgtggatcttgagagaaggagcttatttggattatctgggcggcctcttaatgcatttgcactcttagaagataaatctgcagagaaggccgtttgaaggtg

SEQ ID NO: 411655 - DNA, 122 bp, Homo sapiens
gatggccgcggatagctgccgggagtttccgtcttggtctccttggttaccgcgttacctcggtacccatagcaaccagaaagctgggttctgccactgtccgccggcagagggcgaaaagg

SEQ ID NO: 411656 - DNA, 122 bp, Homo sapiens
cctgctttgtcctgacacggtaggtggccgctctgggtatcacggtcaacctcacatgcccgaggtcacatgcccgaggtgctttgctctgacctttgaatactgactcatctgtaaggcag

SEQ ID NO: 411657 - DNA, 122 bp, Homo sapiens
gtatctgtgtgtgtatatgtaagaggcagaggaaaagcattgcacaaagagaaagctgcacgcaggcaaaggctatggtattctcagaaaaggtgtgcctggccctctcggtaaagaggcca

SEQ ID NO: 411658 - DNA, 122 bp, Homo sapiens
accggttcctcctcccggctgctcgctggggggtgaggcctcccccttcgccctcccccacgcatctactgctcctgtcgggaaggaaggtcgcccaggccggttcagcctctgggcagggt

SEQ ID NO: 411659 - DNA, 122 bp, Homo sapiens
gcgcgcgtggacctgcagaagaaggcgcaggcgctgcaggaggagtgcggctacctgcggcgccaccaccaggaagaggtgggcgagctgctcggccagatccagggctccggcgccgcgca

SEQ ID NO: 411660 - DNA, 122 bp, Homo sapiens
agagggaaagtgcaggctagagggacgcggcctgagctgatttcacagggcactcggggccgcgaggaggccgcagcccagtcccgagcaccgtagtcctccctggtccccatgctaaaaaa

SEQ ID NO: 411661 - DNA, 122 bp, Homo sapiens
cctgtcgccggcgggagtcagggtggcggccactgacaacgaaagtgaaacaaagctggtcgccgggcgcgcacccccgccggccccgcgcggacctcccaggccggacgcccccgccgcgt

SEQ ID NO: 411662 - DNA, 122 bp, Homo sapiens
gccctggagagagcggggcctgcctgacaggctgggaaactgaggcccattgagggtcttcgaggtcacagggccgggcctgggaaggaacaggacccaggacatccacgccaccctgctgg

SEQ ID NO: 411663 - DNA, 122 bp, Homo sapiens
atgagaagggcacaacgcaaccagggttttgggcagccttccatgaaagcacctggaagccggagaaggggggcggggggacttttgacacagatggggaagggcggaggcgctgggtttga

SEQ ID NO: 411664 - DNA, 122 bp, Homo sapiens
acctcaggtcatctgcccgtctcagcctcccaaagtgctgggattacaggcgtgagccaccgtgcctggccgtaaggtattatttttaaaggttagctcacctaagacttccgcagctgagg

SEQ ID NO: 411665 - DNA, 122 bp, Homo sapiens
gagttccggtgggcgtgagctgggcgggccccgcactgggagcggctggccggcaccgcccgccaggcagtgaggggcttagcacctgggccagcgttgctgtgctcaatctcttgccgggc

SEQ ID NO: 411666 - DNA, 122 bp, Homo sapiens
cactggggcaaggtgcagatgggacctgggtcctgagcctcctggaggccgacgctctgccgtggatcatgaatagcattcccgcgtgagtctttttttgacacagcctccccgacgtcctt

SEQ ID NO: 411667 - DNA, 122 bp, Homo sapiens
catccgcccgacactgaaacttttccttttgcatggtagccacgaccgcccacagtgaggcggctgtagcccgcttccgcccttacagacaccccaggacgcgaccgagacaggtatgacgt

SEQ ID NO: 411668 - DNA, 122 bp, Homo sapiens
aggaaactcagcaacagccagacctgattttgaatcctttctctagcattcatctctacacgtatgaccttaaccaagtcaccgcacctttcttagcccccatttccccatcatggaatggg

SEQ ID NO: 411669 - DNA, 122 bp, Homo sapiens
acctggttcaggccttgccctgggggacactgcagtccaaggcgaaaggagacttgctcccggcctctgggtccctaggtcaaggcacctccccgccccgccgcccctgagcccaagtcgcc

SEQ ID NO: 411670 - DNA, 122 bp, Homo sapiens
tatatggggttgttgtctcattttggtctgttttggtcccctccctcgtgggcttgtgctcgggatcaaacctttctggcctgttatgattctgaacatttgacttgaaccacaagtgaatc

SEQ ID NO: 411671 - DNA, 122 bp, Homo sapiens
agttttcctgtggcacgtggccccggcatccacgtttctgtggagagttttcctgtggcacgtggccccggcatccacgtttccgtggagacttttcctgtagcctgtggccccggcatcca

SEQ ID NO: 411672 - DNA, 122 bp, Homo sapiens
ccatctcaacgccatttgcgctcccggcccccacctccttcctccaacagccgctcgctccgtcactccgcttcccacagtccccgcgcggccgcccgaccccgcagccaatcgcgcagccg

SEQ ID NO: 411673 - DNA, 122 bp, Homo sapiens
cccactcagcccgcagcctggtccccgaaagcgctcagtcagaatccgagagcactgtggcggcgcccccgtgtggccacaggactgaagacagaggaccccgctcccctttctccccagcc

SEQ ID NO: 411674 - DNA, 122 bp, Homo sapiens
tgcttccaaggagtctgcttttgtgacacaaatggacttgcccccatctgctggtgctgtcgcttgtttccaaaatgtgcccagcatccagcctctcctctgaccaactcaagccctcatta

SEQ ID NO: 411675 - DNA, 122 bp, Homo sapiens
acttgaccatggcgccttttcaatgaaataaggggcaaggggcttgggcaaacgaggatgcgtaagatgatctggggtcccttccggatccccaggtcctcgacccccggcatgtaagggta

SEQ ID NO: 411676 - DNA, 122 bp, Homo sapiens
gccggacagggcccgacgagggagcctccttacgcgcgggcggcgggcgcgagccctctacggttgcctggcgccggagacccacagacaggactcacccagcttcctcaaacgcccacgcc

SEQ ID NO: 411677 - DNA, 122 bp, Homo sapiens
gaaattttccttatgctgctggtagaagggaaggaggactccaccatactagagagataacgacttttagttgctaaatctacacagctatgttgttactatttgatgctgctggaatctga

SEQ ID NO: 411678 - DNA, 122 bp, Homo sapiens
agttcctccttgcagagcttcatgtcagtgttgttggcctctctgagccacaatttctctcgctcccttttcatcctctttttacatactcacttcccaacttggatcccccaagaggaccc

SEQ ID NO: 411679 - DNA, 122 bp, Homo sapiens
acctccactgcagttcaattcctactttgcataatcataagtgaactttgccccctttcacgaccaaggtaataagagtctctaaatatttatctttacttgagtttacgtaacttgcacat

SEQ ID NO: 411680 - DNA, 122 bp, Homo sapiens
tgtccctgcagagcgggagagttggagatcagagggcagcacccgccccccagctacccccgccttggtcctggggtacccctcaccagtcttgggcaggatggtggcctggtgcagcacca

SEQ ID NO: 411681 - DNA, 122 bp, Homo sapiens
tagctgagccactacttgagggggatgaagcgggaggagtgggtggccccgatgccgggccggcagtgcttcaccagcttataggtgatggagaactcgcccaggtagtgactgatcatctc

SEQ ID NO: 411682 - DNA, 122 bp, Homo sapiens
cgcggggacccaggcgcccgggcctcctgccccgccggctctgctcacaatggcgctcgccgcctgcagctcgggtgctgacggcctgaaagactgacagactgacagccccgaaacttcgc

SEQ ID NO: 411683 - DNA, 122 bp, Homo sapiens
ccttcttatggccattgtttctctactttgaattcagtttaatcagtctccaatgacagccgtcacttcccatcctcatcactccactgaacctgctatgagtgtaccagttaggatgttta

SEQ ID NO: 411684 - DNA, 122 bp, Homo sapiens
taggggtgtggcccagagccacttggccagttaggggtgggggccgggatctttgtcctgcggatcaaacagttggcccctctggactgcatctccgtgccccccggccctgcggggtaata

SEQ ID NO: 411685 - DNA, 122 bp, Homo sapiens
gcccgggccctccaatcactgcgcgggtctgggtccgccggccaatccctcacggtagggcgggccctgaggttggcttcgtaaacaattggagcctaggccaatccgaagtcccagagcac

SEQ ID NO: 411686 - DNA, 122 bp, Homo sapiens
ccttgcgcgtcgtcgctacctcctcggacaggtgagaagcagcccaggtgaggcaaggggcgccgtgagggttgcgagagtagcgactgccgccccgccggggtttccatcgggcaggagct

SEQ ID NO: 411687 - DNA, 122 bp, Homo sapiens
tgcctgctttgaaacgaaatttttgaaaaactttgatcttgaataatctcttcattctaccgatgaggagacaggaacccagaaaggagaaaaaaaggatcgtctcagcatcaggctgacct

SEQ ID NO: 411688 - DNA, 122 bp, Homo sapiens
cccctggcgagggtaaagcccagcggaacggggagctgggggacaggcgtgggcagcccgcgggggcccacatgggctgggagtggcaccgacggcttcggggaggttgcgggccgagacag

SEQ ID NO: 411689 - DNA, 122 bp, Homo sapiens
tttccgttcattttttcatgccttcagtggccagcgtggaacttcctcaggagtgccaaccggccccagaatgccctggcccatgggaacctgcacttaaagatgcagcaccaacaggtgtt

SEQ ID NO: 411690 - DNA, 122 bp, Homo sapiens
gcattcagcacctatccatgttcaagtgtgggcaaggtggcccaggcaaggtgaaggcagcgaagacccagaggcccctgggcccagcccctacaggtcaggaatgaacaccccgaacagaa

SEQ ID NO: 411691 - DNA, 122 bp, Homo sapiens
gctagttcaggcctttgaattctgggtgtcaggatcacaaccttggctcctttaactgtccgctctaggagggaagcatgccaaatgtcaggtctcactctgactttgttccagtccatagc

SEQ ID NO: 411692 - DNA, 122 bp, Homo sapiens
atctgggtttggggacatggtgagcgggtcgtagtcaaagagagccacaaagatccgggccgggagctcttcggcaccagggtcagtttctgactcttcatagaagtctggagaaaggcggt

SEQ ID NO: 411693 - DNA, 122 bp, Homo sapiens
gatcagtcttctgcacctctaaagccacatgtataacataaaccaacagatggggtcctccgggagtggggctggggctgtgcaccgagaatctctctgagagtgggaaccactccctggag

SEQ ID NO: 411694 - DNA, 122 bp, Homo sapiens
aaactctggcaagatggccaagtatggagaacatgaagccagtcctgacaatgggcagaacgaattcagtgatatcattaagtccagatctggtaggtaaaggaagctcaagaaagctatgg

SEQ ID NO: 411695 - DNA, 122 bp, Homo sapiens
gggcgggcgctccccactctgcttctagccagcgagactccgagctctctgctcgttccgcgcccttcccggtgcgaagcccccatacaacgccccgcagagaaatcccttccccgcggact

SEQ ID NO: 411696 - DNA, 122 bp, Homo sapiens
ttcggtgggggcctctggctcagatttggggccaaggaggcctctgtcattttaaagactcgtgtttacagttttgtatccaaggccgcactgctttgcctgttcctgtgtccctgtgttta

SEQ ID NO: 411697 - DNA, 122 bp, Homo sapiens
agacaggagcgcggccgttcccaggccctatgggatccgggtatggggggtcctggagtgcgacgggatttggggagggggcggcgagggccagtgtatgtcaggagggcggaggccaagag

SEQ ID NO: 411698 - DNA, 122 bp, Homo sapiens
gtcagagcatgtgtccagggtcttccccgcttcctggtggacgggaaggcgtcttcggtccggtggttgacaaaaaatccaaagagggcgtcagatgtgtgcactctggtgtttggaattta

SEQ ID NO: 411699 - DNA, 122 bp, Homo sapiens
gccgcgctgccttctacggatgtgtttgctgcgggcttgggccgggccgcagttttattgcgctcggaggattttctgctcctcctcccggtggctggcggccaatgcaggctctgggcgct

SEQ ID NO: 411700 - DNA, 122 bp, Homo sapiens
gtctgctgctccatcgccggcaggggctctgtctgcaggaggattgggggtcagagcagccgtcggagcccctcccactgtgaccaagagccgaaggacccaggccctgcacccacccccgg

SEQ ID NO: 411701 - DNA, 122 bp, Homo sapiens
gaccatccccaaagtcccctttaaatgacaaccctccccccccccaccccgcccccacaccgagcgccgtattcaccccaatagcacatcaatccctccgcaacgccgggatactgagctct

SEQ ID NO: 411702 - DNA, 122 bp, Homo sapiens
gtgcagccagccagctgggccaggtgagccggtcctgaagggcaccaagcagggttgccccgggctcctgagaggatttttcacatgcagcagctggagacagtttggaggggcccagggcg

SEQ ID NO: 411703 - DNA, 122 bp, Homo sapiens
gctgcctgcggtggggcttggtgatgtgtaagaccctggactgtggtgccctccagcacccgccaacgtgcctttaggagcacggcaggcaccacccccccgcccccgctccccctactctg

SEQ ID NO: 411704 - DNA, 122 bp, Homo sapiens
gattcaccctttgcaagaatagaatcaaagcctctaaggaattggatttaattctgagaacgtggaattttcctttgaagtgaccctttaaaaatattagcaagttcctgccttaatatcca

SEQ ID NO: 411705 - DNA, 122 bp, Homo sapiens
gaccacactattttcagtgtctggagacctctaaagactctaattcgaccttggccaaaacgatccttaacagcatttatatgcttgatctcctctccacgcagcccatcaataagccattg

SEQ ID NO: 411706 - DNA, 122 bp, Homo sapiens
cggaggagtgagaactaaagggcatgggggcaggccttgaagaagatccaggaaggaccccgagcgaagggatggaacccagaaagcacgggggtcgggacaggacaggccgacgacggggc

SEQ ID NO: 411707 - DNA, 122 bp, Homo sapiens
ccagggcccggagcttggctctctgggcttcaggccccgagggcggtgcctgggatgggccggctcagctttggggtttcccgagctccgctctctctcttccacctttcccaacctgtgtc

SEQ ID NO: 411708 - DNA, 122 bp, Homo sapiens
gggcgcgcaaagccttcccgcacaggttcccggagctgggtgggtctggctcaggccgcccgcacactcagccctcccagccacctgcagaacctcaggcagcacgcccgctggcagactgg

SEQ ID NO: 411709 - DNA, 122 bp, Homo sapiens
tgaagtccaaatacactggaattaaacactccctcgacccacagtcccacaggagcgccccgtcactcggccacagagccgatggctgcttcacctccccaccggctgtgggtgtcggctgc

SEQ ID NO: 411710 - DNA, 122 bp, Homo sapiens
ggtatgtgaaacaagaagttctgggtcctttcatcataagggagaagcttcagaaagttccgaggacctgctaaaatcagctactagaatctgctgccagaggggacaaagacgtgcactca

SEQ ID NO: 411711 - DNA, 122 bp, Homo sapiens
ggcatctcagtggcaggttggtggcacctctttgcagaccctgtagccagcccctcatgccgaagtctcctgcctgcctgagaagccctagatctgcctcacttctctgctaacgcagcccc

SEQ ID NO: 411712 - DNA, 122 bp, Homo sapiens
accccgcctggtcacgccccctcccccgcgcgccacgcccacagtccgcccctgcgggcccgccgcgctcctcgcccggcctcgccacgcctacaacccgcctagccacgcccacatgcccc

SEQ ID NO: 411713 - DNA, 122 bp, Homo sapiens
ggggaggcgcatcatctgattcctggcagtcacttggagtaggatgggctgttgagagggcggtaaggtagatctaacatcttagatctctctgctgccatatcatctaagatgagatcatc

SEQ ID NO: 411714 - DNA, 122 bp, Homo sapiens
cctctgtgagacctctcccaatttcccagaaaattatcattttcattaacgatgatgagacgacattcctcatagtgccctctggaccatcgtgtctcccctatttccccctttaggttgtg

SEQ ID NO: 411715 - DNA, 122 bp, Homo sapiens
ctgaaccgcccctcccacagcgctggccgggaccccgagcctggctccaaaccctcgaggcggatctttggacagaagcagctcttccccgaacactgtggcgtccgggacggccccacccg

SEQ ID NO: 411716 - DNA, 122 bp, Homo sapiens
ctcttgaaaggtaaaagtgggccagacctggaatttgtggaatgtcacctgcttctgccacgtggattggaagcagacagagaaaggggaaagatgagcagggacagccaggaacaatcttg

SEQ ID NO: 411717 - DNA, 122 bp, Homo sapiens
ttttatagaatagaaagtcaagatttagagaggttgagtaactaccctaatcacacataccgtgtgtgtgtgtgtgtgtgtgtgtgtgtgtgtgtgtgtgtgtgtgtgtatgtgtgtgtgtg

SEQ ID NO: 411718 - DNA, 122 bp, Homo sapiens
ttgatggaaacgtattaaatagtaaagggatttggaaatcctcgccgtcttcctccttttcgtctattcatgcttgctcccgggagctggctgtccctctggcacggtgctgctgggctggc

SEQ ID NO: 411719 - DNA, 122 bp, Homo sapiens
ccccgggcgagcctcccccaggcttagagctcttccgctggcagtggcacgaggtggaggcgccctacctggtggccctgtggatcctggtggccagtctggccaaaatcggtgagtgcgtg

SEQ ID NO: 411720 - DNA, 122 bp, Homo sapiens
ctctccctcgccaggtccccgttgcctcttccggaagcgggcccccagccggtgtctgggcggcaggagatccatgcccaggaccttgtgggtctgccggaaggccagcattcgcagggcgt

SEQ ID NO: 411721 - DNA, 122 bp, Homo sapiens
ccctggcccagctttgggagctgggtttgttgtgacctttctatcggcaaacaccttccccgttctcctaaaactccaccccacctttccccattctagggagcccatgagtccctagtcag

SEQ ID NO: 411722 - DNA, 122 bp, Homo sapiens
cagggtaacaggagccatgggggggccatgagactggattccactcatagaggccccgcacgcggctgttcaagcaaagccacactgacatttctggtatcaaatttaagtcaatcttttaa

SEQ ID NO: 411723 - DNA, 122 bp, Homo sapiens
tctctaagtcaattccacccctcctcgaagtcccggcttccacccctctcctcagagtcccggcgtttacctcgtggtgtgtttgccttgggcctttcatgccccggctgcacacatcgtct

SEQ ID NO: 411724 - DNA, 122 bp, Homo sapiens
gcagagaggattatgtgtagtcgtgaaagattttttgttgttttttaaggtgggaggaggcggcatgggccaggtagtatagatcttgaatgttggattaaatttgaactataaaacaggca

SEQ ID NO: 411725 - DNA, 122 bp, Homo sapiens
ggctcccaggtccccgaggtgagaagccagagcgggaagctggccgagaggccccgtctacgcgccttccgggtggaaaaggcgctcgctggaacctgcagctccagtggcaaagcccagct

SEQ ID NO: 411726 - DNA, 122 bp, Homo sapiens
tctcagcttacttcttaattagctgtaattccctgtgcatgttaccttacctttactgtccgtaaaatgccctactgccgagcggggcgggtggtggtatggagagaatgctgttgctttat

SEQ ID NO: 411727 - DNA, 122 bp, Homo sapiens
ctgggtcagctgcacgcccccgccccgggctggccggacctcgtagcccaggtcccaccacgccgtgaagtttgcggaaagttttgcagttgcttccccgcccgcgccagcgggggagttgt

SEQ ID NO: 411728 - DNA, 122 bp, Homo sapiens
tggcccccacctgccaaaccattctcagggacaggtaccagctgggatgttggcagcagccgctcccctgcaaggagaacctcccacttcctgtcccgcacacctgcctcattggaaagtga

SEQ ID NO: 411729 - DNA, 122 bp, Homo sapiens
cggccacgcctctgggggacggggcactcttcgtcacgtgaaagggaactgggcgtttgccgcagggaaaagtaaggtgtttctgctctcgcgccatatgcagttcccgcgggatctcgttg

SEQ ID NO: 411730 - DNA, 122 bp, Homo sapiens
gggagggcgctggggacattcacccacaacagcgggtctggcaccccgggcgtctaaccccgaggggctgcccgtgcatcctcatggccaattagtccactctactctgctcctgaagcgaa

SEQ ID NO: 411731 - DNA, 122 bp, Homo sapiens
tcttaaactttctttcccaggtctacccctaccctagggccccacttcgggaacaaattccgtgagaataaaatcatagctaggctggcctacttccctaaagcttggtggaagcgagtaac

SEQ ID NO: 411732 - DNA, 122 bp, Homo sapiens
aaaaggagtggcccgtgggcctgtcactcacatcagagttgggaagcccgcctccaagcccggaagacccgcctcctctgtaaggttaaaggaggaagaggcagagattggaggttcaggca

SEQ ID NO: 411733 - DNA, 122 bp, Homo sapiens
atgttgctgctgttgtcgacagccagtatttcctcagcatgtactctatgatagtcaccgcgaagctaggtattactattattcccataaaaccaaagatccaagagaattaacgatttacc

SEQ ID NO: 411734 - DNA, 122 bp, Homo sapiens
aaggccgaggcgcgaagggtgggaccgcaggagccgtgcagccgcggaccaatgagcgggcgccggacgacctgtggcccaatggcggcggcgcgcgggcacgctgggggccggccagacgg

SEQ ID NO: 411735 - DNA, 122 bp, Homo sapiens
tggctgggactctgtgtgccgctgtcggccaatgaagacgctggagatcgggcccctgcccgtcccctttctgcgccccgggatgaggcagagactgaacagccggcgagcaaatcaacggc

SEQ ID NO: 411736 - DNA, 122 bp, Homo sapiens
cagcattccagggcactggaggtggtagctcaagctctacagctggtggtccctgatggccgcaagaacaacccctcgaggctccgctgcaccccccagctttgtgccagccagcgtgcgag

SEQ ID NO: 411737 - DNA, 122 bp, Homo sapiens
cactgtaagactctgcaagggctctgttttcagctgatactggaactgcctcctcaaacacgctcgtctacacatacaaatgcatttccagcgaggagagactacttctcaagtcatctatg

SEQ ID NO: 411738 - DNA, 122 bp, Homo sapiens
tttagagcagaggcccaaggagcacttccccacctgcagagggacaggcttgggaggaaccgcctggcagctccacctgccctcctacggccacgcaggaacaggaagggcaggacctgggt

SEQ ID NO: 411739 - DNA, 122 bp, Homo sapiens
gggagggaaaggtgggtgggaggcgcggggagcgttccagggcggctgctcacgggtggccgcagcccagtgctgggactcgcgcggctcctcctcttagccccccaccccttcctcctctt

SEQ ID NO: 411740 - DNA, 122 bp, Homo sapiens
ccagcaagccgggagccttatcttatcgccggcgcttcagctctcccgttatttagggaccggccacaggctcgatggcattcctctgctgtgagcacagaactaaactgggcacgtccatg

SEQ ID NO: 411741 - DNA, 122 bp, Homo sapiens
ccacagagtcagatcacggcttcacaccagtcgttctggtcacttaggcgttcgcgtgagcgctcaaccccttaccgccacctcatcgtcactctacaccattctgagcgcaaaaatgtttt

SEQ ID NO: 411742 - DNA, 122 bp, Homo sapiens
ccgccgaagctcggctcagccatacgcgcgcggacggcgaaggtgtagcgcgtccggccccgcaggttgctcagcacacactcggtgcggccctccaggatctccacctgggggcggaatca

SEQ ID NO: 411743 - DNA, 122 bp, Homo sapiens
acattcccctgagagggagggttaagctctggagagctgggagtgagacccggactatcccgggacagaagaccacagcaaatagttcatgaagttcctggagtctccatatcttctgtccc

SEQ ID NO: 411744 - DNA, 122 bp, Homo sapiens
ttttaattcatgtaattcattatagttcatatataattctcattgagttgggcccattatcgggtggagcaagtggggagaggagaggctggagaggagccccaggtgccatccgaggtcct

SEQ ID NO: 411745 - DNA, 122 bp, Homo sapiens
cgagttccgccgctgggactacagcgtttggctgcacggggagttctcgtatgtctagaacgatggcctttctgcggtgtctgcgaccgggaccaaggcggagcaaagtcgccgggggtgtg

SEQ ID NO: 411746 - DNA, 122 bp, Homo sapiens
gcgtctctagcgctggattatgacgctggattatgacgcaggcagtgggcgcggactctgcggttcgcttgactgacggcgcagcctccgggcctagccacagcagcaacggcagaggccag

SEQ ID NO: 411747 - DNA, 122 bp, Homo sapiens
tggggtcctccaaatctaccaggccatctccccagtttcccagttcttcctgcgtgcgggcgagagtggttgggccctcgggaacccactcagagcgaggctaaatttacggagggactttc

SEQ ID NO: 411748 - DNA, 122 bp, Homo sapiens
gtggtcctcagaccaccggcagcagcactaaggaattctttgcaatgcaatttctcagctcgaccggaaacctgcagaaactctgggagtcgttccagtggcccagagacagggttaacaag

SEQ ID NO: 411749 - DNA, 122 bp, Homo sapiens
gcgggcaggcggtggagaaggcggaccgctgggaggagccgagtgcgggtaagcagctgccggcaaggttctcgccttggccggctctgaggagccatgcagggctctggagcggccttgga

SEQ ID NO: 411750 - DNA, 122 bp, Homo sapiens
agtgttttgcctgacctttaaggaaacatgacggagaaaaagaaggtctaaaaaaaacttcgttatcattacaattaaggggaaaaaagaatcagtcagggcttgttatcctgtggatatgg

SEQ ID NO: 411751 - DNA, 122 bp, Homo sapiens
ttccctcagagggtaaaacatttgtgtcacttccagccaaggagacatgaccccctccctcgccaagagcagaggaagcccttcttagctaaaaataagtttgttgagcctctgggggaaat

SEQ ID NO: 411752 - DNA, 122 bp, Homo sapiens
tcctcaagcaggggagctgagccttccagggcagggtgggctccagttgtcttgagggtccggatgggctcaggtaataaagaaacggaagcagcagccagccacgctggtctccccaaggc

SEQ ID NO: 411753 - DNA, 122 bp, Homo sapiens
ttatgggaaatgtagtccgccgttccgccgcgcttccggacacgtcccagcggcgtccggcgttcctgctagctcttccggttaggcgtctctgtcccgcggacgccgcagccgtgcggcgg

SEQ ID NO: 411754 - DNA, 122 bp, Homo sapiens
ccggactctcctaggtctgggtgtggacccggtgccggccggcgtggatgccagcccaggcggcgcaggacgcgaccccggcccgccaggcggggcgcccgagaagcggcgggtgggcaccg

SEQ ID NO: 411755 - DNA, 122 bp, Homo sapiens
tccccttcccccctttcctctccctccctctcggctcccgcatttcccctcggctgccggcggctccgacatcatgctccggctcctccggccgctgctgctactgctgctgctgcctcccc

SEQ ID NO: 411756 - DNA, 122 bp, Homo sapiens
cttctaacctagaagagttagcttcctccctaacatacttggagaaagatttgggcataccgcagcatttcatttcctctttgtctagcttgatgataactcgtcacttttcaaactgtgaa

SEQ ID NO: 411757 - DNA, 122 bp, Homo sapiens
gagcaacggaaaggaccagactcagacaggagaaaggaggggatatgacccggttggttccggtttgaaagggaagagacaggacctggtagggtttgagaacaggaatacacagaaggttc

SEQ ID NO: 411758 - DNA, 122 bp, Homo sapiens
aagttgccaggtgaaaggatggataattttcttgcatgcccgtcgcatgccagggcctttcgcgtgccagtgcgctggggctttagaacagccctgaaacgtgttcatgtgccggcgtggaa

SEQ ID NO: 411759 - DNA, 122 bp, Homo sapiens
tgtcattggcctggaggtctcgaatgcccagggtcccattggcataggggaagaagcgttcgtcctgaagcactgttgtcccatcctcgtccagcctggagggagcagggcgggcctggctc

SEQ ID NO: 411760 - DNA, 122 bp, Homo sapiens
taattgattaatacccaactctggcaagaagctaagagtagaagacacattgcctgacagcgtgcaataggtcctcattacttgcatcacctcccattaagcatctgagtctctcatgggct

SEQ ID NO: 411761 - DNA, 122 bp, Homo sapiens
ccatgtggagccactactcggggaggacgtgggccacccggagctcagtgacagtactcccgggagtgtacatcgttggtaatgtccacgacagtgtccctgcctgtgacccaataatttcc

SEQ ID NO: 411762 - DNA, 122 bp, Homo sapiens
aactcactgccctacctctctgggtgattctatgcccattaacatttttaaaccccaccccggtggctcagaataagattccactgcctccttattttcttattcaagagcttttaaagacc

SEQ ID NO: 411763 - DNA, 122 bp, Homo sapiens
gaggcagcacggggaaaaaagcggcgggccggagtcatttcactgatgacagtgccttcccggcagaccctgcgccgggtttggggtggtcgtggagtccctggcttgcacccagtgtgcgt

SEQ ID NO: 411764 - DNA, 122 bp, Homo sapiens
gcggagggaggaggcgggggaccgctcagaagggcagggaaggaggagccggcgcggcgccgcgacacgtcccacagcctcagagcgccgggaccacaactcccggcatgccctgctttagc

SEQ ID NO: 411765 - DNA, 122 bp, Homo sapiens
acaattacgaaagtttttaattagctccttgttataattcattttatttccagaactctccgaccataaattattcaaagagtaagccaacccgagcggggcggccgcgcgccttccccacg

SEQ ID NO: 411766 - DNA, 122 bp, Homo sapiens
agaggtgacagtggttaacttggctcttgctccacgaggctggaacgttgcccatgacctcgggaatcccagcgacctttctaaggctgggctcaagcctggggccaatcttcacagcctag

SEQ ID NO: 411767 - DNA, 122 bp, Homo sapiens
catagacatagcagatatctgagtcacaaacaagtcaggaaatgctgcttacactgtatccgcattacacaatagccaacacttcacacaagacattaggccagtcctgtaggcccttggga

SEQ ID NO: 411768 - DNA, 122 bp, Homo sapiens
attcctacactatcggtggacacatcacagtaagattagactgaggattggcgaggggtgcgccgttcttgtgtaaagcgggagaagagtgtattatcgttaggcaacattttaggatatag

SEQ ID NO: 411769 - DNA, 122 bp, Homo sapiens
atgattggctaaaatacatcagtctcctttcctgaggatgtgagtcatgtgagaaaagaacggatactgggacaaagcagctgctctgctagcaaaggaagatctttgtaatagtgagccgt

SEQ ID NO: 411770 - DNA, 122 bp, Homo sapiens
gccccactcagccagaggatcttgagggcacgcagggcactgatatcctcaggcaggccccgcagccggttgctggacacgtccagctcctccagggccaccagctgcagcagctgccgggg

SEQ ID NO: 411771 - DNA, 122 bp, Homo sapiens
tcagttggcaggagccacctacatggaaattcaccaggccggaggagggatccactttaccgtggagcgcacgcgccaagccacagaggaggagctgttccgctccttgcagcaacggctcc

SEQ ID NO: 411772 - DNA, 122 bp, Homo sapiens
ggacgtgtggggatctggccctctcccgcttgcaggtgtggctggcgtacgcgttgggagcgcctgcttgcccctcctccgggggggaaggactggccgtcgtccctgccccgggggtgcgg

SEQ ID NO: 411773 - DNA, 122 bp, Homo sapiens
cgcccgggatggagatgccgcagggagacgcaggcctcagcatcaccatcgcccccacgccgtaaaggacaaggacattagagaggaagacctcccgggagtcacacatgagaactaaagtt

SEQ ID NO: 411774 - DNA, 122 bp, Homo sapiens
ccgccgcccctccgaggcgaaattgatgcctcgcatttgctaggagcggagagattgctgcgtttctcatacacttgaactccgagtaatgcagaaagagaaattgcagaggtggagacaca

SEQ ID NO: 411775 - DNA, 122 bp, Homo sapiens
tgcagggtcagcttctgtctcctttaagcagacgtgcagatggcggcagctccaggcccccgccccccaccccacacttaacctgtgaggtggttgtgggtcatccggccgcactccacgct

SEQ ID NO: 411776 - DNA, 122 bp, Homo sapiens
tcgtggccgcttttgggatggccggcatctttctgagttcactgacactgagtgagtccccggctcagcgcgctcctgccatgggggcgggggtggcaggagagaatggggctcaggccgcc

SEQ ID NO: 411777 - DNA, 122 bp, Homo sapiens
tgcaggtttcgttggtgagcgtgaacgttcgtgcacaccccttgctgtgtgtgcgtgtcacgactctgttgccacctgttttcgtgtgaactggcagtccagtccagggcctgtccccacgg

SEQ ID NO: 411778 - DNA, 122 bp, Homo sapiens
ccagcatcgaagctagccaccactgacttgaggaccttggtcgtggtggacgtcagcacacgctcatcatagtcgtctccgatgctgaagatgcgaggaagctggctaacgatgggccggaa

SEQ ID NO: 411779 - DNA, 122 bp, Homo sapiens
tggggaagcacaatttgacatgctcttttgtcttcttgtcacttgcccagagctagtccccgcatctgctctgacacacacagctcagcagcaggcatagtgacctctgagtataagcacag

SEQ ID NO: 411780 - DNA, 122 bp, Homo sapiens
taggttaagtcccagagtccggaaccgctgcctgcggcttgacacagggttggtacgtagcgtctgtcctgggcgttggtccaccgggattgcgtttatctggcgaccccatggagttcaca

SEQ ID NO: 411781 - DNA, 122 bp, Homo sapiens
gctgttggaactacaggtctgggcctagggctctgactccctccagaaagcttcctcattcgaaccccaagccagtcaatatacccttgctttgggattcagactaaaagtacaaattaaac

SEQ ID NO: 411782 - DNA, 122 bp, Homo sapiens
tggggcatactcagtgtggtagtgtggtggctcttctatccatctcttctaggatctctccggaagctgaagtcagctggcagttaactgggggctgcatggtgtgacttgggttggccgac

SEQ ID NO: 411783 - DNA, 122 bp, Homo sapiens
aggaatgtgtggctcacagttctggaagacggaggtccgaggtcgaaggcccagcagcttcggtgtctggtgcggaaccgccttccagctggtaggtgtcgtctctcaggcctctttgatga

SEQ ID NO: 411784 - DNA, 122 bp, Homo sapiens
ccccttcgccgcccggagacatcatttccaaatggactccactcatcagttccttcgtgccgggggcctcggggcggccgtggctggtgacggacagcgggccagggaattctgacgctcgg

SEQ ID NO: 411785 - DNA, 122 bp, Homo sapiens
cactgctgacttaccggttttactcctctgctcaaaaggcgcctgcccgaggccgctttccgttgcaaaggttcctgaatttggggaggaagagcagcaagactgaaatattgggcatacgt

SEQ ID NO: 411786 - DNA, 122 bp, Homo sapiens
taaacataaaagaggatagtgatagcctacacttgtatcacatttttatgaagttcaatacgttgatggtccatgcttagtcacattttgtcctagaaaatcttttctaattatttctacac

SEQ ID NO: 411787 - DNA, 122 bp, Homo sapiens
caggaaaaggccaggagcagaagatggagagatggagaagcagcaggtgcggagaagcggcgctccacgggctgggtcagcatccgctggcggatcttagatgactttgaagatgaggaagc

SEQ ID NO: 411788 - DNA, 122 bp, Homo sapiens
ggagtgaggctggatcaaagtccaacatcaaactaagttaagacctttggattagaaagtcggcctgcacactgggacctgttgtggggtggggggaggggggagggatagcattaggagat

SEQ ID NO: 411789 - DNA, 122 bp, Homo sapiens
gcaacaccttttggaaaggtggtaacagctgctgatatggaaagcaccgaggcacaatgacgtgcagcaatcctttcctcatcaagcaggaaaaccatgctgtgttgctgacatcacaggtg

SEQ ID NO: 411790 - DNA, 122 bp, Homo sapiens
cagggagggaggaaggggtaactgagtccaggaagggggtggagcgtggccatggataatcgggcttcctactggcccagggtatttgagagtgacccagtgcctccatccctccttctgcc

SEQ ID NO: 411791 - DNA, 122 bp, Homo sapiens
gcggtatccacctgcagcccttttagtggtggtgtctcactctttcttctctctttgtcccggataggctaatcaatacccttggcactgatgggcactggaaaacatagagtagacctgag

SEQ ID NO: 411792 - DNA, 122 bp, Homo sapiens
gacaccctttgtctccaccacacatagtgtactttggaagcacaacgtccaggctggtaccgcagcgccatgcccattcctcgcctcattcataggacacttcactgccattttctattcac

SEQ ID NO: 411793 - DNA, 122 bp, Homo sapiens
caccgcagcgcctgtcaaacgcgggccggctatttataccccgcggggccccgccgccctcgggcccccaccagcccgccgaacctgcttcttttgctgtcttgaatcccgccctcttctcc

SEQ ID NO: 411794 - DNA, 122 bp, Homo sapiens
ctcgttcttgtgttttcgcgctctcttcattttaaaaagtgttcctaatccctctatgagcgtccctgaggagagggaggagctgcaggacctgagtgccagcagaagtgggggggccttac

SEQ ID NO: 411795 - DNA, 122 bp, Homo sapiens
cgctggagccgtctctgactcatgacttcccctcactcaccttcagggctccttctctaccgtgtatatgattttagagtcaagaccgctcgggaatgggaatatagctacatatgggaaaa

SEQ ID NO: 411796 - DNA, 122 bp, Homo sapiens
gtggctttgggacgctgctctggtctgtcctgtgaagagtggttatgccagtgttcgtgtcgggaaaacatttcccgtggtcgctagccctgtgcttatggtgatggaggggccttcagaga

SEQ ID NO: 411797 - DNA, 122 bp, Homo sapiens
aaaactgagagtgttgggatataaggatataatactgatttatgaaggtgaacagtcaaacgtcagtgcaggatctgaactgcaggggaaataaggggccttggtggctaaggaagggagga

SEQ ID NO: 411798 - DNA, 122 bp, Homo sapiens
ggccttttcgaagagtttagctacgcaaccgttttccattaatgttaccatcttgtgactcgggtgacctgtgcgacttgggtcgtgaattctcaggtcggccttcccaatgcttgagaagg

SEQ ID NO: 411799 - DNA, 122 bp, Homo sapiens
ccccgcctccctgtgccgggccccgcgcgggaggccctgggcgcgccgggaccgagggcgcgccccagatccgcgcgccctacagccccgagtctcctccagtttcagacccccggaggcgc

SEQ ID NO: 411800 - DNA, 122 bp, Homo sapiens
gtgggtggagcaggaggggctggagtattgggaccaggagacacggaacgccaagggccacgcgcagatttaccgagtgaacctgcggaccctgctccgctattacaaccagagcgaggccg

SEQ ID NO: 411801 - DNA, 122 bp, Homo sapiens
ccaggaggggagaaaggtcttacctaaaggaggagccatgcaaacagagaggagggctatcgggaaggtggagtaggcagttcgttgtcatcagttgtatctgaaggacaaggaatgcatct

SEQ ID NO: 411802 - DNA, 122 bp, Homo sapiens
ggcagtaacagaagtggtgggaacttaagggtgcagcagtcactggtccccatgtcagcacgggaggagtgtaagcaacagggatggtgtggctctgatggggtggcctgggagttcttatg

SEQ ID NO: 411803 - DNA, 122 bp, Homo sapiens
cctgagacatcagtggctgaaatactaacttccaacacagtgttcaatgtgggagccaatcgaatttcatctctgcaaatagcatacatgcataatcagtttggagagttgatatgaaatga

SEQ ID NO: 411804 - DNA, 122 bp, Homo sapiens
atccggaacccgtgtagacgtggtctatggagccctcggccgtctggcccctgcggctcccgaagccgaataacttcatggcggtgactacttctcagacccccaaccaccggctcttgagc

SEQ ID NO: 411805 - DNA, 122 bp, Homo sapiens
cactgtccctaagagagacacagcaggctgtgctgccaatggcacagggtatttaattgccggaagaaggaaagttcttatgtctgggacatgcccaagcgtaactcttgcaaaaccacagt

SEQ ID NO: 411806 - DNA, 122 bp, Homo sapiens
ctttaatagacatgttaactagcctcagtttccttatctgcaaaaagcgggggttgtgcccggggatccctaaggcgtcttccagttctattttcacctcttaaagtgctgtgaggggctgt

SEQ ID NO: 411807 - DNA, 122 bp, Homo sapiens
atggagctggaggccattatcttcagcaaactaatgcagcaacagaaaaccaacactgcacgttcccacctatagatgggggctgaatgatgagaacacaaggacacatgggggtggggagg

SEQ ID NO: 411808 - DNA, 122 bp, Homo sapiens
agggctgcgtgaactttagtcacgtggtgacaggccgagtcaccatgccaagtcactgtgcgcctccttgctgctgtgacgtcagcttccccatcctcccagccaggctggacctccgtgag

SEQ ID NO: 411809 - DNA, 122 bp, Homo sapiens
gccacggagaggaacggtgcctttgaagcacaaaaaaaaaaaaaaaacaggaagggagggcggagccagaaatgccttttctaatgagagtacccatcagggaaggctccataggctggcag

SEQ ID NO: 411810 - DNA, 122 bp, Homo sapiens
aagccgcagtgggggtgccgcctcccgcccagcccgctcccggggagcccacgccacctgcgccgcccagcccggactggaccagcagctcccgggagaaccagcaccccaatctcctcggg

SEQ ID NO: 411811 - DNA, 122 bp, Homo sapiens
aaaaataactagctgggcagagtggcatgcacctgtgagcccagctactcgggaggctcacgatgattgcttgagcccaggaggtcaaggctgtagtgagctgtgatcacaccagtacactc

SEQ ID NO: 411812 - DNA, 122 bp, Homo sapiens
ggctggggtcaggaaagctgggaggttcaactacgggcgagaaaattggggcactttccacgtctctcccgaaaataaaagaaaggatgccgggcacggcggctcacgcctgtaatcccagc

SEQ ID NO: 411813 - DNA, 122 bp, Homo sapiens
cgcattaataaatacatttgcggcccctcattggacagttggcctaatttgtttctttttcgcggggtggggggagcagccgcgcccgcgccccctggctcccagcagccctgtgcaaagca

SEQ ID NO: 411814 - DNA, 122 bp, Homo sapiens
tccagcccgcagccgagtggaagctccaccgggcgggcggggaggcgggttgcataatgccgggcactgccccctcattggcctcttgccgacggagccgcaggccccgcccccgattggct

SEQ ID NO: 411815 - DNA, 122 bp, Homo sapiens
gtggcagcgcttgggtctcctgagggttccttgaacctgcgtctacagacgcattcctgacgccagagaaacgtagggtgctgcgttcagagcaggtgggcgtttaggggcacacgggccgt

SEQ ID NO: 411816 - DNA, 122 bp, Homo sapiens
ccaggaatccacgcttcctggaaggtgagtggctgggctcacccctgcctgccactgagacgcagacatgcatacaccacccgcactccctcgccgtttccaaggcggcggccgcgttcgca

SEQ ID NO: 411817 - DNA, 122 bp, Homo sapiens
cgcggaggccggggaggagccggggcctgcagcggagccgagccgagcccgagcccgcgccgagccctgacactgtctgcccgccttctggctccccgggagcccagactggtcggagcccg

SEQ ID NO: 411818 - DNA, 122 bp, Homo sapiens
ccggcggcagctggtcgacctgggaggccagaccgagaagcggtggcgagcggaggttggcggggtgtggggatgccctgggccttgccaccccctttcacaccccttccccacgccccacc

SEQ ID NO: 411819 - DNA, 122 bp, Homo sapiens
tcagctggcttgcttgaagagggctatcaggctagatttcatgtctcaacaatttctagccggtctccctgagctggcaagcaccgctcagtttataatagtgcctggcacatggtaggtcc

SEQ ID NO: 411820 - DNA, 122 bp, Homo sapiens
gatgggggttcgggggctgctggtgaaggaacattgagcagaaacctgaataagtcacgccgctatggggcggggctggtccctggcagaggaagcgcggtgcaaaggtcctgagacgagca

SEQ ID NO: 411821 - DNA, 122 bp, Homo sapiens
tcacatcgtggcttctaaccgcgtcaccatcctcctagctctgcggatgcctgcgatgtccgaactgccttaaggtgaggcgagtgtcagcactgaacacaaagcctcaggagtgataaagc

SEQ ID NO: 411822 - DNA, 122 bp, Homo sapiens
taggagctgcgcacgcggactggacagcctgaaaggcgctgttgctagggtgccaggattcgctgcagcagcttccggaaaaggcggtgactgggggcggggccagagagggcggagcattg

SEQ ID NO: 411823 - DNA, 122 bp, Homo sapiens
tggctggagccactgctgaagggactccacctggcacctatgccaccaatggcccctgaacgggtatctaggcccacccttaataaagatgagctgctcattcccagtttcagaccttgttt

SEQ ID NO: 411824 - DNA, 122 bp, Homo sapiens
gggagttgcatggcccatgtggatcccagcctttggaatcctcatctgctgtttctctcccgtccccccaccctctgcgtagggaatggatgggtctttttttgttgttgttgttgtttgtt

SEQ ID NO: 411825 - DNA, 122 bp, Homo sapiens
ctgggcgctggaggagggcctggccatgttttctttcctagaaactctcatttgatcctccgaagggagagaagggacgggaaggaacagaggccttgggtgtcggcctaattcagtcccaa

SEQ ID NO: 411826 - DNA, 122 bp, Homo sapiens
gggccagaggctcatctgccgagtagagctgctggggctcggggactcagggcacacaggcggaggagggcggggcgctgaggactttgagactcggccctggtgttgatgaacaggccagc

SEQ ID NO: 411827 - DNA, 122 bp, Homo sapiens
tttgggtcctctgcccactgcattcctgttaattgatgttgttcaatctctggggcagatcgttcaaagatctcccttgaaaatgcaattcctcatgtaacagtctagggactttctagaag

SEQ ID NO: 411828 - DNA, 122 bp, Homo sapiens
tgaaagggagccttggggatcgtaactgaggaggtttgggggctgcgtgtgcgatgaggccgtctgcatttttgtaggggttttctccgatgtggatcctctgatgttgcatgaagatgccc

SEQ ID NO: 411829 - DNA, 122 bp, Homo sapiens
cccagttgaccactccgcttctgctctcccctccctctgttaggggtcgtcgcgcttctccgatttctccacgaactttgtgattattcattttgggttttcattcctggcttttctttatc

SEQ ID NO: 411830 - DNA, 122 bp, Homo sapiens
gggccgcagaagggcactgtcaggaggcgggatccctgtaccctgatgactcccgggaagcggcagaaatcacggtcatgaaggattcgtaaccggggcagggctcttctcagagcgggaga

SEQ ID NO: 411831 - DNA, 122 bp, Homo sapiens
cttcatggaaaacttgggacgaactgaaacagaacactttatttgtaaaggagcaaagaccgtcgaccaggccaagcacttggctatcacaaaatcgggacgagaagcctttaatcagccag

SEQ ID NO: 411832 - DNA, 122 bp, Homo sapiens
aaggtgaccataccacatgcaccagcctcctccaggcactgtaatcctgcttggaaggagcggggagtgcttgccctttggaagtactgggggacatagacagaccactgagtgacagagac

SEQ ID NO: 411833 - DNA, 122 bp, Homo sapiens
tcatacttatcctgctgcaagaaacgtgctgtggggacacgaaggatccggtcacaggggcggcctccggggaagatactgacagagacgccgccatccggggctccctgggcggggtgcgg

SEQ ID NO: 411834 - DNA, 122 bp, Homo sapiens
ccgcctgcagccctcgggccttccccttaaaggggccgctcccgagcctgcagccgcccgcgctaaaccccgcccaccctccgaggtccaggaggagagccccagtgctcttcctgcgcgtg

SEQ ID NO: 411835 - DNA, 122 bp, Homo sapiens
cctgcttctgtctcaagaaggctgatgtcacttcctctgatgaaatcctgtcttcccccacggcccctcaactgatgccacctcaccctggagagggtgggcagagcctcctacggagggag

SEQ ID NO: 411836 - DNA, 122 bp, Homo sapiens
agtgaggcggtacagggctggagcggggcccagccctgcaggcgacgatgtcacattccccgagttcctgagatacctggtggatgaggaccctgagcgcatgaatgagcattggatgcccg

SEQ ID NO: 411837 - DNA, 122 bp, Homo sapiens
ccgcgccgcctttgttcgcagcctgggccccgccgccagccgctgctcggagggagcgagcgagaaaggggagccggcgcagctcgctgccctgttccagaactcagaatttgagaggcgag

SEQ ID NO: 411838 - DNA, 122 bp, Homo sapiens
agcaagctgcgtaaaggctgcggcagtctcggtctcccggagctcttgggagcctggccccgcccctttcccggtgattgatgtgtgctgcctctttctgggtgatttacatgtaatgcccc

SEQ ID NO: 411839 - DNA, 122 bp, Homo sapiens
ctggggctgactgtcctatttgtccttcaccagtaggcggctcaagcctgccccagaatccgggaacctggccctatgcaagagctctcttcacctgacctgtctccggtcacaatctgaca

SEQ ID NO: 411840 - DNA, 122 bp, Homo sapiens
cagggtcctgcagctctgcggatgggcggccgtccggggaggcccaaggtgtggcgagatcggggagttcttctttcctgatgttgttgtgacccgaaagtctgtgttttcttcacctgaga

SEQ ID NO: 411841 - DNA, 122 bp, Homo sapiens
gcgctggcgctggcccgggagccccctgcggcgccgtgtcccgcgcgctgcgacgtgtcgcggtgtcccagcccccgctgccccggcggctacgtgcccgacctctgcaactgctgcctggt

SEQ ID NO: 411842 - DNA, 122 bp, Homo sapiens
tctctcgtcccaagccccacagggtcccctcgccgcaggatgccccccgattgtcgcgcccgggcctcctacctgcacgtcgtctccagactccacaccggaaagagagagtgggagggggc

SEQ ID NO: 411843 - DNA, 122 bp, Homo sapiens
cggagctactgcgccggggagcgggttggtttaaaatgctgtgttagttccacggaaacccgctcgcctgctgcagtacggagcctcaggcggacagatggactgtaaggtgaggctgccgg

SEQ ID NO: 411844 - DNA, 122 bp, Homo sapiens
cccaggctggagtgcagtggtgagaccactgctcactgcagcctcaacctcccaggttcccgcaatctgcgcacttcggcctcccaaattgcgattacaggtgtgagccacggcactcagct

SEQ ID NO: 411845 - DNA, 122 bp, Homo sapiens
tgctctagcaatttttatttttaatcacagtggaggctgtgttggagctgaggccggtcccgctctcagggagatttgctgagaaagcgcctctctggcaactttttgacgcaaactctcca

SEQ ID NO: 411846 - DNA, 122 bp, Homo sapiens
ccccggcagagcgggaaggctgaggaggctgcggcgggagccgccaggcaggatcgggcccgcgggggcgggctgctggaggtcgcgaggtttgcggcgggagggaagaaacgtggggggcg

SEQ ID NO: 411847 - DNA, 122 bp, Homo sapiens
cggttgcaacccgaggccaccccctgccgccccagggccacctaccgtggcgagacgcggcgaggcagccccacgcacccagcgactcccggctctccagccgccccagccggggaaggggg

SEQ ID NO: 411848 - DNA, 122 bp, Homo sapiens
tcgagctttatgatggtgcagaagcagcctacgtgcagtagaaactgtaccacaagtgcccgtgccaccattctgcgtctcagtacagtattgaataaaggacatgacacagtcaccacttt

SEQ ID NO: 411849 - DNA, 122 bp, Homo sapiens
aaacacaccagtagattcacacacataaaacaaaacccctctgtttcctcaaaatgccagcgctgaccagagtttcttttttaaaatttgagctttatcttaaatatttaatcagatctttt

SEQ ID NO: 411850 - DNA, 122 bp, Homo sapiens
aagaggagcacccgccagatcgcgccccctttcgggcagaatccgctcccggtccggtcccgattggcagaaaacgatacgagggcggtatacactcaacacgcgcatgaacgattcatcaa

SEQ ID NO: 411851 - DNA, 122 bp, Homo sapiens
cctagggtcatgggacacaaatactaaaatatttccactactggtaacgatgctggcgaacgctttcctaatccagttcagaccgacctctcattggagcttgtgtgacccgcaggagtccg

SEQ ID NO: 411852 - DNA, 122 bp, Homo sapiens
cctcgcaaagcctgacactagtttctggataaaatgcaggcgatggctgctggcggatgccggcagacacactcaaagacccttttggactttccgagtttcccattctcctctactggagg

SEQ ID NO: 411853 - DNA, 122 bp, Homo sapiens
cgtcaccccgcgctgttgcctcccacagaacctggctcctggtgcgcgttgcggggtgtgcggagatggtacggacgtgctgcggtgtactcactgcgccgctgccttccactggcgctgcc

SEQ ID NO: 411854 - DNA, 122 bp, Homo sapiens
tatgaagatgcattctcctgtcatttagcattccactgctgaacaaaaagattaaaggaccgaatgaacccagtatttggtttggtactgttcttacctttagtctagaacttcaagaaagc

SEQ ID NO: 411855 - DNA, 122 bp, Homo sapiens
gagttcacagtgggagacaaacctgtttcaaacttccggatgatcgaacggcactatttccgggaacacttgctgaaaaactttgactttgattttggcttctgcatccccagcagtaggaa

SEQ ID NO: 411856 - DNA, 122 bp, Homo sapiens
gcggctctgggagaagtgacctgaggagtctgcagatcccagcccgggacggaggcgccgcgagaggagctactaagccctccaagccgccctttccctcttgcctccccagcccagttcat

SEQ ID NO: 411857 - DNA, 122 bp, Homo sapiens
agctatggtcgtccatagatatccccatttttcagatgaagaaattgaatctcagctgggcgtgctggctcacacctataatcccagcactttgggaggctgaggtggaaggatcatttgag

SEQ ID NO: 411858 - DNA, 122 bp, Homo sapiens
cccccggggagaggccgggtggggaccgcagggcgcagctctcccagtcccacccttcggcgcagggctccggccaacacagccctccaggccgcctactctccagccagccggctccacgg

SEQ ID NO: 411859 - DNA, 122 bp, Homo sapiens
ctgcgcgaggggttctgtttggagggcagcgcggagccctctgctggccgcggtggggaccgctggctcccctgaagtcaccaggccggcgacgctgcagccagtccttcctcgtcctcctt

SEQ ID NO: 411860 - DNA, 122 bp, Homo sapiens
ctttcaatttattttcacgtggcactcaaaatgacctgtgaaactctccagtggccagctcgttccaaaaaaagaccaatcgctcagtgaggtgcacagtctggaccatcacctctctgact

SEQ ID NO: 411861 - DNA, 122 bp, Homo sapiens
ggtgggacgcgatttactggctgcaattcccggcgcccctcgatggcacttaagagagaccgggagggagccggggagagcgggcggagggcgggcgggcgggcggaggaggggcggcggga

SEQ ID NO: 411862 - DNA, 122 bp, Homo sapiens
tagaaatcagataagaccctctaaacatcgttacatgggccacagttacattaagacaggcgttctgacgttctgaaaccgcctttgcaaaaaattgtatcggtgagagaaggttggccttg

SEQ ID NO: 411863 - DNA, 122 bp, Homo sapiens
ctcagagcagcaacccagggctgcggcatgatgggcctggtcggcgctgggtgcctcgttcggtgccggcaggaaccagcacgcactcaggctgatgagaccaggagggtcagctggaccct

SEQ ID NO: 411864 - DNA, 122 bp, Homo sapiens
aaggaaagggagtaaaatgaatcccaaacttttcggcttacctcttcttcctgtctgattcgccgaaatattaatggtggagagtgtcccggttcttggcttcctgaacaaagaattggaca

SEQ ID NO: 411865 - DNA, 122 bp, Homo sapiens
gcagctttgtctgcatgtccaaatctagtggtcaattttcatatcttattttacttatcccgtaatcatcatttgacactgttggtcactcctcctccttgatacactttctcctggcttct

SEQ ID NO: 411866 - DNA, 122 bp, Homo sapiens
gtggggctctccccttgggcggagtggggcgcggtggggaacacagcttggacgcctaggcgtcctgagcccggcaccctgcgcgcagagcagacccaggcgctctcgcgagctctagcgtc

SEQ ID NO: 411867 - DNA, 122 bp, Homo sapiens
tcccaagtccacaatgccagccaggtccctatgtcccttgtgttcttgtgtccctattgtcgtttccctctagagaactaaagtacaacctccaggacctcattacctacaattacaacaga

SEQ ID NO: 411868 - DNA, 122 bp, Homo sapiens
atgaaaatgctttgatctggagacaggaagtacttgcccccaggacagattcacaggaggcgaactgcagggaatttacaaatggcattgtatgtgtccagtagtctaagggttcaaagata

SEQ ID NO: 411869 - DNA, 122 bp, Homo sapiens
tgggaaaactggatatccatatgcagaagaaactaaacctaggccgggcggggtggctcacgcctgtaatcccagcactttgggaggcggaggtgggtggatcacctgaggtcaggagtttg

SEQ ID NO: 411870 - DNA, 122 bp, Homo sapiens
ttggggatgagccagccccgccccagccctggtgccttcccccacctctcctcggagccccggacgccccgtgccttcccagagcctggcagccgggtgccccccagcagactggagtgcca

SEQ ID NO: 411871 - DNA, 122 bp, Homo sapiens
gtagagtcacatgggaccacttgacaaaggggcacaggacttccatccatcagtatcccccgaggacattcacataccagcactgctctcccgctgagatctactgacaggcaggggcaggg

SEQ ID NO: 411872 - DNA, 122 bp, Homo sapiens
cagcaggcacgccgctccctccagatggctgagtgaacagcttcatcacggctggctggacggatcctgcatccctggcctggggctacacgggcgactgggatcaatccttcgtcaggata

SEQ ID NO: 411873 - DNA, 122 bp, Homo sapiens
aactaagccatctgcagagaatggaggatgcctgagaggggtgtgtaggagtaagagagccgcccttggcactgtaagaatccaggcgaaaggaaaaagaaaacctgcaaagatggtttata

SEQ ID NO: 411874 - DNA, 122 bp, Homo sapiens
tttgaaagtaagcaagagaacagaaagcgagcaagagaaccgcaacctttaccaccttggcgaattcttgccgggacctacatattaaacagcacttgcacacagacgcctcaagtcgtcct

SEQ ID NO: 411875 - DNA, 122 bp, Homo sapiens
aaagaaagcggaattgtcgatcactccagttgccagttttatacaattttaagcagtcgtcgccactcgtttcccctttgcaaaactgcaaatcaccaccaaccttgcatcaaatagaagtg

SEQ ID NO: 411876 - DNA, 122 bp, Homo sapiens
gacctccccgtcggagccctggctcaccgtgaccttggggcccagaattgctgggggccccgccgctggagtagcaggggagaccccggggcggaagagccggtgcgggccgtcgcgtggcc

SEQ ID NO: 411877 - DNA, 122 bp, Homo sapiens
ggtgtcctacaatgcccccacctttccttcagcttccaggcaggctgcagtagcctggagcgccttatggatattaactccctcaaccctgacggcagcccagtggggagggtgcacttccc

SEQ ID NO: 411878 - DNA, 122 bp, Homo sapiens
ggtctcctagctaccatcttgtcagcaggcgacctttacccagactctgtcctactaccacggctggcgccaacagcatcctagagggacagcctggaaccaggagttacacgagttgggca

SEQ ID NO: 411879 - DNA, 122 bp, Homo sapiens
tgaccttgatccacctgcctcagcctccccgagtgctgggattacaggcatgagccacctcgcctggcctataaactacgactctgatgaccgcatagtatttaagcaagaaaacaaccaaa

SEQ ID NO: 411880 - DNA, 122 bp, Homo sapiens
gtggtgctaaggggagagagcggcttctcctcgcggtggcctctgcatttagggaggtcccgtgtgaagccgtggggtgccacgcatccccttcccgtggcctcaatgtggcttctctggca

SEQ ID NO: 411881 - DNA, 122 bp, Homo sapiens
ggaatgcccacactgggggtcggggtggctggggacacaagagaggatgtgagtcagacccgaaagtgaaagtcctgctggctcagccgcatgctggacctcacagtaagcaagtgctgcca

SEQ ID NO: 411882 - DNA, 122 bp, Homo sapiens
gcttatgccgaggcctgacaccatcaaatgtgcattcaaattgggggtgtggtgggggagcggggatacctactgaaaaacactggaggcaaaactggcagcaagagaccgttacttctaaa

SEQ ID NO: 411883 - DNA, 122 bp, Homo sapiens
aaatgaatccacataaaatgtttattttaaaaagcaagcgttcaacattacatcacgtatcggtgttaactgtgttactgaaaatgttcaggtaaaaatgaaatgacctcgatgaattagga

SEQ ID NO: 411884 - DNA, 122 bp, Homo sapiens
gcgggctcaggcgccccggagctggaggggtcttctctgtaaaagtgacctcaggaggtccgggtcctgcattctttctgtccccagcccagaacctgatttctgaaacaaagtttcctggg

SEQ ID NO: 411885 - DNA, 122 bp, Homo sapiens
tctctgatgatctgtcacgagggggatatgaacaactgctgtccccagagcctgggcccccgaatgagaaatgtgaagcagaccacgtggcctggtagcatttggtcccagagggatgagac

SEQ ID NO: 411886 - DNA, 122 bp, Homo sapiens
ggcgtccaggaggctggaggatgcgaggttgaaaaagcccgcggcgtcttctctgtcacccgcgctcggctccctgctcggtcgggctggaacctgtactggcagccggaggtgtaggtagg

SEQ ID NO: 411887 - DNA, 122 bp, Homo sapiens
cctgccctcattcagcccacagccctggtccaagaatggcccgggtttcaatgcccaggacgtaatgataggaacactggggcagaggagggtgtgtgggagcgggcagaggagagaggagc

SEQ ID NO: 411888 - DNA, 122 bp, Homo sapiens
gttgaagggtatctcgcagacttttgggaagcggtcccggtagcccatggcgttgcccagcgtcagctccgagaacttgagcagcgccgtctccgatgcgtctccaatcacgatgcgctggg

SEQ ID NO: 411889 - DNA, 122 bp, Homo sapiens
aagaatctggcagcaggtctctgacttcaatttcccccatgtgtctttctaggccctttgcgtttctcccactgttctactttccctctcttcttcattgtctgtactgtattgcactactg

SEQ ID NO: 411890 - DNA, 122 bp, Homo sapiens
tagccccggacccctgccccgcccgaccccgccccgccacgggagcgcgccactcgcccgcgcagcaacggcctcaatagcgccaggcccgcgtctacaagaagcccgaccaaggccggcgt

SEQ ID NO: 411891 - DNA, 122 bp, Homo sapiens
gtccatattgcctggtgtaatttccttcccatggaccttctggccacctgccttcacctacgactgcagcatttctccatgtctgccactgtgactagatcactccagtgatcctctgatgg

SEQ ID NO: 411892 - DNA, 122 bp, Homo sapiens
tctggggtcggtcctaaaataaaaggtgagttcctgaatgatgggactaaagaggagagacggaacaataatgtaaggttttcagagggagtagtcacaaaagctttcagaggaagtactgg

SEQ ID NO: 411893 - DNA, 122 bp, Homo sapiens
atggactccgtggcttttttttccctttttctttttttaaaattttatttaaaaaaccttcggtgcaatattaaaaagcaatacagccagctggagcgacaatcaacagaaagaaaagaggg

SEQ ID NO: 411894 - DNA, 122 bp, Homo sapiens
ttatgcttctcctcttgttcctggagctttgagaaagataatgaaatgagttgagcgccacgtgcaacgtggctggctaggagactctgctggatagtgcaattggaagggacacctccgtg

SEQ ID NO: 411895 - DNA, 122 bp, Homo sapiens
acagtggaagtgctgtgcaaaactaaaccaagggttttgatttcacttctcgatactggccgtgctactgccttcttgacactgcctgcagcttactggtgaaaatggaagaactgaaagaa

SEQ ID NO: 411896 - DNA, 122 bp, Homo sapiens
catctgtgtgctgccgccacagaatcccgttctctgtagcgtctctctgggtgacatcctcggggtcctcatgtctgctcccggtcaccgagtcttaaatatctgaatcagcaagaggctgg

SEQ ID NO: 411897 - DNA, 122 bp, Homo sapiens
aattaggggacaggcgcgaccccggccgggccgcactcaccatggtgagtccgggcggtgcgtctcacgttgagtcggggtgacaggtctcagtgagaactgcgctagctgcagtgccgcac

SEQ ID NO: 411898 - DNA, 122 bp, Homo sapiens
ggaggctctctgtggaaggtaacgacatacatacgttaggaaaggaagcttagggcatatcgagagcattttgaatttagacttgtgggctgtgtgggtgtcagatggttgtctctcagctg

SEQ ID NO: 411899 - DNA, 122 bp, Homo sapiens
tgctttggcctcccaaagtaccatatctggcgaatttcttatattatttcttacactcctcgttctccctgttacctgccgtgctggattttccatttctcttcctcatctctggacttcaa

SEQ ID NO: 411900 - DNA, 122 bp, Homo sapiens
tcaaaaccccctcccctgccgccggaccaatgaggagcagcagatgtggccgtcaggcgccgcctcaatgcctcctgggagttgtagtttagaagggagagcggaacttagaacccgggttc

SEQ ID NO: 411901 - DNA, 122 bp, Homo sapiens
gcgtgcacaggtcctgtccgtggcgcatccgccctgaatcacagaaaacacgcaccccgccgtcaggcccctgtgacctcgggtgtgtgagtggcagttattttcgttgaagccagtgtccc

SEQ ID NO: 411902 - DNA, 122 bp, Homo sapiens
gaagaggctggatgtactaggaagagctggctgaaatcagtgactcataaagctgcaaatcgcaaatcgcatgaaaacttgcgtagcaatataatgttgataaaagcaccaggtactagaac

SEQ ID NO: 411903 - DNA, 122 bp, Homo sapiens
tcatccaagccatcctgcacactcagtgaacgggtcaaggttatctggagtttttcatttcgttcattaacagacttggacagatcctcatatctcccaacaatgtcatctactccaaacag

SEQ ID NO: 411904 - DNA, 122 bp, Homo sapiens
ctagttgagacaaacataccacagtaatatgagatgttaaaaatggggggaaatcaggtgcggggtacgtgagaattctctgttttatctctgcaatacttctgtaaactgaaaactattct

SEQ ID NO: 411905 - DNA, 122 bp, Homo sapiens
caggaaaggaagtcatttccccaggaaagcacatctgacccctaaccttgcatgtggtcacggtggccgtggggccccctcccttcccctggcccgcaaggctggactgtgctgtcatcccg

SEQ ID NO: 411906 - DNA, 122 bp, Homo sapiens
ggaaacagcattttgtgtcttaacaagccctccaggacactctgatgcaccccccacccccggcaagactgagaaacactgacccagaggttattcctctaggtcttaagtagatatttgta

SEQ ID NO: 411907 - DNA, 122 bp, Homo sapiens
ttacaagtttattttgcaacatcagtgcttgacattagtatggtggggtgttgagtcagacgtagattttgtgtttccgtaaagatggcagcatgcgatcctatggaaacctcatctacatt

SEQ ID NO: 411908 - DNA, 122 bp, Homo sapiens
atgcttgactccagtcagccaccgtaggccccgccaccggcggtgcactttctgtcgatacggtagcttcgcgcttgctcacgaacttgcctgcctggctggcgcacccagcccctccttcc

SEQ ID NO: 411909 - DNA, 122 bp, Homo sapiens
tttctgggcgctccctgagtcagagtctcagaagacctgtgcaggctggcgtgagaggagcggcagccacactgcggccccacgcccaaggactgggctgctctcgaggggggcgcgcccac

SEQ ID NO: 411910 - DNA, 122 bp, Homo sapiens
cctcctccacagacacctcggggaggggtcatccttcagacacgctgagcctaggctgcccgcccttccgcagccccgccctggccggctcctcgcggcccactaggccggttcttccccac

SEQ ID NO: 411911 - DNA, 122 bp, Homo sapiens
tctccgagctcaagggcgccaaaaggcaggtggaggaggcgctgacgctggtgatccaagcggacaagatcaaggccgcagagatccgcagcgtgtaccacctgcaccaggaggagatcacc

SEQ ID NO: 411912 - DNA, 122 bp, Homo sapiens
ggagcagcggtaggcagacctgcgagacgactctggcccaaagcttaaggctgcatcatccgtcaggtgtggatgagatccatcgaaacagtgagcgacgcctgccatctacaggccacaat

SEQ ID NO: 411913 - DNA, 122 bp, Homo sapiens
gaggggctggcacggcgacttcgcggggacccttcagtcactatttccagaggagctcggcgcacccctctccgggtgggcaggctgaacctcctggccctgcacgctgccggggtccccga

SEQ ID NO: 411914 - DNA, 122 bp, Homo sapiens
ccatcggtcatggggcgggcattttgggccagtcttgggctgccgggatccggaagcaggcggggtacctgacctcccttggcctgccagtggtgggggccagccatggctgggccagcgtt

SEQ ID NO: 411915 - DNA, 122 bp, Homo sapiens
ggagggagggaaagcagatgagcgggcgggaaaactagcgggcttgccacgcccaggcagcgctgctcgggtttccgcttcctccgccccttcctttttctctgtgcatcctcagtgacgcg

SEQ ID NO: 411916 - DNA, 122 bp, Homo sapiens
tgaggaggatgtgacgactctctttcaggacgtcccaaccagagacgcagggacgtctggcgcctcagcgcctgcgccaagtggcgcgcttaaggtgagcagagtcagctgtgggtagactc

SEQ ID NO: 411917 - DNA, 122 bp, Homo sapiens
agatttgttcaatgaggtagtcagtacaaggtaaatgcctataacagatcaagggatttacggtggacaccaggcatgaatacatgataatcagaacaaatctagagtctgtgaagattaca

SEQ ID NO: 411918 - DNA, 122 bp, Homo sapiens
gagaggccggactgtgcccgcagcagggagcacgacaccacgcacggcgacggggaggtgcggcagccccctgtgggcattgcagtggccttggcccggcagaaggacacagtgagccggtc

SEQ ID NO: 411919 - DNA, 122 bp, Homo sapiens
gccagctttctatgatcaacagacttctctcgtggtgtggtgcgtatgcggaggagacttcgacagcttaaaaatacaaaacggggccaggcgcggtggctcacgcctgtcatcccagcact

SEQ ID NO: 411920 - DNA, 122 bp, Homo sapiens
acttaaaagctcctcatgctgatgactcaactttatctccccgagtcataggcttcctcacgggccacctgcccgaatgcccttccacctgaggcttggagccgtgaaggccaccagagcta

SEQ ID NO: 411921 - DNA, 122 bp, Homo sapiens
aacgtgtgcgtggtgcccagcttcacaaagcgagcgggcagcacctccttggtccgggaacggcctcagcctggccgtccacatcccaggggtggaaaggtggagagagaaaggggctccgg

SEQ ID NO: 411922 - DNA, 122 bp, Homo sapiens
ttgtctggcttgcaatgggtccactgggcgagtggccactgtggccatttctctggtcctcgaatgtgtaattggaatatagagacttgacacttggcacagcccccacattaactctttgg

SEQ ID NO: 411923 - DNA, 122 bp, Homo sapiens
ttcgagaggccataaccaagacacaatcacaatcagccatgtcttgaaagattagcaattcgacaagaggaaagggtgagaaagggcatcccgaacacggaagtggagaagctcagggtgtg

SEQ ID NO: 411924 - DNA, 122 bp, Homo sapiens
ctaagcagctggtgtccctggtgccctgcgggggtgaggtggccgggaaggctgctgctgcggggcagccccccgggaccgggctagaacttgggaggcgcgtgcccgtcgttctgggactt

SEQ ID NO: 411925 - DNA, 122 bp, Homo sapiens
attcgcttacatcatcacaccaagaaaattggtaagctccagaatattcaatatccaattcgtagttagatttcttccaaattgtcctcagaatgttttctatttattcaaaatttttgttt

SEQ ID NO: 411926 - DNA, 122 bp, Homo sapiens
gggagtgggcactcacttctttgaactcctgtatctgggcttgttcaaacatggaaaagacgttggaagaaccacgttgggcctgcttggtggctgccaccttgccccgggtccccgccttc

SEQ ID NO: 411927 - DNA, 122 bp, Homo sapiens
agctggctctttaggacaggaggagaaaacggacagaccccaaaggggagaaagggaaggcgcatgtgatgctgactaaaatggacaggtgtcaccttcaggtgggcagcgacactcggctg

SEQ ID NO: 411928 - DNA, 122 bp, Homo sapiens
acgtgggaaaagcaagagaagaaaagggaaaacagcgcagaaggaaagccatggtcatgccgatgagtgcgctgccccctctacccggcttcaggagtctgatgacttttctttcaccctct

SEQ ID NO: 411929 - DNA, 122 bp, Homo sapiens
agccaagttgcatgctgggagcatccctgctgtccaggtttcaacttccggagactctgccgctgtggactacatttcccagaagtctccggggcacaggccttttaggggcggggcgagct

SEQ ID NO: 411930 - DNA, 122 bp, Homo sapiens
gggtcctcttgctttaacccaccttccccacaatcccactcatcccttccggccacagcccgccttcttagacacaaggcaggcaggagtatgcgagagagaagacgtaaggacgccttgct

SEQ ID NO: 411931 - DNA, 122 bp, Homo sapiens
ccactgcagctggcgtcttttaggcgcatggttcttttcctctccggcgaggggcggtctcggggcggacccgaactacaattcccagcatcctgcgcggcgcggggaaggaagcccgggag

SEQ ID NO: 411932 - DNA, 122 bp, Homo sapiens
ccaaaacctccaagaaaaaggtggtctctgtgctgggggtcagggggttggtgaagaaggcggcaaaaggaagagtggtgaaaaaatagaatgaacactaagaatggaataaaagggaaaaa

SEQ ID NO: 411933 - DNA, 122 bp, Homo sapiens
ccccccggagactgtgcctgcaggtgtccatcaccttcaaggacttggccgtgcggttctcggaggaggagtggcggctcctggaggaggggcagagggagttctaccgagacgtgatgcgg

SEQ ID NO: 411934 - DNA, 122 bp, Homo sapiens
tggaacccagacttgctggtctgatccatgcacaaggcgcggctacgaggccactgtgcccgggcagggaagtcggtgcggttggccagctccgggatgacccgccgggacccgctcacaaa

SEQ ID NO: 411935 - DNA, 122 bp, Homo sapiens
acttccgatggcgtcaggaatttcagccaataggagccagccaggaagtacctctctgagcggttggtgccgggtataaaagaaggccgcgcagccacggctgctcacgacgccgcggatcc

SEQ ID NO: 411936 - DNA, 122 bp, Homo sapiens
aattagccaggctgttgcagagttttcagatacaactttggcttgcctgtcacaccatcccgtctgttctctaactccctgaagaggtttcccttcttgccctgagtgtgttaagcagtgtg

SEQ ID NO: 411937 - DNA, 122 bp, Homo sapiens
ttcctgttgaggtcaggttggggattggccaccccagcttcgttgcacacacatggattccgaaagggaaaaactgatatttcaagcaagacaaatggaaaatgttctctagagaaagagga

SEQ ID NO: 411938 - DNA, 122 bp, Homo sapiens
cagcagcggtgagctcctccaagcccgctcgctacaccaggacgcgcggccaagattggccggaaggtttttacttggaaactggaggatgagccatgacatccctctctccacctcaaagc

SEQ ID NO: 411939 - DNA, 122 bp, Homo sapiens
aaagcgagagagagagagagagtcttgagagagaaagagagagagagagagtcttgctttcgaacaaagaaaaaggaaataaaaagacccgataatctcaaaaggttatttgctgcttgaaa

SEQ ID NO: 411940 - DNA, 122 bp, Homo sapiens
ccaaaagcaatacactggccactagagagtaccctagagctctagaatcccctcccaacacgcacacacacacacacacacactctctctctcacacacacacactcagtcacacacacaca

SEQ ID NO: 411941 - DNA, 122 bp, Homo sapiens
gccctcaccccaactcggtgacaaaagctatcacagggctgcagtgggggaggaacaggacgcatctgccaggcacctgacccgcagtgcacttctgggagctgtgcttatctccccggggt

SEQ ID NO: 411942 - DNA, 122 bp, Homo sapiens
tctaagggatgaaggcaatatttacatttaaacccctaattttcctaggctattagtgtgcgattcaaatgtgtgtctataaagtttattataattaaagcaaaagtttgaaatttgaaaat

SEQ ID NO: 411943 - DNA, 122 bp, Homo sapiens
gactgggtaatttagaaagaggtttaattgactcacagtttcacatagctgggaagaccacgcaatcatggtggaaggtgaaagaggagcaaagttacatctaacatggaggcaggcaagag

SEQ ID NO: 411944 - DNA, 122 bp, Homo sapiens
ttgatgccagcctagttattctacagaccctaagcctcaggggagggggattcccatacccgtccagtggagacaggtccttcagtcacccacagcagggacttggagtcagagctgactcc

SEQ ID NO: 411945 - DNA, 122 bp, Homo sapiens
ccgcccacccccaccccggcgcagaacagggccacgtcaggtttcgggcaggtcacagagcgctgctgcagacggagaactccagggctgtttgggcaatggaccaaggccctgagtcccct

SEQ ID NO: 411946 - DNA, 122 bp, Homo sapiens
acaccacgcgctcgttgggatcggccgcctaatcaggagcgagctgtggccttacgcctgcgcagaggggagacgcgagcgccgcgtggacgctgacctcggtccgcgcctgcgccttggtt

SEQ ID NO: 411947 - DNA, 122 bp, Homo sapiens
gggcttagcactgtggccagcagctgtggagggggcgctgggtcccccagcactgccggccggcctgcgcggtgctcgaattctcgcctggcctcagccgcctccggaggggcagggctggg

SEQ ID NO: 411948 - DNA, 122 bp, Homo sapiens
cgggcttcagcagagaagctggagacaaggcagacgggaacccgcaatttccttccccagcggctggggcctctctctcacctcccaactctggtgtcgcccggcgttttccgcctgcggct

SEQ ID NO: 411949 - DNA, 122 bp, Homo sapiens
tgttgtgttaccatggtgacctggcctatagtctgaagaagttacaaagacagatttagacgtaatggtaaaaactagtgattttcctaagctgtgccttgttttggaaggaaatgctggct

SEQ ID NO: 411950 - DNA, 122 bp, Homo sapiens
cggacgccagcacatgaagtcacgtgcaagtgcctttgattcgttccttctttctaaagacgacagtctttgttgttagcactgaattattgaaaatgtcaaccagattctagaaactgcgg

SEQ ID NO: 411951 - DNA, 122 bp, Homo sapiens
cctccagggggaacccgcgaaccgtccaatccgggacggcgggccgcgtttccatggccacggtaactaggggaccatcgtagtggctcagaaagaataaataaaggatcacgaccacaaag

SEQ ID NO: 411952 - DNA, 122 bp, Homo sapiens
agcaaactacggtccagaggccaaatccagtcctgtacttggtctttgtaataattttatcggaacatagccatgtatatttgtttacatacagtctacatctgctttcatgctacaatagc

SEQ ID NO: 411953 - DNA, 122 bp, Homo sapiens
accacttctgtagaaagccaggtctgagtcccagcagatgatgccctttcattctgactgcgagggtgagtggggctgcatggcaggtggaggtctgctgctcccccaacccctggagacct

SEQ ID NO: 411954 - DNA, 122 bp, Homo sapiens
cttacctatacaaacggcccctgacttacaaatggttgaacttacaattttttgactttacgatgggcttatcagcatattaaatgcattttgacgtacaatattttcaagttaaaatgggt

SEQ ID NO: 411955 - DNA, 122 bp, Homo sapiens
accctccttccggcatccgtagaacccccgcctttgacctagcttcaggagattactttccgggtcagcgtgcgtttagggcgaagacggagttgtaaacttcttaaaattcctctctcgac

SEQ ID NO: 411956 - DNA, 122 bp, Homo sapiens
gtcagccaccgagcccggtcacttttttgtattccccacagtattgatgtatatcttctgcgttcaaaagcaattttttaaagcctcataacgtggtaacagaatactttgcacattacaaa

SEQ ID NO: 411957 - DNA, 122 bp, Homo sapiens
gtgagttctcaactgtaaatgtagatctgcccgattctctgttcatcccagacacttctgcgtcctgggttttctaactgttatttggcttgtgtacatctaggagtgccagacctgggggc

SEQ ID NO: 411958 - DNA, 122 bp, Homo sapiens
tcctttccaaattcccaggtgtacttgtttgaaatgtatctggcccaatcgctgagcgtccgcgctgcatttctccaaactgcccagcagggggcggtgctacctcggctccgcgcagccac

SEQ ID NO: 411959 - DNA, 122 bp, Homo sapiens
cagcatgctgagtgactcaaaggattagggcagcccagggagtaggcccctgggtctcagcgtgcaggatttgtccccacatacacgtgaaagccatgtgtttggcagagacaccacagtcc

SEQ ID NO: 411960 - DNA, 122 bp, Homo sapiens
tcctgtacaacacaggaagtctaaaattttgtattctaaagtaattttagaggttattaacgcaaaatggacacagaaaccaccaggaaatttctagacctgagaaaactgaatacatagtt

SEQ ID NO: 411961 - DNA, 122 bp, Homo sapiens
ctgagaagagcagagaggctcttgctctttagccagtggcttggtttctggggatttcatcgttttcctctgctgccaagttgtttctggactaatgcagtacaatcctcctagggggcgct

SEQ ID NO: 411962 - DNA, 122 bp, Homo sapiens
caaccttatccagggctgttgggcctgggatatggccccctgtcagaactcaggtaggagcggccttggctgttacccagcccccttgccacctcacatggggacctgtctccgcagtgggc

SEQ ID NO: 411963 - DNA, 122 bp, Homo sapiens
gcccgtgatgggaagcctgacgtctgcatcgtcctgcgctgcgtggccggtcggtcccggcgctctcagcacttggagtctcagctccccgggtcatcagtccaagccactcagcaggtggc

SEQ ID NO: 411964 - DNA, 122 bp, Homo sapiens
gatcccagggaggggaaggcgggcggaatctgagcggcaggcgcagctgctccgggcgggcggccaaggttccctccctcgagcactggcattcctgagggaggggccgagcgcagctgccc

SEQ ID NO: 411965 - DNA, 122 bp, Homo sapiens
gaaggttggatcgaggctggaggccagaagtgcaggagccgcctcgcaggcgggaggagtcggtagccatggtctctgaaaactgggccctgtaaacaattttcaggcgccaggaacagaag

SEQ ID NO: 411966 - DNA, 122 bp, Homo sapiens
aaggttcagtgtctggtaagggctcttctcttccagaatggcaccttgttgctgtatactcgcacagcagaagggacagaagaggcaaactcacttagggtctccttataaaaggaatgagt

SEQ ID NO: 411967 - DNA, 122 bp, Homo sapiens
tggatggggtctctgtaccagcccagaccagagcgagtgtcaagggggctcctctggccgcgctgcgcccccgcggggcagccccagaagggccattgctcagtcctcaccaagaccagcga

SEQ ID NO: 411968 - DNA, 122 bp, Homo sapiens
gtggcccgctgccagctgcagccctggtgtcttgctgggctctaggtctagcacctgccccggccactgggtctcctcacttggaagcccagccacggcccttccactccacacatctggac

SEQ ID NO: 411969 - DNA, 122 bp, Homo sapiens
gctgaagctccagccctccacatggctgaagaccatgggtgggaagatgagaatgaccagcgtccccagggtcaggaacagagccaggcccaggacttgcagtacctaggagggagggagtt

SEQ ID NO: 411970 - DNA, 122 bp, Homo sapiens
agggcacactgtggtctacaatcccatggagtgttacagcattgcatgatgtgagggcagcgagagaacaaaaggagaagggacttgaggggggccatggtagctgcccgggcattgagcag

SEQ ID NO: 411971 - DNA, 122 bp, Homo sapiens
gccggggagccagggagcagagtgtgggaactgggtggagatgtctgcggaacggtcacccggacacgggaacacggctctgaacgtcgggagagaagctgcagctgaaaggagacatttga

SEQ ID NO: 411972 - DNA, 122 bp, Homo sapiens
atcgccccaaataaacagccagcattagctcagctgctcgctggcagcctcggatccaggcggggtcagtgttgcgcactggggatagtgcctctgctcggccttcggagggagggtttcag

SEQ ID NO: 411973 - DNA, 122 bp, Homo sapiens
ccgcgcctgggggcacctgccgggcctcagcccggctcctggaacccgcctctgcctccccgcccgccgctgagcctggggcgcctccatcgtcgttcattgcccctaaccccgcgccaccc

SEQ ID NO: 411974 - DNA, 122 bp, Homo sapiens
ctatattacatagtgatttgtgtcactaaaaaaaagaaattagtttcaaaactggaaactcggcaatacctttctggcaccataaacaaatggcaataagaactgtgaaatggccaggtgtg

SEQ ID NO: 411975 - DNA, 122 bp, Homo sapiens
agagaaagtggatcccggcgatgggcttggagcccctggttcaagatgtccctgaagccacgtcctggctcttcatctactcaggtgacagacagactcctttttgctcacaccagtttagg

SEQ ID NO: 411976 - DNA, 122 bp, Homo sapiens
cactgattcagcctgtaattattgataattattcatttgcatatgtagatccccagtccccgagctaatgatgaggaatggagaggaattcagtgtgtgaccagggaaactgagtcactggg

SEQ ID NO: 411977 - DNA, 122 bp, Homo sapiens
acagcagggctaaaaagacctccctctgcagccgggggtggaatatgcaaggggctgggccggggcagaaatgtgggcgcggagggaaagaaggtcggagccacaggggaggtgaaagagaa

SEQ ID NO: 411978 - DNA, 122 bp, Homo sapiens
agcgcctctttcctaagtgctgttacagggagctgagcttgccgaggtagacagtggccacgtgactgctaaaccggttgccagaggcgcggccatttttggggcgggcacccaatctctcg

SEQ ID NO: 411979 - DNA, 122 bp, Homo sapiens
agagtcctcgctcctgcgtggggcggagggcagggcctcacttgcagacatagcgctccacggtacgctcacacctgcggcaggtgacgtagcagcaccagtggtacttacagtggcaccgc

SEQ ID NO: 411980 - DNA, 122 bp, Homo sapiens
cttcctccccattgaactttttgactctcacggatgagggtttcagtggtatcctttcctcgcatctgaaactgcagaacatgggcctcagttgggcagcccacctcctccaagggcaccct

SEQ ID NO: 411981 - DNA, 122 bp, Homo sapiens
tttatgaaccctatcgctattaaaaaaccactgaactgtatactttggaactgagttttacggcatgtaagctcagctttagcaaaaaagcctctaatgagaccccatctctgcaaaccata

SEQ ID NO: 411982 - DNA, 122 bp, Homo sapiens
ctaaagccatctttctgcctcagcctcctgagtagctgggactacaggcatgtgctactgcgccagcttataaacatgttttgactggaaaccttagttgttgactatgtagagtatgtaaa

SEQ ID NO: 411983 - DNA, 122 bp, Homo sapiens
agggggaccctgcccacctttgaacactggcagatgggctggaggcctggagcctggggacggggctttgagggtccggaaggagggcggggctgtgcggccggcggaggcccccgaaagtt

SEQ ID NO: 411984 - DNA, 122 bp, Homo sapiens
tggattctggattaaaaaagttataaaagatattataggacaatggaggaaatctgaaaacgaagagtacatcagaaaaggcagtgggcttataatccaccttttcagcaatataaagtttg

SEQ ID NO: 411985 - DNA, 122 bp, Homo sapiens
ttttatggtctcctctccatggccctctgaacctcactgctcagatagctcctcctaacccgctccactctgcagctcaccagcctttttagactgagatcttggtaaagcctccttccctc

SEQ ID NO: 411986 - DNA, 122 bp, Homo sapiens
cgactcacggtctggctctgccatgggcgcggtgctgaagcccttgaggctgtcaccgaccgctctgtcccgtcaccaaccactgtgtcccgtcaccgactgctctgtcctgtcaccgactg

SEQ ID NO: 411987 - DNA, 122 bp, Homo sapiens
cgccccgcgctccggaggacccgccacaccacgcccccacgctgcagctccgcgtcggatcgccagtgggtgcgcgccctcctgtccacaatcccagagcctggggaaaggagcatcgcggc

SEQ ID NO: 411988 - DNA, 122 bp, Homo sapiens
ggcgtaaggggtgggccccccggaaatcctgctgcgctgtttaaacctaaggtgacctaacggatggcgggagcggccgcgcgagccttggagcagggcgcggccattggtgacgcacgccg

SEQ ID NO: 411989 - DNA, 122 bp, Homo sapiens
cccgtctaggaacccctgtgcataaatgggggttcacacccgagaaacgaggcctaattccggcagctcctggggctgcggcgactgccggacactccggggcagcagacggctaggaaacc

SEQ ID NO: 411990 - DNA, 122 bp, Homo sapiens
cccccggggccggcggggccggcagagcaggcagtgccagggtcatcaggatgatgcggacgcagtgtctgctggggctgcgcacgttcgtggccttcgccgccaagctctggagcttctcc

SEQ ID NO: 411991 - DNA, 122 bp, Homo sapiens
tcccaactcttttgtgtgatttattcatggcattaattgtgagggccaacctgtggtgtccgttggcagctgcgccgttatcagggcctgggatcggcccagcgagctcaaagcacaaggac

SEQ ID NO: 411992 - DNA, 122 bp, Homo sapiens
cttgctactgctcgctctttggtgggtccacactgcttttatgagctgtaacactcaccgcgaagatctgcagcttcactcctgagcccagcgagacgacgagcccaccgggaggaaggaac

SEQ ID NO: 411993 - DNA, 122 bp, Homo sapiens
tcttgtgctgctgttttgcttcttgccatgttcagtcccctcagatgccagccagacatccggcagggggctggtgaggactctctgccaggcacctgggagtctccctaattatccagtga

SEQ ID NO: 411994 - DNA, 122 bp, Homo sapiens
ggagtttcaccatgttggtcaggctggtctcaaactcctgacttcatgatctgcccaccgcggcttcccaaagagcattttttcatgttcgttggccacttgcaggtcttcttttgcaaagt

SEQ ID NO: 411995 - DNA, 122 bp, Homo sapiens
gctcatctctgccgtcaaatcgctctgactttgcgcagatctcttcggatcaaggctgcacgttaagttctggagtgtgggaaataaacgggctcgtttgtgcttagagccgtaagacaact

SEQ ID NO: 411996 - DNA, 122 bp, Homo sapiens
aggaggctgagggtgaggtggcccctggggccgcagcggctgtaggggagacccctgttccggtggggagtggcggcagaggtggtttgggccagttctgaaacaggctgctgacaggcttg

SEQ ID NO: 411997 - DNA, 122 bp, Homo sapiens
aggagaggtgggaggtttggctgagaatttttccacacaattccaagaatggggcggaggcggggggaggggagggggttggggagggggtcgcggcgagcgggtgggaggaaggccgggag

SEQ ID NO: 411998 - DNA, 122 bp, Homo sapiens
ccagcatttctataccactttgggctttggttataagtgccatcttctacagcaaaatcacgtcttaagaacaggaaaaacgttccacgggaatggagagattatctatgcataaacagctg

SEQ ID NO: 411999 - DNA, 122 bp, Homo sapiens
taaggccagggcccaagtgggaggctgggcccacagataaccctaggcaggtcagcggctcgggacaggagtgtgaggctgagtcagggccagaggatgtgggactgctgggggctgctgct

SEQ ID NO: 412000 - DNA, 122 bp, Homo sapiens
ggcagctccattttcaacgaggctctttccacttggggaaatggatggaatcacctattgcgtgagtgcctcagccctccctctagctccccacggcccagagctattgcagctctgggtcc

SEQ ID NO: 412001 - DNA, 122 bp, Homo sapiens
gccaccccgaggggagggcgaccgtagagacttggtcgggaggcgccggcccagcgaggccgctgggactgtgcactgaggggcgctgaccgttggacgcgcgctccccgcagaccctcgct

SEQ ID NO: 412002 - DNA, 122 bp, Homo sapiens
ggtcttccccatctctgtccctcactggctgacatacagggtggcggggctgtgtgtcaccggccttcctccggggccgggcccagcccgtgcatagtggaccttattcttagttgcactct

SEQ ID NO: 412003 - DNA, 122 bp, Homo sapiens
atttgagcccagcagggctgactcatgatccagtctttgagcagccctttacacccagcacgactctgtgtcgattatacatgttagagcgggtaaaggagaggagggattctcaagattaa

SEQ ID NO: 412004 - DNA, 122 bp, Homo sapiens
ccccagtgctgtgttctgtgcatttggaatcggcctccaccttgagtccatttgctgcaccgtgcctccccacaccccatcccggctctcacgtctgttcgttccagcaacagaattatcca

SEQ ID NO: 412005 - DNA, 122 bp, Homo sapiens
cgggggacaccatgtactggctggcggcgcagggaggccggcgcccggcggggatgtaagcgcggctcggggagggagaggccgcggccggcagccgggcggcccaagcccccggccccggc

SEQ ID NO: 412006 - DNA, 122 bp, Homo sapiens
ttttttgggttctgacctaccacagcgttcagagaactacatccgggtttagaggccgtacgtttgcgatatagcccaatagcagtcgttatggtgggggaggcggggcgagacctacgacg

SEQ ID NO: 412007 - DNA, 122 bp, Homo sapiens
tggttttttttccccaatttttaaaagatcattcatttaaaaattttagatttagctgggcgtggtggcttatgcctgttatggtttgaattgtcttccccacaaaagatgtggaaggctgg

SEQ ID NO: 412008 - DNA, 122 bp, Homo sapiens
gctgaccctctggccacgtagtcaacccgaggatgtgtgccccggggctcggccttgcctcgggtgagaaggctagtcaccattcagggtgcaggtgtcatggcctggaaatggcaatatct

SEQ ID NO: 412009 - DNA, 122 bp, Homo sapiens
cctcccagcgcccgtcatccaggtcaaggcgctcatctgtggcggaggaagggaggaggacggaagggaaatcagtaccccttgcgccttcaggccctggggcaggggttggggacgggcct

SEQ ID NO: 412010 - DNA, 122 bp, Homo sapiens
atagcgatagcggtgtcttagcagcagaagtgatggttggttaactgagcgtgttttagacgccatctgcattacaaagtatcttccatggggtaggccatggagtcagcaccactgttctc

SEQ ID NO: 412011 - DNA, 122 bp, Homo sapiens
gttccacagatttgtcattcaatagtgtagaatcagatcatgtcctcgttctcgccacggcgcggaaagctaacaagagtcagcccggctgcaatctgcagtgctggcggttcccgttgaat

SEQ ID NO: 412012 - DNA, 122 bp, Homo sapiens
attctacatctttgacaccataattgggtagtagaaactctccatgcccgtgcaggactccgtctgcctggacccattacacaaatgttctttactgtcactgatgatttgctgccttccct

SEQ ID NO: 412013 - DNA, 122 bp, Homo sapiens
gtgctggccagggttagacatcaggtgagcacaatgagagacagtgtagtttagtggttccgagcatgagcttttggagttgggcagaactgaatttcaagtctggctctgccactagatgt

SEQ ID NO: 412014 - DNA, 122 bp, Homo sapiens
ggcccgggcgggggaaccagagctgccacaggtcgcccgcgatcctggcgggcttcgccgcgctgggtccccgggagtgcctggaaaaaaacagcattactttcaactccctactctttttc

SEQ ID NO: 412015 - DNA, 122 bp, Homo sapiens
tcctggggccactgctgcaatcacaggagtcctaaacacttcgcttgtgtttttcaggcacgggtgactggtgttggagccagacttgggatagaagcaggagcacctaccgaggggcccgc

SEQ ID NO: 412016 - DNA, 122 bp, Homo sapiens
cacggactctgaaaggagagaagtggtgtttctgggggccacaagatcggggcactcttccggtagcagctcgctctctggccaccgtcttccccagccaaccaggcctcccggaggcggcc

SEQ ID NO: 412017 - DNA, 122 bp, Homo sapiens
ttagttaagacaaatcgtaatcaaataatgctgcagccagtcagtgcttactgagtaagccgaggtttaaataaatagattgttgataaactacattatcaagattccttggttacagacag

SEQ ID NO: 412018 - DNA, 122 bp, Homo sapiens
ccactctcaggggctttggggcgtacgactttcggggctctggtcctctgtttccctatccgtagaatggagacggctactctgtgagaagcccgaggtgcgcaggacccaagtgaggagcc

SEQ ID NO: 412019 - DNA, 122 bp, Homo sapiens
ccaatgggaagcagaggcccagagcccccaccagccggaggctcgcagccctcctgggtgcgccttgagagaaggcgctcctcgaccaccccagctgggcgggctgccatgcagagctgagg

SEQ ID NO: 412020 - DNA, 122 bp, Homo sapiens
tctcttaaaatgcagtgagattgcttcacgatgaagggtatgaccaagtggaattgtacacggtatagttaggaggtgatgatgaccacagtggggtctttaaaacagtgcacggcccgcct

SEQ ID NO: 412021 - DNA, 122 bp, Homo sapiens
acatggggtatgacaatctaaatgccagcaatcttcatggtgccagaaatcccaaacaggcgaatgttcctcacactcgttcccgttcccgtaacaacacctgatttgtttctgacagaaaa

SEQ ID NO: 412022 - DNA, 122 bp, Homo sapiens
tccagtagacaggaggagcaactttgctgcaccaagtgtaactggggtcagggcttgttccggggattactcacagccttgggatcccgcactataggtccagattctggaaagtggtgatt

SEQ ID NO: 412023 - DNA, 122 bp, Homo sapiens
tatggaggcttccgagattaaaagggcttgaagtgtgttaatgccttgaggcttccctgccgcctgcttagctccctgctcagctaacctatttcctttggctacttcatctgttcctcttt

SEQ ID NO: 412024 - DNA, 122 bp, Homo sapiens
gagagggagacagacactagcagtcatcatttgctgagcgctctgtgccgggcactctatcgagaactctatgtgcatataatttaatcatctcaattcctatgaaatggcacttattagcc

SEQ ID NO: 412025 - DNA, 122 bp, Homo sapiens
tgttctgggagtgtccgcgtgagatagtggcggcgtgagaggccgggcgccgggaccctgcggggacagccctcctaatgcaccggccgcacctgcaggaggccctcggagcccggaaaagt

SEQ ID NO: 412026 - DNA, 122 bp, Homo sapiens
catcagcatcgtcatccccggctcggatcccggccgcgacccgccagggccgccggagtccgcgaataccgcccgctcccagcaacgaagctccccggctcccggccgaccgcgagttcctg

SEQ ID NO: 412027 - DNA, 122 bp, Homo sapiens
gccgtgtgaggtgcgtattgcggaccgccggccgcgctgtgaggggtgtacatgtggagccgtgacaatcgtgggaagttctgtttccagctttaagctttcgtttatatttctgcatatta

SEQ ID NO: 412028 - DNA, 122 bp, Homo sapiens
gctgcggtcctgggattagggggcgggcccgggaagcggggagacagggccttggggtgccggcccaaagggacgtcctggagccctccaagctggggatgcttttcctctccccacggaga

SEQ ID NO: 412029 - DNA, 122 bp, Homo sapiens
agcgattatcctgcctcagcctcccaagtagctcggattacaggtgtgtgccaccatgcccggctaatttttgtattgttagtacagactgggtttcaccatgttgaccacgctggtcttga

SEQ ID NO: 412030 - DNA, 122 bp, Homo sapiens
tacgtaaagtttcagtgtctgaatcaaatgttctcttggatgaagaagtacttactgatccgaagatccaggcgctgcttcttactgttctagtaaggatttcccctttttgagtcccccac

SEQ ID NO: 412031 - DNA, 122 bp, Homo sapiens
ttggagaatcactctagtagccaaacagtgggggagcttttccagtttcccctttgttaacgtcattcctacatattgacatgtacttaacctttgtaatgtgacttggcaaggctaggttt

SEQ ID NO: 412032 - DNA, 122 bp, Homo sapiens
cttccggcggacttggcctttgcggtgcgagctctgtgctgcaaaagggctcttcgagctcgcgccctggccgcggctgccgccgacccggaaggtcccgaggggggctgcagcctggcctg

SEQ ID NO: 412033 - DNA, 122 bp, Homo sapiens
gggtgctttgctcatttttttcgccatcgttgtggttagggtgcatgcactagtggaccccgggtgggggtggggctcccctccccaaaagcccggcaggcctccggatgccgttccgagac

SEQ ID NO: 412034 - DNA, 122 bp, Homo sapiens
tcgtggggtgccggtgccgggcattagtgcccggggctgggcgtggggtgctgactgaggcgcgcgggctgcgctaccagtgcccgggagggtcctggacaaacctagggtctccagaggag

SEQ ID NO: 412035 - DNA, 122 bp, Homo sapiens
ctcgctgtcctcgccctctaccttgtggcgtcggtggggttggggagatgagttctccgacgcagcaggcacccctgctcatctcctatggctgttgccttttgggcagcccctcttcgcgg

SEQ ID NO: 412036 - DNA, 122 bp, Homo sapiens
cacgagtagcaacagtgaacagctaaaccccgggactggccaccagcagggagcctcccacggagcccgttaatctgcagatcttagccccacttcagaccctctgagtcgaaaattcgggg

SEQ ID NO: 412037 - DNA, 122 bp, Homo sapiens
tcgcggtgcgcgggctgctggggtccggcagggctggaggcggaccgcgaggaagcggcgcggccgggaagatggggcagggtcgcctcggccccggggcctcggtttcctccgatcacagc

SEQ ID NO: 412038 - DNA, 122 bp, Homo sapiens
ttcggaagtacagcgagatgatggacctcaccatggccataagttctgcggttgagtgctcggtctggttttgctcttgaggagtctcctcccttcccgattccttcaggtcagtgtgagcc

SEQ ID NO: 412039 - DNA, 122 bp, Homo sapiens
gcttcctggagacacacctctcagcacattccagggcctgaggaactcagagggggccagcgggagggtgttacggctgtttcttgtgtaggaattaattaagtgtttttatcggctacata

SEQ ID NO: 412040 - DNA, 122 bp, Homo sapiens
atggctggagggaacatacagacatccctcagcatcccagggggattggttccaggactccgtgcagatacaaaactatgggtgttcaagatgcttatgaaatcacagagtctttacataca

SEQ ID NO: 412041 - DNA, 122 bp, Homo sapiens
ggtcagcgtctctaggagccgtggtgcaggtgcatggtgcccagcacggcactgtcgtaccgctcctgcaccttcacggacttggaatgctcgaccacactgttcagttctgggatgctttc

SEQ ID NO: 412042 - DNA, 122 bp, Homo sapiens
caactccttcctgcctccttctactcctcattttctcccctcccctcctttccctgtatacgcccatgtggaagggaaagggggcagctggcaatgtttacctctcaggagtgccctcacat

SEQ ID NO: 412043 - DNA, 122 bp, Homo sapiens
ttttatgttctccaatgcctgcgtagctcacaccactaagccctgatgcatctcttccaacgtgactgcattttttatcacagcctttcaatttcacatggttactgtggagcagaggctgg

SEQ ID NO: 412044 - DNA, 122 bp, Homo sapiens
taatagacaccctgcccccgtaaaaaacactaccttccccgtaccgcctcccaagtctcccggggtacggattgcctttgcagcagttccgccccacctgactcactccagggtcagccccg

SEQ ID NO: 412045 - DNA, 122 bp, Homo sapiens
aagttgttgatcaggtcttcttccaactcgtcttattccttctttcttaagcgccacgggcggctgcgtctcctctttcttgtcaaccacgccaacgctgcggggcagcgggttcttgcggt

SEQ ID NO: 412046 - DNA, 122 bp, Homo sapiens
agtgcagggtacagagctgtccctggggctgcctacttatacccccagctgaaggtggcacgcctgggtgtgcccttgttctgtgccagcctccccccacagacccgagggaggtctgggat

SEQ ID NO: 412047 - DNA, 122 bp, Homo sapiens
ggggctcggtgggtggcctgcctgcctttgaatcctggctgagcaatttatgcatagtctcgggcaaggtgtgcaatgttctttagccttagtatttttctccacaaaatggggataattgc

SEQ ID NO: 412048 - DNA, 122 bp, Homo sapiens
acagccgcggggcaccacgggatatagagtccccaggcctgggaattcacttaaatgacacgtcgccgccctacaactcccaggaggcatcgcggcgcaagtggccgcgggagtcgtcggag

SEQ ID NO: 412049 - DNA, 122 bp, Homo sapiens
acagcagggtcagcgccctaacctgtgaacagatggccacacagatgggcaaactgtgcccgggacagcagagtcagcgccctaacctgtgaacagatggccacgcacatggaaaaaccgcg

SEQ ID NO: 412050 - DNA, 122 bp, Homo sapiens
ctaactggcagccctgctcctgcctcactctcccacaactttttatcccctcaccaccaacgctctcaacaacccctgacacgtcttcccacaggtccctggctcgctgtccggtctcttcg

SEQ ID NO: 412051 - DNA, 122 bp, Homo sapiens
gttcctagcatagcgccttgtattctttaggtacctgacaaatggccaccaaccctccaccggagaggactttttaccaagcctgcaggaagggccagctaggcaggcgtctccctgctttg

SEQ ID NO: 412052 - DNA, 122 bp, Homo sapiens
agtgcaatggcaggatcttgggctcactgaaacctctgtctcctgggctcaagcaattgtcgtgcctcaccctcctgagtagctgggattacaggagcctgccaccacgcccggctaatttt

SEQ ID NO: 412053 - DNA, 122 bp, Homo sapiens
ttccaacaccccagattctgcagggctacatgtgcatccagaagaggcataggccatgctcgggcagggagagggataataaatatttctggtgcctccacttactgggaaacttgataccc

SEQ ID NO: 412054 - DNA, 122 bp, Homo sapiens
gctgccgccccctgacttcatggaggcgccccaggacttcgtgccccctccccctgctgtcgccaagaggcctcctatgccccacccccacaagaggcacgaagcatcaatgttcagatgcc

SEQ ID NO: 412055 - DNA, 122 bp, Homo sapiens
ggggggacgctgtctcggggtgcctgtgaacagccttcaaaccatgggccccaatctctgcggggcccccaccgccgctgcagctctctcggagccctctgctgggggcgggtggcctcccc

SEQ ID NO: 412056 - DNA, 122 bp, Homo sapiens
tgagcacgggcttgcattttattgtctgcaagatcacggtctacttactcgggttgctgccgggtcgtgaggctttgtaaattgtttgtatcacttcacccgggattaaaacggggtgtttg

SEQ ID NO: 412057 - DNA, 122 bp, Homo sapiens
agggagaagtgggagggaacaagccaagcagaagcccagggccattctcacatttcaacacgtagagttaaggaagggcctcttcctctgtgagaattcagcattttgcaaccatccaaaaa

SEQ ID NO: 412058 - DNA, 122 bp, Homo sapiens
tctgggtttcggccccatggccgtggctgtgcttggaaggccccgggagcagccagggagcgcggtgcctgccctccacggcggccgcctgcggggaacagggcagcgtccagcaggcggaa

SEQ ID NO: 412059 - DNA, 122 bp, Homo sapiens
aggcgcccaagcggcggaaagctgcagctggcccggccatagctgtagaacaggacgcaccggaccaacgccgcccaggccacccaagaggccagccaatcccgaccgcccatgcaaataag

SEQ ID NO: 412060 - DNA, 122 bp, Homo sapiens
tcgaagccgcaggggaatccgggcccagccgacggcgccgcctggcgggcaccgaggggacgaaggggaggagtcactctccgcttccgggcggccaggttcgccaggagacctgaggcacg

SEQ ID NO: 412061 - DNA, 122 bp, Homo sapiens
tctcggtaagtctaggtggctgccttagcttgtcagtgacacacgaggcaggcgtgctgacgtaaggctgagacgtattcgattccaccctctgcggctctcttcctcctctccgatgcaga

SEQ ID NO: 412062 - DNA, 122 bp, Homo sapiens
ggagaccccagagagcctagagcttcttcatgggcccacgggacctgccctgctcacggtcgccagatttcagaatctgtctgtaaagcacctgccgctaggcccgactcagagtgggcctc

SEQ ID NO: 412063 - DNA, 122 bp, Homo sapiens
tctaggccgggagggtgtttacgttctctacgggctcgggtggaaccgggaaggaacgcccgtgtcccgccctcagtgtgtaccgcgtgtctgccccctcccccgggacctcaactcccgca

SEQ ID NO: 412064 - DNA, 122 bp, Homo sapiens
ggggcccccaccagcccctctcccgctcctctcctatgcgtgaccccgcgccggtacccacgattgatttttgcggtcctcagccctactccctggggtgtcgcccccgccctgttcccaga

SEQ ID NO: 412065 - DNA, 122 bp, Homo sapiens
gtgttttctccaggagcaatcctaacttctgggcagatgcctggctctggccaagagcctcgtccaagaacattatgatctcagtccctactggcctaacgctaggacgcttccagctgggg

SEQ ID NO: 412066 - DNA, 122 bp, Homo sapiens
gagaacgagggcgttctcgcgagatttgcctcctcccggtcccagctccccgcaccttctcggcctctgtctgggtccccaccttagtctacggtgtcgccttttctaactgcgagtgctaa

SEQ ID NO: 412067 - DNA, 122 bp, Homo sapiens
agcagaagtattaaacgcatgccaaaggctcacataaatgatttattatgcaccaattaacgttatctgagccatggtttttctttgttgttatgaattgagcattgacagcaaggcagcac

SEQ ID NO: 412068 - DNA, 122 bp, Homo sapiens
tccaccacaggcttccttgctccttagtttgcagacggcctgtcatggaatattaccttgcgatcatgagtcaattctccttaataaactccctttcatatatacatatattttattagttc

SEQ ID NO: 412069 - DNA, 122 bp, Homo sapiens
accggcgctcggggagccgctggcccgggtgtccagccggcccttgccctgcctggcgctcggaccgccacctttgccgccccctcgccagcctccgcagcttccagactggccggtctgcg

SEQ ID NO: 412070 - DNA, 122 bp, Homo sapiens
ttcctgggtcctgccctagactaactgactcaggatctcctgaggtggtacctggaaatccgtcttttttttttttttttttttttttggttgagacagagtgtcacactgtcgcccaggct

SEQ ID NO: 412071 - DNA, 122 bp, Homo sapiens
aagctccgttcctcttggctcattagttgctccttggacatctcatagctccaaggaggacgtcgaggaaagtccagaactgggaattcaggaaaaagtccaagtgtgaggaaatcttcagg

SEQ ID NO: 412072 - DNA, 122 bp, Homo sapiens
tgcccaactaaagaactacatttcccagattcccttgcagctgagggtagccatatgacacgttctggtcaaagagatataactggaaacctgctggttattttggtgacgttgctttcctg

SEQ ID NO: 412073 - DNA, 122 bp, Homo sapiens
tacaagttatagagtccacaacagatagttcttgtttctactttagtcagctgggctgggcgtggtcctgcgaggaggtgggcggggcgcactgtggggcggggccggtggggacgtgggcg

SEQ ID NO: 412074 - DNA, 122 bp, Homo sapiens
cgcccgcagacaaagaagccagtgcggcttggctgggctcggctcggcccgggagctggtcgggacccgccgccgcccccaggcccccagcctgggctgggcagagccgaagggggctccgc

SEQ ID NO: 412075 - DNA, 122 bp, Homo sapiens
gacggaggtgtgaacttgagccagaccagaaggagctcgagagcggccgcaggacaagcccgaggagcaggcgggcgctccaggggaaaaccacgcacaaaaccttcttcagagaaaaggga

SEQ ID NO: 412076 - DNA, 122 bp, Homo sapiens
tgtatggcctctcagcaggctagataggacttcctcacacaacagccccgtccaggagggcgaaagaggaagtggtaaggcccctggagctctagcgttatgggtctagaagaatgatagaa

SEQ ID NO: 412077 - DNA, 122 bp, Homo sapiens
acagggcctgggtgcttccccgccatgaccgtggccaaggcccgcctgagtggtgggggccgagtcagctgcagccatgataacagctgctcccaggaggccccgtctcccggacagccaca

SEQ ID NO: 412078 - DNA, 122 bp, Homo sapiens
tgccctgagctgtgctctcaggagcccggcctcctctgatgcttcgggctggctcaaggccgggccttgctcagcgctgacctagccccagccctgtctgctgtcctggtccacacaactga

SEQ ID NO: 412079 - DNA, 122 bp, Homo sapiens
tgcaccctggcgatcgtgtcccgtacgaggctgctcagaactcggtcatcgaggcttaggcggcagcgggggtcgtcagacaccagttcgcagagcaggtacctgcggcaggcgagaggaag

SEQ ID NO: 412080 - DNA, 122 bp, Homo sapiens
tcccagctaaattgtgtattattagtagagcgggatttaccatgttgtccaggctggtctcgaactcctgggctcaagtgatctgcctgccttgacccccccaaagtgctgggattacaggc

SEQ ID NO: 412081 - DNA, 122 bp, Homo sapiens
caatttgtgaaaaccacagtcgtctccagctacagccaaaagtcccctggggtgcggaatcgccccgggtgagggcgactggggttccctgaggaggcaacagcggcgcggggccccgaccc

SEQ ID NO: 412082 - DNA, 122 bp, Homo sapiens
tggaaattgccctgtttctttccgctgcttgctaccttcttcagttctggacatcggctccgcagtggaactaggtagcctcaactcttataatgattcaagattattcctgttttacaact

SEQ ID NO: 412083 - DNA, 122 bp, Homo sapiens
tggctgggaggaggtaccagtaaaattaggagtgtcagaatgagctgcttttttggcccacgcaagccacttacattttcaaatcattcctatcactctcagctgacaggcataggactttg

SEQ ID NO: 412084 - DNA, 122 bp, Homo sapiens
tccacgccgcgcggggagtggtggcccgggtgctcctacgacctgggggccctgtcaccgcgatcttaattgattcccaaaggatccagaaaagggacacattggcgcccgcccagggcggg

SEQ ID NO: 412085 - DNA, 122 bp, Homo sapiens
ctatgggcgcctgctgtgggggctgagcgtggctgtgactgccatgggggctgggctgcccgcaggcttcttgggtccctaggggacagggacaggccctctgcagagccaacccccacccc

SEQ ID NO: 412086 - DNA, 122 bp, Homo sapiens
ggagcgagcgcggagcgaggtgtctctttaaatacgctctgcagtgtgacggcggccgcccggctggaagagccatccccaccctgcggcaggagcccgcccgccgccatcgcccgccccgg

SEQ ID NO: 412087 - DNA, 122 bp, Homo sapiens
agtgctgggctgccctgatgagctggtgctgagacagaagcggctttgcggacggctgcacgggctgtgtgttctgcttccgaactctatcaggtgagcgtggaagacacttccatagacac

SEQ ID NO: 412088 - DNA, 122 bp, Homo sapiens
ggaacctgagggccatggaggggagggctgcagtgagagagaagggccggtaagggagaccgggtaaggcatcagtggcactcagaatctcccctagctgcactcctcaatgctgctgaggc

SEQ ID NO: 412089 - DNA, 122 bp, Homo sapiens
ctgcccagggacccatggctcctccccagctgctcctcagcacccgggtctggggcacgtcggcactcctggaggcctcttgtgactggtgtctcctccgtcaccctcctagaccatgagga

SEQ ID NO: 412090 - DNA, 122 bp, Homo sapiens
ccacaccctaccgcccgccttctgttggctgctgaccctgggggcagcccagctcaacgtcgtcgcaccaggtaataggagttgaagggctaaggagcctcacagctataaaagaggatgtt

SEQ ID NO: 412091 - DNA, 122 bp, Homo sapiens
aaccacaggaagtggccattagccaagccatctgagagaaagcatctgattgctctgctacgtgcacagtatcttgagtaactgcaaaagcctgagaggaaggactgcagggggtggggatg

SEQ ID NO: 412092 - DNA, 122 bp, Homo sapiens
gttagggccggccagagtcggttcccctgcagggtgggacttcctcggtgaggcccggagcgtaccggactggtccagctagaaaaagaaaggttttgagctgaataggataaccccgcgcc

SEQ ID NO: 412093 - DNA, 122 bp, Homo sapiens
aatttcggaacttaactttcagtataaaaagtttagttctctgccacacggaatttcagccgtatgcttgtgtaatgtatataaagatttaaaaaaatagatgggattatttaaactaaaaa

SEQ ID NO: 412094 - DNA, 122 bp, Homo sapiens
ccaaacattcatacatttatccaccaacacatacctatggctgttaaatatttatgcagacgtgtgaataattcataaaggtacaaacacttttgagacttgaaatttattcagctgactgg

SEQ ID NO: 412095 - DNA, 122 bp, Homo sapiens
ctctgctagggataaatacatttttcagggatttcccaaaagaaagccaaggcatacttccgtatttccagaggtttcaaatagagacaaaatgaaaggtttgtgctgtatttacagtataa

SEQ ID NO: 412096 - DNA, 122 bp, Homo sapiens
ctcaagtgatccacccgcctcagtctcccaaagtgctgagattacaggcatgagtcactacgcccggcccatgtctgtctgtcttgatgtgtgagcagcagctgtggtcattaaaccattag

SEQ ID NO: 412097 - DNA, 122 bp, Homo sapiens
gggtgagcatcaggggagacggtgagagaagccgacacccgcgtgggtgcgttcaatccacggccgacccgccaaggtctggtgtttaacaatcacagcagttaagggaagtcagaatatta

SEQ ID NO: 412098 - DNA, 122 bp, Homo sapiens
ctgcacacaccacacaggggtgcaggtgtcccttctcaatcttctgctcggggcacctaccgggcctcaccgatgagctcctaagtgcatcccggggtcttcagacaactgccaggctgccc

SEQ ID NO: 412099 - DNA, 122 bp, Homo sapiens
gctgctgaccggggtttgcagagctctcgtccaccaggcggtcatactccagcaggaactcgtccagctcgccggagtccccgaaggcgccccactcggtattgacgcacatgcggccctcg

SEQ ID NO: 412100 - DNA, 122 bp, Homo sapiens
gggacgcgagtgaggagcggtttgtatgtctggtgacctgccccactcccaccctggcatcggctccagtggggccacctccctccgcttccctctagttcttgggcgatgagtcgcggggt

SEQ ID NO: 412101 - DNA, 122 bp, Homo sapiens
gcgtccccaccgcgggggcccgtgcagccgccccccacgccgggtggagcgccgccaacgcgggaagccccagcactgcctccaaagatgtccgcacactccaccctgctccctggaactat

SEQ ID NO: 412102 - DNA, 122 bp, Homo sapiens
caagcatatctttgtctatattttaattttctttgccgggactctggaaggcttgtgcttcggcatctccagagtcctctctccctgggccagcagccttcgtcctccccactctgcctcca

SEQ ID NO: 412103 - DNA, 122 bp, Homo sapiens
caggcaaacagcaggggagccacaagctgtgccctgcagaccgctcctcttactggactccgttctgggtttttctcaatgagcacggggctgctcctgctcgacctgtcagcggaagtggc

SEQ ID NO: 412104 - DNA, 122 bp, Homo sapiens
ttaccagccccctccccccagctccagttctggccccttccctgcctctgcacctccccacgataagccccagagataagattatgccaggtgacaagggaaatccacactcccgaagactg

SEQ ID NO: 412105 - DNA, 122 bp, Homo sapiens
cctgtggccagagcccagaatgacctggggccacagaagctggaagaggcaggaggaatccgcccctggagtctttggaggaagcactgcctggcccacacctggatgttggacacctggcc

SEQ ID NO: 412106 - DNA, 122 bp, Homo sapiens
gtgtgtccacactctgtatctaactaatctggtggggacgtggagaacctttgtatctagcgcagggattgtaaacgcaccaatcagcgccgtcaaaacagaccattcagctctaccaatca

SEQ ID NO: 412107 - DNA, 122 bp, Homo sapiens
ccttggattcagggcaccgcttcaagttgggcactagtgtggggtgactcctctaagcagcgaaggtactgttttccctggaaggggagtgatattgtttggatttgtgtccccccccaaat

SEQ ID NO: 412108 - DNA, 122 bp, Homo sapiens
tggtcggtatgtgtgtctgtctccatatgggctaagtgcttgaattagtcaagtgtgactcggagcgtgtgtgtgtatgtgtgtgtgtacgcgcgtgtgtgccaccagaggaagcagcagca

SEQ ID NO: 412109 - DNA, 122 bp, Homo sapiens
tgtatcccaccttcctggggctggatccactctgggctctgagaagctgtggtcagattccgcagaagcagggtccctggctggcagggattcttactcagagcgtagcactactgggggca

SEQ ID NO: 412110 - DNA, 122 bp, Homo sapiens
tgccgggtgccactctgacctcagccatggcagggtcgggggatgccgatgggcgctgcacgggctctcagaggcccctcacctatggccatggccttgactgtgggggcctctgtccaccg

SEQ ID NO: 412111 - DNA, 122 bp, Homo sapiens
ttaggagtttaatctagatggtttgctgtttctagcagcagagcacctgttcagactctacgtatatgcacccatgaatggtgcagctgccaagagaaccaaagctaaatgttggcaggatc

SEQ ID NO: 412112 - DNA, 122 bp, Homo sapiens
accaaactgggaaatcttacaaggagttgaaaagattaatgtcccaacctgatgagattacggccttgagacaataaggtggagcaacagaacaatgggaaagaggactgggagaggaatct

SEQ ID NO: 412113 - DNA, 122 bp, Homo sapiens
ggtggtggtgtgggtttggggtgcggccgggtagggggttcgcctgcggccgcgtctgctcggggcctgaggcctcgaagaccccagcccaagcccccaggtgagccctgcggcaggagggg

SEQ ID NO: 412114 - DNA, 122 bp, Homo sapiens
cgggggtcgtggagaggggcccctccctctcaggggtgtcttacactcacctgctcccggcgcccaaagcaatagagctctcagcgcagccatgtttgagccgagtcaggtgacagaaccca

SEQ ID NO: 412115 - DNA, 122 bp, Homo sapiens
gccttcctcttccctcccagtcctgccgagctgacggcgtcccggatcacatggagcccccgccccaccccagcccgccccccgccgccaacgccggtggcccttccagtcgcgttactacc

SEQ ID NO: 412116 - DNA, 122 bp, Homo sapiens
tgccctgaggttttcattcactgttccccgtccctggaatgttcttctcaccaacatctacgtggcttggtctctcccaccatgcaggtgtctgactaaagctcaccttctcagggaggact

SEQ ID NO: 412117 - DNA, 122 bp, Homo sapiens
tgaaggtaaatgcaaagccatcaaccataaacgttcaaaatatataaccttagaagaaaacgtagctaacgtttcttaattgatcttactgcttctgattatacaataagagatggaagatg

SEQ ID NO: 412118 - DNA, 122 bp, Homo sapiens
ggtggccacgggggcctgggagcgggggccgctgggcgtgctcttgccctggcagggctccgccgcgctgggccgctgctgtcctggccgtgacccgatgtttgtcgcccgcgggcccccgc

SEQ ID NO: 412119 - DNA, 122 bp, Homo sapiens
tatttttcattgacgaatctgttatttctgctatccagggtggtgggagccccaggaagacgatcagttatagatgaaagtaagaaattgcatttactctgcaaatctgtgtgccttgtgag

SEQ ID NO: 412120 - DNA, 122 bp, Homo sapiens
gggagccagcacaagctctgccttctcctcttcagtccctctgtccctgcccaggtgcagcgagaagtagagaacatgctagaaacaaggcccccaacctacatcagggagccaccctgctc

SEQ ID NO: 412121 - DNA, 122 bp, Homo sapiens
gtagtgagactaagaagaaggggaggggagagcagagagggaacgcaaccccggggaagacgccaagagagggtgctgggccggggtgaactttattaatgcctgccgtttccagctcgttt

SEQ ID NO: 412122 - DNA, 122 bp, Homo sapiens
cgcctcggccccccaaagtactaggattacaggcgtgagccaccgcgtccagcgccctggcggtttttaatcaagtagaaaagctgcattataccacttgcttcggttgcttcagtgagaac

SEQ ID NO: 412123 - DNA, 122 bp, Homo sapiens
aaggagccgcttgtcattggatgcctcaggcaccgcctaccttttttcaacaactacttccgtcgccttatgagaacgttcaggaagtgctatttaaccttattagagtcttctgctagctc

SEQ ID NO: 412124 - DNA, 122 bp, Homo sapiens
ccataatcataactatttcttccataaatagcatcctctgcatctcgggggtcctcaaagcgcaccaaggcgaagggcacaaggcagtgcccattcttaagcttgatcttgcggatccggcc

SEQ ID NO: 412125 - DNA, 122 bp, Homo sapiens
caaagcagtaggcatggagtaaggaaaaaggcttgtgttttaatagccaggagttctactcggacccactcaggtaaactgaatggcaaagataattcttcctgcaggtcatttcttttgct

SEQ ID NO: 412126 - DNA, 122 bp, Homo sapiens
gtgggtacccagcgagggtctggcaaggaggtcagctcagctgggcagacacatgcagcccggaggcctggggtgtccgggtcccacgaagccaggagaacacagatggggccgactctgcc

SEQ ID NO: 412127 - DNA, 122 bp, Homo sapiens
aaaagaagagttctctccggtcctggaaagctctaattgtcagaaaaactaggtggtttgcgtctttaaaagcaagttccagtctgcggggaaccaagcaggtgaactcctgactgaactag

SEQ ID NO: 412128 - DNA, 122 bp, Homo sapiens
cctctctccctccctccagcaaaccctcaagctgaggggcagctccagtggctgaaccgccgggccaatgccctcctggccaatggcgtggagctgagagataaccagctggtggtgccatc

SEQ ID NO: 412129 - DNA, 122 bp, Homo sapiens
gctcaccatggctcctaaccagacaccttgtttgtgccgctccagtccccatggcaggagcgactcctctctctcaccagtgcgaggatcacaatgttattgcttataaagcccttaagctc

SEQ ID NO: 412130 - DNA, 122 bp, Homo sapiens
gaaaaacagagggcggtcgtccctaggccccgtcttcgacttgtgacacgctgggcatctcgggttataaaaggtggggctgagacgagtgtgtgtcaatttcgaacccccgactccggggc

SEQ ID NO: 412131 - DNA, 122 bp, Homo sapiens
tttctaaaataattttcacatataagatctggcacacaatcttaaaataacttggcataccgtaaggcaaggcaacagaaaagacacccagcagaaataacagacaatagacacaaactcac

SEQ ID NO: 412132 - DNA, 122 bp, Homo sapiens
cctgccccctcctctccactcttaaggagatgctactaactcgctagcggggattcaacccggaggcgcccgagggcttttccgattctaggcggggctggggagatgccaggatccccagg

SEQ ID NO: 412133 - DNA, 122 bp, Homo sapiens
gggcctcctgcccacccaggcgccatcacctgacagcccctccagccggcagggctcacacggacatagcccagtaagggtcccccaagtgtcctgcccctgccacatcccgggtaccccca

SEQ ID NO: 412134 - DNA, 122 bp, Homo sapiens
cgtgtaactcgtgttgttacatatgtaagtatgattacacgtgtaatcacacatgtgactcggttagtgtctgtctctcaccactagaggtcagtcccgtgagggcgggcacattcattcga

SEQ ID NO: 412135 - DNA, 122 bp, Homo sapiens
caggatctcagcgagaaatgccccaatctcaagggcggcaccgagaggtgacgcaagcggcgcgcgaggttgcgtcaatgcaggaccgccccgcctccggcctgtgcattgtgggacctaag

SEQ ID NO: 412136 - DNA, 122 bp, Homo sapiens
cgcggccatgttggagaaaactgcactacatttcccatgagcccgcgggacaacgaacagcgctcccacagtcctcttcgcctcccagagcccgggagtgaccctttttcgaccaagtgtct

SEQ ID NO: 412137 - DNA, 122 bp, Homo sapiens
cataagttgtcctctccagatgccgtgctgatgaacacctcctcccgttccgtaggagagcgcctcgcactccacactgcccagcctcacatgttctcaacgtcttcactctttccgagtct

SEQ ID NO: 412138 - DNA, 122 bp, Homo sapiens
tggctcctgtggcttctgagaagccccagatgtcaaacaggcatcagagcattccagtcacgtgccccacagagtcatcacggagacagcagagacagccatgagatttgctcagactttca

SEQ ID NO: 412139 - DNA, 122 bp, Homo sapiens
gtcctggtgggaaactcagcccagaagggggcttcgggggctcctcgcgggctggggaaccgtcggatgccggcccaaggggcggggccaggaccccgggggggtcaccccgccccttcgcg

SEQ ID NO: 412140 - DNA, 122 bp, Homo sapiens
aggggaggtgggaaacgggctgacagaactgctgtgttgaggtgaggactcctgactgtgcgacccccattcatgcattcattcactcattgaatttttttttttttttttttttgagatgg

SEQ ID NO: 412141 - DNA, 122 bp, Homo sapiens
cgtgatctgcctgcctcggcctcccaaagtgctgggattacaggcatgagccaccgagcccggctgagaccaggatgtcaaggcttcagtgagccaagatcatgatgccactgcactccagt

SEQ ID NO: 412142 - DNA, 122 bp, Homo sapiens
ctctgatgccacttgccttgcatctcgcagcccggagaccggtgggtttaagggaaccttcgtcagaagttgggtgctaggtcatctttgtggcatgcagaccctgacatttggctaggcaa

SEQ ID NO: 412143 - DNA, 122 bp, Homo sapiens
catctgggtggcctgagcccggctctgatgacttcacatggagccacctgccaacagagacgctggcaaagcagctgctctgggacctgacagaaaagataaaaatgatggaatgtttgttc

SEQ ID NO: 412144 - DNA, 122 bp, Homo sapiens
ggaagccatgcccctccaactgggttgtgggaaataacatacaatgatgggtgtgacacgcggcctgctccttccctctactccccaagggttttggagcgagctggcctcctccacctctc

SEQ ID NO: 412145 - DNA, 122 bp, Homo sapiens
gggtcctgcagcctcaagacctgctggctgcagctggccgagttccgcaaggtcggggaccggctgaaggagaagtacgacagcgcggccgccatgcgcgtcacccgcaagggccggctgga

SEQ ID NO: 412146 - DNA, 122 bp, Homo sapiens
tttattttggaagcagtgggttttaaggctggtgctcctcggagcctcctaaccatcactcgtttggcaagttgcagatacactgcctgactaagctgggagaaagaaagggttaaagaagg

SEQ ID NO: 412147 - DNA, 122 bp, Homo sapiens
ttcaaacaaacaaagcacacacaaaagagcaatgcagtgtcacaaggctctgctagctgacggtccagggcaccctgagggcacatcgcttaacaattgttgtgctttgcaacttgagacta

SEQ ID NO: 412148 - DNA, 122 bp, Homo sapiens
ccctggccaggcagctacaacacagaaggcatagtgcgtgctatgctatgttcgcacaatcgctcaaaagaaaataaaagaaaaagacaaagtacaaaagagtaacagctataaagaccacg

SEQ ID NO: 412149 - DNA, 122 bp, Homo sapiens
gcgggaccgggcgggccgctagggacgccggacgaagggagcccgcgggcggggtctgggcgcctacatccttgctcccagggaggaagggacaggaaactgaagctgtttccggggctgac

SEQ ID NO: 412150 - DNA, 122 bp, Homo sapiens
tcattctatgagctgatctgtcctgacagctgccaaattagtcctctcattcctggagctcgctttggcactctcacgaatgtttctttcaaagtccactcttcatttaaaacgttgctcag

SEQ ID NO: 412151 - DNA, 122 bp, Homo sapiens
tacctggccttccttccaatacaaatcatcttggtggatggttctctgaggctcagtcttcgctgaagtcagaagaggaattggactcacattgcaaaggcacagggcagggcagatttcct

SEQ ID NO: 412152 - DNA, 122 bp, Homo sapiens
caaacaatctagtctaaaatgggcccaaacattccagtttaaaataggttcaaggagtgccggggtgcttaggagtttttacttaatactgctgcatgttcagttcactgtcaccaggtggc

SEQ ID NO: 412153 - DNA, 122 bp, Homo sapiens
cagtctgatttggcaagaaagaataagtattacgtgatttgaagtggtctacaattcttacggtgagtgagggggaaagtgcattaaaacaaccacaccctataaacattctcactcatcca

SEQ ID NO: 412154 - DNA, 122 bp, Homo sapiens
cccaggctcccaaggcaaaaggaggaagtggggacccagcctgggcattgggcaactcaacggcctctggcattgggctataagaggagcttgaccgtgggtgcaccctggaccccaccatg

SEQ ID NO: 412155 - DNA, 122 bp, Homo sapiens
ctgccagagaggctgggcatggcctttgaggggacactgggcccctgtctccctgcctggcggctattgtaggttttcctgaaaccccacatggctggggcccacgtaggctgggcctctgc

SEQ ID NO: 412156 - DNA, 122 bp, Homo sapiens
gacagcggcgaggcttcttgcagcgcgaatccgtccatcaacacgcaaaggcctaggattcgtaggcgccccaggtgggcggtaccaggactctccaggggtacccgactagtgggtgctaa

SEQ ID NO: 412157 - DNA, 122 bp, Homo sapiens
tagatggaggagatctggggacccactgttcccagcctagctgtgagcccctttctctcccgctccccaaacatattatggaagtaggcgtggcccactgcatgggaaccacgtggaccagg

SEQ ID NO: 412158 - DNA, 122 bp, Homo sapiens
taaggatttagacctcttaggtgtgcagacaacctcaactgcctgactcctcttgattcccgctggcgggaagttcccaccgcgcagcctggcaggcgcccctgccaccgtgcactgctgca

SEQ ID NO: 412159 - DNA, 122 bp, Homo sapiens
cgccgcctctcagtgctattgtccctgggcctggccttgagcgggtccactggggaaggccgtgtgcgccggctccgcggaagatgccggaccaagccctacagcagatgctggacaggtac

SEQ ID NO: 412160 - DNA, 122 bp, Homo sapiens
ttgcctctgtgagcctcagtttcctcatctagtaaatgacagttcttacctcagggttgccgggataattcattggaagaataggggcaaagcattgagctcagcacctgtcatgcaataaa

SEQ ID NO: 412161 - DNA, 122 bp, Homo sapiens
cagctaggaaaccgaggccaaagattctgaccttgaacatgaatgtctctggtctacatacgtaaagtgctagaagtcacttttggttggaactcaccaggactaaaggagctgttacttct

SEQ ID NO: 412162 - DNA, 122 bp, Homo sapiens
ccgggcccgtcccgccccatccgggattggctgtgcgtgccgcggccctccaccccgccccgctcaggatcttcccgggattggctgagctacccgacctctccaggggatcggctgcgcgc

SEQ ID NO: 412163 - DNA, 122 bp, Homo sapiens
atgcacaaaataaaaatgacgtagacagattggaataaaacaaatggacaaaagatatgccgaatgtatccatcagagtcccacccccaaaataggcagcaagcacacagaataattgagga

SEQ ID NO: 412164 - DNA, 122 bp, Homo sapiens
ccactgcactccagtcaaaaaaaaaaaagacaaataaatgggtctgggatgaaggaaaaccggccgtgcctttgggacctccaagcaggagggagtctgttgtaaatacccctaggaggtgg

SEQ ID NO: 412165 - DNA, 122 bp, Homo sapiens
tagaaggagacgcgaagccccgcccaccccaccggaaacgcatttgcgtcacgtccgccccgcccgctgccacttgtggctctgccgctctagcccccggcggagccagctgctgctcttcg

SEQ ID NO: 412166 - DNA, 122 bp, Homo sapiens
acccgttacgctaattgaaatgtgccaaatagctgcccggggcggggccgagcggagcagcgggctccgggtcacctgcggtgttgatgaggtattcaagaggaaaaagcgccggagcggca

SEQ ID NO: 412167 - DNA, 122 bp, Homo sapiens
gtaacagaaaacacagacacttcaaaacggcagttatcagttttcctaagtactagtctgcgagattttccaagtgcaaattgcccctggagcctctgcatgacagattcttatctgaagtg

SEQ ID NO: 412168 - DNA, 122 bp, Homo sapiens
aaaaaaaagaggaagaggctgtgttcctgagccacccggccaggaagggcctggctgggccggacgccccacccttgccaacaggcaggcccgccccgtctccgcctcgccgccaacaagga

SEQ ID NO: 412169 - DNA, 122 bp, Homo sapiens
tgtttaggttaaaaacaatgaggcaaaatttatgtgttacttttaagtttttgttgaatacggattggaaatgtagttgatcagggaactgatgaaagtaagataaaggagatacggaagaa

SEQ ID NO: 412170 - DNA, 122 bp, Homo sapiens
ccctgggattgttgagctcgggcaggaccgggtcttctttccgcccctagggggcacaagcgggcatgtccaagcgcctaggagcccgtaccgctggggacctccccttccgcgaaccccga

SEQ ID NO: 412171 - DNA, 122 bp, Homo sapiens
cgtctgggtcaaccctccccacagccctgagggtcatccccattttactgatgatgttaccgagacttgaagaatcaaggcacctgcccaactactgagaacgcccaaccaccgagtggtgg

SEQ ID NO: 412172 - DNA, 122 bp, Homo sapiens
tataaacatccgcagagttataggagacttctggctgagggcccggcaagataagtagagcgtttgtatctctgagtttctgagttaatgatgccagcagtctctggaccggccaaattgtg

SEQ ID NO: 412173 - DNA, 122 bp, Homo sapiens
ccagaagggtggtgggtggcctggggagctgcagtgcgcagccccggggtgctgggcggccgcccctccctgggcgggccgtccactcctcacctcctgcttgcccagtggccgagccgggg

SEQ ID NO: 412174 - DNA, 122 bp, Homo sapiens
agattgtcatatgcatttggattgataacaatgggaactttgatagcatttttggaactccgagcataagttggctcgtcatgaatgataattggaaaaggtggcataccagcattgttata

SEQ ID NO: 412175 - DNA, 122 bp, Homo sapiens
gctgatgcagacaaatgcaaagatggtgaagagggtgacggagaaggccagtgtgccggccgacacgtggaactcctgtccctgcagagcccagtagatggcggccacggaccaggccaggc

SEQ ID NO: 412176 - DNA, 122 bp, Homo sapiens
ggccgtgccggccggggcacaccaggccagggtgggcggctgttcctggaccccagcgggcgtctgcctcccctacagcgggtccgggcaccccgggtctacttccagttcagaagcgcagc

SEQ ID NO: 412177 - DNA, 122 bp, Homo sapiens
agcagcagcaaatccgtacgggtctgtagcaacctcaattcttgcttcctcagaagaattcgaccgaagggcataaggcagagtgagaaaccaaggcaagtcttagaggagtgaaagtttat

SEQ ID NO: 412178 - DNA, 122 bp, Homo sapiens
cttgcgggtcggttcctgaggaattggaagtgtcacgagatgtggccctcgttgggctggcgctcattggcctcccttgtgcctgtgcaggaggagctgattaactcagtggtcatctcgca

SEQ ID NO: 412179 - DNA, 122 bp, Homo sapiens
ggcggtggcgctgggagctcctgtcaccgctggggccgggccgggcgggagtgcaggggacgtgagggcgcaagggccgggacatggggcccgccagccccgctgctcgcggtctaagtcgc

SEQ ID NO: 412180 - DNA, 122 bp, Homo sapiens
ttctcggcctggaggagggggtcgcgcgaagtgccagatgcaggcggggaaggtctgtgacgcgcacccgggtggagggaagctggttagacacctggagaccctggggggcggggtcagaa

SEQ ID NO: 412181 - DNA, 122 bp, Homo sapiens
aagactgggcaaggtgagggcactcctgaccccagtgcaaccagcctcaatctcctaactcgggccttcagaatcatctccccatgctggctccatggccagagggagacccaccggtgaca

SEQ ID NO: 412182 - DNA, 122 bp, Homo sapiens
aaagtgagccccaagcagcgggagctggcaggtgaggcccgcgggacgtgggggtgggggcgtcctcccagcagcgcaatgcccccctcgcgaggaaacccaggctagaccgcaggaaggtg

SEQ ID NO: 412183 - DNA, 122 bp, Homo sapiens
agatccaggctaggacttggatccaggctaggactcagatccaggctaggactcagtggccgcacgctggtgagggtgcgatggcagttagcacccttctccacccccacacccagggacag

SEQ ID NO: 412184 - DNA, 122 bp, Homo sapiens
gctccgggcagcagcggcctccccccgggtgcgcgcgcatccagccccctccccagccggcgctgcgcttcttccgtaaccgagcccttggaatcccggagacccgccccgcccgcagcgcg

SEQ ID NO: 412185 - DNA, 122 bp, Homo sapiens
tggagagaaaccctatgaatttactgaatgtgggggaactgttactcatatgttgcatttcgtcgaacgtgcaagtcatgctgaagagaaaccctgtgcttctaaggagtattgacaagccc

SEQ ID NO: 412186 - DNA, 122 bp, Homo sapiens
ttctatttaaaaataaaatgttaacctaaaaaccaatagtcatggtctcggccagcgcctcgccgagttgcagtgagctgagatcgtgccctcccacgcccgcagcccgcgtcctgccttgg

SEQ ID NO: 412187 - DNA, 122 bp, Homo sapiens
atggatcgctatcccgtagccgggtgttccggagcgctgcgggcaaagcagaccgccttgcgcctattatgggttgagtggctctgtactctagatcggctctgtcacttactaatgggccg

SEQ ID NO: 412188 - DNA, 122 bp, Homo sapiens
gaattgctgttttaaaatatgcaactggcatttcacacctctacactggacgacgtattgcgtggaggatggagaaggaagatcacccctactcccaaattcgtagttataagggcgggtta

SEQ ID NO: 412189 - DNA, 122 bp, Homo sapiens
ttgtagttggcgttccgggccgcgtggcggtgaatgccttggctgtaggagaacccggaacggcctccaaaccagcttctcccattggagggccgacccaggtaagcacctgagcttgagac

SEQ ID NO: 412190 - DNA, 122 bp, Homo sapiens
gccggccgagcactgcgctttaagcgggcagcggctcagatgccctgggcaccccacgcacgggctctgtgactctctgggttttggtcttttgtttgtcttaagaaatcaaaaggaacaga

SEQ ID NO: 412191 - DNA, 122 bp, Homo sapiens
tctctctctttcttgagggtgtgtgttgccccctcgaagtgaaggaattttgctccaaagcgagctgggaccgaagactctaggctaagttatctatgtagatggtgtcagggagcgaagct

SEQ ID NO: 412192 - DNA, 122 bp, Homo sapiens
ggacgggagttccccggagaaggatcctgcagcccgagtcccggtgagtgcgagaggacccgcgccccctgtcacccctcacttctcctgagtcccaagtaaggaacggagccaaccctggg

SEQ ID NO: 412193 - DNA, 122 bp, Homo sapiens
cgcacccacggtccactcccagccatggctgccccggccccgcactcgccacgtcccccgcgcgctcccagacgcatgggcaagggagcccgctggcccctccgtagctccggggtgcccag

SEQ ID NO: 412194 - DNA, 122 bp, Homo sapiens
cctagaggtcacaaagagagttgccccgctatctgcaggtgcacagttcaccaattagcacgctgctactgtggagacctccagcatcacacagagagcaaggcctccatattttctcctct

SEQ ID NO: 412195 - DNA, 122 bp, Homo sapiens
gggccagccccagggccccccgcccggcccctctctggctgctcagctctcccaaggccccgtcgatgcaggcctcggccccagcctggcctgtgcctgacttcccagcctccgcgtcccct

SEQ ID NO: 412196 - DNA, 122 bp, Homo sapiens
caccaccctccaggcggaggtgccgccaccgcccaccgcgccggccgccgcctcggcctccgcgtccccgaggccctcctgcgtctccacctcctgcagcaggaaacgctcgggcccggcgc

SEQ ID NO: 412197 - DNA, 122 bp, Homo sapiens
taagaaaaccaaacctactttgctgagcggactggttataaaacatccagggagagaagacggtcttggaagccggacaagagggaatgaaacaaaagttagatcgtgtcagcctttgaaat

SEQ ID NO: 412198 - DNA, 122 bp, Homo sapiens
cctgtaatcccagctacttgggaggctgaggcaggagaatcacttgaacccaggaggcagcggttgccatgagccgagatggcgtcactgcactccggcctgggcaacagaacaagactctg

SEQ ID NO: 412199 - DNA, 122 bp, Homo sapiens
gtttccagcttcttaggagtcaagctgccgtgaactttcgcacgcttgtcattttctgaacgttggcagccctttatctaaggtactaacctgagagtagaattgccgggtgagaaggtata

SEQ ID NO: 412200 - DNA, 122 bp, Homo sapiens
cgggctgcggctgagccgccagggcctgctgagggcaagcggggcctctcgccttggtggcgcgcaaggtgccttgtgaggagcaatggcggtcccggaaggggaggcggggccgagcctgg

SEQ ID NO: 412201 - DNA, 122 bp, Homo sapiens
gcggggcggcccggggcgtgcgcctggagtcgcgcggagtgtgggcttccgcgaggggcgcggggcgccgcccgggctttattcgcgactcattagcatctcattacttctggatccctcta

SEQ ID NO: 412202 - DNA, 122 bp, Homo sapiens
gcccttgtctcccacaggtcctggtgcttgatggtcgaggccatctcctgggccgcctggcggccatcgtggctaaacaggtactgctgggtaagtcgctgctcgtggcccctctgtcatgg

SEQ ID NO: 412203 - DNA, 122 bp, Homo sapiens
tacacaactggtcttcctttctgagaaaggtcttcataaatatgcagaaggccaatttgtcgcggacattttgagcactagaataaatgttgctagtttctggtgctgtcttggccttccag

SEQ ID NO: 412204 - DNA, 122 bp, Homo sapiens
gacaggcagggggcatgattacctggaggcaagggttctagagggtgggcatgcgatctacgggcagtacctccgcccagcggggcccagatgactcggcggatggcctgcacccagtcctc

SEQ ID NO: 412205 - DNA, 122 bp, Homo sapiens
cccgccttgccccactgaggcatcagccagcacctcctgcaaataacatgcacggtagagcgtagagagagacttggcatttcagagtctactttaaattttatcagcattacactttcgag

SEQ ID NO: 412206 - DNA, 122 bp, Homo sapiens
aataataataacgtaacattttggggcactttcatatcctaggcactgttctaattgcatcgcatgattaatcacacaaccctatgagataggtactcttatttccactttacaataaggaa

SEQ ID NO: 412207 - DNA, 122 bp, Homo sapiens
aactgatggaatccaaatcatgaccacataaggtaaatactgtcaacatcttcccacttccgtatctgatgcatcagcaagttctgttggctcagcttctgaactaggtcctaaatccacct

SEQ ID NO: 412208 - DNA, 122 bp, Homo sapiens
agccaggattcgaacccgagaactgtggctccagaaaacaagccttaatctgttaaacatcggaggccgcgcatgcgctgacacgcccctgctatgaacgccacgtcccagccaaactgcac

SEQ ID NO: 412209 - DNA, 122 bp, Homo sapiens
agctccccagaacaggcacctggaggtccagcctgacccatggtgagggggcatgggctccgagccctgctgcctgcagcccctacctgcctcttagcaccaggggcaggatcaggaggtcc

SEQ ID NO: 412210 - DNA, 122 bp, Homo sapiens
ccacaatttaaaagcattgtttatgttcctgatacaacacattgtttaaatgagggggaccgaaaagcagtctgaatatgcagtaatcggggctaaagatggtttttatccccaggtcccca

SEQ ID NO: 412211 - DNA, 122 bp, Homo sapiens
agagggtatatagttttacaacattaagcctagtttaaaatgaccaccagtgcacagaaccggctggaggatgaaagcctaaagcagccatctttcaaatggctgctgaatgctccagaaaa

SEQ ID NO: 412212 - DNA, 122 bp, Homo sapiens
gctagggggcgggcgaggccagccgcgcagacccctccggagcggagctggttcgcccagcgttggtcccagagccttaacaaatgggtttattttgcagtggtttaaaactgcgagaggga

SEQ ID NO: 412213 - DNA, 122 bp, Homo sapiens
aggttatggaatgcccacccaataggagggcgctgccgtctctcacctgccaggtgcccacggtcagtactccatcatgcccgctgcggccagcagagggcagcaacatcctgccctgtgcc

SEQ ID NO: 412214 - DNA, 122 bp, Homo sapiens
tatctgctgggagggagatcgcagctcgtggggccggagtaagccacaaatcactgccgccgccgcctctctgcattctcttaattgtatgtattctctggataaaatgatcattgtggcct

SEQ ID NO: 412215 - DNA, 122 bp, Homo sapiens
aaaccctaggggcagaagcactttaagtgggatgaaagggaccccgccgcagggcggctccggaggcgcttttatgtcctggttcccaggcgctaaggacgtgtccagacagccaccaccag

SEQ ID NO: 412216 - DNA, 122 bp, Homo sapiens
gggaggcgggacggtggctcccacagccaatcgcggccggtagagttgcccggcagcgcccgccccccagtccggcttctaccaatcaaaaggaaactagaggcgatgactcgctaggattt

SEQ ID NO: 412217 - DNA, 122 bp, Homo sapiens
ggcccttcctattcacatttcccaaatgtccccatatgccgcctgccgctatctgtttcccgccagcattcggtcacggcggttctcagtccacatcccatcggagcctgggggtcggttgg

SEQ ID NO: 412218 - DNA, 122 bp, Homo sapiens
ggccgggaaagcgcgtccccccgggagggcgcggaaggcacactgtgttccgtggggcctcgtaaataccctgcggccagagaaccactagagctactggtccgggcgcgggctctggggcg

SEQ ID NO: 412219 - DNA, 122 bp, Homo sapiens
tcagccttccttacgcagagaatgctcatcaaaaaataaaatggacacaccatacactgacgtcactcagatttctatggctggaagttaacaaatattgttttcaaatgcgtgtagcctga

SEQ ID NO: 412220 - DNA, 122 bp, Homo sapiens
cgccaaaggaactgggttgtgggttggagcccttaaaccacaggggttcgttccctggtgcgagggtcgctagaaagctccggtggtcctcggtgattcatttgcaactcaactcagctttg

SEQ ID NO: 412221 - DNA, 122 bp, Homo sapiens
aatatagcaaggaagtggactttagtcattgttccaatgctacgtaaatagatgcatcctcgctagctcagagatcagtttttcctgctctcatcaatccttgggagctcatcgcaaaagat

SEQ ID NO: 412222 - DNA, 122 bp, Homo sapiens
gcccggactgtgcagaggtgcgcgcccacgccggcctcccggaccagcctgagctcggagcgcctctcgccctcaggtctctgcagccagaggcatctggggaggtgaggggggaatttgtc

SEQ ID NO: 412223 - DNA, 122 bp, Homo sapiens
ttcctgcgtggggtgggttgattccggagctctctgaggtccccagcgccgcgcccctgccgcttcatctcgcagggcacacgagcagccccagcagctccacgctccccatgcgccccagc

SEQ ID NO: 412224 - DNA, 122 bp, Homo sapiens
aagtgcattgctttcacctggagggatgcttttcatccacatccagactacctacagcatcgccatttatagccttctatgtattaatacttttccccatcaagttgaacccctggaactgg

SEQ ID NO: 412225 - DNA, 122 bp, Homo sapiens
gtccactggagtcatctctggacttgaaaacacacagacacagaaacatttgttgacttccgatggcctcactgggtgacctgaggtgacctgtctcatatttctaacatcatcacacagga

SEQ ID NO: 412226 - DNA, 122 bp, Homo sapiens
attagggaaaaactaagggaatgtgaataaagtgtggacttaaggtgtcaataacggtgccgtaatggtgacagctgtaccacatgctgcgagatgttcgcaatcagggaggtcatgtgaga

SEQ ID NO: 412227 - DNA, 122 bp, Homo sapiens
gccagagcgccggcaagagctcggtgctcgagaacttcgtgggcaggtaagcgcgcagggcgcggagtaaggatgcggcagtggggcgaccccgctgcgggccgttggaacgtggacgggca

SEQ ID NO: 412228 - DNA, 122 bp, Homo sapiens
gggcacggcggggctgctggcctccagctccaaggctgtcaggaagcactccgtagccgccgcatcgttgccctgagcttggaggacctcgcccagcccgttccagacctcgtgggctgtcg

SEQ ID NO: 412229 - DNA, 122 bp, Homo sapiens
atctctttcggattaaaggaaactcatctgtggtcataaaatcaaggtagtggctccctccgatgacttcttcagagatgaaggtgctggcaggacactggtgagtacctccgcacctgaaa

SEQ ID NO: 412230 - DNA, 122 bp, Homo sapiens
aacctgccagcaagcctccctgctctgttggtgggatgcactgctgagcattagagatcacgagtgaatatggctcccgtgcaatttagtgcggtgatgagtcaaactagacacaggctggg

SEQ ID NO: 412231 - DNA, 122 bp, Homo sapiens
aatcagacatttctccaagcaacactgattcttttttttttagacggagtctcatcctgtcgcccaggctggagtggagtggcgcgatctcagctcactacaatctcggcctccagggttca

SEQ ID NO: 412232 - DNA, 122 bp, Homo sapiens
ttcccaggcaatgttgactctaccgttccaggaacacaatttgggagaagactttctaaccgcttcttttagatagctacataatctttaatgatagagatacagcatgaatttttctgtca

SEQ ID NO: 412233 - DNA, 122 bp, Homo sapiens
tcggcacattaagaagccagaggctcattagtgtctatttactaccttgtagaatgctctcgaagaagaacctgagactgtcatctcctggaatggggctccccagagcttcctcactcagg

SEQ ID NO: 412234 - DNA, 122 bp, Homo sapiens
aagtttttcaaacatacttctctgtgacgaaaaggtcctacagcctttcctaaacattcacgaataagaaagtcatcactgttttctataacagggaagtattgtaaacatcccaaagatcc

SEQ ID NO: 412235 - DNA, 122 bp, Homo sapiens
cacctccctggttcaagcaattctcatgcctcagcctcccacgtagctggactacagacacgtgccaccatacccagctaatttttttgtattttgtaatttttgtattttgtattttttgt

SEQ ID NO: 412236 - DNA, 122 bp, Homo sapiens
cctgcagctctgggtcgctcccagcctggagagccagcttcatcaccctgggcccttctccggagcaaatggccctcgagaccaccacagctcacccctcatgggcacgagagggcagcact

SEQ ID NO: 412237 - DNA, 122 bp, Homo sapiens
gggcgggggagactagggcttatatcagcccagatccaggcaaaaatggtagggagggtgcggcgctctgctaacactatcaattatgcatcatgttgaacgtggcttcggggaggaggcgg

SEQ ID NO: 412238 - DNA, 122 bp, Homo sapiens
ctagtagcagtagtagcagttgttgttgttataaaatgaaacaagtctaatttttctttgcggctttgtagtggtcctataggcagtgaaaaacgacagttctttcaggtttattaaagtaa

SEQ ID NO: 412239 - DNA, 122 bp, Homo sapiens
gcagctgccgatggccacgggccggtgatagacctccaggcagatggggcaggtgtactgcgcctccaggccgctgtcgccgcccgccggcccggccggcggctgccgctgctgagccgagg

SEQ ID NO: 412240 - DNA, 122 bp, Homo sapiens
ccatggtaatggcatcctactgtcctactgctgttaatccttgagtgtctcttcatccctcgtggttctcttaaccttacctttcatgcttccaaaggaaaactacactctaaattagcata

SEQ ID NO: 412241 - DNA, 122 bp, Homo sapiens
cccctgaccgcgggcctttgcggaaaacgccgggccctcccccacctccagctggcctctcgcctgtgctgtttctgctgccaggaatgtccttcccgtggagccggcctgggtgatcctct

SEQ ID NO: 412242 - DNA, 122 bp, Homo sapiens
ccttgggcgctgccaggaagtgcttggcggggctggggcccgggaggcacacagctgcgccgcccaggtggccgcccacctcgcccagcgcagggggcatcacgaaggccgccttgtcgggg

SEQ ID NO: 412243 - DNA, 122 bp, Homo sapiens
gttgatacattataacttttttttcttgttactttcacccccagatcctccgagcggcggcgacggctgttgctaagggaggggacgcgcgaggaagcgcgacccgggcggcagacggcacc

SEQ ID NO: 412244 - DNA, 122 bp, Homo sapiens
tcccttacacacacgcaaaatactccttcagcggagcgaagaggtggcggatgactggcacgctccatgaccggcccagcagtctctgcctcgccaagcggctcatgttggagacgtcagta

SEQ ID NO: 412245 - DNA, 122 bp, Homo sapiens
ggtaagaagtgcgactacgccgaggccgccatgctgaggagaccacgggcaaagagcagccggcagaccgtttccaggtgagcccagcctccagccttcccaccaaggtaccaggcattgag

SEQ ID NO: 412246 - DNA, 122 bp, Homo sapiens
ccagcctgggagacagaggaagactccgtctcaaaaaaaaaaaaaaaaaattacattcaacgagttgttgctggcaattcaacatgcactgagatttatttctttatagagtttgcattgta

SEQ ID NO: 412247 - DNA, 122 bp, Homo sapiens
accacgcgggaccctcccgggggctcccgcaggcgcctcttgctgcccggggccaagggtcgggcagcccatagcgtccggcctgggcctttacttggaattctttctgttgaagacttggt

SEQ ID NO: 412248 - DNA, 122 bp, Homo sapiens
gcacggcggccggtcccggttacctgcctgggatctggctcaggcgaactctcttcacaccgccatttgagggaacacaaatgcccgctctgggccaccgtagttcacagaaagtacaagct

SEQ ID NO: 412249 - DNA, 122 bp, Homo sapiens
tccttccgttagccccgggagatcgtggtgtcctgcaggaccagctggaccctggaaggccggtgggccctgatgttcatgcggaattctttgatgacaaagtagtagcagaaaacatccag

SEQ ID NO: 412250 - DNA, 122 bp, Homo sapiens
agttgtggcctgaggaaaacttccaggtcgccagcaggaacgtcacaggagagccccggtcgctcgtcaggcgggcggccctggagcgtgcgcgccacccaacgccgcgctgggcggccgcc

SEQ ID NO: 412251 - DNA, 122 bp, Homo sapiens
tataaagtccaccagtatataatctaggagaattcccttatattaaggtcagcagattagcgaccttaatctgcaacattaattctcccttgctgtgtaatataacatattcctattgagca

SEQ ID NO: 412252 - DNA, 122 bp, Homo sapiens
atggaacccgtggaagtggggagacgaatttgcgtgtcccagggacctgtggaaacggagcgttcagtgctaaccggtgctccctggcggtggatctcctgtattcagaggctcctccccaa

SEQ ID NO: 412253 - DNA, 122 bp, Homo sapiens
ataagagaggagagacagatacacacagagaggggatgaccgtgaagagggaggcagaaacgcacacagatacacacatactcagggaagaggaacaacaggccagaggggccgtcaaaccc

SEQ ID NO: 412254 - DNA, 122 bp, Homo sapiens
cccactctgaagtcctgccgtctctcagacccagcctccacatctaggaagcagcaaaagcgcagaacagaagccaaactatcccagggtgtgagccttcttctcatccgtgtcccacccag

SEQ ID NO: 412255 - DNA, 122 bp, Homo sapiens
ccttcccagggccctgtgcacaaaatggtcccctgtgcattgttattttgctgtgtttgccgatgtccacagcttcctagacattaacagatggatatctgggtgatgatgaacagacagag

SEQ ID NO: 412256 - DNA, 122 bp, Homo sapiens
aatgcaacagggctctctgagtaggttccagtgaactagacactgcaaagggctgcaccacgatacccatccatgtctctgtggccacagtgcagggcaaggatcacacacctgaaaacctt

SEQ ID NO: 412257 - DNA, 122 bp, Homo sapiens
cgccgggattacagatgatacacctgaaccctggagccctcacggggtcctgagaggccccgctcccgccaccagccctctccaaagcacggtcttatttccagcacagcagagaaaccgcc

SEQ ID NO: 412258 - DNA, 122 bp, Homo sapiens
tccacaacccgctctgctgaggcctgtccagttgcctgatctctgacccgcctgtccggccgcctgcctcgaggaaacgtcggatctcttacacaatgctcgctgtcaaaccctccagcctt

SEQ ID NO: 412259 - DNA, 122 bp, Homo sapiens
cccgggcgccgcggctcttttgtttctccgttggggccgagcccgggccctagttggagccggagtcggagtcggagtcggatccggattcggattagcagcccgggaagagtgccgtggca

SEQ ID NO: 412260 - DNA, 122 bp, Homo sapiens
gatagcacaggcccatcttaggcatcaataatgttcacagaaacaaactttcaagagtttcggccaggcgtggtggctcacgcctgtaattccagcactttgggaggccgaggcaggcagat

SEQ ID NO: 412261 - DNA, 122 bp, Homo sapiens
gggcggggcatctgtggcgcgtcttcccgcgctgcggcgacggccgttggggctcgcgcgcgccctcggttgccccgcccccgcccctgcgcccggccccgccacgcccacgccccgccggc

SEQ ID NO: 412262 - DNA, 122 bp, Homo sapiens
cccagatcatcccggtgaccagacgctcccaagatctagaaaaagcccctgcatcacagccgacaaatgatcttgatcagacgtcccagagaaaagtcactcgtggaagaatcctcctaaag

SEQ ID NO: 412263 - DNA, 122 bp, Homo sapiens
gaccgcggcccgcgggtggccgccccggatgcctgaaaccgaggagttaaatacagtctccgaagacccgcgcatcgatgtgcataagtggtgcttaaaagatgccaaggaaatgtaccaga

SEQ ID NO: 412264 - DNA, 122 bp, Homo sapiens
tcaccatcccgttgcctgcagcagaggccggcgtcaggcagcggtcaggccccaggcttgcgcccgtggacccccccaggcggctcctctgccaggcttggccggcccctcacccgccccct

SEQ ID NO: 412265 - DNA, 122 bp, Homo sapiens
cactcccctccaaagcatctgacacccacttggctctccactctcagtgctgactatatccgctccctgttctgcataacacatccccccaaatttacctgctggcaagaaggctgactcag

SEQ ID NO: 412266 - DNA, 122 bp, Homo sapiens
gcacctctttttctttgttgttgccaccaggccgaggaaccaactcctgagactcactgccgccaccaccaacgtcattcctctggcgatgctcccgtcgcctggcattataaaactcccgc

SEQ ID NO: 412267 - DNA, 122 bp, Homo sapiens
ttacttacacgttcatttctgtacacatttagttaatttagaacctgggacttttacaatcgattccccaaacccctttatggcagcaacactgaaggagcacagtttctctctctaggaag

SEQ ID NO: 412268 - DNA, 122 bp, Homo sapiens
gctctgtggagaggcgtgatcgagattggccgcgagagcgttattactctcagcgttctccgtttgcggcctgacctacttagtattaccctttttaatcttgtcaaaaattacacagacag

SEQ ID NO: 412269 - DNA, 122 bp, Homo sapiens
cacactaccgctaccctggagtgagtcaaaacataggggtgggaaatggtttgacatccccgccagcctggggctccttagctttggctcggttgggtgacccatttctttacattaatatt

SEQ ID NO: 412270 - DNA, 122 bp, Homo sapiens
gggaggaaggccgcgctgctgtcctggggctgggcagcctccgcattgcacagcgcagaccgctctagccttaggcctggaggggacaccaggagatgaggcttctggctcagcctgctctc

SEQ ID NO: 412271 - DNA, 122 bp, Homo sapiens
atagactaagggggcagatttttaagaaccccaccagagttgacatacacacgtgattctcgtgtctgtctctcaaagctctcaatgtctggggctgtgtttgccctcttttcattgatgct

SEQ ID NO: 412272 - DNA, 122 bp, Homo sapiens
tgctctgcgttcctaaccctggaagaagcggtctgggtgcagccaagcactggacatgctcgcgagagccagggcaggctcgggtcgtccgcaggactcgaaggcttgctgtgctctcctgt

SEQ ID NO: 412273 - DNA, 122 bp, Homo sapiens
atagctccgcgccgtcggggttgcactgcccagaagaacactttcggaacgggggcgttacgaaatcgccgtggtcattgagtccgcagttttcccggaactcatagtctagcgggaaagct

SEQ ID NO: 412274 - DNA, 122 bp, Homo sapiens
catcttgattctcatcacatttttctctttattactgtttttatcctgttacctgtcactcgtatcacaggaaatgatgcatccttttttttttttttttttttttggcttttcaaaaattt

SEQ ID NO: 412275 - DNA, 122 bp, Homo sapiens
gtaaagtatatgggattgaattatttgtgaaggagagtagtggtagctccaaaatgatctcggaggtagaagtgtgagaatctgcgtatctgtgtgtgccataagaagaaatctgaagagga

SEQ ID NO: 412276 - DNA, 122 bp, Homo sapiens
cgccgaggccaagactttgatttaaaagaaaacacacctcggcgacaatgtcttgctgctcggattaggtgggggaggggcgacagtagtgagcgcctgagccgaacaatcctcgaactaaa

SEQ ID NO: 412277 - DNA, 122 bp, Homo sapiens
ctgagtgttatctgatctactcagccataaaatcaggggtgctcagcaacaccctgtcatcgagaggaagtgacatgtgtgggttgggtccatgcaagtcctaaagcacaagtaggttgcca

SEQ ID NO: 412278 - DNA, 122 bp, Homo sapiens
gcggcggggcgggcggtgccgccggttggaagtgggtggagttgcccttggaggcggcaccggacctgggccccgaggcccgccgcgccctgtcgggcctgagccgagtggccccacagagc

SEQ ID NO: 412279 - DNA, 122 bp, Homo sapiens
ggtatctgagctgaaaacagatttcactgtcagatagaaatgtagataccaagacaatttcggtatcacactattaaaagtaatcatggctgcaacagctgggagttaggaagaatattgct

SEQ ID NO: 412280 - DNA, 122 bp, Homo sapiens
ccacatttgatgggagaagcatcagatgatttgcagctattaaaacaacaaaacccaaaccgctacagtcctatacagtcagccttaagatctctctgagcactctctagggattcttacaa

SEQ ID NO: 412281 - DNA, 122 bp, Homo sapiens
gtacgcaccacgggggaagccaatgagaaaatcaggcccagccctagggggcggtgctgtcggtcacatgcgcacctggggcgggtggtggcggcggcgcgggcaccgcgagccggcggaag

SEQ ID NO: 412282 - DNA, 122 bp, Homo sapiens
ctctgttgcgcatgtgcgcgctctccgcctgataggagttgtagttctgcgggtgaagctcggcgttactatcaagcaaccaaactgcaagctttgggagttgttcgctgtccctgccctgc

SEQ ID NO: 412283 - DNA, 122 bp, Homo sapiens
gagggtcgaccaccaagggcagagcctatcccttggggagctgctggaggagacaggcagcgccgggaggtggctcacaccgcaccgccgagagcgctttgccctcgcatcgctgaaattta

SEQ ID NO: 412284 - DNA, 122 bp, Homo sapiens
ctaatccccactggaaacatgagaaaatagagacatgctacccagaatctaggaactgaacgccaagcctaagggcttcacctagcccctaagtccagccttgagggtaaagaggtaatgcc

SEQ ID NO: 412285 - DNA, 122 bp, Homo sapiens
cctggggctggagctggcggagctggtgccgcgcctgttcaggatggcctccaaagaccgcgaggaccttctggaggtaaatctgcagaatggcattttgtttgtgaattctcggatcgacc

SEQ ID NO: 412286 - DNA, 122 bp, Homo sapiens
cgaccacgggccacccctcgctgcttagttgcccccagaagttagagttgctgccgtgggcgtcgctcctggggccaggcagcgcagaagggtcccattcaagggggaacctgggaccagat

SEQ ID NO: 412287 - DNA, 122 bp, Homo sapiens
ggtcgggagtccgagatggtagatccccctccaggcgcctcgctgacattttgtcccggacggaaaacctccgcgcgtgccccttaaagacacagcgctgcattcacacgtctgcggggaaa

SEQ ID NO: 412288 - DNA, 122 bp, Homo sapiens
tgaggacttcttccaaagcagtacagaccccaaagactctagcttaccaggggacttacacgtgaccagtggccccgagagccctttcaacaatatatttaatgatgtggacaaatcggaag

SEQ ID NO: 412289 - DNA, 122 bp, Homo sapiens
ctgcccatgagaacacgggtcaagctcccgtcccttctgccctgccggctgccccaagtgcgccctgaccacctactgcgctggcatggccggggccaccctgacagctgatccatcatctg

SEQ ID NO: 412290 - DNA, 122 bp, Homo sapiens
ctcttggtgctcctgctttctcctctgtaaaaacgacaataataataataataggccaggcgcggtggctcacgcctgtaatcccagcactttgggaggctgaggtaggcgaatcacctgag

SEQ ID NO: 412291 - DNA, 122 bp, Homo sapiens
ggaaccatgaggtgcgcggcgcgcttccctacgtcactcggagcgccggcggaaacgagacgagcctcgccccgcacgtccggaagccacgcctccagcttccggccacacctttcggcggg

SEQ ID NO: 412292 - DNA, 122 bp, Homo sapiens
tagcattatagcaaatgtagttcatatcactctcctgggcagagtctagcaatgcagacacggcctgtatttctgctctgtaaaattcagaggagcctagtgtgttctttttagtggatgga

SEQ ID NO: 412293 - DNA, 122 bp, Homo sapiens
aaaagcggtgggaagcaggggtgagcgcggggagcgggcagccccaacctgaacagattccgctttctcctcctccccccaccccgggaagctcgagcggggaggtacggaccgtctcctct

SEQ ID NO: 412294 - DNA, 122 bp, Homo sapiens
gcagcgggagagagcctgccccactacacatcagcatctgccaggacacaagaatggactcggtgcggggacagaacacctggaacgcagacctgggagcacaccatagtccacgcacgaac

SEQ ID NO: 412295 - DNA, 122 bp, Homo sapiens
tccacatgactcagcgccgtacccctgtatccacgactcggctccataccccgatatccacgactcggctctgtgcccctatatccacaactcagcgctgtacccctacattcacgcaactc

SEQ ID NO: 412296 - DNA, 122 bp, Homo sapiens
acttcctgggttttaccagcccctaaatttactcacttaaaaaatttaattacatagacacgaatcattcattgtagttgctaaatattggtagcaactaactcgttgccttttgttggaat

SEQ ID NO: 412297 - DNA, 122 bp, Homo sapiens
ccctccgcagcacggtgaccgactcgccctcgcggaaggacagctcgtccccgaactcggcgctgtagtcccagagagcgtacactgccccgctgttcatcagccccatactctgctcgacg

SEQ ID NO: 412298 - DNA, 122 bp, Homo sapiens
tggtggggtacttacctccatgatggctgctgctggttggctgctcctgctggtgactggcgtcccacaggaggcctggggcctggcgatgatgcttgccggagcctgagggcccgtcccct

SEQ ID NO: 412299 - DNA, 122 bp, Homo sapiens
aaatgatagatcagaggaaatataccaagtgcacatacgcatcacagccagccaggtcagcgccaggttgatgataatattcactatgcttaaattgggcagttttcctaattttcagaatt

SEQ ID NO: 412300 - DNA, 122 bp, Homo sapiens
aggtcccgcgtcgggaaacatgtgccaggcctgccaggcttgcgacatggggatgggacacgtctcgtggtggaatctgagccccggtgcccgactcagggagtgatgtcgagacacacaca

SEQ ID NO: 412301 - DNA, 122 bp, Homo sapiens
agaggaaaaaaacactgacttcccccaaaccaagctatgagtgaaaactgacacatgcaccgatgacatatacatttcccttaaagtctcttccttctaattccccaaatttctctttgtgg

SEQ ID NO: 412302 - DNA, 122 bp, Homo sapiens
tagtactgttctctttatttgtaccttttttattccttataggtttttaaacatgtttcccggcatccatcattttaacagcccctcttccctttttccacacaaaaattcttccttacatg

SEQ ID NO: 412303 - DNA, 122 bp, Homo sapiens
gcctcccgtccctcgactccgcccaccgcctcgctcttgctctgcgaccccgctggcttccgttgtcatatcccagcataccctcatccagaacaggcagcgggccagggctgcagaagaaa

SEQ ID NO: 412304 - DNA, 122 bp, Homo sapiens
gcgacaggaggagctggacgccatgacgcaggcgctgcaggagcaggatagtgcctttggcgcggttcacgcgcagatgcacgcggccgtcggccagctgggccgcgcgcgtgccgagaccg

SEQ ID NO: 412305 - DNA, 122 bp, Homo sapiens
agctcggcgggcgcggcacttgccgcagcttcttgggggcctcaccctgcgggcggccctcggacctcggtgagccccgcggtccagccctcccagcagacacccctgcagccgactccctg

SEQ ID NO: 412306 - DNA, 122 bp, Homo sapiens
tcggctgagcgcctgcctaacatgggagcgcctgcctaaccctcctgactggagggtcagcggcggggagtcctggccttcaatcggccatcgccacggcagaaactggggcccgggctgcg

SEQ ID NO: 412307 - DNA, 122 bp, Homo sapiens
agcttcagggagctcgcattctcttgtgttcgtgttgccctcgtgcccatcaagtgcagtcgggacctcccaggacaagcacgaggcctcaggtcggccctgtggcgggtaggcaggaagga

SEQ ID NO: 412308 - DNA, 122 bp, Homo sapiens
ccgctccgaggcccgcctgggagggcggcgcccccacggtgcaggacaggagggctgcgccgggctgcggggtgagcaagacccctagagctgcctttcccgaccccttcctatttgggggg

SEQ ID NO: 412309 - DNA, 122 bp, Homo sapiens
gaggtggtgtttcctggagttttacgtatgtggaatcacagtgcgcactttctgtctaaccgcttgaattcattcaccacggaggctgggagactcctcctggagcgtccgcagttcctttt

SEQ ID NO: 412310 - DNA, 122 bp, Homo sapiens
ttgctttgcctgccaccagatctgagcgccaggctggccagcacccagagagcccagagccgcaggaaaaaatgtgaaaagtaccaggagaccactgggtaatcgccccagtgcaaagggcc

SEQ ID NO: 412311 - DNA, 122 bp, Homo sapiens
atcggcgcccgcctctgccaccgcgcgggccctggagcgcaggagggacccggagttgcccgtcacgtccttcgactgcgccgtgtgccttgaggtgttacaccagcctgtccggacccgct

SEQ ID NO: 412312 - DNA, 122 bp, Homo sapiens
agaaaagcctagcgtgttagaaaattaaagcaaaatccttgacaaatgaaaacaatccagcgcattttagcactgcttttagaggagtgctgtgatagtggtccggccctgccacactctaa

SEQ ID NO: 412313 - DNA, 122 bp, Homo sapiens
atggagtaggcatcccctccacgatgtatggggacccgcatgcagccaggtccatgcagccggtccaccacctgaaccacgggcctcctctgcactcgcatcagtacccgcacacagctcat

SEQ ID NO: 412314 - DNA, 122 bp, Homo sapiens
gagatagtctagtgctggcttttcgaggaacacactacaggggacacaaggagaggaacacggatgccgcagttttccaagtgcagcttgcccctcccacgtgataggtttctggcatcgcc

SEQ ID NO: 412315 - DNA, 122 bp, Homo sapiens
attaattctattttctaatagtgcacctagtacaaggctcaacacctaggttctcttacacggataaaacatgttttaacttttggattgccagagaagttagttttccaagggaatgatga

SEQ ID NO: 412316 - DNA, 122 bp, Homo sapiens
ggggacacatgagagcacaagagggcagacagaaaagggtggcacgtgggaactcacagacgccagattcaacctccagggagccagcagctccactgtggcagggccaagatgagcctggg

SEQ ID NO: 412317 - DNA, 122 bp, Homo sapiens
agaatgaaggaggcccgggggaggtcaagacagcgaatggaggaagagtgagagtactttcgatgggattaggacgcttctgcaccaccattaatgggaaaaactttactttttaaaaaaca

SEQ ID NO: 412318 - DNA, 122 bp, Homo sapiens
cccagcgtctccgcccagcacccccccggccctccctccccaccccccgcctccgagctgcggggagtcccagcctgggatctttgcctcatgtccttgggctcctgccctggctggcccgt

SEQ ID NO: 412319 - DNA, 122 bp, Homo sapiens
gcagacagacggctggagcggagactcagagacggaggccatcaactggacagctgcgtgcgagggagacatcctcaccaagtgtccccctttctgggtcatgcacccccagccccagaaga

SEQ ID NO: 412320 - DNA, 122 bp, Homo sapiens
acttctctgtggtgagttggacgactgactagccgggcgataacggcagagagcatagagcgcaggaacaagcgcaacgtccaagagggaagggccagcacgtcgggggcctctctggccct

SEQ ID NO: 412321 - DNA, 122 bp, Homo sapiens
atccccttcccatgtctggtagatgatgatggcctcaacccccaggtgactcttggaccacgtaccatccatgcctttcccattgagctactgtggaaagcccatgcttgcttctaagtgct

SEQ ID NO: 412322 - DNA, 122 bp, Homo sapiens
cgcgcgcagctgttgtttactagccggtaactgtttcagagccgcggcgcgcgcagggttcgcgctgccggggctggcgccccctccccggcccgacgccagagcagcagttacgtgacctg

SEQ ID NO: 412323 - DNA, 122 bp, Homo sapiens
aagagtgagccttgaggaattgccagggtaggaaaccggttgctaggaaactagggaaggcgtggtcttactttgggcgagtctacagggagaaaatgatgctctgacaaagatctattccc

SEQ ID NO: 412324 - DNA, 122 bp, Homo sapiens
gaagcgctgatggttctattgaagaagcagctgtttgtgtcttcacttctgacccgtggccgcactctgggctggctgtgctcaaaggtctttcactctcccccctccaagcggcttgctat

SEQ ID NO: 412325 - DNA, 122 bp, Homo sapiens
cttctggagcaaagttagaaccgcagggaagcttgaaaagaggaaacagaccagcctggccggtggaggttaaattaaactacagttctctagcaggcctcgggcttggtcaggagctattg

SEQ ID NO: 412326 - DNA, 122 bp, Homo sapiens
tgaaagaaattgaatagtaatgccagctgactgcagtttcccacatggaaggaagcaaagcgggtgaagagtgaacatttcccaggtggtaactgagctaggtgctttgaacagtatttcct

SEQ ID NO: 412327 - DNA, 122 bp, Homo sapiens
gagggcaacaatttactctggatcactttcaaggactgttgtctaaccactcattaaaatcgttcctttgtgcaactgattatctaaaagtactgagagaatgcagtacttctctttgaaag

SEQ ID NO: 412328 - DNA, 122 bp, Homo sapiens
tctgtcctcttctccatgggaatggaagctctttgctctcattgctcaagcccaaaagcccgggggtcatcctcagctgctccttctctgtcatacactgcgtcctattcgtcagcaaaatc

SEQ ID NO: 412329 - DNA, 122 bp, Homo sapiens
tgcccaggcaccgttcctatcagcgcacttgctgtcccatttcacagaagagcacgggggcgccaggagctgggaaccccatgaaatggcgccggggtctgtgcccccaccaggtcgtgggg

SEQ ID NO: 412330 - DNA, 122 bp, Homo sapiens
gctgggccccaggtcggtttcaccaccaggctctctcgcctaactcggcccacgggaggccgtttccagctgctctggctccatagctcagcctggcagcggccactgggtgccctgatttg

SEQ ID NO: 412331 - DNA, 122 bp, Homo sapiens
aattgcctatgattctggaaggcatgctggctcctgccctggcccacactaacctgagaacgtgggcagctgttgttcctcaggataactggtgggtgggcatccttgctactgggaacagt

SEQ ID NO: 412332 - DNA, 122 bp, Homo sapiens
gaggactgtggccagcaattaacaccatgtagacttccttagttcttaagtggttgaattcgctgcttgttctgtaacgttataaataatttatatctgaagacggagagcctgtaatattc

SEQ ID NO: 412333 - DNA, 122 bp, Homo sapiens
ggaaaagtcggcaggtcgcgcgcacacacttgtcgcttgaatcgtatgtgtgcctgcagacggcaaggcctatgcctctgactgcgttcacctgaaataaaatacccaaccggcaatacagt

SEQ ID NO: 412334 - DNA, 122 bp, Homo sapiens
tcttgaggcaacccccacttttaggatgatatacacgttgcaagaattcccgctattttccggcccccagtacctccccagagtccacatgtctgcctggacccaccctcagagcagaggaa

SEQ ID NO: 412335 - DNA, 122 bp, Homo sapiens
acttacaatgttgctttgtagttccttttatctgttgtacgcttcagttaacagcgcagtcgacacctccccggtgttggcatattctatccttccacgtccgtgttgtgtgttttcatggc

SEQ ID NO: 412336 - DNA, 122 bp, Homo sapiens
atttctgccctcctccagccccgagcagcctggaagccaagtggcaaggatgtagtcagccgggtgggccctgagagccggtggaatggtgtccatgttgcaggaaacaagggaaggtgagg

SEQ ID NO: 412337 - DNA, 122 bp, Homo sapiens
attgtctgtaatattttctcattagcaccaaagacccaccatctctaaaatgactaagcccgtgggcatctatggctcagtgcagcaaaatccatcttttcagcatctcaagagcatagctg

SEQ ID NO: 412338 - DNA, 122 bp, Homo sapiens
tctccctagcccggtgtgcagtctgacccagcccccacagcagaccacccccagaccgggcgcccgagtctgcggaccgctctaccgcacctggttctggctctgggccccgggccccgtgg

SEQ ID NO: 412339 - DNA, 122 bp, Homo sapiens
gcaccgcgcccaggagcagcgcggccatgctggacaccacggtggcttcactgggccgcgcgccgctgggtcatgaagtgccgcagcagggaagcctcctagtcagtggcacatgggcgttt

SEQ ID NO: 412340 - DNA, 122 bp, Homo sapiens
cccaattcatcctcaggcggactagctggaaggaaggcagactctggtgaagacgtgggccgtcaccgtcagccttcggtacttgaagagtggttatccctgctgtgttcgcttaatttatg

SEQ ID NO: 412341 - DNA, 122 bp, Homo sapiens
aatagctaagcataggatatgtagataaatgcctgtttaaggcaaggtcttcagcttacccgctatgagacttcagtttaggttcttaaaccaatgaatcccacagtgtggtcccagatcca

SEQ ID NO: 412342 - DNA, 122 bp, Homo sapiens
ccgctccgcccggccgggggacgcgtcccgcgcctggctcgaattaggcgcggccgaaggcgtgtctcccagcgtggccccgggccccaacgcgccttcgagcccctctggccggggcagcc

SEQ ID NO: 412343 - DNA, 122 bp, Homo sapiens
aacagtgagaacttgtctcaacaaaacaaaacaaaaacaaaaacaaaaacaaaaaccacacgctatggaaaaagacataaaatatgaaatatgtagggctttctgagtaaacacttaagact

SEQ ID NO: 412344 - DNA, 122 bp, Homo sapiens
gtctggagccaaatgctgtgtgagctggggcccggtcatggaaacagaaaacttccattccgtcaagctggatggattctacagaaggaattcggtgtttacagaatcgttagcagggctgt

SEQ ID NO: 412345 - DNA, 122 bp, Homo sapiens
tcactaagtacatccattactttgcagtgctgtaatgcagccattctgagaggctactgacgacacagatttgactgcctctcttcaaaacaactccagatgtaccatttggagacctagtg

SEQ ID NO: 412346 - DNA, 122 bp, Homo sapiens
tccgaagagtccgggcccttatttttccaattcttggtaaacaacaaacatgctcgccctcgcctccccgtgcagacgcctcagggccaactcgggcttcgccaggcaccgagagcagacag

SEQ ID NO: 412347 - DNA, 122 bp, Homo sapiens
tgttggcgaagaattcttgaattgaaggtaccaaagtagagtttctttaaggtcaatgaacgtaaaggaaaaggcttttgcttccaatggaggtgtgcacagcttgcactgaagaaagaagc

SEQ ID NO: 412348 - DNA, 122 bp, Homo sapiens
agccgctcgccgctggttccagcacaggctaaagagcttcggcatccagaaaaccagaagcgcgccgcgcacgcgcgccaaggagttcggcgacggccccgccccttcgggggtagggacag

SEQ ID NO: 412349 - DNA, 122 bp, Homo sapiens
tttacattctcttcactgatacacgaataataaaactatgaggtaaatgcaggcttaaatcgaataatgggcataaataaaaaaattttttgacattaaaaactcagtgtaaattgcactac

SEQ ID NO: 412350 - DNA, 122 bp, Homo sapiens
ggcttcgtccaccgaggtcccctcacccacgctgaggcgtcggaagctgcggacactgctcgcttcagggctttgctcagctgcagctggtgacctccagagagggagtctctgatgtcccg

SEQ ID NO: 412351 - DNA, 122 bp, Homo sapiens
ctctaatgaggtgggaaccacatatttttatttaaggtgggaggaaagtcatggtatccacgatattctccctgtggattgaaaagatggatgggccatcacatatgcccataatactcata

SEQ ID NO: 412352 - DNA, 122 bp, Homo sapiens
agccacgggcgtcttgccacgcgagtgcccctagacagcaacacacccactggaaacgcacgtgaacaaagctctcgcccccgggagccgctgcctgcggtttcctagtcgatcccagcttc

SEQ ID NO: 412353 - DNA, 122 bp, Homo sapiens
gagtcccaagtcaggaggcaggtgctgctggagcaggtgcaggtgcactggtgcaggtgccgctggggaggacccgaccgccccgttttcccatgccctatacctctttaggccagatcctc

SEQ ID NO: 412354 - DNA, 122 bp, Homo sapiens
ctctgaagtttctgccccaaggttatttcgccttattaacaggcttttccaccagcccaacggggcaaacaaatacgtgcttgtggtcatttggtggttaaaactgtaagttgcgtctcatg

SEQ ID NO: 412355 - DNA, 122 bp, Homo sapiens
ggggggcgcgtggggagagccggggccaggcggggaggatccgggctgcaggcaggagtgcgcggggcagggcccgaccgctcagcctccccggggctcacacgggaggagcgcgccgagcc

SEQ ID NO: 412356 - DNA, 122 bp, Homo sapiens
tgccccagtggaccttctccacgcggtgtaggttctcggaccccgaggtgaagaaggagacgcgacctgggagaggagaagagagagaggtggccatagagccacacccacggccacagcct

SEQ ID NO: 412357 - DNA, 122 bp, Homo sapiens
agcaagtggcttttcctagtgtcctgggatggctcgccgaatcccagagacccctgcaggcgattgtgttaggatccttgccagcagcagctgccagggcagggtggggcagaggggctgca

SEQ ID NO: 412358 - DNA, 122 bp, Homo sapiens
aggggctggcgttccgaggccgtgggggaagggcgggcgggggcggggcctgggcgccgccgagcccgggacccgctggaggtgagggctgagttttaaccactcctcacctcccaggctcg

SEQ ID NO: 412359 - DNA, 122 bp, Homo sapiens
gcagggctgggggtctgctgaggcccgccaggggactgtaaaccaagggagcagcgcccgcggctccagcccctcctccctttggctggggagggggccagaactgatccccgaggtgggat

SEQ ID NO: 412360 - DNA, 122 bp, Homo sapiens
tggtccttggaatcacggaataaatctaaatgctcatcgttcatgattgaagatagctcccgagtgcaatgtgttcatggtgaggccactgtgttggaaaaccctggaatgaggttttctgc

SEQ ID NO: 412361 - DNA, 122 bp, Homo sapiens
aaagcactgattcgatttaaaatactcctcccacctcttaaagttatgaacattaaatcacgcatgacaagctctagcggaacatgtagtaagagctcagtaaatgctttaccattgctgtt

SEQ ID NO: 412362 - DNA, 122 bp, Homo sapiens
ccgcgggctgggccagcgccggccccgcccctttaacccgcccgcgcccgccgcattccgcggggaagtgtaggctttaggcctcttagggcctcagtttccccgtctgttcgaagactgcg

SEQ ID NO: 412363 - DNA, 122 bp, Homo sapiens
ggaaggtggtcctgctgggctgctgcagatttggattctggccctgctgttaattagcttcgtgacccctggcaagccagcctccctgggtctctgtttcttcatcagtaaaacaaaaggct

SEQ ID NO: 412364 - DNA, 122 bp, Homo sapiens
cggggacgacgtcacccgtgaggtcccgcggcgcctcctcctaaagctcggctgggaaaccgtccgcttccccaagacttgggggcttgtggccgagttgttttagttttcctgtaggattc

SEQ ID NO: 412365 - DNA, 122 bp, Homo sapiens
cccgcgtcaggcgatcctgtcgactgccgccaagacccggcttccggctttgaggggccacgccccgctcgcactccctggcggaacctttcagtgctgcgctcgcgttgccaacccggcgc

SEQ ID NO: 412366 - DNA, 122 bp, Homo sapiens
ccacaacagtaaaggatggcttataggtggctagtacctttcatgaatgcgttgcctttacggtagcactccagggccttctgtggattgtgaatcttctcaaagagatcacctgcctgtta

SEQ ID NO: 412367 - DNA, 122 bp, Homo sapiens
tttacagtctttgtggcagcagaatatacttgtccatggttcatatcaatgctaaaattccggcagggaaaaaaatgatatgttaagcacccaaatcttcacatggagggggagggggtggg

SEQ ID NO: 412368 - DNA, 122 bp, Homo sapiens
tgcctccaagccaaacattccgggattcggcttgacacacaaggtcagtcagcttgctagcgcggaatcggccccgcaggtgctaggaggctcacttccttcttcgcagacgctatacccta

SEQ ID NO: 412369 - DNA, 122 bp, Homo sapiens
caggcaaacaacccccagaacctctgttttgctcgttcatgtgtctccgacacgcacacacgagctgcgctcagacagcgtcagtccctgtcgccaggaacacgttaatgacaaggaccgca

SEQ ID NO: 412370 - DNA, 122 bp, Homo sapiens
actatcaagaaaaaatatactgccattaaactgaattataatgccttaacgatagtctcacgtgacacatgaaccagatacaccaacctctgcttactttgaaatcgtttattagctattcc

SEQ ID NO: 412371 - DNA, 122 bp, Homo sapiens
tacccttttgccggccatccggtgttatttcagacactgttggacagatgggctgtgttccgagtggggaagagtggaaatgttttatagggcttgtcagctcactgcacacaaaatgtgtt

SEQ ID NO: 412372 - DNA, 122 bp, Homo sapiens
gaggaggggatgtaccaaacggagagaggcgataccctgtgcagaaggatggaacggagccggccatgcccagggaacacgcatgcgcaaggcgggcacacaccccccccacgcggagcagt

SEQ ID NO: 412373 - DNA, 122 bp, Homo sapiens
aggctttccaggttatgcacctaaatacatcatttttcacatcgttgtcacatgtgcacacgcttttgtttctggtattatttgtgagaggtcacttgaaaagctgaaatcctctccctgga

SEQ ID NO: 412374 - DNA, 122 bp, Homo sapiens
cagtatctttcaggatttagtcattgactgttgccttttattttaccttgtgtaccattgcgttgtttaaatgctgttactttttaacttccaaatgtttgccttatccactcaactcagtt

SEQ ID NO: 412375 - DNA, 122 bp, Homo sapiens
gatagcatgctcagaacctcctctcctgcccaagggtgtgctcaccccgcgttgcccaaacgctgcacctacatacccgtccacgagtgggaaactccgcatcagggcctgcgcgcgacccc

SEQ ID NO: 412376 - DNA, 122 bp, Homo sapiens
tgagtcagactccggggagatggcacgggctaaatataacgctgggcaggctgtccgacgcgtcattaacctttttccttcagaacaaaggcggataacccaccgaacacaaaacaaaagta

SEQ ID NO: 412377 - DNA, 122 bp, Homo sapiens
cccggcccgcccggccgctgggacgcacctgcctgttcagtcccgcaggcagaggggctgcgcctgggcctacgctcgcgatacccagaatccactcgcacctgcgaaggcgcccctgccct

SEQ ID NO: 412378 - DNA, 122 bp, Homo sapiens
ggccaccgctggctgccgcaccaccatgatcgcccacgtgtcggatgcgccagcccagcacgcagagacactcagcaccgtgcagctcgccgcccgcatccaccgcctgcgcaggaagaagg

SEQ ID NO: 412379 - DNA, 122 bp, Homo sapiens
tctgctgtcctcccctgtgctgccagcagctgggcagggcctggggtgcagagccagcctcgtgttctggggcacagcacccgggcaatggggggctgcctgggaggttctttcagggctgt

SEQ ID NO: 412380 - DNA, 122 bp, Homo sapiens
tgccattcaaaaattattcttaaggcattctttgttctcttttcactagctaaataatgccgtgcttttaacttttctttatgtgttcagcagcttttcccagttgtggatatttgaaaaaa

SEQ ID NO: 412381 - DNA, 122 bp, Homo sapiens
aggtagaggggctactcgcaacaggaagttccgcccttaaaaactccattcctgagggggcgtggttgctttgctgggccccgccccgagctgcgccctgcgagcctctgccaggccgggcc

SEQ ID NO: 412382 - DNA, 122 bp, Homo sapiens
tctttgtggtgttctctgtatttcctgaatttgtattctgtatttcctaagcctgccttgcgaggttggggaagttctcctggattatatcctaaattgtgctttccaacttgattccattc

SEQ ID NO: 412383 - DNA, 122 bp, Homo sapiens
aggcccccgggctgtttctcgggagacgggcgtttctggctagtgtctgaagggtctcggcgtggctgggattttaacccttcattttctttcttggacccacgttacagcgtcggcggaga

SEQ ID NO: 412384 - DNA, 122 bp, Homo sapiens
cgccccttgagccacacgtaaggcccggctgcacacgcgtgtcccgctccagaccccacgcgtgtccctaggaggctgccacatgacctgttacatgccacacgcgctcccgcccccacgag

SEQ ID NO: 412385 - DNA, 122 bp, Homo sapiens
agccgtggtctcttgaccacgctgctcttccataaagactccacaaacgactgcaaaagccgaaggctggccaccttctatgccgatgttgtgactccagaatgcttgcaaaggggaatcca

SEQ ID NO: 412386 - DNA, 122 bp, Homo sapiens
gggtgacttggctggcgggatcaagtgcagctgcttcaggctgaggtggcagatagtgagcgctggtggcggagttaaagtcaaagcaggagagtaattatgaatagcgcagcgggattctc

SEQ ID NO: 412387 - DNA, 122 bp, Homo sapiens
actcatggtaccctgtgcagttctggaggtccatcagttctcaagagacgccagtgtggccgaggcctggctgcttggacaggagccgtacctatccagccgagagataggccagagcgtgg

SEQ ID NO: 412388 - DNA, 122 bp, Homo sapiens
caccacgtggggccactcactgtaatataaacggtcatgcatcactgagcaacagggatacgttctgagaaatgcgtcgttaggcgatttcatcactgtgggaatgttacagagtgtgccta

SEQ ID NO: 412389 - DNA, 122 bp, Homo sapiens
aggttggcgaaggtgcgagggcgcagggggtggggcggcggccgttggaggcggagcctacgcgcccctccctccccgcacgctccgcccgatcggccagggctgggggcgctgggggcgct

SEQ ID NO: 412390 - DNA, 122 bp, Homo sapiens
ctcaggtcatccacccgcctcagtctcccaaagtgctgggattacaagtgtgagccaccgcgcccagctgccattgggtcttaattctccagaaacagtatctcagtcaagaatgcaaagct

SEQ ID NO: 412391 - DNA, 122 bp, Homo sapiens
tgcagaaagctggaggggggaattaaattcctcctacacgttccgctcccctatcctgtccggttcaaatatttcgccacatgtaatattgaaaattctacagctggcagttatgtgctcag

SEQ ID NO: 412392 - DNA, 122 bp, Homo sapiens
ctaccgagtaccggtcgtcttccgccgggaagtgccgggtccgcaggaggagcgcgaagccgagtccgagcccgcggagcccgccccctagatcgcagaaccgccttctccatcctctgccc

SEQ ID NO: 412393 - DNA, 122 bp, Homo sapiens
tcacttgttcattcaacaaatattttttggttacctactgcagtggtccccaaccttttccgcaccagggaccagtttcatataagacatagggcagttgggggatggttttgggatgaaac

SEQ ID NO: 412394 - DNA, 122 bp, Homo sapiens
atcagtgtgtgcagctacaaagtgcaggtcacagctcgcccgcacaggagcaagagtcctcgtcgtttttaatctggaaatgcactctgcttctgtgacgggtggggccgttacacacccaa

SEQ ID NO: 412395 - DNA, 122 bp, Homo sapiens
actttcacagcctgggtactcttttcttttcctcggtgtggggtgatcctggtggctccccggacctggcttgcgttgactagggagcggatcgttggtttctctgcctgcagtgacttcat

SEQ ID NO: 412396 - DNA, 122 bp, Homo sapiens
gttcccttagagctaagaataagggacagccagactctgtggcatcccttctttctgggccgggggtatccccagtcctcatgaagggggcacaccttgggtccggcagatcctgggattcc

SEQ ID NO: 412397 - DNA, 122 bp, Homo sapiens
aggggctgtcctggtggcagcttcttggggtctcatggccacctgtccttctagtaccctcgtcctccttcaggctttcaggaagcagacctagcccccaagttagctgagcttgattcatt

SEQ ID NO: 412398 - DNA, 122 bp, Homo sapiens
gatatacactgtgaagtatgtatccaattttatctatttccaaatggttatccagttgtccgaacaccatttatttaaagtccatcccagcagattgagataccgtctcgtctaagcataca

SEQ ID NO: 412399 - DNA, 122 bp, Homo sapiens
aagcccagccccacatgcgtctcccagccagcctggagctcaggagacacaggcaacaggcgaggagtcccaactacacgcacgacgaggtgtcctcggtgggaccaggtgattgaaataaa

SEQ ID NO: 412400 - DNA, 122 bp, Homo sapiens
gtctggtgcagcatcagggccagcaatcccgcgcggtttgtcatggctgtgcgcacattgcgctcctgctcaaacagctcgtccagcttgtaccactgccaagggagcggcaggagtcctaa

SEQ ID NO: 412401 - DNA, 122 bp, Homo sapiens
tgcctcccctgtgagggtgccctggcgggtgtgagcccggcgggctggagaaccgggtctcggcgccgcaggtgggtgaccgtcctccccctccttccctccgggggcagcctcctcgcggc

SEQ ID NO: 412402 - DNA, 122 bp, Homo sapiens
gatgacttttttcaaaagtctcagtggatctggattgctcacatttctgagaagtggatacggaggactggacccataatcagaggctttttgtcccattatgttatttgtgacagagacat

SEQ ID NO: 412403 - DNA, 122 bp, Homo sapiens
cagctaacaaaaaacagaatgcaaattcaagctaaagataaggctgggcgtggtggcccacgcctgcagacgtagctacttgggaggctgagttgggaggatcacttgaagccaggagtttg

SEQ ID NO: 412404 - DNA, 122 bp, Homo sapiens
catctggggcgaaaaaaaaggacttatccttggaaaagcggcttcttgagtctcaacaaccggagggacacagtagggaagtcagggctcacctaaaaccctccaccccagcagacagtccg

SEQ ID NO: 412405 - DNA, 122 bp, Homo sapiens
ccatgtggttccacccccaacccaggatttctcccatagtgataattctgatcccagagacgtctccacagttttctgattcgtggatgatcactacaagaaccatgaatgcttgtgtcaag

SEQ ID NO: 412406 - DNA, 122 bp, Homo sapiens
tggtagggaacagactgacagacaaagcagacagactctaaccaggcctcgctctgttttcgatgcaacacaaatgttttccattaaaagttccctgccccacaaacactcatacatgcagc

SEQ ID NO: 412407 - DNA, 122 bp, Homo sapiens
tgtgaaaaaaatacgacccctgcccataataattgctggacgttcgatgtaaagtattatcgactcaaaaaaaaagaaaatatctgggattcatgctcagggacccgtgtggcgcggtctaa

SEQ ID NO: 412408 - DNA, 122 bp, Homo sapiens
aaaatcctgtttcgctaacggctggtggtagcaggttgagtaccgggagggctgcaagaccgtgattgatggggaggactgcgcagaccctggcgagggtgagcccctccccggaggcgcct

SEQ ID NO: 412409 - DNA, 122 bp, Homo sapiens
ctctgccggaatggggtctaggacgagattcctcaccctccgagcctcagtttcctcatccgtaaaacgagccatctcgtggaggccgtgcgcataaaatcgcttagctccgtgcctggctg

SEQ ID NO: 412410 - DNA, 122 bp, Homo sapiens
cagtggccgggtgcgcgtgttcgcgaagcattctcgcgatgcccgagtgcgcatcagaggcgtcactgtggtgggagaaacacctggaccacggtccttgccctgagctgcttagaaaacac

SEQ ID NO: 412411 - DNA, 122 bp, Homo sapiens
ggtagggcgaggttgtacccaaaacccggtttagacggccaatgaagtcctaggaaaagccgccccgggggcacgttcaggtggagcggctgcacctcgggtcgttctaagggatgggctgc

SEQ ID NO: 412412 - DNA, 122 bp, Homo sapiens
agaacgtcaaacatctggcaaggtcggaatgattttgcgatgagcaccgcctggattctgcggtgaaagcgactgtgtgcgcgctcacggcctcgcctgtccctgcatcagcccatctcgtc

SEQ ID NO: 412413 - DNA, 122 bp, Homo sapiens
ggtggagatcagaaagtgttcttcttttgttctcaaaaggaatgaggagagtcagagtgtcgctattgcttcttgacataaagacggtgtctttgttttatgtctttatctctgaatcccgc

SEQ ID NO: 412414 - DNA, 122 bp, Homo sapiens
cagatcatcaggcattagttcaattcacataaggggcgtgcaaccttaatcccttgcatgcgcacttcacagtagggattgcgctcctatgagagtctaatgccatagctgatctgacagga

SEQ ID NO: 412415 - DNA, 122 bp, Homo sapiens
gggggctgtggtcagggcggtcccatgaccccgccactgtccccaccctagagccaccgccgctgcaccctcagcctggtccccaccctgagcttgggagcatgggccctgcagggatcctg

SEQ ID NO: 412416 - DNA, 122 bp, Homo sapiens
cagcatgtaaactgcatgagcccctcacaacatcctgtgtgctgctgaactgagctggggcgcagccgcctgtctgcaccggcagcaccatgtcgctcatggtcgtcagcatggcgtgtgtt

SEQ ID NO: 412417 - DNA, 122 bp, Homo sapiens
agcggccccactgtgtgccctgtcgcccataacaggaagtgtgtcagagccgggtgggcacggggtgggtggggcaggcccacggggctcagttccaccgagcggaaaatcatctgacgtgt

SEQ ID NO: 412418 - DNA, 122 bp, Homo sapiens
ggcaacctcagcctcctgccgcccgcaagctgggtccccaccccggctgagggcccgctgcgggggcacagggcgcgaggacacagcctagcacactagggactcacacttcatgttcttca

SEQ ID NO: 412419 - DNA, 122 bp, Homo sapiens
acatactcgtctgtgtatcctgagttccgcccgcgcctgatattagccaagtggacactccgtgaatatttagtgtccccggtggcaatgattgcaacgtccacaccattctgtccattcaa

SEQ ID NO: 412420 - DNA, 122 bp, Homo sapiens
cgacgggggcggggccgccgcggggggcggggctgcagggggcggaggctgcgcagggagcggcgcgcgagccagcgaccccgcccgggcctgcgggaggacggaaccccagccccgaggac

SEQ ID NO: 412421 - DNA, 122 bp, Homo sapiens
tacagccactttcatgcacacaacattagtgccttttaaatgctgctaaagcaccccttccgccttgtgaagttacaatgagaagagagccatctataaggatgcaggccctcacgagacac

SEQ ID NO: 412422 - DNA, 122 bp, Homo sapiens
ttttaaaatgcttgttcttccacatatcttgtttccctaactcttccttctcaggcttctcggtctgttcattgcttattctgagtgttgtcctttgctccagacttctttggtcaatacct

SEQ ID NO: 412423 - DNA, 122 bp, Homo sapiens
ttccgtcgccaaacaggtaagttattctctggccggggcggggggtttggaggcggggaccgtccagcgtcagcgcggggcctgggggcggtggcttgagggctcgaagccgggcggctggg

SEQ ID NO: 412424 - DNA, 122 bp, Homo sapiens
gaaccactcgcggccctggactggtgtgggggacattccggcgggagaggcgaggcgctgcgtttcccttcaggagacagttggctagaagaagaaaagaagtgttcgttcaaattaaggag

SEQ ID NO: 412425 - DNA, 122 bp, Homo sapiens
ctcagactctgagtctcaccctaagaagtactctcatagtttcttccctaagtttcttaccgcatgctttcagactgggctcttctttgttctcttgctgaggatcttattttaaatgcaag

SEQ ID NO: 412426 - DNA, 122 bp, Homo sapiens
cctgccagtcacagtactacgtgtttaaatgtatcatcttatttaatgcttataatttctcggtgagtaggtgatgttagtaatgccaaataacataagagggaactagagaatgatttact

SEQ ID NO: 412427 - DNA, 122 bp, Homo sapiens
ttttataggaaggctgttatatgacgacaccatctctttaaaagcaaagtctcaccctggcgtggtggctcacgcctgtaatcgcagcactttgggaggccgaggcaggcggatcgcttgag

SEQ ID NO: 412428 - DNA, 122 bp, Homo sapiens
agaagtggctgctctccgcgctgccatttccagaaccgttcggataaaggtcatccttctcgctacccgtggaatccgaaagtgtcccttcacggttctcactggaggcagaaccggacatc

SEQ ID NO: 412429 - DNA, 122 bp, Homo sapiens
taatctacagcgagacctcagcatggcaagcaaggaatcactaaagccaccagggagatccggatgcactgatacgatccagaaacatagcgagtccgggaactgatgcggactttgaggca

SEQ ID NO: 412430 - DNA, 122 bp, Homo sapiens
aacatgccggtaaacaaataaaaaatcaattaatcaatgaatgaatgaatgtcctgaactcgggcttgaaggagaggatttggacaaagatagaaatggagatgagaatgaagggcagatgt

SEQ ID NO: 412431 - DNA, 122 bp, Homo sapiens
tggtgcctctggacattttccgacagcagggatcgttgggtgaggttagcagcgccagcccgggttagcggaagcagccttcaggtctcctaggagagcaggtttatgagcatgcgcagcgg

SEQ ID NO: 412432 - DNA, 122 bp, Homo sapiens
agggaatgtgctgtacccggcgttatttaccgcagctctgcacgtgaggcgcagcggaagcgcatgggagtcgcggagagcgtcttttggacagcttatctcttggcaagattaagccggct

SEQ ID NO: 412433 - DNA, 122 bp, Homo sapiens
gagcttccagggtacctctgggtcccgtggggtcagtcacagtgggcaggagcccgagaccggtgggtgggcttctggtatcgcagtggggagagaaaccttgaaccttggagagtttgacc

SEQ ID NO: 412434 - DNA, 122 bp, Homo sapiens
ctcaagactatatagcattggcatttacaagcttatgctgaattttagttgtttacttgtcgggctcctccacggacaatgaacaatttgagaacaagaactatggcctattcatgacatgg

SEQ ID NO: 412435 - DNA, 122 bp, Homo sapiens
cccggaggggagcaagggcattttcgtgttctctttttttctctttgctgtgctagaccacggggcttgttgtgggttttggtcgcattctctctggagtattcggattgctatcactggct

SEQ ID NO: 412436 - DNA, 122 bp, Homo sapiens
ctgagcatgtgaatagggcagtcggaagaccatgtgtgtctgtggcttttaaatacaccccgaacgtctatctcttttaactggagtatttaatttatttacatttaatatagccactgata

SEQ ID NO: 412437 - DNA, 122 bp, Homo sapiens
tcttattaactcaaagaattcccaagtctggcaaatgtgatgtttggccctcctgcactccgtttgcccaatttttttgaagcccaaagtgcctcaggtatgctttctcatttgtccacatg

SEQ ID NO: 412438 - DNA, 122 bp, Homo sapiens
tctcgtgacttcaactgacttcgccttcttcttccatttctggagacttaaaaacaaaggcgacaggtcttcttggcagccagtgtcgaggccaattgcagaaagcggtccccttcttccca

SEQ ID NO: 412439 - DNA, 122 bp, Homo sapiens
caggggccaaatttgtgttgtctcccagcacggctgtaattacactgtagatcaaactgacgccttagttttcagtggcttttttccctctccgatgtccctgaagttgccaggctcaccaa

SEQ ID NO: 412440 - DNA, 122 bp, Homo sapiens
gggaaaaggagagagcctgctggcggcgaagctgcaagaggcagctgcggagggagcgcgcggcgggcctgggggagcgctgggcgggggcgggcggtgcgggcagggctatacccgagctg

SEQ ID NO: 412441 - DNA, 122 bp, Homo sapiens
agccttcgggggggcaagttccgaaatgcagctttggaaggatgccgaggcccgagggaccgctcatgctagtccagcacacggaggccggggcacctcagggacagtgcagtcgtctgtac

SEQ ID NO: 412442 - DNA, 122 bp, Homo sapiens
tattccccttcctgctagtcctggtggatctgcagtacgaaggtgagtcctgccctgccccggccaggaagtgggctcccggaccaggccccccgcgctttcccgtctgcgcccgggcgcct

SEQ ID NO: 412443 - DNA, 122 bp, Homo sapiens
tgacctcatgatccacctgccttggcctcccaaagtgttgggattacaagcgtgagccaccgcgcctggcctagtgatttccttagcaacaaaacgacggagtttatcttctttaaagatac

SEQ ID NO: 412444 - DNA, 122 bp, Homo sapiens
cgagtgtgtccttgttggctggcgtgtgggtaggtgtcactgtgtgagaaacagaacctccgtggtctggtgaatgggacctgacccaggctggaacccttgctctgcctcggaggctgtgt

SEQ ID NO: 412445 - DNA, 122 bp, Homo sapiens
acactgtatcttgaatcatggtccttcccctcctagttttggtctcttccgttggagaagcgtgggccgtgtggcctcaaagcgccccgtggctggagcagttagaaacagccactgtggct

SEQ ID NO: 412446 - DNA, 122 bp, Homo sapiens
agagcggggctggggagagggacccacccccggcgcgcccggctgcccggttgcgcggcgcgggctcctggccccggcccgctcacaccctcccgctcggctccaacttgcaggcgtccatg

SEQ ID NO: 412447 - DNA, 122 bp, Homo sapiens
gctgacattactaggaaagagctcagatgtgccacgctcactctgagtagcacctttcgacgtgaacgttgggaccctgacctgcagcgtctttgggagatgggccatcacacgggttcgac

SEQ ID NO: 412448 - DNA, 122 bp, Homo sapiens
ttcctgggtgataatgcctgtatttaagtaaagtcatgcacaggtctttccttaaaaaaccgagtcataaggggagaaagtgcttggttgcagaataaaacccttcctggactcttctccct

SEQ ID NO: 412449 - DNA, 122 bp, Homo sapiens
agatataaataaaatatagttaaaaaattacaggagattacaaattatatatgtaaatctcgagaggtcaaaaatgacaaattttgtttatttacaaggttttatttatgtatttattcatt

SEQ ID NO: 412450 - DNA, 122 bp, Homo sapiens
agattcaaaaccatcaacaaacaaaaacagaaagcttgctttctggcatctacgttttgccgttgaatatttttgagatgtccacataagttccaaggagcagctgcagccacaccaccacc

SEQ ID NO: 412451 - DNA, 122 bp, Homo sapiens
gccagtcagcacggacttcaagaaccaacttcattccttgcaaggtgctttagttctggccgttagggcggcaaccaaacagaaacctgccccgcctctgggagagaaggcggatccctaac

SEQ ID NO: 412452 - DNA, 122 bp, Homo sapiens
tttcagaggtggaggagatccctacagatgaggcaccaggaaaagcttcaaggtggaggccggtctgagtctggcctcaaaggatgaaatgattcagataaacagcaaaacaaagcaacagg

SEQ ID NO: 412453 - DNA, 122 bp, Homo sapiens
agctcatgggcaaactcctgtctctcagaaggtaaggacggtacctgtcgtaacatcggccgtgtagtagagatttggcgtagctgtccattgacgtatccgggtcttcacttctgtatcct

SEQ ID NO: 412454 - DNA, 122 bp, Homo sapiens
tctcctgatgcgctgttttttaagccggtcggaaaagcgcagtatcaggtgggagtgacccgattttccaggtgccgtctgtcacccctttctttgactaggaaagggaactccctgacccc

SEQ ID NO: 412455 - DNA, 122 bp, Homo sapiens
tgaggaggtgtgatttcagaggccaagtacagaatgagtgaacaactgggagagacacatcggctgagattagagagatggtccggtagacaaaagtgtaagcatgagacccgaggtaggac

SEQ ID NO: 412456 - DNA, 122 bp, Homo sapiens
ccaaattctgtggggtgctctgtggggtggggaccagccttagagttctcatcggaagcccggggtggctggatgggggcagatgttttcagggcaagagcggcttggctcgcctctctggt

SEQ ID NO: 412457 - DNA, 122 bp, Homo sapiens
ggcttgtgggaggagcccggggcccagaaggaagtggggtcaggggctcaggctggccctcgggctgctctgacattgggtgggcactcgctggatggaatcacagttaacacctcgatccc

SEQ ID NO: 412458 - DNA, 122 bp, Homo sapiens
ccagtcggcgtcccccgtgcacctttcccttggtctaagggccaaccagtgatctgctgccgtcctgcgcctctttcccacaccctgggtctctaaaaaccagttcccagctgtccgaaagg

SEQ ID NO: 412459 - DNA, 122 bp, Homo sapiens
ttaagaaaatagataaaaaagtctgtcttccttgacaggtgcaaagggtgaaaggcaccccgtccataagagtgagctagggtcatattgtttctcagtggtgaagtactgtagtcaactct

SEQ ID NO: 412460 - DNA, 122 bp, Homo sapiens
taaagccgccgggacagcgccgaccccgccccgccccgccgaccccgccctctcccacctcggccgcctcccccgcctgcatcccgggccacagtccccgttccgccacctcgctcccggcc

SEQ ID NO: 412461 - DNA, 122 bp, Homo sapiens
gcttgcgtggcgctttcccacccgtggacttgcgagcagtctgcttggtacgagccattgcgaacttctaaaccctgctaaatgacgaaaaaacgaaagtctagcctttcgtacccgtatat

SEQ ID NO: 412462 - DNA, 122 bp, Homo sapiens
ccaaggacctctgatcagcaccaggggagaggaggggctgctcagggagctggggtcctccggattccatccacagcagggccagactctccccaggaaatgggacagggtggcagcggagg

SEQ ID NO: 412463 - DNA, 122 bp, Homo sapiens
ccggacgccgagcgggcaatgcggctgacggagagtgaaagtgcggcggtgggaggcgcgcgccgggcgctttagaggggagagccaggcggggcggggcggggcgcgcggtgaggggcggg

SEQ ID NO: 412464 - DNA, 122 bp, Homo sapiens
aaaacacaattagatgcagtttcagaaaaggttagtcacttttttgtcatttctggacagcgataaaaggttgggtaaaatttagttttatttcaaaattagaagaatgcgtttttctatta

SEQ ID NO: 412465 - DNA, 122 bp, Homo sapiens
gcatgaaagactggcccgtgctccagctccagatccctattccaattccagagcagccagcgcaagtgtccaaatctagagaccatttagaccagctctcatgactttacacatcaacccac

SEQ ID NO: 412466 - DNA, 122 bp, Homo sapiens
gagcccgcttttctgggactgtgaacaacagtcacctcttctagggaagggacagtggaacgtactgggcagggctctactgggtagatagtggaacatactgggcaggcctgtggtgtgtg

SEQ ID NO: 412467 - DNA, 122 bp, Homo sapiens
ctgtctgtcctcgatctcggtgtgaggtaggcgcctttgggcaagtactgctggctccagcgtccggctctgtcgcctgccagtgggtccttgggcgtcactccagccccttgctgaattct

SEQ ID NO: 412468 - DNA, 122 bp, Homo sapiens
tgtgatccgcccacctcagcctcccaaagtgctgggattacaggcttgagacacggcgcccggccaaagccagcagttttcaaacccacaacaggtgtaagacaccatgggcccggcaatta

SEQ ID NO: 412469 - DNA, 122 bp, Homo sapiens
tcgtgcgtgcccacgagcatgcgcttcggagggggcgcgccaggccgcgagacaccagtgcgcatgcgcaccagttgttccagccaaggatccgcatcccagggttcagtgaaccggtacct

SEQ ID NO: 412470 - DNA, 122 bp, Homo sapiens
cattaacagagggcaggggcgccggggaggaggggaagggtgaagacgcagagaagtgagcgagaggtctcagcagacgaagctggagcgcccactcataatttccacattggccattggtg

SEQ ID NO: 412471 - DNA, 122 bp, Homo sapiens
tgggagcgtcctggtggggaaccgcattcagatccccaatgactctcggcctgagaaccccggaccactgggccccatctcgggggtgggtggcgggggcctgggcagcgggagcgacgaca

SEQ ID NO: 412472 - DNA, 122 bp, Homo sapiens
gcaggcgcgctctgattggtgctctggtcgcccgcctggctggcaggctctgagccgctgcgctgctcccaagttgtgtttgttccacctcacaaaaggggaaaaatattaaaattccccgc

SEQ ID NO: 412473 - DNA, 122 bp, Homo sapiens
gtccctgggggctgaagacccaatggaagtaactgatggatcgcaaattggaaatcgtaacgtggccgacagacctgatcaggaaaactcgcgtccttatatgaaacagccccgaggccgcg

SEQ ID NO: 412474 - DNA, 122 bp, Homo sapiens
ggagcacagcaggaggtggccggcccctggatttatggccctgtgcctgggtgggtgagccggagctaaggttacccgggagtcagcaccgtatttatagcaggaactctcctgcatcaagt

SEQ ID NO: 412475 - DNA, 122 bp, Homo sapiens
ctcggggggcggagcaacatcccaaacgagcaaacaatggtcattgacatctttttctctcgcccccccaacccccgccccataatggaggcaaaaaaaggtaaaaggggcagttgggtgtt

SEQ ID NO: 412476 - DNA, 122 bp, Homo sapiens
agccggaggcatcatataacccgacttcaaaatgcaccatgccagaggcatcctatcactcgacttcaaaatgcaccaagccggaggcatcatgtaacccaacttcaacatgcaccaagccg

SEQ ID NO: 412477 - DNA, 122 bp, Homo sapiens
agtgggcgggcctcagacctggaagcctcttccctgggacaatctttctcccattgagcccgcctccctcagattatcccatgtggacccagggcctgtccccatcctcagccagcccagag

SEQ ID NO: 412478 - DNA, 122 bp, Homo sapiens
caaggtaatacacagattcatcaccctccgcaggaactatcctgctggctcttgcttgcacgggctccttgctttcttggtgtggctcttagagtcagcagacatgggttcaaagtcagatg

SEQ ID NO: 412479 - DNA, 122 bp, Homo sapiens
ctcctggatgtacagccatgcccacaactgtgagcaaggcagacgaagcccctgccttctcggagcttataatctagtggcagaatcatttcccaagcccacaatgcagacctaattctgtg

SEQ ID NO: 412480 - DNA, 122 bp, Homo sapiens
tccgtctcaaaaaaaaaaaaaaagttatttacaaaatcagatggtgatttggatttggtccgtaggctgttgtttgccaccttacactagagaggagacacaagacagaagaagcacctggt

SEQ ID NO: 412481 - DNA, 122 bp, Homo sapiens
taagggcaagagagcaaaggatgctgcatcatcacccaggctggcctcttggccagcaggcggagagataagaacgttgctctggggaacgagttccccagcagtaactgcagtctctgttt

SEQ ID NO: 412482 - DNA, 122 bp, Homo sapiens
catgacaccccctgaatccttgcagcaccagacaaaatcatccccttctgcccactctatcggaacccgggggctgcaggaaccctcatatccttccaaaagactctcctccacccctttga

SEQ ID NO: 412483 - DNA, 122 bp, Homo sapiens
gcccggtggcgtcctgggatttcgtcgtcgcaaagccactcgttttttcccgagcagtcacggttttgcatctgtaaaatgggacggttcatatctgccctcttgggactaaaagagctatg

SEQ ID NO: 412484 - DNA, 122 bp, Homo sapiens
gggggagccgccgggacaccaaaataggagctgcttgtggggtggagcggcactagctggcggcttccgagcgcctcttccaaagatggtcagaggggccggaggcgtccccgctcccgctc

SEQ ID NO: 412485 - DNA, 122 bp, Homo sapiens
ccccttcctggggaagcgaatggtcccttccaggcgggtggccatgttgctctaataaagcgggaggggcggcggcgtggggggagcagatgccgctggctgccagcgggacgccggcgagc

SEQ ID NO: 412486 - DNA, 122 bp, Homo sapiens
cacctctctgatctgcgcatgtgctgggctacgcccgggcgcaagcgccaagagcggctgcgtctatggtcatgacgtctgacagagcgtccacccgtcttcgacaggactctatggttctt

SEQ ID NO: 412487 - DNA, 122 bp, Homo sapiens
ttatctccatttaaaaggaaaaaccaaagttcaaaaagaggaagtatttgccataagtcccgtgttgataagtggtggatttctttgcaggacctatgttgtctgcctctgcagatggaata

SEQ ID NO: 412488 - DNA, 122 bp, Homo sapiens
cccggaaaaatgggctgtttctccgccagctaaattggtcctgggccttctccactgagacggccgctcttgtccccttctcaattttcctgttcccaaagggcctttggcctcccaaaggg

SEQ ID NO: 412489 - DNA, 122 bp, Homo sapiens
ctcttcaaaaaccacgcagcatttgcctaataagctgacgctctcttgacagctcgattgcgtgctgcctctgctcctgcataaatcatagggccctgccaaggaacgaggggcagaatttt

SEQ ID NO: 412490 - DNA, 122 bp, Homo sapiens
gcctcacacccatcttcttttatctaaaattctgaattagctatgaatattctcattttacgaatgaggaaagaaatgtgatctgagctaatgccttgtgtcaacaggtatattacactaag

SEQ ID NO: 412491 - DNA, 122 bp, Homo sapiens
gggaaaggaaggagcctagccggggagccgggctggcagccgccgcgggaggaatctgagcgtgcagcccgcgcggggggagcggcggccgccgcggaggcggcggcgcgggagggcggagg

SEQ ID NO: 412492 - DNA, 122 bp, Homo sapiens
tgccaatttccagatggaactctgcagctatactgagttcactccttttcaaaatctgttcggcaagtgctcccagggctggtataagctctggggctcgtttgtttttcctggtaaccatg

SEQ ID NO: 412493 - DNA, 122 bp, Homo sapiens
gggcctgcccagcctcccgcccagcccgggcccgggtcccgccgaggcaggtgtgcgtggcggactagctctcgggcactcggctggcccagctccaccccgaacgccaccgggccaggcca

SEQ ID NO: 412494 - DNA, 122 bp, Homo sapiens
tgcgccccgaggtgggggcgggggctcccttcttttcccctccccttaggtcgagtttcacgcgcacgtgactcgcccgctggtcccggacactctccctctggcacagccccagcacctac

SEQ ID NO: 412495 - DNA, 122 bp, Homo sapiens
gcagcgtggcttccatgccgaagcctacgggggcggggggggcccgcgtctcctgagtgtcggccggagcaaggcgcaggctgccccacaccgcccttccagacctgctccagccccaaacc

SEQ ID NO: 412496 - DNA, 122 bp, Homo sapiens
tgttgcagtggtaaaaactcgccttccgaggcagaaccgtgttaccgtccttttcctaatcggggggaaatttcccagagaacatgacggagaagcatctgtgtgagagtggcatgcggcgt

SEQ ID NO: 412497 - DNA, 122 bp, Homo sapiens
tccattggataaatggcgaggaaacgtatactccctcttaaggaacacggtgtcttccttcgtctccgggttcccgagaccccagagtcactgacctccgtccctcagctttcggggttcgg

SEQ ID NO: 412498 - DNA, 122 bp, Homo sapiens
cctacagaaaaaatgtccaaactccttagcatggcatgttaggcaccagcatgaccctcccggtgctgggtgctaaaacctccaccttgaaggaagtgcagcaaacccattcattccgctct

SEQ ID NO: 412499 - DNA, 122 bp, Homo sapiens
ggtcctcagctccgtgccacaccagtctggcctgtaggcccgccccagcccgcccccgcccgcccccggctccgccctcaggctggcacccactccgcccccagcccaaccctcgggcccac

SEQ ID NO: 412500 - DNA, 122 bp, Homo sapiens
aggatggtggggccggtaacccaacatggggcccaggagcgggagacatggccggaggggcggcgaggaacgcaccggggtgggctagtttggaagggagctcggggaacaggcaggggact

SEQ ID NO: 412501 - DNA, 122 bp, Homo sapiens
agaactgtatcataataaatgtgggtggatttaagcctctgagtttgtactagtttgttccggcagccctaggaagtgaatgcaatgggcgcagcatttgatggccagcctggcatccagcc

SEQ ID NO: 412502 - DNA, 122 bp, Homo sapiens
cacctggcggcggcggagggcgggcagaaggcgagcgtgggctgggattggctgaggcgacgcgggtggagggggcgggaaggaggcggggagacggttgtcgggctggttcctgtgctgga

SEQ ID NO: 412503 - DNA, 122 bp, Homo sapiens
cattcctgccgagggtgcactggcttggggcagaagtctctggatggctccagcctgtcccgcggagccggccccaccactcacgtcttcccaccggaggccagcacctcgaggagcagaga

SEQ ID NO: 412504 - DNA, 122 bp, Homo sapiens
agcgcagcatcccccacccacccccactcccacccacccccaccctcaccccccttcccgcgcagggatagaccaaggcttcccgcagaatcgctaaggagcgcctcctggcggcctggccc

SEQ ID NO: 412505 - DNA, 122 bp, Homo sapiens
cctgtctttctgcaacctgcagctctcgctttcctgctgtgactgagccagtgggatcgtcggccaggagagggcgcctcactcagtgagacataaatccaacgcaccctatgagggcacta

SEQ ID NO: 412506 - DNA, 122 bp, Homo sapiens
tcagggctggaccagcccggactggagcagggtgcagcctccagggttgctgggcagcaccgagaccctttgagcaccgaacggataaactacgggagctttccgcacttgcacattgttcc

SEQ ID NO: 412507 - DNA, 122 bp, Homo sapiens
ggggtgcagccggggcgcggggcttctgcccgtcccgggagcctttacggagtttcctggcgtgaaacgggtgcctcccaagcatctcctggagcaagggaagccaggaagggaggcgtttc

SEQ ID NO: 412508 - DNA, 122 bp, Homo sapiens
gggggaggtgggtgggtaaggtcagggcttctgattatgaggcatttcttccgttcctggcgctggaccgaggaagccctttacggatggatgccatccttacgctcattttacagatgaag

SEQ ID NO: 412509 - DNA, 122 bp, Homo sapiens
ccagatggccatttccacgaattcatgtttccgttcggcggccggcgtccctcgggtggtcgcatgcaatgagtgcatctttctcgagaacaactcttccgcggaaagtcattgctgacagt

SEQ ID NO: 412510 - DNA, 122 bp, Homo sapiens
ataggtagaagtttcttaaagtgatgtttttatgtgatgatactgcccatactagaagagcgtggggcaggagactgcatggcagagcagaaacggcacatactgcaagctaactctcttcg

SEQ ID NO: 412511 - DNA, 122 bp, Homo sapiens
ccttcccagcacatggatgcgttcataacccaggaacttcttggagcctctctgtttcagcgttttattaaggttccattatgcagacatgatttatttaaataccggtcttggtgactgaa

SEQ ID NO: 412512 - DNA, 122 bp, Homo sapiens
cttagcagcttcgctgtaggactttattgtcaaatttaacacatgcacatttgttcccagcgcttggccccaaatacacacacacgtacaaacacgcaggcatccacagaaaacgcgactga

SEQ ID NO: 412513 - DNA, 122 bp, Homo sapiens
gggaatttttgtacccagcttctcttgaagggcccctgaatagtctgtaaaagggatggacgcccagttgcagaaacaggcattgtgcaaggcacttgtgtgtgtgcactgaaatggctggt

SEQ ID NO: 412514 - DNA, 122 bp, Homo sapiens
ggggaacacaaacatcacatgctggtagagggtctgccccaggcaaggtagcagctgctgcgcggatggcgagaagtcagggtggatcttgtagcgccgcagggcgggcacccaggagcaca

SEQ ID NO: 412515 - DNA, 122 bp, Homo sapiens
tcgtagctcgagagccacgatctgatttcagggaccgtgcctatgtgctgagtcaaaccccgccgctgggctgggtctgcagccgggccgctgagcacaatccgctgtggttaatgattaat

SEQ ID NO: 412516 - DNA, 122 bp, Homo sapiens
gaagttttgttttctttttaaccacgaatgggcatgtagttatttctctcaccctttaaacggccagggtttcctcagctgcaccttcccaacaccctctccaagaacagagcgtggcttgc

SEQ ID NO: 412517 - DNA, 122 bp, Homo sapiens
tggccgggtggcaagacagggagtgtaaaggagaggaaatagtttatacaaatgcacagacgctggaatagtcagggagttacatgtgggccagtattttgagaatgcagtctggtcatggg

SEQ ID NO: 412518 - DNA, 122 bp, Homo sapiens
ccacagccgcatgaagcgtgaggttagcgcacacttccatgaggtgctgaggctgaaggacgagatgctcagcctctcgctgcactatagcaatgcgctgcaggagaaggagctggccgcct

SEQ ID NO: 412519 - DNA, 122 bp, Homo sapiens
gggcaaaggcaggccccacactccaggctgctccctggcctccctacagcaacaaagggacgttgagctgagagcaatacaagagaaagagccctaggagggctggaagtccaaatgcctgc

SEQ ID NO: 412520 - DNA, 122 bp, Homo sapiens
ggtgcatttaaagaggcatgtacaatgagccctgttggaattcagagaatgaatgaaccacgtggaggctttagggaaggcctctcagaggaagcagcatctgagctggatcttggaaaagt

SEQ ID NO: 412521 - DNA, 122 bp, Homo sapiens
ccttgcgcggttgcgtagcagctgcgaggacgcggggcgagccggaagtggagtgcgctgcggtgcgagctgggccggcggggtggttcgagagcgcgcagagtccagactggcggcagggc

SEQ ID NO: 412522 - DNA, 122 bp, Homo sapiens
gcaatttccttacgccttcctgaaaacgaaccctgactgcccacggggcagctgagcccccgaggctctgttgctgcaactgtgctcatctccaggtggctgtcaaggtgctcatgccttcc

SEQ ID NO: 412523 - DNA, 122 bp, Homo sapiens
attcactatctgtggatgaagatctccaatcttgggaagcgactctgcagccaggataaacgctggagacagcacgatctgctctaactcagcagggtctgcgttcttggcttggaagatga

SEQ ID NO: 412524 - DNA, 122 bp, Homo sapiens
gccacctgcctgagggaaagggtttttgatcataactcaggattctcagcacctcttatccgatagctttggaatgaatgacaaggccttcataacagccactgcaactgctgtctcctttc

SEQ ID NO: 412525 - DNA, 122 bp, Homo sapiens
cctcctggcttcccagttaagattggtgagaccgcacggccatttctcctgagcccgtggcgggccgaccggggtttagatgaggtcggggtggggctgaggctgaggtgtgaggggctgag

SEQ ID NO: 412526 - DNA, 122 bp, Homo sapiens
cgtgagcaaacaaatcatttcttctagttgcttgacaagtttttggttgtgctgtttctgcggggagagtcaaaggaaggtgaccaaggatggccccctccactctattccccagaccagga

SEQ ID NO: 412527 - DNA, 122 bp, Homo sapiens
ctcaccagtttcgtagagacctcctcctatcagctcttagccatagagtaagagccacagcgtgctctacagctttgctctaaacattttcaacccatggagccaatagggaggtcatggtc

SEQ ID NO: 412528 - DNA, 122 bp, Homo sapiens
gcgcctcaaagctgagggggcctgggggcacggccagcgacaggctgctgcccagtccgtcgccgcccgcgtctccctccccctcccgctcgcgctcccgctcaccctgcagctgctccgtg

SEQ ID NO: 412529 - DNA, 122 bp, Homo sapiens
tggagaggtgagtaggccccgagaagaggaagcaggctgctttagcttcagggaaaactccggagttgtcattagaggagtcctgggaaaagctaaaataaagaaaattctagggtggtctt

SEQ ID NO: 412530 - DNA, 122 bp, Homo sapiens
tctacaggcaagctgtttagtgagaaagaaagggccctgcaaagatcctccccaggtggacgggcagcccccaagcctgtattgagctcccggacgctgctcctggggaagggcctgccgag

SEQ ID NO: 412531 - DNA, 122 bp, Homo sapiens
tcgaacccggcgtcttgttctgccagccctggtgactcatcctccaggggctctggagaccgggatttggggactgactgagggagcgacgggtgtcaccctttcccttctcaagatggcgc

SEQ ID NO: 412532 - DNA, 122 bp, Homo sapiens
gattctgggagacggaggaggagacgccagcatttcgccccctgcacctccagcgggctgcggtccgctcccggcctcactcgagcaggccccgccctcccagaggcagttagtccaagtca

SEQ ID NO: 412533 - DNA, 122 bp, Homo sapiens
ctctggagatccttccgtccgtccctacaggagaaggctggcccgggctgctccactccccggagctgcagactgagtcgccaggtttctgtgccttcaaagccctgcgcgacggccacacc

SEQ ID NO: 412534 - DNA, 122 bp, Homo sapiens
ctggaggagtggagcagcacccggccggccctgggggctgacagtcggcaaagtttggcccgaagaggaagtggtctcaaaccccggcaggtggcgaccaggccagaccaggggcgctcgct

SEQ ID NO: 412535 - DNA, 122 bp, Homo sapiens
aaccctcggctttgcaggagggtgcgtgggggctggagggtccctggaagccgcagggagcgcgggcccgggtgggtcctggtaccgggtggggagagcggaaccctcccaaaacttggggc

SEQ ID NO: 412536 - DNA, 122 bp, Homo sapiens
ctgccagacctgtgagaaagcgatgcccattgtttaagcccctggtctttgatctgttaccgcagcgcgagctgaccacgcactcagtgtgaggcgatgacctttttctcaaccatgcgcaa

SEQ ID NO: 412537 - DNA, 122 bp, Homo sapiens
gggagagacttcgctgggcagatgggacaccgtgtgcagggccgtcatggtagtaggggccgcctgccctcgggagacgcacgcgtgaatgcggagcgggctgagccagtcggcgccggcgc

SEQ ID NO: 412538 - DNA, 122 bp, Homo sapiens
gttgggcggggctacggggcttgtgatgccgcccgctgaactttgtgacacagccgcttgcggagacaggaagcggtcgcagcacgtcaggcccgccctcttccgcggccgcggtgggaatg

SEQ ID NO: 412539 - DNA, 122 bp, Homo sapiens
agctccaggagcgtgttgtgcacggcggggcgctgcgctcggccttagggaaagaaggcgcggctgtctccccggaccccaccgttagggacccacacctagaggtgagtgtggcgtgagcg

SEQ ID NO: 412540 - DNA, 122 bp, Homo sapiens
actcctcaccgcctccccggccgccccctgggtggaagtgcttggggtggacgccttaagcgcggatccctcggcgctggtgcccgccgccccttccctgcctgggaggcagacgcagacct

SEQ ID NO: 412541 - DNA, 122 bp, Homo sapiens
ggacccggcactctgtcagttccgtccccggtcctgggaaccgctctttaccccactctgcgtgtctgccggaacctggctgggaagcgctacttgctgccctgccagcccgggtgagggcg

SEQ ID NO: 412542 - DNA, 122 bp, Homo sapiens
tctgtgcttgtttttctacgtttatccctgtcgctttccccacttattctgcaggcatggcgcgcccccagtgccggcttggtgccagggctgggagatccgggggtgaatcgtgagcccgg

SEQ ID NO: 412543 - DNA, 122 bp, Homo sapiens
agcctgggccttggcggccaaggggaaacttgggagcctcgggactgttggccaccggcccgtgggaggagtaaaggcggccctggctggcaggccgagggtgtgacgcgccggcccgccct

SEQ ID NO: 412544 - DNA, 122 bp, Homo sapiens
ccctcccaggaactggcgccgcttgccccgagctccgcctacttcgtcccgggcttcccgcgccgggaactcgtgctgctagtcccgccctggccccgcccaccgcgctactggccccacca

SEQ ID NO: 412545 - DNA, 122 bp, Homo sapiens
cgcagaggggcggcggggcgctgaccgaggtctaggtctcgattgccgccggtcgagccgcgcagtttgcctgcagacctcggtcccctgcccgcgcagcctcggctccatcaggcccggcc

SEQ ID NO: 412546 - DNA, 122 bp, Homo sapiens
gtatccagtaggtgtctgaccagggcctccagagtgccagctcggagccgtcgggaggaacgtgggggaggcatagggacctggagaacacagagagatgatcgctaaccctttctcccact

SEQ ID NO: 412547 - DNA, 122 bp, Homo sapiens
tcttctgaacatgagctgacatagagtagccactcactaagggtctgtgaaatgttgtcacgaactgtgctccagccttggtgggcttgttacagtgagccccctgcatgcactgcttcctc

SEQ ID NO: 412548 - DNA, 122 bp, Homo sapiens
gaaaatgaattgcacataaacaaaagcctagtgacaaataaatggcactcataacagatccgcaactaaacatcaacaacaacagtaattatcaattgtgagtactttctttgagccgcatc

SEQ ID NO: 412549 - DNA, 122 bp, Homo sapiens
cgaggcgcttggcacaaagcctagcatataatatgcgcttaagtgtttgttaaataactacgggctctctcagagtcggccccttccctttaggcgccggttttgtaatctgggaaactttg

SEQ ID NO: 412550 - DNA, 122 bp, Homo sapiens
cagagaacagatgttaacatgaagccaatgtacagcctcaacagctgcataccagacaatcgccacagcggctgatcgtcgttaagacatagcgtggccggaggcaaatgttaccctttatc

SEQ ID NO: 412551 - DNA, 122 bp, Homo sapiens
ctgacatgagcagtctggacttcaggataaagctgcaatgctcaccacgagggacaaacccgcgtcctgacgcccagagcacatgcccggcccctgcggcctccccttcatggcctaactct

SEQ ID NO: 412552 - DNA, 122 bp, Homo sapiens
agacaagcgagacttgggctgctgcgtccgtcctattgtttagacacttgccaggggctccggagtcggcagagccaccgagtccccgctctgagtcgtcgccctccctctccccgacctcg

SEQ ID NO: 412553 - DNA, 122 bp, Homo sapiens
cacagacgtgacccagcaaagcccccgcactccaccaagcccctagaatgacagcaggctcgacagaagcttctcccgaccagcacccaggtctcggtcctcgggaggatcccacagagggc

SEQ ID NO: 412554 - DNA, 122 bp, Homo sapiens
ctgtggcttcattcctaacgtcagagagacaacaaactcaccgggaaaaatgaacaactccggacccgccacccttaggagctgtaacacggccagggtctgcggcttcacttccgaagtaa

SEQ ID NO: 412555 - DNA, 122 bp, Homo sapiens
cggcttccatggtcggcgcgcccagggtactgccgctttcaagtacagtcaggcaattcgcgcggcacgctgtctctaggcatctgaaaaaagaaaaaagaaaaaaagtaaagtatctggca

SEQ ID NO: 412556 - DNA, 122 bp, Homo sapiens
ttgtggacgcctaacttgcgcgctgagatttccggcgtgggagcagaggtctgagtcttgcgtgggtcctctatatagggtgagaagcgtggcgctcggttcctgcctcggggaagtcctgg

SEQ ID NO: 412557 - DNA, 122 bp, Homo sapiens
ttaagatgttgcctgcggccttctgggaagtcgcgtggctggtctcgcgggaagatgtgacggctccgccctctggcccgtagcgtcagccttggccggagaggcggtagagtagggtgggt

SEQ ID NO: 412558 - DNA, 122 bp, Homo sapiens
ccttccctgcggccgcgcagagcatgccgggagccgccggccgccggtgtccggaccgctcgcccccgtttggacccgacttcggttcttctggggtgttgatgctcctaaagcccgagagc

SEQ ID NO: 412559 - DNA, 122 bp, Homo sapiens
ttacacttttaggctattgagagtgaaaacaagcactgacatgaacacccaaccagctgccggtgacatcgtccccttctgagatctgaggacatggatacccaaccacctgccggtgacat

SEQ ID NO: 412560 - DNA, 122 bp, Homo sapiens
gcgcggagggtgaactcgcgggtcttgagctgcaactagaagctgctcctagcaaggggtcgggtggagatgaaaagactgtggggaaggggaggtggttgtatgcccagagatatcccggc

SEQ ID NO: 412561 - DNA, 122 bp, Homo sapiens
aaatgtgagaaacccccctggatctgttcatggaagtgagctccagtatagatgtggagtcgggatggatgccacttagggtggcacactgaccaatagtaacaagcacactaactcatccc

SEQ ID NO: 412562 - DNA, 122 bp, Homo sapiens
ttgatctcagactgctgtgctagcaatcagcgagactccttgggcgtaggaccctccgagcgaggtgcgggatataatctcgtggtgtgccattttttacgccggtccgaaaagggcaatat

SEQ ID NO: 412563 - DNA, 122 bp, Homo sapiens
agaaaaaaggacgcaaacagcattttacacttttcccactttagcgggaatcggaggagccgggcgagaaagcccgaaaagggaggcggttatttacgaccggcgggttggagtctggcacc

SEQ ID NO: 412564 - DNA, 122 bp, Homo sapiens
agcggcggcggctggtgctggggcgggggccaagcagacccccgcggacggggaagccagcggcgagagcgagccggctaaaggcagcgaggaagccaagggccgcttccgcgtgaacttcg

SEQ ID NO: 412565 - DNA, 122 bp, Homo sapiens
gctctctcttagcttttaggtctctgctgagatgtcgctgcctcctgaccccactagcaccgctcccctagccaccccccactttcctggcgtcagcacacactggcttggtttgttaactt

SEQ ID NO: 412566 - DNA, 122 bp, Homo sapiens
cacagacaggccgcgcactgagtcatacactacaacagaggaacacacaggaagtgcccccgcagcgaagagaagcaaaggctacctggcttgaaggaaaggtttccccggagaccccacga

SEQ ID NO: 412567 - DNA, 122 bp, Homo sapiens
ccccatttccaccaagctctttcctagctgacagcagctcccctgaacaccaatgaaggacggtatatgcagaactgccagtcaccactcgtcacaagacctatgtgggtgtcgggaggcag

SEQ ID NO: 412568 - DNA, 122 bp, Homo sapiens
tgctccaggagatataagaagcccaggttttcccccttcctgggagcgctgcggatcattcgcaggcggcccggcaccctcgcataggtgggccggcccctggggctccagccgtgcgaccc

SEQ ID NO: 412569 - DNA, 122 bp, Homo sapiens
gactctgggactccatggccctgccacaggcggtgggctcctgggacacagatgctcaggcgcacccagcactcatcacagagtgagttggtgagccacactggctgagtgcacgagtgagg

SEQ ID NO: 412570 - DNA, 122 bp, Homo sapiens
tctgggaggggcctcgcaggcgccctgatatgagccctttctctttgggagctctgctgccgagcactttagggaagaatctgtgatgattccatgaaaaactaggcaagtggagaaaaaag

SEQ ID NO: 412571 - DNA, 122 bp, Homo sapiens
gatgattctaaccatgggcgtgagtgtgtatttggcaaattcatccacacggtgggagggcggttggggctgggtcctattagctttgagtcaatgtaggccaagattagaaatcagaaagc

SEQ ID NO: 412572 - DNA, 122 bp, Homo sapiens
taaacctttatacgttctaagtgttttcatatacactggctcatttaatcctcacaattacgctgaggggtactgtattagtctgttctcacgctgctcataaagcatacccaagactgggt

SEQ ID NO: 412573 - DNA, 122 bp, Homo sapiens
cgccatagagacagcactcggcggcggtggcggtggcggtggcggtagcggcggcggcagcgggtgccccatagacacctctcgcccagcgaagggaaaggcgagcaggagctgcgccgcac

SEQ ID NO: 412574 - DNA, 122 bp, Homo sapiens
ccaagtgaaaacacttgggaatcctggcacttgagctcgtctcccagagctgcacggtcacggctgggctggttttcatcatcagcagagggagggaactatttgcatatctcctactatat

SEQ ID NO: 412575 - DNA, 122 bp, Homo sapiens
caccgagttagtaccagtaccatgttcgctaatccaggttttcctgagaaaaccctgccccgctgcagcgagaggaagggaccgggcccgagcgggcctctccccctctctcctcggatgcc

SEQ ID NO: 412576 - DNA, 122 bp, Homo sapiens
cactgtatgtagagatcaagacccctgtaagctccagtcatattgaattgtaccaggcaacggagcgtccttaagagtttacagtaagaaaaaacaaaggccttataaataggacaatccaa

SEQ ID NO: 412577 - DNA, 122 bp, Homo sapiens
aacaccagatggaaacaagaatggaagcggctttcgaaggggcctctggctgtggggacccgcagctccgcgtcgcaggccggctttgtcgcagcagcagtgctgctgtggtcgtctgaaac

SEQ ID NO: 412578 - DNA, 122 bp, Homo sapiens
aagtggctgctaacttgtttcaggccagagtaacaagatagcaacctgagagagcagggacgtcccctggagaagtaggcttttgtgcaaaaagcccatcacaaaccttaaggtttaataaa

SEQ ID NO: 412579 - DNA, 122 bp, Homo sapiens
tcctttaagacctcccggaggctgcacttggcccctgaatccttcttcccctccctatcccggtatccctgatccagccacagtgggcttgccacgagctgtgagtgtacaccctgatagcc

SEQ ID NO: 412580 - DNA, 122 bp, Homo sapiens
ccttctgtgtcccacaatgcttcgcggcgcgcctcagcccccatgtatcccaccgtcacccgcgactccccgcctgttctacctgcctgcttaatgtgaaactcagcgcaggggaggtccgt

SEQ ID NO: 412581 - DNA, 122 bp, Homo sapiens
acgaggcggggatgatgctggaagacttagggtgggacggccccatcctctcggaacctccgtccctgcaaccgattttagggtggggatggggtgggggctgagtctgccctcaaaacggg

SEQ ID NO: 412582 - DNA, 122 bp, Homo sapiens
cctcgggagacagatcccgggcttgtggcctgcgggtgttttcggtttctaccatttcctcgacctggtctgggttctcctttctgcccgttctctccatctctcaacacccaatttctctt

SEQ ID NO: 412583 - DNA, 122 bp, Homo sapiens
caaccaggtgacgggctggctggacggcagcgccatctatggttcctcgcattcctggagcgacgcgctgcggagcttctccaggggacagctggcgtcggggcccgaccccgcttttcccc

SEQ ID NO: 412584 - DNA, 122 bp, Homo sapiens
aagtatgtttgttttctggcaataagaagatatttccagactcatcttgatatttcctgccgtaaaacatgcaatgaatttttctccagggagcccagtgccctcagggtcttctggctgga

SEQ ID NO: 412585 - DNA, 122 bp, Homo sapiens
ccactgcgcctgtgtcctcgtcaggtcactccatctatagattctgggagcctgatcaatcgtagttcctggggctttctctgcgcccgacaccaaaccatgtctaggggaaagggagggtg

SEQ ID NO: 412586 - DNA, 122 bp, Homo sapiens
ttctttgactcagaaagggaactccctgaccccttgcgcttcccaagtgaggcaatgcctcgccctgcttctgctcacgcacggtgcgcgcacacactgacctgcgcccactgtctggcact

SEQ ID NO: 412587 - DNA, 122 bp, Homo sapiens
agactgggagcgactagttagcagccctttccctggattgagaactgtgggggtctcacccggctcccagcggccccaggccagcctccttttcgcagaaccaggcgggcgcgctcgctccc

SEQ ID NO: 412588 - DNA, 122 bp, Homo sapiens
aggcagcctgtgtttaggatgccagctgtttaaaagccttttctggatgtgccccagttgcgcagcacttggaggccttataatccatgggatattacagttccctctgcagatgagaggga

SEQ ID NO: 412589 - DNA, 122 bp, Homo sapiens
ggaggcagaggcctggggtcccgggaggcaagtggtttcttaggagaagtaggaagatagcggggataggaagtgtacccatatcccgaggtccttgcaggctgcccaggtctctgccttta

SEQ ID NO: 412590 - DNA, 122 bp, Homo sapiens
aagttttaatgtgaagaaagaagcttgttgtcccatagaagccaaccactgctgtttcttcgtatggcctttcccggggtccgaagcgtctcagccctagcccaggccaacgtccagtgaca

SEQ ID NO: 412591 - DNA, 122 bp, Homo sapiens
ctgggctgatcttggtcttaggctttctcaagctcatccacctgctgctgcggaggcagacgttggctaaggctatggacaaattcccagggcctcccacccactggctttttggacatgcc

SEQ ID NO: 412592 - DNA, 122 bp, Homo sapiens
aaatgaaatatttttaaattctaccttgaaattttcttatatgaatactgcttccctgagcgtgctgctctgttacagattccagtgtttcagcgaggtggaagtgtgataccaataaagac

SEQ ID NO: 412593 - DNA, 122 bp, Homo sapiens
tctctgtgcccaagttttccctttttattaagacaccagtcatactggctcagggcccaccgctaatgccttaatgaaatcattttaacattatattctctacaaagaccttatttccaaat

SEQ ID NO: 412594 - DNA, 122 bp, Homo sapiens
caggccggggtcccgcgggcggcgcctcctcctccgcggcgtccccatactcgccctccgcgtcgctctcgtccgagttgtcctcctccaagtagcggtcaccgcgcaccttgtgctggggc

SEQ ID NO: 412595 - DNA, 122 bp, Homo sapiens
atttatggcactggggagatttcataaactccaccagccgcagagaaggcggggaggctccgcagttgctggaagggagtgccctagctgccagccaagcctgggctccctgcagggccaca

SEQ ID NO: 412596 - DNA, 122 bp, Homo sapiens
gactgctactaggacagtcattatgtacctggttgaggcaagagggtgacagatgtttgacgtcagtttgttcccttgttgtcagtaaaacgaaagctgttttagggtacctctgtttctgc

SEQ ID NO: 412597 - DNA, 122 bp, Homo sapiens
cggccgaggctcaggggcgataaagcctcgcacctggtggccccgcccccggccaggccccgcccccggcccgggccaggaccctgagtccatgccccgccgccctggctgcggtccagcag

SEQ ID NO: 412598 - DNA, 122 bp, Homo sapiens
ccgccgccaccctgggctggcagtggagctggagctggagcccgcgctgcccgctgagagcgtgacgcgcgtcctgcagccagccgtccccgtggctgcgctgcgcctcaacctctcaggcg

SEQ ID NO: 412599 - DNA, 122 bp, Homo sapiens
ggccaggactttcagcacaatgctaaatgaacgaactggtacctaaagacacaacctaaccgtactaaaattccatctttggggatctgtttcctgggatcgccttaaagaacagtttctgt

SEQ ID NO: 412600 - DNA, 122 bp, Homo sapiens
gcagggagcagggcagggtgttgaagagacggcaggtgcgtcaggggctgacgtgggacccggcactctgtgctctgtgtctgcccgggaacaggtagtcctgcgtcggaccgggaagtgtg

SEQ ID NO: 412601 - DNA, 122 bp, Homo sapiens
acagcctgcacctgcaccccgcggcgccagccctgccgccagcgccccagtaacttgccgcgcgcattcacagccagacccagggaaaggaaggttttttgtttttttgtttgtttggtgtt

SEQ ID NO: 412602 - DNA, 122 bp, Homo sapiens
atgtcaggtgtgagcccctcgctccctcccctcccctgggctcagagcccttcctcccgccgtgtggcccctgcctctcagcgaatgtagacgcctcgtccccagccctccagctcattctt

SEQ ID NO: 412603 - DNA, 122 bp, Homo sapiens
taagaacagaaccagccgggctatgctgcagcgtctcagacatgtttccactcgctgctgcgatgtgtttgtcaaagagtttacttagagagctgcagagctatcagagaggagaagagaag

SEQ ID NO: 412604 - DNA, 122 bp, Homo sapiens
ccagctccagaagggatctgatagaatcagaaggaagaagtcagaagccacagtcaagaacgcaaacagaattggtatatttgaaggaatcagtctcccttgtgctgggaggccttcacagt

SEQ ID NO: 412605 - DNA, 122 bp, Homo sapiens
tgctgttgtaagttgaattgtgtcccaaccaaattcttatgttgaagtcttaacctctggcgccccagaatgtgactttatttggaaatagggccattacagatgcaattgttagttaaaat

SEQ ID NO: 412606 - DNA, 122 bp, Homo sapiens
gacttccagatctactcggagtactgcaataaccaccccaacgcctgcgtggagctctcccggctcaccaagctcagcaagtacgtgtacttcttcgaggcctgccggctgctgcagaagat

SEQ ID NO: 412607 - DNA, 122 bp, Homo sapiens
gcacgtcgtggttgtgtcgccccacagtactgactgcttcacctttgcagacagaggctccggcccggcgcggtggctcacgcctttagtcctagcactttgggaggtcgaggctggaggat

SEQ ID NO: 412608 - DNA, 122 bp, Homo sapiens
ctagccggccggcgaggcctgcgcagttgcagcggccggggaagatggtggaggacggcgcggaggagctggaggatctggtgcacttctccgtgtctgagttgcctagtcgcggctacggc

SEQ ID NO: 412609 - DNA, 122 bp, Homo sapiens
cagggtcaggcgggcccataccggctccgccgcctgtgcgcggtccgcgcgcgctcgcagcgcacctaggccgacgccgaaagcagccaagggggccccgcccctacaccgcgccacgaggc

SEQ ID NO: 412610 - DNA, 122 bp, Homo sapiens
ttccgtggccaaaggcgcttcatttccgggtgaaactggcattgagggtactggggcgtgcgtgaggcgtttactgatgcttcctggtccggtggcctcggtcccggtaagccaggcatgaa

SEQ ID NO: 412611 - DNA, 122 bp, Homo sapiens
tgatgcgcgcagtgtgggaggcgctggcggcgctggcggcggtggcgtgcctggtgggcgcggtgcgcggcgggcccgggctcagcatgttcgcgggccaggcggcgcagcccgatccctgc

SEQ ID NO: 412612 - DNA, 122 bp, Homo sapiens
tcggtccctggccccggcaggccctggaacagaccttaaaaaacactttcccttgggaggcggggattcgagtctggtttgtgtgtgtgtgtgtgcaagaggagggagacttgaggggcgcc

SEQ ID NO: 412613 - DNA, 122 bp, Homo sapiens
tggcctgagggcttcgggctgcggcacatgtcctccatggagcacacggaggagggcctccgggagcgacttgccgacgccatggccgagtcacctagccgggacgtcgtgggatccggaac

SEQ ID NO: 412614 - DNA, 122 bp, Homo sapiens
aaatgaataatattcaaatttactggcatagagatgtttgcacagattccatgtgagagacgtaggctgttaatcttgtgttctggccgcatgttaggaaccctcttatggtgtggataaaa

SEQ ID NO: 412615 - DNA, 122 bp, Homo sapiens
taaacatgactgtggagtgattctattatgaacgcttaatgaaaggcttaggaggagcggcgttatgtcatggaaacatgtttccacatgttccgttgtttctctggcctgggaagtttgtt

SEQ ID NO: 412616 - DNA, 122 bp, Homo sapiens
ccataaggtagtggcttttgtccccagggagaggtgaaaagaggacacaggttagaaggtcgctctttgcggtgcaggtggcacagacatcaatcaatgaaattgacctttggattttagag

SEQ ID NO: 412617 - DNA, 122 bp, Homo sapiens
agcggccagtgtaggactggacagaggccatatgaaacacacggtacattccggtcccagcgtaacaaactgtaccagcctttttgagagctgtgagcactaaaatggggagggaagagagc

SEQ ID NO: 412618 - DNA, 122 bp, Homo sapiens
gaagatggtgtgttcgaagcgggttatttgtggtttttcttagtgcaaatagatgctcatcgctgagtgatgggcaagcagcgaggcctttctgattttcatccctcttgccaaaactttgg

SEQ ID NO: 412619 - DNA, 122 bp, Homo sapiens
gcgtcaacgcgcttcccctgccgttgcctggcaaaggccagctgtgggagggtagcgggacgtgatgggggcttccgcctcagagctccctgaaaggtggcaggtggccagtgggggacgct

SEQ ID NO: 412620 - DNA, 122 bp, Homo sapiens
acccggccctgcatggcccagacgggcggaaagagcctgcggagctccagcccaaagagccggcaccgtcccgggactgcccgcaccgcgggggtgctccgagctgcggcgctgggctctgg

SEQ ID NO: 412621 - DNA, 122 bp, Homo sapiens
gtgttcgctttgactgtggtctggaagcaaacccgcgacatcgctgaggccggcccaagacgcagctgcagcatacgcatccgcgctaccagacgccgcgggagggccggctccagggtgac

SEQ ID NO: 412622 - DNA, 122 bp, Homo sapiens
ccaacacagcgaaaccccgtctccaccaaaaaaaatacgaaaaccagtcaggtgtggtggcgcgcgcctgcaatcacaggcactcggcaggctgaggcaggagaatcaggcagggaggttgc

SEQ ID NO: 412623 - DNA, 122 bp, Homo sapiens
tcctcccctcccccagcactgacatacgagccccagtgtcctgaggatgactccaaacagcgtcggaccttcaagtggaacctcaggcttgttaaggagtggcctggaactgcaccagattt

SEQ ID NO: 412624 - DNA, 122 bp, Homo sapiens
ccacctaccaccatgagaaataagtgccacctggaaaacgaatcgtcccacctccacccacgacggacaatgccagcccatgccgctctgttgtcagggtcttcatgacttggactggaaga

SEQ ID NO: 412625 - DNA, 122 bp, Homo sapiens
tgagtgtggtggggggaaggcgaagagagaactgatccaggacctggacgcgggggtctgcggcgcccctacgcccccacgcccccagccgtccgcagtgccggaatgagccggatagcgcc

SEQ ID NO: 412626 - DNA, 122 bp, Homo sapiens
ctgatgatactggaggggaaacaagcacgatcttgtttttcactggccaagtgagtcagccgaatacacagctagccagacagaaagttggtttaggaagctgtttacttaatttgataagt

SEQ ID NO: 412627 - DNA, 122 bp, Homo sapiens
ccccggcgtcccggctgtctctgtgcggctgacacccctgacgtcccggctgtctctgtgcggctgacacccctgacgtccccgctgtctctgtgccacaggcatgtccgatttcaactacc

SEQ ID NO: 412628 - DNA, 122 bp, Homo sapiens
agagcgcggcctcacccctcggtgaccctgcggagagccgcgcgcgggcggtggggcgcgcgcaggtctctcttgttgctcgctgtgttttattttaattttgggggtggttagaacgtgtt

SEQ ID NO: 412629 - DNA, 122 bp, Homo sapiens
gaaatacccagttaaaatatcagaaatgaaaaagtgataccattagagacactaaaaagacgattagagatactaaaaataccattaagtaatagtattagcttttgtattctgagattcaa

SEQ ID NO: 412630 - DNA, 122 bp, Homo sapiens
taatatgtatatcacatataggtggagacagttgaatcttttgactggcagagacaactgcgctattactgggatatagacctggataattgtgtggctagaatggcgctctctcagtacac

SEQ ID NO: 412631 - DNA, 122 bp, Homo sapiens
taaagcttaaatacatagcttgcaatacttaaagagaaacttcccttccatcaacagagacgctgtttagtgtgatttaataaggagttctagctgtgagatggctcactcactcaaagata

SEQ ID NO: 412632 - DNA, 122 bp, Homo sapiens
tgctattggcatttgtttaataaccaatatcagtcttcctgtcatcctgtcatcatcccacgagtgtgacatgaaggaaaacaaaaactttagaatcttactgtggaaacacaaacttccac

SEQ ID NO: 412633 - DNA, 122 bp, Homo sapiens
tcgaggcttcagaacagccaccggccccctcaagccccgccccccagtgggcggagaaggcgttacaagccaagggtgcctgtgcgtaggcggggaaatctggtagatccataggaactcct

SEQ ID NO: 412634 - DNA, 122 bp, Homo sapiens
caaagagttctgaggatccaagaacgtgaccgggtcagacaggttcagctactgagttcacgttccagcccagctgtcgaagattgaaaactggatttaagccaatcacacaaaattcctgg

SEQ ID NO: 412635 - DNA, 122 bp, Homo sapiens
tgtatcataataaccagaagtcattaagcagtttacatctatacagcagtggctaaaaagcggaatctctgccagtatgcatttgatgagcatcactgattatgtgtgatttccagcagttc

SEQ ID NO: 412636 - DNA, 122 bp, Homo sapiens
gaaacacctgtgtggcagataaggccaactgagtgtgatcagctgaggaaaccttagggacgcatgtcactcaatatttctttttccatgccaggcagggcagaggcacaatctagcctgtg

SEQ ID NO: 412637 - DNA, 122 bp, Homo sapiens
cgggcaggtaggtgcaggctgcagaggaaccttgcggccgcgcagggaaaggcttcgtcccgtccctcctcgcagccctctgccgccctcggagtggggactttctcctgtcgccgtgggaa

SEQ ID NO: 412638 - DNA, 122 bp, Homo sapiens
ctctggctttattgttccaccaccctcccatgctcagataaacagaaaagtagggaaattcgacaagggaggcttcaaagttataagagggatgcatgaatgtattaccaatagccacttct

SEQ ID NO: 412639 - DNA, 122 bp, Homo sapiens
gtctcacaacaggcctggagcactttggagacagcagtggcgctggccaccttctctccccgggcccaagggaccctccaccactgggcagtgccgggtgctgcaggagccaggcctggacg

SEQ ID NO: 412640 - DNA, 122 bp, Homo sapiens
tctgcgtctggacaggcaccagctcctcagcagaggagcctgctagcttctgccggcagccgcagcacattcagagcgttgacagagcaggggctcctctcgctgtccctggaaggagtgcg

SEQ ID NO: 412641 - DNA, 122 bp, Homo sapiens
cttgggtggtcgatgggactgggtgccctggagcagggggtggagctcgtcagggaggctcgggctgcacaggagcccatggagggggtgggaggctcaggcatggcgggctgcaggtcccg

SEQ ID NO: 412642 - DNA, 122 bp, Homo sapiens
cttaaatattaagaggccgccaggtcctcctccacccattccagcacgtgcaaccttctccgccatcaccattaactgaagtacacgagacaaaacggcttggagcgtccattttcacagga

SEQ ID NO: 412643 - DNA, 122 bp, Homo sapiens
tcatctagggacttaccacctgtgatcagcaccaaaagcttaggaatcccctcggcagcccggtagccggctgaactcgtgaataggttgttacgaacaaagtctagagcagagcccgtgta

SEQ ID NO: 412644 - DNA, 122 bp, Homo sapiens
tctctctctctctctctctctctctctctctctctctctctctctctctctctgcctcttcggctcacgtgaccgcttgctctcaacggctccgatcacctcttcctgaggcagcacctttc

SEQ ID NO: 412645 - DNA, 122 bp, Homo sapiens
cactgagaacttacacatgcacattctcaggcccattgcagacctcctgaaacgagaactcgggaggcagggccaggcaattggcactttgcctgaagcactcacgttttgagaacacctgt

SEQ ID NO: 412646 - DNA, 122 bp, Homo sapiens
gcacaacctgggtctgggatgccaaaagccttcggtcctgggacgcctcgttggtgcccacgactggcacagacgatgcacccgccaaaggacacaggagtggcggccgtctaaagaaccaa

SEQ ID NO: 412647 - DNA, 122 bp, Homo sapiens
gggctgaggcctggcagcgaggaccctgacaccccttcgggagaggagtggctgctaggccgctcgcttgctcctggaaagatttggggtttgagagctcttggccaggaggctcgcgctgg

SEQ ID NO: 412648 - DNA, 122 bp, Homo sapiens
gaatttcctgggcccgcctctagggccacatgcccgcccctttctctagtgcgcgggctgcgcagtcaaacccccttccgagctgtcagttccagtgagaagctgaggagagctgttgagca

SEQ ID NO: 412649 - DNA, 122 bp, Homo sapiens
tgcttggtctccgctgcctgcgccgcagcaactcagaccttacagttcgcaaccccggaccgagtaggctgaaagtggagaccacctcgcgctcctttgctgccgggaaactgagggccaga

SEQ ID NO: 412650 - DNA, 122 bp, Homo sapiens
ccctgacccggccagcagctgcgaaacccgtccacgcgaaattgagttcttggctgggcccgtgcctcgtgctccggacctgggatcctcgaggcatctctgccccagccctgcccgccctc

SEQ ID NO: 412651 - DNA, 122 bp, Homo sapiens
ggttcctgtggcgagcacttggccacacctacagacctcctcgcctctccttttctagggcgaggccctggagcaggccatcatcagccaggccccgcaggtggagaagctcattgctacga

SEQ ID NO: 412652 - DNA, 122 bp, Homo sapiens
ccgcttaccagcagcagcagcgccccctggcgcctgccgagggcactgcgcaagagaggtcggcattgatttcagaagggcgcccggaaggacacctgtctggccccagaccgggcaggagc

SEQ ID NO: 412653 - DNA, 122 bp, Homo sapiens
gattgaggccctggccgccctcaagatgcgggagctgtgtcgcacctatggcaagccagacggccccggagacgcctggagggctgtggcccgggatgtctgggacactgtaggcgaggagg

SEQ ID NO: 412654 - DNA, 122 bp, Homo sapiens
aaacagcatggtgccctctccagcccctggaaaagcacttaaagtcagtaacacccaaaacgccaggttctgactccgtgtgcattgtctcctcagtgctaaccacaactccgtagggagac

SEQ ID NO: 412655 - DNA, 122 bp, Homo sapiens
ggtgcccttacacggattggagagggcagcgatggggcggagttcaagctccgattagtccgcgctccgtggcgggcttggcgattggacgccggcgctgtcagccgcgcgcggaccggggc

SEQ ID NO: 412656 - DNA, 122 bp, Homo sapiens
acggtgcaggattcttccttggccagagaggattttgctggagtcagaaattcaaccaaccgtattgccactgggtggcacaattggaagtctctaaagaggtctgggctttaaaagggcct

SEQ ID NO: 412657 - DNA, 122 bp, Homo sapiens
cgtggcctcgctcccgaccgctgccccgcagaggcctcccgaccgccgaggccctcgccacgcccgggtgcccccagggggcgccggcttccacccacagagctccccaggcctgggcgggc

SEQ ID NO: 412658 - DNA, 122 bp, Homo sapiens
tgacttgtttatctggacgcaatctttgtcgcacccagttatctcgctcagcgaccggggcgaccacgtttccttaaatcagagccccgtggactccgccggagaactacattacccagcgg

SEQ ID NO: 412659 - DNA, 122 bp, Homo sapiens
cagacccttaacaaactgcaccaagacctggtctcagggcccactgcacaggacgccccacgtctcatggctcaagagcagccagaaatccagcaggttttctgaaatctcctgagttttaa

SEQ ID NO: 412660 - DNA, 122 bp, Homo sapiens
ttggggccttcttagggaggaggccgtgccagcccgggagccgggggcgtggggaggctgcgctttgctggcttccaggaagacgcacacgctgtgtgtggccagagaccggggcacctctt

SEQ ID NO: 412661 - DNA, 122 bp, Homo sapiens
cctgacacaagttataaccaccaccttctaggaaaaccacttctcagggagcagggaggacgtggccacaaggtcaagaacgggttggatcctagcacactgagagatgggtaccctctggc

SEQ ID NO: 412662 - DNA, 122 bp, Homo sapiens
gccagtcctgggacccctgaagtttctattcaggtcttccagctactcctggaaaagtcgcgtcaacttggatcccagcaaacccagaagcgcagtgaaagtggccaacccggtcgcctaga

SEQ ID NO: 412663 - DNA, 122 bp, Homo sapiens
tgaaaggcacatggaaataaatggcaacaaaagctactttcatggtaatctcacatcccacgaatactgaaatgaaaatcgccgcggcaatggactgtggttcaggtggaacacgttctcgt

SEQ ID NO: 412664 - DNA, 122 bp, Homo sapiens
aagcctcccttcttcctcagctacggcaccctgggccaggccatacgcttccaagtaatacgcagttttttgttcttcatctttctcgttctgggcacgtaacctttataagacataagaat

SEQ ID NO: 412665 - DNA, 122 bp, Homo sapiens
gtgggctgccgccgcgcccacccggtcccatgcccgtcccgcgccccctcccgggcccggcgccccctcctcaggggccttgggtccccgccactttcgtccggtctcggtccccgcggatg

SEQ ID NO: 412666 - DNA, 122 bp, Homo sapiens
ggatggacaaatgaatacacttctggcctaggtgtcaggagaggaggtcttaagctctagcgagattgcagtgtgtggccctgggcaagtcttgtgctctatcctcgtcccctcctccagga

SEQ ID NO: 412667 - DNA, 122 bp, Homo sapiens
atagcacacccaggagcgcactccctcagcaattttcacttacaacagagaggagtctgtcgggaaaacatgcaccctctacaaaggagtgattcagatgacctggtctcagcttccagctc

SEQ ID NO: 412668 - DNA, 122 bp, Homo sapiens
agcctaggcccgcagaggcccggggctgccgccccatcacacactcatggtcatccctggcgagtactggcccgccgctgtcacggtcttgctctggccccccggccgccccgccggggcct

SEQ ID NO: 412669 - DNA, 122 bp, Homo sapiens
tggacctgaaaccagcgacaggttttggcagctgcacgctcactcccagggaggcgagggcgcccggcgaagtgtggggtctgccgccccctgccggcttggctgacgttcgcttctgtttc

SEQ ID NO: 412670 - DNA, 122 bp, Homo sapiens
tgctggcggctgaggaaccacaccctgtgggttgcgggaggacaaggcaggctcctgtgccggcaaggtggggtcaaccccgaaggtcgaggacaccaagacccgctcctctcccacagagc

SEQ ID NO: 412671 - DNA, 122 bp, Homo sapiens
tcaataaccagatgtgggagatggagagtgcctttggcataaccaataaccgagctagtgcgtggcagagcggtccacgcctggacataaatagaaaatataagttagtataactttaaaaa

SEQ ID NO: 412672 - DNA, 122 bp, Homo sapiens
caccccgttccagtacctggagccacagccacaggttaggctgccgtgggtctcgtcccccggggctccccacccacagatgccactccacccaggcccttctggggcaaagctgcagcacg

SEQ ID NO: 412673 - DNA, 122 bp, Homo sapiens
gagggtgggggggaggatctgctggcagcggtggttctcatctggattaagatcgtatttcggaataactcgcaggtcttaccttccgggggtgtccttcattatgatgttccctgtgatgc

SEQ ID NO: 412674 - DNA, 122 bp, Homo sapiens
gtcacaactccacgaatgttaacaacctgtccaattacagggaagggggtcccgacccctcgcacctgctaattaaaattgctaatcaccagcaattatctggccgagctttagaaaccatt

SEQ ID NO: 412675 - DNA, 122 bp, Homo sapiens
cttcctgacgttgccccaaggattaaaagaatgtaagactctcaaaacaagcttctttgacgtcccatccacagtgcagaaggcccccattacccctgcactgtgcggttggctctcctttg

SEQ ID NO: 412676 - DNA, 122 bp, Homo sapiens
caaggaagtagccgatctcccagatgcggtctcttcgctccgctccacccgcaccagcagcggcccacccacctctcctgtaagaggaagaacgtcccggagacacttccggccccgccccc

SEQ ID NO: 412677 - DNA, 122 bp, Homo sapiens
aaaaaaggacacacatactcaaatgcttataagagataaattaatgtaataaatggcccacgcgattccaccctggtgctgcagtttgtaaaagaagaaaaaatacctgttcaattggtttg

SEQ ID NO: 412678 - DNA, 122 bp, Homo sapiens
ccggtgaaggcggtgccaggaggtcccttacctgccgagaggaggtgctgttaacgggatcgggcaccggtgcgagaaggctgggcgggttctttttgtgaacgctattcataccaggcatt

SEQ ID NO: 412679 - DNA, 122 bp, Homo sapiens
ctgagagaccagcagggaccggctccgggctgaggctggggctggagtccagatgcacagcggacagaaatgcgtaggagtctgggttgcagctgcacagacaacacactaactttattcac

SEQ ID NO: 412680 - DNA, 122 bp, Homo sapiens
ttgaggtcagcctagccaacatggcgaaactacatgtctactaaaaatatataaattagccgggcatggtggcatagctactggggaagctgaggcaggagaatcacttgaacccgggaggc

SEQ ID NO: 412681 - DNA, 122 bp, Homo sapiens
gttgggaccctccggaggccagtggggtactgcaaaggtgagtgccccagtgccaggggtcgtgagcccggagccctgcgggggacggctggtaggccctgctggatgagtcattctcccca

SEQ ID NO: 412682 - DNA, 122 bp, Homo sapiens
ctcgggggcgctgggcggcggccctgggctgctttggctaacttggctgcggggcaggcgcgaggagcggcgcgccgaccgggccgagcggagaggccgcccattggccggccagcgccacg

SEQ ID NO: 412683 - DNA, 122 bp, Homo sapiens
ggattttagatgatgtaggtaaatctcattgtttttgacctgcaatagaaagaaccagctcgcttcttgaaggaccagcatccccagtcactgcctctacacacatgtccacctgcatctgg

SEQ ID NO: 412684 - DNA, 122 bp, Homo sapiens
gcgcctttcgcgcttctgccctggccctctgcgggccgctccgccggtgctgtccctgggcgcctccgtgctctcagccaaccacctctgagagcgcccactcgagcgccccgggagccaga

SEQ ID NO: 412685 - DNA, 122 bp, Homo sapiens
ccgcaccccgaagctgtagcaccagtttgttttctcacggcacaggggcggcttccggggcgcggcgtgctgggggttgtagtccgcgctctgcctcctacttccattacagaaggcgatgg

SEQ ID NO: 412686 - DNA, 122 bp, Homo sapiens
tagtgaaggggcctctggaacggccgggaccctcaacgtggttttccttaattccctgggcggtcctgaaggtggtgtggccagtcctccgcctcgctccgtcagtttccccctgctgaact

SEQ ID NO: 412687 - DNA, 122 bp, Homo sapiens
gtaactaggtttgtgtcctgggcacaggtgcccagaagtgtaatcaggtccgggcacagccgtttgcaaggctctgaagggctctgcagcctctcgtggtgacggtcccccagccatggtgc

SEQ ID NO: 412688 - DNA, 122 bp, Homo sapiens
atgcatctgaccctctgtcccatcccatctgggtccctttcccacctactagtgggtatgcgtaccccatagctaagtacctacctttcttctcactcttcttttctttagacttcgcacgt

SEQ ID NO: 412689 - DNA, 122 bp, Homo sapiens
attcattgtatagatgggaacctggagctagagaaacacgtaaagtgatttggctgagtccggagtaactgccacagttttctgactgctgatgtattcctgctgattacctacacagtact

SEQ ID NO: 412690 - DNA, 122 bp, Homo sapiens
aacttttctttctgcaatccctccacctaggctaaactgcaaagccactggcaatggagacgcaggcgctgcacccccgggacgcaggcagaggtaccttttccgcgaggcagaggggccgc

SEQ ID NO: 412691 - DNA, 122 bp, Homo sapiens
ggcagatggccttgtacccgttttacagacaaggcaactggggctgtggatttggcaaggcgctagttgcaggacctcaggtaactggcagagttaggatgtgaacctaggttgctatctac

SEQ ID NO: 412692 - DNA, 122 bp, Homo sapiens
tgagggccgcctttatctctcatctttcatctccaggcttttcgcgctcctcagttagtccgcccccacagctgcctggactccaccctgggggaagaagaggccctgggatggggtgacca

SEQ ID NO: 412693 - DNA, 122 bp, Homo sapiens
cctgtagtaccctgtggggtagaccccccggttcctactggtggggaaaccctagacctgcgtgcgagtctcccagatccggtcccagagcattacaataatggttttatatatatatatat

SEQ ID NO: 412694 - DNA, 122 bp, Homo sapiens
tggatgagtgatggagtccagaataattgccatcatttgtttaatgtctcccatgtggcacgtaatgtacatagtgtctcactagtcctcacaataattctgtaagaaggggcactgtaaaa

SEQ ID NO: 412695 - DNA, 122 bp, Homo sapiens
aagtttctaaaaaccagacggaacgagaagcttagggttccctaagtttaactcctccttcgtcccttcccaatacaaagacacacaaactgggggggacacggaggtcggtgccctcgagg

SEQ ID NO: 412696 - DNA, 122 bp, Homo sapiens
agagcaggttcgtggacaggagccggcgggcaggccgggggatccctggtgaggaagcggcgagggaggggcgtgggccgagccgggggcgccgcggggagggtcgctgtcagtcaggccga

SEQ ID NO: 412697 - DNA, 122 bp, Homo sapiens
ccatggcctaggtattgtaaacctgtctgcaggttcagggaagcaccacctctgctgaatcgaaaaagaaaattgtctggggatcaggagaaaggattctccaaaaggccaatgttcttata

SEQ ID NO: 412698 - DNA, 122 bp, Homo sapiens
tttgaagaagctggctgtctccagtgcctgttaagctgaggatacaaccaggaaatgcaacggtgtcagattgtgttcaaaatgtctagaaaggcttgataacattcctgttacttttctag

SEQ ID NO: 412699 - DNA, 122 bp, Homo sapiens
tggagcatagaattctacaagccacaaactatcactctgaataacttctcggttgaaattcgatggagttaattcgatcacatcatcactagaggaatacagaccattcactgccagaaaga

SEQ ID NO: 412700 - DNA, 122 bp, Homo sapiens
cctaggccttgctgccaacaagcgtcaatcttgatttttgaaaaggtccaaggatgattacgacgtgcgtaggttgcgaaccatcgaaaagcacccaccaatgtgtcaacctggcaactcag

SEQ ID NO: 412701 - DNA, 122 bp, Homo sapiens
ctgggttacgtgaaggagctgtttgaagacccctcctttcaggatgctgtggtgtggagccgggggtgggcaggagacaaatgagcctgggcagcttcccctggtgctgcgtggacccttcc

SEQ ID NO: 412702 - DNA, 122 bp, Homo sapiens
ttctctttacaaactgtgtatgtttcattcctggattgcatctgagctgccgccatggaacgggcattgagttttagcgtgtgtgatgtcccatgtgttcattttgtctccccacactataa

SEQ ID NO: 412703 - DNA, 122 bp, Homo sapiens
tcgctggctcaggagtgaagctgcagaccttcacagtgaacgttccagctcttaaggcggcgcctctggagttgttcgttcctcccggtgggttcgtggtctcgctggcttcaagagtgaag

SEQ ID NO: 412704 - DNA, 122 bp, Homo sapiens
agtatctactgagttcttccagaaacatcaggtgaatgtttctatgaccttctgattttgcgtaattactcttttaaaaagtccttgtggcttcataagaattcatcgttggcacttggcac

SEQ ID NO: 412705 - DNA, 122 bp, Homo sapiens
ccagcccctccccggccgtgcgtgctgcgcaagcacgtagccggcctctgcggaactgggcgttgcggccccgcctccatccacacccaggccacgcccccaggggagctccgcccctcgcc

SEQ ID NO: 412706 - DNA, 122 bp, Homo sapiens
gggacgcggcgggcgggtggggccgcctcccggctgggcacgcctccaagccagactggacgcgaaggaaaccggaacctgtctgcctacggtgcctgtttccggaagcagcttgagtccgg

SEQ ID NO: 412707 - DNA, 122 bp, Homo sapiens
ccgagacgggatttcacacacctgtaactagcaccagagttaaggggtggggaggggcagcgtgggcaaagcgaaacgaaaccgagcaaaaacaaaaactacggccttgccgcttgctgtct

SEQ ID NO: 412708 - DNA, 122 bp, Homo sapiens
catggggtccatgtcaagggtctgctgatgctgtgggaacacccccaactcctcaccccacgcacggtcacaggagcgagggcgcgtcgtggggtccacgtcaagggtctgctgacaccacg

SEQ ID NO: 412709 - DNA, 122 bp, Homo sapiens
cgaagcgggaggagccactggcagcctttgcgtactgtcatagcaacgggaagggcacctcgaccaatcaccgcccgggaatacggaggggcggggcggaagggacgaggtggagccagtgg

SEQ ID NO: 412710 - DNA, 122 bp, Homo sapiens
tcctatctcctctatttcaatttgtccttcacatacagaatagttttcatcactcgctcacgaaatgagagacttccaattgccaaccagatccacctcaattctctccaatcttatttctc

SEQ ID NO: 412711 - DNA, 122 bp, Homo sapiens
tcctcgcaggcccctccctctccctccaggcggcagctaggcgatggaatgttgtgtggtcggttgccaggcaaccagagcctgctggtggctgccttctgggccgagctgagcaggcttcc

SEQ ID NO: 412712 - DNA, 122 bp, Homo sapiens
ccgaggccacggcccgtcctgatgtggtcagagatgtcgtcatgtgccactaacaggcgtcgccaagaccagccaggtgcagaccttgggtgggtcctatggggtcctacaggaagcatagg

SEQ ID NO: 412713 - DNA, 122 bp, Homo sapiens
gcttctcccgctgccactgcccgactccgcgcggggaattgcgtcccaccgccacttccccgcctctcggagctcctgggaagtttctgatctactttcggctctgaaggaggaagagctgt

SEQ ID NO: 412714 - DNA, 122 bp, Homo sapiens
ttgcgaaactgctgcacagggcggtcaaggaatcctcgagctggacgcgaaccctagaggcggagggtggggggggtttgttgggggtggaaagaagatggagaggaaaggacagcaggaga

SEQ ID NO: 412715 - DNA, 122 bp, Homo sapiens
ggtgcccggcttcgccttcaggcggaccttctagagaaaaggaatgcagcggatgacctccgagctgatggatggaaaaagcagaaaaagaaaatgtattcaatcaatcaaaggagaaaaga

SEQ ID NO: 412716 - DNA, 122 bp, Homo sapiens
gaagtacctgggctgtgagcagcgatgcatgaaagagaaaggaaaagctctgtgtattcacgattctaagagcctagaggaaaagctctgttgctgattcttccaagagcctagagaggttg

SEQ ID NO: 412717 - DNA, 122 bp, Homo sapiens
agtgaatgtatttaacgccgctgaactatacatttaaaaatggttgcagtaggccaagcgcggtggctcatgcctgtaatcccagcactttgggaggccgaggcgggcggatcacgaggtca

SEQ ID NO: 412718 - DNA, 122 bp, Homo sapiens
tttttccctcccgctgtccttggccccgccgaggtctcgaactcagaccctagcccggcgcgacccaacccacttcgcagtcggagttcgcgccctgagttcggtctccagcttccccggct

SEQ ID NO: 412719 - DNA, 122 bp, Homo sapiens
aataataaatcatttggaaatgattcaaaaagcacacaccactgcagaatgcaaaagattcgtttactattaccacagtactgcagaatttaagccgtgctttgtttgtttttaacaacttc

SEQ ID NO: 412720 - DNA, 122 bp, Homo sapiens
cactcgcaggggagcagagggagcagggcagaccggcaaggggccttcctgcacctgcagcggaaggcatcggccagagaggacatttgcaacacgtgtagactcagagagtgttggctttg

SEQ ID NO: 412721 - DNA, 122 bp, Homo sapiens
cggagcccggtgaggtgagcgcgccaggccggccggctgggctggaggcagaggcccaggcgcccgccctcgtgggaaagcgcgcggagggcgacccgggtgagtcagccgaagagcagacg

SEQ ID NO: 412722 - DNA, 122 bp, Homo sapiens
aaggagcaaagagacatagctgtccacaccaaatcagcccaagtgaaccaggctcaggcccgcccccatgctgggctacacagatttgacccacctttgcagcagtatctggaacatgttaa

SEQ ID NO: 412723 - DNA, 122 bp, Homo sapiens
ccagcctcgggagcctgctcctcagcttcctagaaacagagcatcgtgtgtgcagtctttcgcgttggcttcctttactcagcgtcatgactgtgagattcacctacattgtcgcctatttc

SEQ ID NO: 412724 - DNA, 122 bp, Homo sapiens
tgatagagcaaatatttcctcctctacatcaacttttggttagcttcacgggcgtgtgcacgcccagggatagggagacaactttaggactatataagtattgcccaaaatgggattcttgt

SEQ ID NO: 412725 - DNA, 122 bp, Homo sapiens
gggtgccgctgatgtttcccgggcttccgtgaggacggaaaggcccacacgcccagcagccggaacacgctcctcccgtgcatccagcccacggggaagtgctcacgtttcagaatgtttga

SEQ ID NO: 412726 - DNA, 122 bp, Homo sapiens
ggaaaaggctctgaaagcttcacctgggcaatgccagtgactgagatggggaccccatggcgagtgtaaaccttttcactcttgacattgagggtcagtgtgttgagagagatcctagggga

SEQ ID NO: 412727 - DNA, 122 bp, Homo sapiens
cctcgggctccgccacttcccttccccgcaaagcacagagtgtcccggccaggagctgcacgttccagcccggtcctgagaagcccggcccagaaaccccggcgcctctgcttagccgcgac

SEQ ID NO: 412728 - DNA, 122 bp, Homo sapiens
gccgccgccgctggcacgagggtgcccacacccggcgcccagctgagcgcaccttcaccacgatgagcaggtagcagaggcagatgaccagcagcggcccgaagaagcccagtgcggccgtg

SEQ ID NO: 412729 - DNA, 122 bp, Homo sapiens
ggaggcagaggttgcagtgagctgagatgacgccactacactccagcctgggggatacagcgagtctctgtctcagaaaaaaaagaaagaaaaaaaaaggcaaagggagaagaaaatttact

SEQ ID NO: 412730 - DNA, 122 bp, Homo sapiens
tggaaaaaaagtacgtatgtgtatataccacaaaactcgggtgcattctctagggaccggcgaagccattctttcaggagatatgctcagcatttgccacgggccagctgctgttccaggtc

SEQ ID NO: 412731 - DNA, 122 bp, Homo sapiens
ttctgtttccctttcatggcctgagcccacttgtgggcagaagggctccttccccaaggccgggaggccggagaccaggtcccggacgcggttctttgggctcccacttagcctccctttct

SEQ ID NO: 412732 - DNA, 122 bp, Homo sapiens
ccacactgcctgctcctgcgcgtggcctgtggtcaggggtggcagggtcagtccttgcctcgcagctgaccacacagcaccatccaggggcgtaggcaggcagagcaggtgttcgggctggg

SEQ ID NO: 412733 - DNA, 122 bp, Homo sapiens
tctggctttcggggtgttaggctccagggacctcctgcggagctcgcaccctagctctgccgccactgccgcctcctcggccccggaccgccgagggttaacaaaaaagccccacgccccct

SEQ ID NO: 412734 - DNA, 122 bp, Homo sapiens
gtacctcaatcacggtggacatgctaagacatatcccaagatttcagatcggttcctccccgtagagattgggacaagaacttttccaccgtggggacgtactttgacccccagagttgaca

SEQ ID NO: 412735 - DNA, 122 bp, Homo sapiens
gtgggagaaacagccccacaccttgctgtcagtctctcgggatccctcaggaaatctttacgttcccttctgcattcacacctgggtgtgagaagccggtccctgacttcccagggactcat

SEQ ID NO: 412736 - DNA, 122 bp, Homo sapiens
aacctcccccacacctgcccaagaaacaaaacaccaaagccagcagccctcgcctcccagcgtgagcagctgctctgggctgagcccttagctctccaggccaggctgctgcctacctcacc

SEQ ID NO: 412737 - DNA, 122 bp, Homo sapiens
agcgccacagccccctcccgctggccctgaaaataagcaagtcgtgggagaggagaacgacgagggagcccacactcatccctgctacaggttctctggaaaacctctgaacaggctgtgca

SEQ ID NO: 412738 - DNA, 122 bp, Homo sapiens
gcaaagtacagtgcctttctattctaccatgctgcctctggagcatgaaagcccagcaaacgagaagactggaaatcataaacagtactgttgaccaaaaatcattaataggcaggcttcat

SEQ ID NO: 412739 - DNA, 122 bp, Homo sapiens
agaaaacagcactaagcgtcctggaggacgctggagcttcaggatagtgtccttccaggtcgtgggaccgccccctcctccccgcactccaccttcccgcaactggatcactcggcggaagc

SEQ ID NO: 412740 - DNA, 122 bp, Homo sapiens
ggacgaaggagagggcggaaggaccgtggcgatcgcaggtttgtccccagttgatagttccgtgagttcctcaattattcctccgcccaggttcacagctgaaactagaggtcatgggtgcg

SEQ ID NO: 412741 - DNA, 122 bp, Homo sapiens
ggggatgctgccaccccagtgccagggtggctccgcccagccccttcctgctgccgccctcgctgactcacctgtccagcctcctactgggctggggcaagggcttgttgccccagagccta

SEQ ID NO: 412742 - DNA, 122 bp, Homo sapiens
agggcggggtggctcacacctgtaataccaactactcgggaggcagaggtgggaggatcacgtgagcccaggagttggagaccaccctgggcaacagagcgagacccagacactacaaaaaa

SEQ ID NO: 412743 - DNA, 122 bp, Homo sapiens
taacgtttagagagcttactgagtcgtgtataggtccaaccttaagcccatctcccactgcgttatttaaatgtcaaagaatatgcatgtgtatttctaaactgttctttgtgggtaccagt

SEQ ID NO: 412744 - DNA, 122 bp, Homo sapiens
ccagcctagctcagaatgggtgtttcttggagcctctgggactgttttctttccaggaaccggcgcgtatttctgcagtgagaccacaggacggacatcggcgccttcggcttcgatggagt

SEQ ID NO: 412745 - DNA, 122 bp, Homo sapiens
gcaggaggcatgaggctacagtcagaagaacatgaggatgacgggcagcatgtgtgcatgcgtgtgcgcgcgcatgcatgtgtgtgtgcacgtgtgtgtacatgtgtgtgcctccgtgtgtg

SEQ ID NO: 412746 - DNA, 122 bp, Homo sapiens
ctctaggagtttctgctgaggaaggcgcaggcaaccctagtcggcttagagagagacaaccgcacgcgatcaccgagcacgatttctcccaacaaaaaaactaacaataatagcgatccaca

SEQ ID NO: 412747 - DNA, 122 bp, Homo sapiens
gttaaggggagggggtgtaagagccagcgaattctttttctttttctattattattttgacgactcctgagttgcgcccatgctcttgtcagcttcgttttaggcgtacatggccaggcaga

SEQ ID NO: 412748 - DNA, 122 bp, Homo sapiens
gagtgcgagccttccgttatgcccagacagagccaccagaagggctccttggcctagcggcgatgccagcatctgggaagacgcctgttgccaggcggaccgtggtctagtggtagcgaaaa

SEQ ID NO: 412749 - DNA, 122 bp, Homo sapiens
cacccgatcacctctccagctctgcttttcaaactccgatcccagtctcctgttttgttccgcccctccaaagcttcccaatttacttgctctcactctcaggcctccctcaacacaccgtc

SEQ ID NO: 412750 - DNA, 122 bp, Homo sapiens
acatgtcctcccataaaaaatcaatatgcggaagaattttagactcccagagcaagaagtcgtgaagtcatatttctagaagtgcaatgatgtcccctggtttgtgatgccttaatgcaaat

SEQ ID NO: 412751 - DNA, 122 bp, Homo sapiens
tcctaaaaaggcgggagacagatcaaggcaaggggccgaggacaggcaggagctgccaggcgcggggctcctccgtggggatgtggcttgggtatacagcagaaggacagcgaggagaaagg

SEQ ID NO: 412752 - DNA, 122 bp, Homo sapiens
gccatagggagagacgcgcccacacactctcgcccgcgcccaggacagctgcgggagccccgggccgctctaacccaatgcgtctcccgcaggctgagatgcggctgctcctgctcgtgccg

SEQ ID NO: 412753 - DNA, 122 bp, Homo sapiens
ggccgagccccctcggtcccctcaggggaatttttggaccaggtgccggtgcccattgggcgaggaggaggagaggagccctggagaggtgggggggcggccaatcagggagcagcggccgg

SEQ ID NO: 412754 - DNA, 122 bp, Homo sapiens
atactgctggcacctataaaatgttcagtaaagttagctattagtagcaatagtttcctccgaattccaaaggacttattctacgccctatttgctcaactactaatctttattggacatac

SEQ ID NO: 412755 - DNA, 122 bp, Homo sapiens
cacacagcctgagccctagcacagagctggccgcagagagggcagcagtgaatgtgtcctcggtggttcctccagatggggcctttgtccgcagtgcacttgtctctgcctgggttgctata

SEQ ID NO: 412756 - DNA, 122 bp, Homo sapiens
gaccagctcgccctgcatacacttcttggctgtgtgcgctcagcaggacgtgggaggctccggcttcaaggtcggtgagtccgtgaaactctgctttattcctccaaagaggggtcatggct

SEQ ID NO: 412757 - DNA, 122 bp, Homo sapiens
acaaaggcagaatagcagatagtaatatcatctatatttattccacatcaaatgcaagagcgttcttaactttacgacagaaaggatacatggggcgtgtatttgatgcaatgtccaaccag

SEQ ID NO: 412758 - DNA, 122 bp, Homo sapiens
ccctcctccgttggagatcatgagaccttgtgggtgggacccacagacaccccttcccctcgaacaaacagacatatcacgcaggctgactcagaaatgccaactggagattccggcagtcc

SEQ ID NO: 412759 - DNA, 122 bp, Homo sapiens
gccacggagtgggcgggacgccaggcaggcgggggacgcggcggctgccagccaaggggccggagccaagagatttgcattggaagcgccatcctcttgcgcgtctgatgaggaagcagaac

SEQ ID NO: 412760 - DNA, 122 bp, Homo sapiens
acgcccgactccgctcccgctcggccccgctcccggccccggccagcacagcgctctccgcgcccccagcaccagcccgctccgctccactccgcgccgagaacgctctgcgccgccccgcg

SEQ ID NO: 412761 - DNA, 122 bp, Homo sapiens
acccactcactaatactgtcacacacgctcagctcccctcggcgggcagggtcagagtggcgccggaccctcatggacatgtttgcagcatctaggtaatttttgtattcctccagcagaaa

SEQ ID NO: 412762 - DNA, 122 bp, Homo sapiens
gccaggtgcgccaggcttggggcggggcacctctggctgggcggggcggccgggccccggcgctctccagaccccggcgggtagctggcgctttgggaacctcagttgcctcggttggaaat

SEQ ID NO: 412763 - DNA, 122 bp, Homo sapiens
tttttgattgactgctctattgagcaaatatttattgaatgcttgtgatgagtcaggggccgtgctgagaacgaggggcatatagtgatgaaacagagaatctctggctttaagaacttcca

SEQ ID NO: 412764 - DNA, 122 bp, Homo sapiens
tgtgttgagatgtgcctctcacctagaaaatggtccttcacgcagagccactcacagacacggctgtgtgtctctaactgctccacaacacagaggcgatgggggcttagcaacagtgacat

SEQ ID NO: 412765 - DNA, 122 bp, Homo sapiens
gttgcaaaggaaagagcttcgtgagactttctccttcccggcgtagggaccagcagagtgcgggcaggtcagccctgtcaccggttcgtttagggaaaaagcgcgacatggggcctgggaga

SEQ ID NO: 412766 - DNA, 122 bp, Homo sapiens
ccttgacaagggagcttctttatgtgtagctacactccatgattccaagagcccagcagccggggctggcctgtttctagagtcataagaacatgaagtctttgatgtgggctgaagatttt

SEQ ID NO: 412767 - DNA, 122 bp, Homo sapiens
gaccaacaggtacctgacggagcagcggcgccagagcctggcgcaggagctgagcctcaacgagtcacagatcaagatttggttccagaacaagcgcgccaagatcaagaaggccacgggca

SEQ ID NO: 412768 - DNA, 122 bp, Homo sapiens
aatctgattattagacagatgattcatcacctgaaggcggttaaatgacctggttcacctcgtccggcctgcgctgccgctccttcagcagttccgcttcgggcaaggaagaggcgccgcca

SEQ ID NO: 412769 - DNA, 122 bp, Homo sapiens
ctgttgcaaaaatgggcttagttaagaaataagcagtggttggccaggcattgtggctcacgcctgtaatcccagcacttagggaggccgaggtgggcagatcaactgagttcaggagttcg

SEQ ID NO: 412770 - DNA, 122 bp, Homo sapiens
agacacgtgtcaattggtactctttatccttgcgagtaaactccatttcccaggttaccccgggacaaatccgggggcggaacttcagaggtccacgctggcgcctgcgcgtgtggttgagg

SEQ ID NO: 412771 - DNA, 122 bp, Homo sapiens
gaatgcaaacgtgtatttttttaatataaatatataactgtccttttcatcccatgttgccgctaagtgatatttcatatgtgtggttatactcataataatgggccttgtaagtcttttca

SEQ ID NO: 412772 - DNA, 122 bp, Homo sapiens
ggtacagttgcctcgcccggcccagagaaggaaggtcagcagttcagtctctggaggtttcgcaaacctcctcagtccggggaaacgatgttctttggtttaggtcttacacatatctcatg

SEQ ID NO: 412773 - DNA, 122 bp, Homo sapiens
cactaacccagaacacccagtacaatgatgcagaggatgagggtggccccaattcctacccggtctacctgatggagcagcagaatcttggcatgggccagatcccttccccacggtgatct

SEQ ID NO: 412774 - DNA, 122 bp, Homo sapiens
agcccttctaggaaagctgagctgaaaggcagctgcggagggcagagtgctggctgggtccgggctcacttcctccttttcaggcaggaaaagcagacaaaagtgcacaatggaccagagag

SEQ ID NO: 412775 - DNA, 122 bp, Homo sapiens
gctggaaaccccggagtaaggctcgaccttggccagacctgcaggctgcggaaccgggggcgcgcgggcgcagcgcagcacagcccggccatggagcacgcggtggccccctgcgtcctcta

SEQ ID NO: 412776 - DNA, 122 bp, Homo sapiens
agggtcattactattgctccttaagcttcctcgccggtccacctacccagacaaggcaaacggaaatctgcagcaggactcagcttggtgcacacaactccgccctcgccacacccactctg

SEQ ID NO: 412777 - DNA, 122 bp, Homo sapiens
cgccccctccagcaggccgcgccggccgcccgagggccgcggtgctgcagtgcccccgcccgcagcgccccccaccgccccgcagcggcctcgccccgcagcacccccactaccgccccgca

SEQ ID NO: 412778 - DNA, 122 bp, Homo sapiens
ctaatttccagaggaccagtttattggctctgtgtacccatctctacctgtgtgtgtatacgtattaggtacactcgctgctgtggatgcttggggaatcttagggatattgccaatctggg

SEQ ID NO: 412779 - DNA, 122 bp, Homo sapiens
agattactaactaaattatttcctgtgacttcttagaaaagctgaactcccaaggtatgccgcttggatatggggacgcgcacacacacacacacacacacacacacacacacacacacaca

SEQ ID NO: 412780 - DNA, 122 bp, Homo sapiens
gcaaggacagcacaggtattgctccagcagtggtgctcagaagccaatcccccttccccccggcaaacccccagccaaagcctaagtggaagcgtgggagcccagcaggaggcgcagaggca

SEQ ID NO: 412781 - DNA, 122 bp, Homo sapiens
ggggccaggggcaggggttccccagctctgctgcctccgataagggcctgaaggggctgtcgcgctcctggcggtgtgataaggagggcggggggaggccgcgggaaggcgtcggggtttga

SEQ ID NO: 412782 - DNA, 122 bp, Homo sapiens
cccacctccccactgcgcaaatgctggaggtttgagcagttagggttctcagaagggcctcgcagatagcaccagtggtttattgggggttgggaggtgtgtcttgaggctgggccatgaac

SEQ ID NO: 412783 - DNA, 122 bp, Homo sapiens
gtgtagtcccagcgttgattttgggatccttcacttgccagttacgtgactttgggcagacgactttcgctgcctgagacttggtgcctcatgagtgacaaggatatattgcctgtcacctc

SEQ ID NO: 412784 - DNA, 122 bp, Homo sapiens
gtcttgggtctgcgagaccactaggcgttctgccggcagtcagaaccgcggcagaaagggcgcgagcggggaactgcgggaacgcagcggcccgggaagctggagggggcggacccggccgg

SEQ ID NO: 412785 - DNA, 122 bp, Homo sapiens
gtagcagttggagccttgaaagtcagaaaccaatgaacggaacagcctgagtaatggacccgactcgtggaaggctgccaagctggagagtgaggggacggagacagaaatatggcgtgatg

SEQ ID NO: 412786 - DNA, 122 bp, Homo sapiens
aactgctaggacagccaggccagcaacaatgcccacgatggggacggtggactgggaagacggctctgggaaaggaggggaagatgaggggccctgaccctgctgaagggctcctgctttcc

SEQ ID NO: 412787 - DNA, 122 bp, Homo sapiens
acacaatctcgccaagcttcgcctggtggtgccacctccctggcctgtgacaacggcagacgcgcgaagcaccgggaacctgagccgtgaccgcgggctctggcgcctttaagggggtcaac

SEQ ID NO: 412788 - DNA, 122 bp, Homo sapiens
ttgcttggccatatttgcctgtgtgccaagtgcaggtagcggcaacagttctgacaggcacggatggcgggtcccgtttagagggcttcaaggttcctgagagcgcccgctgccaggcctca

SEQ ID NO: 412789 - DNA, 122 bp, Homo sapiens
tgtgcatccggggaagaacttccgcggaggagcgaactggccgggcacacaaacgttgaacgcgggtcagccctcggggcaccgagcgcgcagaccccgcccggcccgaatcaaccgcccca

SEQ ID NO: 412790 - DNA, 122 bp, Homo sapiens
tttgtcataatgagcttctccatgatagtttcagtttttacacacacacacctgtaatctcgccagctaggtgtgtatgtttattcgaagtaacctgtgttcgagagtacctgccacaggct

SEQ ID NO: 412791 - DNA, 122 bp, Homo sapiens
cgtccaccatgaggacagagatgccactgtgcaggaggatgttgaccacgtgaaagcccacggggtggaagcctcccgagaggtagtagttaatcctgcagaaacacagggtgttcagggta

SEQ ID NO: 412792 - DNA, 122 bp, Homo sapiens
gggagactctgtctcaaaaaaaaaaaaaaaaaaaaaaaaaaaaaaaaaatcaacacaagacgctttcaggaaagcaggcgttattagatcccacagagagcattcttgtttttaaggactca

SEQ ID NO: 412793 - DNA, 122 bp, Homo sapiens
gaaaggcctccttgggaggctcccagcattccatgtggtcttgccgcttctcctctctgccggtctcaatgtccccctgagtccctgtggcccggactagccacactgtggccttgtttttg

SEQ ID NO: 412794 - DNA, 122 bp, Homo sapiens
gggtgggggtggtggccttcttggtaacagttgctctgcctatttacatcctttcgacagcgtttgatccagttgcaagccgaggtctctagaggaaaagaaaaacaagtccccctccccca

SEQ ID NO: 412795 - DNA, 122 bp, Homo sapiens
ccctgcagaggccgaaacggagacgagtgtggtagtgatggggtttcacgactctgccgtcggtggcgaacggtgtccgtggcaaccgccttctgacgtcaagagttcttgacgtcatgcca

SEQ ID NO: 412796 - DNA, 122 bp, Homo sapiens
cctcagtgacaccaactaggctgcttcctgcctcagggcctttgtgcatgctatttcccccgtgcatacatgtctgcaccattcgcataattcaggtctgagtgccgccaatgtcatattcc

SEQ ID NO: 412797 - DNA, 122 bp, Homo sapiens
tcgtcttcccactcgctgcttccggaaggtccctgagccccaaggcccccgactctgcctcgggcatgggcgtttgggtggctcttgctacctcgctcacccttggcacctcggccagtctc

SEQ ID NO: 412798 - DNA, 122 bp, Homo sapiens
acaaaggccgcagcaggaaagctgtgggagaggccacaggaacagcccagctctccttcccgcccagaaaactcctctgaacaggaagattagccaggggagttgagggaaaatggcaggac

SEQ ID NO: 412799 - DNA, 122 bp, Homo sapiens
cgccgcaggttagagacgtgaggccgcgaggctgagggctgtgaaggcggtgggcacgcacggcgtgccggggccgcctggcttcgcggcgggggaggtaacactgcgacaccccgcagacg

SEQ ID NO: 412800 - DNA, 122 bp, Homo sapiens
tagagtctgcatctgattgctcactagtgatagagggcatggtagtttctttctgcagcacgtgtctgacattttggggagctgaaatttattgagaagttcagcaaatttacccagcaaaa

SEQ ID NO: 412801 - DNA, 122 bp, Homo sapiens
gaggccctccgcgttgtctggcggaggaggggagtggcaggtgatcctcacaggtaagctcgccgggcattttcatgcagcaggattatgataaatgcttaacagacacacggctgggctgg

SEQ ID NO: 412802 - DNA, 122 bp, Homo sapiens
cacagtgcagcaggccccatctgggaaacacaaatggctcagttcctctcccattttcagcgccccagcccacaggcgggtccttcagccccagccccacacccattcagggaccatcccct

SEQ ID NO: 412803 - DNA, 122 bp, Homo sapiens
gtcacataacacttaaaacatcaaaaaagctttctgataaaaagctcagcttttaaatcacgttttgtttctgcaaatttgggagacaaattgagttcttactggaatgtggcctatcgctg

SEQ ID NO: 412804 - DNA, 122 bp, Homo sapiens
ggctggacacttggctgtcacacttggccttctggggtgactgcgtgagtgtggccccctcgtcagcctgtcaggacacctcctcttgctggggctgcgcctctggctgggatttgtcctgg

SEQ ID NO: 412805 - DNA, 122 bp, Homo sapiens
tttcaaggagaagcaggacaatcatgtcagagagcttcagtgaggttgaaaatgctccaccggattcagcagtcttgaggctatcagaatcctttggcagggcaggggtttggaggggtgag

SEQ ID NO: 412806 - DNA, 122 bp, Homo sapiens
aactctgcagatgcatttgataaatgtatctgtatggcagcaagccagcaagttcctgaacgacaacaggatgtaagctcagctttatgaagcatatttattgtcagagtcatcacattctc

SEQ ID NO: 412807 - DNA, 122 bp, Homo sapiens
cgctcatttgatgagtctcatccattggttagaatggtgtagccattctggctgagagcccgccctaggcctggcctcacaatgggaatcaagtcccaaaccggttccgggttagtgccctg

SEQ ID NO: 412808 - DNA, 122 bp, Homo sapiens
ggggttgggggataggccacctcacccctgaccgcctcttccgcccggactgcagtcacccgaatagccttctgcctgcccaagaggagcagaattgctcaggaacccggactagggtcctt

SEQ ID NO: 412809 - DNA, 122 bp, Homo sapiens
aaaacgccgctctcgtgccctcggcgcccagtcggtggagaggagcgctaggttccacagcggggcgccaggtttatcaagtatgcaagacgtctacttaatttgaatttcagattaaaaaa

SEQ ID NO: 412810 - DNA, 122 bp, Homo sapiens
aacatgatttcattcatttagaggagaactatttcctggtgaagtggaaaattgtgcggacggattctggaagaccttcagtctaaagcagctttatagtgaaacatttcatttagaaatct

SEQ ID NO: 412811 - DNA, 122 bp, Homo sapiens
ggctgcatctccgctccagcaaggcggtcagccactggactccggaactggaggaagccccgcccactatggagccccgccccaggccaggtcaggccccgccctctgcccgcccacgactt

SEQ ID NO: 412812 - DNA, 122 bp, Homo sapiens
tttgtgggggcctcgctgctctttctgctggtgaacgtgctgtgtgctgtgctctcccatcggcgccgggcacagccctgggccctgctgcttgtccgcgtcctggtgagcgactccctgtt

SEQ ID NO: 412813 - DNA, 122 bp, Homo sapiens
gtgatggcatagatggtgggcagctgcggctccggctgtggctgcggccgagactggttgcgcttttgggtcccgtgagccgggccgcccctgcggagcgggagtcgggcgcccccgcggcc

SEQ ID NO: 412814 - DNA, 122 bp, Homo sapiens
attgcaattttacatgtctcctcatgcattcagtagagctttattttaggtttataggtccgtgaggcaacctgtttcttcttcagtttccttatactgtactctggtcccctttggatttg

SEQ ID NO: 412815 - DNA, 122 bp, Homo sapiens
ttaattcatatttggctttggaatgtagtgtatggtttttggtagggaagtcaatattttcgattatgttttgcttagatcagtgttgaactaagttggcatagcacacactaacagttgta

SEQ ID NO: 412816 - DNA, 122 bp, Homo sapiens
aagcaccagcactgctgtaagtgccctgagtgctatgaggtgacccgcctggccgccctgcggcgcctcgagcctccgggctacggcgactggcaagtccccgacccttacgggccaggtgg

SEQ ID NO: 412817 - DNA, 122 bp, Homo sapiens
ctgttcggagccgcagaaaacatgacagctgtaatcaattagggtggttcctgcctcaagcgccggctgcctcggattccaacggctttcctggcggctgtgagcgcctcgggatgcagacc

SEQ ID NO: 412818 - DNA, 122 bp, Homo sapiens
tttaaggaagagatgtggcagtggaacagatacaagaactactgagtgtgtcataaggggcggttgccaccacttcctgtgcatgtcctctgagtgacagtgaagaggatgtgtgtgggtaa

SEQ ID NO: 412819 - DNA, 122 bp, Homo sapiens
cccgggaagctggagggggcggacccggccggcgagcgcaggcgctccctggctcacgcgcgcaccccggccccaccacccacccttacgccgcggcccgccctccggggcgggtaagagag

SEQ ID NO: 412820 - DNA, 122 bp, Homo sapiens
ttctcgacagcttcggggaactgattccgcagccttccaatgaaggtaagccaggtaccgcgacgcacggagctctgccccgcggggctcacgctcttcaaagcacgttctcaccgaagcct

SEQ ID NO: 412821 - DNA, 122 bp, Homo sapiens
gagtgccagccggcagaggcggcggtggggagcacacagagtgccagccggcagaggcggcggtggggagcacacagagtaccagccggcagagggggtggtggggagcacatcacacctag

SEQ ID NO: 412822 - DNA, 122 bp, Homo sapiens
gacggctcccacgagggccgcttccggcgggaggtggcggggcttaagtccccagacccacggttgcttttaacgctggaactccgagggagtcacccgggaagctctgtaaagttctgtgc

SEQ ID NO: 412823 - DNA, 122 bp, Homo sapiens
ggcaggcggacaaggtgtggcggctggacctggtcatggtcatcctgttcaagggcatcccgctggagagcaccgacggcgagcgcctggtcaaggctgcgcagtgcggtcacccggtcctg

SEQ ID NO: 412824 - DNA, 122 bp, Homo sapiens
aacagagcgagactctgtctcaaacaatgaaacaaacaacaaacaaaaccttttgaagcccgcatcaagtcctttaacaattaaggagagcatttatctttaaaattagacttatatgcctc

SEQ ID NO: 412825 - DNA, 122 bp, Homo sapiens
caagtgtgctggtcagaaaggagagaacctgcacacccaccatggggaggtgacacagtgcggcctcagcatccacggaccgcgcctcagccacagacaggagtggcctgggagacacgcgg

SEQ ID NO: 412826 - DNA, 122 bp, Homo sapiens
tcactcccacccgaatacggcgcttttccgacgggcttaaaaaacgtcgagattatatcccgcacctggctcggagggtcctacgcccacggagtctcgctgattgctagcacagcagtctg

SEQ ID NO: 412827 - DNA, 122 bp, Homo sapiens
cttctctttcgtctttctttgcactgtgtatttctgccaccatctgtcagatgcccagtccgggctcctgtgtttctatatgtgaagctaatcaggagaaaagttgctgttattaaatttaa

SEQ ID NO: 412828 - DNA, 122 bp, Homo sapiens
atgtagcaacaacagttgagtaagatactagacataactattactgctgtgaatgagttccggaagctgcagtctcactggtccttcgggtcatcatccagctttcagttaggggaagctgg

SEQ ID NO: 412829 - DNA, 122 bp, Homo sapiens
tacaaacacagaactgtaataggtagttttaatgtaacacatcacagcagtagatgcaggcggccagaaacgtgttacctggttttgacttatacccaatttccaagaccagactaagactt

SEQ ID NO: 412830 - DNA, 122 bp, Homo sapiens
gggagcttacccggcatcagagggactaaaaggctgccggtgtagttgtgcagtgcacaacgtgtgcgactgcatggggtgacattgtggggggcagacagtggaacacaattcatgcacaa

SEQ ID NO: 412831 - DNA, 122 bp, Homo sapiens
gctttggacctgagcctctgggccccgcggtctggaaagtgctcctttctctgcatgctacggggctatcaacttgagctggtccagtctgcagatctacatcctgcccgcctgagcagagg

SEQ ID NO: 412832 - DNA, 122 bp, Homo sapiens
gccccgcgcctgcctgccggctcggcccctcggagcaattctgggccaggagtggggacccggaccccgcccctgatgcagccccacccccgcgtccgggccttgcaccactgactgtcccg

SEQ ID NO: 412833 - DNA, 122 bp, Homo sapiens
tggggaggcccggctagtagggccgcagccaaccgcgctctcctcttcgcagagtgcgcgcgcaggatgaagaagtgcatcaggtgccaggtggtcgtcagcaagaaactgcgcccaggtgg

SEQ ID NO: 412834 - DNA, 122 bp, Homo sapiens
gatgccagtcaaggggttagactttgccccgcaggtgcggcctccaggtttttaagcagacgcctgtggctctcacacgccctctcccaaggcggcgtctctgggagccctggcgttccctg

SEQ ID NO: 412835 - DNA, 122 bp, Homo sapiens
gggccttcgggcgctgacagggagagcctggggccgggccgtgtggatgccatccccgagcgcggttcgcgctcggctgaggcgctggacaagtggcttgggctcccgcgcctcagtttctc

SEQ ID NO: 412836 - DNA, 122 bp, Homo sapiens
accacctcctgcgtggtcctagggtctgtgtttcaaactggatttgacgtggagcctggccgagcaaccaacagagatggtcaggctgggggaggggctcaaattctttcctgcctctaaga

SEQ ID NO: 412837 - DNA, 122 bp, Homo sapiens
tgtctttcagatagggggatttgagctgaaccaaagcatcaacaccaatcagactgtttccgaagaactagagttttctgggtcagcaatggaaagcctcagagggaatactgctcagggtc

SEQ ID NO: 412838 - DNA, 122 bp, Homo sapiens
aaacataacctagccttatgatcctcctttcccatttaaaaaagaggtgagcatctattacgcagactggattccattttagactgggaaatgcttgaggaggaaagtatttaaggccttac

SEQ ID NO: 412839 - DNA, 122 bp, Homo sapiens
aagatcacttagagtaactttttcctgcctcacttgaataatgcagagacacttcaaattcgtaacatgtttagggggtctcaaggaggatgggctatgcgttttgaatatatgcatataaa

SEQ ID NO: 412840 - DNA, 122 bp, Homo sapiens
cccatggctcagtctccggagtgattggagccctggagacctggcgtctcacctgctgcccgccccgccctcccacacgtcacagccccacccccgcctgtggtccccgacacactctagtt

SEQ ID NO: 412841 - DNA, 122 bp, Homo sapiens
gcactttgctaccacccagtggacaagtatgggctttgagaccgccaaggtgagcagagccggcctcctcccgcttgctgcccccgcatccctgtgagtgccgtgcgtgagcgcacacagaa

SEQ ID NO: 412842 - DNA, 122 bp, Homo sapiens
gtggacactcaatatttatgtttaatgaaccataaactacccagaagttgtatttttaaccgttagcaacttttttgtccctaagctggtagcttttgtcccaatctgatttgttggatccc

SEQ ID NO: 412843 - DNA, 122 bp, Homo sapiens
gtgggcaaaatggctgtcctcctagttttaccattggttggcttttgcgtccttcaagggcggttacttaccacggattggttctttttctcttgaggttggaggaagatttggcacggctc

SEQ ID NO: 412844 - DNA, 122 bp, Homo sapiens
cgctgctgcttaacctttcgctggtccacccgcaacggcccttccgttttctttgtcactcgtaaaggtgtggtcacttaacagggtatttcatttctgagtgcttttttgcccacccttga

SEQ ID NO: 412845 - DNA, 122 bp, Homo sapiens
tagggaaagacaggctcccagtagatagaaaacacctgaaacgggtgataagcagcttcccggtaagatcttagcagttgggcgagtgtactcaagcatgagcactaacaggcagaatgcca

SEQ ID NO: 412846 - DNA, 122 bp, Homo sapiens
agttcagggatactcatgggtcacccaactcaccttctgtgggacctggaaccccccaaccggatccctacagcccgatatcctacaaacactgccaatgtgacgtatgtcttccctgccac

SEQ ID NO: 412847 - DNA, 122 bp, Homo sapiens
tgtgcctgggccccgcccctgacctgggccggcccaggtggctggttgccgggatggctgcgaggatcttaggtgcggacccccacccagcggtctgccccatctgtgttcccttccttccc

SEQ ID NO: 412848 - DNA, 122 bp, Homo sapiens
tctgcaaacatgtattgggcgcctgctgtgtgcctggctggattcagtgccagggtggggcgaaggcgctgaggtctccgagtgctctttcaggtccaactccagaatcgcccagccccacg

SEQ ID NO: 412849 - DNA, 122 bp, Homo sapiens
cggtgacgcccagagctcccggcgagcgccgctctgtgatttggtgagaggctgtcaaaccggtgacgtgagccaggagtcacccagcagaagacaaagtcactcgcgctctgggcggccac

SEQ ID NO: 412850 - DNA, 122 bp, Homo sapiens
cctcggccgttttattcagttaaggaaactgagtcactccatcccaaagccagattcccgcggttctaagctgaagctgtctcgggtgcatttgcattccaaaaaggcgaagggtcccgcta

SEQ ID NO: 412851 - DNA, 122 bp, Homo sapiens
caccacctgtatcgctaatcctcttaactggcaggaatggggcaagtcaatttcaacacgcgagtcttaggctaaatctgtttataggagttgcccccagaaagggagtcaggatctccaaa

SEQ ID NO: 412852 - DNA, 122 bp, Homo sapiens
tcctgggacggagcctggggttggggggctaaggctgggagcgggctcaggctcgggaaccgtatccttgaggttttctttcctctccgctacgagtggcactttctcatgtttctgcagcc

SEQ ID NO: 412853 - DNA, 122 bp, Homo sapiens
gtgaatctacccacgctggaaacagcaggtcaaaactcctgtgcttctcagtagtggtatcgcaactgtgaatagccactgcactccagcctgggcaacatagcaagatcccatctctctaa

SEQ ID NO: 412854 - DNA, 122 bp, Homo sapiens
cctgggggtgctgcttcgtgacgtcagggctgagctagggggcgcccgctcctggctgcccgctcctcccggccctgcggcccccgcctgccctttaaaagagcggggcctgcgccggccgc

SEQ ID NO: 412855 - DNA, 122 bp, Homo sapiens
tacgttaaccactttcaagcataccattcagtagtgttaagaattttcaccctgttaggccgggcacggtggctcacgcctgtaatcccagcactttgggaggctgaggcaggcagaccatg

SEQ ID NO: 412856 - DNA, 122 bp, Homo sapiens
gatgaagataatgcaagacctcgctcttgcctttggaagctcactaaggaggggcaccgccgcttttgggaggagactcgtgtcttagcctttgctcaaagggagagaatccaagagtgcat

SEQ ID NO: 412857 - DNA, 122 bp, Homo sapiens
gagatgagacattctaggaaaagcggcggaggtcggctaagaacgtgtggagtttgaccgcgcaacacccttccccttcttcctcgccatttctgaggctttgggcttcaataactgagggt

SEQ ID NO: 412858 - DNA, 122 bp, Homo sapiens
ggcattttggaacagagaagcccccgccgtatatttgctaaaaagcgcgttcacataatacgaagaactcataattttgacctgtgatttgttgtccggcagctttcagtgtcggttttacg

SEQ ID NO: 412859 - DNA, 122 bp, Homo sapiens
ggccttccacaatgaagggaaagtgtacacaagtgggctagagcaaggaggtagcctccacgactgcacacttctgctgctggccaagtgacccccagtttaggagatatgacgtttggtga

SEQ ID NO: 412860 - DNA, 122 bp, Homo sapiens
actgcgcccagccggtcccatcgttttcttatctttattcctgatgaggatttgaagttgcgtggtcatattttctcctctgctttcccctgggggctggagaggaggtggggaagctcaac

SEQ ID NO: 412861 - DNA, 122 bp, Homo sapiens
gagtcagctcggtccaggcgaggctgggaagccgagccttggctctcatgtggctccacccgcctggctctggggccggggcaggtctcgcctctctctgggcctcagtttcccctctgcct

SEQ ID NO: 412862 - DNA, 122 bp, Homo sapiens
agctgtacctgtggggctggggccaaatggtgcacccacgtcgtggcactctgtctcttccgcatccacaacgtgaggccctcccaatttatcccggccctatcctacactccatccccccc

SEQ ID NO: 412863 - DNA, 122 bp, Homo sapiens
gcctttctgcggatttgtgtacttaagtgatcatcaatttgtctatgcttcatttctcctcgatttagaactaaggagacaggcaaggacagggaaatggacagactgattgattgactgat

SEQ ID NO: 412864 - DNA, 122 bp, Homo sapiens
cgggtaaaggcgagaaggctgcaggagaccgagggggagccgggccggtggggccgccgccgccgccatgcaggaaatcatcgccagcgtggaccacatcaagtttgacttggagatcgcgg

SEQ ID NO: 412865 - DNA, 122 bp, Homo sapiens
gctgggactgctcagcccctacctcaatatgggcccacatagctagcctatggccctagtcggcagctcagagcagttcagtgctccctggggtgcattcatgtcccagccacaaccttatg

SEQ ID NO: 412866 - DNA, 122 bp, Homo sapiens
acctcgtgatcaacccacctcggcctcccaaagtgccgggattacaggtgtaagccaccacgccgggccaggatttcttaaatataacataaaaagcactcattagggaggcaaaaaattaa

SEQ ID NO: 412867 - DNA, 122 bp, Homo sapiens
catgaggagcccccaagggcggttttaagagggtgaagcaggaccgggcgcagtgacttacgcctgtaatctaagtgctttggaaggcctaggcaggaggatctcgagcccaggagttcgag

SEQ ID NO: 412868 - DNA, 122 bp, Homo sapiens
aggctcttaataatcctggggtccaaacattgggccactgggggacacaagtcataaagacgtctggggactggtcgatggtcatccagctgttaatagtggggctagccctgattttggga

SEQ ID NO: 412869 - DNA, 122 bp, Homo sapiens
agaccccggcctgaaaagggccaggtcccgggcagggccccacctctacctggtggcctgcgggctccccctcgccagtcccgccctgggctccgcagcccgtccctctctcgcctgccctc

SEQ ID NO: 412870 - DNA, 122 bp, Homo sapiens
cgcgcggccgcctggcctccgccagcccgggacggggatcgtgctaggtcccgtcgccctcggtggcctgagagcctaccaagtgtatttcctcgcgttttatagggaaaataaggcccgga

SEQ ID NO: 412871 - DNA, 122 bp, Homo sapiens
cccctgattcccgaaacgcagccccgggtctctgcatgacaagcagggcttgctgctccccggctgtgtagcactaacgttgtcttccgacttcgaactgtgaagcaaggattcctctctgg

SEQ ID NO: 412872 - DNA, 122 bp, Homo sapiens
gcctcaacctggcatgcatggagaccactctggaccctggatgccacaccttggccccctcgatcccttgcaaacaaacaggaaggagcctgtctcggatacctcccccacccagcctcacc

SEQ ID NO: 412873 - DNA, 122 bp, Homo sapiens
accacgtcccaggcagaccaagcccaggcggaccacgtcccaggcagaccacgtcccaggcggaccaagcccaggtggaccacgtcccaggcagaccaagcccaggcagaccacgtcccagg

SEQ ID NO: 412874 - DNA, 122 bp, Homo sapiens
gaggaaagaggaggtgtgtactatgcttcctctttcctgacattgcctctgagccacatccgccctcaccttcaatctaaccgtagaaatcaagtttcatctgaaacccagaagcccatctc

SEQ ID NO: 412875 - DNA, 122 bp, Homo sapiens
gaatgtgactaatgtcgcaacacattaggccactctcaagagaggcctgaacaggtttggcgtaaaaacggcagtgaggtgaggctggtgagaggggaagtggcgacagttcagtcaactcc

SEQ ID NO: 412876 - DNA, 122 bp, Homo sapiens
caatagaatgagaccatgtctctagatagctagctagataattgatacatagctttctgtcggaaatttttttcctagatttgaacctgtttttctaaagtagcattcaacacatcagcatt

SEQ ID NO: 412877 - DNA, 122 bp, Homo sapiens
gccctgccgtgtcaggtgcgcaggtgtggcaggtgtggcccgggcgccaggtcgagtcagcgttagcagggccggctcccccacagcgctcccaggagcccagcggaccctcctacctgcgt

SEQ ID NO: 412878 - DNA, 122 bp, Homo sapiens
ccacactccacacaagtttaaacatctctggaagctgatcacggacatcttcctggctcacggtcagaactgagaaacaatgacatatctgctcactagtttatggtccacctccacttcta

SEQ ID NO: 412879 - DNA, 122 bp, Homo sapiens
atttattgaggagctgccttgtgctatatacggatggtatggtggtagggcctgctttcacggacttagatttaagcaggggagaagtctagtaggaaacatatacctgagtgtctcatcat

SEQ ID NO: 412880 - DNA, 122 bp, Homo sapiens
ccatgcagccaacgctgcttctcagcctcctgggagccgtggggctggcgggtgagtgggcgcggcgggccggtcagcaccgcggacagcgccagcctcgctcttccccgccgctcccgcag

SEQ ID NO: 412881 - DNA, 122 bp, Homo sapiens
tatgagtcacaagtgagttataaaagggtcgcacgttcgcaggcgcgggcttcctgtgcgcggccgagcccgggcccagcgccgcctgcagcctcgggaagggagcggatagcggagccccg

SEQ ID NO: 412882 - DNA, 122 bp, Homo sapiens
atacccaaatattagagggatgcagcagtggggaatgtataatccatggtgtctttgtttcgtgagaaccccaatgaagaaagagaaacagggagacatagtttagagcatgccgctcagca

SEQ ID NO: 412883 - DNA, 122 bp, Homo sapiens
gcaggcacaggtagcacacccagttgctcatggcgtgcaccttccccgaggtcccggggccgaccaggctatccacacactcgaagcagtagcatctaaggccagacagaaaaccacagcag

SEQ ID NO: 412884 - DNA, 122 bp, Homo sapiens
agcctagaagcaataactgattaactcaagaacattggccagaaactcatacaaatccatcgacattcactctgacttttctctattttcatctttataataattagtaaaagttctttttt

SEQ ID NO: 412885 - DNA, 122 bp, Homo sapiens
cgcctgtattcccagcactttgggaggccgaggcgggcggacagcttgagctcaggagttcgagaacagcctgcgcaacatagcgagacccccgtttcaaaaaacacacgaaaaaattaaaa

SEQ ID NO: 412886 - DNA, 122 bp, Homo sapiens
taggaggggcctgtcctccttccgagctccaggaggcagactggccgggaggctgaagcccggttcacccttctccccagttcacaggtctgggccctggtcaggggagcaaccccagcgtc

SEQ ID NO: 412887 - DNA, 122 bp, Homo sapiens
ggatggcccgcttgttgcttggccaggtgggggcccacacctgccggggggctccgcagacggacctggggactccaggagcgcctgagtccccatcctcgagtgcaccgggctgtcttcga

SEQ ID NO: 412888 - DNA, 122 bp, Homo sapiens
gagagagcactgcattctgggatttgtagtttctctggtggataccgtcggcgttgggaccgaggcagccctgcatcctgggacttgtagtttctcgcactgcgtgttaagattttggtggt

SEQ ID NO: 412889 - DNA, 122 bp, Homo sapiens
gagggactgtccagcctcctcgctaccacttagcccctgtaaaggaggaagtccctttggcgagggatatgagatcctgttttgccaatgaccgtagtctgccctccaagggcccgtgaaga

SEQ ID NO: 412890 - DNA, 122 bp, Homo sapiens
tgctcgcatttgctgctggggaacttgtctttgttgttctcttttttccacttcatcctccggttctggaaccagattttgacctgtctctctgtcagtcccagggcgtgcgatacctcgat

SEQ ID NO: 412891 - DNA, 122 bp, Homo sapiens
gacaagccaatccgaagaaatggcgacatggttgcgccctggaaaaagacaaaagacaaacgctgtttgggggctataaaagatattatttttggtgccccatgtctacttaaccagtgctt

SEQ ID NO: 412892 - DNA, 122 bp, Homo sapiens
gtctaactcattctctgacctgccgccaattagaaaacaactgttgccaataaacgtggtcgcgccgcctgtgacctcagccgggacggacccgcgggcgggagcctgcggggcgtgaggcg

SEQ ID NO: 412893 - DNA, 122 bp, Homo sapiens
tcactgggtcagattctaggctagtataaaggcttaaaaagaagattattctgtcttttacggagtcagttggcttgttgtcattgaaatgccttacactgaaatgcagaagaggtatctcc

SEQ ID NO: 412894 - DNA, 122 bp, Homo sapiens
cttaccctatgttttcatcatctgtttgtttatctgttgcctcattatgagctgcttgatcgtcatggctacaaggtcatggtaaccttagatggctgacaatcccattttttgtaaatgta

SEQ ID NO: 412895 - DNA, 122 bp, Homo sapiens
ggctcggaaaagctgagataaggaggggcgaagtaatagtaatagcgacagtactaacaacggtaataatagctgtagaaaagggacgtctggtgttgctgccgcccctcgctcatcagcac

SEQ ID NO: 412896 - DNA, 122 bp, Homo sapiens
tacatgacaaggtttagcaaaatggtttgtggtacaaagcatggctgaccacaagggttacgattattttcaccctttataaatatatccccaaattgacttctgtcctagttgtccagtga

SEQ ID NO: 412897 - DNA, 122 bp, Homo sapiens
cttctcgaaggtagacaggcgcaggatgcggcggaaattggcaaaagccatggccgggggcgcggtggcgccggctcgggctcgggctcgggctcgggctgtggcttcggcggccgcgagga

SEQ ID NO: 412898 - DNA, 122 bp, Homo sapiens
acctcctactgcctggcggccggcggcggcgtcttccgcaccttcgacggcgccttcctgcgcttcccagccaactgcgccttcgtgctgtccaccatctgccagaaactgcccgacatctc

SEQ ID NO: 412899 - DNA, 122 bp, Homo sapiens
gccctccggccgcgggaggatctcccgccaagcttgttgcttttccaagttagtgcctggcgtgtgtgtgggctgcataggggcacccctcgaggcccccttctcttctcccgcctggactg

SEQ ID NO: 412900 - DNA, 122 bp, Homo sapiens
cgccggccggctgatgtcaaactgcagctcggctggtgtagctcttaaagggcccgcgggcgccgggggccgaggccgcccgcggggcgaggagggagaggctgcttccttgcccgccacct

SEQ ID NO: 412901 - DNA, 122 bp, Homo sapiens
ggccgctgcgcaggggcagccggatgccgtgctgggtgccgtgggcaggcagcactcccgcgcccatccacagcaggagccagggcagggcttgggccatggtgggccccggccttcgggcc

SEQ ID NO: 412902 - DNA, 122 bp, Homo sapiens
gacacgagggatcaggtcgctgctgtgaagattgtcaacctctctggttgccaacgacctcgagaatggggttgtggtccctgcgtcagggcggttgtgctgaaggctggatgagggcacgt

SEQ ID NO: 412903 - DNA, 122 bp, Homo sapiens
aaggaacccagaaaccaagagaaaggctccttgagagtgcttctaaggaaaggagactgccgtcttatttctgcttaggaagccccttgtgcctgattgagaaaggaattgggaagagaaat

SEQ ID NO: 412904 - DNA, 122 bp, Homo sapiens
ggttacaaattaacctgacatagacattaacaagaaaaaaaacccgtacttaattacatacgcagaggagtcccaccatggtcagatgattgaatattatacagcatcctacgctactcaag

SEQ ID NO: 412905 - DNA, 122 bp, Homo sapiens
caacatcaagctatctgactacgggatttcgaggcagtcattccatgagggcgccctaggcgtggagggcactcctggctaccaggccccagagatcaggcctcgcattgtatatgatgaga

SEQ ID NO: 412906 - DNA, 122 bp, Homo sapiens
tgcgggagatttaaacctgcaagaaaggaggcagaaggggagccatgttttgaggacagacgcaaacctgaggagctgagaaacacttgctccttccatctgcagctttgggagtgcaacag

SEQ ID NO: 412907 - DNA, 122 bp, Homo sapiens
aacacactttgtccggcgcgatcacaaaggggtctttgcgcattctcagccagctggactcgcgctggtaaacgctgtgttccctgctccctcgcccttcctccaggaagcacctccttctg

SEQ ID NO: 412908 - DNA, 122 bp, Homo sapiens
agatatatattttttaattgtatgtttgtgaaccattggtccacagttaaatgagtacaacgcgagggctactccatgccggctatagataaaacctgtctccaattcgtctgcagtctgtg

SEQ ID NO: 412909 - DNA, 122 bp, Homo sapiens
tactctcccaggaggccttcctgaattcttctgtgaggcagactacttcccgagctgccccggcccttctccggccaagtctctccagaaactcatcccattcgttctcagatggaagggga

SEQ ID NO: 412910 - DNA, 122 bp, Homo sapiens
atgcagagctcagcgccagccactcacaaggagcctggcaagttttatcgaattggtgaacgaagttcgaaagctctacccttggagatccttattcagtaggtctgaggtagacctaggaa

SEQ ID NO: 412911 - DNA, 122 bp, Homo sapiens
cgggcttgagttggctgctggggagatgatgcccgccttggaaactctagctggccttggcgggaggggaggaaggaggctggacgttgggggtgacgttgcttggaggaggtcgcttcgga

SEQ ID NO: 412912 - DNA, 122 bp, Homo sapiens
gagcccacaggatcctacaggaggggccaacaactgcttgcctttgaaacttgaaactctcggtctaaggttccttaggagcgtaaaaggcacagcgttttctgatcgcagcttcaggtctc

SEQ ID NO: 412913 - DNA, 122 bp, Homo sapiens
tttctgtaaattgacttaacatattaaatgggaactttggaggccaggcgcggtggctcacgcttgtaatcccagcactttgggaggccgacgcgggcagatcacgaggtcaggagatcaag

SEQ ID NO: 412914 - DNA, 122 bp, Homo sapiens
tacgccagaatgtttccaattgcactccttggcaaggtgaggtgtccaatcaggatgtggcggttgccctggaaacacaggtttctctacacaaagggtcagcagatgccatggggactaag

SEQ ID NO: 412915 - DNA, 122 bp, Homo sapiens
tggaggggcccacagacttgctttgcccctgccctggctaggctgaaggtgagtgggagccggggcacagatggaggtcagccctgggcccagcctcctgccgccgctgccacgtggctgat

SEQ ID NO: 412916 - DNA, 122 bp, Homo sapiens
tgggtccctgctggcccagctgcctgtggacgttgtgactggtgagtacccaccccacctcgtgatcactcagggccccaggagcgggtatgggcacagctcactctctgagtggcctgggg

SEQ ID NO: 412917 - DNA, 122 bp, Homo sapiens
ccatcttgcagatcaaaaactgaagccgacagtgaagtggttgcctgatgtcctatgcaacgcataatttcagtatctcccctaatttccctctttctcaaaaggggtttcttatttcatgc

SEQ ID NO: 412918 - DNA, 122 bp, Homo sapiens
tccactgagccggtgtgtacctaaaataaacaatcctcctgttcttcacatcggtctctccggtcctcagtttcccacaacactgcatgtgcttgagctgctcgtgcctcagctctggcctg

SEQ ID NO: 412919 - DNA, 122 bp, Homo sapiens
caagggcgccagaggcagagccatcttcagggatcaagtcaagggagaagctgaagaaaacggggcctggctagcccgctaaacaaaacgagacagatttcacaaaatcacagattgttaat

SEQ ID NO: 412920 - DNA, 122 bp, Homo sapiens
accccataggcagcacttctgattcaaggccagctgttttccattgtagtgcctcggaaacgcatgccctcaccactacaaattctggctgtgtaaacaggttccactatgaccctctcatt

SEQ ID NO: 412921 - DNA, 122 bp, Homo sapiens
tcccccttacaaatcctgcaagcccggggtctgctggagccaacccccagtcccccaaggcgtccccacgctcaggcagccaccctggcgggaggtcaggcctggggccagggcagctcatt

SEQ ID NO: 412922 - DNA, 122 bp, Homo sapiens
ctttttcagggcagaggtaatccttcccagagcactgtggccaatccatagggattccttcggtgttcactttaaaagggcttcatgaggatgaagcctatggcactgaagggaaggatccc

SEQ ID NO: 412923 - DNA, 122 bp, Homo sapiens
tttacagtcagggtgtacatttgatgaggaatctctaaatgggattttggggaatcaaaacggaatggtgcataagtgtgaaaatttacaagactgcgcaaagctgcaaggcccggagcccc

SEQ ID NO: 412924 - DNA, 122 bp, Homo sapiens
tgtgcaggtagcgctgggctgcaggaggcagccaagccaggcgcacgatcagagcagggacgcctcccgttccttggttcctgggctccaacgggcacctccaaaccaatagttccagcatc

SEQ ID NO: 412925 - DNA, 122 bp, Homo sapiens
ggggggaattaaattcctcctacacgttccgctcccctatcctgtccggttcaaatatttcgccacatgtaatattgaaaattctacagctggcagttatgtgctcagcgacggctttctgg

SEQ ID NO: 412926 - DNA, 122 bp, Homo sapiens
gctgatggacctggccaaggaaatgaccaaagaggccctgccaatcaaatgcctggaagccgtgatcctgggaatgtatccttcctcacctgaaggggaggggtccgggcttctctgggcct

SEQ ID NO: 412927 - DNA, 122 bp, Homo sapiens
ctgtcccgccgggctcctccccaaaataaagagacgttgttcactaacatgttgaaaagacgtgcttgtcattcttaataaacaactagagtaagaatacataagagaaacagagtggtatc

SEQ ID NO: 412928 - DNA, 122 bp, Homo sapiens
ctgcttatttcggcctaactcttggtttcctcatctgaacaaccccaggctcccatggttcgttcatcagacgctactgatcgccaacctcctggcaccccatctttaccctaaggcagcag

SEQ ID NO: 412929 - DNA, 122 bp, Homo sapiens
aacacaatgtagaaattgcccagccagttgaagcgtccaaagtcacccagcaggtcaaagcgagtgagccctgaagcacaaaggccaggatgagaggtgggctccccaggcccttttctgct

SEQ ID NO: 412930 - DNA, 122 bp, Homo sapiens
agaacactgattcccagcattctcactgcaggtcttgtggaacccagtgtgggcccgtcccgctgcatggctgcagctttattggtgtaaacttgtagggacatgtggttagtgccaggtgc

SEQ ID NO: 412931 - DNA, 122 bp, Homo sapiens
tggctaattggggtttaatttatcatggaagtacataaagaggaaggaaagctctacacacgtacaattactttgcttgttcaaagaagaaaagtcctaaacaacatgttacctgcttgtca

SEQ ID NO: 412932 - DNA, 122 bp, Homo sapiens
tctgcgtgtgccacggtgcccaacagcatctcgtgccagctgagctgcggtgtgtggacccggggaatggaccgggctggacaacctctaagacttggctccagctcagcctgtgaaggaat

SEQ ID NO: 412933 - DNA, 122 bp, Homo sapiens
ccgccaggaacccgggctagaatctgcagctgctttcagccctggctgcccctggttagacgccgctgatgcccgccaggccctcggcgcgctctgggggcgcaccggtgctgtgtgcctgg

SEQ ID NO: 412934 - DNA, 122 bp, Homo sapiens
cacgtattcaatactgtaggagacaagatgcttgggcagcactgacaacgccacaaagcccggtgcgaatcccgaggcgtcagccttgagacgcctgatagacactgagcgtgggctgaagc

SEQ ID NO: 412935 - DNA, 122 bp, Homo sapiens
gccacctgtggacagcgtcactcgctagcacctgagtggaccggggcgccttcggggatccgcaaaccaactgagaccacagaagctcagctgttctcagcaccgttctctacactgtgcag

SEQ ID NO: 412936 - DNA, 122 bp, Homo sapiens
cccgggccccctggggccccagggtcggtggaggaagcttcagtgccactggccagggcccgaccggcttcggccctgccgctgggcccgccggcgcccccgtggatctctgtgagcagacg

SEQ ID NO: 412937 - DNA, 122 bp, Homo sapiens
gcctgcgcagcgtgtagcgcctgggccctttcgggccgcacgcgcctgcgcagcccctgccgggggcgtcttcctcagtgcctgatggtctggacccctgggtctctagtggacatgggagc

SEQ ID NO: 412938 - DNA, 122 bp, Homo sapiens
gccacccgtcggcgccgggctgatcccacgcgcagcgcgcacctctgccctcacctagcccgggcgccggcacccgcccccgcacgcacctctgaggcttccccagcccaagcccgcactgt

SEQ ID NO: 412939 - DNA, 122 bp, Homo sapiens
aacttgcggaaccccggctggcagccagcatgtccccgcaccttttcatctgtccgctgacgctgccctggcagcttcagagttagtgctagagcacagtgctgccgccgcagcccagaact

SEQ ID NO: 412940 - DNA, 122 bp, Homo sapiens
tatgtttccctgaaaatctaatcaaggcagaatgttacccaggacgtgacccctgatgggcgcattgcacctaaatttgcaggtctttgcaggcactagaaatatctgctgggggcaccctt

SEQ ID NO: 412941 - DNA, 122 bp, Homo sapiens
gtctcacgccctgcccgtcctgggttcacggtttttcatcacctgcggctgtcctgcgatcgaccacagctgtgcaggaggggcaggaggtatctgttgctgcagttaccggaacctttgcc

SEQ ID NO: 412942 - DNA, 122 bp, Homo sapiens
tataactgactgctcaggatatgccaggccttttgctatgtagtgtctgttaacctcatgcggtgctcccagccctgtgaggtacgcattatgctctgcatttttttcagatgagaaaacag

SEQ ID NO: 412943 - DNA, 122 bp, Homo sapiens
gcagccgccactctcgtgggggtcttgtgctttggtgcccgtcagggcccagtgaagatgcggaaatccgccaagcagggctaagggcccagtgaggaccacggagtgaggcggaggctctt

SEQ ID NO: 412944 - DNA, 122 bp, Homo sapiens
gtgcctcagcttcctcgcctgtgaaataggtcgcctcgcagcctcactcacagggagtgtcggcagggttagatgagtgaatttgcctgaagcatgtaacccaggactgttctagcacggag

SEQ ID NO: 412945 - DNA, 122 bp, Homo sapiens
ccgctactctggaggctgaggcgggctcccaacaggcagagttgagcagggtagtaggggcgggaagtctctaataggggatgagggatgggaatctatgttgtacagcctggagatccctg

SEQ ID NO: 412946 - DNA, 122 bp, Homo sapiens
atatcctggtgtcacagttcccagggaggaagaggttgcacaacaaggccggctgggaagcgcttaggcatatccctcagtgaccgcccggacgtcagcctgtgtgcctggctttgcagaac

SEQ ID NO: 412947 - DNA, 122 bp, Homo sapiens
tccaccacagaactacccacatcctatcttgtcaccgttatctgactcagttgtcaaatacgatggagtccatttgaaaagcagagaatttgggaagccatgctgctctgaggggtttttgc

SEQ ID NO: 412948 - DNA, 122 bp, Homo sapiens
cggggccagtgccaccggccgaccgctcggagtgtggggcccgccgagcccacacccacccggaacttgcgctggcccgtgagcaccgcatgcagccccagttcccacccgcgcctctccct

SEQ ID NO: 412949 - DNA, 122 bp, Homo sapiens
tataactaacagaaatgaagaaaacccgcgagccgggaccgcgggggaaggtgtccccggcgtttgccgcctgccgagcggttcggttctcggctccctggcagccggccttcaggtcgggc

SEQ ID NO: 412950 - DNA, 122 bp, Homo sapiens
gggattacaggcgtgagccaccgcgcccggcggagaggagatttctactctggaaaggagcgagtggacagcacaactggtttggaaacacgacaaactgcgtctgcatttacagaagcaac

SEQ ID NO: 412951 - DNA, 122 bp, Homo sapiens
cttagctctatgttgtctctatgccttgctgtcttgcctgcctccttgtaggtccaacctcgggagcgcagcttttaaagagtgacagtgtttgtttggatcacccgcagcttgactcatcc

SEQ ID NO: 412952 - DNA, 122 bp, Homo sapiens
tattctttcttgccacctttaatgaaatcagcacactactcatcgttctcacatcttatgcgttcattgttgtaaccatcctcaagatgcgttcagtcagtgggcgccgcaaagccttctcc

SEQ ID NO: 412953 - DNA, 122 bp, Homo sapiens
cgtgcccttgcctaatagtgcctgggacatagcactcaataaacatcaacacctgtggaacgagggaattaaaaacaggttataaacaacccctgcacagccttcatcttactgcctctttc

SEQ ID NO: 412954 - DNA, 122 bp, Homo sapiens
cgggagggagcgccgagggctctggcgggcgctgcgctgtccccggaggagtccggagtccggctgaaagcaaaggttctcgaggctaactgtagcccccgcgctggtaacccgacacccct

SEQ ID NO: 412955 - DNA, 122 bp, Homo sapiens
tccttgccctggtcatccaaacacaaacaatcattgtgcggtggatggggtttcaggctgcgttgccaagcgttgggaaatgaaggcacacagaggccgacggagcgtcttggggccaccct

SEQ ID NO: 412956 - DNA, 122 bp, Homo sapiens
tcggcggccaggccctgaagccgcattggtgggtctccatttagtttgtcctttaaagtccggagaatgattattccataattctctcacctgattaattcttaactatgaacataattaca

SEQ ID NO: 412957 - DNA, 122 bp, Homo sapiens
aagaccggaagctgctgggtatccgcgccggaaccgcgagggggttggttcaggcctaggcgcggggcaggacgggaccggtgagtggctcctccaaacagctatagagacccagaaatgcc

SEQ ID NO: 412958 - DNA, 122 bp, Homo sapiens
ccccgctccccgcaccgtacccggccgcctcgcgccatggcggcccccggcagcgcccggcgacccctgctgctgctactgctgttgctgctgctcggtgagggggtcgaggcggggcctgg

SEQ ID NO: 412959 - DNA, 122 bp, Homo sapiens
aagaaatgacagcttctgttctcatacctgtgactcagagaaaagtggtttctgcccagtcggctgcagatgaaagtagtgaaaaggtctcagacatcaatatttcaaaagcacatactgtc

SEQ ID NO: 412960 - DNA, 122 bp, Homo sapiens
aaaatatcaagatcatgaaattcaaggaaaaactgagggactgttctagactgaaggaaacgtgatgtgaaaactaagcaaaacattgtgatcttggattgggtccttttggtaggaaagac

SEQ ID NO: 412961 - DNA, 122 bp, Homo sapiens
tcgccatttactcagaaaaaatgtcccttacaggaaccggcagcagctaggcgaagtcgccggcccacctccatccaaaatcatgctcgcgtgcttcggaagcatccgggtcactcctttcc

SEQ ID NO: 412962 - DNA, 122 bp, Homo sapiens
ctccgaccgcagccaccctacggcacatcagttccggcgtcacaaaggttccgccaggggcggcgggattacctaaatcactgacttggcgagagactcagtggatttaagtgaaaagagga

SEQ ID NO: 412963 - DNA, 122 bp, Homo sapiens
taaactctccccgactgagcgggctcccccggccttaatgagataatcaatacttgttctcggcttaatttccatctaattgctctttaacgacgccggataatgggccgcctcctgtgagg

SEQ ID NO: 412964 - DNA, 122 bp, Homo sapiens
ccggggcgggggcgctgctgctgcgggggcaggcggcggcaggggcggcggcggcggcggcggcccgctccagccatgccgaataaaaacaagaaggagaaagtgagtccgggcccggccgc

SEQ ID NO: 412965 - DNA, 122 bp, Homo sapiens
cgctcatgacacgaaatttggagcccgtacttggttaaggctggtgagtgcagggcagggcgtggccccacggccggcaggagtccggcgcacactgggcctggagcgcactgactggggct

SEQ ID NO: 412966 - DNA, 122 bp, Homo sapiens
gcgccgacctcccctgtgatggtgtcccaagcacaagagcctgggcgtggctcctggactcgcgattggccacagcctgttagcgggcggtgcatgtgtgcggggtcgtggcagacgcgtgg

SEQ ID NO: 412967 - DNA, 122 bp, Homo sapiens
cgccgccgctgcctccgcgccgccgctgcctccgcgccgccgctgcctccgcgccatggccggcctcagctacctggaggcagtgaaacgccagatctaggccctgcagcagcaggcggacg

SEQ ID NO: 412968 - DNA, 122 bp, Homo sapiens
cagtaagtggcagagaatttcatccgcttctgcttctgtctctggttgcaaaaccacacccgcaccacgttctttttgaggtccagtttctcggcgatggcggcgatcttctcggacgaggg

SEQ ID NO: 412969 - DNA, 122 bp, Homo sapiens
gggctgctggaaggcgcgactgcaacttgactttgcctcactgttgttgctggcagaatacgtacaccaatgcggacaagctcctagaagcagcagagcagttggctcagacgggggaatgt

SEQ ID NO: 412970 - DNA, 122 bp, Homo sapiens
ggggcaatggtgaaagaaaggagtctggtgggatgaacctggggagagagttcttggctccgctttctccatcatacctatggccttgtttggctgctctgtgatttcagagtgctcttcaa

SEQ ID NO: 412971 - DNA, 122 bp, Homo sapiens
ttgggagaaggccactaggctctctcctctgttgtttgcagttttggaggttgctgtctccgccttatggcactcagcccagccttggctgctgctggctgcagggagtggctagggctgga

SEQ ID NO: 412972 - DNA, 122 bp, Homo sapiens
ccgggcgggcaccgacaccgcccaaatccccgcccccaacgggccacgccctgcaccctacgtaaatgcacggaagccttccccgcccgcagcccagtcttggccccaccggtcacgacccc

SEQ ID NO: 412973 - DNA, 122 bp, Homo sapiens
gagtaattattattaaaagttaatgtcaacaagtatcgattggcaatttgtctccatccccgacccctagtttccctaaccgccaagcccggggttggggagtggagtggcacaagctcctg

SEQ ID NO: 412974 - DNA, 122 bp, Homo sapiens
attttaactaattacgtgttcatggctccatttccaaatatggttgcatcagaggatgttcgcagacatgaattttgagggctagaatttgacccactacactacatatattttattattac

SEQ ID NO: 412975 - DNA, 122 bp, Homo sapiens
gagcggtgggggagcaggcgcagggtggcacgagcggaggcggggcccgggcgtggggcacggctggggaagctgccgcctccggccctgcccggctgcctccgccgcggccagtggctatg

SEQ ID NO: 412976 - DNA, 122 bp, Homo sapiens
gccagtggccagtgtgcttctgccagccctgatcttcctcctgagctgggcgtccatggacgcagaacataggaagctttcgtgagatacgcaaagggtgccactgtccggttgccctccca

SEQ ID NO: 412977 - DNA, 122 bp, Homo sapiens
atacacacggttttgttcttggctctcttcgtaattattttcagatctaaatttcagatgcgtgcgttacagaaggctaccaggcgcgccagcagtgtctgtgccgtttggattccgcctgc

SEQ ID NO: 412978 - DNA, 122 bp, Homo sapiens
atatttcaagtggaacttagaagctattccttaaggctaggacgaacaccacgctacacgcgaaggctatcctatttgataaagatcaaaaactagcaaacaaaaatctccagctgcccacg

SEQ ID NO: 412979 - DNA, 122 bp, Homo sapiens
atctgattgcagccgaaagaagtaacgttgtttgatcatttgtatttcttgcctgatggtcggatttacatggaggtggctttgggtccccaggattctggatcgtggttgcatctggagag

SEQ ID NO: 412980 - DNA, 122 bp, Homo sapiens
gcgggacccacctccgctttcgggtaattaatttataaacagaggcggcggtggagctggcggagcctgcatagtgggggctgcggggactcgggaggcccgggcgggagggagaggccgag

SEQ ID NO: 412981 - DNA, 122 bp, Homo sapiens
ggggcagcaacaaggacaggggcttgaaggcgagaggctcgctggccacgaacgcgaatccggaggaagcccagcaggaaaaacagcaggcggctcaggcctagcaccccgttgtggcacac

SEQ ID NO: 412982 - DNA, 122 bp, Homo sapiens
ttttttttttttttctgagacaggatcctgctctgtcacccaggctggaatgcagttgcacgatcaatcatagctcactgcaacctcaaacttatgggcttaagggattcttctgcctcagc

SEQ ID NO: 412983 - DNA, 122 bp, Homo sapiens
cctgcaccgcacaggggggcctggcgtgagggtggggggcccaggtgggggagccccgcccgtgtcccctttcccgtccgggcagcccccgggccggagccccctccgttaccccgatggct

SEQ ID NO: 412984 - DNA, 122 bp, Homo sapiens
tcggtgggtcgtgggccgtgggtcggcggggccagacaactcagcggcgcgcggcgggggcggggctccgaactttgtctctaagtttccggttctgtgctcagcggctccaccctcggtgc

SEQ ID NO: 412985 - DNA, 122 bp, Homo sapiens
agggcgggaggagcggcgccgagtcggaccggctgcaggccagtggtcttcccggaagtgcgcctcccccggttatttcccagaccccggcgcggggctgcgaacccacctgccccagagcg

SEQ ID NO: 412986 - DNA, 122 bp, Homo sapiens
gcagagaatctcaggacaattccggcacctgtgctctcagccactacgctatattgccttcgagcaaattcccctctgtattctctctgagccggcctttccaactcacaggtggaggctcc

SEQ ID NO: 412987 - DNA, 122 bp, Homo sapiens
aatttatctccaggatgtggtcagcacacaatattcatgcctccttggttaaataagagacgtgttttccaagtctaatgttgccaaaaagaccacgtcagtgctttctgtggaatggaact

SEQ ID NO: 412988 - DNA, 122 bp, Homo sapiens
gctcctaaagagactcagctgaaatctaagataaacgcccaacactacaggctgcagagccggcattttatataagggagacttacatagactatcacctaaagtttagcttttcaacacag

SEQ ID NO: 412989 - DNA, 122 bp, Homo sapiens
ccagggtgagcggctggaccactgtcaatgtcgccatgtctgccgtgggagccgaagtgacgctcggcttcagcatcagcaaccgctcgtagtgagaaaaaaaggaggagattgggggcggg

SEQ ID NO: 412990 - DNA, 122 bp, Homo sapiens
attgggaccaggaaaacctgggaggatgggcagacttcctgtctttgaggctaatggacccgtggggcttgtaatctgtctctttctactatttacatctgatttaaataaaccattccatc

SEQ ID NO: 412991 - DNA, 122 bp, Homo sapiens
cctcggggctttgggtttggggctgttgggttgtgcggaatctgaagtagtccacttctccgggttttactggcagcttgaagaagagtaaggaaagtgctggggaggctgtcagctactga

SEQ ID NO: 412992 - DNA, 122 bp, Homo sapiens
agggcctgcagccttgtctctggaaggtgctgattaggactgggaatggcctcctctggtcgagactctctgacccctaagtaaatgaacttgttcccatcccagtctccaaacagatccca

SEQ ID NO: 412993 - DNA, 122 bp, Homo sapiens
ccaccgtccgcagcactcacatctggccaccgtccgctgcgctcacatctggccaccgtccgcagcgctcacatctggccaccgtccgcagcgctcacatctggtcaccatccacagagctc

SEQ ID NO: 412994 - DNA, 122 bp, Homo sapiens
cggacggccatgtgcgcggcggagaggccgggtggccaccgaaccttcccgcctgttctgcggtgggtaggagtttggaaactaatgttcctgtgctaaccttcgtgtctctgtgacatgac

SEQ ID NO: 412995 - DNA, 122 bp, Homo sapiens
tgggaagcgtggcgtttgcggcgttcgtgggatgggaagcgcgtgttcacagagggccgccgtgaagagtggactttgacaaggcttgggaagtcctgaattccaaacagcgcagatcagca

SEQ ID NO: 412996 - DNA, 122 bp, Homo sapiens
atgcagtgagttttccacatatcacataccatttctacaggtagcaaagtcttttcctatcgttttatccaattttttattatttccattagatatcaaaggagggtttaattatttcattt

SEQ ID NO: 412997 - DNA, 122 bp, Homo sapiens
ccaagtcttggctcttaccagctgatcttgggtggtggctttgaacttgccatctagggccgggggcgatgcttatgagcctcattcacaatagcctcctaccccatcccaggagaggggcg

SEQ ID NO: 412998 - DNA, 122 bp, Homo sapiens
ataaagtaaaaaggatagaatgaaaaacccattctaatgtcaccactcagagataagtaccgtatttctgtgtatccttctataaactctttacttctgtttcctttattttttaactttaa

SEQ ID NO: 412999 - DNA, 122 bp, Homo sapiens
acaaaggcgcagctcacctcgtgcccatggaacgccgcctttattaacacagcacaggcacgtcccaccagcgtgcaacaccgtgcggcgtggaactgccatctctaggcatgaacctccgc

SEQ ID NO: 413000 - DNA, 122 bp, Homo sapiens
agctgaccctctgtcttactaactcaaacggcccagaaacatcaaagtctgaccaaaaaccgttaatggtagtcagctccctccctttcacagaggtctcactactgtcggggggcgccggg

SEQ ID NO: 413001 - DNA, 122 bp, Homo sapiens
ggcaaattactcacatttcccaaatctctttttcttcatgtgtaaaatggatagtaatgccgacctattccagaaaaggaagatcaaatcccctagctgcctttgagagtctaagatttgaa

SEQ ID NO: 413002 - DNA, 122 bp, Homo sapiens
ctcgcggctgcagtccccagcctggtactggcctggaggtttgaccatatgtagcttcagcgtggctctccatgggacagttaactttctccactcatgaagttgtttaagcgtctccccgg

SEQ ID NO: 413003 - DNA, 122 bp, Homo sapiens
ctccgccccgccctccggccgcgcatcaaggatctttgctcctcccgcggattcgatccgcgctcgcgcctcctgagcccgccggcctgtacctgagctcaggcccctcggtcgcctcctct

SEQ ID NO: 413004 - DNA, 122 bp, Homo sapiens
tcaagagtccgccgccttaaaatgactaaaacaataagcaaccccaactcccacttcaagcgcgtacggtttccatttgctcccctgcctcagtgggaggaatggaacgtgaagacaccgct

SEQ ID NO: 413005 - DNA, 122 bp, Homo sapiens
ccagctgcgcctgcgctgcaggagggcgggggctctggttgtaaaacacacttcctgctgcgaaagacccacatgctacaagacgggcaaaataaagtgacagatgaccaccctgcagctct

SEQ ID NO: 413006 - DNA, 122 bp, Homo sapiens
actcgctgctgccgccccaggacccgcacctgcccctcacctccctggtctccatcaacgcggacaacggccacctattcgccctcaggtctttggactacgaggccctgcaggagttcggg

SEQ ID NO: 413007 - DNA, 122 bp, Homo sapiens
tggctaggcgtataaaggcactttcgattaagtctaattagcgagcccgagctaaaaggccgccacagcggcggggcccagggagaaaaagcagcgttcccaattcccatgcttccagctcc

SEQ ID NO: 413008 - DNA, 122 bp, Homo sapiens
tctttgacggaagcggttttcagagaaaagaagttcgaggcacaagcctgttgggtggggcgcaactgcagtcccagcgagctgaggatggctgcgccaggcccccttcctgccgctgctct

SEQ ID NO: 413009 - DNA, 122 bp, Homo sapiens
agcagccgggccaggctgggtgcgggcttgggtcctgcgagccgagctagtgcggtgaggcgctcaggcgcggctgcggcccggcccagccctgcgcgccgccatgttggcctcctccccct

SEQ ID NO: 413010 - DNA, 122 bp, Homo sapiens
gcgtgggagagaaaagtcactagataagacttgatgggaagaaagagaaagatttccaaccgtgtggccatagaagacataaacacctaagagaacttcagagagggaatcaacatactgag

SEQ ID NO: 413011 - DNA, 122 bp, Homo sapiens
ctccccctaccaagatgtgctgcacacatacagccctgccccacttccagcaacttccaccgtcacccccagcatttctgccctgaacagacaggagagtcagcttccatcccagatggaac

SEQ ID NO: 413012 - DNA, 122 bp, Homo sapiens
tgccttagagcaattacgcacttctctctggtagtccctgaaatgttctaatcatcagatcgccccagcttctcctgaccgtttcttgcttacggctcagttcagacagtatttgttccggg

SEQ ID NO: 413013 - DNA, 122 bp, Homo sapiens
tgtctcatgggcaccgctgtctgcaaatctaccaggcagggctctgcagaggttcaaattcgaactggtttccgcctctcacaaagtgtgttatataagctgggctgggagaatttacatgc

SEQ ID NO: 413014 - DNA, 122 bp, Homo sapiens
cgggcgaggggtgggagggctccgctgggagcttcgctggggatctgaaaggaagtcacccgggcgcggagggacagcctaggggccgtgcgggtttcggcgctgctggaacgaagttcccc

SEQ ID NO: 413015 - DNA, 122 bp, Homo sapiens
cgctcgtgccgcccccgccgtgctcctcggcagccgttgctcggccggttttggtaggcccgggccgccgccaggcctccgcctgagcccgcacccgccatggacaactacgcagatctttc

SEQ ID NO: 413016 - DNA, 122 bp, Homo sapiens
acttaatttttaaaagctgatccaaatgctgtctgggcccagccacagtcattgaacacacgcacagacacacacacacacacacacacacacacacacacacacacatcacagagcatttt

SEQ ID NO: 413017 - DNA, 122 bp, Homo sapiens
ccctccccagaacccacatctggcccaagtgctcagttttctgggctgtaaattgcctcccgctgccccttggcatcctctcaggtttcagcttcatggctgttttgcttttggtggggggc

SEQ ID NO: 413018 - DNA, 122 bp, Homo sapiens
agcgtgtgtgtgtttagagtctgcactctgtgtggatcaggaaaggggtccttgcaggctcgctgagtccctgctctgtgcccagccccgagttggctccaatggggctatatagaaaggaa

SEQ ID NO: 413019 - DNA, 122 bp, Homo sapiens
cgcctcccactggggtccagggagcaggcggtgggcacccaccctgggacctaggggcgccgcaaaccacactggactccggccctcctaccctgcgcccagtccttccacctcgacgttta

SEQ ID NO: 413020 - DNA, 122 bp, Homo sapiens
aaggacgcgctgtgtgcaccaaggccggcactgggctcctgtcacctgggaaggcctagccgacctggccctcagtcagatctaccaatgtccttgtgagcaccaaccggctgtgtctcgct

SEQ ID NO: 413021 - DNA, 122 bp, Homo sapiens
cattgaggcccagccgcagctctggcattcctgacagaaacaccttgagcttgatggtaccgacgatttcgctcagaaggacgctgccgttggcattgacctgagggaggacgttgggtata

SEQ ID NO: 413022 - DNA, 122 bp, Homo sapiens
aaaaaaaaaaaacagccggatgtggtggtgtgtggccgggtgtggtggcgtgtggccgggcgtggtggcatgtggccgggcgtggtggcatgtggccgggcgtggtggcatgtggccgggcg

SEQ ID NO: 413023 - DNA, 122 bp, Homo sapiens
gacacccgtccgcagacgcgcgcccttcgtcgcgcccttacctgagcgctgtggttgccccgcgccgggactgcctgtgcggctcctcgctcgcacccccaccctgccccctgccagtcccg

SEQ ID NO: 413024 - DNA, 122 bp, Homo sapiens
tggtatcctcaactaaactgaaggagggccgggccagggacaaggttgccatggtgaccacgaccaggcagatgaaacgaccccagctgaccatggttacggtaccaatccccggtcctctt

SEQ ID NO: 413025 - DNA, 122 bp, Homo sapiens
cgcttcacggtcacccttcacccggttccattgtgtgcctcctgcctccacccaccatggcgtctgccctggcttgggttgtataggagagactccgtgttaccaaattggctccagccctg

SEQ ID NO: 413026 - DNA, 122 bp, Homo sapiens
ggaaaagcgctgctgcaagggtttctgcatcgacattctgaagcggctggcgcataccatcggcttcagctacgacctctacctggtcaccaatggcaagcacggaaagaagatcgatggcg

SEQ ID NO: 413027 - DNA, 122 bp, Homo sapiens
gtcaaggtgaggctggtggcttaaccctccagggggaagtctctaaagtgccttggtaggcgctggatgcttcagattcactaaatttcttcccccggaattccacatcctgtgttccttat

SEQ ID NO: 413028 - DNA, 122 bp, Homo sapiens
ctaacatctctgggaaggaaatcaatgacatcgtcctttctgtagggcctccggagagtccgccacctgtccagccccatcaggccacagtggatcccaacatgtccatcctgaacagcagg

SEQ ID NO: 413029 - DNA, 122 bp, Homo sapiens
gcagccggggctagcgagcggcgcccgcgcgctggaggaaaccgtgcacttgttccaatccgggggtttatacatcagggcaaagcctcccttaggccgccccatccctccccccgcccaag

SEQ ID NO: 413030 - DNA, 122 bp, Homo sapiens
actgagggagatggacaagtgtgatacagtctgtgatggggtacagggaagaggggcactcgggccagacctgggggaagcagagaagtcttacaggaaagacaatgtaagcagagtgcagg

SEQ ID NO: 413031 - DNA, 122 bp, Homo sapiens
cttgatttctcgcggggccttagctgccttcccgcggggcagggctcgggacctgcagcccgccatgcctgagcctcccccgccacccggcctccgtgggctcctgtgcagcccgagcctcc

SEQ ID NO: 413032 - DNA, 122 bp, Homo sapiens
ggatctggccctgccccttgcacctgaccctgcccggagatctgaacccctaggatacggcgggtcccgcagtctgggccctctatgatctgaccccgtccctgcacctgaccccgccctgg

SEQ ID NO: 413033 - DNA, 122 bp, Homo sapiens
acatcgctagaagattatgacactttactatgtaccctaggaaaggcagccactgccaatcgattggagttgtcacatgtgataaaacctatttgtcagcctagataaaacctgttaataga

SEQ ID NO: 413034 - DNA, 122 bp, Homo sapiens
aagaaagcagttacttcgacccctctttgtgaaccacaggaaactgaacatagggcagagcgtttctaggacatttatgggagctggtctctgattggctaggcaaccagatgcagaatcct

SEQ ID NO: 413035 - DNA, 122 bp, Homo sapiens
gctgtgacagccttcccagggagctttcagagctgctgcagtgccaccagaggttaggtgcgcagggagggagacttgtccctctaatggcctccctggaggcctggcccagcaacccccag

SEQ ID NO: 413036 - DNA, 122 bp, Homo sapiens
cttcaacaagaaaattttgtaatgagccggaggaaatggtctcatcattactacgttatacgcagtctgagagtctgcgtggatttttatttcacaagaatgtgactgtttaattgaaaaat

SEQ ID NO: 413037 - DNA, 122 bp, Homo sapiens
ttgcctacctgagcaacgggaataaagccggactccgcctcccctggtgctgtgtggcttcgcgggccgaggcgctcagcactgagcccagggcctgttggtgaaaaacgcgtcgctccagg

SEQ ID NO: 413038 - DNA, 122 bp, Homo sapiens
ccttcaaaaggtcatcagcagtacatccttagtaggcctcacaatagtgtgtccacaatacgggttagtgggagtgattgaaaggcttggagagttgtccttctgggtttgctctggttggg

SEQ ID NO: 413039 - DNA, 122 bp, Homo sapiens
gttgggctatattagtgcaaagcctggagtagctgaacactaagggggcattacatcgaccgtaggggaaaggaattcactgggacatccgtatgttccaagaggaaacataagcaatgagg

SEQ ID NO: 413040 - DNA, 122 bp, Homo sapiens
tagccaatgagacaggagccacgagaacacggaccaatcggcggcggcgacagtgtggaacgcggttgccaggaggcgggacgcggcggcgtgccagcctagccactctagcgacggcgggg

SEQ ID NO: 413041 - DNA, 122 bp, Homo sapiens
acgtggggcacgtctgcaagtccacagagaagcagtctgtgaagcagcgatacaggtaggcgcgtcctgcatgaggaggcctcctgaccccgggctgctccatccagcgctgactctgcaga

SEQ ID NO: 413042 - DNA, 122 bp, Homo sapiens
gctgggggatctggggcttagagggatggggcaggccgtccacaggaggtcgtggcctcccgggccgagctggacagcacgctgctgccccagggctccccaaacgccccctcctcgcaggg

SEQ ID NO: 413043 - DNA, 122 bp, Homo sapiens
tgccgtcggcgctgaccttcgccgccgaagctgtagccgaggctgcggccgccatgttcccgtgttaataactgctgcctggttgtttatttcaatggagatcctcccccaactccctcctc

SEQ ID NO: 413044 - DNA, 122 bp, Homo sapiens
tggctgtttggggcgggtcggcttcatccgcgtctcaggagcaagtagagaattagcgggcggcagcaatgctccgcaaggtgagaagctggacagaaatctggcggtgggctacccttttg

SEQ ID NO: 413045 - DNA, 122 bp, Homo sapiens
agtcgccgcggtcgccatcttcccagcaacaacgtcacttcccttccggaccacaaggggcgctgactccgaacttaggacaggaagaaacaggcacatttccggtctctatgctttctcat

SEQ ID NO: 413046 - DNA, 122 bp, Homo sapiens
tttctatgagaagagagcagtaatgcaatctgcctccctttttgttttcccaaagagtaccgggtgccagactgaactgcttcctctttccttcagctatctgtggggaccttgtttattct

SEQ ID NO: 413047 - DNA, 122 bp, Homo sapiens
ccccactcctgagtctcaacaggcctagtagagcatgaagccggccgcgtgtgctttgtgcgaaggcctgagaccttggaaagggtggctgaagacttatctgggacagaccccccgggagc

SEQ ID NO: 413048 - DNA, 122 bp, Homo sapiens
ggcggggcctgggacggggcggggcttgtattagcataatccttacgccaggtgagaacccggtgctctggagctctggcgggttggccccatctcccttcccgtctttccttggagtcctg

SEQ ID NO: 413049 - DNA, 122 bp, Homo sapiens
tcgcgagaggggtatatacagggaggccaggcagcctggagttagccgaccgttgcgagacgttgagctgcggaagatgagtccaaagccgagagcctcgggacctccggccaaggccacgg

SEQ ID NO: 413050 - DNA, 122 bp, Homo sapiens
agttcgccccctgcccgcgccagggcgttttgggtcaccgagtcctgtggggatccgaggcggctgccgcccaaggccgagcgcagcctcaggacccgcgccccaccagacggggtcgtgcg

SEQ ID NO: 413051 - DNA, 122 bp, Homo sapiens
cgaccggtgggacgaggtggagtttgtcctgggcagtaggaggacagcccgggcacccagcggcccaactccaggggaaagccatctcccttctggagctgcccaactccgggggaaaacca

SEQ ID NO: 413052 - DNA, 122 bp, Homo sapiens
gtgggcctgtgtctagtttgagatctttattacggggagtgtgccttccgtgataggagacgcatgagatggaaatgaggatttcatggcctacgggccctgggggtacacggccctcctgg

SEQ ID NO: 413053 - DNA, 122 bp, Homo sapiens
ccaagtctacatcctcaacacctgagccctgattaagcacatcgtcacgatgatacactgcggttgccattactattgatggcatgtctatagagacctctggctaaaaaagaccctaggtc

SEQ ID NO: 413054 - DNA, 122 bp, Homo sapiens
tcaagaccagcctggccagcatggtgaaaccccatctctactaaaaatacaaaaattagccgggcatgatggtgcacacctgtagttcctgcctctcgggagactgaagcaggagaatggct

SEQ ID NO: 413055 - DNA, 122 bp, Homo sapiens
gaatgtagtttgggcatttgtctggaacttcggattctcgggactccagggtggccaaggcgcggaggtgactcaatgacattgaccggcctggatgcacgtgggttgctgagccgatgctg

SEQ ID NO: 413056 - DNA, 122 bp, Homo sapiens
tgcatttgttttccttagcttacctagcaggctaatggcaacagtgtctccagtttggtccgaagcaattgctggtgagacttgggataatgatcccaagctggtgagacttgggataatga

SEQ ID NO: 413057 - DNA, 122 bp, Homo sapiens
ccgccatgttgagcgagggcaccgatgccgcaacctgacaggcaatgacgccgttctttccgccatctttactaagggcagtcgatttccggttgccttacatagagccaggctcagaaatg

SEQ ID NO: 413058 - DNA, 122 bp, Homo sapiens
acacactcaccgactctgggttcttgacaaagaccttggtgctccccatctggtactggtcgggctccatgttgaccgcccgaagcaggtgctggacgccctggcgttcgtccccacgccac

SEQ ID NO: 413059 - DNA, 122 bp, Homo sapiens
tacggggtaaggccagccaagagaacttccactcaccatggcggagagaggagacagccacgctcctctcagcccggctgctgccacaggaaaaggaagtgcttaccactcccgctgtatat

SEQ ID NO: 413060 - DNA, 122 bp, Homo sapiens
cgccatgttggccaggctggtctcaaattcctgacctaggtgatgatcatctgcctccctcggcctcccaaagtgctaggattacatgcatgggccaccatgcctggcctcaggtatcttaa

SEQ ID NO: 413061 - DNA, 122 bp, Homo sapiens
gacctttatgtattttgtctggatttcctacatcccttcatttgtaatacttagaatcagcgttgaggttcagaaagcccctggagctgaacaattagctatagaatgctagagatcctatg

SEQ ID NO: 413062 - DNA, 122 bp, Homo sapiens
ggcgcgctgaggggagaagatcaactctcggggggactggagtgtgtgcgtgggggccaccgttaggaggaaaagaggagcacgagctcgcgtcccgacactgggatgcacgtcccctacac

SEQ ID NO: 413063 - DNA, 122 bp, Homo sapiens
ccactgaagtatggcagacatttaatcccttcttccaatgcaagaaggaataggcaggggcgggaaggtagaagagcaggtgtctgaaacccccagaggacctccgtggtgagtgggtcctg

SEQ ID NO: 413064 - DNA, 122 bp, Homo sapiens
tcagaagcacggcaaacgctggagaaggtttgaggaagcgcatcctgaagctgatggcaccgtgtgggggcagcgggcgggcaggtgcagacgtttcacgcatgtctccactcacactgctt

SEQ ID NO: 413065 - DNA, 122 bp, Homo sapiens
cttcagatttttttttaacctcaaatatgcctaaaaggaaaaacaatgcctcgtggtccccggcatcctgtgggtctcagggcacccccgacacctcccgacattattcctgcacccttgat

SEQ ID NO: 413066 - DNA, 122 bp, Homo sapiens
aaccccatcataactaaatatatctgtaatgacactatttccaaatatggtcctattctgcggtatttggtggtaagacttcaacatatgaatttcgggggacacaattcaacctttaacag

SEQ ID NO: 413067 - DNA, 122 bp, Homo sapiens
aatgctaaggaaagagagaccccaggctggggaactaaggagacctggccaaggcaggagcgccctccttgctgcaagatcatgagtgggctggagctgagaccagctcggccctgtcctct

SEQ ID NO: 413068 - DNA, 122 bp, Homo sapiens
ggtctccagtctcctcagcatttccctctggtctccctccagagaggacagatctactcacgatctttgggaccacccagaaagggtcaatttcaaaatcgaattttctcaggatgacttca

SEQ ID NO: 413069 - DNA, 122 bp, Homo sapiens
ggttggctgtccctgtcctaggggtggcaggcagtctgcacccagcctagccctgcccagcgtggggtctctgaccttcttggtcttgggcccagccaagattcccagccccctgccttctc

SEQ ID NO: 413070 - DNA, 122 bp, Homo sapiens
gtcgatcttggagctagaacattttcctttggccatttacacgaatccactggaaaatgccgcagtgtttatcaaagttactcaaagtagaaatgtccagacgtcttatgagcttagacaaa

SEQ ID NO: 413071 - DNA, 122 bp, Homo sapiens
gatgggtgagacttgggtgttggggacctggccaggcggagggcttcctccccgggccatcgggagccaggcaggggagctaccagcaggcactgaggagcagcccctctcagtcctgcagc

SEQ ID NO: 413072 - DNA, 122 bp, Homo sapiens
gggcggcccgcccgcgaaccctcgagcgaggccaggtcgccgtaccgccatgagcccgcgcggctccctagccagaccgcggccccctcgtccaggccccggtacctcagcgcccaggctcc

SEQ ID NO: 413073 - DNA, 122 bp, Homo sapiens
cgggacccccggcgggacccccactgcccgcccccggtccctgatgcccggaccccgctccgcagccaggtcccaccgccgtctgctgcagcgcgcccggctcctctgcctcgggccgccag

SEQ ID NO: 413074 - DNA, 122 bp, Homo sapiens
aaagacagagagctcgtatatatatttctctgttttacccagcggaccgtgcatgaaaggcgcctttcctggcgcgtgtgtctctgaccctgtggatcttctggacaattcccggaatttct

SEQ ID NO: 413075 - DNA, 122 bp, Homo sapiens
atgaagcttggagaggttaaggaatgtatccaaggtcacacaacaaggaaatggcagagtcgggtttcataatcactctgggaactgggaattgatgttaaaagtggcagaggaacttggca

SEQ ID NO: 413076 - DNA, 122 bp, Homo sapiens
cacattatcaacagcaacactgtctatagtattcaattcaccattacagcacaactgtatcggtctgaatttgtagcttggtttttctaatataaacaatgggctacttcaatgtctttctg

SEQ ID NO: 413077 - DNA, 122 bp, Homo sapiens
gcagggaaactcagagaaccgttcccaaggtagcggggccccaggagccctctccgcccgcgaacactgttagggttcccgctggctttgcgttgtctctgcgcacagcctgcctgtgcctc

SEQ ID NO: 413078 - DNA, 122 bp, Homo sapiens
agtgccagtgctaggctgagcaccatcagctctcccaggtccttgtcacctgcttgggcacgtgcatggaacccgagccaacttcaccccaccctcgtcattacctgggagatgcacaagac

SEQ ID NO: 413079 - DNA, 122 bp, Homo sapiens
gaagcaatttcactgtccttcagtatgggaatacatatttacataaaagtttaaggcacgcgaaataaaagtacatgttacagataaacatatatgtaataaaaatatgatacatatttgaa

SEQ ID NO: 413080 - DNA, 122 bp, Homo sapiens
ggtttggcggagaccttggtgctttcgaagccggagaaagtggctggctcccggcagccgcggaggcgccagctgctcaggctgcagacaaatctaaacccttgcttgctgccaacatctct

SEQ ID NO: 413081 - DNA, 122 bp, Homo sapiens
gctgctctggtgatttctgtgacatcccagaccccaactgtggggctctggagcggactgcgcttcacttcgtggggagggtgtttccacctaggccactcttatttctcttcacatcccca

SEQ ID NO: 413082 - DNA, 122 bp, Homo sapiens
gggtggcgggtcggtctcttcctgccgagtgcgccgagccccccgccccttcctgccccccgcccctccgcagcctcctgcccgcccacagcccgctgcccgcctcggacctcggagaggag

SEQ ID NO: 413083 - DNA, 122 bp, Homo sapiens
gggcactgtgcagtgtggctggctctccagcatcaggagtactggggattgcctgggggacgactcctagggctgggcgcccgtgggccctcccctgctgccactgcggcccacgcaagccg

SEQ ID NO: 413084 - DNA, 122 bp, Homo sapiens
atagtgaatgggacggatcctgtagcctcgactggccggctactcctccgtcatcactggcggcagaacttacacttaatgatcttcttaaacgcgttttgaaagtccttgttgaagtatgc

SEQ ID NO: 413085 - DNA, 122 bp, Homo sapiens
tcaccttcgctgcctctaacgtcagtccagccttactcagaaccactcctcggactgcagcgtgctctgcaccgcatggccttcaagctgcacgccgcgccgatctcgctcagcgccgatgt

SEQ ID NO: 413086 - DNA, 122 bp, Homo sapiens
ggaactaccaaaccattctccaaaggagaagtcccattttatactcccagcagcaatgtacgggaagttccagtcactctgcatcctcgctagtagttggtaaggtcagtcttctcatttta

SEQ ID NO: 413087 - DNA, 122 bp, Homo sapiens
cccggcctgatcccgtcccgcaacagcctgcctcctctttcctttcaacatgacagatgccgctgtgtccttcgccaaggacttcctggcaggtggagtggccgaagccatctccaagacag

SEQ ID NO: 413088 - DNA, 122 bp, Homo sapiens
tgcccccttttgaaaggctttacaacttttttttttttttttaaggctttgttaaagaatcgagtgggagggaagattccagaacctgttatccacactggcttttcttcagatacaggtgt

SEQ ID NO: 413089 - DNA, 122 bp, Homo sapiens
ctcgcatggagcacagcagagctgctctggaaatgtggggtcacaccttcactgtcttctcgggagcagctaggctgggctggggaatgacctgggaacacagataatcagggaatcaacac

SEQ ID NO: 413090 - DNA, 122 bp, Homo sapiens
aagatgcggtcgatgaccatggccacgtacttccagtcctccttcacctgcaagcacagacgccgtcactccagcacggcccggccgccgccagcggggacagccctcaggaccccggcgcc

SEQ ID NO: 413091 - DNA, 122 bp, Homo sapiens
gggctaaaggtacaactttcttaagacttactgattgtgtgggttttttcctgagccaaccggcttacagcatatgtataaaagcaatgatagaagtataatttggtgtagtaattttaccc

SEQ ID NO: 413092 - DNA, 122 bp, Homo sapiens
cgggaagggctccgtgcccagtagaggtgcagtgcagcagccagctcgcagcagtgctcccgtagagctgatggcattggcaggagtggcggctcagcacagggaagttctccagtgcccag

SEQ ID NO: 413093 - DNA, 122 bp, Homo sapiens
cagactgaggttgcggagcgtgttgccggcagtgctgctctggactgtactgaaggcagacggccggttcaggaggccctggtcctgctgcgttgacgaggcctgctccgggggatggaagg

SEQ ID NO: 413094 - DNA, 122 bp, Homo sapiens
tcgggaggggcaggcttgggagctaaggccacactggactccaccatgggtgccagatcccggggtgacaagattcccgtccccttcgaatccctcgagaaaagtccagtccacttaacacc

SEQ ID NO: 413095 - DNA, 122 bp, Homo sapiens
agcgtcagcgtgacttgcataagatcaagcagcttcagcagacagtgagagacctggagtcgaaggacgaggtgcctggcagccgcctccacctaggttctgcccgcagggctgccggctcg

SEQ ID NO: 413096 - DNA, 122 bp, Homo sapiens
ctctgtgcaaaccctcagacaactcccgcgactgacattgtttccacccctccctgcctgcgttctaaccacactggtctccctgctgttcctggaaaaaggcaaaggtactcctccctctc

SEQ ID NO: 413097 - DNA, 122 bp, Homo sapiens
aggccagttttgcccaaggagcccaggcaggccaagttgatcccttacagcttcaaacaccgcctcagacacaaccaggccccagtcacgtaagtcaggcctctttcattttgttctgagga

SEQ ID NO: 413098 - DNA, 122 bp, Homo sapiens
aactggggctgcacgcagtgcttgcaggccagcgcgagttccaggtgggcatgggctcggcggccctgcactatgagcagccagccagcccgctgcactgggcagtgaggagcttagcacct

SEQ ID NO: 413099 - DNA, 122 bp, Homo sapiens
ccaagggccggcccaccgtctccctgtagaggtcccgtctcctgtctcctgccttcctgacgagttccttgggagtctcccagcagccccagccagtttggagagggctgtgagtttgttac

SEQ ID NO: 413100 - DNA, 122 bp, Homo sapiens
aaattttctctggcgatcaaaagcctggtcggcaacaaagaccgcgcccgctttttccaccgtcctggtgtggcgagttgcggaatttcaataactgtgacaagggtgactgatttgtgaac

SEQ ID NO: 413101 - DNA, 122 bp, Homo sapiens
taggtgtctggttggttgctgggctgatgctgagccccgaggtgggcatgtgtggtggcacgtggccctagctttgtgtatttgccctttgcaaaggctgcgtgcgtcacggcaccattgtg

SEQ ID NO: 413102 - DNA, 122 bp, Homo sapiens
tctatccggcccggtctcctgccattcggggagactgcaggccaaccgggaggctgagttcgaagctagcagggcggcgaagccagtgtcgcccgcggcgttgagaagacggtgtggccccg

SEQ ID NO: 413103 - DNA, 122 bp, Homo sapiens
gccatggaaaactaggatgcttacacaccagagtgaggttaaactcagaagtttaataggcgaaagaaaaagaagagatctctgtgcaaagaggggtctcagagaaaaatgggttgctgtgg

SEQ ID NO: 413104 - DNA, 122 bp, Homo sapiens
cgctggacaagcgagagctggacggaaacggtgggaggccgtaggcggcggctgggggcgcgggacccgcgcgcgggcgcggaggcgggcggggaggccccgcagcccgcgccgccgccagc

SEQ ID NO: 413105 - DNA, 122 bp, Homo sapiens
ttagtgaccaactgctgtctgcttttggggagagggtacggggccgcgggagagaaatcccggaccctgggactatgcagcccgtgagggccccagtcccgacccgtccattccactgacct

SEQ ID NO: 413106 - DNA, 122 bp, Homo sapiens
cttccacaaggaagtatggaaaagattgggaacagaggccagaggaaagcacagaaagtccgttatggaaatatgaggcaagggaagttgagaccctttaaacattcattagcagcataaag

SEQ ID NO: 413107 - DNA, 122 bp, Homo sapiens
tgggcttgtgagtggggctgccgagagggcaggcgtggggcgaggccaaaggactgaacccgcaggagcgtcacgggcgccggggcggctgccgacggcgggactgggtcagtgagaagccc

SEQ ID NO: 413108 - DNA, 122 bp, Homo sapiens
gtcctgcgaagtggaaaggtcagcacaaagccctgtgtgtgctgggtcctccgccatgcccggcttcctgcttctgtgtccctctcactagcttccgtgttggggagttgctggcacaagtt

SEQ ID NO: 413109 - DNA, 122 bp, Homo sapiens
cccaggtcctggtctttactccatccacaccctgctgggtgccttcattttaaagcttctcggaaaccataggatacaaaaaaaggatacaaaaaatgataagccttagtcatgccctcatg

SEQ ID NO: 413110 - DNA, 122 bp, Homo sapiens
ctgcggctgggacaaggagcacccgcgtgcaggtgcgaccctgcaggatgctggcagcggcgtggccaggggcgcccgtgttctgagggcctgagggccagcccctccacccgcgccatggc

SEQ ID NO: 413111 - DNA, 122 bp, Homo sapiens
ggctaagaaggacttgcacaattacataaccatgggtgacatctccagaaagaaaacctccgataaacatgacattttctcttttggggcatttggattcagtgcattttattggcaactgt

SEQ ID NO: 413112 - DNA, 122 bp, Homo sapiens
cacattggtattgtcagactcacaaattggactttggaattaatgaagtaaagtgaatgacggtctctttctgacattgggatggtatagagtgtgttacatctaacgtggaggggagatgg

SEQ ID NO: 413113 - DNA, 122 bp, Homo sapiens
gatctccagcactacttccctctagcaatgccatacacatctaaccctaaaacgaggaagcgtccgctgaggttgcccactgcaggatgctggtgtgtcgccgggcacatgaaagtccctga

SEQ ID NO: 413114 - DNA, 122 bp, Homo sapiens
atccatccgcttcggcctcccaaagtgctgggattacgggcgtgagccacatcacccggccggatgtcctcttataacatcttgcttctcagggtctcagagagtttgagtgcactaggaaa

SEQ ID NO: 413115 - DNA, 122 bp, Homo sapiens
ttccacggtagtcaggaggcggagatcgctgcttctcacctactttctgaacttggcctccgcagtcgcgacctggcgtgaaggaggagctgccgcccccgccccagcctcggggacgcctc

SEQ ID NO: 413116 - DNA, 122 bp, Homo sapiens
cagcccataataagtaggacctgttacccccttagtttttgctcccagaactagaccctgcgacagggattccagggcaagtggttgatttagagttgattccaggaaacactggagtgagg

SEQ ID NO: 413117 - DNA, 122 bp, Homo sapiens
tttagctagtggccaagattcgcaaagcctcgcggcgaggaaagcacgagtattcaagcgcggctgaggccctccttggctagtgctgggacatggagccccggcagccaaggccaaccttg

SEQ ID NO: 413118 - DNA, 122 bp, Homo sapiens
gtcgagagggaggggtagggccggagacagggactcaagacaggggctcgagaaacgtcccggcaaggaaaagggcaagaaaagcaaagaactcaaaatgttaagacccaagtcgggctgag

SEQ ID NO: 413119 - DNA, 122 bp, Homo sapiens
acgactgtttcttcccacgccgcggagtgcattccctcatgctcccgtcctgtgaacacgcgctgcagcctctgccctcctggggctccctgagagagggggcaccccttgctcccatcaca

SEQ ID NO: 413120 - DNA, 122 bp, Homo sapiens
ggacgcttcccgcccttggtcttaagcggggtccatttcacagaggggacaactgaggcccggagagatgattttcaaatcagcgggtggtcggaagcaaagcaggattcgaaccccgtctg

SEQ ID NO: 413121 - DNA, 122 bp, Homo sapiens
ctctgttgcctaggctggagtgcaatggcacgagctcggctcactgcaacttcagcctcccgagttcaagctgttctcgtgcctcagcctcataaagtagctggtattacaggcacgtgcca

SEQ ID NO: 413122 - DNA, 122 bp, Homo sapiens
ggcaggccctgagcaggcagctgggtgtccccgctcagatccaggcccgagtgggctgggcggctgcagagccagtcacctgagctacccagggtgggatccctggccccgacctctgtcct

SEQ ID NO: 413123 - DNA, 122 bp, Homo sapiens
agggccccatcactgagtttgggagctccacactgcaccttgggccactctgcttagagccgttccaggaatccattcattggtgtgctagtttattcaacaaatatttggtgaccgttcaa

SEQ ID NO: 413124 - DNA, 122 bp, Homo sapiens
aaggccttgtggagccttgctcctctatccttgggctctattgccccctggtggtttctccgagacaaacgcggccagggctcagctccgaggctcaggtgtcctgccctgcgggctggagc

SEQ ID NO: 413125 - DNA, 122 bp, Homo sapiens
ggcccaggtggctgaaggggccgttaggaacatccaagcggtggggcacaggcagatccccgacctgacctggaccacccttctcctcttggcccgccccttcaactcgcctccgcttaggt

SEQ ID NO: 413126 - DNA, 122 bp, Homo sapiens
aggaaactcggcctgagaggcgcagtggctagaaccagtcaacactgctacgcacagccacgtttccatggcttcctacgtcactcaggccttagggggcggggtatgtcaccctatccaat

SEQ ID NO: 413127 - DNA, 122 bp, Homo sapiens
aggcggctgggggtgggcagcgggagggctgggcgtcagagcagtcgggcggagacgggccgggagcagccctccatacaaggcagccaggaactcccaaagtcggcgccggctcgctcccg

SEQ ID NO: 413128 - DNA, 122 bp, Homo sapiens
aactctggaagtatcgcctttggctgcagtgccagattctggtgaggatttcctggaccccgatttatatctgaaaaaacactaaaaataacagaagcagggcaggaagtggctatgataac

SEQ ID NO: 413129 - DNA, 122 bp, Homo sapiens
tgtttgtgtatacgaggaaggtggagtcaccggttcttcgtggccatcagaggaccgacacgcccataggtctcatgcattaagtctgcgttgagcaatccctaacacggtttttgcctaca

SEQ ID NO: 413130 - DNA, 122 bp, Homo sapiens
agaggtcagcatcccatgatcgcgctgcactgttgctttatatgattgtgtttgatggcacgattgtttacaacccttgactttcttccctgctttatcattagcattactttagaataatg

SEQ ID NO: 413131 - DNA, 122 bp, Homo sapiens
aaaaaaaaaaaaaaagaaaaagaagaagaagaatacaaaaattagctgggcatgggggcacgtgcctatagtcccaactattcactgggaggttgtattagtccattttcatgctgctgata

SEQ ID NO: 413132 - DNA, 122 bp, Homo sapiens
ctgtaccatcctccttgctggaacagggcaggctcctgagtgatagggcaggcgcctgagcggccttttctcgttaaagttgtttctcagtatcttgaaatgtctctgtaagttgcactttg

SEQ ID NO: 413133 - DNA, 122 bp, Homo sapiens
atcaaattgattgactctgcatttacaagaacaatccccatgtcttctctcatcttgtttcgtttgttttgtttttgtttttttgtccatgactttttaagacattggtttcgagtgctact

SEQ ID NO: 413134 - DNA, 122 bp, Homo sapiens
ccacacaggaggctccgttcactatccaagactgggtagaccaagtgatccaatttctagcgtttccccagggaccaaccttatccatcatccacccaagtatgagatctgtgtgtgttagt

SEQ ID NO: 413135 - DNA, 122 bp, Homo sapiens
ttcggctcggcatcccctctccagaagcagttgcaacctcacagaccattcagagggaggcggggcctgcgatgccagctcatcagtgaatcagcatgtaagcaggtgagaagacagatgac

SEQ ID NO: 413136 - DNA, 122 bp, Homo sapiens
aggctgctggctgcggcgccgcctctctctactccctcctcccaccgccccccttccccgcggttgggcccactctgcggcctctgcccgcctcgccctcgcccgggcctcctcccgctttc

SEQ ID NO: 413137 - DNA, 122 bp, Homo sapiens
cacagtccctgctgggcatggttccagatagatcagaggactggggaactgttggctgtacgccagtggtgataaaggatttattcagactagcatggcagtgaccctgttagtacccaagg

SEQ ID NO: 413138 - DNA, 122 bp, Homo sapiens
gataccattgtgtgaagctgcatacaacatgcatgaccttgagcaagttacataacttatcggaacacctttttgtcccaggggagtattatcattcaacttgcttggctattttgaggact

SEQ ID NO: 413139 - DNA, 122 bp, Homo sapiens
gggtgttcaggagtctcccaagtgcacaggggctcgtgcccaaagggtggaggtcggcaccgcttcgctcaattcaggagtggagaaggatcctagaggaccctctggaggtggcaggtgga

SEQ ID NO: 413140 - DNA, 122 bp, Homo sapiens
ggtttataatggggttctgctcctgtgagaatctaatgccactgctgatctgacaggaggcggatcttggtcagtaatgcttgctcgctgcttgctgctcacctcctgctgtgcagccaggt

SEQ ID NO: 413141 - DNA, 122 bp, Homo sapiens
gagttggactccagtgatatttatgtgtttttccaacctcaaaacctaggcttctgtaaacgtttccctaaccaaggtaacaatcacaatgataaaataagttggttgtcagcaatgaagtc

SEQ ID NO: 413142 - DNA, 122 bp, Homo sapiens
cactgcggcctgggccccggggggcagctgtttatccagcaaacacctccccagggccagcgcggggcatggcacagcagggcactgccggggcgcaggagctgcgggggcgggtacagcct

SEQ ID NO: 413143 - DNA, 122 bp, Homo sapiens
aaggggcagtggcaagaagaggccggggcctcggacgttatcctgggaggacagggaacccggaggatctaagctggcgtgagtgatgctgtcacattttgtctcaaagccattcttaccct

SEQ ID NO: 413144 - DNA, 122 bp, Homo sapiens
gaagagaggtacggcctggagaagcgctcccgcccggctcgctcaccacccccgcactcgcgcccgatttagccgcagggaggctgggaacattgtctttattttaagcctccgagtgcggc

SEQ ID NO: 413145 - DNA, 122 bp, Homo sapiens
tgaagatggtgggtggcctgtggatggtgcatggcctgtggacggtgggtggcatgaggacggcgggtggtgggtggcgtgtggcgtgtggacggtgcatggcgtgtggacagcaggtggtg

SEQ ID NO: 413146 - DNA, 122 bp, Homo sapiens
aaattcaaacagttgggcttctccctctcttcataggagcacacaggcacgatggtctgtcgcctccgctctgtgcaggcgatgtcccggcaggagcagaagagcattccgtagctgtgctt

SEQ ID NO: 413147 - DNA, 122 bp, Homo sapiens
ttcctctagtgcgtttgcttctactccccgaaaacaaaaacccaccaacccctgaaacctcgggtttgcctggtgttggaactttggttatttgtcctttgtttgtgttgtgtttttggctc

SEQ ID NO: 413148 - DNA, 122 bp, Homo sapiens
cagtaagccgttaagccggaggtcagtagactaaagatggttcgaaacctgggtacctggcgttggacttgaacaggggtgaacagcttcacagatagagacgttaaaaacagagccccaag

SEQ ID NO: 413149 - DNA, 122 bp, Homo sapiens
acgacggcgacgcctcgctcgtcagatgggagttacctgtgaccgtcttgggtgcgcttgcgcaacgctcctcttcagccctaaccggctcagctgacgtgcccagaagacgaagatggccg

SEQ ID NO: 413150 - DNA, 122 bp, Homo sapiens
cctccgtcctcgtgggacgggtcctgccttgggccccaaaagccgaccgcggttcattagcgctgcttctgggatcatcccgcagccctttccgcgctcctttgcgctgtcaggggaggggc

SEQ ID NO: 413151 - DNA, 122 bp, Homo sapiens
gtttgtgtcaacacggccgcagcctcagcagctgggcatccagggcctggggctggacagcgggagctggagctgggcccaggctctgcccccggaggaggtctgccaccaggagccggcgc

SEQ ID NO: 413152 - DNA, 122 bp, Homo sapiens
gcaacctcactctcttcttcacccatcaaatcacccacaggcgtggaacaatggccaccccgcctacgcttcctatcaacaccgatggagaggaacacagggcctcttcactctaggtcctt

SEQ ID NO: 413153 - DNA, 122 bp, Homo sapiens
cgcctgcccgttctgacaggactgtatccaacaatgacttggcaagtatcttccagtgtccggtctgcttagactatgcgttaccaccaattcttcagtgtgagagaggccatcttgtttgt

SEQ ID NO: 413154 - DNA, 122 bp, Homo sapiens
cgacttctgcctacctgcaattagtcagaactcaatcatatgacgccaccttattacttacgatcttactgctagtgcatataacttagctgtatgcccaggagtactgtgtgagtgtgtgc

SEQ ID NO: 413155 - DNA, 122 bp, Homo sapiens
cagaaagaacaaactccagacacgccgcctttaagaactgtaacactcaccgcgagggtccgcggcttcattcttgaagtcagtcagaccaacaacccaccaattccggacacactatcagc

SEQ ID NO: 413156 - DNA, 122 bp, Homo sapiens
cgccgccgctccacagacgtcacatgatgtttggtcacgtgggctccattcatgaagcggcgacgcggccggccggcgcttaaaggggaaggcgcggcggcgggagggcaaactgcgcatgc

SEQ ID NO: 413157 - DNA, 122 bp, Homo sapiens
gagcaagactccatctcaaaaaaaaaaaaaaaaggtacattggactggagctggtaagtccggggggactcatgaacctcctgaacatctgtgaaactgggcctctaaagagtaggctgcat

SEQ ID NO: 413158 - DNA, 122 bp, Homo sapiens
ccttgggagagtttcttacccttcagagcctcctttccaaggctaagaaacagacgtcttcgtgtctaccagtatttagttggacatgcctggttgcaagtaaataaactattttgagttgg

SEQ ID NO: 413159 - DNA, 122 bp, Homo sapiens
ccaccaagacgagaaaaggagccgggattcctaccttcttcctcgagcgcgctaacatagcgttattaacaattggaaatcctagcagtaaagttctcgacactggacagggcagtcccttg

SEQ ID NO: 413160 - DNA, 122 bp, Homo sapiens
tacgtaaaactaatctatgatgaaagaaatcaaaacagtagttgtttgggattggtgttgcgggtaggaaccagagcaaagaattgaaggactgactgctaaggacccaagagatctttcta

SEQ ID NO: 413161 - DNA, 122 bp, Homo sapiens
tgcgtgcgtgagggaccttgagccccgggaggacgcgttccaatgatgcatttctggaaacggaggagggcgcccatgtttcggctctgctttcaagacccctgttgcttcccctaacctgg

SEQ ID NO: 413162 - DNA, 122 bp, Homo sapiens
ctcagggccacaggccttggcacctctacctggggatgacgtcaactccgatgattccgacgatattgtcattgcaccgtctctgcccacgaagaactttccagtttaggtccccgtcactg

SEQ ID NO: 413163 - DNA, 122 bp, Homo sapiens
tcccagtgggaatcgggtcactgatctgctcagggacaggagcaaaagcccgaaacgacgcgggtcacacgtccagccagagatgcctcttgaggggtcactttgaaccatggccctttgca

SEQ ID NO: 413164 - DNA, 122 bp, Homo sapiens
atcggttctcccgggtactaacccacgggtggtgtccggctttggcagagtaacattgaccgtaaggtcaaatgagcaggaaatccctcctgcccggtgtcgctgtgaagttgcactcacag

SEQ ID NO: 413165 - DNA, 122 bp, Homo sapiens
aagcctctcagaccgtccatgccgtgcttcccttcgttaatgcagatcgtccaccctgcacgtccacgtccagcaggctgagccaggagggaaacctagacccgggccaggggcgagccgat

SEQ ID NO: 413166 - DNA, 122 bp, Homo sapiens
tacggctctgtttttgcgagcgcatgagggacagtgtccctgccgctcttaaatgacaggcgtctattaaagatagcttttgtgtagtgtttctccaaggcgaggtcaaattccatacactt

SEQ ID NO: 413167 - DNA, 122 bp, Homo sapiens
ggcctctaccagcaaaagctcgagggttggaaagagtcccctggcagggaattggcaccccgtcgtgcctatcctctctctctgactgcctgctggaaatgcccccatctccctttgagtcc

SEQ ID NO: 413168 - DNA, 122 bp, Homo sapiens
cctgctccatggcgcccagtcccatcaaccgcccaagagctgaggagtgcgagcgcatggcgcagggctggcagatagctccacctgcagcccttgtgcgggatccactgggtgaagccagc

SEQ ID NO: 413169 - DNA, 122 bp, Homo sapiens
ggagggcttctccaagtggaagtggttaggcagttttgtttttggccgccaggcgtaggacgcgagaagggggtgcagcggccggggaccagggcggcggtccccgcggtgggatcgcgcca

SEQ ID NO: 413170 - DNA, 122 bp, Homo sapiens
tggcgctcccaggggtcgggacacaactgctgcacccgcgctccgaggccgccgaggaaacgaaacctagctcgagaggagcagtccctgaagccgtcaggaagtcacgtggggtgcggggg

SEQ ID NO: 413171 - DNA, 122 bp, Homo sapiens
cgcgcccacgcacgcacgcgcacgccgcacgggcctgggccccgggctctgaatagcggccgtgctgactgctgcgcgccctgtagagtggaggccatattcaggcttccgggtgatgtttg

SEQ ID NO: 413172 - DNA, 122 bp, Homo sapiens
acaaatacgcatctgaagatgcgcccggggccttcgcccctttccaggcttacttctcaacgcaagaagactctcacgtgttgctacaccgcaagtctccaattaagagtggaccggcaagc

SEQ ID NO: 413173 - DNA, 122 bp, Homo sapiens
ggggctttggctgctttgcacttgtaaaagcgctgctttttgcctgtgctggctccctcccgcaggcacccattggctgttcctggccagggtggaccccagcctccccttgggctgacttt

SEQ ID NO: 413174 - DNA, 122 bp, Homo sapiens
agccccgggctgtagggtcggggcccactgacagctcccgcccccgccgcggccaatcagcggttggtgcacacgcccccccggccacagccaatccgcagcagccctgcagctccacccct

SEQ ID NO: 413175 - DNA, 122 bp, Homo sapiens
cctcgcaaagagggaagagtgggcggggccacgtgccgttgtcagagttcgcaactcgagcgcccagagggctcgcgaaaagtcccagcctgcaagccaacctcgctcagcggacgactggc

SEQ ID NO: 413176 - DNA, 122 bp, Homo sapiens
tggcagcatctcctcccagcgtcaggtctaagcacacaagttcttccttccatctacaaacgcaggaaaccacgactggagaagttatatgattggctaaaccatgaatgacgcaacataac

SEQ ID NO: 413177 - DNA, 122 bp, Homo sapiens
gatacattgatagtgttgtctggggcaagacataggccttcatttttgccaacttgttcccgctccacttgatggaagaattaggcccaaaatatatatggtaaacatacttctcaaacaaa

SEQ ID NO: 413178 - DNA, 122 bp, Homo sapiens
tttctttggaaggcagtggatttttctcttgcgtctctgtcttcttcagtttcgacttatcgaatttctcgatctcagccatatcggatttgtcagacatggttacggaggagaagcggagc

SEQ ID NO: 413179 - DNA, 122 bp, Homo sapiens
gaagagggtaagaggaatttcagtgccttttatgacctagctttgaatgtgacataccatcgtcacttctgctatattctgttggtcacatagaccaaccctgacatgttgtgggaggggac

SEQ ID NO: 413180 - DNA, 122 bp, Homo sapiens
cgaaggccacgttgggcaggtcgctggagcgcacggtccccatgcagtcggggcccgcctcgaaggtatccaccaggttgactacccactgctgcaccttctcaaagtcctccttgcccacg

SEQ ID NO: 413181 - DNA, 122 bp, Homo sapiens
gtcgcctgcaattggcattaatttaaaatatttttccccgagtctccttggagtcagttccgtgaaacacaagtgcttgccagctctctaatctgcggcgtcctttgaaattccatccagcg

SEQ ID NO: 413182 - DNA, 122 bp, Homo sapiens
tgggggagctggaaacaggcttcctctgggtgggggcgcgacgagggggcggggcgcgggcggccccactcacctgcgattcatgggccggaccctcacggccaccttgaccgatgccatcg

SEQ ID NO: 413183 - DNA, 122 bp, Homo sapiens
accaccacacccagctgggtcttgctttgtcgcccatgctggagtgcagtggtgcaatctcggctcattgcaacctccacctcccgggttcaagcaatcctcccacctcagcctccctagta

SEQ ID NO: 413184 - DNA, 122 bp, Homo sapiens
caaaagcctcgaccacacacaggggcggttacagctcttgaggtcccgggggtcacaggacgccttccgagttggggggaggagaaaacaaaaccacaggaagaaacgaacaacgctttcgg

SEQ ID NO: 413185 - DNA, 122 bp, Homo sapiens
agacacggagacaaagtacagagaaagaacagcgggcccaggagaccggcactcagcatacggaggaccagcactggcaccggcctctgagttccctcagtttattgattaccattttcagt

SEQ ID NO: 413186 - DNA, 122 bp, Homo sapiens
taccagcgaaacgcctgcgggagtctaattgcccggtcgatgcgcaggaaatttggctcccgcaggcgtttcgcgagtagcttgggaggcgtgggaattttggcccaggcaggaggacctgt

SEQ ID NO: 413187 - DNA, 122 bp, Homo sapiens
ggcgggtaggaggtccgctttaggggagcagacaaaggagccactactccctaagcctcacgcctgggcgcaagggttgtgtccacagcaatatgtgtgttggcgcgcgcggagcggggtag

SEQ ID NO: 413188 - DNA, 122 bp, Homo sapiens
attggcaacagctgagcccagaaacgagacttgctctgattggtcaagctactgcgtttccgcgcggcgattggctggcagaaaggcagaggcggggccaggagagaaagctttgtggtttg

SEQ ID NO: 413189 - DNA, 122 bp, Homo sapiens
gctgctcctgctgttaccgctgccgccgccgcccttcgcgcgcgccgaggacgccgcccgcgccaactcggaccgctacgccgtctactggaaccgcagcaaccccaggtgagcgcggccgc

SEQ ID NO: 413190 - DNA, 122 bp, Homo sapiens
tcaagcgattctcctgcctcagcctccccagcagctggggactacaggcgtgcgccaccacgcccagctaatttttgtattaatcaaagacgcatttcaacgcagaggaggaagtgctagcg

SEQ ID NO: 413191 - DNA, 122 bp, Homo sapiens
tggcttcctcagcccgcacggggacctgctctgggctggacgcctctccacattgctgctcgccttccccagggtcagcctgcaggccaccatccgcgacgtggtcatagtctgtgtcctgc

SEQ ID NO: 413192 - DNA, 122 bp, Homo sapiens
acatctgtcatcgctgttagatttcgggtcaatatccatcatcgctgttagactcggggccgacatccgtcatcgctgttagactcggggtcgacacccatcatcgccgttggactcggggc

SEQ ID NO: 413193 - DNA, 122 bp, Homo sapiens
ggcctccatggagtattgtggctcgtcttcgggctggggcccagcatgggcttctaccagcgctttccgctcagcttcggcttccagcgtctgaggagccccgacggccccgcgtcgcccac

SEQ ID NO: 413194 - DNA, 122 bp, Homo sapiens
agcaccctggagagggacctgcaggtcactcaaaggtcacagctcagccagccttggacacggaccagcctatagccccaccccctctatctacatgccagcctagccgagggccactgacc

SEQ ID NO: 413195 - DNA, 122 bp, Homo sapiens
taacgcgcctgcgtaaagtttagagtttacctcacctcagacgcgactacgacctctctgcgcatgcccctttcgggaagcgcgttccaatcgaggtcgcaatcctgtgcgtgacccttctc

SEQ ID NO: 413196 - DNA, 122 bp, Homo sapiens
aagagggtcccaaaaagaaccagcttccgtgtagacgggtctgcagaatctgccgtctcccgtcttctgggtcccctggcccgcccggagtggggacaaggaaatggaaagcccggctcacc

SEQ ID NO: 413197 - DNA, 122 bp, Homo sapiens
ggtgctgccgcagctccgacagggattcgctctgctccctcatgagcgggttggccgagccgttgaagtcatcgcccctaaggtcgtccagttccgccttcaggcctctgttctccacctcc

SEQ ID NO: 413198 - DNA, 122 bp, Homo sapiens
caacctcagaatgctgtcgggccatttcccagaggagccctccaaaaaccctatctctggcggcgctgagtctgtggggtgcctcccccagcaccaccactcaaggtttcccttatgtaata

SEQ ID NO: 413199 - DNA, 122 bp, Homo sapiens
cgcacctgccctaggccctggggtttctaccaggggagaggcacccagggagggagcacacgcacctgtgatgggcacatagccaacgccctgctggtacactgttggcatcaggaccacgg

SEQ ID NO: 413200 - DNA, 122 bp, Homo sapiens
tgggcctcaactcatggaagtgactgtctacagaagacatggacgggcatatgttcccatcgcacaagtgaaagatgtgtacgtggtaacaggtgagtggtgtgaactctaactgaggatga

SEQ ID NO: 413201 - DNA, 122 bp, Homo sapiens
aggatgaaggaaatgggggttcctgagaggcggcgctctgcggaggcggtgtcgtaggcccgccaggcgttggcgctgaagatgggcatccagcacaggaagaagaggaccacgatgacgat

SEQ ID NO: 413202 - DNA, 122 bp, Homo sapiens
gggtgatttggctcatccatacttaggaatttggggtttgaggccgggtgcggtggctcacgcctgtaatcccagcactttggggggccgaggcgggcggatcacaaggtcaggagatcgag

SEQ ID NO: 413203 - DNA, 122 bp, Homo sapiens
gaccccttcttaccaatgtagaagagaaagaacgctctgtttttatttgcatgtcagatacgtgcagataggtagtttgagactacaaaatttgagcagaatttaactcatacagtgaaaca

SEQ ID NO: 413204 - DNA, 122 bp, Homo sapiens
aacatcatctttccagctttctttgaaaagcctcacggcttctgctccgggctgctgtggcgggagctgtggtgtccctggacacatccggcccggaggtggcttccttgaccggcacagcc

SEQ ID NO: 413205 - DNA, 122 bp, Homo sapiens
ggcagtgcgcgtcctcccagcccagagcgagccgcgtgcgtgcagctccggaggccccgccggcccacttgggccccacccctgtccccaggccccagacctgccgctgacgccccaggggt

SEQ ID NO: 413206 - DNA, 122 bp, Homo sapiens
tgctgttggtcagcatgtcgtccgtgatgatggtgacacgcagggtgcagaaggccgtgacgctgtggatgccatctgcagacacaaggaaagtcagggtcattcagatgctgcgggagtca

SEQ ID NO: 413207 - DNA, 122 bp, Homo sapiens
cgcagcgctcggccccgcccccagctcccgtggccggaagtgggaggccgcgcgcgcgcgcgcaggcctactctgggcgtggcctgccgctgcgtgtttttttcacggtttctcattctcgg

SEQ ID NO: 413208 - DNA, 122 bp, Homo sapiens
gaacggagtttttggcacttttcggtttggtgattcccctaaataaccttacaaaagtttcgttgaacaaaaaacctggctggagctccaagatcttttttttttttttttttttttgagac

SEQ ID NO: 413209 - DNA, 122 bp, Homo sapiens
tcttcctaatccccaccctaaaaccttattacctttggtcaagacctttttcagtgttctcgacctaccttcctgtccaactgcctgtattttctttagaacagatgtgctgggtttcagcc

SEQ ID NO: 413210 - DNA, 122 bp, Homo sapiens
gagacgattaaataccatgccgcagaggcccacgggatttgggggcggggctacggcgagcgcacgcgcatacgttgaccgcatgcgaccccggggagttgtgggtagagagttccagggaa

SEQ ID NO: 413211 - DNA, 122 bp, Homo sapiens
ctgagacatacaagaaacccaagcctgaccagagtactacccacccctaacaacatgtctcgttcaggaaagagcacatgactgaaactagacaatgtcttcctcaggacttcactttcctg

SEQ ID NO: 413212 - DNA, 122 bp, Homo sapiens
ggtgcacgcggcccggccccagccccagggccgcagcccacccgccgcccgcctgttttccgggcctgcagtcaattcaccacataatgcccgattcgctctttgcaaagatagaaacgata

SEQ ID NO: 413213 - DNA, 122 bp, Homo sapiens
ttatttttttaagccctgctgagactaaatcaatttccttatctgtaaacataggtgggccgggctcacacctgtaatcccagcactttgggaggccaaggcaggcggatcaccagaggtta

SEQ ID NO: 413214 - DNA, 122 bp, Homo sapiens
tcaccctctctggactgaactctgaactccagcttttctctaagaaaaaccagctaagaacgaaaaagactttgatcccggtgagccggaggaggaggaggaggaggaggaggaggaggagg

SEQ ID NO: 413215 - DNA, 122 bp, Homo sapiens
tgtgggcaggaggaagagccctgtgcgggggtcctcctgcccaggttcctgtcccagcaccgtgccgggctctccaggcgcccaggcccttccccacccctgggcctcggttttcctgggct

SEQ ID NO: 413216 - DNA, 122 bp, Homo sapiens
cgcagggagccagggaaaaccaaagtccgttccctgcttcaggatcgttttctagatgtgcgcaaaatacagtcccctccccccacccctcccacggtgagctgcgcccaggtcgtctcccg

SEQ ID NO: 413217 - DNA, 122 bp, Homo sapiens
caaccaaacaaaagccaggttgaggcctctaggtgggtctccgctaccgatggattcagccggtggggctgcaggaggttcctataagcgtggtcccctctccccgcaccgagtccggcccc

SEQ ID NO: 413218 - DNA, 122 bp, Homo sapiens
tttttcaggcagctacccactgaggccacctcctgtttaaaagggccaagtgaggccaggcgtggtggctcatgcctgtaatcccagcaccttgggaggctgaggcaggagaatcacttgaa

SEQ ID NO: 413219 - DNA, 122 bp, Homo sapiens
cctggtcctcctttgctcacgggcttgctgggcccgccatgcccattaggacagggtgggcgttggttcctgtgtgcaaacccaaggcagttcctgggtgctccgagccacagctctgactc

SEQ ID NO: 413220 - DNA, 122 bp, Homo sapiens
ttggggacccacagaccaaaaattgcaccctgagcatcagagatgccagaatgagtgatgcggggagatacttctttcgtatggagaaaggaaatataaaatggaattataaatatgaccag

SEQ ID NO: 413221 - DNA, 122 bp, Homo sapiens
gaacatgaacatgaacccaaaaggctgcgtcagggaggaaagaggcaaatggccgtaaaccgccacctcttcataccggccgtccaaacatccaatggggaacatgggccatggagctcagt

SEQ ID NO: 413222 - DNA, 122 bp, Homo sapiens
caagaccccagagtaccagtggaaatcaagaccaaaccacacggtggagactggttccgacgtatcagactcagtgcttccggcatggcgctttagtgtcaggtgaaagaacagcaacccgc

SEQ ID NO: 413223 - DNA, 122 bp, Homo sapiens
gttctgagccctgcccggtggggaggcagctgaggccaggcgaggattcgagcacagcgccggcgggctggcactgctgggggactcggcgcaccctccacagctgctgtcccgggtggtaa

SEQ ID NO: 413224 - DNA, 122 bp, Homo sapiens
gattcacctgcaaatagagatgccacattcctaagactctgaaacagtggttcccagcttcggtcacaacagtaatatcttattcctaagaatttcagtgcttgagttaatatacaaatact

SEQ ID NO: 413225 - DNA, 122 bp, Homo sapiens
gggcattgctgcaaatgtaggtgggtaactgtagtgcatttgcattcagtttgaatgagacgaaaagtccactgaagtttgtagacagaagggtgctatggccatccctaggtcccaacagg

SEQ ID NO: 413226 - DNA, 122 bp, Homo sapiens
ttccatctccagctcctccaatgcccaagtccaacaccccctccctgaaagcctccactccggagaagccagctctgagctccttgcttgatgttttgtgaataaagggccagcaacagccg

SEQ ID NO: 413227 - DNA, 122 bp, Homo sapiens
actgtaagcggaaatcactaagaaagagaggctttggaaaactcttacctgctgaactgacggggtaggcattggagttgcaagccctgcatctccaccatcaatatcaaagaggtcattcg

SEQ ID NO: 413228 - DNA, 122 bp, Homo sapiens
ggcaacggagacgctggatcgggaggcgacggaggtgctgcgcgcgcaacccgccgttcccgtcacggcgccacggtcgcagttggccacacagtgcaagtgcagcccaagccgaacgccca

SEQ ID NO: 413229 - DNA, 122 bp, Homo sapiens
cctctggacgtccagctgcttgtatgttcttccgccgatgtgttcctctcgacgtccagccgcttgtgtgtctgcctgcaagggtctctgggatttttataagcataggatgacggtgtggc

SEQ ID NO: 413230 - DNA, 122 bp, Homo sapiens
atccgacaggcggcccacttttcccagcaggtgagctgcgtgagtagccctcctcctggccgggactgtggtgagctccctgcaccccaccccaggcagccacgtggccatcagcacatcat

SEQ ID NO: 413231 - DNA, 122 bp, Homo sapiens
ctcagtttccccagctgtgcagaagaagcaggttgtctcgcaggacccgcccagcgctaacgcaacgtgattcgctctggcaggagccgggggctgcccgcattgctgcgcaggcatcgggc

SEQ ID NO: 413232 - DNA, 122 bp, Homo sapiens
aaactgcacctttgcaaccgggctaagcgctgcccagggccagagctggaggactgagaacgcggagcagtgctgagggggcgcagaagggggcaggggcgggggcgtccaactgcgagagg

SEQ ID NO: 413233 - DNA, 122 bp, Homo sapiens
ccaggtccgcgtgaggggttcgggggttctgggcaggcacaatggcgtctcgagcaggcccgcgagcggccggcaccgacggcagcgactttcagcaccgggagcgcgtcgccatgcactac

SEQ ID NO: 413234 - DNA, 122 bp, Homo sapiens
ttagctaaatctggaggaagggacaccgtggttcctctgccaccatctgtccacccctgccgtggccaggctcctggactcagcatagcactccctgggcactggcttcctggagccctgca

SEQ ID NO: 413235 - DNA, 122 bp, Homo sapiens
ggcatgtctttatgttctgtcactacaagacattccaggctattcttacactttccctgtcgcagacgtggaaccagccatttctccaaagctctattctcctcctagtggagaataaaatt

SEQ ID NO: 413236 - DNA, 122 bp, Homo sapiens
gagcactttacttgcattgggtgaatagcattatcatctccatgtcacagatgaggcaaccggggcacaggaagaataagtaacttgtccaaggcaacagagctaggaaggggcagagccag

SEQ ID NO: 413237 - DNA, 122 bp, Homo sapiens
gagacgatcttcttccctagaaagaagtcgcttacggttggcgtttccctcaggcagcgccgtgggcagcccacaggcccttgtaaggcgcgcgccgcggccccgcctctttcctttcggcc

SEQ ID NO: 413238 - DNA, 122 bp, Homo sapiens
cggcgtggttgtgggcggggcccggcgagtgtgggcggggtcggtgggcgtgtccaccaccggggccccgtctggctcgtagctgctgtcatcctcactccgtcttctcgcagggagcctcc

SEQ ID NO: 413239 - DNA, 122 bp, Homo sapiens
ccggcggctggcgcctccatgaccgggaagagcagtgcgccagggcgggtagggcccgggcgcggtagcccgccctcccgccactgagcagccgttcattgggcaagggctggtgacacaag

SEQ ID NO: 413240 - DNA, 122 bp, Homo sapiens
cggggagggaggacatttgtcccgtgtctccgggaggggagcgcctttaagccgaaaccccgccctctcggtcgtcctggcaacgcctcccccaacccggggctcccacatttcagcaggtg

SEQ ID NO: 413241 - DNA, 122 bp, Homo sapiens
tggtttggggctcagagggccgcgcgtgtgtggcctctgtctgtccggggatggggtgggcgtgtttggctttcgaggtggattcgtgcttgtgtgagagggtgtgtgtttctcattcctgg

SEQ ID NO: 413242 - DNA, 122 bp, Homo sapiens
gtaccatgtacgtgcacccgggaccctctggccggaatccgtggtgtctggctcaggaggcgccggcactgccctctagactctgcgggagccatcaagcgtctggggctgggagccgcacg

SEQ ID NO: 413243 - DNA, 122 bp, Homo sapiens
tatacaaacaccaacaaaaaacgacacctctccaggctggcacatggcactggaggacagcggggagggtaaagcgatcagcggccacctccccaggctaaccaacccgaggaaccattaca

SEQ ID NO: 413244 - DNA, 122 bp, Homo sapiens
aacgcgacagatgctgggacgctgcaataggccaaactaacttacctcctgtgccagcagcgcccaagtgcagctgcccaaacgtgagcactgaccgtgagccaggcactgtcctaagcact

SEQ ID NO: 413245 - DNA, 122 bp, Homo sapiens
taattgtatgttatttgcagaatttgtgtacttagtttttgaactacttatcctattttacgtctctaagaacttaatgtattgaacaaagtcaaaatgttaagtttcttctcatcagcatt

SEQ ID NO: 413246 - DNA, 122 bp, Homo sapiens
ttggggggactctcctgggataaacagattctgcagcctcatagcccttgttagaactggcgcccccaaaatccctacgaaacaggtaaagtggtggaagcaaaggatggggggatgagcaa

SEQ ID NO: 413247 - DNA, 122 bp, Homo sapiens
atcatcttcgtttgacctggcccttcttttcaatgttaacagaagccatgcagtgacacccgctaagacttgttggtagccatgtcggagccccacagggtccagttcacctctctcccagg

SEQ ID NO: 413248 - DNA, 122 bp, Homo sapiens
cgtcttcattcagcaaatgcgtatggagctgccaccgcgtgcccgtgcctgtgcctgacacgcccccgtcgtgtgacctctgacactggaccttgagaccatagtgcctgtcgctgtaaaca

SEQ ID NO: 413249 - DNA, 122 bp, Homo sapiens
gcgttctgagcagacgggtgtttcctggctgcaggccgggccttggatgcagccttgacgcgtgtcgatctgtttacacacagggctgagtccgccggccccccgggggtgctcatgggtgc

SEQ ID NO: 413250 - DNA, 122 bp, Homo sapiens
aatctaaagagcaggttttgcgttgctgctatgctcgggccccgggcttatataagccggcgctgccctgtgattggtggagcgtccaatccaccgccctctggccgccgccgctcgcggtt

SEQ ID NO: 413251 - DNA, 122 bp, Homo sapiens
agcggggtgggcgtggtctggtcgacccggtggtgccgccccacagcgccccctcgcgtgcgccagccagctcggcctcagctccccgcgctcctgctcctgcctaaggagagctgctggcc

SEQ ID NO: 413252 - DNA, 122 bp, Homo sapiens
gagaaagacggagacccgccatcgtggccaacgaccccgtgaagagggaacggcggtccacgcacgggacccagcctccaatcaagcccagcaggcgccagccgggcacgcctagtgctggg

SEQ ID NO: 413253 - DNA, 122 bp, Homo sapiens
gccccctccccgccaggcaggagctgcgaggccaggctgagcgagacccggtgtaaggtacgacagtggcaagtgcgggtgtgacggtcccggaacccaggggtctcggcccacccaccgtg

SEQ ID NO: 413254 - DNA, 122 bp, Homo sapiens
ttccaggcatctagagaatcagagcgtgatcatcaccagaaaatcccagctgactgaggacgacatggacaagcgatgacagcgtgagaaacccacggtgcagcaaagcgtgcatagtatgg

SEQ ID NO: 413255 - DNA, 122 bp, Homo sapiens
tcggcgcttccagtagggaagagcctgaactcgcgtgcccatctgggagcccctctcacgcggttagcccggctgtctgtcccagtccaagacacaatctcacagttccctggccctactga

SEQ ID NO: 413256 - DNA, 122 bp, Homo sapiens
aaaacaagtaactggattttcagaaaagttaagtatttgttgaatctataatgcactaatcgttttgtaaggtgatgtgagatacttaaagaggcattaagatacaaacatagagactagtg

SEQ ID NO: 413257 - DNA, 122 bp, Homo sapiens
gcgtatgggcgggactaagctagccagagtctagaagcccgcgctaagggttgctagggacgcaccaaacacccctacggcgcttcggaggagccaaaggaataatgggcgcctccgccccc

SEQ ID NO: 413258 - DNA, 122 bp, Homo sapiens
tgattcaaaacccacatccttccagggctcctcctgttgttttgagcagctttctccttacgacaagcaggaaggcagatgctaacttctaaattgtgatttgtaaaacttcatatgtgtat

SEQ ID NO: 413259 - DNA, 122 bp, Homo sapiens
caccagtggagtgtaagcagaaggcatccacgccagttcccacatgtgttcctccatgctcgctccctttacagttggctagaatggagatgaaccccagggtgaacctggaagccatgaat

SEQ ID NO: 413260 - DNA, 122 bp, Homo sapiens
tgacttcagcgttctccggacacacgtcgatcttgtctaccaccttgtctgcatcaaagtcgtcctggcacacgtcgcccacgccgtcccctgagaggtgggagacccctcggtgggctaaa

SEQ ID NO: 413261 - DNA, 122 bp, Homo sapiens
gatgttgagatgtttatagtaaaattagagatcctgaatgcagtgcaacaggtttaaatgcggcatttacttctcatctgtggcagtgttcgccttaagtcagtgctaagtgtggccagtag

SEQ ID NO: 413262 - DNA, 122 bp, Homo sapiens
ccatgcaaccctgggcgctgccaaccgtgggcgagctctgggtgtgcgggcggcctggcgcggcgctccgctgtgtcagcgtgttatgatgccgtcccataccaacctggctactggaatcc

SEQ ID NO: 413263 - DNA, 122 bp, Homo sapiens
attgggctcagcagagatcaaaaccacgaccttgtccttattttatctttctgccactggcgtgcttaaggcagacaaacacttgccatcaaacggctataaagcgttttatttcccttcat

SEQ ID NO: 413264 - DNA, 122 bp, Homo sapiens
tcccttcccatgtaataacatacaaagttactttacctttctgcagatttggaacgggaacgagagcgagaacggctgcctcctcgacgtctatcccttgaacgatgccgctttctatcttt

SEQ ID NO: 413265 - DNA, 122 bp, Homo sapiens
ttgcccggcgctgagcggagggcccagtttcgggaccacagccttgctccctgggagctccgggcggccaatgccgggcaagcccagcccggcacaggaggaggcagggcccgtctccggaa

SEQ ID NO: 413266 - DNA, 122 bp, Homo sapiens
caaaaccggattcacaagtacactggagactttacattttgggcaaggatattaagctaacgggagtgagacaacccttcttcagtagaaaaaaggcgagcagcaggcgctgctttagttac

SEQ ID NO: 413267 - DNA, 122 bp, Homo sapiens
catcccttccccactcactccactgctccagggccccagtgtcctcacacggatgagtgacgcctgagatccctcatttcacagatgattaacaaaccacatggggcatgagagggaggagg

SEQ ID NO: 413268 - DNA, 122 bp, Homo sapiens
gtagtgaccgcgagacaaagacccggcggcgggggaggcggcggagagaccccgccagcgcggagaccccagggaagcttctctggaagacctggtgctggtccgctctcccgggacctcat

SEQ ID NO: 413269 - DNA, 122 bp, Homo sapiens
agctggggacagaatagtgttctggattgagtatctcagttaccagcctgaaatctccatcgaccaacactgccttctctcaaatgacttcttatatgaaagtggacagacagtggaatgca

SEQ ID NO: 413270 - DNA, 122 bp, Homo sapiens
tgcacacccaagagaaagaagctggtggcaaggagatgcccttatgaggcaggcagagcacgcccacttggctcttgaggccaccaggtcctaccaaaggagagagggacgtaaccggcgac

SEQ ID NO: 413271 - DNA, 122 bp, Homo sapiens
gacagcatgcaagggaggttgacgtccctggacgaagaaagtgctggagaaactggcgaccgtcccaccttccctaaggcgaaggctctgaattccgaagaccgttactcggcgcggaacgc

SEQ ID NO: 413272 - DNA, 122 bp, Homo sapiens
aaaggcggagaaaccaagccttgcatatatataaacatgaccccttacctgggatatggtcgatgcagctgtagtgacaatctcagagcagcttctacaccacagccatttccagcatgaag

SEQ ID NO: 413273 - DNA, 122 bp, Homo sapiens
tatcttgaatatgattgttgtcacccactccattgcgtccactctagtcatagccaccatcgtctctgtcttggatcattgaacgagcccgtaacttgtctctttgcttcctttcttgttct

SEQ ID NO: 413274 - DNA, 122 bp, Homo sapiens
catgcacacagcacttcccctgggaggcaggggctgtgcccacagaagtcgttacctctgcgtcctgagtatggacagccaccatcacacagccccagaggccgcccaggctctagccacac

SEQ ID NO: 413275 - DNA, 122 bp, Homo sapiens
acgtggacggtggcctcggggtggttggctcacagaccagggtggccttcctgagcatcccgtagggccgtgggacctgaagcaaaggctacctgttgttgacgccgtgtgacagacgcctg

SEQ ID NO: 413276 - DNA, 122 bp, Homo sapiens
actttctatccacctatccagatccagtctccatccccctactctaaggatgatgtcacccggcaccctgccttccagcgtctgttagatttgggtgataggaagcactaactggagatcag

SEQ ID NO: 413277 - DNA, 122 bp, Homo sapiens
aattttgcttttttgagggaagttggtctctgtgaccagtaaacccagccccaagtttaccggccgaaggaagggaaagttaagagtgatagggcatgaagtgaaaggcttcaggtgggaag

SEQ ID NO: 413278 - DNA, 122 bp, Homo sapiens
gagtctgactttctccctgaacgttgtgtgttagtgattctgtgactctttctccctgagcgttgtgcgttagtgattctgtgagtctggcctttctccctgagcgttgtgtgtcagtgatt

SEQ ID NO: 413279 - DNA, 122 bp, Homo sapiens
cgctagcactttcagccccttgcggtagacttggattaggcaggtatgaatacttcagttcgagaaaagtgtgaggcagggaagcttccgagcatctcttgctgagcagatattctgatctg

SEQ ID NO: 413280 - DNA, 122 bp, Homo sapiens
gaacagtgcttgctatgtaataattgcccattaaagttttttaaaaatattttactgggccgagctttgtggcatgttcctatagtcccaggtactggagaggctgagttaggaggatcact

SEQ ID NO: 413281 - DNA, 122 bp, Homo sapiens
cacttcccagacagggcggctgcggggcggaggggctgctcacttctcagacagggcggccgggcagaggcgctccccacatcccagacgatgggcggccaggcagagacgctcctcacttc

SEQ ID NO: 413282 - DNA, 122 bp, Homo sapiens
gataagaggccgcctgcacacagagcccagttaattctccgcacctcggttgtgtgcttccgaatgggctcactcccgtggtggtgtttgagagccaacaacactacctcagagacgggtct

SEQ ID NO: 413283 - DNA, 122 bp, Homo sapiens
tcttggcggtcctcaggtgttttgtggaagccgggcctgggtggcgggcgcggggaatggcggctgcgctgaggaggcgtcgcggcgcgacagcagtgggggagggggagggggagcgccga

SEQ ID NO: 413284 - DNA, 122 bp, Homo sapiens
tgaggagccatcccagggcttgagaaggagctggcctgctgccttcctggacggtgaggacgctgacgacattgttattgcaagttttctggcaatagggagcccccaggggcaggggaggg

SEQ ID NO: 413285 - DNA, 122 bp, Homo sapiens
agttccccgctctgtggctttggccggccctgccatgctgaccacgggtgacgctccagtcggccctgacacatagtttgttggccgacatcgtgttgtgtatttctcaatacaaaataaaa

SEQ ID NO: 413286 - DNA, 122 bp, Homo sapiens
gaaaatagaaaaggcgcagcagcaaaggtccccttgccataggcaaaagtgcctccccaccgctcatgcacagagcctaggggaccctgggactcccaggttcacgcccacggagtgcctcg

SEQ ID NO: 413287 - DNA, 122 bp, Homo sapiens
gttcctttaatcttctttggagcctggccccttaagcaccgactgtgctaagcgattatacgctttcaggggaggggaaaatgcccaagaggtgagataggatctttatttctacttactcc

SEQ ID NO: 413288 - DNA, 122 bp, Homo sapiens
agagccgctgactcagcccttatttggttctgtggctgggggtgggtgagcctgggcttccgcttggctccctagagggtagtgtggctggcagggcatctgtctagacactctctgaggct

SEQ ID NO: 413289 - DNA, 122 bp, Homo sapiens
cagttcattacatctgcaaaactcagaagagcaacaatgctgtcaaaaatgttccagcctcggcgaaagtagtggtagggatcgagcgcaatgatttttaggcacatttctgctataaaaat

SEQ ID NO: 413290 - DNA, 122 bp, Homo sapiens
gtcaccccacagctggctcctggccccaaggcagccacgggcaggggtcgtgatcgggggcgggacggggcccggacctcctgaccgccccccaccccccgccgagcgggggtgtatttgca

SEQ ID NO: 413291 - DNA, 122 bp, Homo sapiens
acagtgagaccctgtctctataaaataaaataaaataaaaattagccaggtgtgggtgtgcgcctgtagtaccagctgcttgggagactgtagtgagaggctcgcttgagcccaggagttca

SEQ ID NO: 413292 - DNA, 122 bp, Homo sapiens
gctggcaaggagcgcccgatgccaggtttcggctctccagtgcctcctctgtgcaggtaacggccgcgtgcgctttagtcgatgaaaaagcattcagtgggacagcattagctgttgctagg

SEQ ID NO: 413293 - DNA, 122 bp, Homo sapiens
caaatgagaattaaaaaagcaagttttataaccttagcttcttccttcttttacagtgcacgtaaccagtgtttgactagctcattgtgagagatagaaaattcaaattggagaaggtccct

SEQ ID NO: 413294 - DNA, 122 bp, Homo sapiens
cctgagcgacgggtcactttggccaatgatctgcagccgccagggtattgcagccagtggcgagtcgagggggcgggaggcagcaggttaggcagtgagaagttagtggcgctgctgggacg

SEQ ID NO: 413295 - DNA, 122 bp, Homo sapiens
gcacggtgctagagtgctaggcacatcatcagtgcataataaaggtgtgcttactctccccggggatgagattaaatcctgggtgcaaagcaagtcttgatttccatgctcgaagcacaaat

SEQ ID NO: 413296 - DNA, 122 bp, Homo sapiens
atgaatgaatgagccccaggtgtttaggagaccctaacagaggtgcccccgttgtagggacgactctcacctgcagatggcctcctcaggcccttcgggtggcactggggagcccagggcct

SEQ ID NO: 413297 - DNA, 122 bp, Homo sapiens
tttgttgtatatggaaaagccctccctggttcaggaacctgtgtgatgtatttgggtgggcgcctttctgttgtggtgcacatggggtatgggttcctgcaggtgggaagttggggttgggg

SEQ ID NO: 413298 - DNA, 122 bp, Homo sapiens
tccacggtttcaaaaagataagcttcgcctataaaaggagtttttgttgctatctggttgcgtgtggaacctgacggaactgccacggtgagtcgggaacatgttttccaggcctaattgat

SEQ ID NO: 413299 - DNA, 122 bp, Homo sapiens
cgcgggaccaaggcttggcagggagcgcgctgctgtggaaggtccttgggaggctgcgaccgcctcggagagggcgggcgggggagaacggggcggggggtggggcgggggccaggggcggc

SEQ ID NO: 413300 - DNA, 122 bp, Homo sapiens
atcctggaggaggccgcactgccggaatcttcccctggcagagaaacagggctaagcaggcgccagggagcaagcctgggcttgccacatcaccaccttctgtgctgaaggtcagatgacac

SEQ ID NO: 413301 - DNA, 122 bp, Homo sapiens
ctgctcaggtcttcacagccaaaagctggtcatgtccatggctaaaccagccatacagggcgggaatgacatcttcccaaggcttcagactactcctaattccctttagggattggaaagag

SEQ ID NO: 413302 - DNA, 122 bp, Homo sapiens
tgagatcgacaaaccccagggtgccctgccccgcaccagctccacaccccagccccagcccgtgtgtgccctgtgggtcactgcctcccctgcatcactagaatgtccccgcccaggtgtct

SEQ ID NO: 413303 - DNA, 122 bp, Homo sapiens
tggcagatcctgtttctcgtcctgtggagggagcagcttctgaacatttggaggcttttccggtcgcctcgggtagggcgggggagggctgtactcggtgctgccaagaattctccttcgtg

SEQ ID NO: 413304 - DNA, 122 bp, Homo sapiens
catgtaggctcagcctggcacttgaaccccgtgccctccgccccccgcccctcccagtggcgtctccgcttctcacttcagaggcagagctgtcatcgtgggcactgggaagtagcctgcag

SEQ ID NO: 413305 - DNA, 122 bp, Homo sapiens
ctctcactgtgacaatgttgaatttacctgaaggttaagaaaccctctattctggtgttccggaaaacagctgatggcagcggggagcccccttgcccgtaagatgctggaaaacactccca

SEQ ID NO: 413306 - DNA, 122 bp, Homo sapiens
aaaaaaaagttcaaccccaaagcccagtcaataattccctaaagtagcagaaactccctccgaggtagatatctgagtcagacactctcgtccaccgagcgattctattggtttaagatgag

SEQ ID NO: 413307 - DNA, 122 bp, Homo sapiens
aaatctccccaggggggatatgggggtgcctttctcttacagagtccaggctggtaaaagcgcatgtgtgtttcgtgtctggtttgtcccctgcccagcgggcgccgttggaagggccttca

SEQ ID NO: 413308 - DNA, 122 bp, Homo sapiens
ctgcgcgtccccgctcgagtgctcggcccgttcagcctagtccgggtaggtgaggtgtggcggggaggggtcgagaggcgctggggctcagtctcctcttctgttcaacaggctggtggtcc

SEQ ID NO: 413309 - DNA, 122 bp, Homo sapiens
ggcgtggaaaccccaccacaacacagcacctagaacacacgtgtgtgacatctcgagtgacgcacattcggaacagatcgtgtggatgtgcagatgtcagggagtctgcagtacctgcgcat

SEQ ID NO: 413310 - DNA, 122 bp, Homo sapiens
aatggaaatcgtggttgcaactgaggttctttcctaagttaacaaatggttgttcctcaccgcagaactacaggaatgacccttacaaatgagcagattctttgttttctcttgattgctgg

SEQ ID NO: 413311 - DNA, 122 bp, Homo sapiens
agcgccagggggacagcgccacaccctggcgggggcgggcctgcaactccgcggacgctgcgaggtggcctgcctgttgacagtcttaacccattgcggggtaaaaaggatgtggcgtgggg

SEQ ID NO: 413312 - DNA, 122 bp, Homo sapiens
tccgcagaggcccggaggcgcccacactcggacagccacatgggcgtggcctttttcctccgcttttcaaactttcgaaactttattggccactcggagaaacgcgcagtcggccacgccca

SEQ ID NO: 413313 - DNA, 122 bp, Homo sapiens
tgtgggtagttaagagtggggtcacccctttaactccaagcactacattttggcggctgccggcctctgggggaggtggcagttatgctgttactagtgattttagggctttgttatttaac

SEQ ID NO: 413314 - DNA, 122 bp, Homo sapiens
gcaggcagggtatctagactggcagctgccggtgcaggatattgccaaggactcggcatccggctcagctcaaggtggggacgaagacgtcctggttgcaaggaggagccctactccccccg

SEQ ID NO: 413315 - DNA, 122 bp, Homo sapiens
gttagtatggaggagacggccgacaggctgggctccattcctctgaggcagctggtataccgggtccatgctctgcccccgagcctgattcctctggtgtgggactttggacaactgagtga

SEQ ID NO: 413316 - DNA, 122 bp, Homo sapiens
ctaaaagaggaagcgaaggaaagaaaggggcttatagtgggcgaggtctataggtagtcccgagcaaattgcttatggctttggttatgactgacaactactcagacgaataaagccctcct

SEQ ID NO: 413317 - DNA, 122 bp, Homo sapiens
acagtgatagattaatggttaataattaactagaggagggcactctgtcttccaattacacgttgatttgctaagtggctcagtgacaaggtaattaagatgaagaaagcaaatgtagcagg

SEQ ID NO: 413318 - DNA, 122 bp, Homo sapiens
atatagatgtatagtcaaaaatgttctgcttaagtgttaaataaaacggaaacacttattcgtgcttggtaatatgtgtgcagattattttctaaacatcgtgaaagctgatgaaaatttac

SEQ ID NO: 413319 - DNA, 122 bp, Homo sapiens
tgcaccctgtaggacttgcaccagagatcacggccttcttggggcaaaccacagcactgtcgctgtgatctgcggaaacggctccctccactttgcctcctgtgagtcttggtgattaaatt

SEQ ID NO: 413320 - DNA, 122 bp, Homo sapiens
tccagcctggagcaggttgtatgttctcgtccacctcagcacgctcttgtccggtgtggacgctgccaactccactctacgttgaagaagtcgagaggcaagaggttccggagtgctccaga

SEQ ID NO: 413321 - DNA, 122 bp, Homo sapiens
gggagggttgcgccaggagttacaaggccggtgacccgaagtgggcctattgtttcttctcgaaattctctccattgctgttctatgacttcagcaatttaaaaaaaaaaaaaaaaagtcta

SEQ ID NO: 413322 - DNA, 122 bp, Homo sapiens
tttctgggggcaggggaaggcaaggctgtttccccggaacgggaccggaacaggtttattcggggtcacagaaggagtcacctgcgcagatacatgaggcttaaaacctgcccttttattaa

SEQ ID NO: 413323 - DNA, 122 bp, Homo sapiens
ctggctaatttttgtatttttagtagagacagtgtttcaccatcttggccaggctggtctcgggctcctgacctcatgagccacctgcctcagcctcgcaaagtgttgggactacaggtcta

SEQ ID NO: 413324 - DNA, 122 bp, Homo sapiens
tttcccaagacccagaaggggtgaagggtgaggtgtgattgcccccacctccttgcctcccgcagcatctgctccgggaccatgaacaatagctgacagctccatggcccttgctgtcccca

SEQ ID NO: 413325 - DNA, 122 bp, Homo sapiens
ctaaacttcctgtataattgaaaactacttcaaaaacaatttatgtttgtctggcatcagcggcaaccagagagaaaccagggttatctgcaaagtcacgtaacgtatcgaaaggtgctgag

SEQ ID NO: 413326 - DNA, 122 bp, Homo sapiens
gcccaggggagggagggaaggggggctctgtcgtctctttcctgggtctgcgggccattgcggtaaaaaagaaaaaaagctgaaggatagtagctagtccaggcagatgccagagattcttc

SEQ ID NO: 413327 - DNA, 122 bp, Homo sapiens
gaagaggcagtcgggctgattttacatgcacctctgcacttagagggatcagggcgttctcgcatgaaatcccatttttcatgaagctcctggatacctcagagataaagttatccacataa

SEQ ID NO: 413328 - DNA, 122 bp, Homo sapiens
agttagaggtgaagcatcataatgtctgcaattttctttcaattgagtaagaaaccaaatcgtaacaactagtgaatctaggtaaatgatatatgggtgtttgaacttttctgtaggtttga

SEQ ID NO: 413329 - DNA, 122 bp, Homo sapiens
tgctttcctatctctatgattttcatgcttttctgactcttgaaatgtctcctcagttcacgcaacaccatgtgtgaggtcctatgctggatgacggaggtccagcatcatataagatgctt

SEQ ID NO: 413330 - DNA, 122 bp, Homo sapiens
gccagcagctgtggagggtgtgtgggtcccccagtagtgctggcccgcaggtgctgtgctcgaattctcgccgggcctcagcttcctcctcacggggcagggctcgggacctgcagcctgcc

SEQ ID NO: 413331 - DNA, 122 bp, Homo sapiens
gataaacctcagcatcctgtccctggcatatacactacctttgagtgtaaacggggactgcgattatgatgtgatagtcattctcatcattgttacctaagacattagccccggcaaccaca

SEQ ID NO: 413332 - DNA, 122 bp, Homo sapiens
ctcccaccgggcataggagcctctcagcagcgcgaggggtcgcccagcctggacctggaacgcttgcagcacgaccgtcgcgcgcttccctccggaaccagctcccaccgtcacagccccct

SEQ ID NO: 413333 - DNA, 122 bp, Homo sapiens
atctgttgccatagcttcagtggtttctgtatcactacatgcatcttcatcatcacccatcgtactatggtaaggagtgcttggttcatctattttcattaaaccatagtctttgtctgctg

SEQ ID NO: 413334 - DNA, 122 bp, Homo sapiens
ggagggggccaccagggtctcctaccttgaagggggagaggtgggcgtggcccacgaccccgtggccagcctcgaggtgggacaagttcctctccgccacgtgcaccagctcgggggcgttt

SEQ ID NO: 413335 - DNA, 122 bp, Homo sapiens
taagccacagggagaacaagattgtcccataaactccttacagagatggtgtacaggaaacgagccttacagagaccacagcctatggagtgtctagcttcagagaatatgtactccactgg

SEQ ID NO: 413336 - DNA, 122 bp, Homo sapiens
aaatacagccacgatctcccttccccagtgtccagagaggtgctgctggccttgccttagcgctcctggaagccagacgccaagttctgcagctgggactgggatgggggtaccccgacttg

SEQ ID NO: 413337 - DNA, 122 bp, Homo sapiens
tggggttaggaggtgacggagtggctgggagagcctttgtatcagattggttaagaaggccgatctacggttcccaacattctaccaccaagggctaggagagtcatctccctcccggaaac

SEQ ID NO: 413338 - DNA, 122 bp, Homo sapiens
gcccatgactgagccccgccgccgccggccgaggaatgggctccgggctctggtaggaagcgctgggagcggggggcgcttttaaaacaccgatctgggttttttaaaaacctcctttgaaa

SEQ ID NO: 413339 - DNA, 122 bp, Homo sapiens
ggcaggcagatcacttgaggtcatgagttcaagaccagcctggccaacatgtggaagccccgtctctactaaatatacaaaaattaaacaggcatggtggagggtgcctgtaatcccagcta

SEQ ID NO: 413340 - DNA, 122 bp, Homo sapiens
ctcacgaataattctcgctgcagagcttagtaaaccaacaatacaaacgattttctgtaacgacctcccgtaaagcagccactcccctcacagcgctgagcaggcgtaaccgccagggtcct

SEQ ID NO: 413341 - DNA, 122 bp, Homo sapiens
cctcactcgccagccccgcaccccaacagcttgcgctggaaaatgcgctttgccagcgggcgccccgccttcgtccgggtacggaggggacactcccatctagcgcccagtgaggctaaagc

SEQ ID NO: 413342 - DNA, 122 bp, Homo sapiens
ggacattttccggggtgtccatggccagaggacgctggccggcagcggccaaacctgaaccgcaaactagaagccgccgccgattcgaataccccgcgcagccgcagtcggctcgccgaacg

SEQ ID NO: 413343 - DNA, 122 bp, Homo sapiens
atttgtaagccagattctgaactcattcattgttgcagttataaactggttgccttttttcggttcttggaatgatttggatggagctcacctggtccccccagctccctgctttgtgattg

SEQ ID NO: 413344 - DNA, 122 bp, Homo sapiens
aagctctgattaggcgcaccgcgcacgcgcagtggcccacttggctggggagttatttgacgccgccgcccctggcagtcggaagttgcctgagcagatcccagccggctggctcgagtggc

SEQ ID NO: 413345 - DNA, 122 bp, Homo sapiens
ggagccggtgtagacgggtggagggcagaccggtactctggtctatccccgcttccgggacgcgttttctagggagggcggagcgtggatggcgagtatggggaactcagagagggacagtg

SEQ ID NO: 413346 - DNA, 122 bp, Homo sapiens
tagatcatgtctggaggtgagtagggaggtgggacggtgggtagagcagttggaaaacagcggggtaaggcctccaagagtgaggaagtgtcacagttggactcatcttttcacagggaagt

SEQ ID NO: 413347 - DNA, 122 bp, Homo sapiens
tctcaccatttctaggcttccggggggtcctggcgtcttagctgtggatcccccaatacccgcaggtcacagagccacagaggctggacctctagcagcagaggacacagaagaacgaagac

SEQ ID NO: 413348 - DNA, 122 bp, Homo sapiens
acatcatagtccaaggctttatgagcacaaaaggaacacggggtggggcggggaggggatcgtctagatgaacctgatggttaatgacagcaggctaagatgagccaaatgtccctctcatt

SEQ ID NO: 413349 - DNA, 122 bp, Homo sapiens
ggcgcacagcccgagtcactttttctttgcgcgtctgtcccttcctcgcctgcaggatttcgctcctggcccgtcctccccttccctgctgggcaggctcttccggagcccacccccggcgg

SEQ ID NO: 413350 - DNA, 122 bp, Homo sapiens
gttctgaagcaagaacagcctgtcctgtcatagacttagaaataaccactggaactgcagcggccacatgccccacagtccaaccagtactcacaaggcagtaccagtgagaagacagcttt

SEQ ID NO: 413351 - DNA, 122 bp, Homo sapiens
cattctttaacattagcttagggaatattgaggtatccaagaggcatgatttcctttcttcgtttcaaaacataagtgagtaataaactcatactaaagaagacagacagaaaacaccctta

SEQ ID NO: 413352 - DNA, 122 bp, Homo sapiens
gatgtctgccatcggtggccatttgcaaagaccccaaagacccctgttctggtttcctctcgcccccatgaatatcctctcaaacgcgtctacatgcgaacacacacgcacctcgtgagacc

SEQ ID NO: 413353 - DNA, 122 bp, Homo sapiens
ggaggttgccgaagttggttttcttcggcctccttctctctcccaggcccagggctgggacgaggccggttcccgcctgcaacctgcactgaagacgggaaccttgggagccggtaccggaa

SEQ ID NO: 413354 - DNA, 122 bp, Homo sapiens
tcctcctccgggcgatggtgacgggcgctctcagagtggcggccacactaggcgcagggccgtcttccaagtgtgtggtcctctcagacctatggagttggtgctgttctggctccctctta

SEQ ID NO: 413355 - DNA, 122 bp, Homo sapiens
ctggaattagctcatggtgatggttgcaaaactttgtgaatatgctaaacaccactgaatcgtacacttttttttttttgagacagcgtctcactctgttgcccaggctagagtgcagtagc

SEQ ID NO: 413356 - DNA, 122 bp, Homo sapiens
ttaaaacaacttgctgaagtccaaagattttttattgctgcatttcacacaactgtgaaccgaataaatagctcctatttggtctatgacttctgccactttgtttgtgttggcttggtgag

SEQ ID NO: 413357 - DNA, 122 bp, Homo sapiens
tcgggtcctccccagctcccagaggaggcctgcggagtgaagtcttcatacacaagtaatcgcagccgtgtcaacagaccgtccccagccatctgctgccagagcagccgtactttatcaaa

SEQ ID NO: 413358 - DNA, 122 bp, Homo sapiens
gttcagttttgcagatggcgtattctggacatccgggagatacattcgggggaaagaggacgagttcagttttgcagatggcgtattctggacatccgcgagatacattctggggaaagagg

SEQ ID NO: 413359 - DNA, 122 bp, Homo sapiens
gttttccctagtttacatctcagaaatggaacgttaatctccagtttcatgaataagcaccggcagcagcagcagcagcaatgtgtcatcacctgtaaccacaatgtggccagtgatttgtc

SEQ ID NO: 413360 - DNA, 122 bp, Homo sapiens
aggaagcccagcctcggccgtctcctcttacaaccctggagagatgtgaaagcttgacgacggacggtgactttgtttgctccgaaaatccttccaagaggactgtctgctgcacaaacaca

SEQ ID NO: 413361 - DNA, 122 bp, Homo sapiens
ccgggagggtgggaagctttgaccccgccctgcccactcgcgtctccgcagccgtagccgcgcctgtcccaatatgaatagggtcaacgacccacttatttttataagagatattaagcccg

SEQ ID NO: 413362 - DNA, 122 bp, Homo sapiens
gaggcgacagcactaaccctcaccctcccgggtacccggtctacgaggcccggaggctgccggagacccgctctcctgaccagagcacgagtgacccagccactgccaccagcaccccacga

SEQ ID NO: 413363 - DNA, 122 bp, Homo sapiens
ctggcacggggcacataaggcagcacattagagaaagccggcccctggatccgtctttcgcgtttattttaagcccagtcttccctgggccacctttagcagatcctcgtgcgcccccgccc

SEQ ID NO: 413364 - DNA, 122 bp, Homo sapiens
cctccatcactctctctcctcttcccctccagcttcacctggctctgcggacacgtgcaccggaacatcctctccaagttcacaggccaggcggtggagctgtttgacgaggagttccgcca

SEQ ID NO: 413365 - DNA, 122 bp, Homo sapiens
caaaccctcagatcttgccactgggaacctttcagcgccagcgacatcaaagaggggcggcggcggcgggggcggccggcggatgcttctcttaaagggccacgccacttttaattcaaagc

SEQ ID NO: 413366 - DNA, 122 bp, Homo sapiens
ttctcaggttcgtggtgcacggcttaaccacgggagagcagtacatcttccgagtcaaggcggtcaatgctgtggggatgagtgaaaattcccaggaatcagacgtcataaaagtgcaggcc

SEQ ID NO: 413367 - DNA, 122 bp, Homo sapiens
gattggtcagtgtcttaccagacccgccctccacgccccagcctagcaggttcggtgggtcgcccaggtcgttaactcccagacccgttagaaccggtcaggagaggaatgtactgctcgat

SEQ ID NO: 413368 - DNA, 122 bp, Homo sapiens
ctatgtggttagtgacctctgtgcggttccaaaatgctggctggctcaccttggagcactcgttgtgggtttatttaaggtataactgatcctctgtcttcttcctgtcctcctgtcattga

SEQ ID NO: 413369 - DNA, 122 bp, Homo sapiens
gtgtccaccccagcggactgcgcctcccaaccaggctaggtgcctgcagaggcgcccggacgcttggaggcggtgggcagcacagggaccactcctccaggctccgctgttcgccacctgca

SEQ ID NO: 413370 - DNA, 122 bp, Homo sapiens
taaaggtgtgtcagcaccacatcaaatgaggaactgggccccctcctttctgctgacggccggccgcgccaataattcattttttagctcattagctaacggaggctgtgaacggtgatcct

SEQ ID NO: 413371 - DNA, 122 bp, Homo sapiens
cgcctctgccccctcttccagatgccccggaaccttccacggttcagatcctccactcaccggctgtggagggaagtcaagtcgagtttctttgcatgtcactggccaatcctcttccaaca

SEQ ID NO: 413372 - DNA, 122 bp, Homo sapiens
tcccgagggcagggagcagaggagaggaaaggggaagactatgaaacgtcctaactaatgcgcgtactgaatgcgcattcacgtggtcagttaccgatgtgcttctctctctcctggcccgc

SEQ ID NO: 413373 - DNA, 122 bp, Homo sapiens
gccgtgtaggaatgtgcctggatagaaagggcccgacctaacgccgatgggctgagggggcggcaggggcggcaggggcggcagggcctaacgtggacgggccgagggggcggcagggcgta

SEQ ID NO: 413374 - DNA, 122 bp, Homo sapiens
catgatgaacatgtctctaaattgccggaactgttcctgtaatcacttgttccaccaaagcgtctttcctgggatctgaatgggaatgtgggtgggcatcagctctcctagtgaatagctcc

SEQ ID NO: 413375 - DNA, 122 bp, Homo sapiens
agggggaaccacctctcgaaaaccccggccgtcgccctcccaggccgggagagtcggccccgcgcgcccccaaaagctccccagcggccggccctctctacgtcatccgcaccctcccgccc

SEQ ID NO: 413376 - DNA, 122 bp, Homo sapiens
agtgttttcgtttttccttgtccaccctaaaggttttcgtcaggatattcccaaagcctccgtcggtctgggggcaggagtagggagaagggatgaggtgactttttgggcggggtgggggg

SEQ ID NO: 413377 - DNA, 122 bp, Homo sapiens
gagccccactcagggcgtaaatacatttggttcactgtgagattctgggggtactgacagcggcaaacactgtcctagggaagtcacgtgacatgagggcaaagatggtgacggcagcactg

SEQ ID NO: 413378 - DNA, 122 bp, Homo sapiens
agctatgccctggggtgggcagggtgatgcgtaggtcatctgcccctgtggtgggcccagcgccctcctgtcttctcagaccctccagaggaggcaaaggaggtctctcaggcagagcgaga

SEQ ID NO: 413379 - DNA, 122 bp, Homo sapiens
ctcatgagcgtgctctggtacgtcatcttcgcgcgacgttcggttcgctgtgtgtgtcgccggctccttgagggtccatgtgatttttacgccagtgctgctgaactgtgcagggtagggag

SEQ ID NO: 413380 - DNA, 122 bp, Homo sapiens
agtgtaactctactgtcccagctctctgtttccagagaacaaatctgatctaagtggttacgtccttttaaaggtcaggcatttcacattcaatcatttaagggaatctttgatttaaaata

SEQ ID NO: 413381 - DNA, 122 bp, Homo sapiens
tcttctgcgagaggcacagcagtggcccgtgaagagtgagaagagaatcaggactcagcacgctgctgtgggagtattgtggggactgatagataatgcccataagcatctggtgtggggcc

SEQ ID NO: 413382 - DNA, 122 bp, Homo sapiens
gggcctgggctgtgcgctgctagccgcccacgccgtggtgctctgcgcgctgccggtccacgtggccgtggagcatcagctcccgccggcctcccgttgtgtcctggtcttcgagcaggtga

SEQ ID NO: 413383 - DNA, 122 bp, Homo sapiens
tttgactttccatgtgacccttcctctttgtagtcttcaaaagcaagcccgtacaaagcccggctccttccttccttctaactccctatcaggaagctccttcgcccctcaaatcccttcag

SEQ ID NO: 413384 - DNA, 122 bp, Homo sapiens
accgggaggaaggagcaactccagacgtgccgcctaaagagctgtaacaccgcgaaggtccgcagcttcactcctgagccagcgagaccacgaacccaccaaaaagaacaaactccgaacac

SEQ ID NO: 413385 - DNA, 122 bp, Homo sapiens
ggtgtgttgccaccttcctgactctcagtatcccgtccgtcctcaggcctgctgctgggacgcgctggaagcgagcacccaagtcaggtactcgaatggaggttgtccatggtgtgttcatt

SEQ ID NO: 413386 - DNA, 122 bp, Homo sapiens
gtgtgtgtgtgttttcggggaggggggtgcggtggtgccggaagtctgattagataaaagcgagaaatacagaggctgccggttacactgagaaattacatttttttgtaaagagagcatag

SEQ ID NO: 413387 - DNA, 122 bp, Homo sapiens
caggacacgcccctgagtgaggcacggagcctggagggaggagagaagaggagggagccgcggacgccagaccagccaaagtccacggcccaggctgccaggcggttcctggaagagtctct

SEQ ID NO: 413388 - DNA, 122 bp, Homo sapiens
gcccctaggtgggaggagcccggggccatggcgggccggctgtcagacaacacgttgcgccggctgatcttcaggtcccgctgcttgctgggcacgtaggcctcccgcagtgagatgaggat

SEQ ID NO: 413389 - DNA, 122 bp, Homo sapiens
aagaaaactacaggccaagccacctgagccacccagacagggcagatgaaaaattggctacgtgggaggcagtttggggtcttgggcagaccctgagggctggggatagggagtgtgaaaga

SEQ ID NO: 413390 - DNA, 122 bp, Homo sapiens
atctacgtcgaaacttcaaaataacattagggggaaaaatgtagcgtcatgtttatcagacgaggacctgagcttaacaagcgattgagagaaaatccttgggaagctgttaaaatttgtgt

SEQ ID NO: 413391 - DNA, 122 bp, Homo sapiens
tgtttggatttgctcattccatctccatggcagcacgcagaacgctggaaaaacgcaaagcgctgattggttaagagtctcagttcctattggccagagtccgaagtgggagcccgtgaggg

SEQ ID NO: 413392 - DNA, 122 bp, Homo sapiens
ctgacctagtgggtagccagagctgagaggacagagcagagcttgagaggaacaatatttcgtgaggcatgtgaggattgaaagcctcatagagtccttcagccatgctcttggcataagga

SEQ ID NO: 413393 - DNA, 122 bp, Homo sapiens
gaaagaaaggacgacccggagcgccggacaagggtccagaacgatcaaccagcctcctatcgtcccgcccctgtcccctcgcggctacttaccgggatgcaggccgcagtcactagggctgc

SEQ ID NO: 413394 - DNA, 122 bp, Homo sapiens
cgcgtcttccaccacaatgcctggtaatcaccctgccccctcgcccggcctgtcgctggccgtctgtcccgccgcctcggagcattccgaaaagcccctgaccgccggccacgagtcaagct

SEQ ID NO: 413395 - DNA, 122 bp, Homo sapiens
aagaaaagaacaagttttcctctgcccagcaagctcacttcaaggacagttataagataacgctgtttaagaggccaaggccaaaagaataagctccagacacccctcgcctccagagcaaa

SEQ ID NO: 413396 - DNA, 122 bp, Homo sapiens
ggtgtcaggaaaacatatctttacagctgcatccaagtgagttccacaatacaggagctacgatcatttaaatggatgaatactttctgcacagtaaaattgttgctttcccttcattacaa

SEQ ID NO: 413397 - DNA, 122 bp, Homo sapiens
tttccccgtaagacggcgggtcccacagggagaaggggtgaagaggaatattttatcagccgtgtacatatgtaaccagaaacggggctgaaaagcaaaacctcgtttccctgaataggggg

SEQ ID NO: 413398 - DNA, 122 bp, Homo sapiens
tgagtgagcctgtgctgagtcgccgagcagcccgctctccatgtgacttcagtttccgtccgttccttccgctggtgctaaaataatctgatgccccacagcaaggaggtagcccagccccg

SEQ ID NO: 413399 - DNA, 122 bp, Homo sapiens
gactcaggggaaggatggggcggggtgggggtttgcctgcgactcgggggaaggggccggcgctccctaagtggtcagtccccagagtgagcaaaacccagcaaaggtgcaatggtgtttgc

SEQ ID NO: 413400 - DNA, 122 bp, Homo sapiens
tcatttgcataattggtataattatgattaccctaaaccattgttgtacatattacatcacgtgaaaaggttagcgcacaatttcagctctaggaacatatcctgtggacatatttcttttc

SEQ ID NO: 413401 - DNA, 122 bp, Homo sapiens
ctgttgggcctagcagtggatacagtcacctgagagcacgtgttatgaaaacagaatccccgggcccctctgccgacctctggagtcaggattttctggtgccctgggggttttcaaagacc

SEQ ID NO: 413402 - DNA, 122 bp, Homo sapiens
aggggagtcgggggtggggctgggaggccgctcccggcctcagaggagaacccgggaatgcgcctgtgtaagaggaggctgggaaatgggggttaataggtatttctggcagcccctggctt

SEQ ID NO: 413403 - DNA, 122 bp, Homo sapiens
gcctccagcactccgtgcgcccgctgatgtgagaaccccacctcccatgtcgtcccctcgcgctactccttgagaacatcgcggagggcccctccgcctgggagccgttttcaaccagcccc

SEQ ID NO: 413404 - DNA, 122 bp, Homo sapiens
gtcacctgcgtgctcatctgggttgtggggggcctcttgagcatccccacattcctgctgcgatccatccaagccgtcccagatctgaacatcaccgcctgcatcctgctcctcccccatga

SEQ ID NO: 413405 - DNA, 122 bp, Homo sapiens
gacggtgctgctcagttatcttccgcctttccgcactatggtgggcaggcgacactgctgcggggcaggcttaaggtccttctgcggatctgtctgtcaaagaaaaattacagacacaaaat

SEQ ID NO: 413406 - DNA, 122 bp, Homo sapiens
taaagttcactggtctcttgattagaccgagagatgggccgtggctgtcccactggctcccgtctccagggaagctgttctccgaccctggcatcacctctctggggcccctgcctgagctt

SEQ ID NO: 413407 - DNA, 122 bp, Homo sapiens
gccacaggaggctccctcagctgtgtcacctcagggcctgggtgcattctcaccctcccacgccagaagcggacagctgaaccccactgaacagatttactcaactgccgacagaagataaa

SEQ ID NO: 413408 - DNA, 122 bp, Homo sapiens
tgggcgcctcgtgccctgattggccgacggggcgcgcgcggcctggaggggcggggcggacgcagagccgcgtttagtctatcgctgcggttgcgagcgctgtagggagcctgtgctgtgcc

SEQ ID NO: 413409 - DNA, 122 bp, Homo sapiens
ggcgggctgcaggtcccgagccctgccgcgtgggaaggcagctaaggcccggcgagaaatcgagctcagcgctggtgggatggcactgctgggggacccagtacaccctccacagccgctgg

SEQ ID NO: 413410 - DNA, 122 bp, Homo sapiens
gccaaagcctgggtgtcgccggatcgttgcattcccatttcgcggatcagtagaatgaggcgcaactgttgaggaccaaagctgcaacttcggatccctgcgctgggttgtctcagtgcctc

SEQ ID NO: 413411 - DNA, 122 bp, Homo sapiens
catcctaccttccaattcctggacgtaaactccccccactgcagacttccccaaggctcacgtaggcccacgtccactttatttcaggcataggtgagttcaggaacccaccctctgctctt

SEQ ID NO: 413412 - DNA, 122 bp, Homo sapiens
agagtgtcctgaggttttgttacaaggctagactttaaaatacctttcaaagtttcatcccgcctcatgtcgcaggactgctgtgtttgtgaaagcgcgtttgtttccacaagacaagctcc

SEQ ID NO: 413413 - DNA, 122 bp, Homo sapiens
tatggtaacccaaatggactaaaacagaagttggtactgagaaatggggtgctgctgtaacgattacctaaaaatgtggaaacagctttggaactggataatggagaaaggctggactataa

SEQ ID NO: 413414 - DNA, 122 bp, Homo sapiens
gattttcccccagcccaactatgcggacacgctcatcagccaggagagctgtgagaaaagcgagcctcttctgataactcaggatttacttgaaatgaaaggagattccaacctacttcagg

SEQ ID NO: 413415 - DNA, 122 bp, Homo sapiens
tccccctcatcccctctacacagaactaactggtagggagagaggaagaaaggctggcatcggttcctcattggatgttttaaatctgtctcaggcccaggccagtgcctggggggaggggc

SEQ ID NO: 413416 - DNA, 122 bp, Homo sapiens
tcctaaggccgggttctcgcccacagcagagaccctggccacgcatggccacctggcctccgggatgcgtcttcgagtgctggggcctcaataaacaaatactgtagcctgggtgctataaa

SEQ ID NO: 413417 - DNA, 122 bp, Homo sapiens
taagtcgctgacctggggcggactggagggtggggtggggtgggtgttgaggggcacgcccgggctggcatcagccctccaggccaccctgccactcacccagcacacggcaaaatgcagag

SEQ ID NO: 413418 - DNA, 122 bp, Homo sapiens
cagaggtgagcgctgcctgagccaccgctccgtcccggatttgcaggcagctggagcccgcgggaccggccaaccccgcccacgccgagcccacagtggccccgtcctgccgcgcggacact

SEQ ID NO: 413419 - DNA, 122 bp, Homo sapiens
gcccgcgtgggctcctccccgcggcgctggctcagtgcgaacccggcgagggcggctgggcgctttagaactgccctgcaggccaggaacctctgtaggtttccctggggaggtctggggtg

SEQ ID NO: 413420 - DNA, 122 bp, Homo sapiens
ccaggtaaaggattttcaggtgtccaagcacacgaatgaggttgtgggcaccttgcggtgcgtctgaggttttggctctccgtgcccacattcctgcagtgcgtctgaggttttggatcccc

SEQ ID NO: 413421 - DNA, 122 bp, Homo sapiens
agactccagcatcctgggctgggggcggccagggccctgactgtcgtcctggccctctgacgtgagccatgtgctgtctgcttgcagcaggcaggatgtcggccgccactgtgctgtcccgg

SEQ ID NO: 413422 - DNA, 122 bp, Homo sapiens
actctgacagacggtccttgtgtccttggctctgctggtcctgaaataaactgcttgggacgggggctgggagtggcaggattaggggagaggaaattaaagagagaaggaagaggatggtg

SEQ ID NO: 413423 - DNA, 122 bp, Homo sapiens
acgctggatgaagctgccaccaacagtgtgacgagaaggaacgccctttccaggagtgaccgggcctcaggctagagacgcggtgggggcaagaccacccggtgagcctgtttggcgacccc

SEQ ID NO: 413424 - DNA, 122 bp, Homo sapiens
gggtagatgctttccataaaccgttgagaaatccacgacctggcccaaatgtggacttcacgagaagccccagatgggtcaatgggtccataggcctctcccattgaagagagaccagtaat

SEQ ID NO: 413425 - DNA, 122 bp, Homo sapiens
gggggcaggggcatcaagggcggggcaggggctcacagcacgcagtcatggtagctctcccgagctgcgatgtgcaggggggtgtccccatggtagttgacagcatggaggtcacagcgcgc

SEQ ID NO: 413426 - DNA, 122 bp, Homo sapiens
cctaagcagcggctccaagagaccggactttcgtacttcccgggggcaggcggaaggttacggagcgctggaaggatcttactgctccttgaagggctgtctgagaaaatacacagcctaac

SEQ ID NO: 413427 - DNA, 122 bp, Homo sapiens
ctgagaaagaggtagaattctgttaggcgattgcgtcgccctgaggaatccagctggatccggtctgaggcggcgcggggccagcgggtggggttttgagcggctggcgggaaggcaggttc

SEQ ID NO: 413428 - DNA, 122 bp, Homo sapiens
agggagactgcttaggcagtggcatcctggtgggatagggtgaggagatcccagagcccacgtttactgcaaccctggggaaatgtcaccagagaaatgggggtggtgccagacaatagatt

SEQ ID NO: 413429 - DNA, 122 bp, Homo sapiens
gctgctggtggccgcagggcagccagggtaagaccctgcggggcagcttcagcagcaccgcggcccaggacgcccagggccagcgcatcggccacttcgagttccatggtaggtctgggggc

SEQ ID NO: 413430 - DNA, 122 bp, Homo sapiens
caaacaagtatgcaattgtgaacctgtgttcacaagttgaacccaggtggttttgtctggcgataatctaaaagcatgatcattttaaccctgcaagccctgacattctcagtgcttggtga

SEQ ID NO: 413431 - DNA, 122 bp, Homo sapiens
tctagaattgttacaggaaagtagtcccaattcagacccccagagaggcttctttgatctcgcacaagaaagaattcagggcaagtccataaagtgagagcaagtttattagggaagtaaag

SEQ ID NO: 413432 - DNA, 122 bp, Homo sapiens
cctccggcctcatccgggatccgccccctgcctcatccaggcttcgccccagtcagtctccggcagcttctcgcggcttcgcaagccccttcccgtgatgccccgcgcctggctgtcgcggt

SEQ ID NO: 413433 - DNA, 122 bp, Homo sapiens
ccctgccctcagcacagcggttagtgccctgggaaccctggagctgcagggtgcaggccccgttttctgtgctgaccagtaaggtgcttgctgtcccacctgcagcttccagggcaccaagt

SEQ ID NO: 413434 - DNA, 122 bp, Homo sapiens
cctcatgccctaggaccctgcctttggtttttcttctgtttcctctgaggaatggttacacgctcagttcagaattcacggcaggcggacagctgaggcagccaactgaccgcctgatgtaa

SEQ ID NO: 413435 - DNA, 122 bp, Homo sapiens
aggagaagacagcagtggagccgccaaaggcgggctgtgagctggcgggagcgccgaaggcggaagccgtggctttcaatccaaacgccgagtgcgtggcaccgccaaaggtaggctggatg

SEQ ID NO: 413436 - DNA, 122 bp, Homo sapiens
aggctcccgcgtagagctgctcctgctggagatcgcggacccagagacccgccctctccgcgtcagtctctttgaccgagcggctctaccgttgagacggcactcaccccacgaatatccca

SEQ ID NO: 413437 - DNA, 122 bp, Homo sapiens
cttcactgcttcactgcccctctgaaatttctagagcatccaggtccatcgggggtggggcggtgtggtgaggattcaattcatgtgtctgtaggatgcagcagcttcttaaccagctgcct

SEQ ID NO: 413438 - DNA, 122 bp, Homo sapiens
tttccccatctcccccaacatgccgactctggaccctttatttatcaagattaatcactacgggcatcactttttgtgcgtgccatacgttcccaggaacagcacttaatccagaaagttcc

SEQ ID NO: 413439 - DNA, 122 bp, Homo sapiens
gcttagcgagcatgcatgtgtgtacgtgcacgtgtgtacatgtctgcatgtgtgggaatccgggggctggcaggtggagcatcacggagcaggctgaggggagccggagttgggctgggagc

SEQ ID NO: 413440 - DNA, 122 bp, Homo sapiens
cagtgcaggattgcttcctgcgtagccgtcccggttattgtaacacgctttgcaagctaacgactggggtttgtgagggggtttgtttatttttctaagtgtttgcaaagatgccgaggtcg

SEQ ID NO: 413441 - DNA, 122 bp, Homo sapiens
gcgcatggccattttaataattcgctgcccgtctcatgcctgggggtccgggcgagtcctcgcaggccccgggcagagccgaggcggcttcgcagctcttcccccgctcgctgggagccaag

SEQ ID NO: 413442 - DNA, 122 bp, Homo sapiens
tggagagtggtttggggtttggggtcggggtctaacgtgatcagttgcagaagcattacacggtggcctggtttctttactcagcccctggggtagatcccagccccccgcgtaggtccctt

SEQ ID NO: 413443 - DNA, 122 bp, Homo sapiens
catggccgcaaggcctcacgggaaatgtagtccaaagccaggaagtggccctggaagcagcgcgcggcccgcctcctccgcaaggggcgctgggaagtgtagtcccaaaagcgtgggagtga

SEQ ID NO: 413444 - DNA, 122 bp, Homo sapiens
aaacgcgacggcggagcggcggaagaacagagtgcgagagctggcagcggcgactgagaccgaccgcggcctcccccgccgttatttaagcggaagcggcgcgcccgcgcggcccggcggcg

SEQ ID NO: 413445 - DNA, 122 bp, Homo sapiens
ggttctttgaattgatggctcactcccagccactcttgactgactgccagcttagcagggcgtagcttaccaacaaatcttttttttttttttaaagccagactgattcatagaaactcctt

SEQ ID NO: 413446 - DNA, 122 bp, Homo sapiens
ggaatatgagcatagtcagaaatctcgagagggggctccctactcctccaagagaacatacgtgacatatagggagcccttccacagccaggctcatccccacagcttaaacacttcatccc

SEQ ID NO: 413447 - DNA, 122 bp, Homo sapiens
gaagccttccaggagaagggggcaacgtggccgcgctgagccgatgctgaggcctcacagcgggcgtctttcttgcaggcgtgtctgtgttagcacagaagcctacgccccaccctcctccc

SEQ ID NO: 413448 - DNA, 122 bp, Homo sapiens
tgttatttgaaaatagacttgggttgagcacctcttggagaatcgctcgggttcgctccacgctgtcgcagccaccgctgtggtcgccagtcagccgaggggctgcgatactggttgcccgc

SEQ ID NO: 413449 - DNA, 122 bp, Homo sapiens
gtgagggggaagcaggggcgcagctgctgggcgtgcatccgaaaggtgagagccagagagcgagcagagggggcgggcaggccacgaaaatgtcctcggccgtggggccccgcggtcctcgc

SEQ ID NO: 413450 - DNA, 122 bp, Homo sapiens
acttgccaatagaatgcaaaaacagagacagagtaagaaaggacaccgagcaggagcccacgaggttcacagtaagaaaacagcccagagagaaagcagcccgagggattcggccacgtgac

SEQ ID NO: 413451 - DNA, 122 bp, Homo sapiens
tcacctagttcttcagaaagtttcttattaactgagggattaattatgaagatttttctgcgactttgcatatgcagctgtatatacaattgtttttttgtcagcttcatttttaaaacagg

SEQ ID NO: 413452 - DNA, 122 bp, Homo sapiens
ggagctccgggcgccctgctggggccgcgctacttgggggcgttgcggcggcggccccgacgccccttgtcaaatcgcctccagggtctcggggacccggtgaacaaagccaagacccgacc

SEQ ID NO: 413453 - DNA, 122 bp, Homo sapiens
cgtccgggcccgcaccacgtgcttcgccgcggacctttgtgaggtcgcccgggcctcccgcgcgccccgccccgcctcccgcggtcccctcagccccgtttacctgcggctccggcgtccgt

SEQ ID NO: 413454 - DNA, 122 bp, Homo sapiens
ccctggtgaaggtggcctttgacttccgtgcatttggaagtcctttgacttccgtgcattcgtctaaaataacgacaatcataataacgataaaataatgaaatgttaaataaatcactatc

SEQ ID NO: 413455 - DNA, 122 bp, Homo sapiens
gggtacagaaaagctggttctgtgagtattaaaaagaaaaacaagcaaccccccactccccggcgctgccaaatggaatgaattgctgcttctagggagaagtgctgctggagtgacacagg

SEQ ID NO: 413456 - DNA, 122 bp, Homo sapiens
ggttgctccagctccatggcctgggcaggtgggagcacaatctgcctccctgtcacaccccgtcctggcgctgggaatattcagaacatgagaatatcgctgtctgtctcaggctgcagtgt

SEQ ID NO: 413457 - DNA, 122 bp, Homo sapiens
tttccagggggttcctggtgctcgaggctggcggcgaggaaggtactggctgagggcccgcgtcgggcccgccctgcgcacgcgtcgtgatcaagggcgccggccgccggccgcgcccccaa

SEQ ID NO: 413458 - DNA, 122 bp, Homo sapiens
tgaaatgtgtgtccctctcggcgtctgggctctcgagaaaggcctttgcttgtctgacttcgcgagggtcccggctctggcccaggagctggggaggggcgggacttggtgacagccgggtc

SEQ ID NO: 413459 - DNA, 122 bp, Homo sapiens
cacccccgagtctgccctcaggggtgtcccctttggtctggcagctcactttaaacggcgcggggactacatctcccagcggccccgggccttcctgacgcagccccccctttcagcccgcg

SEQ ID NO: 413460 - DNA, 122 bp, Homo sapiens
acctaccatttctaatactagcaatacatatatgatcctcccacgatatattttcttcttcgtgaaaaaaaagcaaggtgctgaactgtaaaaatattaatatattggcatttgtcttattt

SEQ ID NO: 413461 - DNA, 122 bp, Homo sapiens
cagggcagctgctaccaaggggcgagtcccagggcccccgtcggccctgcgtgcggggcgcggtccccaacacccagggccccggaggcggacacagccccagccaggtcgtccgggaaatg

SEQ ID NO: 413462 - DNA, 122 bp, Homo sapiens
tccagtatccacccccctacccttttctcctcccagctcaaccagccttcaggttctctccgttcacttggtttgcctacaacccagtcatagcctctctgatgaagctctgggagcccagg

SEQ ID NO: 413463 - DNA, 122 bp, Homo sapiens
gacgggtccccgaaaggctgcagccgggggctgaccagtgggcaaccgtggtggccgcggcgatggaagatgaccgggtagtagccgcgctccagggcgagcaagcaaaggccgagcacgtt

SEQ ID NO: 413464 - DNA, 122 bp, Homo sapiens
actgctatgaagaaaaataccccaggctggataatttataaagaaaagaggtctaatgaacgcatggttctgcattgctggagaggcctcaggaaacttacaatcgtggcagaaggtgaggg

SEQ ID NO: 413465 - DNA, 122 bp, Homo sapiens
cccccaccccaccccctagtcaatatcaggatctccctcttgtgtcttggagtctgagttcgagctctaatatatccattccacggttcccaaaagaggaactcttctgttcctggataggg

SEQ ID NO: 413466 - DNA, 122 bp, Homo sapiens
gtgtaggtgagcttgcctcgggtcagctgggagatcagtgcctccttctcatccagctgccgggacagctcacctggggaagcaccattctagatcagcactcctctctatccccacctcct

SEQ ID NO: 413467 - DNA, 122 bp, Homo sapiens
ctgccaccaccgagtgcctccagttaggaactggtttgtgaaattcattaccctatgagacgagttttatctctgtttcactcaagaggattctgaggctcaggaggttgtgaatgactcgg

SEQ ID NO: 413468 - DNA, 122 bp, Homo sapiens
tcgccccacagcacacctgagcctcctgggcagccccgagcccacagctcccagcagaggcgctaactgccctcctcaagcacaggtcgccgcgtccccaactccctgtcctcaccccggcc

SEQ ID NO: 413469 - DNA, 122 bp, Homo sapiens
aatagccccacctctgccaatcagcgattggctttaggggctgcccatctgcttcatactcgccaatcactgtcgcttccagcgctgactggccagggagcagccaatcggggcgtggcgtg

SEQ ID NO: 413470 - DNA, 122 bp, Homo sapiens
cagggaaccctcttccccaccgcggctctctcctctgacctcccgtccactcctcccgctcggtgcacctcctcagggaagctcgcccttcgtctgagtcaggctgctttgctggagaactt

SEQ ID NO: 413471 - DNA, 122 bp, Homo sapiens
gtctgtccttggagggaaatgagcactgtgatgtcagaggtatagctgggaaccaaattacgtaggccctttcaagtcatgatctgaactttgaatttggttctaagtgaaggagagccatt

SEQ ID NO: 413472 - DNA, 122 bp, Homo sapiens
aaataccactgcatgaacgactgtggaaacctggcccgtctacacctctgtctggtgagacgcctcccctggcccatctacacctctgtctggtgagacgcctcccctggcccgtctacacc

SEQ ID NO: 413473 - DNA, 122 bp, Homo sapiens
agggagcgacaggggccgcggctgctccctggcggggtcggggctgcgagctgccctccgcggggaccctccgcccgccccgctgaccgccgctgtcttcacagatgggagcagctcccgga

SEQ ID NO: 413474 - DNA, 122 bp, Homo sapiens
aaaaaaaagcaaaccctgagaaagcgagaaagcactttgagcatttagaatgggaacaaacggcgctattagtgcttcaaaaacgtaactgcccaaggcccctggtaagcagaggatactaa

SEQ ID NO: 413475 - DNA, 122 bp, Homo sapiens
acagaaatatcccaggttgggaccctaaggcagggatcgggcagagagacagaggctctccgccaccctctccctgacctaatctaaggccagaactgcgtgcctaccgagagagctcaggg

SEQ ID NO: 413476 - DNA, 122 bp, Homo sapiens
aagtgacaactgctcggaaacagacaggacagagaatcttaaaatagagcagcaaatatccgcggctcgccgccccgggctctgtggcaccatcagcagcttgcgcaggacacagacgtcgg

SEQ ID NO: 413477 - DNA, 122 bp, Homo sapiens
tcaagaatgaagctgtggatcctcgcggtgagtgttaacagtttttaaaggcggcgtgtccggagtttgctccttctgatgttcggatgtgttcggagtttcttctttctggtgggttcgtg

SEQ ID NO: 413478 - DNA, 122 bp, Homo sapiens
aggggtgtgggggaaggggaggcgtgggggaaggggaggccgggggaaagagctggccgccgtctctaggctgccctcggtcagtcagtgactgggaaggaacaggagtctagcagggacac

SEQ ID NO: 413479 - DNA, 122 bp, Homo sapiens
gctaggaatggccactggtataataagaaaagccgggccgtagcgtcctctgatggaacacgtgggacccgagcgggcagggtttttgggggtgaggtgtctgtggtttcggctggctgggt

SEQ ID NO: 413480 - DNA, 122 bp, Homo sapiens
ttagaaaccccaaaagtcagagtgaagcgtcgccccttttcctttcgcagacaatgcagccgagcagcaggcaacaggtgcgccttctgcagaaaggtactctgattcccaccttctgcaaa

SEQ ID NO: 413481 - DNA, 122 bp, Homo sapiens
gtgaagtaacttgctcctggtcacacagttggtgaggagctgcagagcccatgccctaaacgaggctatgctgccttggagaatggagcagagacacagaggtgcacaaatggaagctctga

SEQ ID NO: 413482 - DNA, 122 bp, Homo sapiens
ggttcagaaccgagcaatgtcatgtgaatggcagtgcagcagagggaaacagaagcccctcggttcaggccttgagtaccactcaaaggcatcctccgctgcccccctattaccagcagcct

SEQ ID NO: 413483 - DNA, 122 bp, Homo sapiens
aggctgattgggtctccggagatctcatcctctgacagctcgctgcaccccgcggaatctcgctttaggtgtgtaactgcctgcctgacacctgacccttgctctccgcagcctgactccag

SEQ ID NO: 413484 - DNA, 122 bp, Homo sapiens
gtcttaagaacaaggtgatgtaaaggaaatgtgaagccacttcagccttcccttattattcgacgggttctaatggatgctttcttctgaagagctggctttacaatagactcagaaccccc

SEQ ID NO: 413485 - DNA, 122 bp, Homo sapiens
caggccgctgtgggctctgggaattgtagtccagagctagatcggccacggacagaatggcgttctcttatctctgagtcggggcctggctcgttttgacatttttgcgcccacgagtcttc

SEQ ID NO: 413486 - DNA, 122 bp, Homo sapiens
agacggcaaggggacactgccggtcagccccgctgggccagcagggctcccagggcccaccgctgtgagactcggtaccttgcagacacgggccacacgagccaccacctgctcggcatagc

SEQ ID NO: 413487 - DNA, 122 bp, Homo sapiens
aaacatgtccaagtgcacatcgctagcttttgctcagcggccgaaccctgggattctaggcgacttctggagcctggtgggttagcggtgagaagatgggcgaggagggcggacttcatctc

SEQ ID NO: 413488 - DNA, 122 bp, Homo sapiens
gcctgcgcaaggagcgcatcatcatgctcttcctcagccactggaggagatcggcctacacgccggccctcaagacagtggcctgcaggaccctaggagcccgccacgcggggttgcggggc

SEQ ID NO: 413489 - DNA, 122 bp, Homo sapiens
tgagccaccgtgcctagcctccctggcctctttcaatgaggagtttctaatactttcatccgtttttcccacggctgacacatctagagtgccgttctttttttatttcaaaatatgccctg

SEQ ID NO: 413490 - DNA, 122 bp, Homo sapiens
ggtatctcgccccgcaccgggcgcccgggaaaactccttcctgcaaagacggccgagctgcgagcaggaaaccaagaccctcctggggcagcttctaggctggggccaccacggatccgggc

SEQ ID NO: 413491 - DNA, 122 bp, Homo sapiens
gcttgccagggcattgctcccggcacgaggccgcccgcctgcagcaggcccgcaggggcacggtgggtccccgcccgctcctcatgccttgagcgcgtcatccttcccggggttcacggcct

SEQ ID NO: 413492 - DNA, 122 bp, Homo sapiens
ggagctcccagaggcttcaagggcccgccttccacccaatcggcgctctcactcagtattcgcccgcccccttcatgctcgcctaaggataggccgcgcctcctggcctctgagccattggc

SEQ ID NO: 413493 - DNA, 122 bp, Homo sapiens
aggtgtcacgtgtcaggcgtcacgtggctggaggccgttggagcgcctgcgcagcttttccgcacgcgcctcgccggcgcgcggctctctcagcgtcccaagagccactttctcgccagtac

SEQ ID NO: 413494 - DNA, 122 bp, Homo sapiens
agagcccgggctgggcgaggagtgtgccgtgctccatcttcctagcttcttaattcatgccgagatacagccgctgccggacgcccgagagatgcacccaacttgggccgggtccccgcctc

SEQ ID NO: 413495 - DNA, 122 bp, Homo sapiens
tcggccccttgcctttcctcattggtccagctcagccctgccgggagacccctcacattacgtcacagcgcgctggcgctacacgcccgctaaaagaaggttgatttctaattggccccggt

SEQ ID NO: 413496 - DNA, 122 bp, Homo sapiens
tccactgcaacatgcttcatgtggcaaactttgctttcttctgacatctggcaccaacagcgtctggcgcgtctgaagggactgtttgctttttgaacccctgccatgttgagattactcaa

SEQ ID NO: 413497 - DNA, 122 bp, Homo sapiens
ttttaaaaataaggtgtgtttcttggtctaaagaaatttcacaacttggtctatgaagtgcgcttggttgaagggatggagagggaagtgaagagctgaagttggttccctatgccatacag

SEQ ID NO: 413498 - DNA, 122 bp, Homo sapiens
tgtggttttgtgttcctttttcccagtttaaaaggaaaacttcagacaatttaaatttaacggagtttaattacacaaggaaaaaaaaattcatgaattgggcagcacccaggatcacatca

SEQ ID NO: 413499 - DNA, 122 bp, Homo sapiens
tgtgaggcgctccaggtgaggtgtgactgccctgttcaattaaatcctccgtctgcacctcggcctgggtggcggcggcgggcaggagaccccgcagcagcttccgcgcggcatgtcccctg

SEQ ID NO: 413500 - DNA, 122 bp, Homo sapiens
gcagcgtttgttcgctggggttctgctagaagtcattctgtctcccgctggtttaatatccgccctctgcggtctccgctcgcctcggcggctcccgaagcgcccccgggagggtcccggct

SEQ ID NO: 413501 - DNA, 122 bp, Homo sapiens
gctcccgcattcccctgattattatttatttgcagagtgcccacggggcaccgggtgccacgcagtgctccttagacaggcaggccccagctttgccaggaggaccttcccccgctcccccc

SEQ ID NO: 413502 - DNA, 122 bp, Homo sapiens
tctgggctggagctcatcatccgaccctgagagctgcagagctgggggactccggctcagcgcattcccatcccttctagaatagaggaaggtccatccctgggcacatctgggaagtcacc

SEQ ID NO: 413503 - DNA, 122 bp, Homo sapiens
cgtaacgtcctgaggcggtgggtggtatattaggcgaagaggcggggtcgcccaagctgccgcgctggcattttctcctggacaaggagagagtgcggctgctgagagccgagcccagcaat

SEQ ID NO: 413504 - DNA, 122 bp, Homo sapiens
ttcccagctgcaggcggccccctcctcctggcctgggggaggtgttcccggcagccctcgcgcggcccagggcaggggtgaagcagcctgttaaacagaacaaggtgctcgcggctcatacc

SEQ ID NO: 413505 - DNA, 122 bp, Homo sapiens
atcccggggacgagagttgggcgggaatccgctccacgcaactcggcgcggtcccggggacgtggcgctttccagccaatcccggctatgcgattgttagaccaatggctactcggggacgc

SEQ ID NO: 413506 - DNA, 122 bp, Homo sapiens
aggggaaccaagggtggcccgggctgggagcggggcgcccttgggaaggcggggccaatgcggggggccgagggcgcggcccagcccgccgccccgtcggggacgcggggtccgagcgagct

SEQ ID NO: 413507 - DNA, 122 bp, Homo sapiens
tgtaagaattaacaattaacactggctcagatcaatacaaagttattatcttacagttctcggggggagaagtccaaactgggactgcccctgagatgggatgaaagtcacggtgcaggcag

SEQ ID NO: 413508 - DNA, 122 bp, Homo sapiens
gcctgtttccacgtctgtatgtggggtaacatagtgtgacgacggcacacttctccgcaccgctggcccttaacaagcgtctactgttgctgtgagagtcgtcaacaggaaatgccagcaga

SEQ ID NO: 413509 - DNA, 122 bp, Homo sapiens
gatagggagagagaagtggacaacaaccgtgagccccacagcgctgagagtgatgtgactcgctttttgtttgatgagatgcccaaatccaggaagaatgactgaagactgggtcccagagc

SEQ ID NO: 413510 - DNA, 122 bp, Homo sapiens
tagagaaaacataatacgagaaacggagtaatatcaccccctctcccccactggatattacgagccccatcgcaggggggtgaggcgccccccgcgatgcggggagtaagagccagcccctc

SEQ ID NO: 413511 - DNA, 122 bp, Homo sapiens
ctcaaagtttggttgggtaattcgttaaatggcatcctaaaagtctggggataagagaggcgaaatgtttgtctgatcagaaaaggagcagtgtaggaggcagatgtgagtcccagcagttt

SEQ ID NO: 413512 - DNA, 122 bp, Homo sapiens
atacacaaagcaatgacaacataaaatcaaaattgcttaaaagaatgtatgtttcctctacgtcagggggacagtgtccctgaacaacacagcccatgaactcacttaaggtgatgtgacac

SEQ ID NO: 413513 - DNA, 122 bp, Homo sapiens
cagccttgggtcaccttcagactgtgatgtgagtcaccactgccgcctctcggccatttccgtctccacagccacaaccgattctgtgccatcgctgggagatgggctcactggggacagca

SEQ ID NO: 413514 - DNA, 122 bp, Homo sapiens
gggactcgtgggctttgggccaagaggcagcccgcatcctgctgggggtcgccttttctccgaggttgagtgtcgtgaaggatggcctcctgaggtgggaaggcccactgtcaaggcaccta

SEQ ID NO: 413515 - DNA, 122 bp, Homo sapiens
cctcacaccacgagggagcagcggcttgctcggctcccgggggcagagccaaggcgcgggcgcggcggcccggggccacctgcccgccctcccgctcgctccccacttggcccgagaagccg

SEQ ID NO: 413516 - DNA, 122 bp, Homo sapiens
cgtgggtgcccagccacatgtagaagggaacggggatgagttggggggagcagtgaaagccggagaggcccccagaggtgccagagacatagcagttctggcccacagcttaagggtctggg

SEQ ID NO: 413517 - DNA, 122 bp, Homo sapiens
acggcaaccaggttgcccctctttgctccaggtacctctctcccctcagttagcaggcctcggcttcctgtctcactgcagccagacgagaggggaaattggacagcctgacacactccact

SEQ ID NO: 413518 - DNA, 122 bp, Homo sapiens
cgcggagcgcgcgccggcacgcgggcagagggcgcggggtggtgaggggctgaggacccccgaggggcagtcccagtttcaaaaaccttggcctcacttctctgtgtgccttctggcaccca

SEQ ID NO: 413519 - DNA, 122 bp, Homo sapiens
cgcaacccaacgtacaaagatgatcttttctgaggctccaccgccgcagagcccttcgcgcggcccacggcaccagccgccgctgattggcccgtggcagccacctgaccgaacggaccaat

SEQ ID NO: 413520 - DNA, 122 bp, Homo sapiens
gaagctccgtaaaggcttctgggacgggcagaagccccgcgcccctgcctgcaccccgcgcgcctgctcatggcacgccaccagcacgggccaggcgcacaagtgcagcaccagcgggctgc

SEQ ID NO: 413521 - DNA, 122 bp, Homo sapiens
ccagagtggcttctgggccaaggcgctgcctgaggagtttgccaatgagggcaacatcatcgcattctgggtggacaagaagggccgtgtcttccaccgcatcaacgactcggctgttatgc

SEQ ID NO: 413522 - DNA, 122 bp, Homo sapiens
acccagactggatcttacagctagctacctctgtcacctccctttttccttcttccaagacgtaaaatgtggcagggagtaaggttatggtgtctcctcgggaactggccctccaacatttg

SEQ ID NO: 413523 - DNA, 122 bp, Homo sapiens
agcaatagtggtgcttaatgttctccactaggtccaggtcctgctgtcccaggggcaggccggcctggagcagcatctccgccaggaaggcggtcaggtggttgcccgccaggtccagacgc

SEQ ID NO: 413524 - DNA, 122 bp, Homo sapiens
ggccttacttccgggatgcttctggcgggagcaagaaacatggttacatacgacgtaatgcgcctgcgcacagtccgtcctgcgcctgcgcattcctgacagcacctcccggaccggacata

SEQ ID NO: 413525 - DNA, 122 bp, Homo sapiens
cgggagacaaagccggggaggacttggcagcgcaagcgcagggtgcttccccgctgggcgcgctgggagatggagtctagccaggagggctccatttttgcccgaggcccttgggaagggaa

SEQ ID NO: 413526 - DNA, 122 bp, Homo sapiens
acacctgtctttactggcacctccgcgattggcagtggtgagtcgtgagtagaggccacacgatgccttgtgacagaaggtgtgactcacaggtgggcagagtcttcagggcactgttgctc

SEQ ID NO: 413527 - DNA, 122 bp, Homo sapiens
tcgggctcccgtgattctcctgcctcggcctgccgagtgcctgggattgcaggcacgcgccgccacgcttgactgctttttgtatttttggtggagacggggttttactgtgttgaccgggc

SEQ ID NO: 413528 - DNA, 122 bp, Homo sapiens
atgtttttctctcttgcacagcctaaaatgaccaatgtgtgatttcagtggaataaatggcgtccaaagtcacagatgctatagtctggtatcaaaagaaggtaagttgatagtcaaaactt

SEQ ID NO: 413529 - DNA, 122 bp, Homo sapiens
acagactgcaccaggagcgagttctcctcttccaagttatctgagaacaaagttaggacacgcggtgagggtgggggaggggccggggctccacacctgaaagtccctcaggtccgtgctgg

SEQ ID NO: 413530 - DNA, 122 bp, Homo sapiens
cactcattttgtattcacacatgaggaatgcacacactctctcacatgaacaccaacatacgcgtctttctcagtttcagatcctatcccctgggtggcccccttcagccctttctcttgaa

SEQ ID NO: 413531 - DNA, 122 bp, Homo sapiens
tcagggtcagctccccgcaggcgccccgacccccgcctccgcgcccatcccgcgcgtccccgccgccccaagagcgtcctaagacacccggggaaacgccttccctgtgatgccgcggaccc

SEQ ID NO: 413532 - DNA, 122 bp, Homo sapiens
tttcattaaaatgcacatcagagcgcctactggagctggtaacaaagacaacattgaaaccgggtgtccgccttccgcggccaagcagggggcaggacaatgatttccccaggatgtgttcg

SEQ ID NO: 413533 - DNA, 122 bp, Homo sapiens
acagcctcagatcctattctaacatcgatccatcctgttacccttttaagaggcggatcccgcagtgtcctttcctccctcccagccacctctacccccagtcggctgggcggagcttcacg

SEQ ID NO: 413534 - DNA, 122 bp, Homo sapiens
tttcccctcttaagacagggtttttgtttttatgtttcattcctcaagaaaaaggagagtcgttgtttgctactctgcttagcagtcttaaagtgggtaaagatgactcctaattctcaaga

SEQ ID NO: 413535 - DNA, 122 bp, Homo sapiens
aggagggaagccccagaaaagccgcgcccggctgcccacccaaagggtcaggtgggagggcgctgaactctgagggccgtggcccctgcttctgggcctgaggctggccgggacgagtgagc

SEQ ID NO: 413536 - DNA, 122 bp, Homo sapiens
tccattacacgcatgtaccatcatttatttaatcaatcttctattggtaggcatttgggacgtttcctgctcttccatactaaacaatgcatagaattttggactacattaaataattctct

SEQ ID NO: 413537 - DNA, 122 bp, Homo sapiens
tctacttcttcttttagaagcagatcaagaaactggcgattgaagagtaactgaaagaaacgcaatctgatcttactagcagtgaaagagcgaggtaagaatttgactattatccagcctaa

SEQ ID NO: 413538 - DNA, 122 bp, Homo sapiens
cccggctcggagaagaacaggttagaggaggcagctccagcccatgcataatcagggctccgcggcgcctccattctttcctcctcctcctcctcctcctcctcctcctcctcctcctcctc

SEQ ID NO: 413539 - DNA, 122 bp, Homo sapiens
gcgaggctgctgcgccgcgcgcgccttcctgccccgcctcccgccgcgccgccgaagtcccgcctctcgccaagctgcccgcggcgccacctgtcttccgcctgcagctcacgtccgcttgc

SEQ ID NO: 413540 - DNA, 122 bp, Homo sapiens
atgtggaaagatcttggcgagaaactgacagaaaccacctccacactctaagggcttatacgaaaaacaacagtcctaagcatattttttgttaaatgctgccattttaaaatgaaatcatt

SEQ ID NO: 413541 - DNA, 122 bp, Homo sapiens
aatgcttggctataatctaaaggaagcattgcacttcgagtgctgattttttatgaagctcgtaaacctttttctttaaatgccaatgtgctgaaaagttatgagtattaaagacttagaaa

SEQ ID NO: 413542 - DNA, 122 bp, Homo sapiens
ggacgagagccgccctgggctctgcgctgcatgtgcagaagtgcaaaacaaagtacattgcgctcgttctcttcctcctctctctgctttcgctccagtccctaaacccaactcctcggttg

SEQ ID NO: 413543 - DNA, 122 bp, Homo sapiens
cctagaaaagacaacgtttcccccagtttgatcacaatgatgtttaaagcataaaagagccgaaaaagaaaaatggacgttgtgaatctggcagaggggaaggccggaggaaggccttgggg

SEQ ID NO: 413544 - DNA, 122 bp, Homo sapiens
gttaagggtatgatgtttggtgtgacccctagctgtccgcgcgcagatgtattttcctgacgctaaggtgtggctgcaggaagggccccaggctgggagccaggagatctgggattttgtcc

SEQ ID NO: 413545 - DNA, 122 bp, Homo sapiens
tgcctcccgaagccaggtgtgggttaggtgagatgtggccgcagcgccttcctttccattcgctgtttccttctctagctcagtctgaactgagccctcccacagcgtctcccacaggtctc

SEQ ID NO: 413546 - DNA, 122 bp, Homo sapiens
cgaaaatcgagaagccccgccttcgcgtgagaagtcctgactccaagttccgccctcttacgacaggaaagtcccgcctcttcagcctgactccctctaggatctgaaagcgtccgtggccc

SEQ ID NO: 413547 - DNA, 122 bp, Homo sapiens
aaatcacaaacgcaggggcccagcatagtgcctgatacgcggcgagagtttagtcaccgacgtcggttgttggtggtgacgtgagcagtgacatagaggacaaaagcgatgctcaattccat

SEQ ID NO: 413548 - DNA, 122 bp, Homo sapiens
atggggaggtaaacattaacactccttggagtgagtccagatcttggaatcagagatcagcgacagcactagctcctgctcccctttcctactaattcacaggaggacaggtggttttgaag

SEQ ID NO: 413549 - DNA, 122 bp, Homo sapiens
attgtgcttttggcttcttgagtaggaggaaagtcgggcgggaagggcgtcaggaatgtccgtgacacgtgaatggggccgtgtgcaaaccttgtatgacatcactgagacacctagcggaa

SEQ ID NO: 413550 - DNA, 122 bp, Homo sapiens
tcacatttccacttgttgaaaacacaaaatggagatatataggcacgctaaatgaggaatcggtgatgtggtactatgaataaagacctttcagggatgaaaaagaactgtatgatttaaat

SEQ ID NO: 413551 - DNA, 122 bp, Homo sapiens
tcatgactccagccgtctctcgggctccatgtagggcagggagggtgtgttgtccactctcgcctatgtcgggagccctgggactcttctcgacgcctcatatttcatagacattgtagaat

SEQ ID NO: 413552 - DNA, 122 bp, Homo sapiens
ggagccagtgtgcagctcactgctgatggagatctagaagaggaagggttaagatcattacgaccccctgtgctcaccgcccatggccttgcacccagctaggaacatgcttcacagttgag

SEQ ID NO: 413553 - DNA, 122 bp, Homo sapiens
gttcttaaggcaccaaactgtagaactgcaggtgatgcaactgtcccaaccctagttacccgagtggttttcaggtcacataacagtgaacggggaggtagtcgtgcagtagactctggagc

SEQ ID NO: 413554 - DNA, 122 bp, Homo sapiens
atccttaacatttttttctctagaagattgataagagaaaaattcagcagaccacagtgccgcaggaacaactggctgccattgtgcttaaagagaaacaaaacaggaagcaaaccaagaaa

SEQ ID NO: 413555 - DNA, 122 bp, Homo sapiens
aacaatggcgagcctctagcccaaacaggaatggcactgggtgcctcgctggatcagaaacgcagcggacaccctgccagatccgaggggtggaagtcaacagcgggtctgcgacagtggcg

SEQ ID NO: 413556 - DNA, 122 bp, Homo sapiens
tggtctggccggcctgacccgtggggtatgactcttgttacggcagattccatctaggagcggaggccacgcgtatgttcccgggagaggtgggaagtgcatcccgtggcctatcccgggga

SEQ ID NO: 413557 - DNA, 122 bp, Homo sapiens
tcgtcagcgcactttccacccggccggttccttcccgagccctctccctcccccggcccgcgggagcacagatccctgaaagcggagctccagataggaatgtctgcatcatcttggcaggg

SEQ ID NO: 413558 - DNA, 122 bp, Homo sapiens
acaccagcctagataaatacaaaggcttgatattcataatttgaaccacagtgacactcccggcctattcccctacatcaggaagacacaagggcgtttacaaaatattcctgtttccaata

SEQ ID NO: 413559 - DNA, 122 bp, Homo sapiens
tcgcccttttaagggactctcccacgttcgactctaagcggaagtacccgctcagggctccggaagtggcctcagagcccctcagcaacatgcccgcagagaattcttccggaggcggtcac

SEQ ID NO: 413560 - DNA, 122 bp, Homo sapiens
ccaataataaaggccagtgcatttactgaacatttactactagccaacggcagttttaaacgtttttcgtgtaatctcatgtaattatcccgccagccccatgatatagagtctctggcatc

SEQ ID NO: 413561 - DNA, 122 bp, Homo sapiens
tcggaggtgggcgacatccggagcgaaacggtctcgaaggaggccggagtcagaactcaccgccaatccagcgcgcctcgggcgtgtgggcaacaggactcggggcggggcctgtgttgcga

SEQ ID NO: 413562 - DNA, 122 bp, Homo sapiens
tctattgtggccgcggcccctgccaaagaaaacgcaagcttgcttattttctccatggggcgcaacagtgcctatgtgtgccggcagagaatcggctggccgtgaaaagaattctaaataaa

SEQ ID NO: 413563 - DNA, 122 bp, Homo sapiens
ctgagtgggctcggggagggagttccagcaggccacggggaacccaggacagcctgaggacggaggcacagccagacgcaccaaggggggcgacccagaggggttgctcgagcgccgtcacc

SEQ ID NO: 413564 - DNA, 122 bp, Homo sapiens
ttccagagtggtctgaatgccgtctctccctccagcagccaggaggcaggggctaactcccggtctcaggagaccctccctgcctgcggctctctgtgccgggagcctgccagtcacttgta

SEQ ID NO: 413565 - DNA, 122 bp, Homo sapiens
ccaattctgaggaccacgaattcggattatccgggagttcttttgccatggcaccgcccccgccacttccgctaggaacccggaagttcctacccgacgccggaagtcccacggccttgcct

SEQ ID NO: 413566 - DNA, 122 bp, Homo sapiens
ctgaggacactcgcctgctgggccggtcgagctgtgcggtgccctccgggacgcagggggcgctgcagccacgctgggtcaggctccgcagggccctcccaacccggggactaacggcgccg

SEQ ID NO: 413567 - DNA, 122 bp, Homo sapiens
ctcccggcggcggcgtcggcggcggcggcgggggaggttgcgggggaggctcggcgtccccgctctccgccccgcgacaccgactgccgccgtggccgccctcaaagctcatggttgtgccg

SEQ ID NO: 413568 - DNA, 122 bp, Homo sapiens
tcatgctgttttgctgtgtgtgcgtctgcatgcctgtgtgtttgtgtgtctctccaccttcgtggggggcaactgtaggtgtattatgagccttgggtctgtctgtgtgtacaatagcaatg

SEQ ID NO: 413569 - DNA, 122 bp, Homo sapiens
actctgtagcccattttctactctgtgtaactgctacctaggatgtgaaagcaaaccaaccgtaacaaatctgcctcatctgtatttttgtaggtataaaagaaaaactattttagaaaaga

SEQ ID NO: 413570 - DNA, 122 bp, Homo sapiens
tggcacgacaacccagagggaggaagacctttccagtaggttttagaaaacatcgtgaaccggaattcagtggtcacctgaaaggcacatttcacagaccagctagcaaacagactcagcag

SEQ ID NO: 413571 - DNA, 122 bp, Homo sapiens
gaggccaaggcaggtggatcatctgagcttaggagttcaagaccaatatgggcaacatggcgaaaccccgtctctacccaaaatacaaaaaattagctgggtgtggtggtgcatgcctgtag

SEQ ID NO: 413572 - DNA, 122 bp, Homo sapiens
ctcaggcattgtgaaactctgctgattactcaatgcagtttctttctcaaaagttcagctcgttcaaccaactgatacttagttccctgaaatatttacaccgttatatccccagtgcctgt

SEQ ID NO: 413573 - DNA, 122 bp, Homo sapiens
ttgttttctccacatttcggggttctggacgtttcccggctgcggggcggggggagtctccggcgcacgcggccccttggccccgcccccagtcattcccggccactcgcgacccgaggctg

SEQ ID NO: 413574 - DNA, 122 bp, Homo sapiens
ttaaggaattaaggaggagaaaggagaggaggagaaggagagaagggcagagtgagagggcgctaagagtttctgatacccattacacagctgagatctgcctcctgcctaaagcagaaaga

SEQ ID NO: 413575 - DNA, 122 bp, Homo sapiens
tgtgtacaagtgaacacatttcttagcccgtttccccactgcctgtgtgatttataaaaacgcaaatataaaatatttccgttccagcagagacgccgcttgctacggcgggttgcccgtct

SEQ ID NO: 413576 - DNA, 122 bp, Homo sapiens
ggagaccctaacttacccgggtctgagatgccgagagagccgggtgtggagctgagtgcgcgcctgccgagcgctgaggccacagacagccccgccccggggcggcaccttctaagggcctg

SEQ ID NO: 413577 - DNA, 122 bp, Homo sapiens
gttttaagaaagtttacaaatttgtgttgggctgcattcaaagctgtcctgagatacatgcggcccacaagctgcgggttggaccagcttggcctagagaatttttctgattacttgacaag

SEQ ID NO: 413578 - DNA, 122 bp, Homo sapiens
gccggcctgtcacgttgcccttccctgggcttgtgaggattggctccgcttggacctttgcggtgctcccggagccctccaggttgtccctccggtgccggaggccaagcggtggtgtcctt

SEQ ID NO: 413579 - DNA, 122 bp, Homo sapiens
atccctcacacaaggcacagatgctcattacgattctttttacgtgcaacacgtgggggacgaagcagtttcatatctcctggtattatctgccgtccaaagcattttctttgaaaggaaaa

SEQ ID NO: 413580 - DNA, 122 bp, Homo sapiens
gtcacacgtacccctggctggagcacatgctagttctccctggaagagcgcagcctcgggcgcttcctacagactgagataaaccaaacgcacgcacagtcagcaaccaccaaagaaaggca

SEQ ID NO: 413581 - DNA, 122 bp, Homo sapiens
gcctttcggttagagttgcggatagggcagtggccttgggggcggggctataaacctgggcgggcattcccggcagggcaagctcagcgtgagcccgattggaggatgggctctaccttctt

SEQ ID NO: 413582 - DNA, 122 bp, Homo sapiens
agccatgagccatggaagctgcaaggtttgggctccctcctgccatcgggtggggggtgtcggcggaagggggtacgtgtcctgtcctctcccagtgcttatttcctgctggaaccgtggtt

SEQ ID NO: 413583 - DNA, 122 bp, Homo sapiens
gctttaatatttatttttcagcatgaacgaccaaacttaccgagagctaggctgggctggcgtggctgctgaagccccacagttgtgggctgttgaagtcagctccgcgggggagctgacct

SEQ ID NO: 413584 - DNA, 122 bp, Homo sapiens
cgagggatcctccctccctccaggtacctcgccccgggacagcagaagtgagagacaatccgagcatatccatgtaatgtggaaatgctgtactatcacccatctaaacaaagctcggaact

SEQ ID NO: 413585 - DNA, 122 bp, Homo sapiens
cttcgtaattcattctgtggaagtgaaacacatcaaaagtaaaaactacagatcaataaccgttgtgactacagatgcaaacattctcaacaaaacattagcaaatggaatctaacagcata

SEQ ID NO: 413586 - DNA, 122 bp, Homo sapiens
cttgcacgcggggcggcagcatgctctgggctccctgagttgctagaacgccgtggatgacgcagggaaggaggctggccccgctatcagggagattatgtcctagtggggtccccacaggc

SEQ ID NO: 413587 - DNA, 122 bp, Homo sapiens
ggctggagatctcaggtgactttggagagagaggctttaaaggagtgatgagaaacaaggcggctggctgaggaatgacgacagtgaggaggtgaagacagcaacaccaaacaacttgactg

SEQ ID NO: 413588 - DNA, 122 bp, Homo sapiens
tgtggatgttagctctgagattggggtgtggtcagacatctggccaggtccatctctgaccggctcctggtcaacccccagggagctggaagagtgccagcgaaaccacgagggtgatgagg

SEQ ID NO: 413589 - DNA, 122 bp, Homo sapiens
aagggtcagcaatatgatgactgaaagggaaaagtggaggaaacgcagctgcaactgaagcggagactctaaacccagcttgcaggtaagagctttcacctttggtaaaagaacagctgggg

SEQ ID NO: 413590 - DNA, 122 bp, Homo sapiens
gcgcagcgaacatgcccattaaacacagatgcccctcacccgccgccggggcctggggcacgggcacatgcgcgtggacttttcaggaacaggattcacggcttctatcaccaggttctgga

SEQ ID NO: 413591 - DNA, 122 bp, Homo sapiens
cctcagtttccagcccccggatctgagactgagaaggattaggggctttggccaaggtcacgcggcccttcagggctagaagtcagggctcctgactccgggttctggacactttcccgcaa

SEQ ID NO: 413592 - DNA, 122 bp, Homo sapiens
acggagctcaatggcggcagtcgcgctgagggactcggctcaggtgagttgtgcgtcctccgggtctcgcctacctcccccagcagaagccttaaggcccagtgagggatgcctgctcacag

SEQ ID NO: 413593 - DNA, 122 bp, Homo sapiens
aggggcagactgacacctcacacggccgggtactcctctgagacaaaacttccagaggaacgatcatacagcaacattcgcggatcacgaaaatccgcggttctgcagacaccgctgctgat

SEQ ID NO: 413594 - DNA, 122 bp, Homo sapiens
tggagtgcgacagacgtaggttcgaacagagctctgctactctgtggctgtgagggctcccgcacacaccctctcgaacgctcggcttcctcatcggtccgcaagcctgggtgcgaggcgtc

SEQ ID NO: 413595 - DNA, 122 bp, Homo sapiens
agcacaggctcgtggtgcttgtcaaggacaatggcgagcctcctcgctcggccaccgccacgctgcacttgctcctggtggacggcttctcccagccctacctgcctctcccggaggcggcc

SEQ ID NO: 413596 - DNA, 122 bp, Homo sapiens
ctgagacagagcgcttggcacaggaggagcggggtcagggcgaagtcccagggccccaggcgtggctctcagggtctcaggccccgaaggcggtgtatggattggggatgccccgccttagg

SEQ ID NO: 413597 - DNA, 122 bp, Homo sapiens
ggtccttctgctctaacctgagaatagacaaaacaattgttggttaccctaaagtgttcacggctgtcatatctgtggctagagaaagttttattggctttagttagtgttttcagacaatt

SEQ ID NO: 413598 - DNA, 122 bp, Homo sapiens
ccttcctttcttcctgcctcccctgagaagctacatttttgtaatctctggagaagagcacgagataccaaccccctaaagtgtgggacggtggaggaacaatggtgggaatgggaagaagt

SEQ ID NO: 413599 - DNA, 122 bp, Homo sapiens
ggcttagaaataccccttgatttgcattcgaaggaaataaggagggctgaacgcagtcgacgggtggccagttgctgggccagttcgcagtcctgactgtcccttgattagtcttagaggcc

SEQ ID NO: 413600 - DNA, 122 bp, Homo sapiens
tggccatcatttcatttcaaatgacaaagaagggacaaatcctttggagtccacattggacgtggcggggaatgccaccacacacccgaaggggaagaattccacaagcaggctccgaggag

SEQ ID NO: 413601 - DNA, 122 bp, Homo sapiens
aagaaagtttcttacagattatcttaaatcctctaagcagtaaaatgcaaagatggcccacgtgtactttttggcccttatttttgcacattaaaaagttgtggttttcttagttaccatat

SEQ ID NO: 413602 - DNA, 122 bp, Homo sapiens
gattttagaggaccagcaagcatcttccatgtggctatgatcttcaggcactggaaaaaacgtctgcatgtaaaatacaggttggaaaagcatttgattagctgagttgagtgaatgagctt

SEQ ID NO: 413603 - DNA, 122 bp, Homo sapiens
ccacgcctcctccgggagcggaggcgggtggctgttctcgggtaggcgtcgcgcgtggggcggcactgtgggagttcccgaggccgaggtcgttcgcaggccccatttccctgcgctcttat

SEQ ID NO: 413604 - DNA, 122 bp, Homo sapiens
gggcctgatagtagattgaatggtggtccccaaaagacatattcacacagaatcccatagcgtgagcttactcggaataaagttctttgcagatgtaatcagggtaataatctcaacatgag

SEQ ID NO: 413605 - DNA, 122 bp, Homo sapiens
cagctgcttcgtgcgtgacctccaaagtcaggacctggcctgtcctttgtggtagcgtcgcgttccaagccgggtcaccgcaagacggatcccgccaggcctctccagcgatgttctgcctc

SEQ ID NO: 413606 - DNA, 122 bp, Homo sapiens
gatgcattttagaggctgtggattctgttatccttctctgaagagatggttctctgggaacggggcattttggcagggagtagaggatggccctcaagacagcagcaagccttaactgcact

SEQ ID NO: 413607 - DNA, 122 bp, Homo sapiens
ggcgactcggagaactcttgggaccgctttcacccgaaggccggcccagacactcaacggcgacttccttaaaacactggagaggcagccgggtgcggtggctcacgcctgtaatcccagca

SEQ ID NO: 413608 - DNA, 122 bp, Homo sapiens
ccccacaactgcacctcacacccctaatcctcagcgtcacctgaggttgcagagctccagcgtcgctgcttaaagtaccactgcccagtcatcccaggtaactggcccatgagaaagaggga

SEQ ID NO: 413609 - DNA, 122 bp, Homo sapiens
cctctcaccaaggcctttcacagtatcttctttttagcgccagaaccctgtgtgtgtgcacgtgtgtgtgcacctgcgtgcgcgtgtacgtgtgtgtgcacctgcatgtgtgcacctgcgtg

SEQ ID NO: 413610 - DNA, 122 bp, Homo sapiens
aggtgttccactcattggcccggtgtgtggcagccctctcagctgcctgtccccaagaggcggcaagcacagccagtcgcctggtctgcgatgccaggtcgccccactccagcacgggggtc

SEQ ID NO: 413611 - DNA, 122 bp, Homo sapiens
tttagatctgacacttgtgggcaagcaaaagtgcttggaagggccacacttccatgtatacgcagggatgatgttcaaaatatttaacaatcactagagactaaaatttatccatctcagta

SEQ ID NO: 413612 - DNA, 122 bp, Homo sapiens
ttagggagcctctgagatacagtgtagccaaggaaggtcaagaccccggaagagacaggccgagggtctgtctgcagggctggtgtgggaggagaaggagactgcagttggtgctgggaaga

SEQ ID NO: 413613 - DNA, 122 bp, Homo sapiens
ctcacctggatgggaagggtgcggcgtccagccctgcaggcgtgtggtatgtggggaaaccgctccgccctcctcctgtgactctgtggggatgatcttgcccaagcccggatatcaagcgt

SEQ ID NO: 413614 - DNA, 122 bp, Homo sapiens
tgctgaggctttgagaaccggactgaagcagtggcgacctgggctgggtgcagagggcggcgacggctgcgttgaccgatcctgcaggagagagccggagactgcagagagctgcagtgggc

SEQ ID NO: 413615 - DNA, 122 bp, Homo sapiens
tcatagtgaaggatgcaaggtggcaattgtagtcacaacaatttccaggaagccatgttccgctcttgagcgagcacccactgggcctcatgcaaggtagaaagagcctgcgtacgtcaccc

SEQ ID NO: 413616 - DNA, 122 bp, Homo sapiens
tctcggtccttccgagagctgagagacactgcctctggttgcgagctgcagcccaagtgccgcctccccctcccttccactcttctccctccctcctcttctgcctccctctgctctgggag

SEQ ID NO: 413617 - DNA, 122 bp, Homo sapiens
accctccccctgcgacgaccccccctcgctctgaccgactggtcccctaaacggtggcggcggtttttggtcgttgggccccgggatttaggaccaacatttgaagacccgaaggggtgagg

SEQ ID NO: 413618 - DNA, 122 bp, Homo sapiens
atgagaaaacgcctggggtagtggcccgagactgaagcgcgctccacgcctaccaagtgccgctcaaccccaattctgctctcggggagagaagagaactcctgccagacccgagtgttttc

SEQ ID NO: 413619 - DNA, 122 bp, Homo sapiens
actgcggcccccccgactccacactgtacagtctcctcaggcgtccccacacccaggcctcgggcccaggccctgcctttcagcgacgtgcatgccaccctcttgccagccacaagccaacc

SEQ ID NO: 413620 - DNA, 122 bp, Homo sapiens
tctttttttttcttttcatcctctcaacccagcttttctcaactttgggaagaactgggacgagaaggccaacatttttaatgtttttcaaatctgcttggtcacttttaaagcatcctgct

SEQ ID NO: 413621 - DNA, 122 bp, Homo sapiens
gtcttccagctcttggaaagtgtgaatgcaggctgtagtgtttactctggttccccatgtcgaatcgccaagtatcatttctgtccaagggcagtctgtgctggcgcaggaaaggaaaggaa

SEQ ID NO: 413622 - DNA, 122 bp, Homo sapiens
tctctgccagggggtgtctgtttttcaccctttgaggtgcctattgtgctgtcttgagaacgaggagaggtgggtgaggagggggtaagaaaggatgctgcttgcggctccaactgcctccg

SEQ ID NO: 413623 - DNA, 122 bp, Homo sapiens
ttccctggagtccgcaagaagcgagcatcgggcgcccgccctagaccgggctggtgctcccggaaagggggcagcagaggacaccccaaaagacggccctaaagtccccgctagagctccaa

SEQ ID NO: 413624 - DNA, 122 bp, Homo sapiens
cgcctcccggcagctggcacgagggaacctggccgtcaggtttcccctgggatcctgggacggtatcaggcggggaatctgtgcggccgcggcgaggtaggtgaggtgaggcggggcgaggt

SEQ ID NO: 413625 - DNA, 122 bp, Homo sapiens
cctgtactctttccctggggatggagctgggtgccggtgcaggcatcggaggagcggtgccggggaacccgcctcctcacctcttgcccctagcacggggcggtgactccagagctgggagc

SEQ ID NO: 413626 - DNA, 122 bp, Homo sapiens
tctggggtcacgagcaccccccagatgctgccgcgtggccagcacaaagtttgctcttgccggggctcaaaagcactcaccccagctcccgcagctgttcacctgcgttctccctccagcga

SEQ ID NO: 413627 - DNA, 122 bp, Homo sapiens
tgggcatgaggaaggacaggtgagtgtgatacttcaggatacttggtgatgaagaaaaggcgagtgatatgcaataaccagggtggtgggtagaggctgttggtaaaaaggtaaactcgggt

SEQ ID NO: 413628 - DNA, 122 bp, Homo sapiens
aggcacagactgaccgagtgaacctgcggaccctgctccgctactacaaccagagcgaggcgggtgagtgaccccggcccggggcgcagatcacttactccccgctccatgcctcacggacg

SEQ ID NO: 413629 - DNA, 122 bp, Homo sapiens
ctgtttgaaatggagggttctaaaataatcagtgaggcccacaggcgatctctccttgagcgctgtaaaatctgttctcttcctcctaagtccccaaaagtagccagtattggcagcagtcc

SEQ ID NO: 413630 - DNA, 122 bp, Homo sapiens
ccggcctgctttcctgtttaaaactcatgatgatcaattgttcagtcaacaaacacctagcgagcctgactcatgcctagccctatcctgggaaccgaggacaccgaggacacaagcgaact

SEQ ID NO: 413631 - DNA, 122 bp, Homo sapiens
gccaaaacgaccgccacaaggaggacaacggaagtcccgccgcgaccgcgcgtgcgcttacggaaacaccacctttcggaggcctcattggctgaaggtcgccgtcgcccaacgcaggccat

SEQ ID NO: 413632 - DNA, 122 bp, Homo sapiens
cagcttccagcctccgtacagctcccttccctgcagcaggatgagtgctttggacaagaacgctagcccctcccccaacgctgagaaaactttctagccctagcaaggccgccagcaagcag

SEQ ID NO: 413633 - DNA, 122 bp, Homo sapiens
ggcttctcgaatacggtttctgtcttcgcgttaaatgtctccttctgtgcggcctggtgccgggtgggctcctgtgggacgccctggccgtccgatccaggttctaattcatagttacacgg

SEQ ID NO: 413634 - DNA, 122 bp, Homo sapiens
ccttctcgtgacgactcaccgtatgccgtacttgggagagaacacaaagggcagaatgatcgcaccgagtccaaaggaagacggaagttcatgtgctcaggcttgcagcagaagtgagagga

SEQ ID NO: 413635 - DNA, 122 bp, Homo sapiens
gcccccctccccagtcagcggctcccgctgcagcttgcttagcccagcctcccgctctcccgcccccccggctctaaaacgagccccccacgcctggcaggagctatataaggcggcgtgag

SEQ ID NO: 413636 - DNA, 122 bp, Homo sapiens
tccagtctgaaaggtgaggacaacgtggaaactcatgagctgagcctgcccgctgggacacgtctccttcccgcgtcaccttctggtttagggagccgtcaggtccctaaacgttccctaca

SEQ ID NO: 413637 - DNA, 122 bp, Homo sapiens
ggctgcccattactgggcatgtgtgaggttggcttgagtgcgcaggaggttagaggggagcgtgtgctccaggcaggagtccggacttcctcaggggagtctgcaaggctggggcaagagag

SEQ ID NO: 413638 - DNA, 122 bp, Homo sapiens
ttaagtaaaatgctaataaaagtgcttaccctgcctcccaagattgtggcaaagttatgacgcaaggcttttaaactgtaatgctgaacaaacgtaagggattggtatataccttgagatat

SEQ ID NO: 413639 - DNA, 122 bp, Homo sapiens
ggacgtgtaaaaagcctttttaagagtcagataacgaaaaacggaaaaagaggagaaacacggtcctacaagggtcctgagctgaggccatcaaatgaatgtactgacaggtatttttctcc

SEQ ID NO: 413640 - DNA, 122 bp, Homo sapiens
cccagacccgtgccctggagtggagtttacccactgccgcccttcctgggcaaatgtcaccgctgcctccgtccccctaggtccggggcgggtcagtgcttcgagccagcggaccccggcct

SEQ ID NO: 413641 - DNA, 122 bp, Homo sapiens
tggaggagatgtcagggtctctaggaggccaaggggccagcttgtggcaggctagctaagcgtgtgagggggagggtggggcttagatggctgctaacccaagggtgagtgggcggttgggc

SEQ ID NO: 413642 - DNA, 122 bp, Homo sapiens
tttgtgtggagtgcccttaatgctggaaataatcctgttggctaggactccagaactgtacggatgagaaaaggatgcaggaaattctgttgtttacacatgtggctgcaactgagacactg

SEQ ID NO: 413643 - DNA, 122 bp, Homo sapiens
atgctgatccccagactcggccatccatgcccatggtctattgttcttatgctttcaaaacgcctcccctgcttcatgctttctagtcttgaggacttggcttaaatatgcttctgaattgc

SEQ ID NO: 413644 - DNA, 122 bp, Homo sapiens
ggttaaaactatgcatatatttggtgaaattctgcttccagagtagatggattatctagccgcagaaagcaactctaaaaattggttaaaatgtaaaattatctgttttgaagtaactgaaa

SEQ ID NO: 413645 - DNA, 122 bp, Homo sapiens
cacttgaaattcaactccatttcccccaattacacttgctaaaattcagggctattatggcgcagggagactgagaaaatctgcacaaggaaagaggcaacaactttatgaactttgaaaag

SEQ ID NO: 413646 - DNA, 122 bp, Homo sapiens
tgggtccctagcctcctggaaaactccttgggccccaggtactgactgtttccttgcagccgcccgtccccaccagccgcctgccgggcgccctgaggatcagtcacttagccattgctccg

SEQ ID NO: 413647 - DNA, 122 bp, Homo sapiens
ccgcagggtataaacacggggcgcatgggttccctgagattcgcctgagtctgggcccagcgaggcacgctgttcgcggggggccctcctcccctgtcccccttccagtcgcatgtcttccg

SEQ ID NO: 413648 - DNA, 122 bp, Homo sapiens
cgtatttgtactcttcatcctatctatttggagtggtctcaaattccacaggctactccacggtgtggaggtggagcaggaagaggaaaatgaagaaggcaactgctgctgggtgtgtaaca

SEQ ID NO: 413649 - DNA, 122 bp, Homo sapiens
acaaagatgctcaaaagccaggaaatcgcaggctcggaagcccccacgcatgcctctgaacgcagcgccatctcggggctgcggcgggaccaagcgggacgcttgcaggctgtcggcggcgg

SEQ ID NO: 413650 - DNA, 122 bp, Homo sapiens
ttcatcaagccagagagctagcagagttggtgctggatgggattatatgatagagatatgcggtgtaggctccaggtgaaaaattgaatgtacattgttaactgataactgggcattggaac

SEQ ID NO: 413651 - DNA, 122 bp, Homo sapiens
aggactccaaagggcccctcgcgtcctctcccgggaatgtacccacaggccccctctacgcgcttgggttgcccaggaaaccccaacggtgaccccacaatgcccagcagagccctcgccct

SEQ ID NO: 413652 - DNA, 122 bp, Homo sapiens
taggacaaattgttattactgcttcgtagtggagatgcttctggtttattttgtggctaccgctgttactgcttggagtgcctcaccgagccagctaacaactgcgtgcgtgagcacaggga

SEQ ID NO: 413653 - DNA, 122 bp, Homo sapiens
ccaggccaaaactaggcgtttgcgccaggcattgtgggaattgaagtccgacgttcacaccggctccgtaaacctcacggcacggagactaggtctcccagaatccatggcgtgacaaacgc

SEQ ID NO: 413654 - DNA, 122 bp, Homo sapiens
cggcacctgtgtgggggagcggatggggggcgtcctcttctccccggggagctgcaggtgcgtccggacaggaatgagcggcaggggcgggagcgggtgggacctgccactggggggagggg

SEQ ID NO: 413655 - DNA, 122 bp, Homo sapiens
agaccgacctgatgcgcacctgccgagttttatgtgacccccttacagcagcttttctcccgggttccaatccctctgcagaccccagaccagagcatagcatgtgcacacatcaaggccac

SEQ ID NO: 413656 - DNA, 122 bp, Homo sapiens
ccagcacccagtgctgcaggtttctcctgggtgaagatggaccagcccaccttggccctccggcaagctagaacaatatgtacacgtctctcaaactatgaagagaagatttgggaggagta

SEQ ID NO: 413657 - DNA, 122 bp, Homo sapiens
gaagttggcagtgaagctctagccgcaaggatgttcacatgccagcatgttcacctaaagcgagagtatatatgcaactggctgagatccaaagaaggaaactgtgctaaagagagatagct

SEQ ID NO: 413658 - DNA, 122 bp, Homo sapiens
ccgcccccttagagttcaaataggtggtgtctcccaggctgctgagatcagttaatgagacggtaattgaaggccgccgtgcgccaacagaataatgcacgtcgattgggcagctccaaggg

SEQ ID NO: 413659 - DNA, 122 bp, Homo sapiens
tccctgggttggagttgtaagcggggagaggggggggcgggggagaatgctgtacctcttcgttaaaaaaaagcacaatgagcaggaaggggcgagctgtgcgcatcctcacctgcgtccga

SEQ ID NO: 413660 - DNA, 122 bp, Homo sapiens
agaaaggaagggcagagagagggtaaggaacgatgctgcgggatgacctctgcacaccagcggctggcggggccctcccgtcacccccagcatgggaatgtgtcatacgggtagcccaaagc

SEQ ID NO: 413661 - DNA, 122 bp, Homo sapiens
gaggcctcccgagggagtgagactctaggccactcccccgcagcaaggcaggatcacctgcgacgcggagagcggttagagggccctggagtggaaaagggcagtgggacctggtagcttgg

SEQ ID NO: 413662 - DNA, 122 bp, Homo sapiens
ggggtcttgggacacgagccaataggccctggtcagtgcagttgtagtcagggtctgccccgtggagcaaaagcaggcggaaacagtccaggtgcccgtagactgcggccaaatagaggggg

SEQ ID NO: 413663 - DNA, 122 bp, Homo sapiens
tgtctgtgggatgcagaaaatacagccgtgtgcagagcatggggtgccacctcccacccccgtccctgccagcccagagagggaaagcaagctcaaaacaatcaaccaaagagatcaatgcc

SEQ ID NO: 413664 - DNA, 122 bp, Homo sapiens
catccttctccccgtcactgcggcgccccggcctccagaattgtgtagaagaggtcccgtcgcgcctcagcctcgccacgcttggtgtcctcacccttgcaaagtttcgctaatctggtagg

SEQ ID NO: 413665 - DNA, 122 bp, Homo sapiens
gcagcctatgcctttagttgaatggggaaaaggtcatatgtcagaaaggaggatgagaagcgtattacaaaaaaatgctttttgggggaaaattttggaatataatagtagtctctcttatt

SEQ ID NO: 413666 - DNA, 122 bp, Homo sapiens
gaacattgtgtgtatattctagacaaagaagctgaagttaatcaatccgtccttcactcacgaaagcaattacagcttactgaccacatagggtatgcctggtggtctacacaaagtcatgt

SEQ ID NO: 413667 - DNA, 122 bp, Homo sapiens
ctcagttctactaagaggtggacagagcgtgagaactgtgcgaggtaaagccagctcacccgtcagacccacagatgggggcagacggcacacaaggctgcgaagtccccaagggtggggcg

SEQ ID NO: 413668 - DNA, 122 bp, Homo sapiens
cactgctgtccaggaactgctgcgtctggctcaggcccacccagccggacctcccaccctcgaccctgtcaatgacctgcagctcaaagatatgtcagttgtagagggtgggctccgggccc

SEQ ID NO: 413669 - DNA, 122 bp, Homo sapiens
ggagctccccgcaggggaagccctcaccacgctggagctgagaaacgtgtggccctggcccggccgcgcgccctcgggacttggtgtgtggctgctgctccccgggttatttcgggaacttg

SEQ ID NO: 413670 - DNA, 122 bp, Homo sapiens
tccgctcccgagcgagacaaggtccagagagccggggccaggcgatggcttcctcttctgcgcctctagactgccgggcacagctgctgcgcaaccttctcagaagtcagccggaaaagggt

SEQ ID NO: 413671 - DNA, 122 bp, Homo sapiens
cgatctcacagtgctgagtgcagccggatgaacaggttccagacccggcccctggcagggcgggcttcctccctgcgttgtgacccgacccgtcccgggaaacgtttgccttaaagcggaat

SEQ ID NO: 413672 - DNA, 122 bp, Homo sapiens
attgttagagaaacaggcattcctccaaggactgaagatctgttcgagtcgcggaggctgcgcgggcccgcgaggctctcgcagggggacctaggctgggtggcggggcagtgccctctgga

SEQ ID NO: 413673 - DNA, 122 bp, Homo sapiens
gtccgcacgtcgcccacctggagggctacggagcctttcacatggcaaggcaccaaaacgcgggacatggtgacagcagccgcaactaagtgcaaccgccgctctaggcccccgaccaccag

SEQ ID NO: 413674 - DNA, 122 bp, Homo sapiens
ggcactggccgcggacggcgggcctggccggcggggccccagagccctgggcggcagcagcggccgccggctccccccgcagctgcctctccgccccgctctttgtgtcggcgcctggagaa

SEQ ID NO: 413675 - DNA, 122 bp, Homo sapiens
cgcgaggcgcggggcgcgaggccagccctggaacggcggggtgtggggggcgggcagctgcggagcccccagaggaaagcaggggcaggcaggggggtgccgaggtaatgggccgggcctgg

SEQ ID NO: 413676 - DNA, 122 bp, Homo sapiens
tggggagatgagaatgtcagtgagcgctggtgcatgtgctgacagtattgttaatggcgccgtttccacatctgcaggcagacttgtgctccaaagacagttatcggagttgctgcaaaagt

SEQ ID NO: 413677 - DNA, 122 bp, Homo sapiens
aaacaatgctaccaagctgccaggtaacccatagaacggctgtcagtgcacggtgcctggcggtcaggtgccaaagaacgagcctcagcccacacctcgcactgcacgcggaagttagctca

SEQ ID NO: 413678 - DNA, 122 bp, Homo sapiens
ttatctcatagaagtaaaaaataaaatggatgctagaggctaggaagcatagggagaagacggaaatagggagagatctgttaaaggacacaaaattatagctaaatgggaggaataagtcc

SEQ ID NO: 413679 - DNA, 122 bp, Homo sapiens
gttgcttgtgccattgtgtaaatgaagttccagagtctagcttggccttcaaagattctccgtaaaatggccccactccacttacttcttattctaatatattccattcaaatctggtaggc

SEQ ID NO: 413680 - DNA, 122 bp, Homo sapiens
gaaagggtgtgtatccagtcctagacccgctctggtctttgccctctgctgctcacacaccggtcagcgccacctacctgccagggctcaggggtcagcttctaccactttccacctttcct

SEQ ID NO: 413681 - DNA, 122 bp, Homo sapiens
gggagaacagactttttccctcttctaagaatttgattgataaaattataatgaagccttcgacaaaacgccctgtggttttcctgcctggcttgtcccgggagttgtctgaagatgggcat

SEQ ID NO: 413682 - DNA, 122 bp, Homo sapiens
cggctgccccgtctctgtctcctgtgctccccacgcctgcaccccacaggcccacacgcccgttctgcatcctggggagacccctgcagacactttgcggacggctttcctttgacgcttac

SEQ ID NO: 413683 - DNA, 122 bp, Homo sapiens
aggaggaagaaacaaaggagccagcagcactagagagttcccttctggtgtgtgagtgcccgccttccttttttttttttttttttttgagacggagtctcgctctgtcgcccaggctggag

SEQ ID NO: 413684 - DNA, 122 bp, Homo sapiens
tacccaaagagacatcagacaaagaaatgcatgccagctaggtaatcctttttgtggaagcgctagataagagattacgaatgctgaatggtgagctggggaaaaattaatgtttaaagtta

SEQ ID NO: 413685 - DNA, 122 bp, Homo sapiens
tcagacccccagccctcccccagatgtccgtcccctggccgtcgccttccccaaagtcttcgcagtgggcaaggaggcctcccccaagctctggtcccggccaaggcagagcgatgcgctcc

SEQ ID NO: 413686 - DNA, 122 bp, Homo sapiens
tgggcttgtctcccagcactgtcacttattgtctatgtggcctcaatcaagttacctaaccgctctgtgcctcagtttctctatctagaaaatggggttagtaacactaacccccttgcagg

SEQ ID NO: 413687 - DNA, 122 bp, Homo sapiens
gcttctggcgcccctggctggactctgtgcggtgcggcctcgttgccaaactacattttccggcagtacccgggacgccgggcgcagagcggagagcgtcgcaaggggcgggcctgacgcag

SEQ ID NO: 413688 - DNA, 122 bp, Homo sapiens
ttccttgccatgaaccctgagttcacactcatattttacatgttacaggaagccacagctcgccccaggggtgctgcaaacagacacgcagaagccagatgtagcccccacccccccaactc

SEQ ID NO: 413689 - DNA, 122 bp, Homo sapiens
cacattatacccacagtcctccaggtgttggcgtagggcaatccgttctcttggcgcacccgactgacctggggtgtcccagcaaaagctcaacctactggagcaaagcgcagcctatgtct

SEQ ID NO: 413690 - DNA, 122 bp, Homo sapiens
taaggctggttcaacgtccagctctggagaaagcaagtgcttcttatgtaacgtgaggcacgtctccagcagcagccacctcacatcccagccccgcacatcatgtcacacattcctgactc

SEQ ID NO: 413691 - DNA, 122 bp, Homo sapiens
ttttgtttttatagagatgggtctaccagttaagcatccctaatccaaacatttcaagtccgaaatgctccagtgagcatttccttttgagcatcacattgacattcagaaagtttcagatt

SEQ ID NO: 413692 - DNA, 122 bp, Homo sapiens
acctcgtgatccagccgcctcggtctcccaaagtgctgggattacaggcgtgagccaccgcgcccggctgggttgctgtgttttcatgactgctttagatcaatttgccaccgacctgcctc

SEQ ID NO: 413693 - DNA, 122 bp, Homo sapiens
cttgggcagatgactcttctctgagtctgtttttttctcctgtaaagcagggaatgagcacgagagccatgaagtggtctcagctccctacatgcttttcccatatgtgaggtgtgtgtgtg

SEQ ID NO: 413694 - DNA, 122 bp, Homo sapiens
cgccccacttccctttcaccacctgggagaaggtggacccctcgtttcttcatggagctccgttcctcacaagcagaatgcagacgggatgacagttctgtggggattcttcctggatttca

SEQ ID NO: 413695 - DNA, 122 bp, Homo sapiens
acctcaactgaattcctcacatctcagaactcaggattctgtacttacctcccactgggacgtatcttttccaggcatcacagataattttcttctccagctatcttatgattctttttgta

SEQ ID NO: 413696 - DNA, 122 bp, Homo sapiens
acctgcaggggcctggtcctcaccacagtaacatcccccggcaaatcccatcagcattcacgctaagtacagatttagaaataaaaatagcctcacatcagctgaggtttccccactgagtg

SEQ ID NO: 413697 - DNA, 122 bp, Homo sapiens
cgctcccccccaccccgcaccccgcaccccggcatggctttccccgtgggcgcttttcggcgcatgctcagagcgccagcagggctgttctgcccctacagaggcctcctagtcctggctga

SEQ ID NO: 413698 - DNA, 122 bp, Homo sapiens
tcaataattcaggagcctctcctccttcaagggcccctggcttcctgcggcataaggcaccgggctgacagcaagcagcagaggcgtcccttatcacaaagagcagccgcaaaaacaacttg

SEQ ID NO: 413699 - DNA, 122 bp, Homo sapiens
gggagaggtggtccagtctgactgtagattcagaatcacatcctgggcctaggggagggacggtggtgctccagggccctgcaggcatatcaatgaatggaaaatggattagtttattaatg

SEQ ID NO: 413700 - DNA, 122 bp, Homo sapiens
ccagatgcagtcatttttgcacccagctcatgggtccaacctttcaccatatgtgcttcacgtagccagctagctatttatgtctgcagaagcattaggaagtagttgcaggaatcagacac

SEQ ID NO: 413701 - DNA, 122 bp, Homo sapiens
cacttacaaacctagccctacctcaagaatgtcttctagaacatatgcttccatttcagccgctgtctccaccatgttttatcaaactgccatgtttcttactgcactatgattagatcatt

SEQ ID NO: 413702 - DNA, 122 bp, Homo sapiens
gctgtcttgggagtaacgtcctacgccatcccccggagatgatattcggatcaatatcaccgggtgggtgtacacctactgcgatattgaacgtaatatcatgctctctccctccctggaca

SEQ ID NO: 413703 - DNA, 122 bp, Homo sapiens
aacagttagtgctgccattacagctattttggaaatatccacattcaaaaactcagcacacgggataaatggttccacacctgatataagcgattccacatggtttctctgaagtcatatta

SEQ ID NO: 413704 - DNA, 122 bp, Homo sapiens
tggcagtggcccgctccaggcgagaggtgacaggtaggcagccggtctctggcctccgcccggctgtacacaaactgcctgcctgtgtgcttgttttcctgaccaggactgacacagaaagc

SEQ ID NO: 413705 - DNA, 122 bp, Homo sapiens
cccgccccggacctgccacgcccctctcctctcgcgcctgcctcgcccatgcccagctcccgggccccgcccttcgctgcccggaccctcagtgaccccatccctgggcggggcccgtgggt

SEQ ID NO: 413706 - DNA, 122 bp, Homo sapiens
tgcctgctcccggagggagacgcgctgccgaggagaacccagcgggtaatgaatcccccgcgcttctttgcccaggccttccccaaacctccccccggtctgcgcgggttctcctattgggc

SEQ ID NO: 413707 - DNA, 122 bp, Homo sapiens
agagcgggtcgtcctggggaagaagggcttcctctaccggcgcaccagctctcgctctgccgcagacacagcttcatgagcacggagccgctgtcagctgaagccagtctgagctcggactc

SEQ ID NO: 413708 - DNA, 122 bp, Homo sapiens
atggagataatgcggctttgggaagcggccatgattctcctgtcagggaccagtgagctacgcaaaagctccctgtcttgtctggaaggacgaactgcatccttgctgctggggagaaggca

SEQ ID NO: 413709 - DNA, 122 bp, Homo sapiens
aacagatagttcttaaacgttacaaaaattcacagtcccagctcccgatgaggaattttacgaaggagagacatttctgtttcgtacaagactcttactaggcgccgaaaggatgcagagat

SEQ ID NO: 413710 - DNA, 122 bp, Homo sapiens
ctgggtccccttctttctctaattcttgccttcccttcacagcgagtctactcaggacagcgccgtggcagacacgcacgtggccaggccccaggggagctgttcacactcttgtccacgtt

SEQ ID NO: 413711 - DNA, 122 bp, Homo sapiens
tggcgggaagccaaggtgaggctgttttgatgaaacccatgaaaagctttggcttggaggcgccggtaataatgcactggctagactctcctgattgggcgattgattggcctgatttgatt

SEQ ID NO: 413712 - DNA, 122 bp, Homo sapiens
ccaccaagcactgctgcattcatctcccggatgggacatcctgcgtggtggctgtcaaggcgggcttctccatcaaagacatcctgtccggactctgtgagcggcatggcatcaacggggcg

SEQ ID NO: 413713 - DNA, 122 bp, Homo sapiens
caactatttctggaaaggggcaaaatgaacacaataaatattgttaaatatgcaaagggccgtgctatggacaaaggtagcaagctgtgcagataaagtgggagtgtttacgagaaggtaaa

SEQ ID NO: 413714 - DNA, 122 bp, Homo sapiens
cgtaggtgcagattcctcatctacaggcgctagtggactggagacggctggcggctgtcccgggacggggaagagagctttggtgcctgagggaagatggcttagggcccggtcccttaagg

SEQ ID NO: 413715 - DNA, 122 bp, Homo sapiens
taggaacatgtctgtgcaactgaactgcgcttcctcttaagtatggcattgtgcaatcctcgtttactttggattatgtgataaggactcagctcctaatcattttaatctcacatttttat

SEQ ID NO: 413716 - DNA, 122 bp, Homo sapiens
ggaataataatatttgtccatgtgaaaatatgtgtgagtcctttctgccacaccatctggcgtataactattcataatccaaacagtagcagctgctgcagagcacgaggatgagttttctt

SEQ ID NO: 413717 - DNA, 122 bp, Homo sapiens
tgttttctttgctctaagcatagctggaatggccgccttacagcccacatctgctgtctccgcactggcgcctcagggcttaggttggttggttgtcctgttctttgagattgggtcacgtt

SEQ ID NO: 413718 - DNA, 122 bp, Homo sapiens
ggtgtcgggtttccagagaagccaatcagtgtcgtcgcggtcgctgttctaaagcccgcacgcacccaccgggactcagattctccccagacgccgaggatggccgtcatggcgccccgaac

SEQ ID NO: 413719 - DNA, 122 bp, Homo sapiens
cacatttgccaattctagggtagttgttacaaaacatatggtgaaaaatctgggctgtgacgcggaaaggtgaccccttggacgctcacatgggcaggtggtcttgtctggtttgagctcag

SEQ ID NO: 413720 - DNA, 122 bp, Homo sapiens
aatactgtaagttgtgctcctctaaaaggctggagttctgtgagctgtcaaatatattgtcgtcttcttcatcaatcccaaatttatggaagcactatattctctccctgaaggctgatgat

SEQ ID NO: 413721 - DNA, 122 bp, Homo sapiens
cggtccagggctgctggtttctccgctggtctgggaggccctagcatggacgtcgtgaggcggagaaaaccttgggatgggtggaaaagaaggattggagggagggcggcagaaagggagag

SEQ ID NO: 413722 - DNA, 122 bp, Homo sapiens
tggttgtctactcagcctctgtccccacacccctttcctcctttaaaacccaaccctctccgcctcctccacagtaaggccctgtgcctcaccaaccagttagcgaagcctcattctctcta

SEQ ID NO: 413723 - DNA, 122 bp, Homo sapiens
cctggggagtcctcggagcgggcagccggacgtcgctccatccttcccgcctgacggatgcgtctgctgcgcaggcacaagctgtcgggccaggccctgccaaggcagaacagtggcgcttc

SEQ ID NO: 413724 - DNA, 122 bp, Homo sapiens
gtgtcgcgcaaaaggagataacaggccgatactaactagactaactcgacttccggacagcgtcggaaacggcgagccaacgagaggaagtcccgccctcacggcggggacgaagctagacg

SEQ ID NO: 413725 - DNA, 122 bp, Homo sapiens
ggcccagagaggtcggcacactggcctgaggtcacacagcaagtctgtagggctgggagccgagggaagggcaaaggggtcccccggatccagccagggcagagagggggatttcaggttta

SEQ ID NO: 413726 - DNA, 122 bp, Homo sapiens
gaagtaaggaggttggcgatggcgggtgaaggtgaggagagggtggatgggacagggctgcgatgggagccttactcgtttggagtcgaatcctgtgctgataagaagtggctaggggctgt

SEQ ID NO: 413727 - DNA, 122 bp, Homo sapiens
cagcccaggacgccagcctgaatcttctcgggaaactcctttctgttctcttacagtctacgctataggagacaaaacgccagccgagaaaagctcgctgagtttggagctgaggctactgc

SEQ ID NO: 413728 - DNA, 122 bp, Homo sapiens
cttctctgaaatttggtgtttttacctcttcagtagacataataccatgaaaagtgtaaacgaaagaagatagcttttccatgaggacagggcttccccactggccctctcaaatgatgatt

SEQ ID NO: 413729 - DNA, 122 bp, Homo sapiens
ggaaggtttgccgcttagtggggctccggcggtgggatgggtctctgccgtgagctttcgcgagccgctcttggcagcctggaatgcgaggctagctcacgcttctcttacacctctcttgc

SEQ ID NO: 413730 - DNA, 122 bp, Homo sapiens
gccaaacccgccagccctgggttccgaagccgcccctggctctccattccctcgcgggcgcgccccgggcccccagtggcggccagctcccaccggtcgctcctgcactgccctgccctgcc

SEQ ID NO: 413731 - DNA, 122 bp, Homo sapiens
ccgtcggggatgctcacagttggacagtttggtcccgaggcatgctgggataccgcgggccggtctccatagtaactggccgacattcgcgcaggccttcggcctgcagggaaggccctgat

SEQ ID NO: 413732 - DNA, 122 bp, Homo sapiens
ttcacattgggtaatgaatgacctttctgtttccgtggccagggccaaacaggcctctgtcgaggcgggtgcaggctgggggccatttatcatgcctcacttagcccgatcactgccttaaa

SEQ ID NO: 413733 - DNA, 122 bp, Homo sapiens
acagggactgtgcgctagtgccagcctccgctgagagcgccaagacattacagcaagcgacggtaggagagcttgtaacgtgaagcaccaccacacctctgtacttcaaacttaaccacaga

SEQ ID NO: 413734 - DNA, 122 bp, Homo sapiens
gaaatatcggcataaaatgtaagcttccagagggatacaaacgcagcccagcgcggacaccgccagccccagccacgcggttcgcatcaagcgcactcccctgggggcggggcctgcgcgag

SEQ ID NO: 413735 - DNA, 122 bp, Homo sapiens
ccgcctgctttttctggatttcaggacccagcaattacaaagccggcctctgggcctgcacgtagagcatgctttaatagtaaaagcatctagtgggtctcttccaacttcgagcattctgg

SEQ ID NO: 413736 - DNA, 122 bp, Homo sapiens
gctcgtgtggccccttgggtgtgagcaagcctggctggcctctgtcccgcaggctgaacacgacggtggcgcccctgttctttgcggaccagttccttcagctgtccacctcgctgccctcg

SEQ ID NO: 413737 - DNA, 122 bp, Homo sapiens
ccgccagctcgaccccggtgtggtgcgcaggcgcagtctgcgcagggactggcgggactgcgcggcggcaacagcagacatgtcgggggtccggggcctgtcgcggctgctgagcgctcggc

SEQ ID NO: 413738 - DNA, 122 bp, Homo sapiens
caagccccagaaggcaatgcgccagcagtgatgggagtgggcgcggaggcgcgggctccccgactacgcctgcgcagcggggctgagttggagaacgtcttagactacaagttccgggaatc

SEQ ID NO: 413739 - DNA, 122 bp, Homo sapiens
ctacaaccaggtggcagcctgtacagtgatcttcctttccctgaaaatccacaggggcaacgagcccaactagcaacattcaatatctgggcttcaccttgacccagaaaatgcaaatcaaa

SEQ ID NO: 413740 - DNA, 122 bp, Homo sapiens
gaagaactgagaagattgtaaactttcacctcttgctaatataaaggcccagtacaagcccggataactgtggaagaagtgcccctgcagagagctaatctacatagactggaagaggtttg

SEQ ID NO: 413741 - DNA, 122 bp, Homo sapiens
ttgagaaatactggcagagataaaaatactactccacctcccactttggatatgaagatacgcagcctaaagagatgaatgaagtgacttgtgctctgccactcactcaggtcctggcagag

SEQ ID NO: 413742 - DNA, 122 bp, Homo sapiens
ttactgagttctgactacacatctcattttatgtcattcagttttcccaggagttctattcggtagatactaaaatagggtccatttaacatatggcaacctgaagcttagaaaggataagt

SEQ ID NO: 413743 - DNA, 122 bp, Homo sapiens
aaaagaaacatgtatatgtaaaaatataaaaaaatgtagtatatataaaacagctgaatgcggtcagggaaagagtaagatctcttccaatactactgacagttctcagtgactgtgggaac

SEQ ID NO: 413744 - DNA, 122 bp, Homo sapiens
gagggtcacatgcccctgccacggagggagacactgaggtcaggggggctgtgtgtggcccgtggacgcctcatacttggggacctccacggtggccaagcatatgctcagtgtgtgaagag

SEQ ID NO: 413745 - DNA, 122 bp, Homo sapiens
tgagttctagattgagtgcacagaagtctaacctgaatcaccaaaatagtcctagcccttcgatcaattcccagatttgagtcaatttacagacccagaaccctatgaataaagaaggactc

SEQ ID NO: 413746 - DNA, 122 bp, Homo sapiens
aaagcgtatcaaattcacgggtttggagacaaagagaaagatgctgctcttatcgacttacgaaaagctccagcagcaacgtggaaacccaattcctgtgatggagacaaacgcttcctcaa

SEQ ID NO: 413747 - DNA, 122 bp, Homo sapiens
ctctgcgcatgtgcgctcttcgcaagctgaaaatcttgcggggagctctttagcaagttccgccttccagcctgaagcgcatgcgcagcctcggttccgttgcgtagcgtgtccctcagtgg

SEQ ID NO: 413748 - DNA, 122 bp, Homo sapiens
gcggccgcagctactgtcctttcatgcatgaggcactggatgtcactcaaaatgggacctcgaccacagtgactttgctggggtcattattaatggtgtgccagcggcctgatgacaacctg

SEQ ID NO: 413749 - DNA, 122 bp, Homo sapiens
gcttcgtttcattggctgccgctcgcgtgatgtcatcacgtcggacgctgtcacggctcgcggcagcttggcgccaagaagctcagcctggctgcgcaggggaagctctttgcttgctcgtc

SEQ ID NO: 413750 - DNA, 122 bp, Homo sapiens
ccgcctgggggctgcagacatgcttgctgcctgccctggcgaaggattggcaggcttgcccgtcacaggacccccgctggctgactcaggggcgcaggcctcttgcgggggagctggcctcc

SEQ ID NO: 413751 - DNA, 122 bp, Homo sapiens
gtctcatactccagcaccgcgaagcccttcagctgcccatcctggccgcacgccagctgccggaggaaggcaggcagtcatgagcatctgggcagcagtgactgcaccaccccgggaagtga

SEQ ID NO: 413752 - DNA, 122 bp, Homo sapiens
acagagtctctgtaagaataaatttcttctctcttatggaggccagaagtccaaaatcagcgtgtttcctgggccgcatttcttctgaagactttaggggaaatttttttcttggatcttcc

SEQ ID NO: 413753 - DNA, 122 bp, Homo sapiens
cccaccaacccccattccccctgcacaacactgccaagcccaggctgctcgaaaaggagccggcttcagccaccgatgttcacgcccagagatgtccaaaacggaacctccgtgtccaagga

SEQ ID NO: 413754 - DNA, 122 bp, Homo sapiens
atgctgtggaaagcacttcccttggaactgcttgaatggaaagttggccatgatatctatcggcaattagtacaagtccagtttctttttgccctgtctaaacaaagccatgggctctatat

SEQ ID NO: 413755 - DNA, 122 bp, Homo sapiens
cgacccccttctcctcccacctcgttttgtaaggaagtaatttcggggccgagcgctctgcgccccccgccgcgggtcggcgccgccgcgggtcgggagcgtgtccgggcaggtcgcgctca

SEQ ID NO: 413756 - DNA, 122 bp, Homo sapiens
agaaattacagtgacatgtgcctcataccatcagcagggggcaccagatagtttccagggcgtagcaagggagggaaatgtcaaaagatgatttctttctctctcccctaaaataaaaggac

SEQ ID NO: 413757 - DNA, 122 bp, Homo sapiens
ctcgccctgaataaataagggatgctcgctgtacagacgcagctccgtgacagttctcagcggcctccactatcggactgccgccttgagcccctgccccagcaagctgccggagccgccga

SEQ ID NO: 413758 - DNA, 122 bp, Homo sapiens
ctgaaaggtggaagacaatgtccgggaaagagaagtctaaatttgatgaaatggcaaagacggataaagtgcactgtgatcgggaaatgaagggaccagctaagggaggcaagaagaagaag

SEQ ID NO: 413759 - DNA, 122 bp, Homo sapiens
ttcacttcgtatttttagttcccaaaccttgacatccaagctcccgctctgtggcttccgcggcagcctggcaagcttcctgtgaagtcgcccgctgctgagcttccgcacccttcctcccg

SEQ ID NO: 413760 - DNA, 122 bp, Homo sapiens
gttagggcggcaaccaaacagaaacctgccccgcctctgggagagaaggcggatccctaacgccagctatctccaagagcaacattgccgcagcacttccgggacgtcgtgctgcaaaggac

SEQ ID NO: 413761 - DNA, 122 bp, Homo sapiens
atggcctgttggccgcacggggacgacagtcaagagagaaccgtgaccttgtttgcattgcgttgctgatacacacgagtctttgaaacaggccatccatgagcctcacaacctcctggcat

SEQ ID NO: 413762 - DNA, 122 bp, Homo sapiens
agtccggaacccgggaatctgagcccggagggcgtgggtagggggcgttgcaccagtgcccggcagacatgcctttgggcgggattttggctaaaagataggagacaggtgcgccgggggtg

SEQ ID NO: 413763 - DNA, 122 bp, Homo sapiens
attttaaggagacaatcttgcttgcaaagagcactcgcgtgccagctgccgtggtgggtacgccgtgtgcagctccgcagagcagctggtgcgtggtccctggggcaagtcggccggcggaa

SEQ ID NO: 413764 - DNA, 122 bp, Homo sapiens
caccctctgtcccccgcccccagccctgccatcaccctgcgactcggacccctgcttcaacggaggctcctgcgatgcccatgacgactcctacacctgcgagtgcccgcgcgggttccacg

SEQ ID NO: 413765 - DNA, 122 bp, Homo sapiens
cagggcagactccaagcctggaaagcaggcacataggcaatgagtggttcactgatattacgtcacagcatatgataaaatgatagtataagtatcctcagagcctgtggcctccgtgcaag

SEQ ID NO: 413766 - DNA, 122 bp, Homo sapiens
caggatcaggcggattctctgaccctgaaggatgcagaagtggcggctccgagcgaaaggcgctgactgcagccagggcgggcgttcagcagcgggatgctttggcctccagggacctagaa

SEQ ID NO: 413767 - DNA, 122 bp, Homo sapiens
gagaacttaggcctcttgatgcaggagtgaaagtcctgtgagcataaagtcaatagatagcgaatgtataagtcatgctggagctctgcctttcatggtcccttgatttttcttggtctcac

SEQ ID NO: 413768 - DNA, 122 bp, Homo sapiens
aaagggctcggtgagggaggcatcataggtgttgaagcctcaacgttgtctgtgcaggcacggccaggctggtggcacctctgccaggagggcagggggtgggggtggggccgcgggctgag

SEQ ID NO: 413769 - DNA, 122 bp, Homo sapiens
atgaactacctgcacggcatttttaatacattgatctttgcaatgtaaaatcttccctctcgcatcatcatccagaaggcttgagagaggcacacacagacatacaccttaaagggcgcttc

SEQ ID NO: 413770 - DNA, 122 bp, Homo sapiens
tgccggctgcgtcttctccctcgctgaaagtctgaagggagccggcttacgtttctgctccgcttgcctagtgagtcttgagctggcttgaggtgtgttggacctggtggttgctaaaagca

SEQ ID NO: 413771 - DNA, 122 bp, Homo sapiens
gtgagagcctgagaggtgctgctcgtccgggcgatggaggtcagcaaaaacagtgatgaacgcgtgagcacgtggcctctgctatgtgaggagaatggccccttttctatgtgctgttccta

SEQ ID NO: 413772 - DNA, 122 bp, Homo sapiens
agtgccattccatggtgctcaatgacgtggttgactacgctacgcttattcagtagacaccgtgacctgcttcttctcagcgtcaaatgcagcctagaagaagcgccctcaggcaacttcgt

SEQ ID NO: 413773 - DNA, 122 bp, Homo sapiens
ccttctctgggtgcggggtgggaggagcagcccctgccaggccccccagcgacccttgcccgcctcagctctgcactgacactggggtcaggtcttcgttttggaatcccgggccgggtact

SEQ ID NO: 413774 - DNA, 122 bp, Homo sapiens
ccttctctggcctctcccagctgaacaccggccctctgaccatactgtagcagccccaagcgcacccgatcctcctccgctgcccggactatgggttggcttcccgccctaggagcacacgg

SEQ ID NO: 413775 - DNA, 122 bp, Homo sapiens
gacgcgcgcgcagggtgcacgcgaggggaaggagactgggcgcggataacgcgtgcctggcgcttgcagggcaccatgcccctccatgccaggataaggccccccaccctcagaggcctgag

SEQ ID NO: 413776 - DNA, 122 bp, Homo sapiens
ctgacgcgggtttgggtgatacccctcacagcccctgtcattccggagtcataaggcacccgcgcgtctagccccagcgccagggcacgcgagcggcgctggagggaggaaagcttccgcct

SEQ ID NO: 413777 - DNA, 122 bp, Homo sapiens
agcctgtggtcccagtaatttgggaggctaaggcgggagaatcgcttgagcccgggaggtcgaggctgcagtgatccgtgactgctccattgcgtccagcctgggcgacagagcgaggcgct

SEQ ID NO: 413778 - DNA, 122 bp, Homo sapiens
ttcatcagcttaagtcctaggtagcatgtctcaatgcatacatatttatatgttattaaccgtgtttcttttctttttttcgagacagagtgtccaggctggaggtgatctcggcttaccgc

SEQ ID NO: 413779 - DNA, 122 bp, Homo sapiens
ccgcctcggcctcccaaagtgctgggattacaggcgtgagccaccgcgcctggccagttgcggatttataaaagcagtcgcttagtaacttgcagcggctacatcaactttggaccaattcg

SEQ ID NO: 413780 - DNA, 122 bp, Homo sapiens
cagggaacctcggaatcagaacgctgagcccgccaggacccctcccctgcccactcggcccgctcttcccgaggttccagttaactctgggcttccgcctgggaacctgcagaaacaggaga

SEQ ID NO: 413781 - DNA, 122 bp, Homo sapiens
accctctagagggaagcactttctgttgtctgaaagaaaccaaagcgcttccctttggagcgttacggtttgagaaactcaatgttgaagttgatgctgacttcagtaatacatttgtagag

SEQ ID NO: 413782 - DNA, 122 bp, Homo sapiens
gccgaggcaggaaggcttcacccaggccgggtggcgtcccgctctgccctcggccggctccgtgcctgggccgtgtttgtgcatgcgttctctaccatacagatttcattttgcaccttttc

SEQ ID NO: 413783 - DNA, 122 bp, Homo sapiens
ttctctggggctgagggtgcatgcactctggagtcgtttctgcccagaaggtgctcaacacggggagaccttcagctgatttcagcagagattcctgggcagattgaacctagaaccagcaa

SEQ ID NO: 413784 - DNA, 122 bp, Homo sapiens
acagagagcaggagggacaggcgccagggcagagagcaaactccctaggaccccaccttccgcagagctccgcctcggttcccctctctcccgggaagaggaccagcttgcgcatgcgcttg

SEQ ID NO: 413785 - DNA, 122 bp, Homo sapiens
gcatgcccgatccccaggccccctccagaagcacaagttcatattcaccgagattgccaccgcaccagtcaagccctgaatcacgcgtgtgactcacttgtcagccgatttctctgcagaaa

SEQ ID NO: 413786 - DNA, 122 bp, Homo sapiens
ctgttctttccttagtagagctgccacccacaatttgaaatgacatatgtgctccgcctacgcattcagggcagtttcatgggagatgtgcgtaattcctttaacctgacaacatgacctag

SEQ ID NO: 413787 - DNA, 122 bp, Homo sapiens
gccaccagaggcggggcgtaagcgctaaagcaacaagacaatagaagcctacatcttgcccgagataattagcttacatgctgatgacaaggtaaacacctttaagtttcacttgtcaggat

SEQ ID NO: 413788 - DNA, 122 bp, Homo sapiens
gaatggtgacgtttgacaagagaaacacagcacaatgatgttgtaagtgaatgcttttgtcggatgattgatgcctaggaattatgagataaacaagatagagtcaaattgttttttaaaag

SEQ ID NO: 413789 - DNA, 122 bp, Homo sapiens
gtacagcccgcccaggggtgggagccgagctagccccacctcccggtggcttctcgcgatcgtggagacgcagcgagcctatgtaacttccggtcgcgacccatcagctcctcggcgattgg

SEQ ID NO: 413790 - DNA, 122 bp, Homo sapiens
gacctgagctggggggctctgcactaaacaaaccctaaacatgcggggtttctatggtaacggtcttccctggcctacccgggagactcctctagggctgtgtcgaggagggcagcccccag

SEQ ID NO: 413791 - DNA, 122 bp, Homo sapiens
ccacatcctccaccaccagtgtcccatgctttgtgagcggggcgtaggccccgagggccacgtgtgtagagacagctgccacgcgggcaggctgcaggcctggcaccccagccaccagcacg

SEQ ID NO: 413792 - DNA, 122 bp, Homo sapiens
gggagcagggggaggcgctcgtaggggaggctcctgaggtgcaggagcccatggcgggggcggggaggctcaggcatggcgggctgcaggtcctgagccgtgccctgccctgccaagaggca

SEQ ID NO: 413793 - DNA, 122 bp, Homo sapiens
ctgaacccttctccactgggccgtgattctcggcagcgagcctccaactgcggcaaccctcggtaagacaggcatcttccgtggggacccagccaacacctacagacatccatacatatcaa

SEQ ID NO: 413794 - DNA, 122 bp, Homo sapiens
ggaaatctctcagccagggactcacccctttctcccaaatctcctgagctccttagttggcgtttctttaaagatacttaagtttgccctgttcagaatttttctgggtttgtagcttgtca

SEQ ID NO: 413795 - DNA, 122 bp, Homo sapiens
gggatgcgggggaggtgacggcagctggtgaccgcggctggccgagggcgggtacactgacgtgtggagggtgagcccgactaggggaagaaggtggggggacgcgggcggacagaagccgc

SEQ ID NO: 413796 - DNA, 122 bp, Homo sapiens
agtagctgcgcaggccacagagggcaggtcacactggttgctctttttcttggggaagcacggctatgtggacttcaggcaggtccctcagctgggacttggctcctgtgaggactacatga

SEQ ID NO: 413797 - DNA, 122 bp, Homo sapiens
caccgagtgagatgactaattacaccttgtcaatcaccggctatgaagacataaaaccagcgcgcacaatgaagtagttgcctgcagcgtcaattagttggcgattctgaggttattgcgtg

SEQ ID NO: 413798 - DNA, 122 bp, Homo sapiens
gagccacccgcctcggcctcgcaaagttctgggattacaggcgtgagccactgcgcccggcgtaggccagtttctatactgtggaacattaagtggacttgtctgcttttccaaactttggc

SEQ ID NO: 413799 - DNA, 122 bp, Homo sapiens
gggtggctgaaggtcctggatgggaggtcctgcccagtgaggaggaatggatcagggtcccgcttaaagaagcagtctggccacaatttggtaaaccagctgtggtatgctgggagatccct

SEQ ID NO: 413800 - DNA, 122 bp, Homo sapiens
tgcattgagccttccctgagcggctgccccaattagcctgagcagtgacatgcaaatccccgagatgttttgcattttttctggcatggtccttaccacagcctgctctgtgttgtctttgt

SEQ ID NO: 413801 - DNA, 122 bp, Homo sapiens
gacaagccctggcaggccgagggcacctgctcctctgtctgccctcctggaaccacgcgtcgggtcacaggccgctgggcagaggtctccgtgggcccccagccaccctaccctgtccgacc

SEQ ID NO: 413802 - DNA, 122 bp, Homo sapiens
tgacacctctgttttatcaacataaaacctctttggtcctccaaaggatgatgttctgttcgaatcctggtatatctgactccattgaatgaatgattttatgcctcaaaagtatcctgtat

SEQ ID NO: 413803 - DNA, 122 bp, Homo sapiens
cagaggggcaaaggaacctggcagagcgagcttgggatgccgcggcccctttaagagcggcggcggcggcgcgcgctccgacggctacccccgggccccgcccctttcccgtgagccctcgg

SEQ ID NO: 413804 - DNA, 122 bp, Homo sapiens
aagcagtctgggaagaatgactctctctttagctaatttttcccctttcaatttccattgcgttagttcaggcctgtatcttttttgtgggccactggaatcataataatgatcacttttga

SEQ ID NO: 413805 - DNA, 122 bp, Homo sapiens
acctggctggtgtgattagcacccatttgcagcaacatgtggacacaatccagcctgtctcgggcctgtgtgctcagcacccggggacagaggtcggaagggcgcatagcaacgttaagggc

SEQ ID NO: 413806 - DNA, 122 bp, Homo sapiens
ttcaccttctctctctacacataggtgcatacaacgcatgtgcacaaatgtgcacacacacggaacactagcacccctcccaactcccccacccaatcacccatgctcactcacctggtaga

SEQ ID NO: 413807 - DNA, 122 bp, Homo sapiens
cctgctctgggagaggagcacgcctcccttgagctgcaggcgggtccggctctgacgaaacgctgcgagaatgccagacagtgtagcctccaccgtttgctcggggtctctgctgccatcag

SEQ ID NO: 413808 - DNA, 122 bp, Homo sapiens
gccgggtccaaacgcgagaggcgggcgggctccgcgcagcccggcccttcccggacccgccgggcccacccaggctctccgggacgcctgcgcatccacctgcctacctggcctggcggcgg

SEQ ID NO: 413809 - DNA, 122 bp, Homo sapiens
tcacatgcattctctgctccagagagcttgctccgcacggccagcagccctgatagcctccgctcacgggcacccatgattacgcctgaccaggagacaggcaccaaattgtggcacctggt

SEQ ID NO: 413810 - DNA, 122 bp, Homo sapiens
agagggcactgaagggcacagatgagaataatgacagcacacagcacgaccgtcaggaaccgacgcagcaccactgggtcagaagttgtggaagaagccatgggtaacagaagccccccatg

SEQ ID NO: 413811 - DNA, 122 bp, Homo sapiens
gtcactgcaggcaagccttggtgctcttgcctgcgacgtggaaatgatgcctgcctgcagcgctgtatagtgcagagcgggcgaggggcatagggaagtcactggcacgtggtatgtgttgg

SEQ ID NO: 413812 - DNA, 122 bp, Homo sapiens
aggacactgggggcagtgaggacgctgtggacagtgagggcgctgtgggggcggtgaggacgctgtaggggcggtgaggacgctgtgggggcggtgaaggcgctgtggggatggtgaggacg

SEQ ID NO: 413813 - DNA, 122 bp, Homo sapiens
aggaaggagtctgcctcttctgtccccaggctcactcagcctggcggccatggggcctgccgtgcctgccccactgtgacccacaggcctgggtggtgtacctcctggacttctccccaggc

SEQ ID NO: 413814 - DNA, 122 bp, Homo sapiens
tgggtggccaaaattcagtccagaggatcgaagcggctgctttaacagaagttggggctgcgtaacaacagctccaagcaaagcttcaggctgatcggaaagatgaggaagcagaaaagaga

SEQ ID NO: 413815 - DNA, 122 bp, Homo sapiens
acaacccaagcctctggccttcaagccatctgtacacagttcctcctgcggtccccaggacgcttggtatattcaactgtcaatttatttactcatctatttatagaaaccacctttcccaa

SEQ ID NO: 413816 - DNA, 122 bp, Homo sapiens
accggcggtagcctgggaggcggggtacggctccgctggttggtggcgctctgcggtcatcgcgccccggcgatcgtagaaacccttttctgaggggcggcgcgcagaatgtggatggggta

SEQ ID NO: 413817 - DNA, 122 bp, Homo sapiens
cgctggggtccatctggccgtacatgcccaccaggaaggcccggtggagcagcacagccgcgtgctctgtgggggaaacggggccctgcacgtcacgctggccacaacatcctggccgcagt

SEQ ID NO: 413818 - DNA, 122 bp, Homo sapiens
gctttgggtttgtcaaatccccagcagcaaacgtaacctcgggccctggagtggcaaagccgtggactagaggtggagggagtgggttctcagctctcaagaggtcactgggaaggcctttc

SEQ ID NO: 413819 - DNA, 122 bp, Homo sapiens
gtcaacaacgccggaaagtactactggaaaagcttccccaggctccgcgaagaaaagttccgaagcccggaagaacgcaagccagacgtggaggcggtgctacgagcttgcctccgccccct

SEQ ID NO: 413820 - DNA, 122 bp, Homo sapiens
cgaggcatagatgcgattctctaaccgttcaggctcgtgcttataggattccaggggaaacgtgtgctgcttggtcacttgggtgggtgttgacggagaggaggagaggccggaggctgcag

SEQ ID NO: 413821 - DNA, 122 bp, Homo sapiens
cgaaacactcaggtcacctgaagtgagaacaaatcaaaacgggccaggggagggagtccacgaagttctccaagtgagaactggagagtacgtctcagtttcgtaaatgacacaggagctgg

SEQ ID NO: 413822 - DNA, 122 bp, Homo sapiens
acaagcttaggaatcttgttttctgaattcgaatcgcaggttgccagttacacctgtatgcgactcaacaagtactttaacctgtctcttagctgttatactacaaacctcaggcttgttaa

SEQ ID NO: 413823 - DNA, 122 bp, Homo sapiens
ctcatcctagcgctgcagcccacccgcgtgggggcggaatccgcccggcacacacgtgtgcggattattaagcagccgagctagggccgccgcggtctccacgcagcaacctctgctaattg

SEQ ID NO: 413824 - DNA, 122 bp, Homo sapiens
ggtgagcagaggcggcgatgggctttcttcacccagcattggtctgcccggctccccagacgccaaggccctcagggcaggattgtggtgtgcgcctcaacagcagccctgcagcccccacc

SEQ ID NO: 413825 - DNA, 122 bp, Homo sapiens
atcatcctacctcagctgttgaaacccggtcatttcgcacctgcttcgatgaattctgagcgacttgtgtttttgatgagctgctcacttcataaattcacccctctccagttatcagcact

SEQ ID NO: 413826 - DNA, 122 bp, Homo sapiens
atcagcgccggcttccgtctataggccagatgcactgtcactctggcgaagtcgcagacccgattggccgggacggaggcgcgagaccgggttgcgggcggggccgaacgtggtataaaagg

SEQ ID NO: 413827 - DNA, 122 bp, Homo sapiens
gaccccgagaggggagttgcacacacattgctgaccttgagggtcagacagaccctttctcgtctagtttttagcatcagatgtaacctcagcttgggcttctatgatctcatcgatgtcct

SEQ ID NO: 413828 - DNA, 122 bp, Homo sapiens
ggaccagatgcgggaagaggcgtgggggaccagacgtggggacagcggcggcctggcaggcggggagggctgcccgcaccgcactcgggcgcctcggggaatccgggccggttctcgctgct

SEQ ID NO: 413829 - DNA, 122 bp, Homo sapiens
cctgtgtcacctgacccggggtaactccagccccactactgagatatttcccactcatggcgcaacttcttgcctgcgcaaagcctcgtggtaccccgagcgctctccaagtgctaccaacc

SEQ ID NO: 413830 - DNA, 122 bp, Homo sapiens
agggggaggcctctgggctctgtgccctgcagctcggcaggcattcgaggcggacagaaacggggcttggcgccccccgcgtgcacgtgtgctagcccaggcaggagggagcgcctcggcgg

SEQ ID NO: 413831 - DNA, 122 bp, Homo sapiens
atctgttctatggaaattactaatgagttaacagagcagcacctgacccagggaagagctcggtcaccctgggctacggggcaccggggcggaagtgacagaaggggcggctgtggctaaga

SEQ ID NO: 413832 - DNA, 122 bp, Homo sapiens
gggctggccccacagaacccacaaacctgcagactgggctggccccacagaacccgcaaacgggggctggccccacagaacccgcctttgcagctcagtgctgaatgttctcgtccccggtg

SEQ ID NO: 413833 - DNA, 122 bp, Homo sapiens
gccagcagcactcagaagcacaggcctcaccctgcttctgggtggcacacagtgccctgacgaccaggtcaggtgctgccagggtccctaggccaggtctgatgctaaagagcctccccagc

SEQ ID NO: 413834 - DNA, 122 bp, Homo sapiens
atcgcaggccacagggaaaggcgtttacgtggctatccaaactaaacctcctcccacgcccgaccctgtggtaaaagacaagtgtgcatgctgggcaaggacgaaagcttcatcccctgggc

SEQ ID NO: 413835 - DNA, 122 bp, Homo sapiens
gcagcagggatgtgggcccggattggacggcaagggcctggggtccctctgtgagggctccgtcgcacttcggggatcccgggtgatggggggcccagaagtgggaggcttcagccgctcgc

SEQ ID NO: 413836 - DNA, 122 bp, Homo sapiens
tccccggtgggggagtaggcagggagcctgcgatccggctctttgaagttttcccccaagcggactcgaggcggcgagaaggagcggggggcggttgggtgggtggagagagatatgagggg

SEQ ID NO: 413837 - DNA, 122 bp, Homo sapiens
gatttcgccagcgctggagtcgcccagggtgcggttgtctttgaaccacaggacagtgggcggtgggtaggcctcgaacactacctgcagtgtccggctccgatgcagctcagcaaattgta

SEQ ID NO: 413838 - DNA, 122 bp, Homo sapiens
tccgcctctgatacacttcctaatatccaggggaagagaggatagttttactcccaatatcgcagaggcagtacaccaccccccgccccgtgatattgttcctaatatccaagaagggagag

SEQ ID NO: 413839 - DNA, 122 bp, Homo sapiens
atactttccttttgagcttttgctaaaatctggagacgtggaatccacccgcggaaactccgagcccctccgactgagcatgcgccatcgccaggcggcttttggtcacaggctcccgagtt

SEQ ID NO: 413840 - DNA, 122 bp, Homo sapiens
ggagctcctgaatgtaagcgctcctggactgtggcctgttcaaacaccgaagccgcagagcgggcgtcagagcctgtgggagggacagggagaccatcagtggaggcgactcttcctgtgcc

SEQ ID NO: 413841 - DNA, 122 bp, Homo sapiens
tgtttggtggtggggattggagtttgggagattagctgaatatggtctgccggaagtaaacgcatatgttgatggaggattataccgagataggtaacacttggggaagaaatttgagcttt

SEQ ID NO: 413842 - DNA, 122 bp, Homo sapiens
tgtttgtcacggtcctagaacagaacagcacatgttaaggaatgaagagtgtacccgtgtcggcaatggcaacgcgatcaggagtaacagcctagagttagctgcctccagtaacccgattt

SEQ ID NO: 413843 - DNA, 122 bp, Homo sapiens
tcttctaacacctggcacctggcacatagtagggcctcaaaaaaacactgatgggacaaacgcaatgaatgttggacaacctcctccctcccttgcctgagatatttcagctgccctccccg

SEQ ID NO: 413844 - DNA, 122 bp, Homo sapiens
cgactccacagccacggccaccgctcctcggctcccgtgacaccggcgcgcctgctgcttcgagcaggggaggctttgcactcccatcgcacttttctcgtccgaagatacgaaactccgtc

SEQ ID NO: 413845 - DNA, 122 bp, Homo sapiens
agccgcctcatcgcgcctgggccggcagagccacaccccgcgtctcgcgtcactgagtcgcgtcacggctattggcttgttcctactgtggcgtcattagagcccggcctccggctggggcc

SEQ ID NO: 413846 - DNA, 122 bp, Homo sapiens
ttgtttctctaaagagccagccagtaagtattttaggctttgagggtcttacttggagtccgttgcatattgttgtttttaaaatccttcaaaaatataaaaaccatttttagctgggagac

SEQ ID NO: 413847 - DNA, 122 bp, Homo sapiens
gaatgtttgtcctctacaaatgtctcttctttcaaaaacaaacccatttggggattatggcgatctttgttcctgattaaaatttctctattctgttgctttgtattttacctttcacagta

SEQ ID NO: 413848 - DNA, 122 bp, Homo sapiens
atgtaaatttccagatgtgctggactgtccctagagcagcagcatatacagtaagacctacgattgaatgactaactgggcaagattgagcttttgtgatgttttaattattttacctaata

SEQ ID NO: 413849 - DNA, 122 bp, Homo sapiens
gcagtggaggggacgagggcttgtcgggtgggaaacttaattcaaaatggctgctggaaacgcttgggttttattcgtagcaaatgttgccaatttctccggccagatacgctaaaccgatc

SEQ ID NO: 413850 - DNA, 122 bp, Homo sapiens
atggccttataaggacaaaatgagaagaaaggcaaacccagctctaatgatagttacatgcgaaacaagagatttttacccaaagattaatggggaaaaaaacaagaaagaaaaagcaaaat

SEQ ID NO: 413851 - DNA, 122 bp, Homo sapiens
tttgtaaatacttaactgatggtaaaatgtcatgaacccctacccccgatggatctgaaccgttcacttgacccactttaaactgaccagacttctccaaataagctccatccacccctggt

SEQ ID NO: 413852 - DNA, 122 bp, Homo sapiens
ctctccgcggtgaatgggaaagtgggtgggagtccacgagagggctccacggtgccttgacgtgcgctgtcatatgatacctccgctgcctcgaaatagacactctagtgcacgaattacca

SEQ ID NO: 413853 - DNA, 122 bp, Homo sapiens
gagttccgcgtgggcgccacagaccgcggcttcccggcgctgagcagcgaggcgctggtgcgagtgctggtgctggacgccaacgacaactcgcccttcgtgctgtacccgctgcagaacgg

SEQ ID NO: 413854 - DNA, 122 bp, Homo sapiens
aagcgtaaatcgggcggcgggggctgcagagccttcatctcttcctccgtcccgggatgtcggagagacggcagcccagcctccgccaccgcaaagctgcttaacgggcagcgcgagtccct

SEQ ID NO: 413855 - DNA, 122 bp, Homo sapiens
ccgcgtgggcgtcacacctgactgccctcagccggggctgggctgctccctcctccttcccggagctcttcgagtctgactagctcctcctgggtccttcaggcccccacacagacaccact

SEQ ID NO: 413856 - DNA, 122 bp, Homo sapiens
tcggccgccgcgtccggtccccgcgtccagcctccggcctgacccgctcgccgccgccgccgccctccacggggccccggcccagccaacccagcagccccgcctgccgggggcatgtgagc

SEQ ID NO: 413857 - DNA, 122 bp, Homo sapiens
tttatttattttttttgagacagcatcttgctccattgtccaggatagagtgcagtggcacgatctcggctcattgcaacctccacctcctgggttcaagtgactctcatgcctcagcctcc

SEQ ID NO: 413858 - DNA, 122 bp, Homo sapiens
tggagcttttgcgagggatttataggtcagatagctcagcagtttgagcttgttgcccaccgtaccttaacaaagcttgtgcgtgtttgtacagctggactggtagctgtgggagtcccgag

SEQ ID NO: 413859 - DNA, 122 bp, Homo sapiens
acaagtgagaaatatctaaggggaaaatcctggcatgaagtggagtgcttctttccctttcgatgcctttctgctttggccaaagaatggagaagtcttttgtaagggaagactggtagctt

SEQ ID NO: 413860 - DNA, 122 bp, Homo sapiens
acaatattgcatcaagttgaatactcacagcaattgtatgaactaggtagtatttattaccggccctatttatacctgaggaacagagaagttgaacaacttgtccaagatcacagtttcac

SEQ ID NO: 413861 - DNA, 122 bp, Homo sapiens
ctgggacactgtaaatagaaagcagcgtgacacacccccttcgccccggggtatggggggcggggatccgtggaggggaaggggtcaaggggaaaagaaagtcagaaaaaaggccgtaagag

SEQ ID NO: 413862 - DNA, 122 bp, Homo sapiens
tgcaggtgttgatagaggatgtgaaagtgtggaggcgagtgactaaaccagatacccaaccggccaactctcacttgtggcagggcctggtctaccagaaggctggaagcaggaacctggac

SEQ ID NO: 413863 - DNA, 122 bp, Homo sapiens
cacaaatatttgggggtcacgggttccaaggcctagtccgggaggtacccctgcccccttcgccatccctggaacttgcagaagttgccccacgccccacacttcgctccccttctccagcc

SEQ ID NO: 413864 - DNA, 122 bp, Homo sapiens
tcctaagtggcttagccagtggagtgaatcttacctgaaaatagagactgcaacacaatacggggaaggggtggatcctggggaagtaaccagtgtcctcaaggttccatatgcttttcact

SEQ ID NO: 413865 - DNA, 122 bp, Homo sapiens
ggaggagggaggagaccccccctaaagagctggggtgtggcccgcctccccacatccggtcgccccccctaccatccaggactgagatgactcagcttggctagactgaggctgggacttgt

SEQ ID NO: 413866 - DNA, 122 bp, Homo sapiens
gccgcccaccgtggggtactcctggcatttcgcttccagagtgctggcgcccacaagagccggacgttaattcaggcctttaactttcactctgtacctccccacaaccagacgagggagat

SEQ ID NO: 413867 - DNA, 122 bp, Homo sapiens
gtctacacacacgggaacacggtaaacaccactgccacggtgtctacacacacgggaatgcggtaaacaccactgccacagtgtctacgaatgcagcaggaacatggttctgctacaacatt

SEQ ID NO: 413868 - DNA, 122 bp, Homo sapiens
atggcgcaagagtgccatctgatgctgggcggggaagaggattgcagcgaggtaccaacacgaccacacatgcaaccacagcagtcaagtctttctaaggcattggccacgggcatcctccc

SEQ ID NO: 413869 - DNA, 122 bp, Homo sapiens
aatcaaggcacagtgaacaggagtcatggacactggcatcaactgcttcggttcagctcacgttagtgcctcttgctagctggtgaccttggacaaattacttaacctctctatgcctcagt

SEQ ID NO: 413870 - DNA, 122 bp, Homo sapiens
gctgcagaagccacatcccggtcatacagtctggcctgccagggaaacaggacgacacctcggtagccaaaaatgctatgaaggaaaagctggaaggaaagaggggcctcagtgagtctgca

SEQ ID NO: 413871 - DNA, 122 bp, Homo sapiens
acacgtggacggtacgtgacttgatccatcttaataaaattcacgaccacgaaggaggcccgtggtggcttctctggggaggtgactttgtcagcgaattctgtgggcctgggggccgctta

SEQ ID NO: 413872 - DNA, 122 bp, Homo sapiens
caagatttaggaaaatgtaacgttgcaagggaagcaaggtctctgtgtaaacctcgtaatcgccaccaaaagtcggtagctgggagccttcaaagcccgccaaacacactggaagcatccac

SEQ ID NO: 413873 - DNA, 122 bp, Homo sapiens
tcccctcctcctgaaccacagagtatttctgggtgggcatcgattgtctatgggccatggcgtaagacccccaccccccgaccccccggcaacaaaagtatcttcttgctccctaaaaaaaa

SEQ ID NO: 413874 - DNA, 122 bp, Homo sapiens
ccagcatgtccccagctggatttaaccctagttattggcctagcagccaagagaagaggtcggggttctcctgagaggacacctattaagatacccttattgtgttttccagcggaaaggtc

SEQ ID NO: 413875 - DNA, 122 bp, Homo sapiens
acctccggagacacaagcccacgtatctactttcacttgctcatccttgctctacctcaacgtggggccctgacaccacgttatcaaacatgcagcccccacacccctcgtctgcccgcccc

SEQ ID NO: 413876 - DNA, 122 bp, Homo sapiens
cctttggatatataaaggaagcagttttagtatcagaaaagatttattagaaaattctcacgctgaactggtgtagcatgtggtgcagcattcagtgaaactggctggaggaaataggcttg

SEQ ID NO: 413877 - DNA, 122 bp, Homo sapiens
gggactggggtggccggggcagctgcgctcctagcaggcggggcgtggagtctggaggagcgaccgccccgtcctctcggctccccgggccccgccccggcggacgcgcgcctcgcgcccgg

SEQ ID NO: 413878 - DNA, 122 bp, Homo sapiens
ttgatgcaatgtgcctcacacagagcaaacataataaatcttaattgtatttatcgttgtcgttattactacatgaagcaatagagtatagtggttaggagtagtggcagatgagggaaggg

SEQ ID NO: 413879 - DNA, 122 bp, Homo sapiens
ctgcagattagggtatattctgactcagcaaaataggcaccagcgcctgtaaaaagaaaccgcgctgggcactaagagaattctcaaaaactcccagagccctgggtgtgtgtcctcccaca

SEQ ID NO: 413880 - DNA, 122 bp, Homo sapiens
acacaggggaaaaaaaagaccaaacacggaggtgcccagggtgtggatctgctggtgtcccgggagaaccagctggctgggcagcccttcttccccacaggcagctgctattgcgtagggac

SEQ ID NO: 413881 - DNA, 122 bp, Homo sapiens
cctagagctgtaggcaggggcctgccgtggagtcagagtggacatgctcctctctcggaacggccgggcctgcctggcttcatggaaactcgctgtcctcctgaaatgggcgttcctggcat

SEQ ID NO: 413882 - DNA, 122 bp, Homo sapiens
gaggtctggtgctgtgagcagtaactgagaacagggctcctctgggcacccacctgcctgcggaagggctctggccagcagggctcagcctctgcccatccctaaggctcccaggggagtct

SEQ ID NO: 413883 - DNA, 122 bp, Homo sapiens
gggctatttattcaggaagttagtggacttgtttcccagctaagatctgggagcagtaatcgtcctctcttgtggagggtcaggtgtttgtagggggcgctgctggtggcttagaaaagttt

SEQ ID NO: 413884 - DNA, 122 bp, Homo sapiens
gtacacgcgcgtttccagtgcacatctgcctgggcaggacacggtttcctcttgctggcccgggaggagttaactttgcgccggccgtcagggcattaccgctaacgtctgcaggagcttta

SEQ ID NO: 413885 - DNA, 122 bp, Homo sapiens
acccaacaggagggaggtcaggccagtaggaagccagcctgtctctctcccttcagatgacgccacagggcatcctgggtggttctcaggtggagttagaacagcagagtggcttctggaga

SEQ ID NO: 413886 - DNA, 122 bp, Homo sapiens
catgcggctactggacttctcctacgagcagtaccagaaggccctgcggcagtcggcgggcgccgtggtcatcatcctgcccagggccatggccgccgtgccccaggacgtcgtccgggtga

SEQ ID NO: 413887 - DNA, 122 bp, Homo sapiens
ctttagtcacagctcagcacttatcgaacaccaccggacgcacacaggagagagaccttacgaatgtcacgaatgcttaaaaggcttccggaacagctcggcacttaccaaacaccagagaa

SEQ ID NO: 413888 - DNA, 122 bp, Homo sapiens
gtagctgggactacaggcacacaccatcatgcccggctaatttttgaattttagtagagacgaggtttcaccatgttgcccaagctggtcacaagcccctgagctcaggtgatccgcccgcc

SEQ ID NO: 413889 - DNA, 122 bp, Homo sapiens
gatcctcaccagagtccgggttaggtgaagggtaaatggggactaggatcagcaatgatccggtcactttaaaattaagggaagaaaaatgactctgagtagatcaaaactaaaatgtgacc

SEQ ID NO: 413890 - DNA, 122 bp, Homo sapiens
gaagacctctgtggtcacagatgcggaccaggccgggacatgctggaaggtgtcaggacacgcccggcctgcacctctgtctcccagagcatcccaggtctcagggcatcaaacgctccgag

SEQ ID NO: 413891 - DNA, 122 bp, Homo sapiens
cacttccgcggaggtcctgcctctccctgcggacgggcgctgattggcccgtttgaaatgcgccaggcgggagctcacctgggctcttagcgtcgccgccggcttcgcagagcaccgcgcct

SEQ ID NO: 413892 - DNA, 122 bp, Homo sapiens
agaaactacgacccctgagagccggaaggaacttaattctcctcaggaaacgttacctaacgatcacatactgttctcagtcagctgctggggacatttctgtctttcaagttttttgggca

SEQ ID NO: 413893 - DNA, 122 bp, Homo sapiens
tggaaaaggccttgaagataagctagggaagcttcttgttaatagatatagaaacaggctcggaaaggcaaactaaccccaggttacagagccagttagggataaaacctgaacttcagttc

SEQ ID NO: 413894 - DNA, 122 bp, Homo sapiens
tcacatttgtaaggtttctctccactatgaatcctcctatgtctttcaaggtgtgatttgcgactgaaaactttgtcacactcttcacatttgtaaggtttctctccagtatgaagtctatg

SEQ ID NO: 413895 - DNA, 122 bp, Homo sapiens
ctcccccagtaggcggggcttggtgccgggggcggggtctggcgggcgcgggcgcgtgtgcgtgttgtgggcctcgcactggcacgcaagtctcagcaattcctgagaatcctcggaggaag

SEQ ID NO: 413896 - DNA, 122 bp, Homo sapiens
ctaaggacaccacaccatgcaagcctggtaccgcccacagccctcccaccgccctcccaccgctgtgcttctgtgtctgtgctgcccctgacatcccattctgtacagcaaacactgactca

SEQ ID NO: 413897 - DNA, 122 bp, Homo sapiens
atagggctgcgtgcccagctcaaagagctcccagatggtcacgcccagggacctgtggggcgacagccgtgagccagggctgggcacagcctgccacagcaaggaccgcgcaggatccccgg

SEQ ID NO: 413898 - DNA, 122 bp, Homo sapiens
ctgacccccaagttcatgctggcgctctgctcttggctcctggctcctggctgctggcagcgcaggcacaatgagccatgtgacccaaggctctggggacaggacaagacccacgtgactga

SEQ ID NO: 413899 - DNA, 122 bp, Homo sapiens
ccagatctcatcatccctctcaaggaacagctcctggaacacagtggggtctgcttgggtcgtgaggtagaggggacgccacctcagcccccgcctcctcttctcggaatctcaggctccct

SEQ ID NO: 413900 - DNA, 122 bp, Homo sapiens
gtgaaactccgccgggcgtggtggtggcgcctgtacctccagttactcagaaggctgaggcgggaggatcgcttgagcccgggaagtcggggttgcagtgatccatgatctccactgcaccc

SEQ ID NO: 413901 - DNA, 122 bp, Homo sapiens
gtcacgcagaccacgaattcatgaattgccgctgtgtctgtctggagcccggctcctgggcgcctggagggagttatcttggcttctgtcgtatttacaagtctagaagttagaatttttgc

SEQ ID NO: 413902 - DNA, 122 bp, Homo sapiens
ccccaataaccgccctaaaaggccgggcttctgctgtcaagtagccagggtgggctccgccgaggcgaggaggggcgccggtggggagatgcgctcccaggtgtttgcagcggaagtgggaa

SEQ ID NO: 413903 - DNA, 122 bp, Homo sapiens
caacattggggtgtccagaaacactggggtttcaggcgctctgtaaatgcgtccgaggtccgcggttctgcccgcaagcccagaccccggcctcacttccgccccgcgccccgcgccccggc

SEQ ID NO: 413904 - DNA, 122 bp, Homo sapiens
agagccagaaatcagcacccgaaggcatgagactgccagttgccagcgaattcacaaatccgaccggcccctcccggcccaccgacctcgggaccgccccaggaacatattcagcactgtgg

SEQ ID NO: 413905 - DNA, 122 bp, Homo sapiens
ccttgctgctgctcggcggctgctgcttctgctactgctgctgcctaggctgctgccgcccgccgctgctgagggaaggaacaggagggaaaaggaacaaaccccaaaccactaattagaga

SEQ ID NO: 413906 - DNA, 122 bp, Homo sapiens
ccctggactctgccgggagaagcctgttgcggaggaacggggcccgggaaggaggtctgtcgctgactcttggctgtttgtcaggtggacgacatccttggagaaggcagcgacgacagcga

SEQ ID NO: 413907 - DNA, 122 bp, Homo sapiens
atctgtcccaagactcagctttgcctcagcccttggcccttcagtttaggagctgttgaccgaatctctcagaatcttcttatttatgctgggattccatgctgatttttcatgcagggcag

SEQ ID NO: 413908 - DNA, 122 bp, Homo sapiens
aacaatactctctggctgggagcaagtctgggccttggggcttcggaggctaggggctgccgagggatttaccacctccctccaggtcaccaggaaatcttacctaccgaccttccctcatc

SEQ ID NO: 413909 - DNA, 122 bp, Homo sapiens
ttccccttctttctccctcccttctgtgacccctcctagcacacatagtcatcatctttgcgctttcctgtctcgttttactgcttagtgtgtggtttaggttcattcattcacagaagtgg

SEQ ID NO: 413910 - DNA, 122 bp, Homo sapiens
caggagtgcggtgcagccacacatccaaggctgacagggcgggcactctgccaagtcctgcgcgctgctcgccttccacaacaccttcctcagcttcgtctgtatttgaagagcttagtaaa

SEQ ID NO: 413911 - DNA, 122 bp, Homo sapiens
gaactgtggagtgatccgcactgagtcctcgggcggctggcagaaccgtgactgcagcatcgcgctgccctatgtgtgcaagaagaagcccaacgccacggccgagcccacccctccaggtg

SEQ ID NO: 413912 - DNA, 122 bp, Homo sapiens
tgcatggcttccacgtgccatttgcatagcttttcataggtttgcattgctttcgtgagtcgtttacaaggagtttgcatgttttgtggcatttgccttgtttttgtgacatttgcatggcc

SEQ ID NO: 413913 - DNA, 122 bp, Homo sapiens
ctgtctcaaaaaaaaaaaaagagaattcagactctgacagggtactctatattatagttacgttaaacaacacccttaaaggggcagggtgaaagtgctgacataagtaactttggaagtga

SEQ ID NO: 413914 - DNA, 122 bp, Homo sapiens
cccagcctcacctctccgggcaggtccaggcagcccatggtggggatgcgcccccctcggcgtctccccgcacgggccccaggctcagccagcttctctcgcagctcgcggctgattcgcac

SEQ ID NO: 413915 - DNA, 122 bp, Homo sapiens
ggtgagtgcgcggcggccggatgggcgggacgggcgtggaggacgccgagcaccgtggcgcgcgctcacgtccgcgtccccaagggctgcgctccctcaagcgcagtgcccagaactcggag

SEQ ID NO: 413916 - DNA, 122 bp, Homo sapiens
ccaagacagttaccaagttaccactgctttgtcacagagggtccaagacccagagagatgcgagagttgtcagaggcttagagacttatgtggttgggatttgggggcttgaagtgtttttt

SEQ ID NO: 413917 - DNA, 122 bp, Homo sapiens
agttctctgcctgcagcagcttgaagcccacagccaggtgatggttctccagcaccgaggcgtcgttgtacataagcgccagctctgagtctgtgagggtatgggactgagagccccaagat

SEQ ID NO: 413918 - DNA, 122 bp, Homo sapiens
tgataccccatgcatcataagcatccactgcaagagaattaccaggaaatttcagtgccacgtggcaaatactcaggcaattacaagcagaaatagtttcagaaattgtttcttcatgtgaa

SEQ ID NO: 413919 - DNA, 122 bp, Homo sapiens
gaactagcggagttggggtatcgggtggagtctcggagaaccaatccaatctgagggggacgcctgtgggagtcctaagtatccagcgcagctgggaggcccacgttgggaagtcggagacc

SEQ ID NO: 413920 - DNA, 122 bp, Homo sapiens
ggtgaagcgcaggccaggccaagtggcgctctgcgggaggcgacatcagggctccccaaccggtagtgggagggaagattgccctcaagtccacaggactgactgaccaagatcattctagc

SEQ ID NO: 413921 - DNA, 122 bp, Homo sapiens
gcccatggccatcagggtgctggaatgcatgtcacactgcattacgtgcattacgatccacgctgcaatgacagcccagagcgtggagaacccagagagggtggggagatggaatcccggcg

SEQ ID NO: 413922 - DNA, 122 bp, Homo sapiens
ccagtgctccgggggcctgcctctgtgagggttttgtgctctgctcttcttctgttgttacgtacaggatttgtccagtgggctctgccatgggggtgagcaccagggtacacttctgcatg

SEQ ID NO: 413923 - DNA, 122 bp, Homo sapiens
gtcgattcctccaaagttcagtccctgtggctgcacaactagttggtggagtcaagcccacgagcggatacggacccctgccttgctcagcgtccagacccgcaggcgtgcaccatccccgc

SEQ ID NO: 413924 - DNA, 122 bp, Homo sapiens
gacaaacccctagtgagtgagcgcgtcccagggatgaaacacccgaccttctcaacgttgcgcccaatcaggcttgcaaccacattgccctggtatcactgagccccgaatttgtcgacagc

SEQ ID NO: 413925 - DNA, 122 bp, Homo sapiens
gcgcggctcacacccaggcacacgcctacgcactgtcactgagacacacatacctgcaggcggagacgcgatggcaacacacactccccgctggctcttcctgattttcacacatacacaga

SEQ ID NO: 413926 - DNA, 122 bp, Homo sapiens
ccccggaggcagtgagcggaggtggtggcagcatgagcctctgggtgctgcggctgttctcggccaccagccccacgtcgcctttctcggctgcctcagcccggacggactccagctgccga

SEQ ID NO: 413927 - DNA, 122 bp, Homo sapiens
gggcctggtctggccgcccctccatccttgtcggtttctcgggtcgcggaccccgcgcggcgccgggcgatgctggcctgcccgtggccaccacctcgcttcattcccgtctctttgggccg

SEQ ID NO: 413928 - DNA, 122 bp, Homo sapiens
aaaatcctactatcagagcagtgtccagtacctgtaccgagagttgctggttcaccttgacgatccagagagggccatccaggatgcaattttaggtgagactccgacggcttggccttcgt

SEQ ID NO: 413929 - DNA, 122 bp, Homo sapiens
agcagccggaccgaacagggcggcttctggtttggcgggtcctttgtctctcggtgcagccggagctccaggtctcctcttcactactctgtgtcctgtgctcctacaggcccagcctctgt

SEQ ID NO: 413930 - DNA, 122 bp, Homo sapiens
tcttgcttggatgagagtgaggaaaaaggtattagtattggcttttcacaacgccttgtacggtttcttgtttaagttgatcaaagcaaaagaaagactgcaggcaatgctaaatataacaa

SEQ ID NO: 413931 - DNA, 122 bp, Homo sapiens
gaatcccctcatattttttagtaacctcattggggtttcaattcctactaaggaatctgccgactaggattccctccaatgacacagtatccaaagagaaaggcagccctccccctctttat

SEQ ID NO: 413932 - DNA, 122 bp, Homo sapiens
aggggatgagaccctgctgaatcgctgctctattttggctggagccacagctccctccaccgcggggcggggctaaaatgtcctcccccttaagggagcaggcagctcctcccagccaccca

SEQ ID NO: 413933 - DNA, 122 bp, Homo sapiens
aaatactcttagtaagccactacctatttacttcttaaataacaactgctacaagatctacgaacttgcaaaaaataaagctgaaaatcctccacaaattgatgcagccaacagcatttgct

SEQ ID NO: 413934 - DNA, 122 bp, Homo sapiens
gtgggtctttagaagattttattgacctttctaatcacaactcccacccatgcccttccacgtttgcactgctagcttccaatcaaaaagcaatatctgattgcatttgtgaagctccaccc

SEQ ID NO: 413935 - DNA, 122 bp, Homo sapiens
ccgcccccaggccccgcccgggacagcgtccaggccgggccagggtccccatcccgctagcgagccgcgttcttacccttccgggccccgctgccccggcagcagacacaggagcctgcggg

SEQ ID NO: 413936 - DNA, 122 bp, Homo sapiens
tgcctcatctaaccctttctctctctggcccctcaagagccagatggacttcctggggttcggaacctggaaccagaggaggttccacaggtgcagttgaggggttctaagaaagatgataa

SEQ ID NO: 413937 - DNA, 122 bp, Homo sapiens
aatgcatctttgattcagaggcaggagttaacaagagggcttaaacctggaggatcctgtcgagttctcagtgtaggaatatgccaaactaatgctacacagcagctttctggaatactgag

SEQ ID NO: 413938 - DNA, 122 bp, Homo sapiens
ggatcggatatagacactgccacagcgatgttgcagcctaacagagaggcaagccagggtcgcatcacagaccagagggcaataaactacgacttcccgaactcaacacctgccaggcgctc

SEQ ID NO: 413939 - DNA, 122 bp, Homo sapiens
gttttgaaatcccaaaagtaacctcaagaggatttcttcctcacactctcaggcccccagcgcaccttaccctttttatcaaaataaaacaaccctccacctctcgcattttcaaaggatta

SEQ ID NO: 413940 - DNA, 122 bp, Homo sapiens
gcaaaagctgggaaaatgccagtgactcaacccagttccattgatcagtgaaatggaaatcggggactctgtgtttcaaccccagtcagccagcccacagccagggtccaggtggcagcctc

SEQ ID NO: 413941 - DNA, 122 bp, Homo sapiens
catccgtcgatgatggagtgcgagccgggagctgcagccccgcggccgccgaaccaaccgcggaggccaggcagcctcgccccagggaccccgcccacggcgccctacaccggcggccagtc

SEQ ID NO: 413942 - DNA, 122 bp, Homo sapiens
agcgggacagagggccttgattcaggtccaggaggtgctgggtcctcagtcaagtcccaccgtccctttgagcctttcttctcatctgtaaaatgaggataatcagtctcacttcgcctgcc

SEQ ID NO: 413943 - DNA, 122 bp, Homo sapiens
tgtcttctataagggaaaaagaaatatttatcatttcttttactgctgaggggatgggtgcggctctcatatttcagaaaggggctggaaagtgagggaagccaaactttttcctatttaag

SEQ ID NO: 413944 - DNA, 122 bp, Homo sapiens
aagcgctcctccactcgccggtgcagctgcttgaaggcgaggcgcatggcgggcgggcagcgccccacggagcccacgatggcgtccacgatgggccccaggtagcccgtcagcagccccag

SEQ ID NO: 413945 - DNA, 122 bp, Homo sapiens
tgtgtgccaggcactcacaggccagcaagtgcaaacagcaaggcttgactctgagtgaaacggaaccgggtcaaatctggctcttcctctactagctgggtggcctcaggcaaagttacttc

SEQ ID NO: 413946 - DNA, 122 bp, Homo sapiens
cattccaggggaagccacagattgggcaaagcctgggaggccaggtggtagggcacgcgacgccaagccctgtgctgagcatcagctagatggcaggccccaaatggacttccagggcctct

SEQ ID NO: 413947 - DNA, 122 bp, Homo sapiens
caccattacatggcagtattactggtctgtgaagtagcaggctgcatcctgtgacctgctcgtttacagcctgagattccacaatttaaatttgtaatctcagatttgatgtcgcaggtgga

SEQ ID NO: 413948 - DNA, 122 bp, Homo sapiens
aggcctgctgcgggagggaagctcttcctgacctctgcctccccgaggaggctgccacggcgcgtggccctagattctgacagaggtactgggcttgggtttgagcaaaagcaaagacagtt

SEQ ID NO: 413949 - DNA, 122 bp, Homo sapiens
agcaatcctcccacctcagcctcccaagtagctgggaccacaggcacacaccaccacatccgacaattttttgtattctgggtggagaaagggtgtcaccgcgttgcccaggctggtctcca

SEQ ID NO: 413950 - DNA, 122 bp, Homo sapiens
gcatgactcaatactcgaaggcatcacgggctctaacacacagccgcccttgcagctgtgcgctctggaaagctggagtatgggcccccagggcactgtttgtaaagactggtggccggcac

SEQ ID NO: 413951 - DNA, 122 bp, Homo sapiens
tagctgggattaaaagcgcctgccaccacgcgcagctaatttgtgtatttttagtagagacgcgcggctaatttgtgtatttttagtagagacggagtttcgccaggctggtctcgaactcc

SEQ ID NO: 413952 - DNA, 122 bp, Homo sapiens
atcctgcctctgtctttagaggagctctggtttcccgcactatttcagggcccaggctaacgtttagggatgttttccagcccctcagccggcccctcctctccgcccacccattctcagca

SEQ ID NO: 413953 - DNA, 122 bp, Homo sapiens
atatgcagggttagagcgctgcgttttaacatttaacattcatgagtaaacagagatggccggtgggtaaatatcttgccaaggtggttcctggtattaagccttttgagtcttaagatgac

SEQ ID NO: 413954 - DNA, 122 bp, Homo sapiens
gatgggcacggggaccacctcggccagcaggcagccgtagaaagccgccatgaaggcagccggatcattgttggggaacaccagtgccacctgtgggacaggccagagcgggtcagcattaa

SEQ ID NO: 413955 - DNA, 122 bp, Homo sapiens
tttctgttgggaggattactgggtcacggtttcccaaggacatggaaacccttgctgaagcgctggaaccgctcggcacgaggcgtacgtcggtgggagctgtgtcagcccgctttcggccg

SEQ ID NO: 413956 - DNA, 122 bp, Homo sapiens
aatcgcactgtgtgacaccgttaggggacttagagtgtcactcgccgccttaaatcctttcgggaacaagccaggatataaataaataaagctaggtgtgggtcttcccttcacaaggcgct

SEQ ID NO: 413957 - DNA, 122 bp, Homo sapiens
ccgggggtggagtcaaccctggaggccacgctctgtgggaaagcacggggcatgcaaactcgaaatgaaagcccgggaacgccggaacaagcacaggtgtaagatttcccttttaaaacgtg

SEQ ID NO: 413958 - DNA, 122 bp, Homo sapiens
gggaggagagagctgtttctggaattggagtgaggaggaaggtagaggaagaaagccatacggtttggagggcctagggctccttgaaaaggacttctaggccagccccagcagggacttgt

SEQ ID NO: 413959 - DNA, 122 bp, Homo sapiens
tcgcaccttgatctgatgccttgggcttctgttcctattgcttgcttttgttggaagggccgtgcagcttcttgacaaattgcaaaggtgcccacgagtttccaagtcctcaaaaacaaaac

SEQ ID NO: 413960 - DNA, 122 bp, Homo sapiens
ctcgtgtccaatatgggaagggatgataaagaatacctctagccattcagtggcaccaaccgatccaaagtctccagcactccaactggcaaagataatgcttctgctgggctgaaacccat

SEQ ID NO: 413961 - DNA, 122 bp, Homo sapiens
gtacatattatttaaaggactgtacagataagtacagggccaggtgtgctggctcatgcgcgtaaccccagcactttgggaagctgaagcaagaggactgcttgaactcaaagaatttgaaa

SEQ ID NO: 413962 - DNA, 122 bp, Homo sapiens
atcctaccgtctgcacggagattcaccgggggagacagacgatcactcagtgccaccctccgagtcccgtccttccatgcccacctacacgccaaacgctggggtggagagacacagtcagc

SEQ ID NO: 413963 - DNA, 122 bp, Homo sapiens
acgtgggagccgcagcagctctgggtgagctctggctgtacgcggacgcacacaagccaccgtgcacggggcaggcacaggcctagaacacgcgcacagacacacgcaggccacacacacac

SEQ ID NO: 413964 - DNA, 122 bp, Homo sapiens
tcccagcctttcttggacctgtggaagcaattcctgcaggaccagactcccctgtctccccgcggccccctaggtacactccgtaacttccgaaaccttatttcgtttgagcgaaacccggc

SEQ ID NO: 413965 - DNA, 122 bp, Homo sapiens
ccccctcccggaaggctacctgaacacataaatgagcgggcttaattgttcatgagcaaccggtgttgtcaggcaagtccctctggcctcttcagaatcccagtaagtttaagactaaatag

SEQ ID NO: 413966 - DNA, 122 bp, Homo sapiens
gatcctgcgtgttctaaaaaccccttaggctttccatgggttcccagaccatggcggtggcgctgcccagggacttgcggcaggacgccaacctggcaaagaggaggcacgcggagctgtgc

SEQ ID NO: 413967 - DNA, 122 bp, Homo sapiens
ccagttttgggctggttggcgcggaatcgggagattcgggaccatggcacctgtgcacggcgacgactgtgagataggggcgagtggtgagggacaattccgcgcgcggggctccgggttgg

SEQ ID NO: 413968 - DNA, 122 bp, Homo sapiens
tttgacttgcgcttgctcttccttctgtcacttttgcacaccgacatcaggtcacaattgcgctatgagctccagggactaccgctgctaacgcagatcttggaaagtgcctttagcatcaa

SEQ ID NO: 413969 - DNA, 122 bp, Homo sapiens
atttaccatagctacagcaatgaatttccattacgatgacagcttcaaccacatcatgtccggaaaaccagccaaccactggcttttaaagaacacacacattttacatgcagaaaacgagg

SEQ ID NO: 413970 - DNA, 122 bp, Homo sapiens
ccagggatggtccggggatgcgcattttaagggaaggcaggggatgaacactcggggaaacggatgtgggtcctgcaggtgaagagcaaagccagagtccgggcccacagatccaaggctaa

SEQ ID NO: 413971 - DNA, 122 bp, Homo sapiens
tgcctgcgctctgaggtgagctgacaggcccctctctgtgtggttcgtcagcgctggtgacgtcatgcaaacgtgacgtcagccctggccagaacatctggcctgggctctccaggcacctc

SEQ ID NO: 413972 - DNA, 122 bp, Homo sapiens
ggccgcctgggctccaggagccccggaaccaggataagttggatggctgccgcggcgaagcggggggcggggtggaccgtgcccggtattttctatacgggttccggggcccggtagaggcg

SEQ ID NO: 413973 - DNA, 122 bp, Homo sapiens
ttttcccggggtagttggaatgcaatgggacgcctcaggccgctgggacaggctggcctccgcgcgggggcgcccgagcagccgagccgccgggccttccggctgccccgccggaagtgctc

SEQ ID NO: 413974 - DNA, 122 bp, Homo sapiens
tcggactcccctcccttcccaggctctacggggcgccgcggatccgcgaacagccgtgcccggctagcgggcggcccagcaagtgtcaagacccttcggaacgacactttggcactcctcct

SEQ ID NO: 413975 - DNA, 122 bp, Homo sapiens
ctgcttcctaacgagcccttgacgatcccagcctcccggtgctcacaccctgtgtaggcccgacgcacacacggaattagagctgacctgtgtgaccagcagaatatggctgaggagacagc

SEQ ID NO: 413976 - DNA, 122 bp, Homo sapiens
agggactgcagggaagggcgggcaggctcccgttcgttctcccagcacccagtttccagacgaagcctccctgggatcctggcttcccacggctctgcactgtccctttctcagaacttaac

SEQ ID NO: 413977 - DNA, 122 bp, Homo sapiens
caaaataaaagtttctgcaaaggaactttttgagcctgtaactagagcacaagctgcttccggggaaggcggagggaacacgtgggcacattgagttgcacgtggacgcggagtgcgcaggc

SEQ ID NO: 413978 - DNA, 122 bp, Homo sapiens
aaggggcaggtaaggtgaagggggtgagctggggccagcacaagaggcccagacggcctccgcccccgaggatacacggccagagctcagggaccaagaggcgagaagaccagagcgcggcg

SEQ ID NO: 413979 - DNA, 122 bp, Homo sapiens
aaacatgttcatagctccctctcatgaccattgaatactatacaagcctccttttattctcgctgttgtattcaactaacagctcactggctaagttttaattgcttccaatgaggtcagca

SEQ ID NO: 413980 - DNA, 122 bp, Homo sapiens
tgtgtaggtcagtcgtagtcttaaactcatttccaatgggtcatttttcctatttcggatcgtgtaaaaatacatacagtagaacaacgtatttgctagtatttccaaaaagtagttccgtt

SEQ ID NO: 413981 - DNA, 122 bp, Homo sapiens
acggtggagaggagaggagcctctctccgtggcaagtctgccctcatgtggggccacgctcgaatcgcagccgagccgagctgagatatcacgcaaaacacccttttctaccccacctcaca

SEQ ID NO: 413982 - DNA, 122 bp, Homo sapiens
acacacggggtctggactctgccctgaggacgcttccattgtccccgcagtcggggcagacgcaagaacgcgcgcggctcttcccagggtgggctccgggcgggaagcgggagaacggaacg

SEQ ID NO: 413983 - DNA, 122 bp, Homo sapiens
gtggatctgattctatgtcatactcctcctccacccgacgtcgggaaaccggccagcccacgtagctcaggactccaggatcgtccagcacccttatggtagcaacttgtcctgaatcatag

SEQ ID NO: 413984 - DNA, 122 bp, Homo sapiens
gacacgggggcgggctgtggctgtcacgtgacggggcgggggcaaatcccatgtgctcggcggcgcagatcgcccggcgcggctccgccccctgcgccggtcacgtgggggcgccggctgcg

SEQ ID NO: 413985 - DNA, 122 bp, Homo sapiens
gagccaagggtcaatagaccccacagagcccagcgaagcacgctttacaaaggacacacacggcatgtacaggtcacacaaggtcgactacgcacccctcacagtcccgcaactgcacccac

SEQ ID NO: 413986 - DNA, 122 bp, Homo sapiens
ggccagggtagggggcacaccctctccctgaatgaaattcatttaggggcactgtctgctcgcatgttctgttctgggagaaaatgggtagcagaagctacaatttgtactaagctaatgaa

SEQ ID NO: 413987 - DNA, 122 bp, Homo sapiens
tttatatgtcggcatttaacacaaaatgctcttggctcaatcccaggtcgcagagggacccggggcccggctgactgatgcggctgtcctcagccccctcacggagcacgggtgctgcggga

SEQ ID NO: 413988 - DNA, 122 bp, Homo sapiens
tggcgggagcaagaaacatggttacatacgacgtaatgcgcctgcgcacagtccgtcctgcgcctgcgcattcctgacagcacctcccggaccggacataacggtccccgcgcggctccccg

SEQ ID NO: 413989 - DNA, 122 bp, Homo sapiens
gccagactgtgctctccctgagtctacagcctagtagggccagaggtcctgacaggaaatcgccaaagatgcaaaacaggggccccgtgatgggaccagctagtagccgcacttgtgttggt

SEQ ID NO: 413990 - DNA, 122 bp, Homo sapiens
atgtaatgggaaaacactgccaaatgctttgagagatctctcatgtatggtttctcccatcgagttgaataaaaggcaggacacttaaggttggtcttgttgaatctagaatttagtccttg

SEQ ID NO: 413991 - DNA, 122 bp, Homo sapiens
gggaggctgtctcgtggggaggctgtctcgtggggaggcggtctcgtggggaggtggtctcgtggggaggtggtctcgtggggaggcggtctcgtggggaggctgtctcaggtcacctggcc

SEQ ID NO: 413992 - DNA, 122 bp, Homo sapiens
acctgggctgatataacatggctcagggcttcaatgcgccaatcacatgactggtctttccggcatggccagccccaccctgaatcaccttcttagcataaactatcttagagcccatcatg

SEQ ID NO: 413993 - DNA, 122 bp, Homo sapiens
gccttgggctcgggggccggggctggagccagggctgggcccacgaaggcgtcgggagcccgggctcgcagggcagggcgcacccaacccgagtgatcctccgaacccaaaagcccagccac

SEQ ID NO: 413994 - DNA, 122 bp, Homo sapiens
aatgagtcttctacttgaagagactcctcactattctctattgtttacttctctacttcacgcttttatgatatcctcatggcctcagtaagtcatttgagtttccagtgtttctcaaagca

SEQ ID NO: 413995 - DNA, 122 bp, Homo sapiens
catatacacttttggaactatggctcacataatacctggcaaacttaaaaatctggataccggccaggcacggtgtctcacacctgtaatgccaacactttgggaggccgaggcgggtggat

SEQ ID NO: 413996 - DNA, 122 bp, Homo sapiens
tcttttaaggaaaattttcttgaaggagaaaagagaacttgaaacccctatcaggctgtccgggaagaaggcccgttgcctctgcagcgtcagcatttttccagggcctaaaataggggcaa

SEQ ID NO: 413997 - DNA, 122 bp, Homo sapiens
gctggcttcaggtgtgccttctgctacctcctgtactgcgaacaggggcccgccgagctccgggagcccctagaagaggaagactcctctggccccactaggtatcatccgcgctctcccgc

SEQ ID NO: 413998 - DNA, 122 bp, Homo sapiens
gcggggcgccaacagctcaggacttgggttgcaggctggttcttgcaccaaccagcggggcggcctcgggcctcagtttccccatcccgcccacgaagggaggcgattgcgagcgcttgggg

SEQ ID NO: 413999 - DNA, 122 bp, Homo sapiens
caaaggcaggagtctgcaaatcacagcattctagaacatcaaagcagactaatgttttcccgattgcagccattcactgctgtcttaccacctgtatattatttaattggtactttctttta

SEQ ID NO: 414000 - DNA, 122 bp, Homo sapiens
ctgcctactcagcagcagcagtggctgcagtgtggggtacccatggccacggggctctaacgatcctgccacctgacaggcctggccccggctcctcattgcctaacccggaaccaggcgct

SEQ ID NO: 414001 - DNA, 122 bp, Homo sapiens
agctggccgtgcttctccgcgggatacagccttccatctccagcgcctcgggccagccttcgtacttgttgctgtgcttactgttcttcacgtgctgtggggaggggagcagaaagtcatga

SEQ ID NO: 414002 - DNA, 122 bp, Homo sapiens
catcccacggggcactcccatgcggtgccagagaggggaggctttgctctgcagctcctccgggccatttcctgtgccgaaaaataccgcgctcaaaaattggaggagtctgcggagagaaa

SEQ ID NO: 414003 - DNA, 122 bp, Homo sapiens
tgtccccaccgggagtggctggttggtgggaggtgctgttttctgcacccgggggccccccgggtgtggacgaggttggtggcctcagagttgtgccagagggtggatgagggcctgtgcct

SEQ ID NO: 414004 - DNA, 122 bp, Homo sapiens
cctaccctcccccggtcccggttggcgcggcggccggcacggcgggcgcggagggggccgcgctggtgtcaccaggagtgaacagcccagctattcagggagggggcgccccccgctgccct

SEQ ID NO: 414005 - DNA, 122 bp, Homo sapiens
gagccgcgggaggacggttgcctggtattattagcaagcagcaaatatggcggtggcgcgcgtggacgcggctttgcctcccggagaaggtaaggcgatccctaccccgagtcctaaggttt

SEQ ID NO: 414006 - DNA, 122 bp, Homo sapiens
gggaggaaagagggggcgtgtgagtctcagcccaccgtgccttgcttctgccttaacacacggaaagatcagatgtgagagaaaagctgattctcggccgggcgcggtggcgcatgtcttta

SEQ ID NO: 414007 - DNA, 122 bp, Homo sapiens
ctctccctcccccgccccttcaacatacaatgcactgaggctgagagggaaggaacggagcgagtcagggagagaaatcatgaagcttttcagggtaaaatacaaacctgctcatccagctt

SEQ ID NO: 414008 - DNA, 122 bp, Homo sapiens
gctgggtttctgaggctctccccgagggctgagtgtgactggaagctgagacactgtgaccgggatagagactggctgacaaagacagtgaccgagcgcctgactggctacttctgaatagt

SEQ ID NO: 414009 - DNA, 122 bp, Homo sapiens
cgatcccgatcccgatccctgtcccgctctctgtctctgtctcgatcccggtctcgatcccgctcccgatctcggtctctgtcccggttcctctcatggctgcggtcccggctgcggcttcg

SEQ ID NO: 414010 - DNA, 122 bp, Homo sapiens
ttctcggtactgaatcttgcacaactataacaaggaaatgatagcacattttaaagacgacgacatggattttattttgtcaagttgtttttttccattgtgtaaactagcagggtgtggcc

SEQ ID NO: 414011 - DNA, 122 bp, Homo sapiens
acgtgggttattctcgttctcccttccccacactgtcgcagaggaggaagacgtcttggtcgccgttaagagctaaaacgaacgccaaggctctaagtggccctggggtccaggctcgccgg

SEQ ID NO: 414012 - DNA, 122 bp, Homo sapiens
gcagcggcaggccgaagggctcctcaagcacggccagagccgacacggaggcccaggaagcgccgagagccagcgagggctgctggcacgttgtcacctttcagtttcacaatatcccaaga

SEQ ID NO: 414013 - DNA, 122 bp, Homo sapiens
cctcgtctggcgcagagacctggctggaaagacacagcgtggcttcgattccggcgcctgcgtgtcaccagcccagggtggccgtggaagctggacccgagccgcaggccccccaggctggg

SEQ ID NO: 414014 - DNA, 122 bp, Homo sapiens
ccatatatacattccttggaaagctgaacaaaatgagtgaaaactctatactgtcatcctcgtcgaactgaggtccagcacattactccaacaggggctagacagagaaggccaacatccgt

SEQ ID NO: 414015 - DNA, 122 bp, Homo sapiens
acttgaaatttcctgactctgcctgtctattgtctatccacccacacaaaagagaaacagcggaaccttgtcagttttcaagtgagcagcttgcaatacacattcttctagggagcttttta

SEQ ID NO: 414016 - DNA, 122 bp, Homo sapiens
ggagggggtggtcgggagggggctggccttctgctggccccttgaggaggagggttgagacgaagaacaagaacagcccccagaggctcagaaggcctcccagcacccgcccttgctcttgg

SEQ ID NO: 414017 - DNA, 122 bp, Homo sapiens
ccaccagactgtcgccgactgacgctccgaacgggcggcgggcgggcggttccgcagctgcggggcacaatgagcgctcccagtgcgcaggcgccacctgtcagctaccgcctctcccctcg

SEQ ID NO: 414018 - DNA, 122 bp, Homo sapiens
ctcggtgcgcatgcgacttgccccgttaggcagcacggagccgcgccaggggatcccggacgcccgaagagactcccgcgccccttgggccgaaatctggctctgcaggcgcaccgttccct

SEQ ID NO: 414019 - DNA, 122 bp, Homo sapiens
tgaccttccctctatctccctaaggcaatgaatcactccaaaagcatccacagccacacccgagcggaggagatgcccacggccaccaggacaccctgttctctgggcccagggctgcccag

SEQ ID NO: 414020 - DNA, 122 bp, Homo sapiens
actacatttccccgaaagctttgcagtgcgcaggcgcatcaatgaggtactgcaatgtcccggaccgtatagtttccaggacgtctcgccgcgcgcatgcgcagaaacactgggcacagggg

SEQ ID NO: 414021 - DNA, 122 bp, Homo sapiens
tcacaaaggctgcaggttcttcccccttccggtcgctgagtggttgaggccggaagacaacgctcatcgtcattggctgagcccggctgtcagtcctttcgcgcctcggcggcgcggcatag

SEQ ID NO: 414022 - DNA, 122 bp, Homo sapiens
catttgtggcttttcttcagagactcccttttttgtcttaaagaattacgtctggtggcacgttggctcatgcctgtaatcccagcactttgggaggtcgaggtgggaggatcacttgaggc

SEQ ID NO: 414023 - DNA, 122 bp, Homo sapiens
acggtagctcagtagctgtgtgtttagcttcgtaggaaaccgaccacctgttctccagagcggccctgccacttgtcactccctgggaatgcctgagagacacggctcaaccctggcaatgc

SEQ ID NO: 414024 - DNA, 122 bp, Homo sapiens
gatatgtgcacaatgatacacagcaaacgtacacagagttcagtacacacaaagagctcacgcccacgtgcacacacccctcagttgggacagagttgaccaccaccacctttctcccaaac

SEQ ID NO: 414025 - DNA, 122 bp, Homo sapiens
gaagggcaaggccagttactgagagagaaaattacttcattttctatgataatgcttccgcgtgctgtgcaggtctcttctcacgctttgttagtatgactgtatatacatacagcatcaga

SEQ ID NO: 414026 - DNA, 122 bp, Homo sapiens
ccacactgatccggagggagtgcatagactcattccattccgggtgctcagacagctgcacgggcatcagcgtgacagacaggcgggacctgcacagccagggagggaggagaggagtcagc

SEQ ID NO: 414027 - DNA, 122 bp, Homo sapiens
cagcaactttgtatgcatttcatatggacaggggtgttaagtttaggcagcagctgccaccgccttacttatcttgaaggaaaacattcacttgggcgtctacagtctggctgctaccaagc

SEQ ID NO: 414028 - DNA, 122 bp, Homo sapiens
gcctctgtttccaactaaaaagtgagccctgggcttgggaagagggaaaagcagggcagacggtgcaaggcaaaagtctacacaacaaagaccctggaaaaggtttgcctctggaaagatcc

SEQ ID NO: 414029 - DNA, 122 bp, Homo sapiens
tctcatacatgcataagagaccccggggtggaggcagtgttaggatggggagggatggaccgggctcctgggaatggcctccatcagaggcctggtctgtgggccccagtcaccgtgagggg

SEQ ID NO: 414030 - DNA, 122 bp, Homo sapiens
caattccatgaggtagaggaattattatcagcctggtttgcagtggagaaagctgggaaacggtggaatgtggctacaggttctgcactggtcactaccacatgtaactgggtctcctgaaa

SEQ ID NO: 414031 - DNA, 122 bp, Homo sapiens
cttttcatctcaggtgttgcctacccaacatacatgattaatctctttattgaaaattgacgggaacttttattgaggactatatatggagccctgtaattaggggttgggagagggggagg

SEQ ID NO: 414032 - DNA, 122 bp, Homo sapiens
gtatagagtgggagtcttccaccatgcaggccttctgtcctggctaccctagaggagacccggtagagtgctgtggcaccctgtgtgtgcttcctcccaagaagccagggctcagaggccca

SEQ ID NO: 414033 - DNA, 122 bp, Homo sapiens
ttgcgccgagccaatggcaacggcaggacgaggtggcaccaaattcccttcggccaatgacgagccggagtttacagaagcctcattagcatttccccagaggcaggggcaggggcagaggc

SEQ ID NO: 414034 - DNA, 122 bp, Homo sapiens
gtgagctgcaagtatgggcgtctcctatggaaaaagtggctcacaccagagcctgggccccggagggaggagccacgcgcctgggagaccacacagccgggagcaggaccagtgtggcccgg

SEQ ID NO: 414035 - DNA, 122 bp, Homo sapiens
gggcttctggagttccctgctccactctgacccccagggagagtccccacgtatcctccccgctgtggagggtgcccttgcagtcctccctgagctgccccaggatgactggctccacaggg

SEQ ID NO: 414036 - DNA, 122 bp, Homo sapiens
agctttaacagctcaaagagcaggggctgttcgcggaagcgccggccaatgcggagatcccgctccacggtggcccgggcgtgttcctcggggggccaggccagctctgcaccagctgcatc

SEQ ID NO: 414037 - DNA, 122 bp, Homo sapiens
gtgcttttactgtaagcccggccggaggaattccattccctcagctcgtttgcataggggcggccggcggccaatcacaggcctttccggtatcagccagggcgcggctcgccgccgccggc

SEQ ID NO: 414038 - DNA, 122 bp, Homo sapiens
tgatcctgggaggcagaggttgcagtgagggaagatcaggccactgcacttcagcctgggcgacagagcaagactgtctcaaaacaaaaaaagaagcgaatgatactacattggagactggc

SEQ ID NO: 414039 - DNA, 122 bp, Homo sapiens
cctccccgcctcagagcagcgtcttgctgaaggcagcggcagcaactaagatggcggcggcgctctctctcgggtccggcgagggtacccggccgggggcggggtggcggcgggaggggcgg

SEQ ID NO: 414040 - DNA, 122 bp, Homo sapiens
gctccattgagaaactgagcgtctcattcacaagctggcggcgaggagggcccggcggagcgaggacgcagtccgggagggggagacagagaggagcccgggcgggggaggggaccgggagg

SEQ ID NO: 414041 - DNA, 122 bp, Homo sapiens
ctcgagctccgtaagggttgggaggagccagctcaggcggggttgggggcgtcttcctcgcgggccctgtgcagggtcttgtaatggaagttacacgcagggcacagagtataggggagggg

SEQ ID NO: 414042 - DNA, 122 bp, Homo sapiens
gctaggaggctggttggctgcgcagctactccagagtgtgcggtagccgagggctgcgtccgcgtaaagcccagagctgtaatgatgtcaacttgttatttactttccaaatctgaatgact

SEQ ID NO: 414043 - DNA, 122 bp, Homo sapiens
aagctggggagaaagaccatcaagtggggagcgatttctttaacagatttctaagagcagcgctgagcaaaaattaactccttcgcggaggccggatgctggcctggcgctggggcagcgcc

SEQ ID NO: 414044 - DNA, 122 bp, Homo sapiens
gccagttcctttattccattggccagatcagactcctcctctcgtttatcctgttgggggcggaagtgagaaagcccttattcgtattggcttagatttgcaagcggcagttgtctatcaaa

SEQ ID NO: 414045 - DNA, 122 bp, Homo sapiens
tttgaaaggaagatgagagatggaaccaaaattagaatgatacacaggcctgaaaatctgcgggtataggtgtatgtcagtgctgggggactattacttggttggttagtttgtttgtatag

SEQ ID NO: 414046 - DNA, 122 bp, Homo sapiens
cgagatcgccccactgcactccagcctggtgactccgtctcaaaaaaaaggggaggggggcgggggagagttgaaagcttaatatgtactttgggggctattaaagcaaacatttcgactaa

SEQ ID NO: 414047 - DNA, 122 bp, Homo sapiens
gtgttccctaggacagcagagacctgaacagcatgctgctggggtggcagccatctgcgccggcgcggcaggagcagagttgtttgggttttacctaggtttgctttcttaaaccttggctg

SEQ ID NO: 414048 - DNA, 122 bp, Homo sapiens
ttatcccacacatggagacggaaatgctttctcgttttctgttccaagaattactagtaacgagagcacaccctaccgcatcagcaagccccagtgtgatcgctttctttcggcctcctttg

SEQ ID NO: 414049 - DNA, 122 bp, Homo sapiens
ctgagaagtccgggtaggtgccgtaggcaaattgaggggagaaagtgacatcttgtgtaacgctgcaaattcgcggaaggctttgaaccgtcaccagagtagcaaatactcattgtgaaagt

SEQ ID NO: 414050 - DNA, 122 bp, Homo sapiens
aagaggccatctgtatgttctctgcaagaagtaatgagagcctgaattatccatggtgaacgtaagtgagaatgcaaagttgctacctaattgagatgctaaccaattgagttgttaaacta

SEQ ID NO: 414051 - DNA, 122 bp, Homo sapiens
taagtgactctggaggtgtccatcccccgtgagcctcggtcagtacgttgtgaaacggggcgaaggtgctgcccccaggccagctgctgcgcctcaccacaccctggcatgctctgtccttc

SEQ ID NO: 414052 - DNA, 122 bp, Homo sapiens
aaatctgatgagccatagattattaacagattctctgcaataaatatgcataaccatgtgcgttgtataaattctttatacatgtttattttaacaaagaaaaactttgctttagagacaaa

SEQ ID NO: 414053 - DNA, 122 bp, Homo sapiens
aaaacatgaagctatacatacagtttctaaatttgttttgtataatgtcttcttcctccacgggtgtttcttcttgaagacggaattttgaaaagcttctgattcttctgttgcatcatcct

SEQ ID NO: 414054 - DNA, 122 bp, Homo sapiens
tttaaatctctaattgtcctaataatatcctttgctaacatgttttgaaaatccaggctccgctgacattttttgggaccagttaggccagttattttgcaatacatacctcaatttaaatt

SEQ ID NO: 414055 - DNA, 122 bp, Homo sapiens
acagcaggtgagcagtggatgtgcggtggttggaatcttggaagtgggtgtcacagttctcgcagtactggagggagggagtaggagacctgcagagaaagaagaaaaagcattaagggcag

SEQ ID NO: 414056 - DNA, 122 bp, Homo sapiens
aagaggaagggaaggtacaggaagggtttcggacagggtcggtcgggcacacagcagctgcgtaacgatatctcttgcccactcccgagtggctttgctttctctcgggatccaccctgtcc

SEQ ID NO: 414057 - DNA, 122 bp, Homo sapiens
ccagcttctacctcagcaagtgtggccccataacgcctgggcagcctctagccaggagaccgcgcctcaaacacctagcactgcgcgggaggagatggacctgcgccacggcggcgccggct

SEQ ID NO: 414058 - DNA, 122 bp, Homo sapiens
gctagaagagccacgggtaggcgcgagtcagagtccgaggttcgagggctctgggccggccgcatctgcgagccctccgaggcgccgtagccccgcccctccggcgcgtggcgcccatgacg

SEQ ID NO: 414059 - DNA, 122 bp, Homo sapiens
accccaataaaaggagagcaacttggtcgagccttgtataggcaaaagagtgttttccagcgcaggctggcctctgtgtgctgacaagaattcagtgtgctcctcagggcggggagtggggc

SEQ ID NO: 414060 - DNA, 122 bp, Homo sapiens
tggcagatgctgttcgagagcgccgacgtgagcatgctgcgcttgctggagaccttcctgcgcagcgcgccgcagctagtgctgcagctcagcctgctggtgcaccgcggtggcgcgcccga

SEQ ID NO: 414061 - DNA, 122 bp, Homo sapiens
ggcttgcacacgcgagggtgtgacaggctccgggccacgtccgctgggagctgggctctgcggcttcccgcctcccgctcggagtccaaatgtgtgaggctcggagcactcagggcgccctt

SEQ ID NO: 414062 - DNA, 122 bp, Homo sapiens
ttttctacttttctagccctggctgttgcaacatccctccttggtttccgtaaccttatccgtagctctttatgagagatcccttcatcaaaagcccacttttctaattggagcctgacaca

SEQ ID NO: 414063 - DNA, 122 bp, Homo sapiens
gaacggccctcccagcctgaggggctgcgcaaggcagctagcctcacggaggatcgggaccgtgggcgggatgccggtgagagtctgggagaggaatggagggaaaggcattggctgccttg

SEQ ID NO: 414064 - DNA, 122 bp, Homo sapiens
cttctccatcacagtgccactaagaagccttcacccaggtctctccagagagcctcaggccgctgcctttacttagttctgtgttcaatgccagaatgctgcctcctacaggaagtccacct

SEQ ID NO: 414065 - DNA, 122 bp, Homo sapiens
caaaaaaaccagctccggccggagggatcatgcgacccggcaggctgggagcccagaaggcgacacaggaattgcgaagctcaggaaccagccccctcgcttgcttcctcctccatcgcccg

SEQ ID NO: 414066 - DNA, 122 bp, Homo sapiens
tccgccgcgttcagctccttccacgctttgcctgcgggccgtgggcgccagtgagtggaacgccgtcgggcgggtgggcgccgagccctccgtgcgcccgggacgccccgcgagggtttggc

SEQ ID NO: 414067 - DNA, 122 bp, Homo sapiens
atgacagtggtaaccatctggatgaaggccttcccatgttctagacattgtgccagaatgcgaggtatagtggtgtgagcccagccatagtggcagaaattccctcctcactactttccagc

SEQ ID NO: 414068 - DNA, 122 bp, Homo sapiens
agcatttggtaatcccctcaccccatacttggctgtaaaatctgtgaagtagcctccttccggaagtcaggttttctagtaatgccctaattggttaagtatgtattatggtgtatttaata

SEQ ID NO: 414069 - DNA, 122 bp, Homo sapiens
atgaaaacggaactgcaaggaaaaccagctagaaaggggaggccagtactcaacagtggccgtgagtgtactaggagctcaagaactgtgcgtgtacttgaatgcaagggcagaaaggagaa

SEQ ID NO: 414070 - DNA, 122 bp, Homo sapiens
accacgccttcccgctcggcggcaaaggtgctgacatctatgtgctaggctgcctcatcacgccactggagtccacacttgaatttgggcagctaccacgggtctgccatgctctggaggag

SEQ ID NO: 414071 - DNA, 122 bp, Homo sapiens
tgggataggagggcggtcagagccagcaggggccctggtggtcagctaggccagccccttcgctcctgcactccacgggcagagaggcccttggggccggtgcaggagccgtctccctcggg

SEQ ID NO: 414072 - DNA, 122 bp, Homo sapiens
ctacactgtcagtaggaatgcaaatcagtacaagcatgatggaaaccagtatagagaattcgaaaaaaagaaaaaatagaactactctatggtccagcaatctcactgggggggtatttatc

SEQ ID NO: 414073 - DNA, 122 bp, Homo sapiens
agtcaggatgtggtgctgacggtgtccgcgctgccaggctggagcgggtgacggtgcctgcgctgccaggctggagcgggtgacggtgcccgccctaccgggctggagcggagcttgctctc

SEQ ID NO: 414074 - DNA, 122 bp, Homo sapiens
cctgcttcgccatgtcagccgtcggctgttctgaattcagattcgttcacaggctgctgacgacaatgcggcctcctcaggggtttctcgggactcctgcttaccctgctgtcctggagaac

SEQ ID NO: 414075 - DNA, 122 bp, Homo sapiens
tatatttaaatggggcggttgtttgacagcctggctattgccaaaggggtgatctagggccgttggaagcaagaatgtaatccaggcctgttaagtcagctggctccccaccagcactcttc

SEQ ID NO: 414076 - DNA, 122 bp, Homo sapiens
caaatagccaacaccagggccccgatgcctaggccggtcacgatgttccgggttcgccgccgtggtaggaccttctgccactgggcaagctccgcctgccgcatggaatgcagttgctcggg

SEQ ID NO: 414077 - DNA, 122 bp, Homo sapiens
gggagaagcagacttgtggagctgaagagaaacacccagaagctcaggtgaaagctgacacggccatagttggttcatattaaccatgtgattaaaatggttaaatattaatttgggttctt

SEQ ID NO: 414078 - DNA, 122 bp, Homo sapiens
ggaaatagagtccgttacttgtcctgggaacggcggtgggtgtcccaggaggcggacttccggtgcactcctgcgcgtgtgcacctctccctgcgtgcgtgttcgcgcgtgcgtgctcgcac

SEQ ID NO: 414079 - DNA, 122 bp, Homo sapiens
aaacaaaacataaagcttcctcagctaagtactttttatagaatttcaaaaatgacaaaacgtgctcagttgcgcattgccagattattctgtgtagtccacagtctccccagtgccatgcg

SEQ ID NO: 414080 - DNA, 122 bp, Homo sapiens
tgcgttccagcatctggaacctcccatccctgccctcctcctgtgtagctgccacctccccgctgggcccagcatggctcacctgtcccgtgggctgtgtttcttgttgtttttctctttgc

SEQ ID NO: 414081 - DNA, 122 bp, Homo sapiens
ggatttcaccaacttcaggatcggagcccaggcaggcgaacgtaccttattgcgcatgctcgctagcccctcccgctcggagcggaagggggagcgctgggggcctgggcctggcctggccg

SEQ ID NO: 414082 - DNA, 122 bp, Homo sapiens
cgcatgcctgcctggtgggcgtggcctggaagcccgggtagcaccggcagtggtaggtgccggggatgttgacgcagtcaccgtggtggcaggggctgctggtgcattcgtctacatctgag

SEQ ID NO: 414083 - DNA, 122 bp, Homo sapiens
gtctgctcctaaagccgaaggctagatgtacgttgtctcttttgatcccagccacaatgccgtaatagcatagctccatagtcccttatttttttgagacagagtctcacgctgtcacccag

SEQ ID NO: 414084 - DNA, 122 bp, Homo sapiens
aaaagctttagagcaggtcattactatgggtaactggggctccatctctctgaaataccacgtggaagataccttggaacattctctttggaagaaggggatgtaggagtgctgttggttcc

SEQ ID NO: 414085 - DNA, 122 bp, Homo sapiens
cctgtcccacagtctccaccgaaagcagcccagacctcaggcccattagtctgcagtgaccgcggtctcaggagacgggctcctaccgtggcgtccgggatctgaagtctgcgtatagtcca

SEQ ID NO: 414086 - DNA, 122 bp, Homo sapiens
cataagagttctttgaaccaatcaggacagagataatcttattatacctctgtaggcttgcgtttcttttgatgagagtctagagaagtcatgggtaatactttaccgtgtgccagagaccg

SEQ ID NO: 414087 - DNA, 122 bp, Homo sapiens
ccttggcggggctggcccggagagcagatgggaggtgcggcgacagtgtttgacgagagccgaaggaggctgtgggaggtgttggcggcggcggcgcgggcgcctgaggaggaggaggagaa

SEQ ID NO: 414088 - DNA, 122 bp, Homo sapiens
ctcctcccgaagacgccgggacagtcgggtgtccgccctcagcctcctggggactcgagccggggatcccctgacggtttttcttgcctaagttatttgagtcacaaaggcctccttccctg

SEQ ID NO: 414089 - DNA, 122 bp, Homo sapiens
aggagttcggggaggcacagggtaggagcggtgagagggccgtggagtcccgcccctcgccgccgcggttggcgggagcgtgtcgtgacgtcacacagggcctctcgaagtgggcttgtgaa

SEQ ID NO: 414090 - DNA, 122 bp, Homo sapiens
tcccgcccccgcctcccgccctccagcgcgacgcacacactctcccaccagggtcctgggcgccgccctccaactccgaagcgcgcgtccacaccacgcgcctccagcgctggtccgaggga

SEQ ID NO: 414091 - DNA, 122 bp, Homo sapiens
gacctggaattggtatgttcactataatgtcatcccaaaactactggctccaccattctacgtgattatgacaccactaaggcatcatttacggctcccacatcactctttcaccacatgcc

SEQ ID NO: 414092 - DNA, 122 bp, Homo sapiens
tcctgggccggcccggagcggggcggtggccgcgggcctgggctctccacgcccccgccacgccccacctgcccgcgcgcccaaacccggagcccgcccgccccgcccctaccgcccctctg

SEQ ID NO: 414093 - DNA, 122 bp, Homo sapiens
cgagaatgaagtaataattcagcaagctgttcaggacttcccatcagcccaactgcaccgcgccgtgttttgagggctcaggcatccttgaactccacggcagagcaagccgcgggaaggaa

SEQ ID NO: 414094 - DNA, 122 bp, Homo sapiens
agtcctatctgtataggaacaaaataggcatgttcctataggtctggccctaaaacaaatcgttgagatgttccataggttctaaaaaccttttccggctgtggagctgagaagatactaaa

SEQ ID NO: 414095 - DNA, 122 bp, Homo sapiens
tggcctccaggagaggatgcagctactctcaatactggccacaagggcacgcagtgctgacgaggctagcagagcttcctccacacccagctcacaccaggaccccaaaaatccctttttcc

SEQ ID NO: 414096 - DNA, 122 bp, Homo sapiens
gggaacatggccacgtctggccccactaggctcccatccaccattgcagtggcctcattccgctagtgtgcaagccatcagagaggagctcggaagagactgatctgaattacgatgatcct

SEQ ID NO: 414097 - DNA, 122 bp, Homo sapiens
ttcccaggctttggcctccagtggacgagaatcgcggagcctgcggggctggaggttgagcgcccgggccagcacctaggcgggcgcgggggtgtgcaggccagggttcgcgcgggccgggt

SEQ ID NO: 414098 - DNA, 122 bp, Homo sapiens
actcacccaggcggcgtccgcccgaccctctgaggccgcgctcttgccacttccgtctcccgcagctgctgaggccgcgcagtcccgaccccaccacagtgcccctctcctgaaccaatcat

SEQ ID NO: 414099 - DNA, 122 bp, Homo sapiens
caggctgtccctgctcaccaaggtgtctgggcacggtcggtgactgctctttgtaggtctcggtgaaaacctgcggaggaatgagtgagtgtaagaaagggaaggagacatttttaattaag

SEQ ID NO: 414100 - DNA, 122 bp, Homo sapiens
ctgtgcaacaaattaccttgaacttggtgacttcaccaccactgcatgtcagcgcccagccgtagacgagggtttgggaggcatggctgggcctgcccagggctccctggctgaagtgggtg

SEQ ID NO: 414101 - DNA, 122 bp, Homo sapiens
gctgaggtgggaggattgcttgagcctggcaggttgagactgcagggagcagtgtttgtgcgactgcactccagcctgggcgacagagcaagaccctgtcaaaaaaaaaaaaaaggcaaaag

SEQ ID NO: 414102 - DNA, 122 bp, Homo sapiens
cttttccctctcaggccggtgaaactcctggggactcctcgcacaacagacagaggacagcgccagcgcccccagaggtggtcgggaaagggcctggggtggactctagagacctgcagcca

SEQ ID NO: 414103 - DNA, 122 bp, Homo sapiens
atgcgtaggatggagctaaatttatttgttcctttctttctcagcaacagcgacgaggcccgaggtgcagctgtctcgcctcgcctgtcttttgcaggcaccggcatgcacagaagatggct

SEQ ID NO: 414104 - DNA, 122 bp, Homo sapiens
gctcctctctcccctaccccaggcagctccaacgtcagaccccactcccgactgagaaaacgaagcccagcccagtcgtttcctgcccaccggggcaggaattcccttccccggcccaggga

SEQ ID NO: 414105 - DNA, 122 bp, Homo sapiens
cccggtcggtgtgggctctgagggtcccagcccctcgcctggagctgccgaccctgcaggcgtccccgagtcgctccccgaaggcctggcccacgagctgcccttgttctccccgccctcag

SEQ ID NO: 414106 - DNA, 122 bp, Homo sapiens
caaacagcgcatgccttacattctctgtgtctgtgctatgctcatgccctattttattaacgaatgccactaatgagctgttctgtctccatatccataaaattatcattgaccctttgcta

SEQ ID NO: 414107 - DNA, 122 bp, Homo sapiens
ttattggaagcggacgacaccaaggaggcgttgccgcggatgtggtggacgatgccaagtcgtcttttaaaaaaggaagtgaagaatgattaagagggtcacgccctctaccactccaacct

SEQ ID NO: 414108 - DNA, 122 bp, Homo sapiens
ctggtagaggaggggtgcacaggataccttttgggattgtaaatctttgtcctgcttttacgcaaatggaaggcagaaagcttttctgtatctgcttcttcttaattgctgtcagctcagca

SEQ ID NO: 414109 - DNA, 122 bp, Homo sapiens
gggcatcgcgtgacagggtaccgtcgcgtggccaggcaaggccctgcgatgggcgctcagcgacttcaggtcggatccagaatggaagcccactggtcccggctccaaaaccttgttctgtc

SEQ ID NO: 414110 - DNA, 122 bp, Homo sapiens
gttccggggaggatgaaccagtcaggattccgctcacgagccgtagctccgcccaccgaacggagccccgtccataggcggaagtcccgcccatagagtgagttcccacccacctggcgtag

SEQ ID NO: 414111 - DNA, 122 bp, Homo sapiens
ggaaaatcaaactgaataaaaacacttataaataagctagtttccccctgtgtaacagcacggtttccccggtgctgcttgtttaaatctccgagctggcggcgccaggcaggaaagtgtct

SEQ ID NO: 414112 - DNA, 122 bp, Homo sapiens
gatctgcgctcccggcgctgtgccctcgccccaccgctgtgcctgagcgcccccccatcccgcccggggacccgcgcccgctcctggaaccgcacccatggccagcaccctgtccccaaccc

SEQ ID NO: 414113 - DNA, 122 bp, Homo sapiens
agtcacctgacgtgctttttctgcgcactcaggtcgtgacaccccaggaggtgcctatcgcgccccaagctcctcacgtgcctcctccccacagtccaggacgcgtcttactaacgcctcac

SEQ ID NO: 414114 - DNA, 122 bp, Homo sapiens
tagcaagtggcaggaaccatggggatttcagtgtgtccctggctgccaaggcctgggggccgaagtttacaaatacacccttggctgaggggaaagggactggggtcctgttccctatcatt

SEQ ID NO: 414115 - DNA, 122 bp, Homo sapiens
tgctcctacacggagaaggacaagcaggcgtatctggaggcagcctatgcagccggcgtccgcaatatcgagatggagtcctcggtgtttgccgccatgtgcagcgcctgcggcctccaagg

SEQ ID NO: 414116 - DNA, 122 bp, Homo sapiens
gtccagtaccacggcgcatgcgcaaggaggcctatggcctacaatccccagaaagccccgcgcgcagcagtggccattcgcaaggctaccctggtgaaggtggcctttgacttccgtgcatt

SEQ ID NO: 414117 - DNA, 122 bp, Homo sapiens
ctgccaagttggcccaaccctactccaatccctgacaaagggagcggccttcaggaggctcggctctctgtgcactttgctcaagatacctgaagaatgattactttgaggaagaaaggaag

SEQ ID NO: 414118 - DNA, 122 bp, Homo sapiens
cctcatttgacaggagcaattccgggtcacaaaggctgacaccacaaagctagtccgtagcgggttcgaccacaggcgcccacactctttgacgcctcaatggcacagccaagtgcgcggga

SEQ ID NO: 414119 - DNA, 122 bp, Homo sapiens
aaacgtaggtaacacgctaaatgtattctcgtaattttcttttaccgtggccccagactgcgcatgtgcgcccccgtgcggaatcgcgcaccccagcggttttccagcgtacgcacaagttc

SEQ ID NO: 414120 - DNA, 122 bp, Homo sapiens
actcaaaatagagtactctaaaaaataagtcaataaagcagttttttaatctttaatgcacgcttgctagcattatgtctgaagtattatctgttacctcagtatgggtttactggtgttgt

SEQ ID NO: 414121 - DNA, 122 bp, Homo sapiens
gcggggggccgggccggtgacgccggacgcccatggacgcctctgaggagccgctgccgccggtgatctacaccatggagaacaagcccatcgtcacctgtgagtgcccggaggcggggagg

SEQ ID NO: 414122 - DNA, 122 bp, Homo sapiens
gggcgggagacggagccgtgagcgcccttctcggccacagccacggccacggtcaccggccgcctctcctgacctcggcctcggcccccaggtccccggtccccggggaaggggctccggga

SEQ ID NO: 414123 - DNA, 122 bp, Homo sapiens
gacagtcctaacggagaggcaggaagcctgcgtgtccccagacatccctgcggggcctcccgcctttcagggccctgctcatgcacaccgggcagctgcacgggtcctttggacttcggcag

SEQ ID NO: 414124 - DNA, 122 bp, Homo sapiens
agctgctggagagggtgagggatccgcagcagccacccctctcaagagtctgaccttccccgccttttcctgcacctcctctgaaacacccccagctcctgaggagcgctaggagacgccgt

SEQ ID NO: 414125 - DNA, 122 bp, Homo sapiens
agtctgtagactaaggagacagagaaggccttgaataaaaacaaccagattgaaactgtgcgtttggaagactcacgtggctacagtgtacgagaaaccagtcagaagaaggctggtggtag

SEQ ID NO: 414126 - DNA, 122 bp, Homo sapiens
cacagctctcggatggaaatgggactcatgcacaaggcaatccccgctactaagcggtggcgcttctggaaggcaccctctgcctaagtgacagcagctgctgtggaacgcgcccccggggg

SEQ ID NO: 414127 - DNA, 122 bp, Homo sapiens
tactatgtgtcatcactttgcatacctttgaacacacacacgctgtccttctatgtgtcccgcgtcttcctgtgctcactcaacatgacatctgggtggctcgttcgggctactacctgtcg

SEQ ID NO: 414128 - DNA, 122 bp, Homo sapiens
caaaagcgtggtaagtaggcagcgccctggcagtgaaagcgttaacagggctgggtaaggcgatcccttgaaatgagtaagactgagtggttaaagttttcaaagcggttggcagcagcggc

SEQ ID NO: 414129 - DNA, 122 bp, Homo sapiens
ctcctcccaggcacctgtctgcatccctctggccagtgcatgctgagcacgtgacctacccgtgttgggacacgtgaggatacagccttgacccccaggggctgacattctagggggagata

SEQ ID NO: 414130 - DNA, 122 bp, Homo sapiens
gtgtgcggggggtggggtgggggctgggctggggggggatctcggctcaagggggtcggacgcggcctcagtattgatctcacaaacagacacgcgcccgccgcccccccgccccccgatct

SEQ ID NO: 414131 - DNA, 122 bp, Homo sapiens
tcacattgggagctaggacctcaacataaaaatttggtgagggcacaattccatctgaaacggatgtccagtgggcaccttgtcttcttggtgaatggcagttccctccttctaggtgctca

SEQ ID NO: 414132 - DNA, 122 bp, Homo sapiens
gccaggttcttgagggtccgggtcctccagccgccccctccttgagccccgagagtcctgcgtgggtccaaccccccgggtgtcccgcctctgtctccgccgtccttgctcgcgcgccgcgg

SEQ ID NO: 414133 - DNA, 122 bp, Homo sapiens
tcccctagccacataccacagagttgaggaaggaagagctgatggacggaagaaccatggcgggaggagtcatccggaagctacctcgctgccctgtcagttacggaacagaggagagatgc

SEQ ID NO: 414134 - DNA, 122 bp, Homo sapiens
gcgggagtcagatccacgaccagtttatcctgcgggtgtcgcccgacctcgagtggcacgcggcctgcctcaagtgtgccgagtgcagccagtacctggacgagacgtgcacgtgcttcgtg

SEQ ID NO: 414135 - DNA, 122 bp, Homo sapiens
ggaggcgggcctgatgaagggctggtgggcgtgttcccgcccaaggtccgtgttggcccgcgcggtggctgggaggccctccccacgcccaactgcgggtataaagaggcaggctgcggact

SEQ ID NO: 414136 - DNA, 122 bp, Homo sapiens
ctcctgggcgcgcactccctgtcgcagccggagccctccaagcgcctgtacgacgtgctccgcgcagtgccccacccggacagccagcccgacaccatcgaccacgacctcctgctgctaca

SEQ ID NO: 414137 - DNA, 122 bp, Homo sapiens
tggcagtggctgggcaccgggccctttctgtggaagtaggaagcgggtccagcacaaaagcgccaggtgcaagttctctgccagttcggagaaatctcccaagttcagctcacaccacaggg

SEQ ID NO: 414138 - DNA, 122 bp, Homo sapiens
tttcacaaattcaaaacgaatagtcattttgccaactatctatatatgactttaaagatacgaccaccatcatttgccataaactggatttgatgactgcacactttaataaaaattttaag

SEQ ID NO: 414139 - DNA, 122 bp, Homo sapiens
ctgctttcttctgccattcctcccaggctacccaggaggacgagaggggcagggtactggcggcagcaagagagaacccgcccaggagggcccagcacgggaactccagcctccagagccag

SEQ ID NO: 414140 - DNA, 122 bp, Homo sapiens
ggcgaggagcaaacgacaccaggtagcctgccgcggggcagagagtggacgcgggaaagccggtggctcccgccgtgggccctactgtgcgcgggcggcggccgagcccgggccgctccctc

SEQ ID NO: 414141 - DNA, 122 bp, Homo sapiens
agataatagccacagatcagaagcacctgtggtcaggcgccagattttttttttttctctcgctctctgtttcttggcacttagcccagtgcttgagtttcatgtgtggtgcaaggtcagaa

SEQ ID NO: 414142 - DNA, 122 bp, Homo sapiens
taaggcctctctgtacagaggttgcaggaaggtgggaacgccaaggaaaaaataaccaatcgatggaggtcaactctatggtttctgaaacaacagtcttattaggtctgttaattatacat

SEQ ID NO: 414143 - DNA, 122 bp, Homo sapiens
accacggagagaggaccctgccctgcggtgacagggcatgaggtgacaagatggcagagacgaggtaatggaaagatggaaagaccgcatttctcagtgacttgcagaatggcagtcgccct

SEQ ID NO: 414144 - DNA, 122 bp, Homo sapiens
ccaagtgggagatcttcctcttcctggccatcctgctacagcaactggagttcagcgtgccgccgggcgtgaaagtcgacctgacccccatctacgggctgaccatgaagcacgcccgctgt

SEQ ID NO: 414145 - DNA, 122 bp, Homo sapiens
tgggggtctgtgcagtctacctcccctgagaagagcagagggtggcttcccaggcggctgcgtagcacagagcagaaggccacgttggtgttaacctccccagaggggtctggggagcttcc

SEQ ID NO: 414146 - DNA, 122 bp, Homo sapiens
ggggtcttctaccagggaggatggcttgctggtgtgtcccccccaggggaggactaccaacgaaggggacccgggagatggcgggtgggggcccccgggaggacagtgggcgagggaggggg

SEQ ID NO: 414147 - DNA, 122 bp, Homo sapiens
tttgtgggcatgcacagagcagtgaaaaatttgcacattcccagttaaggttcaacaaggcgtcacgctgctgctgcttgtttcagctctcctattgaatgagtgtccttctcagtctactt

SEQ ID NO: 414148 - DNA, 122 bp, Homo sapiens
aatagaactttaaaaccctgaaggtagactatactatagattgggaaacagtgtttccgtcggagagtctcctgataaaatcccctcctcagataacacagacaaatatgtcttctaaaatt

SEQ ID NO: 414149 - DNA, 122 bp, Homo sapiens
gcccgggacgccggcgccgcaggggctgtgagcggtgggtggccccggagacggagctgtcgagtctgtgcctgacacctcttttccctccactttcttggtctctttcagttggaggagga

SEQ ID NO: 414150 - DNA, 122 bp, Homo sapiens
tgaattgaggtagcggtacccgggcaggtagtagggctgatagcattcctggatcactggcgcctgtacagctggcagtgaggtcaagccacagcatttcttgggaccacagtaactggcgg

SEQ ID NO: 414151 - DNA, 122 bp, Homo sapiens
tctgaacccaaggacctaaccccctaggaccccctcgccacggaggaccccccgggtctgcgtctggcccctcgctctgctccaggactgccgcgtcagaccctacagaaagccccttcctc

SEQ ID NO: 414152 - DNA, 122 bp, Homo sapiens
ggccattaagaagggccagtcaggacaggtgatgctggcaggaagggagccagcctgcgacgtgctgggaagacaggcagagagactatacgttcaaagggtgtgaggcaggcatgagtttg

SEQ ID NO: 414153 - DNA, 122 bp, Homo sapiens
gggctagttaaaacgcagatggctgggctcgtccgcagagtttctgcttcagtaggactgcggtggggcccagtcatttgtattcctaaattctcaggtgacgctcatgctgctgaaccggg

SEQ ID NO: 414154 - DNA, 122 bp, Homo sapiens
cagcatccggcgcccccatccccctgcccgccagattctgcggagtctgcgaaacaaaaccgccattgtttccagccgggctgctcaggaaaaacaacaggtttttccactttggggccttt

SEQ ID NO: 414155 - DNA, 122 bp, Homo sapiens
aattttcatggaataactacattcaggtgtagtaatagtaacgcaaagctctgaacaccacgagacaattcgttgcttccgaaacgcagccggcagcaggtactcgagatgagtagtgtgag

SEQ ID NO: 414156 - DNA, 122 bp, Homo sapiens
tctgggattacatgcgtgagccaccgcgcccggcctatttttcacttttttttttttagccgaatgtggcgaggacagttatcggattatttgcagcggatcctacacgtcccctcctcctg

SEQ ID NO: 414157 - DNA, 122 bp, Homo sapiens
tcattgtgcactatcattataaaaatgctgagggtgggagacaagctgagagctgggagacgggtcttcctacaaagcagccccaaacacaactgaaaacaaggtcaagacttcgaatccaa

SEQ ID NO: 414158 - DNA, 122 bp, Homo sapiens
gggtcagaccggggctggatcatgaaggcggcagagagctcggagggagcccaacaaggccgtgctgcggcccggttttccttccggtgctgaggatggcggcggcctggttttccttccgg

SEQ ID NO: 414159 - DNA, 122 bp, Homo sapiens
actgttctctatctgatgcatgtctctagagctgaacagtggaatggcagaatttcaaaacgcctgatggtggcatttgaaggcttccccaccacctacactagacacaagatttgagagga

SEQ ID NO: 414160 - DNA, 122 bp, Homo sapiens
gcagaagttgtagagcctggactgggtgttatcagggtccctttagaggagtggcacacgcgattctggcgtcacctttcactacttagatagaaggtggaaagaatttgctaatgaataat

SEQ ID NO: 414161 - DNA, 122 bp, Homo sapiens
gcgggcagactaggggcatgtctttcccccgcggctgcgtagcgccccgatacttgaaggcggggggcaatccctgttcacaccgcgcttcctcccgccagctggggctgctgcccctcctc

SEQ ID NO: 414162 - DNA, 122 bp, Homo sapiens
cgccttagacggctgtctcgcgggttctgtggtacctgggttctgtctgggcaccttagacgactgtcttcagggttctgtggtacctgggttctgtctgggtgccttagacggctgtcttg

SEQ ID NO: 414163 - DNA, 122 bp, Homo sapiens
cccccagatgggcctctcctaaagtagctacaaactgctgatccaggtgacccaggatggcgtgggtgaagaagctcacgacttttcccagcctcctccagggctccatttaaacagcaagc

SEQ ID NO: 414164 - DNA, 122 bp, Homo sapiens
aagtccctgagcctcttggaatctccgtcttcctgtctcttagatggagctaataatacccgcccgaaggctggctgtgccgggggtgagcgcgaagctggcatggagcccagcacagagtg

SEQ ID NO: 414165 - DNA, 122 bp, Homo sapiens
tttttctttgtccaagtgtctgttacttgctaaactagtatgccttggcattggtaacgtcgggaagatagattgtattagtttggaagtttaatattacgtactagaaagcataaaaataa

SEQ ID NO: 414166 - DNA, 122 bp, Homo sapiens
aagacgaagctgagtgtcgccatggccccgggcggccacgcacttccggcggccgcgccccgccccggaaccacgccccgcccccgtgaaatgcgttcccagtagccacggcaacgcccagc

SEQ ID NO: 414167 - DNA, 122 bp, Homo sapiens
gacactgggggcatgatccagctgttggacatgccaggtctggtgacggctgcctgccctcggctgccagcatctcactcagctcagcaggagggctgccatcactgctgatgcttacaaca

SEQ ID NO: 414168 - DNA, 122 bp, Homo sapiens
tggggggcggggtgattgttacagcctcaacaggaagctcccggctccgggacagcaggccgggcactgcggcgtggcggcccaggtgatgccggtggcggttgcgggcctccggggctctg

SEQ ID NO: 414169 - DNA, 122 bp, Homo sapiens
gctacgccgcctgcctgctgcccggggccggggcgcggcccgaggtcgaggccctggacgcgagcctagaggacctgcttaccagagtggacgagttcgtgggcatgctggacatgcttcgc

SEQ ID NO: 414170 - DNA, 122 bp, Homo sapiens
cagcattttatgtggggcgggcacagtgccgtgagtcttacagaaacctgcatggtgagccgcacgcctttgagtccccatcagccctggcccatccctgctgaggtggcgcgacctgctca

SEQ ID NO: 414171 - DNA, 122 bp, Homo sapiens
gggattggacttgcggacggggcgggaaggtgtggtccacctttctcggtgccggtgcctcgtttcgggctcgaagagccccaggtcctctgcagagggacgtggccgcccatttaggaccc

SEQ ID NO: 414172 - DNA, 122 bp, Homo sapiens
cttcagttgcctggcagcaggcttgtttacatggtccgaccctgcaagaccggacagctccggtttgcagaagtaaatcagtgattgtctggagttggagatcagaatctgctgttcacatc

SEQ ID NO: 414173 - DNA, 122 bp, Homo sapiens
gtggttggatggagccatgtcattagttctggccaatgagctgtgagtggtagtggcttgcgttaattctacgtgagagcatttcagtgctggagaaacctgcgaggacctctttttccctc

SEQ ID NO: 414174 - DNA, 122 bp, Homo sapiens
aggaggtatgggaagcagctctggagggttaaggaaatcattgccaccatttttaaacagcgattatgtgccaagccccatgtttagcgttttacataaaatgcctttatcctcagaacagc

SEQ ID NO: 414175 - DNA, 122 bp, Homo sapiens
ccagagatcccctctgatgacaagaccactcccagagtccataccactcctgaggcacaccgggctgggcccccctaccccggcgcctctgggctccccccaccaaagtcttgtcagtcagc

SEQ ID NO: 414176 - DNA, 122 bp, Homo sapiens
agaggaggccgtgctgcctgctcatgtgaggctgttgctcagcatgcaggggccctgtcgcgggcacagcccaaggctgcctccccacggtgcgtgccctggtgctgcgggtgcagcacgga

SEQ ID NO: 414177 - DNA, 122 bp, Homo sapiens
cccgccagcctcctgcctcacccagaggaagtggcgtttcctcccggacgccggcctgggcgctgcccacctggtgagtcatgggccactctcttctgaggctggcggcctggcccgccctt

SEQ ID NO: 414178 - DNA, 122 bp, Homo sapiens
ggaggatcacttttgctcatggttctctaataagaacattttccaaggtgcagcaagtttcgatcttcaaaaacccgcagctactcacagtgtaagatgcctgtcggggtggggctctgggc

SEQ ID NO: 414179 - DNA, 122 bp, Homo sapiens
ttagggcttctctgccaacttccagtattttgggctgtgttgagactaggccagggatagcgaaggagaaaaaattgttaatctcatggccatttaggtggcactttaaattctggtctttt

SEQ ID NO: 414180 - DNA, 122 bp, Homo sapiens
gttcggttttgaacacagtaaataggagatacctgtgaaagactccagtggagacacccacgtctgaaaaatcaggactgggctggagatataaatgtggggctcttcacctcataccacag

SEQ ID NO: 414181 - DNA, 122 bp, Homo sapiens
gcaaggccccttgcctgctgatttgtcaggcatccagacaggcgaggctatgggagctcccggtccgaggctgcctcggaaggctcctgttatcctctaagagaggtgaaatgcacctttca

SEQ ID NO: 414182 - DNA, 122 bp, Homo sapiens
cgcggaggatacagggagccgtttgcctgggttcgcgctcggctgtcctagctcacggggcgacctcggaaacgtccagcgtctgccctgtccccctgcgccgcgtctgagcagccagcccc

SEQ ID NO: 414183 - DNA, 122 bp, Homo sapiens
ctgggattacaagcgtgagccactgcgcccggcccattactattttttgagacggagtctcgctctgttgcccaggctggagtgcagtggcacaatctcggctcactgcaacctctgcctcc

SEQ ID NO: 414184 - DNA, 122 bp, Homo sapiens
agggctggcaactaccaaaaagccctctttgaagacagatgctgacataaaaacaaggcccgagggtgtgtctggcacatggtttattctgatcactttggagccattggttgatgggtggg

SEQ ID NO: 414185 - DNA, 122 bp, Homo sapiens
ttggagtatcccatgagcttatccaaatcccttatgaaaatctggtttataggccaagcacggtggctcatgtaatcctagcagtttgggaggccggagtgggtgggttgcctgagctcagg

SEQ ID NO: 414186 - DNA, 122 bp, Homo sapiens
ccctccgcccgccttcccggcggcgcccctgattggacattgcactcttggacccgccttcgttgcctgagtgacagctagtagggaagtcgcgtctctaagcaacctgcattcgtccgggg

SEQ ID NO: 414187 - DNA, 122 bp, Homo sapiens
aaataacatctcaactgtcatgatcatcacatgtactttacaaagaggtaaactaaaaagcgctatacatgtaaaagtgtcagaaaggttgctgcctgcccccatgtgcacgtgtgcacaca

SEQ ID NO: 414188 - DNA, 122 bp, Homo sapiens
gtgaccgaggagatgcagtaaacgagaggtgtcatcctgcgaaaccaacccacccccccccgccccctcacagccgggccccggccgcaggaagtggaattcttctgggaaagagactgacg

SEQ ID NO: 414189 - DNA, 122 bp, Homo sapiens
agctgctccggcacagccccgtcggcgcgggatgctcgggcggggccccgcgcgggggtgcgcacattcccgccagccccgccccgcgcccggacgccccgcccccagacctcagccggttc

SEQ ID NO: 414190 - DNA, 122 bp, Homo sapiens
taacagcttttaggccaagctggcctgacggtatggctgcaggaagtgactgagcagtagcggtactcagccagaccaagacggagagggaagagtccacagctttctggaagctaaggcat

SEQ ID NO: 414191 - DNA, 122 bp, Homo sapiens
ccatttctcaccaggtttctctcttggcagaatccaaccagaagccaaaggaaaggaagccggttgatatgattgcaggagacactgtagggaccccacacacatcaccttgacatttagag

SEQ ID NO: 414192 - DNA, 122 bp, Homo sapiens
aatactttgaactccacaggcttatgtactaacagtgaggcctcttaatttgaaagtgaacgaagatttgcagtcctgatgctcaggacaaaggccagtgctaaactgactcggctggagtt

SEQ ID NO: 414193 - DNA, 122 bp, Homo sapiens
tgtcctaagacgggcggggcgcgctgcgctagggactgtcataaaaggggcgggacgcgccgcggtcgggatgacgtgagctgggggcgctcgtcgctgcagccggcggctagcgggcgtcc

SEQ ID NO: 414194 - DNA, 122 bp, Homo sapiens
agtaggtcactgggaataaaagtaagcaggaccactgcttttatctctttgtttcacattcgaggacatagcgccttccagtggtcgttcatttagagcatatactctgttctggtgggtga

SEQ ID NO: 414195 - DNA, 122 bp, Homo sapiens
gcggcctccggagaagccacggaaacatgacagcggtgcggcggacttggagcgggtcaccgactatgcagaggagaaggagatccagagttccaatctggagacggtaaggttggccaaga

SEQ ID NO: 414196 - DNA, 122 bp, Homo sapiens
gaagagtgggccccagacttgccttccttgtcgtggttgtgggtgcgcagcggggtggggcggccagtgggtgcagagtcaggtactgcggccgattgagatggaaggtttggtacaccgta

SEQ ID NO: 414197 - DNA, 122 bp, Homo sapiens
cctggagaatgccgcggagaagagggagcagatggagagggaggcaaagcccttcgagtgcgaggagtgcggaaaacggtttaagaagaatgcaggcctgagtcagcatctgagggtccaca

SEQ ID NO: 414198 - DNA, 122 bp, Homo sapiens
tgggacctgtaggctctcagcacctagccgtggaatgacagatccaagctggaagggatacggacaatccataggtcccacccgcctctttcagcagtgagagaattgagacaccgtcgggt

SEQ ID NO: 414199 - DNA, 122 bp, Homo sapiens
ttttgcttgcgcagtgctcccgaagggattcgggatccgcatccggagggattcgggatccgcatccgaagagcaccccttctctcaggacttcccctgggaccgacgtttccagtcacccc

SEQ ID NO: 414200 - DNA, 122 bp, Homo sapiens
atgcgcattctgacaaagcgaagccaaaggtggccattttgactaatgtcaacggtttttcggttttttttgtttttttttgcggtgccctttccggaagtcattcaggatgccatattgac

SEQ ID NO: 414201 - DNA, 122 bp, Homo sapiens
aggtgacagggtgggataacgaggagaaaggaagggtggctttcctgcctcccccacccccgaaaggtcatcggagtcagaggggtaaccatcgggttaaaaagtattgtgggcagagttca

SEQ ID NO: 414202 - DNA, 122 bp, Homo sapiens
ggcccgggggcgaggctggttggggtacggccatagtgggcggggcctggccggcgggagcgcaccgccttcccaaagggctcgggggcggggccggcggagggggcgtgtcttctgggggc

SEQ ID NO: 414203 - DNA, 122 bp, Homo sapiens
gccctagtcctcttagacccgcgaccggaggctccggaagaccccgagccccgcccgctccgtgaccccgcccccacccgtcccgcccctgaaagcgcccggaacgctgtgcgcgcgccttc

SEQ ID NO: 414204 - DNA, 122 bp, Homo sapiens
tacaggcttaggagtgtggagaggatgcaacagtggtgggtaccagagggcccctgaccccggaggcaaaggacaactgtttgacaaataaataccgactgggcgtttccttttctcaactc

SEQ ID NO: 414205 - DNA, 122 bp, Homo sapiens
aggaagctagatcatattcagaagtctctttattaattaactatgagaaatactcaaaatcggtatgaccagcatattatttttatgtagagagagtaacacagaaatcaggatgttgcttg

SEQ ID NO: 414206 - DNA, 122 bp, Homo sapiens
gcttggtgttggggatggaagagggtgagaatatgatagggagagtagttagatgcaatacgccagatgaaaaaggctgaggatttagatccatgctaaccaggagaatatagggtggggag

SEQ ID NO: 414207 - DNA, 122 bp, Homo sapiens
ttaacctttggagaggccctttagttcggggagggggcttgctgctccaaaccgtagccacgtcacccacaaggactggggaggaaatgactgaccgctcaagagtcagggacccctgtctc

SEQ ID NO: 414208 - DNA, 122 bp, Homo sapiens
ggacgtagtgtctgtggacttggtcaccgacagcgatgaggaaattctggaggtcgccaccgctcgcggtgccgcggacgaggttgaggtggagcccccggagcccccggggccggtcgcgt

SEQ ID NO: 414209 - DNA, 122 bp, Homo sapiens
ctccagtgccggcaggtgggagggctgaggtggcacaggctgctccgccacctcggactgcggctcctactcggccactggccagagtccctccagccaactgcccctggtgagaccaccgt

SEQ ID NO: 414210 - DNA, 122 bp, Homo sapiens
ggaaaaattggaattcagggcgcccggggtaggggaacgatgcgcactgctggagacgggcgaccttcgctggccggtcggtgggttcctggttttctgctgccgagtaaacaaacgttccc

SEQ ID NO: 414211 - DNA, 122 bp, Homo sapiens
ttatttctacaccaatttctgtagattattatgagaattaagggagagaattatatcaagcgcttagcacagtgtctggcatctaggaagaaagtagtaagtgatagcatttatttatttat

SEQ ID NO: 414212 - DNA, 122 bp, Homo sapiens
ctagcaaaaatgaagtcagaagtgagcgagttccttgagaatttatagaatttgtatacacgggagtctttcccataaatgaatttagtttgatacttaaaacatctgtgatagtttccttt

SEQ ID NO: 414213 - DNA, 122 bp, Homo sapiens
gcctggtgactcagagttcctcacaatgctgcaggctgacccggcagtgctgggcatggccgcctcggggcagagctctgatcccagcccctcccctctcctcttgcttcctgtcatttcct

SEQ ID NO: 414214 - DNA, 122 bp, Homo sapiens
aacttttaaaaattatgtatggctttaaaataggaataaagacatccctgagacattatacgtatagatagatatctatatctaggaatggatagagagattagttacgagcactgatctct

SEQ ID NO: 414215 - DNA, 122 bp, Homo sapiens
tgagctcgagacccacagacactgaccgagacccgacaggacagacatgcaccaaaaacacgcggacacgtgtgcttgagaagaggagggggagcccgaacaggcacgggggagcccgcaca

SEQ ID NO: 414216 - DNA, 122 bp, Homo sapiens
ttaactactttgcacaaataagaaaacagaggaattagaaatacagtaagataacaaatacggagtagcttgaaaaggattgagcatcagtctgaaaagtaattttttttttttttttgaga

SEQ ID NO: 414217 - DNA, 122 bp, Homo sapiens
cctgggctggctccataacaattataatctcctatctgaagcggcctggaggcaaagggccggtgaggctgaattctttgcagaattaaccgccattcagatggataggagaagaattgagc

SEQ ID NO: 414218 - DNA, 122 bp, Homo sapiens
agcaatcagaagagcctcaatctgtctgactctcatcctgggctgcccaatgactgccaacgagtcagggtgcaggggaggcgtggctgcccagttcagaagatgaagccccagtgccagtc

SEQ ID NO: 414219 - DNA, 122 bp, Homo sapiens
agtggctgagccacgataagaacatagctcccccgactctcaccctggtgctccctccatcgtgccacagtgctaatacaagggcaatggagcccctgggagccaatgttaggtgctgtgct

SEQ ID NO: 414220 - DNA, 122 bp, Homo sapiens
gtagtgtttatgtaatctccaaaatgtttgtatttgagaataattcaccaactcttaaaacggaaggaaccctaagaaaacatctaggcctaagataatgcctgacacatagtagatgctga

SEQ ID NO: 414221 - DNA, 122 bp, Homo sapiens
gccatttttggccccttgtcctgaagttagaccacactttctgccacagtccttttgccccggtggcccctcagtagccactgatggtgtatatgttgaggaaactgctcctggcagaaatg

SEQ ID NO: 414222 - DNA, 122 bp, Homo sapiens
cacaagctaggtcgtgtgacgctgcatgacgggaattgtagtcctcaaattgctagcttccgatgccatgcgctgcgactggaacgccaattcccaccatgccgcgcgctcacagctctcag

SEQ ID NO: 414223 - DNA, 122 bp, Homo sapiens
cctcctgcccacctacctgcccaaacacacgtccccagtcgtcacctgcccacccacccgcgcattcccacacccttgtgggcctggctttcgggaaactacaatttgcggggagagaagtc

SEQ ID NO: 414224 - DNA, 122 bp, Homo sapiens
tttaaacttattgtgcactttgtgactcattgggcttgaatctcccctcttatgttctcacgaaaacacaggcttcatattgcaatgtggaatctggatataatgaagggcatggataatct

SEQ ID NO: 414225 - DNA, 122 bp, Homo sapiens
agtgaagcaaataaatccgcttgggctctcgtgcacagctctgtgctatcatgatgaaaacgtggccatggagaaaacagatatttgaatgaaatatctgttacccctaaacactggtcaca

SEQ ID NO: 414226 - DNA, 122 bp, Homo sapiens
catttgtgtaagtaagaacataaccacaaccttttccattttacttaatggctattttgacgagaagcagatctgtttttgcttttaacacagaggaaacagtgggcaaagaagaaaaagta

SEQ ID NO: 414227 - DNA, 122 bp, Homo sapiens
ccgagttgctcctcatccccatggggaccttctcacacctcttcaaccggcatcccatatcgaacccctgggtatgtgctgttttctcccatggactccaatgggtgcaggcatctccacct

SEQ ID NO: 414228 - DNA, 122 bp, Homo sapiens
aggagcaagggaaagagggaggtgaagtagaaactcacattttagcctaaaattaccttgcggttgagaaaacgtttgctttgagtaacatgccctctgttggaatatgagcattgacaagg

SEQ ID NO: 414229 - DNA, 122 bp, Homo sapiens
cacctccccaccctcggcccctccctgctcccctcccctctgactcgctggctaggacttcgctcggactccccctggcggattggctaaggccgagctgccctagtgatgtcatcagtgag

SEQ ID NO: 414230 - DNA, 122 bp, Homo sapiens
gggctgttttgaggagtactggttaggtatattggagaatgtgcctttattggaatttttcgcataattacacagggttatgggcttaggggtacatgattgttggccgggcgtggtggctc

SEQ ID NO: 414231 - DNA, 122 bp, Homo sapiens
gaggcacgtaccaggtcgatcaggtcgctgaggtttttctcgatttgctggggaggcaggcgcctcattaggtccaaggcacagtccagctgctgatcactctgtggagggagaaatacaag

SEQ ID NO: 414232 - DNA, 122 bp, Homo sapiens
ttctacaggaagcataccagggccagacccctgtctggggagtgcaggagcctgtcagtccgagctcactctggagttggtcccggccctggcctcctctgccgagcagcctccatgtgggg

SEQ ID NO: 414233 - DNA, 122 bp, Homo sapiens
aaaaaactcctggccttgagcgatcctcctgcctcagtctcccacaatgctaggattacacgtgtgagtcacagtgtctgacctgatttcattcttagtgattgcatggtggatatcatggc

SEQ ID NO: 414234 - DNA, 122 bp, Homo sapiens
ccccgatggggcggggctcccggagattgggggcccaagagctcggccaggataaatgagcgggctgccggctgcagacagtaggtcgggttagcgggcagcatctgcagccttttcgtggt

SEQ ID NO: 414235 - DNA, 122 bp, Homo sapiens
agtttccaaccgttggatttccctcccgggaggctccccttgctctgtaagcaatgaatgcgggccccggggcactcggcctgccctggacctgctcacggggcgaccttcacgggcctagc

SEQ ID NO: 414236 - DNA, 122 bp, Homo sapiens
ttcctttctttttctgtaagacggtgtttcgctcttgttgcccaggctggagtgcgacgccgtgatctccgctcgccgcaacctccgcctcccgggttagagcggttctcctgcctcagcct

SEQ ID NO: 414237 - DNA, 122 bp, Homo sapiens
tccactctgcaaagcaaagcagccctgggaacagccctggaaaaagccccttcccagctccgggacccccgctcacagccagggccggccagttccacagctacccggacgtagatacagca

SEQ ID NO: 414238 - DNA, 122 bp, Homo sapiens
ctcctcggaatgcgtgggggcttcctgcaacatcagtctccgccgccctccactaaatcgcgaccctgggaaggtgtttccactgtgcccatcacactaggggaaattgaggcggaggcagg

SEQ ID NO: 414239 - DNA, 122 bp, Homo sapiens
actcccacacaaagcgcctgcagctgacagccgccgggaggggacatctggacagcctcacgcagctttcagacctgcagtccatgttaaaaggatcttgtttccaatttgccttaattaaa

SEQ ID NO: 414240 - DNA, 122 bp, Homo sapiens
caatttttcaatcagtaaatatgaacaaattgtggtttattcatacaacagaagactccacggcagtgggagtgaacaagttgtttctatgcacaatgtgattggctttcacaaatgttagg

SEQ ID NO: 414241 - DNA, 122 bp, Homo sapiens
aaggctgagagctcttcaaccaatcgaaagtggggttgttacagctctttcagtgtccttcggtctgcgccctcctccttaacgcgggccgggccgtgcctccgttgcctggcaaccgtcag

SEQ ID NO: 414242 - DNA, 122 bp, Homo sapiens
actgtagctcagtctccacctaagtaactggagcatgtgcccacttctgtgcccccaatccgcaatctccttccccagttccaggggcctgctgggattggctgcagtggaagaggctcttt

SEQ ID NO: 414243 - DNA, 122 bp, Homo sapiens
cgcgcccccgggctatattgcccaggcaggtttcgaattcctggtctccagctatcttcccgcctctgcctccctaagagctgggattacagggtgagccaccgcgcccggcactttgaggg

SEQ ID NO: 414244 - DNA, 122 bp, Homo sapiens
cggaggcgcgtcccggctccggcggcgcagcccggcgacggcaggggagggtgggacgaccgagaacacctcctcgttactgggagtactcgagccgactgcagtgtttaaatttttaatag

SEQ ID NO: 414245 - DNA, 122 bp, Homo sapiens
gttgctggtgggtgcctgtagtcccagctactcaagagcctggggcagaaggattgcttgcgcccagaagtcagggctttgtgtgagatcacacctgcgtataactactgtactccagcttg

SEQ ID NO: 414246 - DNA, 122 bp, Homo sapiens
aagctggggttccggggcccgattctcagcgtgagcgatgggtgtggcgtctggagtggacgagggaggacactgaggggctgggtgtggcccggagagtcgggtgcgctgcgaggaatccc

SEQ ID NO: 414247 - DNA, 122 bp, Homo sapiens
ctgctgctggtcatcgtggctgtgctcatcgcctacaagcgcaagtcacgagatgctgaccgcacactcaagcggctgcagctccagatggacaacctggagtcccgcgtggccctcgaatg

SEQ ID NO: 414248 - DNA, 122 bp, Homo sapiens
tggtttcgagcctgcaatcatttgaatgacattcaggtccagctggctgcccgtcgatcacgactcgaacgcggggtaacatcgtgtgcatgtgtgtgcgggggactggggggacagtgaaa

SEQ ID NO: 414249 - DNA, 122 bp, Homo sapiens
gggcgccggctcgtcctcgggcagccgcgggaagctggtgatgctcatgtagtccactggcgagtaggcgcccagggcgctctcctggctggcctcgttctccgccgccatcctcgcccgcg

SEQ ID NO: 414250 - DNA, 122 bp, Homo sapiens
ggggctcagagctaggggcttacgccaagcggagcccggggaggggtgcccacctccctccgccgcatcccaagcccggcccccttgatgcgctggcggcctcggccgggaactccggggta

SEQ ID NO: 414251 - DNA, 122 bp, Homo sapiens
aagtaggtggctaagaaccctccgagaccagttctgttcgggccagtccgcctgacaaagcgggctcagaaagacaccgtggtgtttccctcaactgcccaaacatatagtcaagtggggct

SEQ ID NO: 414252 - DNA, 122 bp, Homo sapiens
gagaaccttatattgtcctgaagagaggtgatgacttaaaaatcatgctcaataggattacgctgaggcccagcctaggggagaattttggcagaggatgccgggatcccaagatttccggg

SEQ ID NO: 414253 - DNA, 122 bp, Homo sapiens
tctgagaaataagaaatgctcagtcaatagtggctctcattagccaggcatggtggtactcgcctgtagtcccagctactcaggaggctgaggcaggaggaccgcttgagcccaggagtttg

SEQ ID NO: 414254 - DNA, 122 bp, Homo sapiens
ccctctcagtgctgcatcgggcctggtgctgccaggatccgcttggcaaagaatagggaacgatggtggagaaaggactctatcaggccattgaagaagcgcagctgctgagaggccaaggg

SEQ ID NO: 414255 - DNA, 122 bp, Homo sapiens
ctcacaaaactgagttttaaccaaaagcatgactgcttttcatttatatggtttcagatccggctaacgagctcatatctccctcattatgtctgttctcaataactccgaagtcaagcttt

SEQ ID NO: 414256 - DNA, 122 bp, Homo sapiens
tcacaactgctgactgttgcctgcagtcggaaggaggagataatgaaggtaatactcctccggacctggcagtttagtgattagaacgtacgcgattctgtgaatgctgtggctggcacagc

SEQ ID NO: 414257 - DNA, 122 bp, Homo sapiens
gctcagccataccactggcgggtccggagtctagcacgcgactgtggagcaagcattaggcgtcacttcctttaccgtgaactacaaggctcagccaaccacaggctttacgtcatttctcg

SEQ ID NO: 414258 - DNA, 122 bp, Homo sapiens
ctcatacctcttagaaattatatttttcaagccaattttccccccttatccattggatcacggtagtttaaactactgatgcctggctcctatccccaggcactgtttaattaatatgggat

SEQ ID NO: 414259 - DNA, 122 bp, Homo sapiens
cagtgcctggagtggctgtgacgctgtggccggcgcctggcgtggctgtgacgctgtggccggcgcctggcgtggctctgacgctgtggccggcgcctggcgtggctctgacgctgtggccg

SEQ ID NO: 414260 - DNA, 122 bp, Homo sapiens
ggcccccctcagccggcgggccccctccctgcgcgctcctggcggcccctgctgccaacgcgccccaccactaagggaccctcaccccaaggcccgacccctgcagcccctcttgcgaacac

SEQ ID NO: 414261 - DNA, 122 bp, Homo sapiens
cagccaccgggccttcagcaccctcaagtttctgtaacttaggcggggcgccctcttccccgcccgctccccgcgccaagcctcgcccggacagagtttgggaactgccaaggacgcccccg

SEQ ID NO: 414262 - DNA, 122 bp, Homo sapiens
cagctccgcgcctaaggtgtctattagtacgcctgcgctgtgacctagaatgggcgcatgcgccgagcggaactggctggtttgaaaaccatggcgtgggtaccagcggagtccgcagtgga

SEQ ID NO: 414263 - DNA, 122 bp, Homo sapiens
tttctaactcctagactacacagtcctttctgcttaaaatactctgtgattggcctggcgcggtggctcacgcctgtaatcccagcactttgggagctgaggcaggaggatcacgaggtcag

SEQ ID NO: 414264 - DNA, 122 bp, Homo sapiens
ggcagaaggccagaaggagtaggcagaggaaggagggggtgttgaacctccttcaggcatcgagcgagaaacctgacctcggaatagtcacacttgatctccttttggcttctgtgtaccag

SEQ ID NO: 414265 - DNA, 122 bp, Homo sapiens
cgcctaccgctcgcccacctccccgcctcctccgggcgctgcagcctccagggatccctccgccccccacccccgggaaacctggaagtggccaccaggcccggtggtccgaggtgagctaa

SEQ ID NO: 414266 - DNA, 122 bp, Homo sapiens
agcagaagtttcagagttctttctgtatttgaacataataattggaaacagaaaactcttcgatcatagagttgtttttagttcaagtagcactttctggtctatttgaaaggcttgcccct

SEQ ID NO: 414267 - DNA, 122 bp, Homo sapiens
tagacttgttttccagtcctgatgtttcattgactgtgtttacattgaccattcgacttgcgagcctaaacaaagagacattaacacgcttgaggaaatgcaaacagaaaatagtgtcattg

SEQ ID NO: 414268 - DNA, 122 bp, Homo sapiens
gcgcctgtgggggatccccagggtacctgggaggtcccgttaccactgcagattgggttgcgtcccccgattcctggacagtttacctgcaggtagataaaggccctggagccggtctccgt

SEQ ID NO: 414269 - DNA, 122 bp, Homo sapiens
gtaactggcaaaagcagattttatgttcctaggagaaagcttgtttggttaaagccatcacgcctgtaacatgtttaccagttttttatttcaagagctgaaagttaaggatataagattcc

SEQ ID NO: 414270 - DNA, 122 bp, Homo sapiens
gcctctcttccgcgagactcttgtcatcgccgcccgcggttaagagttggggctccgggtcgggctgcctcagttcagatcttgctcctccacttaggagtgtgtgatctgaggtaacctac

SEQ ID NO: 414271 - DNA, 122 bp, Homo sapiens
tgtattggttgcattggatcagttgagcgggtgtactctacagaacatgatcagaggtttcgagttgtgagctagacagtagctactacaggctatcagataagggggccaggagggcttcc

SEQ ID NO: 414272 - DNA, 122 bp, Homo sapiens
taaatcttctaaaattagtaacagcagccactatttattaagaaccagtgagtgcagacacgaagccaagaacttcacatacgctgtctcattgaatcctcccaagtaattcctgagaaatc
